United States Patent Application Publication US 2006/0048240 A1 - sequence listing, part 7

SEQ ID NO: 24861 - protein, 289 aa, Zea mays subsp. mays
  misc_feature (1)..(289): Ceres Seq. ID no. 12465519
MKDIQLDLVHTPSRRAAASSHGRHRKKNSVAATAQSDDNKMLALWSVDRVSSGSRRHDMDLRPPQSEAAETEKGKKRPSSEPVPVVTVKDLSVDKQEVLSRPTVMAVAATATTTEPHREWKKKVIDRLSSEAQRLRDLRTIVQELRAGVEASSDAELDGVKAQMAGAEGAIAELVDANAKLLKKAEGSRRRATAAATWTCAAGASARSWSACARCRTRPGGWSWSCSGSSTRCCGTRRSARRGARPRRRRRAPPCRCSGGRGCSLWSTCTGGGATAGGPSRRPAARPAA

SEQ ID NO: 24862 - DNA, 776 bp, Zea mays subsp. mays
  misc_feature (1)..(776): Ceres Seq. ID no. 12465542
gtggccgaagatttacacaagaatcaaaactgagagctcatatcagggcacaacatgagaaagctgttggcttgcagaatccaggtgcgtcatcaatgaaccacagtgcaattggaggtccgcaccagccccctaggccagcgaaggtctcagcagcacctccagctccctcagctgagcgcccttacgtctgcccctacgatggttgtgacaaggcatacatccatgagtacaagttgaacctccatgaaaaaagagcatcccaaccactaccaggatggtggtccaaatggtgctgccgccccttcaaagcgcagcatctcgaagagttcccacaggagcaagctggacatcacctctaggatgccaccggccaacatccccaagcacagagggtatgcaacaccattgccanctgtggtgagcctccctgaggagcagcagttgntaaggaaagtggtgtncgaggatgacagcgagnagactnaagaagagggggataacaatggcgaggncanatggaantacaananagntgctancagngncnncnaggaaaccgnagncgaagaatgagntgctagcagggattcatttttttttcttctgtagctgtgcatataccataatctatagactggtggttatagatttcaatacatgtacatttttaaaatacggctggcctatagtagacaagaggttgttgctgccatgccccttntcaactacacaggccatgagttcagaaacgataatggatcattgctcccgtc

SEQ ID NO: 24863 - protein, 119 aa, Zea mays subsp. mays
  misc_feature (1)..(119): Ceres Seq. ID no. 12465543
GRRFTQESKLRAHIRAQHEKAVGLQNPGASSMNHSAIGGPHQPPRPAKVSAAPPAPSAERPYVCPYDGCDKAYIHEYKLNLHEKRASQPLPGWWSKWCCRPFKAQHLEEFPQEQAGHHL

SEQ ID NO: 24864 - protein, 109 aa, Zea mays subsp. mays
  misc_feature (1)..(109): Ceres Seq. ID no. 12465544
  misc_feature (57)..(57): Xaa is any aa, unknown or other
  misc_feature (68)..(68): Xaa is any aa, unknown or other
  misc_feature (73)..(73): Xaa is any aa, unknown or other
  misc_feature (79)..(79): Xaa is any aa, unknown or other
  misc_feature (81)..(81): Xaa is any aa, unknown or other
  misc_feature (90)..(90): Xaa is any aa, unknown or other
  misc_feature (91)..(91): Xaa is any aa, unknown or other
  misc_feature (93)..(93): Xaa is any aa, unknown or other
  misc_feature (95)..(95): Xaa is any aa, unknown or other
  misc_feature (96)..(96): Xaa is any aa, unknown or other
  misc_feature (97)..(97): Xaa is any aa, unknown or other
  misc_feature (99)..(99): Xaa is any aa, unknown or other
  misc_feature (100)..(100): Xaa is any aa, unknown or other
  misc_feature (101)..(101): Xaa is any aa, unknown or other
  misc_feature (102)..(102): Xaa is any aa, unknown or other
  misc_feature (103)..(103): Xaa is any aa, unknown or other
  misc_feature (106)..(106): Xaa is any aa, unknown or other
  misc_feature (107)..(107): Xaa is any aa, unknown or other
MKKEHPNHYQDGGPNGAAAPSKRSISKSSHRSKLDITSRMPPANIPKHRGYATPLPXVVSLPEEQQLXRKVVXEDDSEXTXEEGDNNGEXXWXYXXXAXXXXXETXXEE

SEQ ID NO: 24865 - protein, 102 aa, Zea mays subsp. mays
  misc_feature (1)..(102): Ceres Seq. ID no. 12465545
  misc_feature (4)..(4): Xaa is any aa, unknown or other
  misc_feature (6)..(6): Xaa is any aa, unknown or other
  misc_feature (16)..(16): Xaa is any aa, unknown or other
  misc_feature (17)..(17): Xaa is any aa, unknown or other
  misc_feature (19)..(19): Xaa is any aa, unknown or other
  misc_feature (21)..(21): Xaa is any aa, unknown or other
  misc_feature (22)..(22): Xaa is any aa, unknown or other
  misc_feature (23)..(23): Xaa is any aa, unknown or other
  misc_feature (25)..(25): Xaa is any aa, unknown or other
  misc_feature (26)..(26): Xaa is any aa, unknown or other
  misc_feature (27)..(27): Xaa is any aa, unknown or other
  misc_feature (28)..(28): Xaa is any aa, unknown or other
  misc_feature (32)..(32): Xaa is any aa, unknown or other
  misc_feature (33)..(33): Xaa is any aa, unknown or other
  misc_feature (37)..(37): Xaa is any aa, unknown or other
  misc_feature (85)..(85): Xaa is any aa, unknown or other
MTAXRXKKRGITMARXXGXTXXXLXXXXRKPXXKNEXLAGIHFFFFCSCAYTIIYRLVVIDFNTCTFLKYGWPIVDKRLLLPCPXSTTQAMSSETIMDHCSR

SEQ ID NO: 24866 - DNA, 947 bp, Zea mays subsp. mays
  misc_feature (1)..(947): Ceres Seq. ID no. 12467581
taaggaatgttttagatatgaatgctcactttggtggatttaatgctgctttactgaaggcaggaaagtctgtatgggtgatgaatgttgttcctacagatgccccaaactatctaccgctgatatttgaccggggttttatcggggttcaacatgactggtgtgatgcatttccaacttacccaagaacatatgatatggtgcacgctgatggttttctatcacttcagaagaaccacaagcatagatgttctactcttgacatattcttggaagttgaccgcatcctacgaccagagggctgggtcataatccgtgacgctgcccctcttattgaagcggcaagatctgttgttactcaactcagatgggacgcccgcgttttggatcttgacatagccagtgatgaaaaactactggtctgtcagaagccgtttctcagaaaataatgagcatagtagacactgacacaagatatgaacttattctttcaccctacacactgttacaattgctgtntgagcacaactgagtacaaagtttgggtaaaaaacacgggaagcatgattcagcaaacttgtcatgcatcaccatggaaccgcaaggtgccattaaattgatcggtcaagtgcatgctgcagaaacaggcttggtggctaagctttccaggccaaggttttattgccaggatatagagatgaagccataaaaattactttattagtgaaaccatatccaataaagagatgctgctgcggtgtacataatcgccgccaatgtgccatataggtataattcattttttcccttgttacaatttctctccttttttctgtaactgtgccaatttgttttattttgtatcttgtatgtaaattggttggtctatatactgatcatcccagactacagcctagtgaaatcaatataattattatttggagatg

SEQ ID NO: 24867 - protein, 148 aa, Zea mays subsp. mays
  misc_feature (1)..(148): Ceres Seq. ID no. 12467582
RNVLDMNAHFGGFNAALLKAGKSVWVMNVVPTDAPNYLPLIFDRGFIGVQHDWCDAFPTYPRTYDMVHADGFLSLQKNHKHRCSTLDIFLEVDRILRPEGWVIIRDAAPLIEAARSVVTQLRWDARVLDLDIASDEKLLVCQKPFLRK

SEQ ID NO: 24868 - protein, 143 aa, Zea mays subsp. mays
  misc_feature (1)..(143): Ceres Seq. ID no. 12467583
MNAHFGGFNAALLKAGKSVWVMNVVPTDAPNYLPLIFDRGFIGVQHDWCDAFPTYPRTYDMVHADGFLSLQKNHKHRCSTLDIFLEVDRILRPEGWVIIRDAAPLIEAARSVVTQLRWDARVLDLDIASDEKLLVCQKPFLRK

SEQ ID NO: 24869 - protein, 122 aa, Zea mays subsp. mays
  misc_feature (1)..(122): Ceres Seq. ID no. 12467584
MNVVPTDAPNYLPLIFDRGFIGVQHDWCDAFPTYPRTYDMVHADGFLSLQKNHKHRCSTLDIFLEVDRILRPEGWVIIRDAAPLIEAARSVVTQLRWDARVLDLDIASDEKLLVCQKPFLRK

SEQ ID NO: 24870 - DNA, 1063 bp, Zea mays subsp. mays
  misc_feature (1)..(1063): Ceres Seq. ID no. 12467899
gaagccctgcaacgatacgaatgatattccaacagtccagtcgtcggtgtccgtgagagatgtgggcacagagatgactccaatacctagccaggaaccttcaagaactggaactccactagggtcaaggacaccaactcgaagccctaactgttcagtaccgtcaacacctgtaggggggaggtcaatagcatctcctcctggagaagactgcacagacgatggcccatttttccacaggaaatgcggcgtacatgcaaatgaattgtcagatactgagacgaggcttaaaacaaggcaagaaatcgctgcgcttggcatacagctaggaaagatgaacattgctacgtgggccagcaaagaggagctagagctagtctctgcggcaccgagcatcgctgatttggagcgcatcaggaaggaatatgctgctcgtgctgcatcgtatgaggaggcagaaaatactaaacatacagcaagattcaaaaaagaagaggtgaagattgaagcttgggagggtcgtcaaagagcaaaaattgaatatgaaatgagaagaatagaggaatttgctgagagaatgagaagtgaggccatggaaaagatggccgaaaagctagagatgacgcgccgcatagccgaagagaaacgagcttcggccaacgccaaaatgaaccagcaagcagctatagcggttcagaaggccgagaagattcgccaaacgggacgagtcccaggatcgagtatcctacgctgcggtggctgcttctgtggaccgtagtagatcatacataggattcgacagctagtatgttggtctgggatatatagtggtgggaaacctgaactccaccctccaacaagtcagcattccttgattttagcatgaaaaaaggaatgtctctaaggtattcagatgcaaacgtgttcttgtttgtcatgtatgtaaattattccaatgattttaacttgggtcggtgtacaaggtaaccagctgttcgttggttaacgaagaagtcacgaatcgttcaaacattatgtttattattaaaaaaaaaaaaaaaaa

SEQ ID NO: 24871 - protein, 258 aa, Zea mays subsp. mays
  misc_feature (1)..(258): Ceres Seq. ID no. 12467900
KPCNDTNDIPTVQSSVSVRDVGTEMTPIPSQEPSRTGTPLGSRTPTRSPNCSVPSTPVGGRSIASPPGEDCTDDGPFFHRKCGVHANELSDTETRLKTRQEIAALGIQLGKMNIATWASKEELELVSAAPSIADLERIRKEYAARAASYEEAENTKHTARFKKEEVKIEAWEGRQRAKIEYEMRRIEEFAERMRSEAMEKMAEKLEMTRRIAEEKRASANAKMNQQAAIAVQKAEKIRQTGRVPGSSILRCGGCFCGP

SEQ ID NO: 24872 - protein, 234 aa, Zea mays subsp. mays
  misc_feature (1)..(234): Ceres Seq. ID no. 12467901
MTPIPSQEPSRTGTPLGSRTPTRSPNCSVPSTPVGGRSIASPPGEDCTDDGPFFHRKCGVHANELSDTETRLKTRQEIAALGIQLGKMNIATWASKEELELVSAAPSIADLERIRKEYAARAASYEEAENTKHTARFKKEEVKIEAWEGRQRAKIEYEMRRIEEFAERMRSEAMEKMAEKLEMTRRIAEEKRASANAKMNQQAAIAVQKAEKIRQTGRVPGSSILRCGGCFCGP

SEQ ID NO: 24873 - protein, 147 aa, Zea mays subsp. mays
  misc_feature (1)..(147): Ceres Seq. ID no. 12467902
MNIATWASKEELELVSAAPSIADLERIRKEYAARAASYEEAENTKHTARFKKEEVKIEAWEGRQRAKIEYEMRRIEEFAERMRSEAMEKMAEKLEMTRRIAEEKRASANAKMNQQAAIAVQKAEKIRQTGRVPGSSILRCGGCFCGP

SEQ ID NO: 24874 - DNA, 522 bp, Zea mays subsp. mays
  misc_feature (1)..(522): Ceres Seq. ID no. 12467920
gacgaagtgtatcctccttatgctaatgggcctggctatgtcatttcatcggatattgctcaatatattttatccgagtttgataataagacattaagattattcaagatggaagatgttagtatgggcacgtgggttgagaagttccatacgactcgtcagcctgtagagtatttgcatgatgtcaggttctaccaacctggttgctttgatggttatttcaccgcacactaccagtcaccacaacacatgatctgtctgtggagaaagttgcaagctgggagcgctcaatgctgcaacgtaagatgacagtggacagcaccgggataagtataacggagaactcactaatcatcgagacataacacagaggatactgcacttgtactgtctgctggaccttgcgaccattcgttcattctttggtcagtagttgattcagctgctgatgctaacactggagatccatgttcttagggtactgtctatcatatttacaagagaaattcattggttttcgtt

SEQ ID NO: 24875 - protein, 102 aa, Zea mays subsp. mays
  misc_feature (1)..(102): Ceres Seq. ID no. 12467921
DEVYPPYANGPGYVISSDIAQYILSEFDNKTLRLFKMEDVSMGTWVEKFHTTRQPVEYLHDVRFYQPGCFDGYFTAHYQSPQHMICLWRKLQAGSAQCCNVR

SEQ ID NO: 24876 - protein, 66 aa, Zea mays subsp. mays
  misc_feature (1)..(66): Ceres Seq. ID no. 12467922
MEDVSMGTWVEKFHTTRQPVEYLHDVRFYQPGCFDGYFTAHYQSPQHMICLWRKLQAGSAQCCNVR

SEQ ID NO: 24877 - protein, 61 aa, Zea mays subsp. mays
  misc_feature (1)..(61): Ceres Seq. ID no. 12467923
MGTWVEKFHTTRQPVEYLHDVRFYQPGCFDGYFTAHYQSPQHMICLWRKLQAGSAQCCNVR

SEQ ID NO: 24878 - DNA, 658 bp, Zea mays subsp. mays
  misc_feature (1)..(658): Ceres Seq. ID no. 12467996
ttttatgattatatggagagtggcagcttatgggatgttttacatgaaggctcatccaagaagaacaaacttgactgggtgactcgcctacggatcgctcttggtgcagctcaaggcctcgcttaccttcaccatgactgcagcccacgaataattcaccgggacgtaaaatcaaagaatatactcctcgacaaagattatgaggcgcatcttacagacttcggcatcgctaagagcttatgtgtctcgaagactcacacgtcaacctacgtcatgggcactattggttacattgatcctgagtacgcccgcacctcccgcctcaacgagaagtctgatgtctacagctacggcatcgttctgctggagctgctgaccggcaagaagccagtggacaacgagtgcaatctccatcacttggtaactattcttcagtctcctgcatttgtcgagttagaagtcggaagtcgcttccttctctttacatcgctttggattccagcagtgcccaataattgctgaacaacgaaccattaggcttgtgttcctacaaggggaccagcgacactaaacctagcatgtgagtagatctatctgcactgcagaccagctgtggactgatgcgctgatccattggattggnggctgaaagctccat

SEQ ID NO: 24879 - protein, 173 aa, Zea mays subsp. mays
  misc_feature (1)..(173): Ceres Seq. ID no. 12467997
FYDYMESGSLWDVLHEGSSKKNKLDWVTRLRIALGAAQGLAYLHHDCSPRIIHRDVKSKNILLDKDYEAHLTDFGIAKSLCVSKTHTSTYVMGTIGYIDPEYARTSRLNEKSDVYSYGIVLLELLTGKKPVDNECNLHHLVTILQSPAFVELEVGSRFLLFTSLWIPAVPNNC

SEQ ID NO: 24880 - protein, 169 aa, Zea mays subsp. mays
  misc_feature (1)..(169): Ceres Seq. ID no. 12467998
MESGSLWDVLHEGSSKKNKLDWVTRLRIALGAAQGLAYLHHDCSPRIIHRDVKSKNILLDKDYEAHLTDFGIAKSLCVSKTHTSTYVMGTIGYIDPEYARTSRLNEKSDVYSYGIVLLELLTGKKPVDNECNLHHLVTILQSPAFVELEVGSRFLLFTSLWIPAVPNNC

SEQ ID NO: 24881 - DNA, 589 bp, Zea mays subsp. mays
  misc_feature (1)..(589): Ceres Seq. ID no. 12468060
acactatgcaggtgtgaaacatgcatcaacttgtatgcacaacgaggtattgcatatcttattgacaaggaggattctattgaggaatacgagaagattgccaagcagaagagggagatgaaactggagcagcagcaaggagctgagacaaattttctgaattcacttaatcatgttcagaagatagagatgataagtggcatcaatgacatgaagaatgagtttcagtcctttctggagtccttcgatgcatcaaaaccggtaacatctgatgatatacattcattcttcgagaatcttgctaagaagaagaaacagaggttatcttagcttttgtgaccgcatcggaccccacctgaggcaatcgttntgctggacagaggtcctagtttgttgggctagtaaatgtaatgttatcttaggtggtacttactaatcgggccagtaatgttgaattctagctggaacgcggtaatgtttgatgcaccgaagtcgcttgcagtaggttccgatggcccaagccaccaaaaacttgtttgctccatgaacctcgcaatcctgttaggtgataatataatatacattgtgt

SEQ ID NO: 24882 - protein, 109 aa, Zea mays subsp. mays
  misc_feature (1)..(109): Ceres Seq. ID no. 12468061
TLCRCETCINLYAQRGIAYLIDKEDSIEEYEKIAKQKREMKLEQQQGAETNFLNSLNHVQKIEMISGINDMKNEFQSFLESFDASKPVTSDDIHSFFENLAKKKKQRLS

SEQ ID NO: 24883 - protein, 70 aa, Zea mays subsp. mays
  misc_feature (1)..(70): Ceres Seq. ID no. 12468062
MKLEQQQGAETNFLNSLNHVQKIEMISGINDMKNEFQSFLESFDASKPVTSDDIHSFFENLAKKKKQRLS

SEQ ID NO: 24884 - protein, 54 aa, Zea mays subsp. mays
  misc_feature (1)..(54): Ceres Seq. ID no. 12468063
  misc_feature (33)..(33): Xaa is any aa, unknown or other
MIYIHSSRILLRRRNRGYLSFCDRIGPHLRQSXCWTEVLVCWASKCNVILGGTY

SEQ ID NO: 24885 - DNA, 661 bp, Zea mays subsp. mays
  misc_feature (1)..(661): Ceres Seq. ID no. 12468098
tcgaggccgtgaagctcaaggcgagcaagctagccaagaagcacccgcgctgcctcgccgacggcaacgagctgctgcgcttccacggcgccacgctctcgtgcgcgctcggcggcggctccggctcttccagcctctgcgcctccgacaagtgcgccgtgtgccgcatcatccggcacggcttctccgccaggaaggagggcaagggcggcgtgggcgtgttcaccacgtccaccagcggccgcgcgttcgagtccatcgttgaggcgccccccgccatcggcgtcggcgacgacgacggagcgggccagctgggcctgggcaccgcgcgcagggcgctgctggtgtgcagggtcatcgccggccgcgtgcacaagccgctggacaacctcaaggagttcgtggggcagacgggcttcgattcgctcgccggcaaggtcggaccctactccaacatcgaggagctgtacctgctgaacccgagggcgctgctcccgtgcttcgtcgtcatctgtagaccgtagcctactactagctaaacaccccgtctcattcttctctcttcccacttttctctttcgattgctactctagtgtacgtagttaacacggacacggcatagctatcgcctatcggttggaaggtcggatggatttgtcc

SEQ ID NO: 24886 - protein, 173 aa, Zea mays subsp. mays
  misc_feature (1)..(173): Ceres Seq. ID no. 12468099
EAVKLKASKLAKKHPRCLADGNELLRFHGATLSCALGGGSGSSSLCASDKCAVCRIIRHGFSARKEGKGGVGVFTTSTSGRAFESIVEAPPAIGVGDDDGAGQLGLGTARRALLVCRVIAGRVHKPLDNLKEFVGQTGFDSLAGKVGPYSNIEELYLLNPRALLPCFVVICRP

SEQ ID NO: 24887 - protein, 87 aa, Zea mays subsp. mays
  misc_feature (1)..(87): Ceres Seq. ID no. 12468100
RGREAQGEQASQEAPALPRRRQRAAALPRRHALVRARRRLRLFQPLRLRQVRRVPHHPARLLRQEGGQGRRGRVHHVHQRPRVRVHR

SEQ ID NO: 24888 - DNA, 838 bp, Zea mays subsp. mays
  misc_feature (1)..(838): Ceres Seq. ID no. 12468112
atcggcgtccgcctggagcagcagtttggattctggaaggtgggcctggtgtacctcgtctctggcttcggagggagcgtgctctccgtcttcttcatcaggaagggcgtctccgtgggcgcctccggcgcgctcttcggcctcctgggagcgatgctgtcggagctcatcaccaactggtccatctacaccaacagatttgcagccatgctgaacctgatcatcatcgccgccatcaacctggcgctcgggatactcccgcacgttgacaacttcgcgcacatcggcgggttcgccacaggcttcctcctcggcttcgtgctgctgatccagccccagttcgggtggctggagcagcccttcggtgccaagaccaagtccaagtacaaggcatatcagatcatcctcctgcttgctgccctcgtcttgctggctgcagggttcgctgttggattggtaatggtgttcagaggagagaacggcaacgatcactgtagctggtgccactacctgacctgcgtgccgacgtcaagctggaagtgtgacaattgaactgatcagagattagtgacgggttagcatgcttgcgtcgtacagaagagaacatgcgtccccaccacgagagacaatgtcaagatagatacgtgcccctcaccttntatgacattgtcaatgtattgctttcaagtttgatttttaaagtctgcattgtacagaattctcctgcctccattggatccaaatgaggagtttattggtattttttcttgtatatgttaaaaaaaactctgtaaatcactctgcctgtgttctggtttatggttttattcattgattc

SEQ ID NO: 24889 - protein, 183 aa, Zea mays subsp. mays
  misc_feature (1)..(183): Ceres Seq. ID no. 12468113
IGVRLEQQFGFWKVGLVYLVSGFGGSVLSVFFIRKGVSVGASGALFGLLGAMLSELITNWSIYTNRFAAMLNLIIIAAINLALGILPHVDNFAHIGGFATGFLLGFVLLIQPQFGWLEQPFGAKTKSKYKAYQIILLLAALVLLAAGFAVGLVMVFRGENGNDHCSWCHYLTCVPTSSWKCDN

SEQ ID NO: 24890 - protein, 132 aa, Zea mays subsp. mays
  misc_feature (1)..(132): Ceres Seq. ID no. 12468114
MLSELITNWSIYTNRFAAMLNLIIIAAINLALGILPHVDNFAHIGGFATGFLLGFVLLIQPQFGWLEQPFGAKTKSKYKAYQIILLLAALVLLAAGFAVGLVMVFRGENGNDHCSWCHYLTCVPTSSWKCDN

SEQ ID NO: 24891 - protein, 114 aa, Zea mays subsp. mays
  misc_feature (1)..(114): Ceres Seq. ID no. 12468115
MLNLIIIAAINLALGILPHVDNFAHIGGFATGFLLGFVLLIQPQFGWLEQPFGAKTKSKYKAYQIILLLAALVLLAAGFAVGLVMVFRGENGNDHCSWCHYLTCVPTSSWKCDN

SEQ ID NO: 24892 - DNA, 916 bp, Zea mays subsp. mays
  misc_feature (1)..(916): Ceres Seq. ID no. 12468118
agcaacccaacccacatccaccggaagatgagagctccagctccagctgctcctattcccgcgctgctctcccgctgctcctcgcctccctcctcggccccgcgccgcctcctctcctcctcccgcacgccagccgcctgctgcccgcctccggcagtcgtccgctctgtctccgtcgatttgctggcggtcgccggggagccggctgtcgcaggcgccccctccgcaacgccgtgccgtcgcctcatcctcctccgtcacggggacagcgccaccgggggccgcttcaccagagatcatgacagacctctaagcaaggctgggagagctgacgcaatcagcgtctctaataaactccaacagatgggatgggtacccgagcttattctctgcagtgatgcaatgcgcacaaaggagactcttaagattctgcaagagcatgtccatggattgtctgaagcagtagtgcactttatcccaagtttctactcaattgcggcaatggatggccaaactgcagagcatttgcaaaaggcgatttgngaatattcgagtgatgagatcttaactgngatgtgcatgggtcataataaaggatgggaagaanccgcctntatgttttntggcgattcagttttgcttganacatgtaacgctgcgttgttagaagctgcaggcaaatcatgggttgaggccttttttgtggctggtntgggaggatggaagctccatggaattgtaaagccatgaattattgtaactaaaagctagatgtaattttttagctgtttnttaattattattattaacctttgtgtagtggtttttacatgccactgaagctttcggtntgaaggtatcaacatggttagatagatgagatgagatgaatgaattnttccncggtccatgagtt

SEQ ID NO: 24893 - protein, 249 aa, Zea mays subsp. mays
  misc_feature (1)..(249): Ceres Seq. ID no. 12468119
  misc_feature (181)..(181): Xaa is any aa, unknown or other
  misc_feature (191)..(191): Xaa is any aa, unknown or other
  misc_feature (203)..(203): Xaa is any aa, unknown or other
  misc_feature (205)..(205): Xaa is any aa, unknown or other
  misc_feature (208)..(208): Xaa is any aa, unknown or other
  misc_feature (215)..(215): Xaa is any aa, unknown or other
  misc_feature (238)..(238): Xaa is any aa, unknown or other
SNPTHIHRKMRAPAPAAPIPALLSRCSSPPSSAPRRLLSSSRTPAACCPPPAVVRSVSVDLLAVAGEPAVAGAPSATPCRRLILLRHGDSATGGRFTRDHDRPLSKAGRADAISVSNKLQQMGWVPELILCSDAMRTKETLKILQEHVHGLSEAVVHFIPSFYSIAAMDGQTAEHLQKAIXEYSSDEILTXMCMGHNKGWEEXAXMFXGDSVLLXTCNAALLEAAGKSWVEAFFVAGXGGWKLHGIVKP

SEQ ID NO: 24894 - protein, 240 aa, Zea mays subsp. mays
  misc_feature (1)..(240): Ceres Seq. ID no. 12468120
  misc_feature (172)..(172): Xaa is any aa, unknown or other
  misc_feature (182)..(182): Xaa is any aa, unknown or other
  misc_feature (194)..(194): Xaa is any aa, unknown or other
  misc_feature (196)..(196): Xaa is any aa, unknown or other
  misc_feature (199)..(199): Xaa is any aa, unknown or other
  misc_feature (206)..(206): Xaa is any aa, unknown or other
  misc_feature (229)..(229): Xaa is any aa, unknown or other
MRAPAPAAPIPALLSRCSSPPSSAPRRLLSSSRTPAACCPPPAVVRSVSVDLLAVAGEPAVAGAPSATPCRRLILLRHGDSATGGRFTRDHDRPLSKAGRADAISVSNKLQQMGWVPELILCSDAMRTKETLKILQEHVHGLSEAVVHFIPSFYSIAAMDGQTAEHLQKAIXEYSSDEILTXMCMGHNKGWEEXAXMFXGDSVLLXTCNAALLEAAGKSWVEAFFVAGXGGWKLHGIVKP

SEQ ID NO: 24895 - protein, 128 aa, Zea mays subsp. mays
  misc_feature (1)..(128): Ceres Seq. ID no. 12468121
  misc_feature (60)..(60): Xaa is any aa, unknown or other
  misc_feature (70)..(70): Xaa is any aa, unknown or other
  misc_feature (82)..(82): Xaa is any aa, unknown or other
  misc_feature (84)..(84): Xaa is any aa, unknown or other
  misc_feature (87)..(87): Xaa is any aa, unknown or other
  misc_feature (94)..(94): Xaa is any aa, unknown or other
  misc_feature (117)..(117): Xaa is any aa, unknown or other
MGWVPELILCSDAMRTKETLKILQEHVHGLSEAVVHFIPSFYSIAAMDGQTAEHLQKAIXEYSSDEILTXMCMGHNKGWEEXAXMFXGDSVLLXTCNAALLEAAGKSWVEAFFVAGXGGWKLHGIVKP

SEQ ID NO: 24896 - DNA, 772 bp, Zea mays subsp. mays
  misc_feature (1)..(772): Ceres Seq. ID no. 12468195
agttacttagaagatagcattaacaatccttcgaagaaacaagaaatgctgggtgattctgtagcctgggctggctgtacgataatgtacttactgggacagcagcagcacttcgagctttttgatttctcctatcaatttctcaatgtggcagaagtagaaagtgcgacagtatcacactatcaatcttcagagaggactaaaagttcaaatttcttgcaaggctacgagggcatcctggaagcgatgaggaaggctaggaggctcaataaccatgttttctccatgttgagggcacgatgcccccttgaggacaaggttgcatgtgctatcaagccaagtggggcaccgcttcaccggatgaagtttatgaacaccgtttctgcattcgagacattgccacaaagagtcacctaaccagcttccaggcaatgtgcagaatgtactcttgtatgcggggttatatgttatgttgtaaggtaaatgtatattatgtaacaaccatcaaccgtggatcctggacctgaacaggagaatgtgtttgcttgctatatatgaaaattaggtgggtatgttgaggttgaccctgagttcgcaagtttagctttcaactttgagactatctcgctgaaccaaatatgtataccagctggagagttgagccagaggacacgtgctagttagctgttcttctcgtgtctgtatttctcagtctgctctcaaagtatatttaatgtatgacgattcaggttagcttaaaaagttgtgttat

SEQ ID NO: 24897 - protein, 138 aa, Zea mays subsp. mays
  misc_feature (1)..(138): Ceres Seq. ID no. 12468196
SYLEDSINNPSKKQEMLGDSVAWAGCTIMYLLGQQQHFELFDFSYQFLNVAEVESATVSHYQSSERTKSSNFLQGYEGILEAMRKARRLNNHVFSMLRARCPLEDKVACAIKPSGAPLHRMKFMNTVSAFETLPQRVT

SEQ ID NO: 24898 - protein, 123 aa, Zea mays subsp. mays
  misc_feature (1)..(123): Ceres Seq. ID no. 12468197
MLGDSVAWAGCTIMYLLGQQQHFELFDFSYQFLNVAEVESATVSHYQSSERTKSSNFLQGYEGILEAMRKARRLNNHVFSMLRARCPLEDKVACAIKPSGAPLHRMKFMNTVSAFETLPQRVT

SEQ ID NO: 24899 - protein, 110 aa, Zea mays subsp. mays
  misc_feature (1)..(110): Ceres Seq. ID no. 12468198
MYLLGQQQHFELFDFSYQFLNVAEVESATVSHYQSSERTKSSNFLQGYEGILEAMRKARRLNNHVFSMLRARCPLEDKVACAIKPSGAPLHRMKFMNTVSAFETLPQRVT

SEQ ID NO: 24900 - DNA, 940 bp, Zea mays subsp. mays
  misc_feature (1)..(940): Ceres Seq. ID no. 12468227
atttgttccctgagccattttgctgtggatgtcaggcaattgcctgtgggagatggtatttggattgcccgtcataaggaagatcacacagagtatgttcttgatttcattgttgaaaggaaagaggttatggatttagatggctcaattgaagacaaccgatatagagatcagaaattaaggatgaagaaatgtgggctgaggaagttgatatatcttgttgaaggtgatctcaaccgtgcaccaaagagggttaaaacagcctgtttcaccactgagattctcgatggatttgatgttcagagaactactgggtttgccgatacccagaagagatatgttgatcttacacgttcggtaatagcatactatgatgcaagtttctcgatcgttggtaaagcttcccctgtttgcccaacctacgatgacttcaagagaaagtgttatgatcttaagaagaaaacagtgagcgacatatttggctgtcagcttatgcaggtaccacaagtaacagaagaagctgcacaagctgttgtagagctctatccaacccctttgttactggcaaaggcatactctatacttggtggcgatacctctgcacaagagaagatgctaaagaagaagaacgagatggtaaatgcaggagcaagccgaaacatatttcaccttatctggggtgacggatgaaaaatactctggactggaaccagttgcgggccaactgaactttggtggcttatggtgtcaccgtcgtggtgaccatcttttgtgtctccgagatttagaggctcccatgttctaaagcaaatagtggctccatagaacactagggatctagattaggaagagtttctctntacgtcgcgtctagagagtactctgctgtggtgtcgtggttgcacagtggaatgaagtggtcccttggatttacgtggtc

SEQ ID NO: 24901 - protein, 229 aa, Zea mays subsp. mays
  misc_feature (1)..(229): Ceres Seq. ID no. 12468228
ICSLSHFAVDVRQLPVGDGIWIARHKEDHTEYVLDFIVERKEVMDLDGSIEDNRYRDQKLRMKKCGLRKLIYLVEGDLNRAPKRVKTACFTTEILDGFDVQRTTGFADTQKRYVDLTRSVIAYYDASFSIVGKASPVCPTYDDFKRKCYDLKKKTVSDIFGCQLMQVPQVTEEAAQAVVELYPTPLLLAKAYSILGGDTSAQEKMLKKKNEMVNAGASRNIFHLIWGDG

SEQ ID NO: 24902 - protein, 186 aa, Zea mays subsp. mays
  misc_feature (1)..(186): Ceres Seq. ID no. 12468229
MDLDGSIEDNRYRDQKLRMKKCGLRKLIYLVEGDLNRAPKRVKTACFTTEILDGFDVQRTTGFADTQKRYVDLTRSVIAYYDASFSIVGKASPVCPTYDDFKRKCYDLKKKTVSDIFGCQLMQVPQVTEEAAQAVVELYPTPLLLAKAYSILGGDTSAQEKMLKKKNEMVNAGASRNIFHLIWGDG

SEQ ID NO: 24903 - protein, 168 aa, Zea mays subsp. mays
  misc_feature (1)..(168): Ceres Seq. ID no. 12468230
MKKCGLRKLIYLVEGDLNRAPKRVKTACFTTEILDGFDVQRTTGFADTQKRYVDLTRSVIAYYDASFSIVGKASPVCPTYDDFKRKCYDLKKKTVSDIFGCQLMQVPQVTEEAAQAVVELYPTPLLLAKAYSILGGDTSAQEKMLKKKNEMVNAGASRNIFHLIWGDG

SEQ ID NO: 24904 - DNA, 727 bp, Zea mays subsp. mays
  misc_feature (1)..(727): Ceres Seq. ID no. 12468256
ttactttagcggtggcaaggatgaagaggaggaagatatacctgacatggatacttatgaagacacaggggataatttggctgctgctgaaccatcatactttatcgcagaagaaccagaagatgacaacattcttcataccagaacatatgatgttagcataacgtatgacaagtactaccaaactccacgtgtctggctaactggatatgacgagtcaagaatgccattaatgcctgaacttgtgtttgaagacatcagccaagaccacgcacgaaaaacggtgactattgaggaccatcctcacttattggctgggaagcatgcatcagtgcacccatgcaaacatgcagctgtgatgaaaaagatcatcgacgttccaatgtcggggggagtggaaccagaagttgacaagtaccttttcatatttttgaaattcatagcgacagtcataccgactattgagtacgattatacaatggacgtcgaccttggcagtacaagctgattattggttggcttgaagcttgtcacttgtctcgggaaaaggaagcaccctaccagaaggcgcaggaagaaggctgaattgcgtgtttgtggttgaacatttgtgcatatgtgcttgttccttggatcggtttgcatttgtgaacaaactntgaaaagctcaaaggcaagacccatcttgtacattctgtgacgctgtcagcttgtgaatccattcgtt

SEQ ID NO: 24905 - protein, 168 aa, Zea mays subsp. mays
  misc_feature (1)..(168): Ceres Seq. ID no. 12468257
YFSGGKDEEEEDIPDMDTYEDTGDNLAAAEPSYFIAEEPEDDNILHTRTYDVSITYDKYYQTPRVWLTGYDESRMPLMPELVFEDISQDHARKTVTIEDHPHLLAGKHASVHPCKHAAVMKKIIDVPMSGGVEPEVDKYLFIFLKFIATVIPTIEYDYTMDVDLGSTS

SEQ ID NO: 24906 - protein, 153 aa, Zea mays subsp. mays
  misc_feature (1)..(153): Ceres Seq. ID no. 12468258
MDTYEDTGDNLAAAEPSYFIAEEPEDDNILHTRTYDVSITYDKYYQTPRVWLTGYDESRMPLMPELVFEDISQDHARKTVTIEDHPHLLAGKHASVHPCKHAAVMKKIIDVPMSGGVEPEVDKYLFIFLKFIATVIPTIEYDYTMDVDLGSTS

SEQ ID NO: 24907 - protein, 94 aa, Zea mays subsp. mays
  misc_feature (1)..(94): Ceres Seq. ID no. 12468259
MPLMPELVFEDISQDHARKTVTIEDHPHLLAGKHASVHPCKHAAVMKKIIDVPMSGGVEPEVDKYLFIFLKFIATVIPTIEYDYTMDVDLGSTS

SEQ ID NO: 24908 - DNA, 728 bp, Zea mays subsp. mays
  misc_feature (1)..(728): Ceres Seq. ID no. 12468275
gatatcgcgttcaattccatagattcgtcgatcaatgatatccaattcttaaacagaaattcccgggctccaggtcctgttcaacaacgtatgcgaacatacaccaaggtgcacaagcgtggcgctgttggaagatctatcgacatcaacagatattctggttacgatgaactgaagcatgacgttgcccgtatgtttggaattgaggggcagctcagcgaccaaaacagagttggctggaaactggtttacgaagatcacgagaaggatgtcctattagttggtgatgacccatgggaggacttcgtgaactgcgtgcggtgcatcaggattctttcgccgcaggaagagaggcaaatgaggctggccagcgactacggagacagctttcttggcaaccaagcgtgcagcagctcggacgggggtcgtccgtggagggtcaccggcgactagaaatagcaggcgatgtctgagcacaaatgtttggtataatccgtcccacgatagcaagaaaatgatacgcgatttctgagcacaaacttttgcactcagatgatcgtgcagacaattagcattttaagaaaaatgttgcagttcaatgtaactgcaggaatgtctctgatgtagcctcttcgatgtggcagccttaacaatcgatgtgctacagttactctgcctatgtatttactatattacctcggccttgtatatccttttgacgtaggagc

SEQ ID NO: 24909 - protein, 150 aa, Zea mays subsp. mays
  misc_feature (1)..(150): Ceres Seq. ID no. 12468276
DIAFNSIDSSINDIQFLNRNSRAPGPVQQRMRTYTKVHKRGAVGRSIDINRYSGYDELKHDVARMFGIEGQLSDQNRVGWKLVYEDHEKDVLLVGDDPWEDFVNCVRCIRILSPQEERQMRLASDYGDSFLGNQACSSSDGGRPWRVTGD

SEQ ID NO: 24910 - protein, 120 aa, Zea mays subsp. mays
  misc_feature (1)..(120): Ceres Seq. ID no. 12468277
MRTYTKVHKRGAVGRSIDINRYSGYDELKHDVARMFGIEGQLSDQNRVGWKLVYEDHEKDVLLVGDDPWEDFVNCVRCIRILSPQEERQMRLASDYGDSFLGNQACSSSDGGRPWRVTGD

SEQ ID NO: 24911 - protein, 86 aa, Zea mays subsp. mays
  misc_feature (1)..(86): Ceres Seq. ID no. 12468278
MFGIEGQLSDQNRVGWKLVYEDHEKDVLLVGDDPWEDFVNCVRCIRILSPQEERQMRLASDYGDSFLGNQACSSSDGGRPWRVTGD

SEQ ID NO: 24912 - DNA, 889 bp, Zea mays subsp. mays
  misc_feature (1)..(889): Ceres Seq. ID no. 12468317
acgacagcgccggcggccagggagccaacagtgccgccggtggcggcggcttcctcacgggaatcatcaccatcgtaatcgcctgcgtctgctggtccgccttcttcgtgctccaggccaacacgctcaagagctaccccgcggagctgtcgctgacggcgctcatctgcctcatggggtcgctcatgagcggctccgtcgcgctcgtcgccgagcgccgcaacacccaggcctgggtcatcggcttcgacacgcgcctcttcaccgccgtctacgccggcatagtgtgctccggcgtggcatactacgtgcaaggcatcgtgtccaggcaacgaggcccggtgttcgtcacggccttcaaccctctctgcatgatcatcaccgccgtcatgggctccatcatactcaaagaagagatcactctcggaagcgtgattggcgctgcgatcatcgtgttaggcctgtacgcgctcatctggggcaagagcaaggacagcgtggccgacgtctcagcatcaggcggctccaagggcgcatcagcggctgccgccgtcgagctgcccatcaccttggcgcagcccaacggcaacggcaactgcaagcacgaggtcggcagcggccgcggcgtcgtcttcgacgtcgagacgccggcggccaacaacggccattactagtagctacagctagtatatctatctatctactactcctaaacctaaatcaacctgcccggccgtcagttgtagctatagacactgacacacgcagatagaagcgtcctgccgcaggttatatatggctgatcgagtggacgttgacgcactgcacatacatatgccgtgcgattttttgtttgttttccgtttttgttaattattaatttcgcctt

SEQ ID NO: 24913 - protein, 256 aa, Zea mays subsp. mays
  misc_feature (1)..(256): Ceres Seq. ID no. 12468318
RQRRRPGSQQCRRWRRLPHGNHHHRNRLRLLVRLLRAPGQHAQELPRGAVADGAHLPHGVAHERLRRARRRAPQHPGLGHRLRHAPLHRRLRRHSVLRRGILRARHRVQATRPGVRHGLQPSLHDHHRRHGLHHTQRRDHSRKRDWRCDHRVRPVRAHLGQEQGQRGRRLSIRRLQGRISGCRRRAAHHLGAAQRQRQLQARGRQRPRRRLRRRDAGGQQRPLLVATASISIYLLLLNLNQPARPSVVAIDTDTRR

SEQ ID NO: 24914 - protein, 223 aa, Zea mays subsp. mays
  misc_feature (1)..(223): Ceres Seq. ID no. 12468319
DSAGGQGANSAAGGGGFLTGIITIVIACVCWSAFFVLQANTLKSYPAELSLTALICLMGSLMSGSVALVAERRNTQAWVIGFDTRLFTAVYAGIVCSGVAYYVQGIVSRQRGPVFVTAFNPLCMIITAVMGSIILKEEITLGSVIGAAIIVLGLYALIWGKSKDSVADVSASGGSKGASAAAAVELPITLAQPNGNGNCKHEVGSGRGVVFDVETPAANNGHY

SEQ ID NO: 24915 - protein, 166 aa, Zea mays subsp. mays
  misc_feature (1)..(166): Ceres Seq. ID no. 12468320
MGSLMSGSVALVAERRNTQAWVIGFDTRLFTAVYAGIVCSGVAYYVQGIVSRQRGPVFVTAFNPLCMIITAVMGSIILKEEITLGSVIGAAIIVLGLYALIWGKSKDSVADVSASGGSKGASAAAAVELPITLAQPNGNGNCKHEVGSGRGVVFDVETPAANNGHY

SEQ ID NO: 24916 - DNA, 885 bp, Zea mays subsp. mays
  misc_feature (1)..(885): Ceres Seq. ID no. 12468373
gaatatattgaagatcctgatcaagttaagccagagggatatgattcaattcctaaagagatacctgatcccaaggacaaaaagcctgagtcatgggatgacgatgacgatggtacatggaagcctagaatgatacctaatccagaatacaagggaccatggaagcggaagaaaattaagaatcctaactacaaaggaaaatggaagaccccatggattgtcaatccagagtttgaggatgacccagacctatatgttctgaaacctttgcagtatgtggggattgaagtatggcaggtcaaagctggttcagtttttgacaacattttgatttgcgatgacccagactatgcaagacatgttgtagatgaaacttttgctgcaaataaggaggctgaaaaggaggcctttgaaggagctgaaagaaagaggaaggctagagaagaagaggaagcacggagggcacgggaggaaggggagagacgaaggcgggagagggatagggaccgcggcagggaccgatacaaggatagatataagcgtcataggcactacgactaccatgacgagctatagatcctgtattcttttgaaatctgcncgatattggatgtctgtctacggagagcgcacgtgcaaaacttgtatgttgtactcacggatgaagctgaacctgtgattttggcgatgggtanagattggccatcgcgtctgtaactaaatttccacgttgcgatgcaatatgagctgtagtactgtcctcgcactactatttaccgtttgtgctgcatatgtgatataaaccttcaagaaacacacacacgaagggtntgaatgagcacggcctttgttgtttgcttnttataaaaaagaactgttttatcg

SEQ ID NO: 24917 - protein, 191 aa, Zea mays subsp. mays
  misc_feature (1)..(191): Ceres Seq. ID no. 12468374
EYIEDPDQVKPEGYDSIPKEIPDPKDKKPESWDDDDDGTWKPRMIPNPEYKGPWKRKKIKNPNYKGKWKTPWIVNPEFEDDPDLYVLKPLQYVGIEVWQVKAGSVFDNILICDDPDYARHVVDETFAANKEAEKEAFEGAERKRKAREEEEARRAREEGERRRRERDRDRGRDRYKDRYKRHRHYDYHDEL

SEQ ID NO: 24918 - protein, 148 aa, Zea mays subsp. mays
  misc_feature (1)..(148): Ceres Seq. ID no. 12468375
MIPNPEYKGPWKRKKIKNPNYKGKWKTPWIVNPEFEDDPDLYVLKPLQYVGIEVWQVKAGSVFDNILICDDPDYARHVVDETFAANKEAEKEAFEGAERKRKAREEEEARRAREEGERRRRERDRDRGRDRYKDRYKRHRHYDYHDEL

SEQ ID NO: 24919 - protein, 103 aa, Zea mays subsp. mays
  misc_feature (1)..(103): Ceres Seq. ID no. 12468376
  misc_feature (78)..(78): Xaa is any aa, unknown or other
MKLLLQIRRLKRRPLKELKERGRLEKKRKHGGHGRKGRDEGGRGIGTAAGTDTRIDISVIGTTTTMTSYRSCILLKSXRYWMSVYGERTCKTCMLYSRMKLNL

SEQ ID NO: 24920 - DNA, 618 bp, Zea mays subsp. mays
  misc_feature (1)..(618): Ceres Seq. ID no. 12468438
gcgcgccacggcggcggcgaccccgtgttcgtcggcgtcaacatgcagcgcatccacaacgacttcatcgacgaccccaaggcgtacggcttccagaccgccaccgacgcgtgctgcggccagggccgcttcaacggcatggggctctgcaccatggtgtccagcctctgcgccgaccgcgacacctacgtgttctgggacgccttccaccccacggagcgcgccaaccgcctcatcgtgcagcagttcatgtccggctccaccgactacatcatgcccatgaacctcagcaccgtcctcgccgtcgacctccagaagcagcagctgcgtacgtgacgtgatgtcgtcatccgcttcatcagctgcctgatcagcttcgtgcgtcgccattgccacatcgtcagatcagtttcgtatgcgtgtgtagtgagagtacctagctagtgcatcatgtgccatcagtttccggatgtggttttctgcagggtttcgttcgttcgttcgtgtgtgtgctgcagtgcaggtgtttaattgtgtgatagtgacgaccgtatcctgtcaattgtcatatagcaggacagcttcttgtaataatttatataaattttcaggcgattc

SEQ ID NO: 24921 - protein, 112 aa, Zea mays subsp. mays
  misc_feature (1)..(112): Ceres Seq. ID no. 12468439
APRRRRPRVRRRQHAAHPQRLHRRPQGVRLPDRHRRVLRPGPLQRHGALHHGVQPLRRPRHLRVLGRLPPHGARQPPHRAAVHVRLHRLHHAHEPQHRPRRRPPEAAAAYVT

SEQ ID NO: 24922 - protein, 111 aa, Zea mays subsp. mays
  misc_feature (1)..(111): Ceres Seq. ID no. 12468440
ARHGGGDPVFVGVNMQRIHNDFIDDPKAYGFQTATDACCGQGRFNGMGLCTMVSSLCADRDTYVFWDAFHPTERANRLIVQQFMSGSTDYIMPMNLSTVLAVDLQKQQLRT

SEQ ID NO: 24923 - protein, 97 aa, Zea mays subsp. mays
  misc_feature (1)..(97): Ceres Seq. ID no. 12468441
MQRIHNDFIDDPKAYGFQTATDACCGQGRFNGMGLCTMVSSLCADRDTYVFWDAFHPTERANRLIVQQFMSGSTDYIMPMNLSTVLAVDLQKQQLRT

SEQ ID NO: 24924 - DNA, 544 bp, Zea mays subsp. mays
  misc_feature (1)..(544): Ceres Seq. ID no. 12468462
gatgttatttgggacatcatgcggtgctgggtgaagaatcatcctattaaggaacagccacgtgactcacctggcacggtgatcctttcaaaatcgccaaagctagaagcaaatttttcaagagcagttgctgccctcagcaaggctcagacaaataagattaaacgattccttccaaaccccgaacggcactggggtccgaaggtcagagcaggccggaagatcacgagcaaacatgtctctctgttgggccctgacgctatcaagggtgctgtgaacggtggtgactgccagaaagaaggaaacggtgctgagccagatagtacagcctcagaacccgaggggatcaaagacgttgaggatgagccctcaaacaaacgccaaaaaaccagcgacggcgaaccagcaagcgaaccttgatttgtttgtcaatctttcgcgtctccattgtgttgtgcctgtgcttttcttgtttgtaggtggtcgatggttatttataccacctgttggattttgatcgaacaaattgtggcaggtttttatt

SEQ ID NO: 24925 - protein, 139 aa, Zea mays subsp. mays
  misc_feature (1)..(139): Ceres Seq. ID no. 12468463
DVIWDIMRCWVKNHPIKEQPRDSPGTVILSKSPKLEANFSRAVAALSKAQTNKIKRFLPNPERHWGPKVRAGRKITSKHVSLLGPDAIKGAVNGGDCQKEGNGAEPDSTASEPEGIKDVEDEPSNKRQKTSDGEPASEP

SEQ ID NO: 24926 - protein, 133 aa, Zea mays subsp. mays
  misc_feature (1)..(133): Ceres Seq. ID no. 12468464
MRCWVKNHPIKEQPRDSPGTVILSKSPKLEANFSRAVAALSKAQTNKIKRFLPNPERHWGPKVRAGRKITSKHVSLLGPDAIKGAVNGGDCQKEGNGAEPDSTASEPEGIKDVEDEPSNKRQKTSDGEPASEP

SEQ ID NO: 24927 - DNA, 879 bp, Zea mays subsp. mays
  misc_feature (1)..(879): Ceres Seq. ID no. 12468612
gccagctagagaaggcgatgtacctgtgagggttaagaattcttataaccgtcgagcccctggtacccttatcactaaagcaagagatatgagtaagactgttttgactagcattgttttgaaatcaaatattacaatgcttgatatagtcagcacacgcatgcttggccagtacggttttctagctaaggttttttcgatatttgaagacttgggcatctctgttgattgtgtggctaccagtgaagtcagcatatctttgacactggatccgtcgaaactatggagttgtgaattggttcagcacaaaaatgaacttgatgatgtcattgaagagcttgagaagatagcagttgttcatctactgcagaacaggtcaataatatctttaattggaaatgtgcagaggtcgtctttgattcttgaaaaggctttcaatgttctacgaagaaacggtgtcaatgtccagatgatatcgcaaggggcgtccaaggtgaacatttccttggtggtccatgacagtgaggcaaaacagtgtgttcaagcccttcactccgcgttctttgagaatggtttcttgttggaagctgatgagttggatgttctgcatgatggctttacatcgcattccaatggcacaatccacagccattagccgaggatttgatattcatctgtttggctactgtagtgccacttgtgatcaaatcctgatctttggtcgatatctaatgtttttatgaggctacgaaggattcggctttagagctactacccatcagaagtntaggaatttgttcagagctactacttaggattttgtttagagattaatgatactgtttggttttttgtacaattgattgaaagtatatactt

SEQ ID NO: 24928 - protein, 217 aa, Zea mays subsp. mays
  misc_feature (1)..(217): Ceres Seq. ID no. 12468613
PAREGDVPVRVKNSYNRRAPGTLITKARDMSKTVLTSIVLKSNITMLDIVSTRMLGQYGFLAKVFSIFEDLGISVDCVATSEVSISLTLDPSKLWSCELVQHKNELDDVIEELEKIAVVHLLQNRSIISLIGNVQRSSLILEKAFNVLRRNGVNVQMISQGASKVNISLVVHDSEAKQCVQALHSAFFENGFLLEADELDVLHDGFTSHSNGTIHSH

SEQ ID NO: 24929 - protein, 188 aa, Zea mays subsp. mays
  misc_feature (1)..(188): Ceres Seq. ID no. 12468614
MSKTVLTSIVLKSNITMLDIVSTRMLGQYGFLAKVFSIFEDLGISVDCVATSEVSISLTLDPSKLWSCELVQHKNELDDVIEELEKIAVVHLLQNRSIISLIGNVQRSSLILEKAFNVLRRNGVNVQMISQGASKVNISLVVHDSEAKQCVQALHSAFFENGFLLEADELDVLHDGFTSHSNGTIHSH

SEQ ID NO: 24930 - protein, 172 aa, Zea mays subsp. mays
  misc_feature (1)..(172): Ceres Seq. ID no. 12468615
MLDIVSTRMLGQYGFLAKVFSIFEDLGISVDCVATSEVSISLTLDPSKLWSCELVQHKNELDDVIEELEKIAVVHLLQNRSIISLIGNVQRSSLILEKAFNVLRRNGVNVQMISQGASKVNISLVVHDSEAKQCVQALHSAFFENGFLLEADELDVLHDGFTSHSNGTIHSH

SEQ ID NO: 24931 - DNA, 706 bp, Zea mays subsp. mays
  misc_feature (1)..(706): Ceres Seq. ID no. 12468644
gaattcggtcgacaggagcggcaacatacttcctggaactgtcgtggactcgaagatctgccaccctacagagttcgacttcttcctgtgcagccatgctggcatcaagggcaccagccgtcctgctcactaccatgtcttgtgggacgagaacaacttcacagccgacgcactgcagaccctcaccaacaacctttgctacacctacgcgaggtgcacgcgctctgtgtccattgtcccgccggcgtactacgctcacctggccgcattccgcgcccggttctacatggagcctgacagctcagacagcgggtcgctggcgagtggcgcccgtggaggcggagcgccctccagctcgtcaacgtcccgcagcacccgcgccaccgccggcggagccgttagacccctccccgcgctcaaggacagcgtcaagaaggtcatgttctactgctgatgaaccggagcatgaagatagtaggcagccctgcctgaaatctgatccgcttggtgctgttgtttggtcagtaataatctgcttgctattgacaaagccgtgctcagaagacatttgcttggtgtttgtttgatgaagggtggctagagtggtggattcgcttcctgcttgtactgagggacgaccgtacgtgaaagaatctaggtctttatttgtgtttggacgattaatagtaaaacacaagagtatttt

SEQ ID NO: 24932 - protein, 194 aa, Zea mays subsp. mays
  misc_feature (1)..(194): Ceres Seq. ID no. 12468645
IRSTGAATYFLELSWTRRSATLQSSTSSCAAMLASRAPAVLLTTMSCGTRTTSQPTHCRPSPTTFATPTRGARALCPLSRRRTTLTWPHSAPGSTWSLTAQTAGRWRVAPVEAERPPARQRPAAPAPPPAEPLDPSPRSRTASRRSCSTADEPEHEDSRQPCLKSDPLGAVVWSVIICLLLTKPCSEDICLVFV

SEQ ID NO: 24933 - protein, 163 aa, Zea mays subsp. mays
  misc_feature (1)..(163): Ceres Seq. ID no. 12468646
MLASRAPAVLLTTMSCGTRTTSQPTHCRPSPTTFATPTRGARALCPLSRRRTTLTWPHSAPGSTWSLTAQTAGRWRVAPVEAERPPARQRPAAPAPPPAEPLDPSPRSRTASRRSCSTADEPEHEDSRQPCLKSDPLGAVVWSVIICLLLTKPCSEDICLVFV

SEQ ID NO: 24934 - protein, 150 aa, Zea mays subsp. mays
  misc_feature (1)..(150): Ceres Seq. ID no. 12468647
MSCGTRTTSQPTHCRPSPTTFATPTRGARALCPLSRRRTTLTWPHSAPGSTWSLTAQTAGRWRVAPVEAERPPARQRPAAPAPPPAEPLDPSPRSRTASRRSCSTADEPEHEDSRQPCLKSDPLGAVVWSVIICLLLTKPCSEDICLVFV

SEQ ID NO: 24935 - protein, 150 aa, Zea mays subsp. mays
  misc_feature (1)..(150): Ceres Seq. ID no. 12468648
NSVDRSGNILPGTVVDSKICHPTEFDFFLCSHAGIKGTSRPAHYHVLWDENNFTADALQTLTNNLCYTYARCTRSVSIVPPAYYAHLAAFRARFYMEPDSSDSGSLASGARGGGAPSSSSTSRSTRATAGGAVRPLPALKDSVKKVMFYC

SEQ ID NO: 24936 - DNA, 957 bp, Zea mays subsp. mays
  misc_feature (1)..(957): Ceres Seq. ID no. 12468701
gagtacacggacaaggttggcgaaattgccgtgaaccacggcttgaagcttcacatcgatggagctcgtattttcaatgcctctgtggcactgggagttcctgtacatagacttgtaaaagctgccgactcagtttcggtatgcctatctaaagggttaggcgcacccatcggatcagttgttgttggttcagaggccttcatcgacaaggctagaattcttaggaagaccctaggcggtgggatgaggcaggttggagttctttgtgccgctgcttatgttgctgttcgtgacaccgtgggaaagcttgcggatgatcacaggaaggctaaagccttggcagagggcctgaataaaattaaacagttcacggtggattcatcttcggttgagaccaatatggtgttcttcgatatcgtggatccacgcatttcaccgagcaagctatgccaagtcttggaacagcgcaatgttcttgcaatgccagcaagttcaaaaagtgtcaggttcgtcatccattaccagatttcagacagcgatgttcaatatgcattgacgtgtgtcgagaaagctgttgaagagctattgaagggcggtacaaagttggagcatttgacgaatggtactgccaaaaactcatattggcactagacgtcagcagggtgtcctgcttgtttgttatcaacgctagctgttaaaactcttctctattaatgaaatagggcacaccactcgtgtgcccgtttgttccaaaaaaaatctaggtgttaatttgtagtcacacctttgccggatggctgttgctgtttactcttcactcggatgtgttcgttcttgtgctgtatagcttaccttctcagaattacctggtccgtttccgcttcctggtaagacggatgcaatgaagtattgcaaatgcagaacatacttggcccagataatacagtttcttttgtt

SEQ ID NO: 24937 - protein, 216 aa, Zea mays subsp. mays
  misc_feature (1)..(216): Ceres Seq. ID no. 12468702
EYTDKVGEIAVNHGLKLHIDGARIFNASVALGVPVHRLVKAADSVSVCLSKGLGAPIGSVVVGSEAFIDKARILRKTLGGGMRQVGVLCAAAYVAVRDTVGKLADDHRKAKALAEGLNKIKQFTVDSSSVETNMVFFDIVDPRISPSKLCQVLEQRNVLAMPASSKSVRFVIHYQISDSDVQYALTCVEKAVEELLKGGTKLEHLTNGTAKNSYWH

SEQ ID NO: 24938 - protein, 135 aa, Zea mays subsp. mays
  misc_feature (1)..(135): Ceres Seq. ID no. 12468703
MRQVGVLCAAAYVAVRDTVGKLADDHRKAKALAEGLNKIKQFTVDSSSVETNMVFFDIVDPRISPSKLCQVLEQRNVLAMPASSKSVRFVIHYQISDSDVQYALTCVEKAVEELLKGGTKLEHLTNGTAKNSYWH

SEQ ID NO: 24939 - DNA, 979 bp, Zea mays subsp. mays
  misc_feature (1)..(979): Ceres Seq. ID no. 12468704
aaacaagttgatcaggcacatgatttccatttgtcagatctggtgtctagatgcatcgggagctcaaatagatccgatatcatatgctatgtcagacgcaaacacaaaaggaagagggattactcgtgtttcgtccgctctccctgtgagagcttgaggccaaggtccaagcctgcagtagtcgaggagtcggaatggagcagaacagccgaggcttcttttgctaaaaggggtaagaggacacaagcagtgggatcatttcagtgtgatattgatctgtgtggcatggcatttgagactagggccgaactcaatgcccacaagcgcaatatttgcactgacgagtcatgtggcaagcgtttcagctcacacaaatacttgaagcgacatcagtgtgtccacagcgagatgaggccatttaaatgcccctgggaaggttgtaaaatgaccttcaagtggttgtgggctcagactgaacatgtcagagtgcacactggagagcggccatacaagtgctcggntcctgactgcgggcagacattcagatatgtatcggattacagccgccacagaaagaaatttaaccattactgacagcttctagttttccgagttattggccgcagctcggggcaaatctccagctgcttgtgtcggtgggccttgtttgttgtagtagctcagctcacgtatttattaacaatctgacagctgataggcctagtgaatgttccccgttaacaatgtgctagtaatttagtcgatgtaggatttagaaattgttggggggtgaagagcaacccccttctgttggtgtaggtttgcataagctgatcaccccccactgacacgtggccattcattatttgtttctcagatcagtgatgatgtatttaatccctgatgacaaacttcatgaacactgaaaccatatgatgtcggatgtcaaaatgatcaggggttgccaccgtgctcatgt

SEQ ID NO: 24940 - protein, 197 aa, Zea mays subsp. mays
  misc_feature (1)..(197): Ceres Seq. ID no. 12468705
  misc_feature (174)..(174): Xaa is any aa, unknown or other
KQVDQAHDFHLSDLVSRCIGSSNRSDIICYVRRKHKRKRDYSCFVRSPCESLRPRSKPAVVEESEWSRTAEASFAKRGKRTQAVGSFQCDIDLCGMAFETRAELNAHKRNICTDESCGKRFSSHKYLKRHQCVHSEMRPFKCPWEGCKMTFKWLWAQTEHVRVHTGERPYKCSXPDCGQTFRYVSDYSRHRKKFNHY

SEQ ID NO: 24941 - protein, 102 aa, Zea mays subsp. mays
  misc_feature (1)..(102): Ceres Seq. ID no. 12468706
  misc_feature (79)..(79): Xaa is any aa, unknown or other
MAFETRAELNAHKRNICTDESCGKRFSSHKYLKRHQCVHSEMRPFKCPWEGCKMTFKWLWAQTEHVRVHTGERPYKCSXPDCGQTFRYVSDYSRHRKKFNHY

SEQ ID NO: 24942 - DNA, 667 bp, Zea mays subsp. mays
  misc_feature (1)..(667): Ceres Seq. ID no. 12468824
gttcaccgagaccttggactactattcggccatgttcgagtcaatcgacacgaacctgccacgggacaacaaggagcggatcaacgtggagcagcactgtcttgccaaggacatcgtgaacatcatcgcctgcgaggggaaggaccgggtggagcgtcacgagctcctgggcaaatggcggtcgaggctgaccatggccgggttcagaccatacccgctgagctcgtacgtgaactcggtgatcaggaagctccttgcctgctactcggacaagtacaccctggaagagaaggatggcgcgatgctgctcggctggaagaacaggaagttgatatctgcttctgcttggcactgacagtaacgttttcagaagaccggaagtacacgtcaactcttacatatatatatgtatgtatgcataatgaattacctggtctgctttccgcaaaaaaggacgccctttgttgnacatgtacatgatgctgtacccttagttttcctgaagtgcagaccagagaagagaacattgacattagattgtagctgntaagctgtatggtaattacagttttnttttgctntcatgtattcacccctgtcatggacttttccaagngtatttttagntaatcagcatgcatacatgctgagatgctttttagtnttc

SEQ ID NO: 24943 - protein, 159 aa, Zea mays subsp. mays
  misc_feature (1)..(159): Ceres Seq. ID no. 12468825
  misc_feature (156)..(156): Xaa is any aa, unknown or other
VHRDLGLLFGHVRVNRHEPATGQQGADQRGAALSCQGHREHHRLRGEGPGGASRAPGQMAVEADHGRVQTIPAELVRELGDQEAPCLLLGQVHPGREGWRDAARLEEQEVDICFCLALTVTFSEDRKYTSTLTYIYVCMHNELPGLLSAKKDALCXTCT

SEQ ID NO: 24944 - protein, 117 aa, Zea mays subsp. mays
  misc_feature (1)..(117): Ceres Seq. ID no. 12468826
FTETLDYYSAMFESIDTNLPRDNKERINVEQHCLAKDIVNIIACEGKDRVERHELLGKWRSRLTMAGFRPYPLSSYVNSVIRKLLACYSDKYTLEEKDGAMLLGWKNRKLISASAWH

SEQ ID NO: 24945 - protein, 107 aa, Zea mays subsp. mays
  misc_feature (1)..(107): Ceres Seq. ID no. 12468827
MFESIDTNLPRDNKERINVEQHCLAKDIVNIIACEGKDRVERHELLGKWRSRLTMAGFRPYPLSSYVNSVIRKLLACYSDKYTLEEKDGAMLLGWKNRKLISASAWH

SEQ ID NO: 24946 - DNA, 482 bp, Zea mays subsp. mays
  misc_feature (1)..(482): Ceres Seq. ID no. 12468860
taagtgcatttgcaccacaaacaaaagaggatgggcttctgcatactgcctgtggaactccaaactatgtagcgcctgaggtgctcgctgataaaggctatgatggtatggctgcagatgtatggtcctgtggcataatcttgtttgttcttatggccggatacttacccttcgatgatgccaatctgatgagactgtacaaactgatctgccatgcaactttttcttgcccaccatggttttcttctggagcaaggaagtttattaagcgcattctcgatcctaaccctgataccaggataaaaattgcagaaattttggaagatgaatggttcaaaaaaggctataaaccaccacattttgaacaaggcgaagatgttaaccttgacgacgttgatgctgcattcaatgattcagaggaccgtcttgtagcagagaaaagagaaaagccagaatcaatgaatgcatttgctcttatttcg

SEQ ID NO: 24947 - protein, 160 aa, Zea mays subsp. mays
  misc_feature (1)..(160): Ceres Seq. ID no. 12468861
SAFAPQTKEDGLLHTACGTPNYVAPEVLADKGYDGMAADVWSCGIILFVLMAGYLPFDDANLMRLYKLICHATFSCPPWFSSGARKFIKRILDPNPDTRIKIAEILEDEWFKKGYKPPHFEQGEDVNLDDVDAAFNDSEDRLVAEKREKPESMNAFALIS

SEQ ID NO: 24948 - protein, 125 aa, Zea mays subsp. mays
  misc_feature (1)..(125): Ceres Seq. ID no. 12468862
MAADVWSCGIILFVLMAGYLPFDDANLMRLYKLICHATFSCPPWFSSGARKFIKRILDPNPDTRIKIAEILEDEWFKKGYKPPHFEQGEDVNLDDVDAAFNDSEDRLVAEKREKPESMNAFALIS

SEQ ID NO: 24949 - protein, 110 aa, Zea mays subsp. mays
  misc_feature (1)..(110): Ceres Seq. ID no. 12468863
MAGYLPFDDANLMRLYKLICHATFSCPPWFSSGARKFIKRILDPNPDTRIKIAEILEDEWFKKGYKPPHFEQGEDVNLDDVDAAFNDSEDRLVAEKREKPESMNAFALIS

SEQ ID NO: 24950 - DNA, 661 bp, Zea mays subsp. mays
  misc_feature (1)..(661): Ceres Seq. ID no. 12468926
tgacttattctgctgaggatgaagcaaaaatcgaaaggcctgtgatgatacacagggcaatcctaggttctgttgaaaggatgtttgccattcttttggagcattacaatggcaaatggcccttatggctaagccctcgccaggccattgtttgttcagtatcttctggttcagtggaatatgcgaaacaggttcttgccatgctacatgaagctgatttccatgttgatattgatgtgagtgacaggacaatacaaaagaaggtacgggaagcccaggtagctcaattcaactacattcttgtcgtaggcgcacaggaggccgagactggaaatgtctgcgttagggtaagagataatgccgacctggccacaatgagcgttgatggcctcatcacacgtttgagggaggaaatcgtagccttcaaatgattttgatgctgcataatttcctagcacttcgcaatcattgactgttcatttgtgattttgattgagttttcagggaacagtactgagttcctccaaggctccaagtgtattcttgttggtacggttggaagctactaagggcatttanaagcacctagtttttaataaactggtttataaaaattgagatggttccaaacatatcggtttatattatggatttntagttt

SEQ ID NO: 24951 - protein, 142 aa, Zea mays subsp. mays
  misc_feature (1)..(142): Ceres Seq. ID no. 12468927
TYSAEDEAKIERPVMIHRAILGSVERMFAILLEHYNGKWPLWLSPRQAIVCSVSSGSVEYAKQVLAMLHEADFHVDIDVSDRTIQKKVREAQVAQFNYILVVGAQEAETGNVCVRVRDNADLATMSVDGLITRLREEIVAFK

SEQ ID NO: 24952 - protein, 128 aa, Zea mays subsp. mays
  misc_feature (1)..(128): Ceres Seq. ID no. 12468928
MIHRAILGSVERMFAILLEHYNGKWPLWLSPRQAIVCSVSSGSVEYAKQVLAMLHEADFHVDIDVSDRTIQKKVREAQVAQFNYILVVGAQEAETGNVCVRVRDNADLATMSVDGLITRLREEIVAFK

SEQ ID NO: 24953 - protein, 116 aa, Zea mays subsp. mays
  misc_feature (1)..(116): Ceres Seq. ID no. 12468929
MFAILLEHYNGKWPLWLSPRQAIVCSVSSGSVEYAKQVLAMLHEADFHVDIDVSDRTIQKKVREAQVAQFNYILVVGAQEAETGNVCVRVRDNADLATMSVDGLITRLREEIVAFK

SEQ ID NO: 24954 - DNA, 638 bp, Zea mays subsp. mays
  misc_feature (1)..(638): Ceres Seq. ID no. 12468946
aaaccgcagaagccagatctgcctctcctttttcgacgagaaacacagacaccctggttggtttgtcaacaaaacagagcgcatctattgggagcaatggttcatcaatttgcaagtcatgttccccaaaagatacagcaagtcaaacagctccaaagggctgacaaacatccaagcaaatgccgtggaggagaccagcacaaggcgtgctgcattggaggcgtcgattaacgaagtgctgttccagatcataaagttcgccaacgagaaaaaggaccacattcctgctatccctgacaggattttcaatcacgagatcatgatcccaagctcggattctgtatttggatggaacacggacgtcattcgcagagttctgaatagcgggcacccatactcgctttaactgaagacgacatctcagtgggcgcccgtattcagtttattagcgtgctgccgccctgtttggaagacggctctgttaaccatcgtggtgaaccatataatatgcctaaggaaaaacctagttctgtgtacatcaccctgctcatctggcatgtacatactgtgttgggatcttgctcatcggtcaaacattnttaagttcgattaagtttataaataacaatattatgatt

SEQ ID NO: 24955 - protein, 134 aa, Zea mays subsp. mays
  misc_feature (1)..(134): Ceres Seq. ID no. 12468947
NRRSQICLSFFDEKHRHPGWFVNKTERIYWEQWFINLQVMFPKRYSKSNSSKGLTNIQANAVEETSTRRAALEASINEVLFQIIKFANEKKDHIPAIPDRIFNHEIMIPSSDSVFGWNTDVIRRVLNSGHPYSL

SEQ ID NO: 24956 - protein, 95 aa, Zea mays subsp. mays
  misc_feature (1)..(95): Ceres Seq. ID no. 12468948
MFPKRYSKSNSSKGLTNIQANAVEETSTRRAALEASINEVLFQIIKFANEKKDHIPAIPDRIFNHEIMIPSSDSVFGWNTDVIRRVLNSGHPYSL

SEQ ID NO: 24957 - protein, 76 aa, Zea mays subsp. mays
  misc_feature (1)..(76): Ceres Seq. ID no. 12468949
KPQKPDLPLLFRRETQTPWLVCQQNRAHLLGAMVHQFASHVPQKIQQVKQLQRADKHPSKCRGGDQHKACCIGGVD

SEQ ID NO: 24958 - DNA, 927 bp, Zea mays subsp. mays
  misc_feature (1)..(927): Ceres Seq. ID no. 12469147
tttcggtgaatgccagtgcacaattctgtggtgttgctgagatgattggaccagtggactttgagaaaagtgtggattactggcagcaagataagtggactggtcaattccctgtgaagtggcacatagtgaaggatgttcccaataatcttttccgacatataattcttgaaaacaacgacaataaacctgtaacaaacagcagagatacacaggaggtgaaactagagcaaggaatggagatgctgaagatctttaagaaccatgatgatgatgcatcaatccttgacgactttgagttttacgaggagcgtgagaaagcgctgcaggaaaataaggcacgcctgcatcagcaacatctacccagttctattgttattgagcccaagaaacccttgactgcacccagtgacctcgtgggccatatcaccaagagttttgctgaggctgtgcggcttggtgaggccaagactgtaagccatttgactgagaaggtttctgggggtgatccgtctattcctgtgaagcatgttgaagttaagcagagtggtttatcttaggaactcttgatcgatgtgaatgaactgtaccaaaaattcacccatacgcttcctgatcaaaatgtcgggaatgcatatgcagatggatgatgatgaaacccaagacatcggcaaaagcatgcatgcacactagggtaggtntttgccaaccttggaagcatagtttcttgaatagtttctctctttttttcttctttcttcctagtattttctccccttctcttcgcatcatatgatgattccttagtgtctagcctcaaggagagttgctgtttttgtgtaagcctctgtaagtttcctgttccatcacatatgagtaaggcctttttgtttctttttatttaagtaaaagatccatcttttatgt

SEQ ID NO: 24959 - protein, 185 aa, Zea mays subsp. mays
  misc_feature (1)..(185): Ceres Seq. ID no. 12469148
SVNASAQFCGVAEMIGPVDFEKSVDYWQQDKWTGQFPVKWHIVKDVPNNLFRHIILENNDNKPVTNSRDTQEVKLEQGMEMLKIFKNHDDDASILDDFEFYEEREKALQENKARLHQQHLPSSIVIEPKKPLTAPSDLVGHITKSFAEAVRLGEAKTVSHLTEKVSGGDPSIPVKHVEVKQSGLS

SEQ ID NO: 24960 - protein, 172 aa, Zea mays subsp. mays
  misc_feature (1)..(172): Ceres Seq. ID no. 12469149
MIGPVDFEKSVDYWQQDKWTGQFPVKWHIVKDVPNNLFRHIILENNDNKPVTNSRDTQEVKLEQGMEMLKIFKNHDDDASILDDFEFYEEREKALQENKARLHQQHLPSSIVIEPKKPLTAPSDLVGHITKSFAEAVRLGEAKTVSHLTEKVSGGDPSIPVKHVEVKQSGLS

SEQ ID NO: 24961 - protein, 107 aa, Zea mays subsp. mays
  misc_feature (1)..(107): Ceres Seq. ID no. 12469150
MEMLKIFKNHDDDASILDDFEFYEEREKALQENKARLHQQHLPSSIVIEPKKPLTAPSDLVGHITKSFAEAVRLGEAKTVSHLTEKVSGGDPSIPVKHVEVKQSGLS

SEQ ID NO: 24962 - DNA, 949 bp, Zea mays subsp. mays
  misc_feature (1)..(949): Ceres Seq. ID no. 12469222
gatgggatcatgactgtggttatgatggagtgagcgttgaagagacactagctatccttagcaggttcccagcaaatgtagcagttcaggtcaccaaggacaagaaggaatttagcatccatttggactcttccatcgcagcaaagcatggagagaacacatcatctcttgctggttttgatatccagactgttgggcggcagcttgcatatattctccgtggggagacaaaaatcaagaatatcaagaagaacaaaaccacaggagggttctcagtaactttcctgggcgacattgtggcaactggactgaagattgaggaccagctctcccttgggaagaggttgtcactagttgctagcactggcgcgatgcgagcccaaggggacactgcatatggagctaacctggaggcacgcttgaaggacaaagactatccgatagcccagtccctctcaaccttgggtctctctctgatgaagtggcgtcgggaccttgctctgggcgcaaacttgcagtcccagttttccatcggaagggggtcgaagatggcagttcgacttggtntgaacaacaagctgagtgggcagatcnccgtcaggacaagcacctcagagcaggtccagattgcacttntgggtctcgtaccggttgcagcctccatttaccggagtttccggcccagtgaaccatcctttgcttattagcttgtcaggagtctcagtttaattatttcatgatcacatcgtttctcttagcaattttgcttttcatatcaaccatgtttcctgctgtttcagttcactcctttgtaattggcagatcgtttcctatcataattttgggtgaagagggttgcgagatttatctggaactatagctgaataaataatgtggagggatgttgatccttgtggttatcaatctattacagcgtttttaagtcttc

SEQ ID NO: 24963 - protein, 234 aa, Zea mays subsp. mays
  misc_feature (1)..(234): Ceres Seq. ID no. 12469223
  misc_feature (189)..(189): Xaa is any aa, unknown or other
  misc_feature (198)..(198): Xaa is any aa, unknown or other
  misc_feature (212)..(212): Xaa is any aa, unknown or other
WDHDCGYDGVSVEETLAILSRFPANVAVQVTKDKKEFSIHLDSSIAAKHGENTSSLAGFDIQTVGRQLAYILRGETKIKNIKKNKTTGGFSVTFLGDIVATGLKIEDQLSLGKRLSLVASTGAMRAQGDTAYGANLEARLKDKDYPIAQSLSTLGLSLMKWRRDLALGANLQSQFSIGRGSKMAVRLGXNNKLSGQIXVRTSTSEQVQIALXGLVPVAASIYRSFRPSEPSFAY

SEQ ID NO: 24964 - DNA, 925 bp, Zea mays subsp. mays
  misc_feature (1)..(925): Ceres Seq. ID no. 12469239
tcccccgtcacctcaaaaacctctccaaccccaccggtccaccaccgccagccacctctccctcgctctcactcaggtcccccgcaacacgacgagaggcagcaggaccggaaggcgccatggccaccacccgcgacgtctccgccgcctccgcggccgccatgttccacgtgtaccagcccatgccgatgccatccacggcggcggcccccgcgaaggcgggcaagaaggagggcggcaaggaccggcacagcaaggtgaacgggcgcgggcggcgcgtgcggatgccgatcgtgtgcgcggcgcgcgtgttccagctgacccgcgagctggggctcaagtcggacgggcagaccatcgagtggctgctccgccaggccgagccctccatcgtggccgccacgggctccggcaccaccccggccgtcttcgtctcctcctccgcgccgtccangtcctcctcctcccactcccactaccagcagcagcagcagcagcagcaggccnccgtcgtcgtcctgggcaagcgcccgcgcgaggagggcggcgacgccgcggcggcgtccgtgccggcgttntgggcggcggcgccgcggacgacggcagcagcggacgccagctggggcttctcgccgctggaggcccagcaggcggcggcggggtacgtgcccatggcacaggcgcagcagcagcagcaccaccaccaccacctcaacctgctcgccgcgctntccggtgccgcgaggcgcgccgaggcggcggaggagacccgatgactgctagcctagtagctacatgcatccgccactcgcgcgcatgcattggtcctttgttgtccgtgtgctcgctcttggcagcgtaaacgttcttgatttttgtttgtgtgtgtgcccttgtgatcttggctcgttagctagagtaatcc

SEQ ID NO: 24965 - protein, 286 aa, Zea mays subsp. mays
  misc_feature (1)..(286): Ceres Seq. ID no. 12469240
  misc_feature (151)..(151): Xaa is any aa, unknown or other
  misc_feature (169)..(169): Xaa is any aa, unknown or other
  misc_feature (193)..(193): Xaa is any aa, unknown or other
  misc_feature (244)..(244): Xaa is any aa, unknown or other
PPSPQKPLQPHRSTTASHLSLALTQVPRNTTRGSRTGRRHGHHPRRLRRLRGRHVPRVPAHADAIHGGGPREGGQEGGRQGPAQQGERARAARADADRVRGARVPADPRAGAQVGRADHRVAAPPGRALHRGRHGLRHHPGRLRLLLRAVXVLLLPLPLPAAAAAAAGXRRRPGQAPARGGRRRRGGVRAGVXGGGAADDGSSGRQLGLLAAGGPAGGGGVRAHGTGAAAAAPPPPPQPARRAXRCREARRGGGGDPMTASLVATCIRHSRACIGPLLSVCSLLAA

SEQ ID NO: 24966 - protein, 257 aa, Zea mays subsp. mays
  misc_feature (1)..(257): Ceres Seq. ID no. 12469241
  misc_feature (151)..(151): Xaa is any aa, unknown or other
  misc_feature (169)..(169): Xaa is any aa, unknown or other
  misc_feature (192)..(192): Xaa is any aa, unknown or other
  misc_feature (243)..(243): Xaa is any aa, unknown or other
PRHLKNLSNPTGPPPPATSPSLSLRSPATRREAAGPEGAMATTRDVSAASAAAMFHVYQPMPMPSTAAAPAKAGKKEGGKDRHSKVNGRGRRVRMPIVCAARVFQLTRELGLKSDGQTIEWLLRQAEPSIVAATGSGTTPAVFVSSSAPSXSSSSHSHYQQQQQQQQAXVVVLGKRPREEGGDAAAASVPAXWAAAPRTTAAADASWGFSPLEAQQAAAGYVPMAQAQQQQHHHHHLNLLAAXSGAARRAEAAEETR

SEQ ID NO: 24967 - protein, 218 aa, Zea mays subsp. mays
  misc_feature (1)..(218): Ceres Seq. ID no. 12469242
  misc_feature (112)..(112): Xaa is any aa, unknown or other
  misc_feature (130)..(130): Xaa is any aa, unknown or other
  misc_feature (153)..(153): Xaa is any aa, unknown or other
  misc_feature (204)..(204): Xaa is any aa, unknown or other
MATTRDVSAASAAAMFHVYQPMPMPSTAAAPAKAGKKEGGKDRHSKVNGRGRRVRMPIVCAARVFQLTRELGLKSDGQTIEWLLRQAEPSIVAATGSGTTPAVFVSSSAPSXSSSSHSHYQQQQQQQQAXVVVLGKRPREEGGDAAAASVPAXWAAAPRTTAAADASWGFSPLEAQQAAAGYVPMAQAQQQQHHHHHLNLLAAXSGAARRAEAAEETR

SEQ ID NO: 24968 - DNA, 905 bp, Zea mays subsp. mays
  misc_feature (1)..(905): Ceres Seq. ID no. 12469368
tgttggactcggacctgttgctgcgtgcagccgcgtccgggtttgggttcatgatgcgcgacatgacggtggagaactgggcggggccggcggggcaccaggcggtggcgctgcgcgtgagcgccgaccgcgccgtcgtccaccgctgcagcatcgccgggtaccaggacacgctgtacgcgcattctaaccgccagttctaccgcgactgcgacatctacggcaccgtggacttcgtcttcggcaatgccgccgccgtgctccagcgctgcaacctctgggcgcgcgtgccgctgccgggccagaagaacaccgtcaccgcgcagagccggaacgattcgtgccagcgcaccggcatcgtcctccacgcctgccgcctcgtggcggccgcgccggcagaaggcctctcgcccgcggcggccccggcgcccgtcccggaccgttcgccgctgctcctctccccgacgacgtacctgggccggccatggaagtccttctccagggtggtggtgatgatgtcgtacatcggcccgcacgtgccgccgcagggatggatggagtggaacgccaccagcacctacgcactcgacaggctttacttcggcgagtacatgaactacgggcccggcgctgggttggccgggcgtgttgcgtggcctggccnccgcgtcatcaacagcaccgcggaagcggagagcttcacggtggcgcggttcatcgacggcgcgtcctggctgccggccgccggggtctccttcgttgccgggctctcgctgctgtaatcgtcttgatggaaatcccagggcacaccagggaccaggcaggctgagtgacaagtagacgtgataatgtacttttagtggcggcagttcgaatcaattcaaatcattttgctgtgagatttc

SEQ ID NO: 24969 - protein, 259 aa, Zea mays subsp. mays
  misc_feature (1)..(259): Ceres Seq. ID no. 12469369
  misc_feature (221)..(221): Xaa is any aa, unknown or other
LDSDLLLRAAASGFGFMMRDMTVENWAGPAGHQAVALRVSADRAVVHRCSIAGYQDTLYAHSNRQFYRDCDIYGTVDFVFGNAAAVLQRCNLWARVPLPGQKNTVTAQSRNDSCQRTGIVLHACRLVAAAPAEGLSPAAAPAPVPDRSPLLLSPTTYLGRPWKSFSRVVVMMSYIGPHVPPQGWMEWNATSTYALDRLYFGEYMNYGPGAGLAGRVAWPGXRVINSTAEAESFTVARFIDGASWLPAAGVSFVAGLSLL

SEQ ID NO: 24970 - protein, 243 aa, Zea mays subsp. mays
  misc_feature (1)..(243): Ceres Seq. ID no. 12469370
  misc_feature (205)..(205): Xaa is any aa, unknown or other
MMRDMTVENWAGPAGHQAVALRVSADRAVVHRCSIAGYQDTLYAHSNRQFYRDCDIYGTVDFVFGNAAAVLQRCNLWARVPLPGQKNTVTAQSRNDSCQRTGIVLHACRLVAAAPAEGLSPAAAPAPVPDRSPLLLSPTTYLGRPWKSFSRVVVMMSYIGPHVPPQGWMEWNATSTYALDRLYFGEYMNYGPGAGLAGRVAWPGXRVINSTAEAESFTVARFIDGASWLPAAGVSFVAGLSLL

SEQ ID NO: 24971 - protein, 242 aa, Zea mays subsp. mays
  misc_feature (1)..(242): Ceres Seq. ID no. 12469371
  misc_feature (204)..(204): Xaa is any aa, unknown or other
MRDMTVENWAGPAGHQAVALRVSADRAVVHRCSIAGYQDTLYAHSNRQFYRDCDIYGTVDFVFGNAAAVLQRCNLWARVPLPGQKNTVTAQSRNDSCQRTGIVLHACRLVAAAPAEGLSPAAAPAPVPDRSPLLLSPTTYLGRPWKSFSRVVVMMSYIGPHVPPQGWMEWNATSTYALDRLYFGEYMNYGPGAGLAGRVAWPGXRVINSTAEAESFTVARFIDGASWLPAAGVSFVAGLSLL

SEQ ID NO: 24972 - DNA, 874 bp, Zea mays subsp. mays
  misc_feature (1)..(874): Ceres Seq. ID no. 12469372
gggatctgacggcaattccccaattcgattccatcccatgggttggcgttggcacgacgacgacggtgacagcggccggggcctcggcggtgtccctgacctcgctggtggcgggggcgatggggcgcagtgcgccacgcgacgggtggtgcagtcccgctgccacacggaggaagtcgagcccggccgatttgtccgcaagtgcgagaagacggagcagctcctccgcgactgcgtcggcaggccctctgaactggtggaatccaaaactgaaaacactgaagaagatgtcacagaagaaatgaagagcggttcactttctcttgggtttccaagaaacgagcccttcgcattccctggactccgcagtgacatggaagcccttgagaaagacttctttgggagcctagggaacgtcctggatgaagctgagcggatggccaacagcttcgtcagatcttttggttttccacctgctcatgacagcggatcaagtccatttcgaagacagcctgcagacaggcatattgaggaagataccgcaaagaataagactgagagcgactactcagaattcaggagcaagatttcagatgtgtaagcagctgtanagctgcagttatntggcctgtgtccatgagctgaaacctgagaagtgagagctttgcaatntcncggtccttatatgtttctctttggaacaaaataggnacttgcggcctgcaggtgctgtttagcctcgcttagtatggtaatngtaatggtagatgaagtgatttgcctgtcanaggtgaggagtattatntgttatgttcggttttgcagggccattttgtacagtactttttgcagacccagcatttgaaatgtttgc

SEQ ID NO: 24973 - protein, 199 aa, Zea mays subsp. mays
  misc_feature (1)..(199): Ceres Seq. ID no. 12469373
GSDGNSPIRFHPMGWRWHDDDGDSGRGLGGVPDLAGGGGDGAQCATRRVVQSRCHTEEVEPGRFVRKCEKTEQLLRDCVGRPSELVESKTENTEEDVTEEMKSGSLSLGFPRNEPFAFPGLRSDMEALEKDFFGSLGNVLDEAERMANSFVRSFGFPPAHDSGSSPFRRQPADRHIEEDTAKNKTESDYSEFRSKISDV

SEQ ID NO: 24974 - protein, 187 aa, Zea mays subsp. mays
  misc_feature (1)..(187): Ceres Seq. ID no. 12469374
MGWRWHDDDGDSGRGLGGVPDLAGGGGDGAQCATRRVVQSRCHTEEVEPGRFVRKCEKTEQLLRDCVGRPSELVESKTENTEEDVTEEMKSGSLSLGFPRNEPFAFPGLRSDMEALEKDFFGSLGNVLDEAERMANSFVRSFGFPPAHDSGSSPFRRQPADRHIEEDTAKNKTESDYSEFRSKISDV

SEQ ID NO: 24975 - protein, 100 aa, Zea mays subsp. mays
  misc_feature (1)..(100): Ceres Seq. ID no. 12469375
DLTAIPQFDSIPWVGVGTTTTVTAAGASAVSLTSLVAGAMGRSAPRDGWCSPAATRRKSSPADLSASARRRSSSSATASAGPLNWWNPKLKTLKKMSQKK

SEQ ID NO: 24976 - DNA, 626 bp, Zea mays subsp. mays
  misc_feature (1)..(626): Ceres Seq. ID no. 12469393
attatgtagagacatttcaagaaagataatgcgaggtatagccttggctttgggaggggcaattgatgcttttgaaggggatacagctggagatcctttctgggtgttaaggttgattggttatcccgtagatattccagaagagcagcgcactgatactggctgtggagctcatacagattatggacttctaacactggttaaccaggatgatgacatatgtgcccttgaggtgcaaaatcgttctggtgagtggatatatgcaacgccgattcccggaacctttgtttgtaacatcggtgacatgctgaaggtttggacaaatggaatatatcagcccacccttcacagagttgtcaacaattcccagcattaccgtgtatctgttgcattcttctacgagtccaacttcgatgctgcagtagagcctgttgagttctgccgggagaaaaccggcggcgctgctaagtacgaaaaggttgtgtacggggagcatttggttcagaaagtattgacgaacttcgtcatgtaaatttgctaagtacgacaaataaatntgcattgcagcatcagaactccagacctatttggtgtgtagtgctgtaccagaaaggtagtaacggact

SEQ ID NO: 24977 - protein, 176 aa, Zea mays subsp. mays
  misc_feature (1)..(176): Ceres Seq. ID no. 12469394
LCRDISRKIMRGIALALGGAIDAFEGDTAGDPFWVLRLIGYPVDIPEEQRTDTGCGAHTDYGLLTLVNQDDDICALEVQNRSGEWIYATPIPGTFVCNIGDMLKVWTNGIYQPTLHRVVNNSQHYRVSVAFFYESNFDAAVEPVEFCREKTGGAAKYEKVVYGEHLVQKVLTNFVM

SEQ ID NO: 24978 - protein, 167 aa, Zea mays subsp. mays
  misc_feature (1)..(167): Ceres Seq. ID no. 12469395
MRGIALALGGAIDAFEGDTAGDPFWVLRLIGYPVDIPEEQRTDTGCGAHTDYGLLTLVNQDDDICALEVQNRSGEWIYATPIPGTFVCNIGDMLKVWTNGIYQPTLHRVVNNSQHYRVSVAFFYESNFDAAVEPVEFCREKTGGAAKYEKVVYGEHLVQKVLTNFVM

SEQ ID NO: 24979 - DNA, 756 bp, Zea mays subsp. mays
  misc_feature (1)..(756): Ceres Seq. ID no. 12469433
acggcatcgttgtccacgccgagtcgccgactgatcacttctcttccagcgagtacacacatcacacagcgaagggcagcgcatcgtgctgcggcggccggaggtgatcgacaagcacctctctaggaataataaataatggcgcagttggtggacaaggcgaaggggttcgtcgccgacaagctggccaacatccagaagccggaggcggagctggccgacgtcacggtggggcacgtgggccgcgatggcgccacgctggcggggcgcgtggacgtgcgcaacccgtactcgcacgccatcccggtgtgtgaggtgacctacacgctgcggagcgccgggcggacggtggcgtcagggacggtgcccgacccggggtcgctcgccggcgacggggctaccacgcgcctcgacgtgcccgtcaaggtgccctacgacttcctggttagcctcgccaaggacgccggcagggactgggacatcgactatganatgcgtgtcgggctcaccgttgacctccccgtcgtcggcaaactcacgctgccgctcaccaagtccggcgagctcaagctccccaccctctccagcatnttctgatcgatcgatctgcgtgctgctcgctcgatccgtaactgcggccttgcgtgttcatgactgatctgcctactcgataatatgtaaaccgctctcttgagtgttgttgttgtgctgcttgagtagtacgagacctaataataataaactacagtgatgtgt

SEQ ID NO: 24980 - protein, 152 aa, Zea mays subsp. mays
  misc_feature (1)..(152): Ceres Seq. ID no. 12469434
  misc_feature (118)..(118): Xaa is any aa, unknown or other
  misc_feature (151)..(151): Xaa is any aa, unknown or other
MAQLVDKAKGFVADKLANIQKPEAELADVTVGHVGRDGATLAGRVDVRNPYSHAIPVCEVTYTLRSAGRTVASGTVPDPGSLAGDGATTRLDVPVKVPYDFLVSLAKDAGRDWDIDYXMRVGLTVDLPVVGKLTLPLTKSGELKLPTLSSXF

SEQ ID NO: 24981 - DNA, 903 bp, Zea mays subsp. mays
  misc_feature (1)..(903): Ceres Seq. ID no. 12469489
gtggcgggatcggatcggatcggatcgacacccagccagcgcgtggtgagtagaacacccccaagaggccaggactgagactgaccatgggagaagcgtgcagggacgcggcggctgcgggccagcagctgcggcaggacgaagagggcggaggaggagggcgtcacgcggagaaggagctcgtcggtgacccaataacccacgactcggtcgtctcggcgaagctgtacgaggacgtgccggcgacgccgatgatggcgctcaaccacatctcccgcctgtgcgaatccgtcgacgcgtccgtccggttctacgtcaaggcgctcggcttcgtgctcatccagcgcccgccggcgctcgacttctccggcgcatggctcttcaactacggcgtgggtatccacttcgtgcagcgcgacgacgcgcggcgggcccccaacgtgaggccggaggaggcggagctggaccccatggacaaccacgtgtcgttccagtgcgaggacatgggcgccatggagcggcggctgcgggagatgcgcgtgcggtacatgaagcggaccatcaacgaggaggaagggtcgcccatcgaccagctnttnttcagggacccggacggcttcatgatcgagatctgcaactgcgagaacctggagctcgtccccgccggcgccttcggccgcctcagactgccccgcgaccgccacaacccgcccgtgngcatggtcgccggcagcgacgagtagagggggagggggctttcgcgtccacgtgaccctccgccctacaaggccagcaccacaggccgggggaaatagtttgtggctcatataatcgccgcgggcgcttatgctggattntgggccgagttccagttttgaattcgaatttgtgctagttttggtt

SEQ ID NO: 24982 - protein, 218 aa, Zea mays subsp. mays
  misc_feature (1)..(218): Ceres Seq. ID no. 12469490
  misc_feature (170)..(170): Xaa is any aa, unknown or other
  misc_feature (171)..(171): Xaa is any aa, unknown or other
  misc_feature (211)..(211): Xaa is any aa, unknown or other
MGEACRDAAAAGQQLRQDEEGGGGGRHAEKELVGDPITHDSVVSAKLYEDVPATPMMALNHISRLCESVDASVRFYVKALGFVLIQRPPALDFSGAWLFNYGVGIHFVQRDDARRAPNVRPEEAELDPMDNHVSFQCEDMGAMERRLREMRVRYMKRTINEEEGSPIDQXXFRDPDGFMIEICNCENLELVPAGAFGRLRLPRDRHNPPVXMVAGSDE

SEQ ID NO: 24983 - protein, 163 aa, Zea mays subsp. mays
  misc_feature (1)..(163): Ceres Seq. ID no. 12469491
  misc_feature (115)..(115): Xaa is any aa, unknown or other
  misc_feature (116)..(116): Xaa is any aa, unknown or other
  misc_feature (156)..(156): Xaa is any aa, unknown or other
MMALNHISRLCESVDASVRFYVKALGFVLIQRPPALDFSGAWLFNYGVGIHFVQRDDARRAPNVRPEEAELDPMDNHVSFQCEDMGAMERRLREMRVRYMKRTINEEEGSPIDQXXFRDPDGFMIEICNCENLELVPAGAFGRLRLPRDRHNPPVXMVAGSDE

SEQ ID NO: 24984 - protein, 162 aa, Zea mays subsp. mays
  misc_feature (1)..(162): Ceres Seq. ID no. 12469492
  misc_feature (114)..(114): Xaa is any aa, unknown or other
  misc_feature (115)..(115): Xaa is any aa, unknown or other
  misc_feature (155)..(155): Xaa is any aa, unknown or other
MALNHISRLCESVDASVRFYVKALGFVLIQRPPALDFSGAWLFNYGVGIHFVQRDDARRAPNVRPEEAELDPMDNHVSFQCEDMGAMERRLREMRVRYMKRTINEEEGSPIDQXXFRDPDGFMIEICNCENLELVPAGAFGRLRLPRDRHNPPVXMVAGSDE

SEQ ID NO: 24985 - DNA, 978 bp, Zea mays subsp. mays
  misc_feature (1)..(978): Ceres Seq. ID no. 12469570
cccgttgctcgtcgtcgtcctctgcatccgtcccctatttatccgtcccctcctctcccgcactagctcccaagttccatcccatcccgccacgaaattctccacgctccgatccaatcgcaacaatgaagttcggcaagagcctcaacaaccagatcgtggagacgctcccggactggcgcgacaagttcctgtcctacaaggacctcaagaagcggctgaagcagatcggcgccggctctggcgagcggcggagcaagcgccagcgggtgggggacgggcgcggcggatcctcgccgcctgcgatgaccccggaggaggccggattcgtcgcgctcctcgacgccgagctcgacaagttcaacgccttcttcctcgagaaggaggaggactacgtcatccggctgaagggctggtcaagatcctcaagaagtacgacaagaggaccggcgcgctgatccgcctgcccttcatccggaacgtgatgcagganccgttctgcgccaccgacgtgctgtacaagctcgtcaaggggtgcgaggagatgctggaccagntcctcctgccccggaaccagcagcggcccgtgccgagcgacaacggcggggaaggagacagcgacggcgacgacgacaagcaacgaccggcggagccaggcgcctcatcgctgcccancggcggcggcggtggcgctggcgacatggagctggaggagatcgaggacatggagagcatgtacatgaagagtacggtggccgcgctcagggcgctcagggagatcaggagcgggagctccacggtgagcgcgttctccctgccgccactacggtgattgacacgttgtgttcggttcagtagcgaagcgagacagaacggggccgactgcgctgttgctgtaggtagtgtttggttcaaagaagacacgaacaaaatgaaagaaaatctgtaaaatgatagtaatattcatctagtattctc

SEQ ID NO: 24986 - protein, 276 aa, Zea mays subsp. mays
  misc_feature (1)..(276): Ceres Seq. ID no. 12469571
  misc_feature (164)..(164): Xaa is any aa, unknown or other
  misc_feature (186)..(186): Xaa is any aa, unknown or other
  misc_feature (225)..(225): Xaa is any aa, unknown or other
PLLVVVLCIRPLFIRPLLSRTSSQVPSHPATKFSTLRSNRNNEVRQEPQQPDRGDAPGLARQVPVLQGPQEAAEADRRRLWRAAEQAPAGGGRARRILAACDDPGGGRIRRAPRRRARQVQRLLPREGGGLRHPAEGLVKILKKYDKRTGALIRLPFIRNVMQXPFCATDVLYKLVKGCEEMLDQXLLPRNQQRPVPSDNGGEGDSDGDDDKQRPAEPGASSLPXGGGGGAGDMELEEIEDMESMYMKSTVAALRALREIRSGSSTVSAFSLPPLR

SEQ ID NO: 24987 - protein, 151 aa, Zea mays subsp. mays
  misc_feature (1)..(151): Ceres Seq. ID no. 12469572
RCSSSSSASVPYLSVPSSPALAPKFHPIPPRNSPRSDPIATMKFGKSLNNQIVETLPDWRDKFLSYKDLKKRLKQIGAGSGERRSKRQRVGDGRGGSSPPAMTPEEAGFVALLDAELDKFNAFFLEKEEDYVIRLKGWSRSSRSTTRGPAR

SEQ ID NO: 24988 - DNA, 552 bp, Zea mays subsp. mays
  misc_feature (1)..(552): Ceres Seq. ID no. 12469663
cagaggttgaagcactctctatggcacaacatgagaatcttgtgccactatggggttattgtatccagggaaactcgaggctcctcatatattctttcatggagaatgggagtcttgatgattggcttcacaacacggacaatgccaactcatttctagattggccaacaagactcaagattgcacaaggagcaggacggggcctttcttatatccacaacacctgcaaccctaacattgttcaccgtgacgtcaagtccagcaacatcttacttgatagagaattcaatgcttatgtcgctgattttggccttgcaagattgatccttccttacaacacacatgtcacgacagagctagtaggcactcttggttacattcctcccgagtatggacaagcctgggtggccaccctgagaggtgatatatatagttttggagtggtcttgcttgagctgctcacagggaagaggcctgtccaggttttgaccaagacgaaagaacttgtccaatgggtaagagagatgaggtcccaangggaaggatattgag

SEQ ID NO: 24989 - protein, 182 aa, Zea mays subsp. mays
  misc_feature (1)..(182): Ceres Seq. ID no. 12469664
  misc_feature (179)..(179): Xaa is any aa, unknown or other
EVEALSMAQHENLVPLWGYCIQGNSRLLIYSFMENGSLDDWLHNTDNANSFLDWPTRLKIAQGAGRGLSYIHNTCNPNIVHRDVKSSNILLDREFNAYVADFGLARLILPYNTHVTTELVGTLGYIPPEYGQAWVATLRGDIYSFGVVLLELLTGKRPVQVLTKTKELVQWVREMRSQXEGY

SEQ ID NO: 24990 - protein, 176 aa, Zea mays subsp. mays
  misc_feature (1)..(176): Ceres Seq. ID no. 12469665
  misc_feature (173)..(173): Xaa is any aa, unknown or other
MAQHENLVPLWGYCIQGNSRLLIYSFMENGSLDDWLHNTDNANSFLDWPTRLKIAQGAGRGLSYIHNTCNPNIVHRDVKSSNILLDREFNAYVADFGLARLILPYNTHVTTELVGTLGYIPPEYGQAWVATLRGDIYSFGVVLLELLTGKRPVQVLTKTKELVQWVREMRSQXEGY

SEQ ID NO: 24991 - protein, 150 aa, Zea mays subsp. mays
  misc_feature (1)..(150): Ceres Seq. ID no. 12469666
  misc_feature (147)..(147): Xaa is any aa, unknown or other
MENGSLDDWLHNTDNANSFLDWPTRLKIAQGAGRGLSYIHNTCNPNIVHRDVKSSNILLDREFNAYVADFGLARLILPYNTHVTTELVGTLGYIPPEYGQAWVATLRGDIYSFGVVLLELLTGKRPVQVLTKTKELVQWVREMRSQXEGY

SEQ ID NO: 24992 - DNA, 702 bp, Zea mays subsp. mays
  misc_feature (1)..(702): Ceres Seq. ID no. 12469805
ctcctgctcgtcaccggtgaccacggcggcctcgccagcctacagccaccaccagacgacgttccaggcacctgcaccgccgccgtcatgcggcgcaatgacgatggcggccgctgcgccgcatgtgcagggcttccacgtcggcgacgacgacactaccaccgcgatggcgatgcaccgtcatcagcagatgatgcgcgagctggcggaggcgcctctgcaccaggaggcagacgacttcgaggacttcgtgacgcggctgcccaaggcggaggacttcggcctgcagggcttccaggaggtggcccccgaggtgttcgacgacgccgccggcatctgggaccacgcggccgcctgggagcccccccaccatgatgatcgactctggcgcccagccccagcagcagctcgtcgtccctctttgactcgctcgtcgatgacgccgcgcgccctgcaccagctactgcttcgttcccagctgcatcgaactggccggtgtacgtggcggagtgatacgacgcgcgcgccatgcatgacaccactgcacaggtggttcctgcatgtgttgcttacgcctcgagacgtacgtacataataccagtatgtatgtaccggatggttactntgatatgactgtatttctcctagttattcgtgagtttcatttggataatgtttcaggttttgtaaaatatatacttt

SEQ ID NO: 24993 - protein, 197 aa, Zea mays subsp. mays
  misc_feature (1)..(197): Ceres Seq. ID no. 12469806
SCSSPVTTAASPAYSHHQTTFQAPAPPPSCGAMTMAAAAPHVQGFHVGDDDTTTAMAMHRHQQMMRELAEAPLHQEADDFEDFVTRLPKAEDFGLQGFQEVAPEVFDDAAGIWDHAAAWEPPHHDDRLWRPAPAAARRPSLTRSSMTPRALHQLLLRSQLHRTGRCTWRSDTTRAPCMTPLHRWFLHVLLTPRDVRT

SEQ ID NO: 24994 - protein, 165 aa, Zea mays subsp. mays
  misc_feature (1)..(165): Ceres Seq. ID no. 12469807
MTMAAAAPHVQGFHVGDDDTTTAMAMHRHQQMMRELAEAPLHQEADDFEDFVTRLPKAEDFGLQGFQEVAPEVFDDAAGIWDHAAAWEPPHHDDRLWRPAPAAARRPSLTRSSMTPRALHQLLLRSQLHRTGRCTWRSDTTRAPCMTPLHRWFLHVLLTPRDVRT

SEQ ID NO: 24995 - protein, 163 aa, Zea mays subsp. mays
  misc_feature (1)..(163): Ceres Seq. ID no. 12469808
MAAAAPHVQGFHVGDDDTTTAMAMHRHQQMMRELAEAPLHQEADDFEDFVTRLPKAEDFGLQGFQEVAPEVFDDAAGIWDHAAAWEPPHHDDRLWRPAPAAARRPSLTRSSMTPRALHQLLLRSQLHRTGRCTWRSDTTRAPCMTPLHRWFLHVLLTPRDVRT

SEQ ID NO: 24996 - DNA, 989 bp, Zea mays subsp. mays
  misc_feature (1)..(989): Ceres Seq. ID no. 12469861
cagagctcctggactaggcttagtctgcagtgatattgtgaaaggagttcctgcaatttttggtcattttctgacctcactccctgcgatacactcgataattgtatttgtgtgtatcaggaatgtgccagttccggtggttcctcaaagtgaaaggttccttttccaacgtgtatgctcaaggggctatcacttgttccgctgtatagcgagatacgggtataaagacaagaagcaggagcaccatagcgtatttgagcgtcttctgattgaaggccttgagaaattcatacaaagagaggcagtagagctatccctacaaagcgaagacgacattgactcggacgaagagcctccaacccctgtgaagatcatcacagcaccaaatggcagcctgtactcgctcgacgtccctctcctggcagactatgtgccttcaacagagctcattcatgaagccagctgctccacgcctcaacacgatcctgtactggattatgcacagaaccttgaactggagctggcgttcatcgagcagtccaagcggtctggggtcatctacctcatcgataatcccatcatcaaggccaggaaggactcatggttcttcaagaagctgatgataaactatttcttcgcgttcctgaggaacaactgccgccgggcgatcatgttgatgagcatcccgcattcaaacatgatgcaggtgcgcatgacttcttatgtctgattgctggaactgcactggttctgttcatggatgtctgatacaaaccacactgacagtaaaagaatgaacgtggcaaatgcaaagaggatatcggcacttttgtttttgttcataatttgatgatggcttaggttgttgtcggaatctatctcccctgtagttgtacaatgccaaaatatagttggaagttttagctggtacaccattagggtgctgtattaaccttttttactcttgtgcagtaaagattctttttgtc

SEQ ID NO: 24997 - protein, 242 aa, Zea mays subsp. mays
  misc_feature (1)..(242): Ceres Seq. ID no. 12469862
RAPGLGLVCSDIVKGVPAIFGHFLTSLPAIHSIIVFVCIRNVPVPVVPQSERFLFQRVCSRGYHLFRCIARYGYKDKKQEHHSVFERLLIEGLEKFIQREAVELSLQSEDDIDSDEEPPTPVKIITAPNGSLYSLDVPLLADYVPSTELIHEASCSTPQHDPVLDYAQNLELELAFIEQSKRSGVIYLIDNPIIKARKDSWFFKKLMINYFFAFLRNNCRRAIMLMSIPHSNMMQVRMTSYV

SEQ ID NO: 24998 - DNA, 498 bp, Zea mays subsp. mays
  misc_feature (1)..(498): Ceres Seq. ID no. 12469879
atcgcgcacatctcctgatcctcgttcctctccgccccgcttgcgccgcgcctccgcccccgtctcctgtgagatcagctccggcggcacgcggatatgactacttcaaggcgtcttgctgacaggaagagtgcaaagttccagaagaacatcacaaagaggggttctgtgcctgagaccacggtgaaaaagagcaatgactaccctgttggacctatagttcttggattcttcatttttgtggtcattggatcatccttgttccagataatcaggacagcgacaagcggtgggctggcctgaattcactgagctaaaaccagaaatttatctgtccgtgagctgggaggcagtatctgtgttgtgtagcaaacttgttcatggatatgtagtgcgaatgtcactactgttctgtttgcagtatcaaaagagtttaaactgatgttgtaaccatgcaaaggctgaaaattttaaagagtatgggagaaaccttaatct

SEQ ID NO: 24999 - protein, 68 aa, Zea mays subsp. mays
  misc_feature (1)..(68): Ceres Seq. ID no. 12469880
MTTSRRLADRKSAKFQKNITKRGSVPETTVKKSNDYPVGPIVLGFFIFVVIGSSLFQIIRTATSGGLA

SEQ ID NO: 25000 - protein, 39 aa, Zea mays subsp. mays
  misc_feature (1)..(39): Ceres Seq. ID no. 12469881
RAHLLILVPLRPACAAPPPPSPVRSAPAARGYDYFKASC

SEQ ID NO: 25001 - DNA, 670 bp, Zea mays subsp. mays
  misc_feature (1)..(670): Ceres Seq. ID no. 12482970
gtttctgttcggacttccgccgcgcttcgccctctcgctccagccgcttcacagcgccgccgctcgcctctccgaccgccgcgagaatgccgttcaagaggttcgtggagatcgggcgcgtggccctggtgaactacggcaaagactatggccgcctcgtcgtcatcgtcgatgtggtcgaccagaacagggcacttgtggacgcggcggcggtgggtacggtggtggccgtggaggcggcggctacggcggtggcgggcgccgtgatggcggtggcggctacggcggtggcggcggctacggtggcggcggcggctacggtggtggtggcggcggctaccgcggtggcaaccgtggcggcggctacggcaactccgacgggaactggaggaactgagcggtggggcccgcgcggccaagttatcctgttcgctaccgtgatgtttaccctagtccagagggtttatcttcgttcgtgtcgtgtttgttgttgcccatctgtgtttttgattgcaaggtcgctctgtgtcagttgttagtgctgtgttcatcctcggtttcagcagacccatgcatcaaacagcatggactgcggatcgatggatgctgttacccccgtcaggctttattctaagttaatcttaaggaaaaaatggtgcttcttggtgct

SEQ ID NO: 25002 - protein, 178 aa, Zea mays subsp. mays
  misc_feature (1)..(178): Ceres Seq. ID no. 12482971
FCSDFRRASPSRSSRFTAPPLASPTAARMPFKRFVEIGRVALVNYGKDYGRLVVIVDVVDQNRALVDAAAVGTVVAVEAAATAVAGAVMAVAATAVAAATVAAAATVVVAAATAVATVAAATATPTGTGGTERWGPRGQVILFATVMFTLVQRVYLRSCRVCCCPSVFLIARSLCVSC

SEQ ID NO: 25003 - protein, 150 aa, Zea mays subsp. mays
  misc_feature (1)..(150): Ceres Seq. ID no. 12482972
MPFKRFVEIGRVALVNYGKDYGRLVVIVDVVDQNRALVDAAAVGTVVAVEAAATAVAGAVMAVAATAVAAATVAAAATVVVAAATAVATVAAATATPTGTGGTERWGPRGQVILFATVMFTLVQRVYLRSCRVCCCPSVFLIARSLCVSC

SEQ ID NO: 25004 - protein, 131 aa, Zea mays subsp. mays
  misc_feature (1)..(131): Ceres Seq. ID no. 12482973
FLFGLPPRFALSLQPLHSAAARLSDRRENAVQEVRGDRARGPGELRQRLWPPRRHRRCGRPEQGTCGRGGGGYGGGRGGGGYGGGGRRDGGGGYGGGGGYGGGGGYGGGGGGYRGGNRGGGYGNSDGNWRN

SEQ ID NO: 25005 - DNA, 1163 bp, Zea mays subsp. mays
  misc_feature (1)..(1163): Ceres Seq. ID no. 12483001
aaaagtagaaaaagcgaaaagcctagtagcacaaggctacaagcctacaagcaaccgcgtccgcgtgtggagcaaggaaggcgaggggagccgagcgggcaaccggcggcgacagacatggcggagcagcacaaggaggagtcgggcgtgacagtgctggacaagatctccgacaagctccacgggcgcgggggcggctcgtcttcgtcgtcggactcggacgacgagcgctcgtcggcgacggccgccgtgaaggccaagatctaccgcatcttcgggcgcgagaagcccgtgcactccgtcctcggcggcggcaagccggccgatctgtttctatggaggaacaagaggatctctggtggggtgctcgcaggcgcaactgccttctggctgctgtttgaggtcatggattaccacctcctcaccctgctatgccactgcctcatcctcaccctggccatcctgttcctctggtccaatgccacgactttcatcaacaagtctcctcctaacatccccgaggtgaagatcccagatgacctggctgtgaatgttgcacgttccctgagatatgagatcaacaggggttttgctaccttgagggagattggccaaggccatgacctcaagaaatttctgattgtgattgcaggactgtggatcctttctgttcttgggagctgctgcaatttcctcaccttgtcttacatagtttttatggtactgtacactgtaccggtcctgtatgagaaacatgaggataaggttgatgcttttggtgagaaggccatggtcgagctgaagaggtactacgccatcttcgacgagaaatgcctatcaaagattccgaagggcccattaaaagacaagaagcaacattagaagcttagaatcagataagggtctgcggtgatttatcatctcttttgaccattattcgtcggttttggtggatggatgtgattccatgtctaaatacctggacgtgctctagtgttttagtgtggtcagtagcaatgttctaaattatctgagattacgctgaatcatgttctgaagtccacgtttaacgttgctctccctatcctttggaagtggcaatttcctcaatgtctgtaatatatctagtctagtgctatttcttaatctgacctagcgtcatg

SEQ ID NO: 25006 - protein, 293 aa, Zea mays subsp. mays
  misc_feature (1)..(293): Ceres Seq. ID no. 12483002
KSRKSEKPSSTRLQAYKQPRPRVEQGRRGEPSGQPAATDMAEQHKEESGVTVLDKISDKLHGRGGGSSSSSDSDDERSSATAAVKAKIYRIFGREKPVHSVLGGGKPADLFLWRNKRISGGVLAGATAFWLLFEVMDYHLLTLLCHCLILTLAILFLWSNATTFINKSPPNIPEVKIPDDLAVNVARSLRYEINRGFATLREIGQGHDLKKFLIVIAGLWILSVLGSCCNFLTLSYIVFMVLYTVPVLYEKHEDKVDAFGEKAMVELKRYYAIFDEKCLSKIPKGPLKDKKQH

SEQ ID NO: 25007 - protein, 254 aa, Zea mays subsp. mays
  misc_feature (1)..(254): Ceres Seq. ID no. 12483003
MAEQHKEESGVTVLDKISDKLHGRGGGSSSSSDSDDERSSATAAVKAKIYRIFGREKPVHSVLGGGKPADLFLWRNKRISGGVLAGATAFWLLFEVMDYHLLTLLCHCLILTLAILFLWSNATTFINKSPPNIPEVKIPDDLAVNVARSLRYEINRGFATLREIGQGHDLKKFLIVIAGLWILSVLGSCCNFLTLSYIVFMVLYTVPVLYEKHEDKVDAFGEKAMVELKRYYAIFDEKCLSKIPKGPLKDKKQH

SEQ ID NO: 25008 - protein, 158 aa, Zea mays subsp. mays
  misc_feature (1)..(158): Ceres Seq. ID no. 12483004
MDYHLLTLLCHCLILTLAILFLWSNATTFINKSPPNIPEVKIPDDLAVNVARSLRYEINRGFATLREIGQGHDLKKFLIVIAGLWILSVLGSCCNFLTLSYIVFMVLYTVPVLYEKHEDKVDAFGEKAMVELKRYYAIFDEKCLSKIPKGPLKDKKQH

SEQ ID NO: 25009 - DNA, 713 bp, Zea mays subsp. mays
  misc_feature (1)..(713): Ceres Seq. ID no. 12483013
cactattggtgttgtctattattcccctattcaattcttttttcttaggaatacctatggtcagcatgctcctttatgtctggagccgagagaatccaaatgctcagataaatatatacggcctcgtccaattgaggtccttttatcttccatgggctatgctcttattggatgtgatatttgggtcatcattaatgcctggacttctgggtatcatggttggacatctctactacttctttgcagtgttgcaccctcttgccaccgggaagaactacctcaagactcctaaatgggnttacataagattgtttctcgattcagggataggcatgcaagcaaactcacccgtccgtccaccagccaatggcaacagcgggtctggtgtgtttagaggaagaagctataggctcaatcaatagattcacccacctcgtaatgtgatccatggtcggagtggcaatgtagaagcaaagaccagaacgcatagtagggtcaatcaaaattaagggttacccgtcagagattttcttaaaaaacctggacggacggaatggagaaccctttcatttgctcatttagttgctaacaatgttcatcgtccatgtttacacatgaatataattctgtaatgacaatttgtgtacacttatgctggacttattgtcgcctctttttagctaggataagaacaaaagatgatgagtttgccc

SEQ ID NO: 25010 - protein, 139 aa, Zea mays subsp. mays
  misc_feature (1)..(139): Ceres Seq. ID no. 12483014
  misc_feature (99)..(99): Xaa is any aa, unknown or other
LLVLSIIPLFNSFFLGIPMVSMLLYVWSRENPNAQINIYGLVQLRSFYLPWAMLLLDVIFGSSLMPGLLGIMVGHLYYFFAVLHPLATGKNYLKTPKWXYIRLFLDSGIGMQANSPVRPPANGNSGSGVFRGRSYRLNQ

SEQ ID NO: 25011 - protein, 121 aa, Zea mays subsp. mays
  misc_feature (1)..(121): Ceres Seq. ID no. 12483015
  misc_feature (81)..(81): Xaa is any aa, unknown or other
MVSMLLYVWSRENPNAQINIYGLVQLRSFYLPWAMLLLDVIFGSSLMPGLLGIMVGHLYYFFAVLHPLATGKNYLKTPKWXYIRLFLDSGIGMQANSPVRPPANGNSGSGVFRGRSYRLNQ

SEQ ID NO: 25012 - protein, 118 aa, Zea mays subsp. mays
  misc_feature (1)..(118): Ceres Seq. ID no. 12483016
  misc_feature (78)..(78): Xaa is any aa, unknown or other
MLLYVWSRENPNAQINIYGLVQLRSFYLPWAMLLLDVIFGSSLMPGLLGIMVGHLYYFFAVLHPLATGKNYLKTPKWXYIRLFLDSGIGMQANSPVRPPANGNSGSGVFRGRSYRLNQ

SEQ ID NO: 25013 - DNA, 619 bp, Zea mays subsp. mays
  misc_feature (1)..(619): Ceres Seq. ID no. 12483051
atttttcgagatgaacgaacagtccagaacccactgctcgaaaccgcagccactggccagtcgatgcccatgactgcggtgcccaggaccggccccggttgcctggggtcgccgccggctcaggctctgtcgagctcactagccggggttcaaggcgccccgaagcgactgggcgcatcgaagccgtcgtggatcgttcgcactgagtcaaacgtgaggagggagagagcaaaacgacctgatcctccttgcaccatctgcaagggcacagggagaatagactgccgcaactgctttggccgaggaagaacaaaccatgccgatgtggccatgcttccgaacggcgaatggccacaatggtgtcgaatttgtggtggtagtggactggattactgcctccggtgccatggaactggtgagtatcgtgaacccatgggcttccacttcactgtccaaagaaaatgagtgaggtgggatggccttgtatgctacgatgcagcgcagctgcggggacatcgtagcccactcagcatgtttctccactgtctctcagaactcagatgatttatgtctagcgctaacgctgtaataacgttgcttcataaaaggaaaaaatgtc

SEQ ID NO: 25014 - protein, 154 aa, Zea mays subsp. mays
  misc_feature (1)..(154): Ceres Seq. ID no. 12483052
IFRDERTVQNPLLETAATGQSMPMTAVPRTGPGCLGSPPAQALSSSLAGVQGAPKRLGASKPSWIVRTESNVRRERAKRPDPPCTICKGTGRIDCRNCFGRGRTNHADVAMLPNGEWPQWCRICGGSGLDYCLRCHGTGEYREPMGFHFTVQRK

SEQ ID NO: 25015 - protein, 133 aa, Zea mays subsp. mays
  misc_feature (1)..(133): Ceres Seq. ID no. 12483053
MPMTAVPRTGPGCLGSPPAQALSSSLAGVQGAPKRLGASKPSWIVRTESNVRRERAKRPDPPCTICKGTGRIDCRNCFGRGRTNHADVAMLPNGEWPQWCRICGGSGLDYCLRCHGTGEYREPMGFHFTVQRK

SEQ ID NO: 25016 - protein, 131 aa, Zea mays subsp. mays
  misc_feature (1)..(131): Ceres Seq. ID no. 12483054
MTAVPRTGPGCLGSPPAQALSSSLAGVQGAPKRLGASKPSWIVRTESNVRRERAKRPDPPCTICKGTGRIDCRNCFGRGRTNHADVAMLPNGEWPQWCRICGGSGLDYCLRCHGTGEYREPMGFHFTVQRK

SEQ ID NO: 25017 - DNA, 646 bp, Zea mays subsp. mays
  misc_feature (1)..(646): Ceres Seq. ID no. 12483995
ctacgcaacctcccactgcattctcgaattccgattcccaatccagcaaaccctaccagccttttgcaaactcagagagggacccgatggcacccaaggcggagaagaagccggcggcgaagaagcccgcagaggaggagcccgcggccccggcggagaaggctcccgctgggaagaagccgaaggcggagaagcggctcccggcgggaaaatccgccggcaaggaaggcggtgttgacaagaaggggcggaagaaggccaagaagagcgtggagacgtacaagatctacatcttcaaggtgctgaagcaggtgcacccggacatcggcatctcctccaaggccatgtccatcatgaactccttcatcaacgacatcttcgagaagctcgccggcgaggcggccaagctcgcccgttacaacaagaagcccaccatcacctcccgggagatccagacctccgtccgcctcgttctacccggcgagctcgccaagcacgccgtctcggagggcaccaaggccgtcaccaagttcacctcgtcctaagctcctttcgagtaggtccttaagcgccgtggcgccttttgactgtatggaatgtttgtcatctgaaagttgatctgagcagtgcaatatataattctggc

SEQ ID NO: 25018 - protein, 180 aa, Zea mays subsp. mays
  misc_feature (1)..(180): Ceres Seq. ID no. 12483996
TQPPTAFSNSDSQSSKPYQPFANSERDPMAPKAEKKPAAKKPAEEEPAAPAEKAPAGKKPKAEKRLPAGKSAGKEGGVDKKGRKKAKKSVETYKIYIFKVLKQVHPDIGISSKAMSIMNSFINDIFEKLAGEAAKLARYNKKPTITSREIQTSVRLVLPGELAKHAVSEGTKAVTKFTSS

SEQ ID NO: 25019 - protein, 152 aa, Zea mays subsp. mays
  misc_feature (1)..(152): Ceres Seq. ID no. 12483997
MAPKAEKKPAAKKPAEEEPAAPAEKAPAGKKPKAEKRLPAGKSAGKEGGVDKKGRKKAKKSVETYKIYIFKVLKQVHPDIGISSKAMSIMNSFINDIFEKLAGEAAKLARYNKKPTITSREIQTSVRLVLPGELAKHAVSEGTKAVTKFTSS

SEQ ID NO: 25020 - protein, 101 aa, Zea mays subsp. mays
  misc_feature (1)..(101): Ceres Seq. ID no. 12483998
LRNLPLHSRIPIPNPANPTSLLQTQRGTRWHPRRRRSRRRRSPQRRSPRPRRRRLPLGRSRRRRSGSRRENPPARKAVLTRRGGRRPRRAWRRTRSTSSRC

SEQ ID NO: 25021 - DNA, 1769 bp, Zea mays subsp. mays
  misc_feature (1)..(1769): Ceres Seq. ID no. 12484003
aggataactcccataagaaaaatcgccaaatacgccattcatcttctccgcccgggtttcagaacgtgcggcagtttagccaggatggtggcgatcgagaaccagaaccagagccaggccgcggtggcggtggcggcggaggcggtgccggcgccggcgtcgcggatccccagggaggcgcggcgcctgctgcacgagctggcggcggcgtgggcggacgtggccgactgccgcgcgctggaggtcgtgccgctcaagggggccatgaccaacgaggtctaccaggcgcgctggctcactgcaggccctgccggccagaaggaggagcccagggcggagagggaggtgaggaaggtgctcgtgcggatttacggcgacggcgtcgacctcttcttcgaccgcgaggacgaggtgcgcaccttcgagtgcatgtcacgccatggccagggtccccgcctcctcggccgcttcccgaacggccgcgtcgaggagttcatccacgcaaggacattgtcagctgccgaccttcgcgatcctgaaatttcagctctggtggcttccaagctgagggagttccacaaccttgacatgcctggtcccaaatctgtgctcatttgggacagacttaggaactggctcagaactgccaagagcttgtgtccacctgaagaagccaaggaatttcggttggacagtctggagaaccagattactgcattggagaacgagtgttcaggtgattaccagtggattggtttctgtcacaatgatcttcagtatggcaatatcatgattgatgaagagaccaacgtgctgaccatcattgattatgagtatgcaagcttcaacccagttgcatatgacattgctaaccatttctgtgagatggcagcagactatcattcatcaaagcctcatatactggactacagcagatatccagatgttgatgagcagaagcgttttgttaagacctacctgaacatttctggtgaggaacctgatgcggaagttgtggagaacctgctccaaagcattgagaagcacacgctcgccagccatctagtatggggcctctggggaataatttcggaccatgttaacgacattgacttcgactacaaggagtatgcgaggcagagattcgagcagtactggcacaagtctgcgatcttaacatcttgaacatgtgtataaacacccgtacgtggtctcaggaactccctgagggcctgtggctgcacacacgaaattgtgcagtgccactgacacatagataagctgtgaaagaagaaatactgacgacgacgacgaataatcccgttttgggctcgggaggttatttctccgcaactcgatgagcttcaggcttcagcttcaggaaggaaggaaggagctatggggatttggctgcccgcttatgctgtaccaatgcaattaaaagataaagatccggtccggtgttgcgtgtgctatgtttagttttggctagcaccgccgagagccgtggtcctgttgtggtgtttctagtttctgtatgcttgatgttgttagtgtgctggataatttggttttgtgcttggggagtccttagctttgggacaacgcatacattgtatactgggtagatgtataaacataaaacagctatgggaatttggttctctacctttatttctctctcgaacaggctgtatttcgttaagaaggttaaatttgggtttgtatttgttattatcagcttgttatacatgtgtcagatcaaatcc

SEQ ID NO: 25022 - protein, 394 aa, Zea mays subsp. mays
  misc_feature (1)..(394): Ceres Seq. ID no. 12484004
RITPIRKIAKYAIHLLRPGFRTCGSLARMVAIENQNQSQAAVAVAAEAVPAPASRIPREARRLLHELAAAWADVADCRALEVVPLKGAMTNEVYQARWLTAGPAGQKEEPRAEREVRKVLVRIYGDGVDLFFDREDEVRTFECMSRHGQGPRLLGRFPNGRVEEFIHARTLSAADLRDPEISALVASKLREFHNLDMPGPKSVLIWDRLRNWLRTAKSLCPPEEAKEFRLDSLENQITALENECSGDYQWIGFCHNDLQYGNIMIDEETNVLTIIDYEYASFNPVAYDIANHFCEMAADYHSSKPHILDYSRYPDVDEQKRFVKTYLNISGEEPDAEVVENLLQSIEKHTLASHLVWGLWGIISDHVNDIDFDYKEYARQRFEQYWHKSAILTS

SEQ ID NO: 25023 - protein, 366 aa, Zea mays subsp. mays
  misc_feature (1)..(366): Ceres Seq. ID no. 12484005
MVAIENQNQSQAAVAVAAEAVPAPASRIPREARRLLHELAAAWADVADCRALEVVPLKGAMTNEVYQARWLTAGPAGQKEEPRAEREVRKVLVRIYGDGVDLFFDREDEVRTFECMSRHGQGPRLLGRFPNGRVEEFIHARTLSAADLRDPEISALVASKLREFHNLDMPGPKSVLIWDRLRNWLRTAKSLCPPEEAKEFRLDSLENQITALENECSGDYQWIGFCHNDLQYGNIMIDEETNVLTIIDYEYASFNPVAYDIANHFCEMAADYHSSKPHILDYSRYPDVDEQKRFVKTYLNISGEEPDAEVVENLLQSIEKHTLASHLVWGLWGIISDHVNDIDFDYKEYARQRFEQYWHKSAILTS

SEQ ID NO: 25024 - protein, 306 aa, Zea mays subsp. mays
  misc_feature (1)..(306): Ceres Seq. ID no. 12484006
MTNEVYQARWLTAGPAGQKEEPRAEREVRKVLVRIYGDGVDLFFDREDEVRTFECMSRHGQGPRLLGRFPNGRVEEFIHARTLSAADLRDPEISALVASKLREFHNLDMPGPKSVLIWDRLRNWLRTAKSLCPPEEAKEFRLDSLENQITALENECSGDYQWIGFCHNDLQYGNIMIDEETNVLTIIDYEYASFNPVAYDIANHFCEMAADYHSSKPHILDYSRYPDVDEQKRFVKTYLNISGEEPDAEVVENLLQSIEKHTLASHLVWGLWGIISDHVNDIDFDYKEYARQRFEQYWHKSAILTS

SEQ ID NO: 25025 - DNA, 819 bp, Zea mays subsp. mays
  misc_feature (1)..(819): Ceres Seq. ID no. 12484054
atgattcatgaatcgctcgtgtgctcagccacgctcacgtctcccgggcacgtctgcggcagcaccactccacacccacactccacccatcggctgccatggcgaccagggcggcggcggcagccacgctcacggcggctacgtcctctcttcttaggcgctctacctcgctgcggccgcagggactccgggtcccccaccgcgtgcctccccaaaggtttgtgcgccatattgcttcatcatcaaacgaggaagctgctgccagagcagccgccgccactgctgacgccggaggaccaaccattttcgacaagatcattgcgaaggaaatcccttcgagcatcgtatatgaagatgaaaatgtgctggcatttagagatattaatccacaagcccctgtgcacgttctagtcatcccaaaagcgagagatgggctaaccggattagacaaggctgagccaaggcatacagaaatcctgggccggcttctttacgcagcgaaagtagtggcagagaaggaaggtgtagcgagtgggtaccgtgttgtcatcaacaatggagctgaaggatgccaatctgtctatcatctgcacctgcatgtacttggtggaaggcagatgaagtggccccctggttaaaattactaagggtgacatgtttgatttcttgtacccctctctctgtgagttgagtttgctgcttgtatgactgttgttgcaaagggagaaagagtggttggtgtactagtatctgcccctgtgatgatggcccctttgagcactcatctctggaattactgagcttatgcagcattttgct

SEQ ID NO: 25026 - protein, 179 aa, Zea mays subsp. mays
  misc_feature (1)..(179): Ceres Seq. ID no. 12484055
MATRAAAAATLTAATSSLLRRSTSLRPQGLRVPHRVPPQRFVRHIASSSNEEAAARAAAATADAGGPTIFDKIIAKEIPSSIVYEDENVLAFRDINPQAPVHVLVIPKARDGLTGLDKAEPRHTEILGRLLYAAKVVAEKEGVASGYRVVINNGAEGCQSVYHLHLHVLGGRQMKWPPG

SEQ ID NO: 25027 - protein, 136 aa, Zea mays subsp. mays
  misc_feature (1)..(136): Ceres Seq. ID no. 12484056
MIHESLVCSATLTSPGHVCGSTTPHPHSTHRLPWRPGRRRQPRSRRLRPLFLGALPRCGRRDSGSPTACLPKGLCAILLHHQTRKLLPEQPPPLLTPEDQPFSTRSLRRKSLRASYMKMKMCWHLEILIHKPLCTF

SEQ ID NO: 25028 - DNA, 1802 bp, Zea mays subsp. mays
  misc_feature (1)..(1802): Ceres Seq. ID no. 12484069
aacaacactcgcctgccctgccctctcatctcgcttcgcttccattccatcgcgccagtcgccagactcaccagggagacagggagagtagggggaaatatcaattagaaacaacgaggaactagcaaagaaagaaggataactcccataagaaaaatcgccaaatacgccattcatcttctccgcccgggtttcagaacgtgcggcagtttagccaggatggtggcgatcgagaaccagaaccagagccaggccgcggtggcggtggcggcggaggcggtgccggcgccggcgtcgcggatccccagggaggcgcggcgcctgctgcacgagctggcggcggcgtgggcggacgtggccgactgccgcgcgctggaggtcgtgccgctcaagggggccatgaccaacgaggtctaccaggcgcgctggctcactgcaggccctgccggccagaaggaggagcccagggcggagagggaggtgaggaaggtgctcgtgcggatttacggcgacggcgtcgacctcttcttcgaccgcgaggacgaggtgcgcaccttcgagtgcatgtcacgccatggccagggtccccgcctcctcggccgcttcccgaacggccgcgtcgaggagttcatccacgcaaggacattgtcagctgccgaccttcgcgatcctgaaatttcagctctggtggcttccaagctgagggagttccacaaccttgacatgcctggtcccaaatctgtgctcatttgggacagacttaggaactggctcagaactgccaagagcttgtgtccacctgaagaagccaaggaatttcggttggacagtctggagaaccagattactgcattggagaacgagtgttcaggtgattaccagtggattggtttctgtcacaatgatcttcagtatggcaatatcatgattgatgaagagaccaacgtgctgaccatcattgattatgagtatgcaagcttcaacccagttgcatatgacattgctaaccatttctgtgagatggcagcagactatcattcatcaaagcctcatatactggactacagcagatatccagatgttgatgagcagaagcgttttgttaagacctacctgaacatttctggtgaggaacctgatgcggaagttgtagagaacctgctccaaagcattgagaagcacacgctctccagccatctagtatggggcctctggggaataatttcggaccatgttaacgacattgacttcgactacaaggagtatgcgaggcagagattcgagcagtactggcacaagtctgcgatcttaacatcttgaacatgtgtataaacacccgtacgtggtctcaggaactccctgagggcctgtggctgcacacacgaaattgtgcagtgccactgacacatagataagctgtgaaagaagaaatactgacgacgacgacgaataatcccgttttgggctcgggaggttatttctccgcaactcgatgagcttcaggcttcagcttcaggaaggaaggaaggagctatggggatttggctgcccgcttatgctgtaccaatgcaattaaaagataaagatccggtccggtgttgcgtgtgctatgtttagttttggctagcaccgccgagagccgtggtcctgttgtggtgtttctagtttctgtatgcttgatgttgttagtgtgctggataatttggttttgtgcttggggagtccttagctttgggacaacgcatacattgtatactgggtagatgtataaacataaaacagctatgggaatttggttctct

SEQ ID NO: 25029 - protein, 366 aa, Zea mays subsp. mays
  misc_feature (1)..(366): Ceres Seq. ID no. 12484070
MVAIENQNQSQAAVAVAAEAVPAPASRIPREARRLLHELAAAWADVADCRALEVVPLKGAMTNEVYQARWLTAGPAGQKEEPRAEREVRKVLVRIYGDGVDLFFDREDEVRTFECMSRHGQGPRLLGRFPNGRVEEFIHARTLSAADLRDPEISALVASKLREFHNLDMPGPKSVLIWDRLRNWLRTAKSLCPPEEAKEFRLDSLENQITALENECSGDYQWIGFCHNDLQYGNIMIDEETNVLTIIDYEYASFNPVAYDIANHFCEMAADYHSSKPHILDYSRYPDVDEQKRFVKTYLNISGEEPDAEVVENLLQSIEKHTLSSHLVWGLWGIISDHVNDIDFDYKEYARQRFEQYWHKSAILTS

SEQ ID NO: 25030 - protein, 306 aa, Zea mays subsp. mays
  misc_feature (1)..(306): Ceres Seq. ID no. 12484071
MTNEVYQARWLTAGPAGQKEEPRAEREVRKVLVRIYGDGVDLFFDREDEVRTFECMSRHGQGPRLLGRFPNGRVEEFIHARTLSAADLRDPEISALVASKLREFHNLDMPGPKSVLIWDRLRNWLRTAKSLCPPEEAKEFRLDSLENQITALENECSGDYQWIGFCHNDLQYGNIMIDEETNVLTIIDYEYASFNPVAYDIANHFCEMAADYHSSKPHILDYSRYPDVDEQKRFVKTYLNISGEEPDAEVVENLLQSIEKHTLSSHLVWGLWGIISDHVNDIDFDYKEYARQRFEQYWHKSAILTS

SEQ ID NO: 25031 - protein, 251 aa, Zea mays subsp. mays
  misc_feature (1)..(251): Ceres Seq. ID no. 12484072
MSRHGQGPRLLGRFPNGRVEEFIHARTLSAADLRDPEISALVASKLREFHNLDMPGPKSVLIWDRLRNWLRTAKSLCPPEEAKEFRLDSLENQITALENECSGDYQWIGFCHNDLQYGNIMIDEETNVLTIIDYEYASFNPVAYDIANHFCEMAADYHSSKPHILDYSRYPDVDEQKRFVKTYLNISGEEPDAEVVENLLQSIEKHTLSSHLVWGLWGIISDHVNDIDFDYKEYARQRFEQYWHKSAILTS

SEQ ID NO: 25032 - DNA, 1051 bp, Zea mays subsp. mays
  misc_feature (1)..(1051): Ceres Seq. ID no. 12544505
caatagccattcaatcattcaagcgaagcagccaccactctctccactgtgactccgtgacctgcctgccctgctgcacaagcacagcacacacaccccgcacaccgcaccagctcagctcagctcaccaagacaatcaatcatggctcgtccgcgcagtgtcgctgccgctgcccccctcctcctgctgctcgccgccgccgcagcggggctcgtgtccgccgcgtcgccggcagccagcgacttcgtccgcaagtcgtgccgcacgacgcagtacccttcggtgtgcgagcagagcctggcgtcgtacggcgggtcgccgccgccacggagcccgcgggagctggcgcgcgccgcgctgtcggtgagcgcggaccgcgcgcgcgccgcgtcgacgtacgtgggccgcctgtgcggcgccagcaacggcaaaggcgcgaagaaggggtcgggatcggcgtcggcgtcggcaggtcccgtgcgcgactgcctggacaatctggcggacagcgtgggccacctccgcgacgcggcgcaggagatgggcggcgccgggatgggccgcgcggggacgccggcgttcaggtggcacctcagcaacgtgcagacctggtgcagcgccgcgctcaccgacgaggacacctgcctcgacggcctctcgtcccgcgccgtcgacgccggcacgcgcgccgccatccggggcaaggtcgtcgaggtcgcgcaggtcaccagcaacgcgctcgcgctcgtcaataaggtcgggcctgggtactaacacgggaaggggacccaagatccaggcccaggcccaggcccaggcccagcccagataccacacccgctactagtatagtactaggcgcctccacctccacggcgttgggtgtttctcgtccgttaatagctcggtttgctttgcttgtgtttgtgtaagatatacattagttaagggcaataagcttgtactattatgagtggcggccgaggagtacagtacgttctcctctgtccgatcatgccaccatattaatgtgggagatatcttttgtcc

SEQ ID NO: 25033 - protein, 210 aa, Zea mays subsp. mays
  misc_feature (1)..(210): Ceres Seq. ID no. 12544506
MARPRSVAAAAPLLLLLAAAAAGLVSAASPAASDFVRKSCRTTQYPSVCEQSLASYGGSPPPRSPRELARAALSVSADRARAASTYVGRLCGASNGKGAKKGSGSASASAGPVRDCLDNLADSVGHLRDAAQEMGGAGMGRAGTPAFRWHLSNVQTWCSAALTDEDTCLDGLSSRAVDAGTRAAIRGKVVEVAQVTSNALALVNKVGPGY

SEQ ID NO: 25034 - protein, 121 aa, Zea mays subsp. mays
  misc_feature (1)..(121): Ceres Seq. ID no. 12544507
IAIQSFKRSSHHSLHCDSVTCLPCCTSTAHTPRTPHQLSSAHQDNQSWLVRAVSLPLPPSSCCSPPPQRGSCPPRRRQPATSSASRAARRSTLRCASRAWRRTAGRRRHGARGSWRAPRCR

SEQ ID NO: 25035 - DNA, 857 bp, Zea mays subsp. mays
  misc_feature (1)..(857): Ceres Seq. ID no. 12544715
aaacaattccaggagctacagtcacacaaccaaagcaactcggccagcgcgcgggccgggtcgcatgggcgacgccggcgacaagtgtgcgctgcggctggccgccaccgcgaggaagtggctggaggacgtccgcgtcgaccgcgaaggccgcgtccaccccgccgtagccagcggggggcaggcgctcacctggctcgcgactgccggcgcccgcgtctcgctggccgagcccggccgcgtcgtctgctcgctccgcgtgggcgccccgctcaccgacgcggaggggaggtggcacgccggggccatcgcggtggcggcggacaacgtgtgcgcggcggcgggtcttcacggctctgggcgcggacgtgctcaccgtccagtacagcctgtcctacttctcgcccgcccatctcgacgtgcgtgcgatgcgaggaggtggagatggaggggcgagtggtgggccggaaggcggcgctggcggccgcgacggtggaggtgcggaagaaagagtccggcgagctggtggcgatctgcaggcagtggatggcacctctctcgacaacaaaggtcagcacaagcacgagcagcaagctctgaagaaatgcagaacgtctctcgccaacacacacaacggttgctgcactcctccggcaggggcggcacggcaacaccactggttgttggtagagagagaatagctgacggtgcagaggatgttgaggcgccgaggcggcgccgcgacggcttgtactctcgagttagggaatcacttctgtgccgccggcgaggcttgttcagcctgagccttctcctgtttgttaaacgcaaacatcaaatggagaagaaattcatcc

SEQ ID NO: 25036 - protein, 285 aa, Zea mays subsp. mays
  misc_feature (1)..(285): Ceres Seq. ID no. 12544716
NNSRSYSHTTKATRPARGPGRMGDAGDKCALRLAATARKWLEDVRVDREGRVHPAVASGGQALTWLATAGARVSLAEPGRVVCSLRVGAPLTDAEGRWHAGAIAVAADNVCAAAGLHGSGRGRAHRPVQPVLLLARPSRRACDARRWRWRGEWWAGRRRWRPRRWRCGRKSPASWWRSAGSGWHLSRQQRSAQARAASSEEMQNVSRQHTQRLLHSSGRGGTATPLVVGRERIADGAEDVEAPRRRRDGLYSRVRESLLCRRRGLFSLSLLLFVKRKHQMEKKFI

SEQ ID NO: 25037 - protein, 264 aa, Zea mays subsp. mays
  misc_feature (1)..(264): Ceres Seq. ID no. 12544717
MGDAGDKCALRLAATARKWLEDVRVDREGRVHPAVASGGQALTWLATAGARVSLAEPGRVVCSLRVGAPLTDAEGRWHAGAIAVAADNVCAAAGLHGSGRGRAHRPVQPVLLLARPSRRACDARRWRWRGEWWAGRRRWRPRRWRCGRKSPASWWRSAGSGWHLSRQQRSAQARAASSEEMQNVSRQHTQRLLHSSGRGGTATPLVVGRERIADGAEDVEAPRRRRDGLYSRVRESLLCRRRGLFSLSLLLFVKRKHQMEKKFI

SEQ ID NO: 25038 - protein, 199 aa, Zea mays subsp. mays
  misc_feature (1)..(199): Ceres Seq. ID no. 12544718
KQFQELQSHNQSNSASARAGSHGRRRRQVCAAAGRHREEVAGGRPRRPRRPRPPRRSQRGAGAHLARDCRRPRLAGRARPRRLLAPRGRPAHRRGGEVARRGHRGGGGQRVRGGGSSRLWARTCSPSSTACPTSRPPISTCVRCEEVEMEGRVVGRKAALAAATVEVRKKESGELVAICRQWMAPLSTTKVSTSTSSKL

SEQ ID NO: 25039 - DNA, 1675 bp, Zea mays subsp. mays
  misc_feature (1)..(1675): Ceres Seq. ID no. 12545410
gcacgagaccattacctagaacatcctaatcgaaaaatccccgccccgcgcaccgcgagctagctagctactgacacccggcgccggcgccgagtacaatacaaggaaagcagcatggtgttcgagcagcaacaggaggaggcggtgttgccgggcgcggtgcacgggcaccggctctccacggtggtgccgagctccgtgacgggggaggtggactacgcgctggcggacgcggacctggccttcaagctgcactacctgcgcggggtgtactactaccggtccggggacggcctcgccaccaaggtgctcaaggaccccatgttcccgtggctggacgaccacttccccgtcgccggccgcgtccgccgcgccgaggcggagggggacggcgcgcggccctacatcaagtgcaacgactgcggcgtgcgcatcgtggaggccaggtgcgaccgcgacatggccgagtggatccgcgacggcggcgcgcccggcaggatcaggcagctctgctacgacaaggtgctcggccccgagctcttcttctcgccgctgctctacgtccagatcacaaacttcaaatgcggtgggctggcgctggggttcagctgggcgcacctcatcggcgacatcccgtcggccgccacctgcttcaacaagtgggcgcagatcctcagcggcaagaagccggaagccaccgtcctcaccccgccgaaccagccgctgcagggccagtcccccgcggcgccgcgctccgtcaagcaggtcgggcccatggaggacctctggctggtccccgcgggccgcgacatggcgtgctactccttccacgtcagcgacgcggtgctcaagaagctccaccagcagcagaatgggcgccaggacgcggccgctggcaccttcgagctcgtgtcggcgctggtgtggcaggcggtggccaagatcaggggcgacgtggacaccgtgaccgtggtcagggccgacgctgccgcgcggagcggcaagtccctggccaacgagatgaaggtcgggtacgtggagtcggcggggtcgtcgccggcgaagacggacgtcgcggagctggcggcgctgctggccaagaacgtggtcgacgagaccgccgcggtggcggcgttccagggggacgtgctcgtgtacggcggcgccaacctaacgctcgtggacatggagcaggtggacctgtacgggctggagatcaaggggcagcgcccggtccacgtggagtacggcatggacggcgtcggcgacgagggcgcggtgctggtgcagcccgacgccgacgggcgcggccgcctcgtcacggcggttttgcccggcgacgagatcgacagcctccgcgcagcgctcggtagcgcgctgcaggtcgcctgaaaactctagtacgtatcataatactacgctgctgcctacgtgctcgttgcatcgttcggtttcgcgatatcagagtaccacctcttgaagaaagtgtagtagcgtaatgaggcgtgactagtgatgggatgtattgtattgcaggatgttgcgcaaatactgtggtcgatttgcgatgtttgttctgtatcgcatgatgtttccttaataagctgctcgaatagatcatgcatgctcaatgtaccaatatttacactggagactagacaaaaacaatcgtttg

SEQ ID NO: 25040 - protein, 425 aa, Zea mays subsp. mays
  misc_feature (1)..(425): Ceres Seq. ID no. 12545411
MVFEQQQEEAVLPGAVHGHRLSTVVPSSVTGEVDYALADADLAFKLHYLRGVYYYRSGDGLATKVLKDPMFPWLDDHFPVAGRVRRAEAEGDGARPYIKCNDCGVRIVEARCDRDMAEWIRDGGAPGRIRQLCYDKVLGPELFFSPLLYVQITNFKCGGLALGFSWAHLIGDIPSAATCFNKWAQILSGKKPEATVLTPPNQPLQGQSPAAPRSVKQVGPMEDLWLVPAGRDMACYSFHVSDAVLKKLHQQQNGRQDAAAGTFELVSALVWQAVAKIRGDVDTVTVVRADAAARSGKSLANEMKVGYVESAGSSPAKTDVAELAALLAKNVVDETAAVAAFQGDVLVYGGANLTLVDMEQVDLYGLEIKGQRPVHVEYGMDGVGDEGAVLVQPDADGRGRLVTAVLPGDEIDSLRAALGSALQVA

SEQ ID NO: 25041 - protein, 356 aa, Zea mays subsp. mays
  misc_feature (1)..(356): Ceres Seq. ID no. 12545412
MFPWLDDHFPVAGRVRRAEAEGDGARPYIKCNDCGVRIVEARCDRDMAEWIRDGGAPGRIRQLCYDKVLGPELFFSPLLYVQITNFKCGGLALGFSWAHLIGDIPSAATCFNKWAQILSGKKPEATVLTPPNQPLQGQSPAAPRSVKQVGPMEDLWLVPAGRDMACYSFHVSDAVLKKLHQQQNGRQDAAAGTFELVSALVWQAVAKIRGDVDTVTVVRADAAARSGKSLANEMKVGYVESAGSSPAKTDVAELAALLAKNVVDETAAVAAFQGDVLVYGGANLTLVDMEQVDLYGLEIKGQRPVHVEYGMDGVGDEGAVLVQPDADGRGRLVTAVLPGDEIDSLRAALGSALQVA

SEQ ID NO: 25042 - protein, 310 aa, Zea mays subsp. mays
  misc_feature (1)..(310): Ceres Seq. ID no. 12545413
MAEWIRDGGAPGRIRQLCYDKVLGPELFFSPLLYVQITNFKCGGLALGFSWAHLIGDIPSAATCFNKWAQILSGKKPEATVLTPPNQPLQGQSPAAPRSVKQVGPMEDLWLVPAGRDMACYSFHVSDAVLKKLHQQQNGRQDAAAGTFELVSALVWQAVAKIRGDVDTVTVVRADAAARSGKSLANEMKVGYVESAGSSPAKTDVAELAALLAKNVVDETAAVAAFQGDVLVYGGANLTLVDMEQVDLYGLEIKGQRPVHVEYGMDGVGDEGAVLVQPDADGRGRLVTAVLPGDEIDSLRAALGSALQVA

SEQ ID NO: 25043 - DNA, 444 bp, Zea mays subsp. mays
  misc_feature (1)..(444): Ceres Seq. ID no. 12545648
aaaaccactcggtccgctcccagcgtcccttcgcccacagccagcggcgaactcgatcgagcaggatggggtttatcggcgcgcacggcgtggagacgctgaagcggtataggtacagcggagaggaccgctcggtggtggccaagtacgtgctgcagcccttctggagccgatgcgtcactctcttcccgctctggatgccaccaaacatgatcacacttacaggattttcgtttctagtactatcagcgctgcttggctatatatgttcgcctcaccttgacactgctccccctaggtgggtccatcttgcccatggattacttctcttcttgtaccagacttttgatgctgttgatggtaaacaagcaaggcgtactagctcatcgagtcctcttggagaactttttgatcatggatgtgatgcacttgcgtgtgcttttg

SEQ ID NO: 25044 - protein, 147 aa, Zea mays subsp. mays
  misc_feature (1)..(147): Ceres Seq. ID no. 13565141
NHSVRSQRPFAHSQRRTRSSRMGFIGAHGVETLKRYRYSGEDRSVVAKYVLQPFWSRCVTLFPLWMPPNMITLTGFSFLVLSALLGYICSPHLDTAPPRWVHLAHGLLLFLYQTFDAVDGKQARRTSSSSPLGELFDHGCDALACAF

SEQ ID NO: 25045 - protein, 126 aa, Zea mays subsp. mays
  misc_feature (1)..(126): Ceres Seq. ID no. 13565142
MGFIGAHGVETLKRYRYSGEDRSVVAKYVLQPFWSRCVTLFPLWMPPNMITLTGFSFLVLSALLGYICSPHLDTAPPRWVHLAHGLLLFLYQTFDAVDGKQARRTSSSSPLGELFDHGCDALACAF

SEQ ID NO: 25046 - protein, 82 aa, Zea mays subsp. mays
  misc_feature (1)..(82): Ceres Seq. ID no. 13565143
MPPNMITLTGFSFLVLSALLGYICSPHLDTAPPRWVHLAHGLLLFLYQTFDAVDGKQARRTSSSSPLGELFDHGCDALACAF

SEQ ID NO: 25047 - DNA, 769 bp, Zea mays subsp. mays
  misc_feature (1)..(769): Ceres Seq. ID no. 12545911
acacatcattgagcgcaacgcggtcgtgattgcgagtgaatccgtggcgtccaactcccaagcccctaccggcaaccctagcgaggcgatggggaaggcggaggcgaggtcaagggggcgcggcggcggcggcggcggcggcggaggaggaggaggcggaggcgccagcggcaatccggggaagatcttcgtcggagggctcccgcgggacaccacggatgctacatttgtgaggcattttggacagtatggagaaatagttgattcggtgataatgaaggataggcacacatctcagccacggggttttggcttcattacatactccgaccctgctgttgttgataaagtgatagaggacaatcatgttatcaatggaaagcaagttgaaattaagagaaccataccaaaaggttcggtgcaatctagctctaaggatttcaagactaaaaagatatttgttggtgggcttccgtcaacactaacagaagacgaattcaagagtttctttgcaanatatgggactgtggtggaccaccagattatgtttgatcatgaaaccaaacgttcccgaggctttggatttatagtttttgcttctgagcaagttgtagatgatttgttagcaaatggaaatatggttgaccttgctggttcaaaggtgagtctgaagttcattatagaaatgacaccaatggttgtctcctccattgtggatctatggtgtaaaatatgtaaagtagtgttttgcattcttctattccaagtc

SEQ ID NO: 25048 - protein, 256 aa, Zea mays subsp. mays
  misc_feature (1)..(256): Ceres Seq. ID no. 12545912
  misc_feature (172)..(172): Xaa is any aa, unknown or other
HIIERNAVVIASESVASNSQAPTGNPSEAMGKAEARSRGRGGGGGGGGGGGGGGASGNPGKIFVGGLPRDTTDATFVRHFGQYGEIVDSVIMKDRHTSQPRGFGFITYSDPAVVDKVIEDNHVINGKQVEIKRTIPKGSVQSSSKDFKTKKIFVGGLPSTLTEDEFKSFFAXYGTVVDHQIMFDHETKRSRGFGFIVFASEQVVDDLLANGNMVDLAGSKVSLKFIIEMTPMVVSSIVDLWCKICKVVFCILLFQV

SEQ ID NO: 25049 - protein, 227 aa, Zea mays subsp. mays
  misc_feature (1)..(227): Ceres Seq. ID no. 12545913
  misc_feature (143)..(143): Xaa is any aa, unknown or other
MGKAEARSRGRGGGGGGGGGGGGGGASGNPGKIFVGGLPRDTTDATFVRHFGQYGEIVDSVIMKDRHTSQPRGFGFITYSDPAVVDKVIEDNHVINGKQVEIKRTIPKGSVQSSSKDFKTKKIFVGGLPSTLTEDEFKSFFAXYGTVVDHQIMFDHETKRSRGFGFIVFASEQVVDDLLANGNMVDLAGSKVSLKFIIEMTPMVVSSIVDLWCKICKVVFCILLFQV

SEQ ID NO: 25050 - protein, 165 aa, Zea mays subsp. mays
  misc_feature (1)..(165): Ceres Seq. ID no. 12545914
  misc_feature (81)..(81): Xaa is any aa, unknown or other
MKDRHTSQPRGFGFITYSDPAVVDKVIEDNHVINGKQVEIKRTIPKGSVQSSSKDFKTKKIFVGGLPSTLTEDEFKSFFAXYGTVVDHQIMFDHETKRSRGFGFIVFASEQVVDDLLANGNMVDLAGSKVSLKFIIEMTPMVVSSIVDLWCKICKVVFCILLFQV

SEQ ID NO: 25051 - DNA, 1657 bp, Zea mays subsp. mays
  misc_feature (1)..(1657): Ceres Seq. ID no. 12548275
cttctagataagcagcgcaaacccctactctctcgcctctccctatccatccccaaataatccccacctcccgctcatcctccgcctccgccgcccgccatggcctccctcacctcggcctccacctcactcctcttcccgcaggcctcctcatccaggagccgcgtccggctctccacctccctgggcttctccgcgcagccggcgcggctgcggagccgggcggcggcaggagggcagcggcgcgggagcctgctggtggtgcgcgcggcgaggggaaagttcgagcgcaccaagccgcacgtaaacatcggcaccatcggtcacgtcgaccacggcaagaccaccctcaccgccgcgctcaccatggtgctcgcctccgtcggcggcagcgcgcccaagaagtacgacgagatcgatgccgcccccgaggagcgtgcccgcggtatcaccatcaacaccgccaccgtcgagtacgagaccgagacccgccactacgcgcacgtcgactgccccggccacgccgactatgtcaagaacatgatcaccggcgctgcgcagatggacggcgccatcctcgtcgtctctggcgccgacggtcccatgccgcagaccaaagagcacattctcctcgccaagcaggtcggcgttcccaagatcgttgtcttcctcaacaagaaggacatggtcgacgacgaggagctgctcgagctcgtcgagctggaagtccgcgagctgctcagcaactatgagtacgacggcgacgaggtgccaatcgtcgctggctccgccctcaaggcgctcgaggccctcatgggcaaccctaccctgaagcgcggcgacgatgagtgggtggactgcatcttcaagctggttgattctgtggattcctacattccagtgccacagcggcagaccgacctcccgttcttactcgctgttgaagatgtcttctccatcaccggtcgtggtacagttgccactggccgtatcgagcgtggcaccgtcaagattggtgacacagtcgatatcgttggaatccgggacacccggaactgcaccgtgactggcgttgagatgttccagaagaccatggacgatgccatggctggagacaatgtcggactgctgctccgtggtatgcagaaggatgacattgagagaggcatggtgctggcaaagcccggctctatcacaccgcacaccaagtttgaggctgttgtgtatgtgcttaagaaggaagagggtggccggcactcacctttcttccctggttaccgcccgcagttctacatgaggacaaccgatgtgacagggaatgtgactgtgattatgaatgacaaagatgaggaggcgaagatgtgcatgcctggtgaccgtatcaagatggttgttcagctcatccagcctgttgcttgtgagcagggtatgaggtttgctatccgtgagggtggtaagactgttggtgctggtgtcatcaacaaaatcattgagtaaactggatatatcacatccaccacgagaattttccttgtttactcaaagcgaaatgctctgtagttgttattatgtgttgagttttaggggttgttcatgtgaaattgtagtatgacactctttcgccaagtgaatttgcataatttatgacattcacggc

SEQ ID NO: 25052 - protein, 465 aa, Zea mays subsp. mays
  misc_feature (1)..(465): Ceres Seq. ID no. 12548276
MASLTSASTSLLFPQASSSRSRVRLSTSLGFSAQPARLRSRAAAGGQRRGSLLVVRAARGKFERTKPHVNIGTIGHVDHGKTTLTAALTMVLASVGGSAPKKYDEIDAAPEERARGITINTATVEYETETRHYAHVDCPGHADYVKNMITGAAQMDGAILVVSGADGPMPQTKEHILLAKQVGVPKIVVFLNKKDMVDDEELLELVELEVRELLSNYEYDGDEVPIVAGSALKALEALMGNPTLKRGDDEWVDCIFKLVDSVDSYIPVPQRQTDLPFLLAVEDVFSITGRGTVATGRIERGTVKIGDTVDIVGIRDTRNCTVTGVEMFQKTMDDAMAGDNVGLLLRGMQKDDIERGMVLAKPGSITPHTKFEAVVYVLKKEEGGRHSPFFPGYRPQFYMRTTDVTGNVTVIMNDKDEEAKMCMPGDRIKMVVQLIQPVACEQGMRFAIREGGKTVGAGVINKIIE

SEQ ID NO: 25053 - protein, 376 aa, Zea mays subsp. mays
  misc_feature (1)..(376): Ceres Seq. ID no. 12548277
MVLASVGGSAPKKYDEIDAAPEERARGITINTATVEYETETRHYAHVDCPGHADYVKNMITGAAQMDGAILVVSGADGPMPQTKEHILLAKQVGVPKIVVFLNKKDMVDDEELLELVELEVRELLSNYEYDGDEVPIVAGSALKALEALMGNPTLKRGDDEWVDCIFKLVDSVDSYIPVPQRQTDLPFLLAVEDVFSITGRGTVATGRIERGTVKIGDTVDIVGIRDTRNCTVTGVEMFQKTMDDAMAGDNVGLLLRGMQKDDIERGMVLAKPGSITPHTKFEAVVYVLKKEEGGRHSPFFPGYRPQFYMRTTDVTGNVTVIMNDKDEEAKMCMPGDRIKMVVQLIQPVACEQGMRFAIREGGKTVGAGVINKIIE

SEQ ID NO: 25054 - protein, 318 aa, Zea mays subsp. mays
  misc_feature (1)..(318): Ceres Seq. ID no. 12548278
MITGAAQMDGAILVVSGADGPMPQTKEHILLAKQVGVPKIVVFLNKKDMVDDEELLELVELEVRELLSNYEYDGDEVPIVAGSALKALEALMGNPTLKRGDDEWVDCIFKLVDSVDSYIPVPQRQTDLPFLLAVEDVFSITGRGTVATGRIERGTVKIGDTVDIVGIRDTRNCTVTGVEMFQKTMDDAMAGDNVGLLLRGMQKDDIERGMVLAKPGSITPHTKFEAVVYVLKKEEGGRHSPFFPGYRPQFYMRTTDVTGNVTVIMNDKDEEAKMCMPGDRIKMVVQLIQPVACEQGMRFAIREGGKTVGAGVINKIIE

SEQ ID NO: 25055 - DNA, 686 bp, Zea mays subsp. mays
  misc_feature (1)..(686): Ceres Seq. ID no. 12549504
atcgagacgctgggcacgttcgcgctctccgtcggggcggcggtcgggatggagttctgggcgcggtgggcgcaccgggcgctgtggcacgcctccctgtggcacatgcacgagtcgcaccaccggccgcgcgagggccccttcgagctcaacgacgtgttcgccatcgtcaacgccgcgccggccatctccctcctcgcctacggcttcttccaccgcggcatcgtgcccggcctctgcttcggcgcgggcctggggattacgctgttcggcatggcctacatgttcgtccacgacggcctggtccaccgccgctttccggtcggccccatcgccgacgtgccctacttccgccgagtggctgcttcgcacaagatacnccacatggacaagttcggcggcgtcccgtatgggctcttcctgggaccaaaggagctggaggaggttggtggcctggacgagcttgttagcagtccggtgagtgaagctactgatactgaagacgcaggagaagaaaagacgcgtccagttgtatgcgttgtccgaacaagcgtgttcatgggccagagtgtgccaaatgagttctagctttaggcgagtgggccaaatgagtgtgggctgcgtcccagggtagtataagtactatgagtctgtaataatcaggacaagaagaatttaggtaaagt

SEQ ID NO: 25056 - protein, 195 aa, Zea mays subsp. mays
  misc_feature (1)..(195): Ceres Seq. ID no. 12549505
  misc_feature (127)..(127): Xaa is any aa, unknown or other
IETLGTFALSVGAAVGMEFWARWAHRALWHASLWHMHESHHRPREGPFELNDVFAIVNAAPAISLLAYGFFHRGIVPGLCFGAGLGITLFGMAYMFVHDGLVHRRFPVGPIADVPYFRRVAASHKIXHMDKFGGVPYGLFLGPKELEEVGGLDELVSSPVSEATDTEDAGEEKTRPVVCVVRTSVFMGQSVPNEF

SEQ ID NO: 25057 - protein, 179 aa, Zea mays subsp. mays
  misc_feature (1)..(179): Ceres Seq. ID no. 12549506
  misc_feature (111)..(111): Xaa is any aa, unknown or other
MEFWARWAHRALWHASLWHMHESHHRPREGPFELNDVFAIVNAAPAISLLAYGFFHRGIVPGLCFGAGLGITLFGMAYMFVHDGLVHRRFPVGPIADVPYFRRVAASHKIXHMDKFGGVPYGLFLGPKELEEVGGLDELVSSPVSEATDTEDAGEEKTRPVVCVVRTSVFMGQSVPNEF

SEQ ID NO: 25058 - protein, 160 aa, Zea mays subsp. mays
  misc_feature (1)..(160): Ceres Seq. ID no. 12549507
  misc_feature (92)..(92): Xaa is any aa, unknown or other
MHESHHRPREGPFELNDVFAIVNAAPAISLLAYGFFHRGIVPGLCFGAGLGITLFGMAYMFVHDGLVHRRFPVGPIADVPYFRRVAASHKIXHMDKFGGVPYGLFLGPKELEEVGGLDELVSSPVSEATDTEDAGEEKTRPVVCVVRTSVFMGQSVPNEF

SEQ ID NO: 25059 - DNA, 712 bp, Zea mays subsp. mays
  misc_feature (1)..(712): Ceres Seq. ID no. 12550684
tagtcatcactagtcacgttcgtccaccagagacaacaatggccatggagacgtgcttcagagcgtgggcgctgcacgcccccgctggcagcaaggacaggctcctcgtcggcaacctggtgctgccgtcgaagcgggcgctcgcgccgctgtccgtgggccgcgtcgccacgcgccggccgcggcacgtctgccagtccaagaacgcagtggacgaagttgtggtggcggacgagaagaactgggacgggttggtgatggcgtgcgagacgccggtgctggtggagttctgggcgccgtggtgcgggccgtgccggatgatcgcgccggtgatcgacgagctggccaaggactacgccggcaagatcacgtgctgcaaggtgaacacggacgacagccccaacgtggcgtctacctacggcatccgcagcatccccaccgtgctcatcttcaagggcggcgagaagaaggagagcgtcatcggcgccgtcccgaagtccacgctcaccaccctcatcgacaagtacatcggtagttcatgagcatgccatgccatgccatgcatacatgcatcgacgactaaacacatatgtgtatctctagtagcctttgcatacgggatatgatcaattcaagcagccagccgtctgctactgctgtgttatatataccatacctccatgtcgaatccagagtacattaattagtttcc

SEQ ID NO: 25060 - protein, 179 aa, Zea mays subsp. mays
  misc_feature (1)..(179): Ceres Seq. ID no. 12550685
VITSHVRPPETTMAMETCFRAWALHAPAGSKDRLLVGNLVLPSKRALAPLSVGRVATRRPRHVCQSKNAVDEVVVADEKNWDGLVMACETPVLVEFWAPWCGPCRMIAPVIDELAKDYAGKITCCKVNTDDSPNVASTYGIRSIPTVLIFKGGEKKESVIGAVPKSTLTTLIDKYIGSS

SEQ ID NO: 25061 - protein, 167 aa, Zea mays subsp. mays
  misc_feature (1)..(167): Ceres Seq. ID no. 12550686
MAMETCFRAWALHAPAGSKDRLLVGNLVLPSKRALAPLSVGRVATRRPRHVCQSKNAVDEVVVADEKNWDGLVMACETPVLVEFWAPWCGPCRMIAPVIDELAKDYAGKITCCKVNTDDSPNVASTYGIRSIPTVLIFKGGEKKESVIGAVPKSTLTTLIDKYIGSS

SEQ ID NO: 25062 - protein, 165 aa, Zea mays subsp. mays
  misc_feature (1)..(165): Ceres Seq. ID no. 12550687
METCFRAWALHAPAGSKDRLLVGNLVLPSKRALAPLSVGRVATRRPRHVCQSKNAVDEVVVADEKNWDGLVMACETPVLVEFWAPWCGPCRMIAPVIDELAKDYAGKITCCKVNTDDSPNVASTYGIRSIPTVLIFKGGEKKESVIGAVPKSTLTTLIDKYIGSS

SEQ ID NO: 25063 - DNA, 2211 bp, Zea mays subsp. mays
  misc_feature (1)..(2211): Ceres Seq. ID no. 12550712
acacacaaaccgccgccgccgctaccttcaccactgcggactgcaccagctgcccgccgactactccgtttctcttcctagtacattgccgcgtcgaaggcgaggtcctcagcagcgccggcggactccgctcgcacgccatactcagcctactccgtcttcccctgtctagcagacaccctcttcccctctccactcccaatcttatcgtcgcctccctcgacgtcgctgctgcctccacttcaccatggcgcttcacgccccggtcctcgttctgaaggactcgctgaagcgggagtctggcgcgaaggttcaccaagccaacatccaggcggccaaggctgtcgctgacatcatacgcactacattgggtcccagatccatgctgaaaatgcttctggatgctagtggaggtattgtggttactaatgatggtaatgccattttgagggaaatagacattgcacaccctgctgccaagtctatgatcgaactaagtcgtacacaggatgaagaagttggtgatggcactacatctgtcattgttctagctggagagatgctacatgttgcacaggcattcatcgacaagaactaccatccaactgttatttgccgagcatataccaaagcgcttgatgatgctattgctgtacttgacaaaattgcaatggctgttgatgtgaatgatcgtggggcaatgctaggccttgtgaagagctccattggtacgaaattcactggccagtttggtgaccttattgctgaccttgctattgatgctactacaacagcaggtgttgaccttggtcagggtatgcgtgaagttgatatcaagaaatacattaaagttgaaaaggttcctggtggtcagttggaggattctagagtccttaaaggagttatgatcaataaggatgtcgtggctcctgggaaaatgaggagaaagatagtaaacccccgtatcatcctgttggactgccctgttgagtataagaaaggagaaaatcagaccaacgctgagttgatgaaggaagaagattggcaggttctgttagagatggaggaagaatacataaagaacctgtgcggtcaaattctaaaattcaagcctgatttagtcataactganaaagggctcagtgatctcgctatccattatttgagcaaggctggggttagtgcaatccgtagacttaggaaaactgacaacaacaggattgctaaagcttgtggagcagttatagtgaacaggcctgaggagctccaagaatctgatgttggaacaagagctggcctgttcgaggttaagaagataggtgatgagttcttttcctttattgttgactgtaaagatcccaaggcatgtactgttctgttgaggggagcaagcaaggatgtattgaatgaagttgagagaaacctgcaggatgccatgtccgttgcaaggaacattttgaaaaatccaaaactccttcctggaggtggcgctacagagctgactgtatcagcaacactgaagcaaaagagttcttcagttgaaggtgtggaaaagtggccctatgaagctgctgctctagcatttgaggcaattccaaggactttggcccaaaattgcggtttgaatgttattaggataatgacacaacttcaaggaaagcatgctaatggtgaaaatgcgtgggttggcattgatggaaggactggtgatattgtcgatatgaaagagcgaaagatctgggattcctacagtgttaaagcacaaacgttcaagacagcaattgaggctgcttgcatgcttttgagaatcgatgacattgtcagcggtatcaagaagaagcaggctcctggagcctcagctcccaaagcaaccccaaattgaaactgagggcgatgctgacaatgagcagatgattccagagtagaggctgtggcgaacctgcactggcaaagttatttactagtgtcaaggtagcacttcgagcagagttcattttggtggttagccttagcttaaagatgcaccttgttttatatagtttgatgagtggtacgagggttttgggatccaggttttgagtgtggttgctgctcgttttgatttggactgatgaaaaagcagtgaaactagcctttatttatggctaactttgcctgttgtatgccgcaaatctactttttttcttggcaacgtctcgtttcgcacgatcc

SEQ ID NO: 25064 - protein, 544 aa, Zea mays subsp. mays
  misc_feature (1)..(544): Ceres Seq. ID no. 12550713
  misc_feature (295)..(295): Xaa is any aa, unknown or other
MALHAPVLVLKDSLKRESGAKVHQANIQAAKAVADIIRTTLGPRSMLKMLLDASGGIVVTNDGNAILREIDIAHPAAKSMIELSRTQDEEVGDGTTSVIVLAGEMLHVAQAFIDKNYHPTVICRAYTKALDDAIAVLDKIAMAVDVNDRGAMLGLVKSSIGTKFTGQFGDLIADLAIDATTTAGVDLGQGMREVDIKKYIKVEKVPGGQLEDSRVLKGVMINKDVVAPGKMRRKIVNPRIILLDCPVEYKKGENQTNAELMKEEDWQVLLEMEEEYIKNLCGQILKFKPDLVITXKGLSDLAIHYLSKAGVSAIRRLRKTDNNRIAKACGAVIVNRPEELQESDVGTRAGLFEVKKIGDEFFSFIVDCKDPKACTVLLRGASKDVLNEVERNLQDAMSVARNILKNPKLLPGGGATELTVSATLKQKSSSVEGVEKWPYEAAALAFEAIPRTLAQNCGLNVIRIMTQLQGKHANGENAWVGIDGRTGDIVDMKERKIWDSYSVKAQTFKTAIEAACMLLRIDDIVSGIKKKQAPGASAPKATPN

SEQ ID NO: 25065 - protein, 499 aa, Zea mays subsp. mays
  misc_feature (1)..(499): Ceres Seq. ID no. 12550714
  misc_feature (250)..(250): Xaa is any aa, unknown or other
MLKMLLDASGGIVVTNDGNAILREIDIAHPAAKSMIELSRTQDEEVGDGTTSVIVLAGEMLHVAQAFIDKNYHPTVICRAYTKALDDAIAVLDKIAMAVDVNDRGAMLGLVKSSIGTKFTGQFGDLIADLAIDATTTAGVDLGQGMREVDIKKYIKVEKVPGGQLEDSRVLKGVMINKDVVAPGKMRRKIVNPRIILLDCPVEYKKGENQTNAELMKEEDWQVLLEMEEEYIKNLCGQILKFKPDLVITXKGLSDLAIHYLSKAGVSAIRRLRKTDNNRIAKACGAVIVNRPEELQESDVGTRAGLFEVKKIGDEFFSFIVDCKDPKACTVLLRGASKDVLNEVERNLQDAMSVARNILKNPKLLPGGGATELTVSATLKQKSSSVEGVEKWPYEAAALAFEAIPRTLAQNCGLNVIRIMTQLQGKHANGENAWVGIDGRTGDIVDMKERKIWDSYSVKAQTFKTAIEAACMLLRIDDIVSGIKKKQAPGASAPKATPN

SEQ ID NO: 25066 - protein, 496 aa, Zea mays subsp. mays
  misc_feature (1)..(496): Ceres Seq. ID no. 12550715
  misc_feature (247)..(247): Xaa is any aa, unknown or other
MLLDASGGIVVTNDGNAILREIDIAHPAAKSMIELSRTQDEEVGDGTTSVIVLAGEMLHVAQAFIDKNYHPTVICRAYTKALDDAIAVLDKIAMAVDVNDRGAMLGLVKSSIGTKFTGQFGDLIADLAIDATTTAGVDLGQGMREVDIKKYIKVEKVPGGQLEDSRVLKGVMINKDVVAPGKMRRKIVNPRIILLDCPVEYKKGENQTNAELMKEEDWQVLLEMEEEYIKNLCGQILKFKPDLVITXKGLSDLAIHYLSKAGVSAIRRLRKTDNNRIAKACGAVIVNRPEELQESDVGTRAGLFEVKKIGDEFFSFIVDCKDPKACTVLLRGASKDVLNEVERNLQDAMSVARNILKNPKLLPGGGATELTVSATLKQKSSSVEGVEKWPYEAAALAFEAIPRTLAQNCGLNVIRIMTQLQGKHANGENAWVGIDGRTGDIVDMKERKIWDSYSVKAQTFKTAIEAACMLLRIDDIVSGIKKKQAPGASAPKATPN

SEQ ID NO: 25067 - DNA, 696 bp, Zea mays subsp. mays
  misc_feature (1)..(696): Ceres Seq. ID no. 12552737
gaagttgatcgactctcaccttgtgccttcctccactgctgcagagtcgaaggtgttttacctcaagatgaagggagattatcacaggtaccttgctgaatttaagactggtgctgagaggaaggaagctgcagagagtacaatgatagcttataaggcagctcaggatattgcgttggcagaactggcatctactcatcccataagacttggacttgcacttaacttctcagttttctattacgagattctgaactctccagacaaagcttgcaaccttgccaggcaggcgtttgatgaggctatttctcagttggatacgcttggcgaggattcatacaaagatagcaccttaatcatgcagctcctgagggacaacttaaccctatggtccgctgacagcacaacggaggacggcatcgaggagggcaatgaggcctcgaagggtgatgctggtgagggtcagtagtctggtaaaacctcgattgatggttcggcatgtttttgaagtccactgtgttggaaaccatgttctaatagaaggcgtctcccgctccatgcattccaagattctgtcctccccctccctcacccattttgtaggctggtagtggtcaaattagttggccctgggtccaattggactgatgtattgtttactgctattgaagtcattcgttctcgttttgctcttgc

SEQ ID NO: 25068 - protein, 155 aa, Zea mays subsp. mays
  misc_feature (1)..(155): Ceres Seq. ID no. 12552738
KLIDSHLVPSSTAAESKVFYLKMKGDYHRYLAEFKTGAERKEAAESTMIAYKAAQDIALAELASTHPIRLGLALNFSVFYYEILNSPDKACNLARQAFDEAISQLDTLGEDSYKDSTLIMQLLRDNLTLWSADSTTEDGIEEGNEASKGDAGEGQ

SEQ ID NO: 25069 - protein, 133 aa, Zea mays subsp. mays
  misc_feature (1)..(133): Ceres Seq. ID no. 12552739
MKGDYHRYLAEFKTGAERKEAAESTMIAYKAAQDIALAELASTHPIRLGLALNFSVFYYEILNSPDKACNLARQAFDEAISQLDTLGEDSYKDSTLIMQLLRDNLTLWSADSTTEDGIEEGNEASKGDAGEGQ

SEQ ID NO: 25070 - protein, 108 aa, Zea mays subsp. mays
  misc_feature (1)..(108): Ceres Seq. ID no. 12552740
MIAYKAAQDIALAELASTHPIRLGLALNFSVFYYEILNSPDKACNLARQAFDEAISQLDTLGEDSYKDSTLIMQLLRDNLTLWSADSTTEDGIEEGNEASKGDAGEGQ

SEQ ID NO: 25071 - DNA, 1472 bp, Zea mays subsp. mays
  misc_feature (1)..(1472): Ceres Seq. ID no. 12554648
aggatgaatcggaagagagaatcctaccaaacctagctaccaactcgatcgtcgtcatcacgctcgaccgcacaactgcaccgaggggggaggagacctaaaaactactacatcttttagctacacatctagctaaagatcgagaggggtaaataaggacgagcgggcgcgagctagaagagcagctgcaggtactaccatcatcgtcgtcgtcgtcgccaggatgaccgttgtcgacgccgtctcctccaccgatgccggcgccgccgccgccacggtaccggcggggaacgggcagaccgtgtgcgtcaccggcgcggccgggtacatcgcctcgtggttagtgaagctgctgctcgagaagggatacactgtgaagggcaccgtgaggaacccagatgacccgaagaacgcgcacctcaaggcgctggacggcgccgccgagcggctgatcctctgcaaggccgatctgctggactacgacgccatctgccgcgccgtgcagggctgccagggcgtcttccacaccgcctcccccgtcaccgacgacccggagcaaatggtggagccggcggtgcgcggcaccgagtacgtgatcaacgcggcggcggaggccggcacggtgcggcgggtggtgttcacgtcgtccatcggcgccgtgaccatggaccccaagcgcgggcccgacgtcgtggtcgacgagtcgtgctggagcgacctcgagttctgcgagaaaaccaggaactggtactgctacggcaaggcggtggcggagcaggcggcgtgggagacggcccggcggcggggcgtggacctggtggtggtgaaccccgtgctggtggtgggccccctgctgcaggcgacggtgaacgccagcatcgcgcacatcctcaagtacctggacggctcggcccgcaccttcgccaacgccgtgcaggcgtacgtggacgtgcgcgacgtggccgacgcgcacctccgcgtcttcgagagcccccgcgcgtccggccgccacctctgcgccgagcgcgtcctccaccgcgaggacgtcgtccgcatcctcgccaagctattccccgagtaccccgtcccagccaggtgctccgacgaggtgaatccgcgaaagcagccgtacaagttctccaaccagaagctccgggacctggggctgcagttccggccggtcagccagtcgctttacgacacggtgaagaacctccaggagaagggacacctgccggtgctcggagagcggacgacgacggaggccgccgacaaggatgcccccacggccgagatgcagcagggagggatcgccatccgtgcctgagagggcgatgccacacatgaacacaaagcaatgttcatactgctgccctgcacctgcaccttcccctgctgtgtaaacaggcctgtgtttgttctggctgatagtgatgtaccctaagacttgtaacgtcatgttcgttcttgtg

SEQ ID NO: 25072 - protein, 367 aa, Zea mays subsp. mays
  misc_feature (1)..(367): Ceres Seq. ID no. 12554649
MTVVDAVSSTDAGAAAATVPAGNGQTVCVTGAAGYIASWLVKLLLEKGYTVKGTVRNPDDPKNAHLKALDGAAERLILCKADLLDYDAICRAVQGCQGVFHTASPVTDDPEQMVEPAVRGTEYVINAAAEAGTVRRVVFTSSIGAVTMDPKRGPDVVVDESCWSDLEFCEKTRNWYCYGKAVAEQAAWETARRRGVDLVVVNPVLVVGPLLQATVNASIAHILKYLDGSARTFANAVQAYVDVRDVADAHLRVFESPRASGRHLCAERVLHREDVVRILAKLFPEYPVPARCSDEVNPRKQPYKFSNQKLRDLGLQFRPVSQSLYDTVKNLQEKGHLPVLGERTTTEAADKDAPTAEMQQGGIAIRA

SEQ ID NO: 25073 - protein, 255 aa, Zea mays subsp. mays
  misc_feature (1)..(255): Ceres Seq. ID no. 12554650
MVEPAVRGTEYVINAAAEAGTVRRVVFTSSIGAVTMDPKRGPDVVVDESCWSDLEFCEKTRNWYCYGKAVAEQAAWETARRRGVDLVVVNPVLVVGPLLQATVNASIAHILKYLDGSARTFANAVQAYVDVRDVADAHLRVFESPRASGRHLCAERVLHREDVVRILAKLFPEYPVPARCSDEVNPRKQPYKFSNQKLRDLGLQFRPVSQSLYDTVKNLQEKGHLPVLGERTTTEAADKDAPTAEMQQGGIAIRA

SEQ ID NO: 25074 - protein, 220 aa, Zea mays subsp. mays
  misc_feature (1)..(220): Ceres Seq. ID no. 12554651
MDPKRGPDVVVDESCWSDLEFCEKTRNWYCYGKAVAEQAAWETARRRGVDLVVVNPVLVVGPLLQATVNASIAHILKYLDGSARTFANAVQAYVDVRDVADAHLRVFESPRASGRHLCAERVLHREDVVRILAKLFPEYPVPARCSDEVNPRKQPYKFSNQKLRDLGLQFRPVSQSLYDTVKNLQEKGHLPVLGERTTTEAADKDAPTAEMQQGGIAIRA

SEQ ID NO: 25075 - DNA, 740 bp, Zea mays subsp. mays
  misc_feature (1)..(740): Ceres Seq. ID no. 12556307
aggtgcatcgccgcagcatccaagcgcatcgtcaccatcatcgacgacaccaacaaccgccccttggagtgcataatcaggagagtattccggagctcgcaggaccacgactgcatgcttctctgcccagttgacatgcctgtgcaggtcctcaagagcacaaatttcagtggctgggtagctgtcgatgacgaccaactcaagcaaatcattccatctgttgcctatgcccttgccagagtacatatgcactttgtagaaagcggattctgttatacagcaaggggtggcttctgctttcctgaagaggccattcaagagtttcatgattccggtgaaggtgtgccttttgaaggtgtagagatttgctgcttcaatttggatggtgcacactatatgatttatacaccagttgatcctcttctttttgtcgcaatcaaggataaggatggtgtgctacggcatcgctgaggatgatctgatggaagaccctgcagttctggatgcggtagatgaagagacagaaatttacagctctagtggaggaggaggaggcccttcttgaaacggtacttggtgaaaggtgatggatgccagggagtacttgtgcaggaagaggaagagagactcgtctgattgtagtagaatagaatggaatggaatgggagtgcatttgcaacttgtaagctggacaacgcagttgataagcaactgctgctgcttaatctttgctaagtgga

SEQ ID NO: 25076 - protein, 156 aa, Zea mays subsp. mays
  misc_feature (1)..(156): Ceres Seq. ID no. 12556308
RCIAAASKRIVTIIDDTNNRPLECIIRRVFRSSQDHDCMLLCPVDMPVQVLKSTNFSGWVAVDDDQLKQIIPSVAYALARVHMHFVESGFCYTARGGFCFPEEAIQEFHDSGEGVPFEGVEICCFNLDGAHYMIYTPVDPLLFVAIKDKDGVLRHR

SEQ ID NO: 25077 - protein, 118 aa, Zea mays subsp. mays
  misc_feature (1)..(118): Ceres Seq. ID no. 12556309
MLLCPVDMPVQVLKSTNFSGWVAVDDDQLKQIIPSVAYALARVHMHFVESGFCYTARGGFCFPEEAIQEFHDSGEGVPFEGVEICCFNLDGAHYMIYTPVDPLLFVAIKDKDGVLRHR

SEQ ID NO: 25078 - protein, 111 aa, Zea mays subsp. mays
  misc_feature (1)..(111): Ceres Seq. ID no. 12556310
MPVQVLKSTNFSGWVAVDDDQLKQIIPSVAYALARVHMHFVESGFCYTARGGFCFPEEAIQEFHDSGEGVPFEGVEICCFNLDGAHYMIYTPVDPLLFVAIKDKDGVLRHR

SEQ ID NO: 25079 - DNA, 686 bp, Zea mays subsp. mays
  misc_feature (1)..(686): Ceres Seq. ID no. 12556415
aaacacaggagatatagctgaaagcagtgagcaagtggggcattactggctagagctgggaaggcgatccaagtaccagttgcacatggtgatagccatactgtcatacatcctcttcgggctgctgccaccagtcatctacggactgtcattcaggacgagcgacaacagagagaacaaagtgctggtggtcgctgctgcatctctcctgtgcattgcgctgctcgcaatcgggaaggcacatgttaagaggcataggacatacctcacaaaccctcctctactacctgtccattggattcagcagctccggactgtcgtacgtcgcaggcgtcctcctcgcgaaggtcctagcacacttcggtatcattgatcagggtggtgcatcaagctcctgctcctccaggtctctcattccctgaagcagccgcctgggcttcctactgagactggagccctcatttagtagttttgatggttaaatggattatctcagcacacatctgcatggagacactatcttgcaattcacacagtttttatcacaagcccttggctctcagaattcgtctctcttttttcacagcacttggccatagtataattttcagaattngtctgtaccccaaccttgtcatcgtatttttgacaggaacatgttgtcaattacaatctccttttttcac

SEQ ID NO: 25080 - protein, 123 aa, Zea mays subsp. mays
  misc_feature (1)..(123): Ceres Seq. ID no. 12556416
NTGDIAESSEQVGHYWLELGRRSKYQLHMVIAILSYILFGLLPPVIYGLSFRTSDNRENKVLVVAAASLLCIALLAIGKAHVKRHRTYLTNPPLLPVHWIQQLRTVVRRRRPPREGPSTLRYH

SEQ ID NO: 25081 - protein, 95 aa, Zea mays subsp. mays
  misc_feature (1)..(95): Ceres Seq. ID no. 12556417
MVIAILSYILFGLLPPVIYGLSFRTSDNRENKVLVVAAASLLCIALLAIGKAHVKRHRTYLTNPPLLPVHWIQQLRTVVRRRRPPREGPSTLRYH

SEQ ID NO: 25082 - protein, 70 aa, Zea mays subsp. mays
  misc_feature (1)..(70): Ceres Seq. ID no. 12556418
  misc_feature (48)..(48): Xaa is any aa, unknown or other
MVKWIISAHICMETLSCNSHSFYHKPLALRIRLSFFTALGHSIIFRIXLYPNLVIVFLTGTCCQLQSPFF

SEQ ID NO: 25083 - DNA, 553 bp, Zea mays subsp. mays
  misc_feature (1)..(553): Ceres Seq. ID no. 12556468
aaacacaggagatatagctgaaagcagtgagcaagtggggcattactggctagagctgggaaggcgatccaagtaccagttgcacatggtgatagccatactgtcatacatcctcttcgggctgctgccaccagtcatctacggactgtcattcaggacgagcgacaacagagagaacaaagtgctggtggtcgctgctgcatctctcctgtgcattgcgctgctcgcaatcgggaaggcacatgttaagaggcataggacatacctcacaaccctcctctactacctgtccattggattcagcagctccggactgtcgtacgtcgcaggcgtcctcctcgcgaaggtcctagcacacttcggtatcattgatcagggtggtgcatcagctcctgctcctccaggtctctcattccctgaagcagccgtagggcttcaaactgagactggagccctcatttagtagttttgatggataaatggattatctcagcacacatctgcatggagacactatctgcaattcacacagtttttatcacagcccatggat

SEQ ID NO: 25084 - protein, 153 aa, Zea mays subsp. mays
  misc_feature (1)..(153): Ceres Seq. ID no. 12556469
NTGDIAESSEQVGHYWLELGRRSKYQLHMVIAILSYILFGLLPPVIYGLSFRTSDNRENKVLVVAAASLLCIALLAIGKAHVKRHRTYLTTLLYYLSIGFSSSGLSYVAGVLLAKVLAHFGIIDQGGASAPAPPGLSFPEAAVGLQTETGALI

SEQ ID NO: 25085 - protein, 125 aa, Zea mays subsp. mays
  misc_feature (1)..(125): Ceres Seq. ID no. 12556470
MVIAILSYILFGLLPPVIYGLSFRTSDNRENKVLVVAAASLLCIALLAIGKAHVKRHRTYLTTLLYYLSIGFSSSGLSYVAGVLLAKVLAHFGIIDQGGASAPAPPGLSFPEAAVGLQTETGALI

SEQ ID NO: 25086 - DNA, 1445 bp, Zea mays subsp. mays
  misc_feature (1)..(1445): Ceres Seq. ID no. 12556598
tgagatgcatggggtagccaatcgggtgtcgccgtgcgcgcgcgcgcgcgtctggcctcctccttccctttccttgctaaataaagcaagtagcagataggggaaagtctgctcgcaagttgcatccgccctgcgccaagaaaagccatcgttcttcccacaaacgcacacatagaagcatcattcccctctcggctagcttcctcctctctccctcctcttcgtcttcctctttccttctcccttgggaaacctgctgcctttgagctttcttcttcgagtgctcccaccagatctcctcctccttaccttctttggcacgttcggcggcgcgcgcggagatagatagatcccgccatcgtcgtcgccgtccttgcttccgatcggagggccacaaccacaacctctcgctccttagcgtgcgcgcgcgagccagggtcaagaagagagctagctataggccggagatcgatggggaggggaaagatcgtgatccgcaggatcgataactccacgagccggcaggtgaccttctccaagcgccggaacgggatcttcaagaaggccaaggagctcgccatcctctgcgatgcggaggtcggcctcgtcatcttctccagcaccggccgcctctacgagtactctagcaccagcatgaaatcagttatagatcggtacggcaaggccaaggaagagcagcaagtcgtcgcaaatcccaactcggagcttaagttttggcaaagggaggcagcaagcttgagacaacaactgcacaacttgcaagaaaattatcggcagttgacgggagatgatctttctgggctgaatgtcaaagaactgcagtccctggagaatcaattggaaacaagcctgcgtggtgtccgcgcaaagaaggaccatctcttgatagatgagattcacgatttgaatcgaaaggcaagtttatttcaccaagaaaatacagacttgtacaataagatcaacctgattcgccaagaaaatgatgagttacataaaaagatctatgagactgaaggaccaagtggagttaatcgggagtcaccgactccattcaactttgcagtagtagaaaccagagatgttccagtgcaacttgaactcagcacactgccacaacaaaataacattgagccatctactgctcctaagctaggattgcaattaattccatgaagaagagtaaaactgccgtcttatgatgctgaaggaaactatttattgtgaagagatgatactcagagaaagacatatttgtggcagggagatttgagatatgaacttataaatgtaatgcaaataattttcagactggaatggggtcgtggaattcagaggatgattgctttctagttgcatttgatgtttgatgagacttttctcatgtgaaacgtttattaaaacttcaaaatggtgcagatgttgct

SEQ ID NO: 25087 - protein, 240 aa, Zea mays subsp. mays
  misc_feature (1)..(240): Ceres Seq. ID no. 12556599
MGRGKIVIRRIDNSTSRQVTFSKRRNGIFKKAKELAILCDAEVGLVIFSSTGRLYEYSSTSMKSVIDRYGKAKEEQQVVANPNSELKFWQREAASLRQQLHNLQENYRQLTGDDLSGLNVKELQSLENQLETSLRGVRAKKDHLLIDEIHDLNRKASLFHQENTDLYNKINLIRQENDELHKKIYETEGPSGVNRESPTPFNFAVVETRDVPVQLELSTLPQQNNIEPSTAPKLGLQLIP

SEQ ID NO: 25088 - protein, 179 aa, Zea mays subsp. mays
  misc_feature (1)..(179): Ceres Seq. ID no. 12556600
MKSVIDRYGKAKEEQQVVANPNSELKFWQREAASLRQQLHNLQENYRQLTGDDLSGLNVKELQSLENQLETSLRGVRAKKDHLLIDEIHDLNRKASLFHQENTDLYNKINLIRQENDELHKKIYETEGPSGVNRESPTPFNFAVVETRDVPVQLELSTLPQQNNIEPSTAPKLGLQLIP

SEQ ID NO: 25089 - DNA, 1412 bp, Zea mays subsp. mays
  misc_feature (1)..(1412): Ceres Seq. ID no. 12556700
cgaaaaaaccatttcttcttcctttttctatatcgcgttacgtccctacccagcgatctaggccgccgcctctcctactgcatctccctcgctctcgtcgcctcgttcgcttcgcctccgccccgccccgccccgagcagagcgcagccctatccggagctgggatggcggacgcgaagcagccagcagcagcagcagcagccacagcaggcggcagcggcagccaccggcgtgtggaagacggtcaagcccttcgttaacggcggggcctctgggatgctcgcgacctgcgtcatccagcctatcgacatggtcaaggtgaggatccagttgggtgagggctctgctggtcaggtcacaaggaacatgcttgcaaatgagggtgtccgttctttctacaagggtttgtccgccggattgctgaggcaagcgacgtacacgactgctcgtcttggatcctttagggttctaactaacaaagcagttgaaaagaatgaagggaagccattgcctctatttcagaaagcttttattggtctgactgctggtgcaattggtgcttgtgttggtagtcctgctgatctggcactcattagaatgcaagccgattcgaccctgccagttgcacaacgacgcaactataagaatgctttccatgcactctaccgtatcagtggtgatgagggagtccttgcgctttggaagggtgcaggtccaactgtggtgagagctatggcactcaatatgggtatgcttgcttcctatgaccagagtgtcgagctatttagggacaaatttggcgcaggagaaatttctactgttgttggagccagcgctgtttctggattctttgcctcagcatgcagtttgccctttgactatgtgaagacacagattcagaagatgcaacctgatgcgaatggcaagtacccatacacagggtctttggactgtgctgtgaagaccttcaagagcggtggcccattcaagttctacactggtttcccggtgtactgcgtcaggattgcaccccatgtcatgatgacctggatattcttgaatcagatccagaagtttgagaagaagatcggcatataggattcccatgggacggatacagggttgacagttctatgctattactgcttgactctgtaataacattccagctgctttcgcaccatggtagttggttttggtagagacaagtctgttacaattttttaccttagctttccaattattgtgttgcaataatcgaattaattgttgctgggggatttttttggggggttgggagggtggcatgcttttgttggctgggatgtagccataaggagagggggatactgcctagttatgtcattgaatggaattggaccatattttatacagatttttaccttcagttc

SEQ ID NO: 25090 - protein, 365 aa, Zea mays subsp. mays
  misc_feature (1)..(365): Ceres Seq. ID no. 12556701
RKNHFFFLFLYRVTSLPSDLGRRLSYCISLALVASFASPPPRPAPSRAQPYPELGWRTRSSQQQQQQPQQAAAAATGVWKTVKPFVNGGASGMLATCVIQPIDMVKVRIQLGEGSAGQVTRNMLANEGVRSFYKGLSAGLLRQATYTTARLGSFRVLTNKAVEKNEGKPLPLFQKAFIGLTAGAIGACVGSPADLALIRMQADSTLPVAQRRNYKNAFHALYRISGDEGVLALWKGAGPTVVRAMALNMGMLASYDQSVELFRDKFGAGEISTVVGASAVSGFFASACSLPFDYVKTQIQKMQPDANGKYPYTGSLDCAVKTFKSGGPFKFYTGFPVYCVRIAPHVMMTWIFLNQIQKFEKKIGI

SEQ ID NO: 25091 - protein, 273 aa, Zea mays subsp. mays
  misc_feature (1)..(273): Ceres Seq. ID no. 12556702
MLATCVIQPIDMVKVRIQLGEGSAGQVTRNMLANEGVRSFYKGLSAGLLRQATYTTARLGSFRVLTNKAVEKNEGKPLPLFQKAFIGLTAGAIGACVGSPADLALIRMQADSTLPVAQRRNYKNAFHALYRISGDEGVLALWKGAGPTVVRAMALNMGMLASYDQSVELFRDKFGAGEISTVVGASAVSGFFASACSLPFDYVKTQIQKMQPDANGKYPYTGSLDCAVKTFKSGGPFKFYTGFPVYCVRIAPHVMMTWIFLNQIQKFEKKIGI

SEQ ID NO: 25092 - protein, 262 aa, Zea mays subsp. mays
  misc_feature (1)..(262): Ceres Seq. ID no. 12556703
MVKVRIQLGEGSAGQVTRNMLANEGVRSFYKGLSAGLLRQATYTTARLGSFRVLTNKAVEKNEGKPLPLFQKAFIGLTAGAIGACVGSPADLALIRMQADSTLPVAQRRNYKNAFHALYRISGDEGVLALWKGAGPTVVRAMALNMGMLASYDQSVELFRDKFGAGEISTVVGASAVSGFFASACSLPFDYVKTQIQKMQPDANGKYPYTGSLDCAVKTFKSGGPFKFYTGFPVYCVRIAPHVMMTWIFLNQIQKFEKKIGI

SEQ ID NO: 25093 - DNA, 1663 bp, Zea mays subsp. mays
  misc_feature (1)..(1663): Ceres Seq. ID no. 12556784
atcgctacccagaaccctagccccctccaaaaacccttgtggcatcgtcatctccattgtccactcgctgccccgcccgagcccccgcttgtttccgcggcctcgccatttgcgtggttgaagaagcgaaagatgctcggcgcctctaggcgatccctcagtgccgccgcccgcagccgcgtggctgccggcgtagcctccgccgtcaccgccgacgcctcagtgccggcccgccccataagtgtagccatcctttttgctttctttattgatggcggttagccatgttaggtgagcaatggagcccgtggggttcctcagcagcagaataggttgctctcagtgcttgtggcacccaagattgcaggaatgagcaatgttgtggccctcaagctgatggatggtgcccttattggtagacgctatgaatcgagtgcagcagcagttgattctacggaccagctagctgagaagcacgagtaccaggctgaggtcaacaggctcatggatttgattgtgcacagcttgtatagtaacaaggaagttttccttcgagaactggtcagcaatgctagtgatgcacttgataagttgcgttatctgagtgtcacggaccctgagcttctgaaggatggtccccaacttgacattcgcattcaatcagacaaggataatggagtaataacaattactgattctgggattggtatgacgaaacaagagcttattgattctcttgggactattgaaagcagtggaactgccaagttccttaaagcattgaaggagagtcaagaagcgggcatggacaacaacttgattggccaatttggtgttggtttctattccacatttcttgtttcagagaaggttgttgtgtcaacaaagagcccaaaatctgacaaacaatatgtttgggaaggacaagcagattctggttcttataccattagagaggaaaaagacccagagaagctaattcctaggggaactcgccttactctctatcttaagcatgatgataagggctttgctcaccctgagaggattcaaaaacttttaaagaattattctcagtttgtttcctttcccatttacacatggcaagagaaaggcttcacaaaagaggtcgaggttgatgaggatccagcggaagccaaaaaaggggatgatgatatcaaaactgagcctaagaaaaagaccaaaaccgttgttgagaagtattgggattgggagctttcaaatgagacacaacctatttggcttcgaaaccctaaagaggtttcaactgaggagtacaatgaattttacaagaaaaccttcaatgagtacttgaatcctttggcctcctcacacttcactacagagggtgaggtagaatttaggtcaattctttatgttcctgctacaaggaaggatgatataactgataataggaagaccaagaatatcagactatatgttaaacgtgtattcatatcggatgactttgatggagaattgttcccaagatatttgagctttgtgaagggtgttgttgactcaaatgaccttccgttgaatgtttctcgtgagattcttcaagaaagtcgaattgttcgtataatgagaaagaggctagtgcggaaagccttcgatatgatacttggcatttcttgcagtg

SEQ ID NO: 25094 - protein, 431 aa, Zea mays subsp. mays
  misc_feature (1)..(431): Ceres Seq. ID no. 12556785
MSNVVALKLMDGALIGRRYESSAAAVDSTDQLAEKHEYQAEVNRLMDLIVHSLYSNKEVFLRELVSNASDALDKLRYLSVTDPELLKDGPQLDIRIQSDKDNGVITITDSGIGMTKQELIDSLGTIESSGTAKFLKALKESQEAGMDNNLIGQFGVGFYSTFLVSEKVVVSTKSPKSDKQYVWEGQADSGSYTIREEKDPEKLIPRGTRLTLYLKHDDKGFAHPERIQKLLKNYSQFVSFPIYTWQEKGFTKEVEVDEDPAEAKKGDDDIKTEPKKKTKTVVEKYWDWELSNETQPIWLRNPKEVSTEEYNEFYKKTFNEYLNPLASSHFTTEGEVEFRSILYVPATRKDDITDNRKTKNIRLYVKRVFISDDFDGELFPRYLSFVKGVVDSNDLPLNVSREILQESRIVRIMRKRLVRKAFDMILGISCS

SEQ ID NO: 25095 - protein, 422 aa, Zea mays subsp. mays
  misc_feature (1)..(422): Ceres Seq. ID no. 12556786
MDGALIGRRYESSAAAVDSTDQLAEKHEYQAEVNRLMDLIVHSLYSNKEVFLRELVSNASDALDKLRYLSVTDPELLKDGPQLDIRIQSDKDNGVITITDSGIGMTKQELIDSLGTIESSGTAKFLKALKESQEAGMDNNLIGQFGVGFYSTFLVSEKVVVSTKSPKSDKQYVWEGQADSGSYTIREEKDPEKLIPRGTRLTLYLKHDDKGFAHPERIQKLLKNYSQFVSFPIYTWQEKGFTKEVEVDEDPAEAKKGDDDIKTEPKKKTKTVVEKYWDWELSNETQPIWLRNPKEVSTEEYNEFYKKTFNEYLNPLASSHFTTEGEVEFRSILYVPATRKDDITDNRKTKNIRLYVKRVFISDDFDGELFPRYLSFVKGVVDSNDLPLNVSREILQESRIVRIMRKRLVRKAFDMILGISCS

SEQ ID NO: 25096 - protein, 386 aa, Zea mays subsp. mays
  misc_feature (1)..(386): Ceres Seq. ID no. 12556787
MDLIVHSLYSNKEVFLRELVSNASDALDKLRYLSVTDPELLKDGPQLDIRIQSDKDNGVITITDSGIGMTKQELIDSLGTIESSGTAKFLKALKESQEAGMDNNLIGQFGVGFYSTFLVSEKVVVSTKSPKSDKQYVWEGQADSGSYTIREEKDPEKLIPRGTRLTLYLKHDDKGFAHPERIQKLLKNYSQFVSFPIYTWQEKGFTKEVEVDEDPAEAKKGDDDIKTEPKKKTKTVVEKYWDWELSNETQPIWLRNPKEVSTEEYNEFYKKTFNEYLNPLASSHFTTEGEVEFRSILYVPATRKDDITDNRKTKNIRLYVKRVFISDDFDGELFPRYLSFVKGVVDSNDLPLNVSREILQESRIVRIMRKRLVRKAFDMILGISCS

SEQ ID NO: 25097 - DNA, 1576 bp, Zea mays subsp. mays
  misc_feature (1)..(1576): Ceres Seq. ID no. 12565869
tattgtgaggggctactgttgggggccttcggcttccgaaggtcctcaaaaatgtaatttgactatgttttccaggagaaatatgtgaacaggtaccttcgaagtcagattgcgagtatacaagagcatggttaagacgaagcttgactgggacggcgatcacgacgaaggataagacgatcacgaagctatgtgcagaagagcttcggcataacggcgggaaggggaaaccgacttaaagatgaaaagccaaattagacctcgaagaattactatagagttattgataaatgtaaagggcattaatgtaattttgcatgggctgcgacccgtgcctataaataggtgaacagtattcccgtactgttcacgctgacttggcattcacttttgcgtcacgcctgtattctcattccttcaagccgaaggtacatttgtaatttaccattgtttacataagtaatataaatggaaatagattaataataatgtttatagaaattatgttactttctatactttgtatgaatgttctccatcttctatcatgatcatgaaggtgaatctgacataacaaaggagcgaattgagaaaattctcaaggctggagctaatgttgtgttgaccaccaagggaattgacgatatgtccttgaagtactttgttgaggctggtgcgattgcagtaaggcgtgtgcgcaaggaagatttgcgacatgttgccaaagccactggtgcaactatggtgtctacttttgcggacatggaaggtgaagaaacattcgattcatcattccttggccatgctgatgaagttgtggaggaaagaattgctgacgatgatgttattctggtgaaaggcacaaagaacaccagcgcggtctctataatacttaggggcgcaaatgactacatgcttgatgagattgaacggtccttgcatgatgccctgtgcattgtgaagagaaccctggaatcaaatatggttgttgctgggggtggtgcagttgaagctgcgctgtcagctttatctggagaaccttgcaacaaccctgggttctcgggaacaattggcaattgctgaatttgctgagtctttgttaatcataccaaaggtactatctgttaatgctgcaaaagatgcaactgagcttgtagcaaagcttagggcatatcatcatactgctcaaacaaaggccgacaagcaacattattcaagtatgggccttgacctctctaagggtatcattcgcaacaaccttgagtatggcgtgatagagccatcgatgagcaaagtaaagatcattcagtttgccacggaggctgccattactatcctgaggattgacgacatgatcaagcttaccaaggaagaagagggtaacgaagagtaagcagcccaccagtagtgggctagtggactcccatgggatggttgccatagcatgtagcacttgttttttcacttatcgtttacttttgcttgctgtgagcattcgtttgtaggaaaagtgagaacggatgtgtatcaatccgtgttgggtgacgatgactcacggatgaatcaaatatttgcc

SEQ ID NO: 25098 - protein, 184 aa, Zea mays subsp. mays
  misc_feature (1)..(184): Ceres Seq. ID no. 12565870
MFSIFYHDHEGESDITKERIEKILKAGANVVLTTKGIDDMSLKYFVEAGAIAVRRVRKEDLRHVAKATGATMVSTFADMEGEETFDSSFLGHADEVVEERIADDDVILVKGTKNTSAVSIILRGANDYMLDEIERSLHDALCIVKRTLESNMVVAGGGAVEAALSALSGEPCNNPGFSGTIGNC

SEQ ID NO: 25099 - protein, 145 aa, Zea mays subsp. mays
  misc_feature (1)..(145): Ceres Seq. ID no. 12565871
MSLKYFVEAGAIAVRRVRKEDLRHVAKATGATMVSTFADMEGEETFDSSFLGHADEVVEERIADDDVILVKGTKNTSAVSIILRGANDYMLDEIERSLHDALCIVKRTLESNMVVAGGGAVEAALSALSGEPCNNPGFSGTIGNC

SEQ ID NO: 25100 - protein, 113 aa, Zea mays subsp. mays
  misc_feature (1)..(113): Ceres Seq. ID no. 12565872
MVSTFADMEGEETFDSSFLGHADEVVEERIADDDVILVKGTKNTSAVSIILRGANDYMLDEIERSLHDALCIVKRTLESNMVVAGGGAVEAALSALSGEPCNNPGFSGTIGNC

SEQ ID NO: 25101 - DNA, 530 bp, Zea mays subsp. mays
  misc_feature (1)..(530): Ceres Seq. ID no. 12565883
aatcagatgaagctggtgaagcattgttgaaaatgctctggcatcatccagatgctattctgtgctgctcttttaaggagaaacctatgtttacgtttgcaaacaaggcagggctcgacatgttagaaacatctcttattgcgctgcaagacctgacgctagacaagatcttcgacgagtcaggaaggaaagcaatattctcagatatctcaaaactaatggaacagggctacgcgtacctgccgtcgggcgtgtgcatgtcaggaatgggtcggcatgtctcattcgaccaagctgtagcgtggaaggtgctcggcgaggacagcagcgtccactgcctggcgttctgcttcgtcaactggtccttcgtttgacacgccatcccatggcctgtgtgatgagcaggccaatttttttgtatggtgatcccaatatggggaaaccatcagctgtgacagaaggctttatgttgcatgcactagttgtacgtcttgaatcgagtgtatttatgaagaaattggatactgcgc

SEQ ID NO: 25102 - protein, 123 aa, Zea mays subsp. mays
  misc_feature (1)..(123): Ceres Seq. ID no. 12565884
SDEAGEALLKMLWHHPDAILCCSFKEKPMFTFANKAGLDMLETSLIALQDLTLDKIFDESGRKAIFSDISKLMEQGYAYLPSGVCMSGMGRHVSFDQAVAWKVLGEDSSVHCLAFCFVNWSFV

SEQ ID NO: 25103 - protein, 113 aa, Zea mays subsp. mays
  misc_feature (1)..(113): Ceres Seq. ID no. 12565885
MLWHHPDAILCCSFKEKPMFTFANKAGLDMLETSLIALQDLTLDKIFDESGRKAIFSDISKLMEQGYAYLPSGVCMSGMGRHVSFDQAVAWKVLGEDSSVHCLAFCFVNWSFV

SEQ ID NO: 25104 - protein, 95 aa, Zea mays subsp. mays
  misc_feature (1)..(95): Ceres Seq. ID no. 12565886
MFTFANKAGLDMLETSLIALQDLTLDKIFDESGRKAIFSDISKLMEQGYAYLPSGVCMSGMGRHVSFDQAVAWKVLGEDSSVHCLAFCFVNWSFV

SEQ ID NO: 25105 - DNA, 1087 bp, Zea mays subsp. mays
  misc_feature (1)..(1087): Ceres Seq. ID no. 12565899
gcacgagaccattacctagaacatcctaatcgaaaaaccgcctcttctcctcttctcgattcgaaatcgagtacgtccgaatgctctagaaccttccgggcctagggatctcgatggggcccgagcaggaggaggccgtgctggagaccatctgggacctccacgacaaggtcagcgacgcgatccacgccctctcccgcgcccacttcctgcgcgccgttcgccgccgctcctcggcctccgcccccggcctcgtggacgtcaagggcgggggtctgggtctcggcgcgcgcggcggagacgaggtcgtcgccctggcggccctggctgaggaggccaggagcctgcacgccatccgcgccgcgctggaggacctcgaggaccagttcgagtgttttctcgccgtgcagacacagcaacaggccgaacgagatttcgcgatggcgaggctggagcaaagccgcatcatgctcgcgataaggctcaaagagcatcacgggagaaaccacaaggtcatagacgaggcgtctgccttcgtccgcgatgtctaccaggacgtctggccttccctgtcagctaccaaggccgagagacgcgccgacagttcaggtaacccggcgaagggtccgagcttcctcgcgcggatggtgtcctctagccttactgtagctgggagcggtttcagtctcaaaagtctggctttagctctcggcctagtcgcggtgctgcagtcttcaggggtcggtgaccgcaggtacaggaggaccaccagcgagaggagctcgtcgtggctgggatcatcatctccgagaggcggtagaacgggtcgtcttgacgtgtctctagccaggggttgaaaggggggctgcggtttgtggccttgcactgtatgcccctgtggcaagggccaagctcaggcccgctgcggtgttttttttgttgctttctcggtccagcagcaccaggcttcatcgctgaggctgctctctgcccatcatgccgggcgcagccggtgggcatgtttgatttgtgctaaatgtgacacattttatctaaggttagtcttttgaatggaagaattaaactt

SEQ ID NO: 25106 - protein, 247 aa, Zea mays subsp. mays
  misc_feature (1)..(247): Ceres Seq. ID no. 12565900
MGPEQEEAVLETIWDLHDKVSDAIHALSRAHFLRAVRRRSSASAPGLVDVKGGGLGLGARGGDEVVALAALAEEARSLHAIRAALEDLEDQFECFLAVQTQQQAERDFAMARLEQSRIMLAIRLKEHHGRNHKVIDEASAFVRDVYQDVWPSLSATKAERRADSSGNPAKGPSFLARMVSSSLTVAGSGFSLKSLALALGLVAVLQSSGVGDRRYRRTTSERSSSWLGSSSPRGGRTGRLDVSLARG

SEQ ID NO: 25107 - protein, 138 aa, Zea mays subsp. mays
  misc_feature (1)..(138): Ceres Seq. ID no. 12565901
MARLEQSRIMLAIRLKEHHGRNHKVIDEASAFVRDVYQDVWPSLSATKAERRADSSGNPAKGPSFLARMVSSSLTVAGSGFSLKSLALALGLVAVLQSSGVGDRRYRRTTSERSSSWLGSSSPRGGRTGRLDVSLARG

SEQ ID NO: 25108 - protein, 129 aa, Zea mays subsp. mays
  misc_feature (1)..(129): Ceres Seq. ID no. 12565902
MLAIRLKEHHGRNHKVIDEASAFVRDVYQDVWPSLSATKAERRADSSGNPAKGPSFLARMVSSSLTVAGSGFSLKSLALALGLVAVLQSSGVGDRRYRRTTSERSSSWLGSSSPRGGRTGRLDVSLARG

SEQ ID NO: 25109 - DNA, 900 bp, Zea mays subsp. mays
  misc_feature (1)..(900): Ceres Seq. ID no. 12565933
aaaggcaccaccaccagctagctctctgtctgctgctcctctcaaaagagtcgcagttcactttgttgtactagagcgctgagcagatctttccttgtttctccattccggtacgaaggggtggggtccaagtgaagggaagggaagggaagagaaggcctgctgcgagcgatgggcatcgtcgacgtcgtctccgagttctgctccttgccgaggactcgccggcatctcaagaagaggaagcagttccagacggtggagatgaaggtgcgcatcgactgcgaagggtgcgagcgcaaggtgaagaaggcgatggagggcatgaagggcgtgagctccgtggaggtggcggccaagcagaacaaggtgacggtcacgggctacgtggacgccgccaaggtcatgcgccgcgtcgcctacaagacgggcaagcgggtggagccctggccctacgtgccctacgagatggtgcagcacccctacgcgccgggcgcctacgacaagaaggcgcccgccggctacgtccgcaacgtcgtcgccgaccccaccgccgcgccgctcgccagggcctcctccaccgaggtccgctacaccgccgccttcagcgacgagaaccccaacgcctgctccgtcatgtagacgtagacccacccacacaccgaccgacccacttgttttctagctattagttactagtagtatagtaggtgcttgcttgggagagttgctcttggaggaggttttgctcttcctgaccctttttctttttctttttttcgttttccggtttcatgtagatgtagtgtgcgttttgatttttgtgaaaaaaaataaactagtttgtaacggtagaccacttgtgcaaactatgatcagaaaaaaaaatcagttcgtccttgc

SEQ ID NO: 25110 - protein, 155 aa, Zea mays subsp. mays
  misc_feature (1)..(155): Ceres Seq. ID no. 12565934
MGIVDVVSEFCSLPRTRRHLKKRKQFQTVEMKVRIDCEGCERKVKKAMEGMKGVSSVEVAAKQNKVTVTGYVDAAKVMRRVAYKTGKRVEPWPYVPYEMVQHPYAPGAYDKKAPAGYVRNVVADPTAAPLARASSTEVRYTAAFSDENPNACSVM

SEQ ID NO: 25111 - protein, 125 aa, Zea mays subsp. mays
  misc_feature (1)..(125): Ceres Seq. ID no. 12565935
MKVRIDCEGCERKVKKAMEGMKGVSSVEVAAKQNKVTVTGYVDAAKVMRRVAYKTGKRVEPWPYVPYEMVQHPYAPGAYDKKAPAGYVRNVVADPTAAPLARASSTEVRYTAAFSDENPNACSVM

SEQ ID NO: 25112 - protein, 108 aa, Zea mays subsp. mays
  misc_feature (1)..(108): Ceres Seq. ID no. 12565936
MEGMKGVSSVEVAAKQNKVTVTGYVDAAKVMRRVAYKTGKRVEPWPYVPYEMVQHPYAPGAYDKKAPAGYVRNVVADPTAAPLARASSTEVRYTAAFSDENPNACSVM

SEQ ID NO: 25113 - DNA, 1190 bp, Zea mays subsp. mays
  misc_feature (1)..(1190): Ceres Seq. ID no. 12565974
aaaatactccgcctgcatctccaaagcacactgctccctctggcttcccgcctcctcttcggctccttcgcgtcccgacgccccctcatggccaccgccgccgccaccgcagcagcagtagtctcctccccggctgccccacgcgccggggccgccgccgcctcccgccgggggttcgtcacgtttggtggaggcgccgcccgcttctctcccacgctgcggtccggccgtgggttctctggtgtgcaaacccatgttgccgctgttgaacaagcaattgtaaaagatgctaccaagctggaagctccagttgttgttgttacaggtgcatctagagggattggtaaggcaactgctctagcccttggaaaagcaggatgcaaggttctggtaaactatgcccggtcctcgaaagaggctgaagaggtctccaaagagattgaagcatctggtggtgaggctatcaccttcggaggagatgtttcaaaagaagctgatgtagagtctatgatgaaagcagctctagataaatggggaacaatagatgtgctggtaaataatgcagggattacacgagacacattgttgatgaggatgaagaaatctcagtggcaagacgtaattgatctgaatcttactggtgtcttcctttgtacacaggctgcaacaaaagtaatgatgaaaaagagaaagggaaaaattatcaacattgcatctgtagttggtcttactggcaatgttggccaagctaattatagcgcagccaaggctggagtgattggtttcacaaaaacagttgccagggagtatgcaagcagaaatatcaatgtgaatgctattgcaccagggttcattgcatctgatatgactgccgaacttggagaagagcttgagaagaaaatcttgtcaaccattccgttagggagatatggccaaccagaggaagttgcagggttggtcgagttcctggcccttaaccccgcagctagctatatgactggacaggtgcttacaattgacggagggatggtaatgtaagatttgagttagcttgatgcacttctacttttgctgagcatttaatgttgaacacccttgttgtgcacgggcgattttggacaacaaattagtgttgtctctttctttgtaatactctctggtaataaatctagcatgtggaatggaagttg

SEQ ID NO: 25114 - protein, 345 aa, Zea mays subsp. mays
  misc_feature (1)..(345): Ceres Seq. ID no. 12565975
KILRLHLQSTLLPLASRLLFGSFASRRPLMATAAATAAAVVSSPAAPRAGAAAASRRGFVTFGGGAARFSPTLRSGRGFSGVQTHVAAVEQAIVKDATKLEAPVVVVTGASRGIGKATALALGKAGCKVLVNYARSSKEAEEVSKEIEASGGEAITFGGDVSKEADVESMMKAALDKWGTIDVLVNNAGITRDTLLMRMKKSQWQDVIDLNLTGVFLCTQAATKVMMKKRKGKIINIASVVGLTGNVGQANYSAAKAGVIGFTKTVAREYASRNINVNAIAPGFIASDMTAELGEELEKKILSTIPLGRYGQPEEVAGLVEFLALNPAASYMTGQVLTIDGGMVM

SEQ ID NO: 25115 - protein, 316 aa, Zea mays subsp. mays
  misc_feature (1)..(316): Ceres Seq. ID no. 12565976
MATAAATAAAVVSSPAAPRAGAAAASRRGFVTFGGGAARFSPTLRSGRGFSGVQTHVAAVEQAIVKDATKLEAPVVVVTGASRGIGKATALALGKAGCKVLVNYARSSKEAEEVSKEIEASGGEAITFGGDVSKEADVESMMKAALDKWGTIDVLVNNAGITRDTLLMRMKKSQWQDVIDLNLTGVFLCTQAATKVMMKKRKGKIINIASVVGLTGNVGQANYSAAKAGVIGFTKTVAREYASRNINVNAIAPGFIASDMTAELGEELEKKILSTIPLGRYGQPEEVAGLVEFLALNPAASYMTGQVLTIDGGMVM

SEQ ID NO: 25116 - protein, 176 aa, Zea mays subsp. mays
  misc_feature (1)..(176): Ceres Seq. ID no. 12565977
MMKAALDKWGTIDVLVNNAGITRDTLLMRMKKSQWQDVIDLNLTGVFLCTQAATKVMMKKRKGKIINIASVVGLTGNVGQANYSAAKAGVIGFTKTVAREYASRNINVNAIAPGFIASDMTAELGEELEKKILSTIPLGRYGQPEEVAGLVEFLALNPAASYMTGQVLTIDGGMVM

SEQ ID NO: 25117 - DNA, 1047 bp, Zea mays subsp. mays
  misc_feature (1)..(1047): Ceres Seq. ID no. 12565996
agagttggcctccaccgtcaagtcaccaaccacccagagactcaccagtcaccaccccaggccagccgccacgtttagccgggctaaacaaacacgggcgcacaatcggaactcgctgcactgcttggaatccaacgagccaatcattcaaatcctccccggaaccgcgttgagcagggcacggtcgattggatctagggtgagggtccgtcgccgaagaaactcgcaggcggtcacgaggaggcggcgggggagggcgggggagatggcctcggaggagatgacggcgacggaggtggctgcgctgctggacttgaagccgcacccggagggcggcttctacaccgagaccttccgcgacggctccatcacgctcaccacgtcccagctcccgccccactacaaggtaaaccgtgctgttagcaccgcaatctatttcctacttcccgcagggagtgtttcccgtctccaccgcattccctgtgctgaaacctggcacttctacaagggagagcctgtcacggtcttcgagcttcacgacgacggtcacattgaccttactgtcattggcccacaccttgaggcaggccagcgcccccagtataccgtgccaccgaacgtgtggtttgggtcgttccccacactagacgtcgagtcgttcgcatctgatggcagcgttcttgtcaagtctcggaagagggaccctgagctgcattactcccttgttggctgcacctgtgcccctggcttccagtacgaggattttgaaatggccaaatttgaggacgtgagatccatcgctcccaaggctgaacctttcctcaagtttcttattccctctaccgattaactccagagcagcctcagatgattgtggatgggttctcagcgactttctatactgcatactgtacggatggtgtttctagtgtgattccatgagagttctgctttcacgacagtgtagacagtaaactgtacctttgtggtggcaccggttgaaacgtttggtgcattgaaacagaataacagctggtcttgatgttg

SEQ ID NO: 25118 - protein, 282 aa, Zea mays subsp. mays
  misc_feature (1)..(282): Ceres Seq. ID no. 12565997
ELASTVKSPTTQRLTSHHPRPAATFSRAKQTRAHNRNSLHCLESNEPIIQILPGTALSRARSIGSRVRVRRRRNSQAVTRRRRGRAGEMASEEMTATEVAALLDLKPHPEGGFYTETFRDGSITLTTSQLPPHYKVNRAVSTAIYFLLPAGSVSRLHRIPCAETWHFYKGEPVTVFELHDDGHIDLTVIGPHLEAGQRPQYTVPPNVWFGSFPTLDVESFASDGSVLVKSRKRDPELHYSLVGCTCAPGFQYEDFEMAKFEDVRSIAPKAEPFLKFLIPSTD

SEQ ID NO: 25119 - protein, 194 aa, Zea mays subsp. mays
  misc_feature (1)..(194): Ceres Seq. ID no. 12565998
MASEEMTATEVAALLDLKPHPEGGFYTETFRDGSITLTTSQLPPHYKVNRAVSTAIYFLLPAGSVSRLHRIPCAETWHFYKGEPVTVFELHDDGHIDLTVIGPHLEAGQRPQYTVPPNVWFGSFPTLDVESFASDGSVLVKSRKRDPELHYSLVGCTCAPGFQYEDFEMAKFEDVRSIAPKAEPFLKFLIPSTD

SEQ ID NO: 25120 - protein, 189 aa, Zea mays subsp. mays
  misc_feature (1)..(189): Ceres Seq. ID no. 12565999
MTATEVAALLDLKPHPEGGFYTETFRDGSITLTTSQLPPHYKVNRAVSTAIYFLLPAGSVSRLHRIPCAETWHFYKGEPVTVFELHDDGHIDLTVIGPHLEAGQRPQYTVPPNVWFGSFPTLDVESFASDGSVLVKSRKRDPELHYSLVGCTCAPGFQYEDFEMAKFEDVRSIAPKAEPFLKFLIPSTD

SEQ ID NO: 25121 - DNA, 1711 bp, Zea mays subsp. mays
  misc_feature (1)..(1711): Ceres Seq. ID no. 12566006
aagcaagctgcaaagagaacgcttgttggtagaacaaagtatatgcccccatgacaccgagtccaagcagcaggctcgagcatagctggagaagcccccacatccgcatgggctggatgcccatttcatgaggaggcttgtgagccggagctgggaggaatccaggctgctatggcgccttgccttcccggcgctcctgacggaggtgtttcagttctccatcggtttcgtcaccaccgccttcgttgggcacctcggagaggtggagctcgcggctgtcagcgtcgtggagaacatcttggattcctctgcctatggggtcctgtttggcatgggcagcgcgctggacacgctgagcgggcaggccgtcggcgccgggcagctggacaggctgggcacctacacgcagcagtcgtggatcatctgcggcgccaccgcgctggcgctggcgccggcgtacgccttcgccccgcggctcctgcactcgttcctccaccagcccgaccacgtgtcgcgcgccgccgggccgtacgcccgctgggcgatcccgaggctgttcgcgcacgccgtgaacataccgctcctcatgttcttccaggcccagagcaggatctgggccgtggcggccatctccggcgcggtcctcggcgtgcacgccgcgctcacctacgtcgccgtcacgaggctcgggtacggcctgcccggggccgccgtcgccggggacatctcccactggctcgtcgtcgccgctcagttcgcctacatgaccggcggccgcttccccgacgcgtggaagggcttcaccgtgcgtgcgttcgacaacctcggcgccttcgtcaagctgtcgctcgggtccgccgtcatgatctgcttggagttttggtactacaccacgcttctcgtcctcgtgggtctcctcaaacatggcaaactccaaatcgacatcatgtcagtctgcctcaacttcgagttcttgactgtaatggttgcgctgggcttcagcacagcaatcgggattagagtgtccaacgagctgggtgcaaacaggccgaaggaggcaaagtttgcagtgcttgtggcagtatcaacatccatgttcatgggagcagtctttatgtgcgtcgtcctcatctggaggacgagcctgccaaagctcttcagcgacagcgaagaggtgaaacgtggagcttccaagctggggcatctcctcgctctcaccgtatgcgtcagcagcatctggcctgtgctatcaggcgtggccgtaggagctgggtggcaagtgcgtgtggcgatcataaacgtcggttgctactacctagtgggcattccgatgggtatcctgcttgttcaagctaaaacacggcacaatgggcatatggatgggcatgttgtcaggcacgtttctccaaatgtcaatacttctcgccactatcttcacaacaaagtgggataaacaggccgcgctggcagaagtgagaatggcggagtggggaggaaagaacgagaacctaacactgacggaaacaacacatacagatgatctgatggctcctgtgcaagagaaaatgttggcgaatgatagccagaagaatgtagaattagtgcgcatagattgatcatagagtatattcatttcagctcgagacattatttcattgtttactaggatgatagtatgaatctatttttttataaataatctctccgttcc

SEQ ID NO: 25122 - protein, 441 aa, Zea mays subsp. mays
  misc_feature (1)..(441): Ceres Seq. ID no. 12566007
MRRLVSRSWEESRLLWRLAFPALLTEVFQFSIGFVTTAFVGHLGEVELAAVSVVENILDSSAYGVLFGMGSALDTLSGQAVGAGQLDRLGTYTQQSWIICGATALALAPAYAFAPRLLHSFLHQPDHVSRAAGPYARWAIPRLFAHAVNIPLLMFFQAQSRIWAVAAISGAVLGVHAALTYVAVTRLGYGLPGAAVAGDISHWLVVAAQFAYMTGGRFPDAWKGFTVRAFDNLGAFVKLSLGSAVMICLEFWYYTTLLVLVGLLKHGKLQIDIMSVCLNFEFLTVMVALGFSTAIGIRVSNELGANRPKEAKFAVLVAVSTSMFMGAVFMCVVLIWRTSLPKLFSDSEEVKRGASKLGHLLALTVCVSSIWPVLSGVAVGAGWQVRVAIINVGCYYLVGIPMGILLVQAKTRHNGHMDGHVVRHVSPNVNTSRHYLHNKVG

SEQ ID NO: 25123 - protein, 373 aa, Zea mays subsp. mays
  misc_feature (1)..(373): Ceres Seq. ID no. 12566008
MGSALDTLSGQAVGAGQLDRLGTYTQQSWIICGATALALAPAYAFAPRLLHSFLHQPDHVSRAAGPYARWAIPRLFAHAVNIPLLMFFQAQSRIWAVAAISGAVLGVHAALTYVAVTRLGYGLPGAAVAGDISHWLVVAAQFAYMTGGRFPDAWKGFTVRAFDNLGAFVKLSLGSAVMICLEFWYYTTLLVLVGLLKHGKLQIDIMSVCLNFEFLTVMVALGFSTAIGIRVSNELGANRPKEAKFAVLVAVSTSMFMGAVFMCVVLIWRTSLPKLFSDSEEVKRGASKLGHLLALTVCVSSIWPVLSGVAVGAGWQVRVAIINVGCYYLVGIPMGILLVQAKTRHNGHMDGHVVRHVSPNVNTSRHYLHNKVG

SEQ ID NO: 25124 - protein, 288 aa, Zea mays subsp. mays
  misc_feature (1)..(288): Ceres Seq. ID no. 12566009
MFFQAQSRIWAVAAISGAVLGVHAALTYVAVTRLGYGLPGAAVAGDISHWLVVAAQFAYMTGGRFPDAWKGFTVRAFDNLGAFVKLSLGSAVMICLEFWYYTTLLVLVGLLKHGKLQIDIMSVCLNFEFLTVMVALGFSTAIGIRVSNELGANRPKEAKFAVLVAVSTSMFMGAVFMCVVLIWRTSLPKLFSDSEEVKRGASKLGHLLALTVCVSSIWPVLSGVAVGAGWQVRVAIINVGCYYLVGIPMGILLVQAKTRHNGHMDGHVVRHVSPNVNTSRHYLHNKVG

SEQ ID NO: 25125 - DNA, 1495 bp, Zea mays subsp. mays
  misc_feature (1)..(1495): Ceres Seq. ID no. 12566151
gcacgagaccattacctagaacatcctaatcgaaaaaacgacagcgcgcacttggattcggcgaccaccggagcgcggaggaggcacaggcgccgatctaaagacgatggccgccgcgggctcctcgccgtccttctcctcctcgagtaagcggtgcgtgccctgcttctttcttcaattttcccccgatccatggctcgtgcgtgggttccctgctcctagctccactcccccgtccatggcttgcatctatgctgcacagctcggttgctgttgcagttcaacctacttgttactccaaaaagaaggcgggcttatccaagatattgatcaaaatttccaccttttcgcgtcgaagggcgatgaattgaaggatccacccaggccaagcactggtgctctgtgcttatcttttagcgagcgaagtggtcatttccccctctcttctttatgggaggaaaataggaaatggtgtgccaagtgtatcctcaaccattctactgttccaaacgtgcagtatacatcggcatacagtcgatccagttgcaacaccatagctggaagggaaggtggccctcgtcactggtggcgccaccggcatcggtgaggccatcgttcgcctcttcatggagcacggcgccaaggtctgcatcgcggacatccaggatgaggctgggcagcagctgcgcgacgccctgggaggtgacgcgcagggcgccatgttcgtccactgcgacgtgacgtcggaggaggacgtgagccgcgccgtggacgctgcggcggagcggttcggcgcgctggacgtgatggtgaacaacgccggcgtgacgggcaccaaggtgacggacatccgcaacgtggacttcgcggaggcgcgcagggtgctcgacgtcaacgtgcacggcgtgttcctggggatgaagcacgcggcgcgcgctatgatcccgcggaagcggggctccatcgtgtcgctggccagcgtggccagcgccatcggcgggacgggcccgcacgtctacacggcgtccaagcacgccgtggtcgggctcaccaagagcgtcgccgcggagctcggccgccacggggtgcgcgtcaactgcgtgtccccctatgccgtgcccacggcgctgtcgatgccgcacctgccccagggcgcgcgcgcagatgacgcgctcaaggacttcctggcctttgtcggcggcgaggccaacctcaagggcgtcgacgccatgcccgaggacgtcgcccaggcggtgctctacctggccagcgacgaggcgaggtacgtcagcgcggtcaacctcatggtggacggaggcttcacagccgtaaacaataacctcagggcgtttgaggattagttgaggcatttatgccagctctgggattgggagggagtattaccgctatttcttctgctgttgtgacaagtgtgtgcaagactaataaaccgcagcatgttcatgtagccaacagatgattgaacattccaagt

SEQ ID NO: 25126 - protein, 244 aa, Zea mays subsp. mays
  misc_feature (1)..(244): Ceres Seq. ID no. 12566152
MEHGAKVCIADIQDEAGQQLRDALGGDAQGAMFVHCDVTSEEDVSRAVDAAAERFGALDVMVNNAGVTGTKVTDIRNVDFAEARRVLDVNVHGVFLGMKHAARAMIPRKRGSIVSLASVASAIGGTGPHVYTASKHAVVGLTKSVAAELGRHGVRVNCVSPYAVPTALSMPHLPQGARADDALKDFLAFVGGEANLKGVDAMPEDVAQAVLYLASDEARYVSAVNLMVDGGFTAVNNNLRAFED

SEQ ID NO: 25127 - protein, 213 aa, Zea mays subsp. mays
  misc_feature (1)..(213): Ceres Seq. ID no. 12566153
MFVHCDVTSEEDVSRAVDAAAERFGALDVMVNNAGVTGTKVTDIRNVDFAEARRVLDVNVHGVFLGMKHAARAMIPRKRGSIVSLASVASAIGGTGPHVYTASKHAVVGLTKSVAAELGRHGVRVNCVSPYAVPTALSMPHLPQGARADDALKDFLAFVGGEANLKGVDAMPEDVAQAVLYLASDEARYVSAVNLMVDGGFTAVNNNLRAFED

SEQ ID NO: 25128 - protein, 184 aa, Zea mays subsp. mays
  misc_feature (1)..(184): Ceres Seq. ID no. 12566154
MVNNAGVTGTKVTDIRNVDFAEARRVLDVNVHGVFLGMKHAARAMIPRKRGSIVSLASVASAIGGTGPHVYTASKHAVVGLTKSVAAELGRHGVRVNCVSPYAVPTALSMPHLPQGARADDALKDFLAFVGGEANLKGVDAMPEDVAQAVLYLASDEARYVSAVNLMVDGGFTAVNNNLRAFED

SEQ ID NO: 25129 - DNA, 1419 bp, Zea mays subsp. mays
  misc_feature (1)..(1419): Ceres Seq. ID no. 12566155
gcacgagaccattacctagaacatcctaatcgaaaaatcagccgcagtcgcgtcgcgtcgcgtcgcgtccagtccaatcctcggagcctcacacgggcggacgagcgggagcttctcccaatctcccctgcccagccctgccctgccgccgcgcttagcttcgcatcttcccctcctcctcctcctccttcctcggccaagcgaggagcgaggcgcgggcgcgagcgcgtcgttgagatggattcggaggcggtgcagcacggctgcgcgcattacagccgtgggtgcagcgtcgtggcgccctgctgcggccaggccttcggctgccgccattgccacaacgacgccaaggttcggtggtttccctcctcccgttttcgcttcggctccggttcagcagatgttctgaaacaaccctgtcccgtgccccggcagaactcgctggaggtcgacccgcgcgaccggcacgagatcccccgccacgaaataaagaaggtgatctgttctctctgctccaaggaacaggacgtgcaacagaactgctccagctgtggggcctgcatgggcaagtacttctgtaaagtatgcaagttcttcgatgatgatgtctcaaagggccagtaccactgtgacggatgtggaatatgtagaactggcggcgtggagaactttttccactgtgataaatgtgggtgttgttacagcaatgtcttgaaggattcccaccactgcgtggaaagagcaatgcatcacaactgccccgtctgcttcgagtatctgttcgactccacaaaggacatcagtgtgctgcaatgtgggcataccatccatttggagtgcatgaacgaaatgagagcacaccatcacttctcatgcccagtgtgctcgaggtccgcctgcgacatgtcggccacgtggcggaaactcgacgaggaggtcgcggccacgccgatgcctgacatctaccagaagcacatggtgtggatcctgtgcaacgactgcagcgcgacctcgagcgtgcggttccacgtgctggggcacaagtgccccgcgtgcagttcgtacaacacccgggagacgagggttgcgtgccccaggatctgaggcgaacgagaggccatgtcacaaaatgccagggagatgccgtccaacgactggtggagatcatctgtctgcaggacgttgctgcgcttaaggttaaaggctagcgcgagaccatgcctggtagtccagtcttgagtctggtgctgtccaggcacacctgtggatcggggccggctcaggattagtggggctgttcatgtttagggcgcgaatgcaacgatatttcacgtgggccgtgggctcggtatgtaactgaaccgattatttctattgcaataataacatgcagttctattgggccgagcctaatcagcc

SEQ ID NO: 25130 - protein, 367 aa, Zea mays subsp. mays
  misc_feature (1)..(367): Ceres Seq. ID no. 12566156
ARDHYLEHPNRKISRSRVASRRVQSNPRSLTRADERELLPISPAQPCPAAALSFASSPPPPPPSSAKRGARRGRERVVEMDSEAVQHGCAHYSRGCSVVAPCCGQAFGCRHCHNDAKVRWFPSSRFRFGSGSADVLKQPCPVPRQNSLEVDPRDRHEIPRHEIKKVICSLCSKEQDVQQNCSSCGACMGKYFCKVCKFFDDDVSKGQYHCDGCGICRTGGVENFFHCDKCGCCYSNVLKDSHHCVERAMHHNCPVCFEYLFDSTKDISVLQCGHTIHLECMNEMRAHHHFSCPVCSRSACDMSATWRKLDEEVAATPMPDIYQKHMVWILCNDCSATSSVRFHVLGHKCPACSSYNTRETRVACPRI

SEQ ID NO: 25131 - protein, 288 aa, Zea mays subsp. mays
  misc_feature (1)..(288): Ceres Seq. ID no. 12566157
MDSEAVQHGCAHYSRGCSVVAPCCGQAFGCRHCHNDAKVRWFPSSRFRFGSGSADVLKQPCPVPRQNSLEVDPRDRHEIPRHEIKKVICSLCSKEQDVQQNCSSCGACMGKYFCKVCKFFDDDVSKGQYHCDGCGICRTGGVENFFHCDKCGCCYSNVLKDSHHCVERAMHHNCPVCFEYLFDSTKDISVLQCGHTIHLECMNEMRAHHHFSCPVCSRSACDMSATWRKLDEEVAATPMPDIYQKHMVWILCNDCSATSSVRFHVLGHKCPACSSYNTRETRVACPRI

SEQ ID NO: 25132 - DNA, 1352 bp, Zea mays subsp. mays
  misc_feature (1)..(1352): Ceres Seq. ID no. 12566161
aaaagaccaaaaaccctcacgaaattctgagatccatccagaaacgtcgctccatggcgattatctccgacttcaaggaggacgagaccccgcagcagccggcggcggtcggccccggcgtcgaggagaccctggtggcagcgctagagaggaccggcggtgcactcccctttctccaggcggccatcgatgtcgctcaccgcaggtctggcctgttccgcgacccttcggcggtgagcaaggttaccgcgatggcggcggccgtcagggcgcaggtggagaccgaggagagggcagccagagaggtcaagaggaaggcggaggaggccgagaggaaggctgcggccgaggcgcagaagcctgacatggaggcggcgacggcgacggcggaggagaagctggagaaggaccgtatggatgcggataaggcggaggaaggcaacgttagacaaccaaatgctggcaatggtcttgatttggagaagtactcatggactcaacagttgcctgaggttaacatcactattcctgttcctcaaggaacaaaatcaagatttgtggtcgttgatataaagaagaaccatctgaaggttgttctgaagggccagccacctatcattgatggtgagctctataagccagttaaggttgatgattgcttctggagcatagaggatggaaaaactctttccatattgcttacaaagcacaaccaaatggagtggtggaagtctgttataaagggtggccctgaagttgatacccaaaaggtggaacctgagaacagcaaactctctgatttggatcctgagactagacaaactgtggagaagatgatgtttgaccagcgccagaagcagatgggccttccgacaagtgatgaaatgcaaaagcaagaaattctcaagaagttcatgtctgagcacccggagatggacttctctagagcgaaaatgccttgaggatttgttcgggcagttatttctaccagtctgcttaggttgtctttgagtctggtatcggtgtcaaacaaatcttcatctgttttttttttgtaatgcgtcaggaatatcaggcttgttctttttcatctcaatccatatgcattggaaacgtttgggtgggtttaaatccatagtaggtcaaaagctttactaaattttccaatccaatccattccattggtcacgtggcttgaggatttgttcgggcagttatttctaccagtctgcttaggttgtctttgtgtgattgtgtctggtgttagtgtggaacagatgtctttgtgtgattgtgtctggtgttagtgtggaacagatcatctttttttagtagcgtcagaaatatcattt

SEQ ID NO: 25133 - protein, 319 aa, Zea mays subsp. mays
  misc_feature (1)..(319): Ceres Seq. ID no. 12566162
KTKNPHEILRSIQKRRSMAIISDFKEDETPQQPAAVGPGVEETLVAALERTGGALPFLQAAIDVAHRRSGLFRDPSAVSKVTAMAAAVRAQVETEERAAREVKRKAEEAERKAAAEAQKPDMEAATATAEEKLEKDRMDADKAEEGNVRQPNAGNGLDLEKYSWTQQLPEVNITIPVPQGTKSRFVVVDIKKNHLKVVLKGQPPIIDGELYKPVKVDDCFWSIEDGKTLSILLTKHNQMEWWKSVIKGGPEVDTQKVEPENSKLSDLDPETRQTVEKMMFDQRQKQMGLPTSDEMQKQEILKKFMSEHPEMDFSRAKMP

SEQ ID NO: 25134 - protein, 302 aa, Zea mays subsp. mays
  misc_feature (1)..(302): Ceres Seq. ID no. 12566163
MAIISDFKEDETPQQPAAVGPGVEETLVAALERTGGALPFLQAAIDVAHRRSGLFRDPSAVSKVTAMAAAVRAQVETEERAAREVKRKAEEAERKAAAEAQKPDMEAATATAEEKLEKDRMDADKAEEGNVRQPNAGNGLDLEKYSWTQQLPEVNITIPVPQGTKSRFVVVDIKKNHLKVVLKGQPPIIDGELYKPVKVDDCFWSIEDGKTLSILLTKHNQMEWWKSVIKGGPEVDTQKVEPENSKLSDLDPETRQTVEKMMFDQRQKQMGLPTSDEMQKQEILKKFMSEHPEMDFSRAKMP

SEQ ID NO: 25135 - protein, 236 aa, Zea mays subsp. mays
  misc_feature (1)..(236): Ceres Seq. ID no. 12566164
MAAAVRAQVETEERAAREVKRKAEEAERKAAAEAQKPDMEAATATAEEKLEKDRMDADKAEEGNVRQPNAGNGLDLEKYSWTQQLPEVNITIPVPQGTKSRFVVVDIKKNHLKVVLKGQPPIIDGELYKPVKVDDCFWSIEDGKTLSILLTKHNQMEWWKSVIKGGPEVDTQKVEPENSKLSDLDPETRQTVEKMMFDQRQKQMGLPTSDEMQKQEILKKFMSEHPEMDFSRAKMP

SEQ ID NO: 25136 - DNA, 1494 bp, Zea mays subsp. mays
  misc_feature (1)..(1494): Ceres Seq. ID no. 12566181
gcacgagaccattacctagaacatcctaatcaaaaaacaagcaacgagagctactagctagctagcagcactgcgggtacgtacccaactactacacattacgtacgtgagctagctagctagcagctagtgatagagaccagatcagctgcagcggcgacgatggctcctgagaagctgaagctgctcgtcggagtgctggccctgcagttccttctggcagggttccacatcgtctccagggcggcgctcaacatgggcatcagcgagatcgtgttcatggtgtacaggaacctcatctccctcgccttgctcgctccgttcgcctacttcctcgagaagaaagacaggccgccactcaccttctctttgctggtggagttcttcctgctagcgctgtgtgggataactgcgaaccagggcttctacctcctgggcctgtatcacctgtcaccaacctacgcctctgcgatacagaacaccgtccccgcgatcaccttcgccatggccgctgtcctcaggctagagcaggtggacctgagcaggaggcatgggctggccaaggtggtgggcacggtggtgagcatcggaggggccaccgtcataaccctgtacaagggcctgccgctgctccatcacagtgatgtgcacgtcaagtcgtctccggtgacgctgtcctcctccagcggcagccccatcctcaactggactctcggctgcgtcttcatcctcggccactgcctctcctggtccggatggatggtccttcaggtgccggtgctgaagaggtacccagccaggctctcggttctgtcactgacctgcatcttcgggctcctccagttcctggccattgccgccttcaccgaggaggacctgagcaggtggaaggtccgctcaggaggggagctcttcaccatcctatacgctggccttgtggcatccggggtagcgtttgctctgcagatctggtgcatcgacaggggaggcccgctcttcaccgccgtcttccagccagtgcagaccgtggccgtcgccgtcatggcttccgccatcctcggggaccagctctacacgggagggatcattggagctgtgctgatcgtcatcggcctctacttcgtgctgtggggcaagagcgccgagaagaagggcgccaggaacctgctgcaggatcagctggcgcagggagcagacgtgacgcggcacctgctcggcggagaagcttcggcgaaagatgaagaagcagccccggccatgctggcgtgatgatcgtttagtcgtctgtcaattggagcacagcgtagtcctgttgcatttgggaccgtatgagtcgtgtgatttcagctgttccaatctggcaaccaagaacaagtgtgcatgggttgccggtgtggaacagtgtgtagccatgctgctgtgagtctgtactctgttgctgtaatgttctgtgcaagcgtaggtaaggtgtataactataaaatcacttcatcc

SEQ ID NO: 25137 - protein, 368 aa, Zea mays subsp. mays
  misc_feature (1)..(368): Ceres Seq. ID no. 12566182
MAPEKLKLLVGVLALQFLLAGFHIVSRAALNMGISEIVFMVYRNLISLALLAPFAYFLEKKDRPPLTFSLLVEFFLLALCGITANQGFYLLGLYHLSPTYASAIQNTVPAITFAMAAVLRLEQVDLSRRHGLAKVVGTVVSIGGATVITLYKGLPLLHHSDVHVKSSPVTLSSSSGSPILNWTLGCVFILGHCLSWSGWMVLQVPVLKRYPARLSVLSLTCIFGLLQFLAIAAFTEEDLSRWKVRSGGELFTILYAGLVASGVAFALQIWCIDRGGPLFTAVFQPVQTVAVAVMASAILGDQLYTGGIIGAVLIVIGLYFVLWGKSAEKKGARNLLQDQLAQGADVTRHLLGGEASAKDEEAAPAMLA

SEQ ID NO: 25138 - protein, 337 aa, Zea mays subsp. mays
  misc_feature (1)..(337): Ceres Seq. ID no. 12566183
MGISEIVFMVYRNLISLALLAPFAYFLEKKDRPPLTFSLLVEFFLLALCGITANQGFYLLGLYHLSPTYASAIQNTVPAITFAMAAVLRLEQVDLSRRHGLAKVVGTVVSIGGATVITLYKGLPLLHHSDVHVKSSPVTLSSSSGSPILNWTLGCVFILGHCLSWSGWMVLQVPVLKRYPARLSVLSLTCIFGLLQFLAIAAFTEEDLSRWKVRSGGELFTILYAGLVASGVAFALQIWCIDRGGPLFTAVFQPVQTVAVAVMASAILGDQLYTGGIIGAVLIVIGLYFVLWGKSAEKKGARNLLQDQLAQGADVTRHLLGGEASAKDEEAAPAMLA

SEQ ID NO: 25139 - protein, 329 aa, Zea mays subsp. mays
  misc_feature (1)..(329): Ceres Seq. ID no. 12566184
MVYRNLISLALLAPFAYFLEKKDRPPLTFSLLVEFFLLALCGITANQGFYLLGLYHLSPTYASAIQNTVPAITFAMAAVLRLEQVDLSRRHGLAKVVGTVVSIGGATVITLYKGLPLLHHSDVHVKSSPVTLSSSSGSPILNWTLGCVFILGHCLSWSGWMVLQVPVLKRYPARLSVLSLTCIFGLLQFLAIAAFTEEDLSRWKVRSGGELFTILYAGLVASGVAFALQIWCIDRGGPLFTAVFQPVQTVAVAVMASAILGDQLYTGGIIGAVLIVIGLYFVLWGKSAEKKGARNLLQDQLAQGADVTRHLLGGEASAKDEEAAPAMLA

SEQ ID NO: 25140 - DNA, 1600 bp, Zea mays subsp. mays
  misc_feature (1)..(1600): Ceres Seq. ID no. 12566193
acctgttctccacctcgcccccaccttcgtccttctccatctagggttctctctgtttcctcctcatcggaattggagcttcgcatagagtgtccctcgtcatcgccgccggcaccgacgccggcagccatgtccatgctccttatacagaaacaacccctccctctctccgttcgtccccgcacgactctccgccagtgccgtctccccacgactcgattctccgccgccgccgccgactcggctagccgcgctgcccccttcgccgtcgaggactacctcgtcgccgcatgccacctaaccccggcgcaggcgctcaaggcctccaaggtgctctcgcacctcaagtcaccctcccgacccgacgccgtgctagccttcctctcgggcctcggtctctccgacgccgacatcgccgccgccgtcgcctacgaccccaagcttctctgctccgaggtcgagcgcacgctggccccgcgtctcgcggagctccgggatctcggcctctctccgtctcagatcgcccgcctcgcactcgtcgaccccgcgcgcttccgccgccccaccgtcgtctccaagctgcagtattacgtccctctcttcggttccttcgagaacctgctccaggctctcaggaacaacgcctaccttctcagctccgacctcgagcgcgttgtgaagcccaacgtcgcgttcctggtggagtgcgggctagatgcttgtgatattgccaagctgtccatacccgtccctaggctgatcaccaccaacccagaacgcgtccgggcaatggtggagcgagctgaagctgtcggtgtgcctcgtggcactgggatgtttaggcacgcactgctggctgttgcattcctcagcgaggagaagatcaaagctaaggcagagtttttgaagacaacatttcggtggtcggatgctgaggtgggcgttgcggtttccaagctgccattggtgctcaagcactccaaggacaggctgcgccgcatgtcagagttcctgatcaccaaggttgggttggagccagagtacattgctcacaggcctgctctgcttacatatagcttggaacgccgcctcatgccccgacactatgttgtgaattacctgaaggaaaatggattgttggagcaggaccggagctactatactgctgtccagatgagtgagagtgccttcatggataagttcatatgcccctacaaggaagctgcaccaagcctcgccctagattatgctgctgcttgcagaggagaggtgcccactaccttcttggcaaatgtttaacccttcagtgtaaagcaatgttttgacacttagcagtgagctggtaattttgtttctttccttgcctaactgctacatcccgcagctgtgtctttagcaattggctctggtacataagatgtgagccatggttattaccagggctagatttatctttgctctctgttattcaagctgatcaagtattccaatttcacatgtcactgtatggtatggatttagtgggtgagtaccctgtatattgctctgcaactgttatcgatgcaatgtttctgaataaatatgcaggatgcacggttcc

SEQ ID NO: 25141 - protein, 432 aa, Zea mays subsp. mays
  misc_feature (1)..(432): Ceres Seq. ID no. 12566194
TCSPPRPHLRPSPSRVLSVSSSSELELRIECPSSSPPAPTPAAMSMLLIQKQPLPLSVRPRTTLRQCRLPTTRFSAAAADSASRAAPFAVEDYLVAACHLTPAQALKASKVLSHLKSPSRPDAVLAFLSGLGLSDADIAAAVAYDPKLLCSEVERTLAPRLAELRDLGLSPSQIARLALVDPARFRRPTVVSKLQYYVPLFGSFENLLQALRNNAYLLSSDLERVVKPNVAFLVECGLDACDIAKLSIPVPRLITTNPERVRAMVERAEAVGVPRGTGMFRHALLAVAFLSEEKIKAKAEFLKTTFRWSDAEVGVAVSKLPLVLKHSKDRLRRMSEFLITKVGLEPEYIAHRPALLTYSLERRLMPRHYVVNYLKENGLLEQDRSYYTAVQMSESAFMDKFICPYKEAAPSLALDYAAACRGEVPTTFLANV

SEQ ID NO: 25142 - protein, 389 aa, Zea mays subsp. mays
  misc_feature (1)..(389): Ceres Seq. ID no. 12566195
MSMLLIQKQPLPLSVRPRTTLRQCRLPTTRFSAAAADSASRAAPFAVEDYLVAACHLTPAQALKASKVLSHLKSPSRPDAVLAFLSGLGLSDADIAAAVAYDPKLLCSEVERTLAPRLAELRDLGLSPSQIARLALVDPARFRRPTVVSKLQYYVPLFGSFENLLQALRNNAYLLSSDLERVVKPNVAFLVECGLDACDIAKLSIPVPRLITTNPERVRAMVERAEAVGVPRGTGMFRHALLAVAFLSEEKIKAKAEFLKTTFRWSDAEVGVAVSKLPLVLKHSKDRLRRMSEFLITKVGLEPEYIAHRPALLTYSLERRLMPRHYVVNYLKENGLLEQDRSYYTAVQMSESAFMDKFICPYKEAAPSLALDYAAACRGEVPTTFLANV

SEQ ID NO: 25143 - protein, 387 aa, Zea mays subsp. mays
  misc_feature (1)..(387): Ceres Seq. ID no. 12566196
MLLIQKQPLPLSVRPRTTLRQCRLPTTRFSAAAADSASRAAPFAVEDYLVAACHLTPAQALKASKVLSHLKSPSRPDAVLAFLSGLGLSDADIAAAVAYDPKLLCSEVERTLAPRLAELRDLGLSPSQIARLALVDPARFRRPTVVSKLQYYVPLFGSFENLLQALRNNAYLLSSDLERVVKPNVAFLVECGLDACDIAKLSIPVPRLITTNPERVRAMVERAEAVGVPRGTGMFRHALLAVAFLSEEKIKAKAEFLKTTFRWSDAEVGVAVSKLPLVLKHSKDRLRRMSEFLITKVGLEPEYIAHRPALLTYSLERRLMPRHYVVNYLKENGLLEQDRSYYTAVQMSESAFMDKFICPYKEAAPSLALDYAAACRGEVPTTFLANV

SEQ ID NO: 25144 - DNA, 1181 bp, Zea mays subsp. mays
  misc_feature (1)..(1181): Ceres Seq. ID no. 12566272
acacacacacatccatcaaagaaacaagcgcacaagatcaaatacctcgccgccaataatggcctccaggtcctccatcctgctcgccatggtgatgctggctgcgctattcgccgttggtttgtgcaccacccccctcaccttccaggtcggcaagggatccaagcctggccacctgatcctcacccccaatgttgccaccatatccgacgtggagatcaaagagcacggtggcgatgacttctcctttacgctcaaggagggcccgactggcacctggacgctcgacaccaaggccccgctcaagtaccccctttgcatccgctttgctgtcaagtccggcggctaccgcatcgccgacgacgtcatccctgccgatttcaaggccggcaccacctataagaccacactcagcatctaatcaatctctggtgatgaattagatgctgagtgtggtcttataggtggcggcgcctacgggagctccccgacgccggcttacggcgacgccccctcgcacggcggcatagggacctcgtcgccgacgccgttcgacccccacagcttcggctctctcccgggctcctgcgactactggaggtcgcacccgatggagatctggtcggcgatcggcgggcggttcccgggcacgtcgtcgtcgatggggacgatgggccacttcttcggcgcggctggcagggtaggcgggacggacgtgagcatccaggacgcgctggcgaacacgcggtcggacggcgcgggcgcgctgctgcgcgagggcgccgccgcgctgctcaactccatgacccgttcgggcttcccctacacgacggagcaggtgcgcgacacgttcgccgcggcggcggcggcggcggcgggcgggtccgacggcgcggccgcggcgcaggcggccgccttcaggatggccaacgaggggaaggcgtagagatcgagcatgtgtacgtacgtgcatggtaaactggagtgtgtgctccggagcacggtacattcttggctgctgctgttgctttcatgcatggctacgacgtaatacgtgccttggttgtgtgcgtttgtgtgtgtgtgtgtgtttgagtgtttcatcggtgaagaagacaccgagctagacctagcttattctggtgtgtagtcgctcgctcttgctattttttgtcgtttgg

SEQ ID NO: 25145 - protein, 139 aa, Zea mays subsp. mays
  misc_feature (1)..(139): Ceres Seq. ID no. 12566273
HTHIHQRNKRTRSNTSPPIMASRSSILLAMVMLAALFAVGLCTTPLTFQVGKGSKPGHLILTPNVATISDVEIKEHGGDDFSFTLKEGPTGTWTLDTKAPLKYPLCIRFAVKSGGYRIADDVIPADFKAGTTYKTTLSI

SEQ ID NO: 25146 - protein, 120 aa, Zea mays subsp. mays
  misc_feature (1)..(120): Ceres Seq. ID no. 12566274
MASRSSILLAMVMLAALFAVGLCTTPLTFQVGKGSKPGHLILTPNVATISDVEIKEHGGDDFSFTLKEGPTGTWTLDTKAPLKYPLCIRFAVKSGGYRIADDVIPADFKAGTTYKTTLSI

SEQ ID NO: 25147 - protein, 111 aa, Zea mays subsp. mays
  misc_feature (1)..(111): Ceres Seq. ID no. 12566275
MEIWSAIGGRFPGTSSSMGTMGHFFGAAGRVGGTDVSIQDALANTRSDGAGALLREGAAALLNSMTRSGFPYTTEQVRDTFAAAAAAAAGGSDGAAAAQAAAFRMANEGKA

SEQ ID NO: 25148 - DNA, 1457 bp, Zea mays subsp. mays
  misc_feature (1)..(1457): Ceres Seq. ID no. 12566276
gccgtctcgtctgaccgtacgtctttggtgatgaagcatcgatccgggagaaggttcagcattagctctagctagagctagatagccggaggaggagctagtaggaagaggcatggataatcatcaacttgtcgccatggcagcggtggctcagccggcgagcccgacctcgccgcacgtcgcgcacaagatcccgcccggcgacgggccttacgcgagggccaagcacttccagctggtggagaaggacctggacgcgtcgatcgcgtggttctggaaggcgatcagcgcgggcgacaagttggacagcgcgctcaaggacatggcggtggtgatgaagcagcgcgggtacctggcggaggccatcgacgccatcaggtcgctgcggcacctgtgcccgaagcagtcccaggagccgctggacaacatcctcctggacctctacaaggccagcgggcggaccaaggaggagatcgagctgctcaagcagaagctccgcaagatctacctcggcgaggcgttccatggcaggaccaccaagcgcgcccgctcgcacggccgcaagatccacgtctccgtcaagcaagagacatcgcgcgtcctgggcaacctcgcgtgggcgtacatgcagcagcgcaacttcatggcggcggaggtggtgtaccggaaggcgcagatgatcgacccggacgccaacaaggcgtgcaacctcgccctctgcctcatcgagcaggcccggctcgccgacgccgagctcgtcctcgccgacgtgctcgccgggaggtacctgcaggcccgcgaccagcaggacggcaagatcgtccggaaagtggaggagctgctggcccggatcatggcgcatacgacgtggccgggcggtggcggcggtgacggacgacgacgcccggcggataagagcgggagcgggagcgagagcgacgacgatgactgggtcgagaaccagatgctggctttgctcgacgtggcggtgccgtaccggaagaagagcaggaggctgccggtctttgaggagatctcgcgagcagaatagcagatggctgatatagattagcagcagcatcatcatctttcgatcgagctccatgcatatatcgtttgagcgagcgcggatcctctggacctaactgcagtctgcagataggtaggtaggtaggtctgagctgatccagacccacatgtcagtgaccggacgcagaggatctgcttccattattatttgatcgactcctgtccagctcaaccttttggaccaactccgtggcgatagcagtagcagcagcagaaaggtaaagcgcgcgtgtgtgtgtgtgcccctgtgaatctgtggatcggagacagtgtgcagtagcatagcatcagcagcaaggtatttaaagcgtgcaagtgtgtgtataactgtatatacgcttcttatatgcatctgtggatattttgcg

SEQ ID NO: 25149 - protein, 312 aa, Zea mays subsp. mays
  misc_feature (1)..(312): Ceres Seq. ID no. 12566277
MDNHQLVAMAAVAQPASPTSPHVAHKIPPGDGPYARAKHFQLVEKDLDASIAWFWKAISAGDKLDSALKDMAVVMKQRGYLAEAIDAIRSLRHLCPKQSQEPLDNILLDLYKASGRTKEEIELLKQKLRKIYLGEAFHGRTTKRARSHGRKIHVSVKQETSRVLGNLAWAYMQQRNFMAAEVVYRKAQMIDPDANKACNLALCLIEQARLADAELVLADVLAGRYLQARDQQDGKIVRKVEELLARIMAHTTWPGGGGGDGRRRPADKSGSGSESDDDDWVENQMLALLDVAVPYRKKSRRLPVFEEISRAE

SEQ ID NO: 25150 - protein, 304 aa, Zea mays subsp. mays
  misc_feature (1)..(304): Ceres Seq. ID no. 12566278
MAAVAQPASPTSPHVAHKIPPGDGPYARAKHFQLVEKDLDASIAWFWKAISAGDKLDSALKDMAVVMKQRGYLAEAIDAIRSLRHLCPKQSQEPLDNILLDLYKASGRTKEEIELLKQKLRKIYLGEAFHGRTTKRARSHGRKIHVSVKQETSRVLGNLAWAYMQQRNFMAAEVVYRKAQMIDPDANKACNLALCLIEQARLADAELVLADVLAGRYLQARDQQDGKIVRKVEELLARIMAHTTWPGGGGGDGRRRPADKSGSGSESDDDDWVENQMLALLDVAVPYRKKSRRLPVFEEISRAE

SEQ ID NO: 25151 - protein, 242 aa, Zea mays subsp. mays
  misc_feature (1)..(242): Ceres Seq. ID no. 12566279
MAVVMKQRGYLAEAIDAIRSLRHLCPKQSQEPLDNILLDLYKASGRTKEEIELLKQKLRKIYLGEAFHGRTTKRARSHGRKIHVSVKQETSRVLGNLAWAYMQQRNFMAAEVVYRKAQMIDPDANKACNLALCLIEQARLADAELVLADVLAGRYLQARDQQDGKIVRKVEELLARIMAHTTWPGGGGGDGRRRPADKSGSGSESDDDDWVENQMLALLDVAVPYRKKSRRLPVFEEISRAE

SEQ ID NO: 25152 - DNA, 1173 bp, Zea mays subsp. mays
  misc_feature (1)..(1173): Ceres Seq. ID no. 12566291
gtgaccacgtcccacgccgagttccgctggccgctgtcgccgaaacacggcagcaggagcagtagcgtccgtcctgtccgcgcgcgttcccctccccgaccggcaggttccccggccattcatccgtttcccactgctcctccgtggctcagctctgctccctgtatcggtctgcccctctgccctcccggtctctcctcttcccgtcccgcccagcgcgtcccccaaggaagccccgacgccgcggcatggggatcgtggaggaggcgcacaacctgcgcgtggtgggcgaggggaagcgcggggtcatcgtgctggcgcacggcttcggcaccgaccagtccgtctggaagcatctggtgccgcacctcgtcgccgactaccgcgtcgtgctcttcgacaccatgggcgccggccccaccaacccggactacttcgacttctcccgctacgccacgctcgagggctacgcgctcgacctcctcgccatcctccaggagctcggcgtccagtcctgcatctacgtcggccactccgtctccgcgatcatcggcgcgctcgcgtccatctccaggcccgacctcttcaccaagctcgtgctcctctccgcgtccccaaggtacctcaacgatgtggactactatggcgggttcgagcaagatgagctggatgagctgtttgaggcgatgcaatcaaactacaaggcctggtgcttaggttttgcacccctgtgtgtcggaggagatatggaatcagtggcagttcaggagtttagcaggacactcttcaatatacgtccggacattgcacttaatgttgcccagacgatcttccagagcgatgtgcgcagcctcctcccgcacgttagtgtcccatgccacattgttcagagcaccaaggatctcgcggtgccagttgtggtgtctgagtacctgcacaggcaccttggtggcgactccatcgtggaggtgatgccctctgaaggccatcttccccagcttagctctccagacattgtaacccctgtcttactccggcacatccagcatgacatcgcaatctaggttggccagtcgttccaacaagacaatgagcactcgaagctgtctactgcctgtttgtatgatatcccgcttaattgttcaacgtaggattgcatctatttgatgctct

SEQ ID NO: 25153 - protein, 271 aa, Zea mays subsp. mays
  misc_feature (1)..(271): Ceres Seq. ID no. 12566292
MGIVEEAHNLRVVGEGKRGVIVLAHGFGTDQSVWKHLVPHLVADYRVVLFDTMGAGPTNPDYFDFSRYATLEGYALDLLAILQELGVQSCIYVGHSVSAIIGALASISRPDLFTKLVLLSASPRYLNDVDYYGGFEQDELDELFEAMQSNYKAWCLGFAPLCVGGDMESVAVQEFSRTLFNIRPDIALNVAQTIFQSDVRSLLPHVSVPCHIVQSTKDLAVPVVVSEYLHRHLGGDSIVEVMPSEGHLPQLSSPDIVTPVLLRHIQHDIAI

SEQ ID NO: 25154 - protein, 238 aa, Zea mays subsp. mays
  misc_feature (1)..(238): Ceres Seq. ID no. 12566293
VTTSHAEFRWPLSPKHGSRSSSVRPVRARSPPRPAGSPAIHPFPTAPPWLSSAPCIGLPLCPPGLSSSRPAQRVPQGSPDAAAWGSWRRRTTCAWWARGSAGSSCWRTASAPTSPSGSIWCRTSSPTTASCSSTPWAPAPPTRTTSTSPATPRSRATRSTSSPSSRSSASSPASTSATPSPRSSARSRPSPGPTSSPSSCSSPRPQGTSTMWTTMAGSSKMSWMSCLRRCNQTTRPGA

SEQ ID NO: 25155 - protein, 219 aa, Zea mays subsp. mays
  misc_feature (1)..(219): Ceres Seq. ID no. 12566294
MGAGPTNPDYFDFSRYATLEGYALDLLAILQELGVQSCIYVGHSVSAIIGALASISRPDLFTKLVLLSASPRYLNDVDYYGGFEQDELDELFEAMQSNYKAWCLGFAPLCVGGDMESVAVQEFSRTLFNIRPDIALNVAQTIFQSDVRSLLPHVSVPCHIVQSTKDLAVPVVVSEYLHRHLGGDSIVEVMPSEGHLPQLSSPDIVTPVLLRHIQHDIAI

SEQ ID NO: 25156 - DNA, 757 bp, Zea mays subsp. mays
  misc_feature (1)..(757): Ceres Seq. ID no. 12566307
atctcgcaatcgaggcgtttttttctgcttcgtaagttcgtggtcgatccagcgagcgagcgagcagaccggcggctaaccgcggagggagagatggcgcaggggacgctggaggtgcttctcgtcggagccaggggcctcgagaacaccgattacctgagcaacatggacccctacgcgcttctgcaatgtcgctcccacgagcagaagagcagcgtcgcatctggcaaaggctgtgaacctgagtggaacgagaccttcgtgttcaccgtctccgatggcgcagcagagctgttcatcaagctcctggacagtgacggtggcactgatgacgattttgttggtgaggcaacgattcctctggaagcagtttacacggaaggaaacatccctccgactgtttacaatgttgtgaaagacgaagaataccgcggagaaatcaaagttggcctcacgttcactccagaggaccagggcttctgaggaataacttggcgtgtggccgctggaactggaggcagcaggcagtcgtcttatgattcagaagcaaacgacggatcgattcccttgatgtactgcagtccagtgagcgtgcatctacaacttgtagaagaagcctgcaacatgatcacgggatcctgtactgcatcactctaaagcctagctaaaaccaccagctcctgtacttgatgccgggcgggcttgtcatgtactgaaacctacaataacggtcgccgaaccccactctttgatgttc

SEQ ID NO: 25157 - protein, 160 aa, Zea mays subsp. mays
  misc_feature (1)..(160): Ceres Seq. ID no. 12566308
ISQSRRFFLLRKFVVDPASERADRRLTAEGEMAQGTLEVLLVGARGLENTDYLSNMDPYALLQCRSHEQKSSVASGKGCEPEWNETFVFTVSDGAAELFIKLLDSDGGTDDDFVGEATIPLEAVYTEGNIPPTVYNVVKDEEYRGEIKVGLTFTPEDQGF

SEQ ID NO: 25158 - protein, 129 aa, Zea mays subsp. mays
  misc_feature (1)..(129): Ceres Seq. ID no. 12566309
MAQGTLEVLLVGARGLENTDYLSNMDPYALLQCRSHEQKSSVASGKGCEPEWNETFVFTVSDGAAELFIKLLDSDGGTDDDFVGEATIPLEAVYTEGNIPPTVYNVVKDEEYRGEIKVGLTFTPEDQGF

SEQ ID NO: 25159 - protein, 105 aa, Zea mays subsp. mays
  misc_feature (1)..(105): Ceres Seq. ID no. 12566310
MDPYALLQCRSHEQKSSVASGKGCEPEWNETFVFTVSDGAAELFIKLLDSDGGTDDDFVGEATIPLEAVYTEGNIPPTVYNVVKDEEYRGEIKVGLTFTPEDQGF

SEQ ID NO: 25160 - DNA, 1848 bp, Zea mays subsp. mays
  misc_feature (1)..(1848): Ceres Seq. ID no. 12566326
gcacgagaccattacctagaacatcctaatcgaaaaacaatctttcttgtatcactaagctagtggccacaactcgttggcaacgaggaagcagcaataagccgagaagctatgccgccgccatatatggcacaggctgccggcaccgccgatgccactgatgaggctccactgctgctggcctcgtcggcggcggggtcgacgccgtcgccgccagctgcagcaccgcgccggaacaggttcgccttcgtctgcgccacgctcgcctccgtcaccaccatgctacatggctacaacctgacgctgatgagcggcgcggagctgttcatgcgggaggacgtggggctcaccgacggcgaggtcgaggtgctggcggggtccatgaacgtgttcatgctcgcgtccatcctcgccgccggctgagtggccgaccacctgggacgccgccgcaccctcgtgctcgccaacgccttcctcatggccggcgcgctcgccatgtcgctcggcaccagcttcgccgcgctcatggcggcgcgcttcgtcaccagcgtcggctccgggttcgcgcgcgtcgtcgcccccgtctacaacgccgagatatcgcaggcggctacgcgtggcgtcctctcatccatgctcgatatattcatcaacgtcggcatcctgctcagctacgtgtccaactacgcgttcgcgggcctcccggtgcacatcgggtggcgtctcatgtacgccgtcggcgtcatcccgcccgtgctcatcgccgccggggtgctcgtcatcatgccagagtcaccgcggtggctcgcgatgcagggccgccacgccgacgcgcgcgcggtgctgctgcgcacgtcggacagcccggcagacgccgacttccggctcggggagatcaagcgagccgccgacgcgccgtcgcccgctgctgcggcgcgccacggtggcggcggtgtctggagggagctcttcgtccggccatccaccacaaccacgagcgtgcggcgcatcctcggctgcgtcctcggcctgcagttcttcgtgcaggcgtccggcgtcgacgccatcctcctctacagcccgctggtcttcaaggcggtcggcgtggcgtccacctccgccgtgctcggcgccaccgtgtccatcggagccgtcaagacgtgcttcatcctcgtcgccatgctcttcaccgaccgcctcggccggcgcccgctcctcctcgccagcaccgccggcgtcgccgtgaccgtgaccgccctcgccgtgacgctgtgcgtgggcacggcgtcgccggcgacggccgcggcgtgcctggcgtccgtgctggccttcgtggccgcgtactccatcggctacgggtccgtggtgtcgacgtacagcgcggaggtcttgccgctacggctgcgcgcgcagggctccagcctgggcgtggccgtgaacaggctcacgtgcggggtggtcagcatgacgttcatctcgctcgccgacgccatcaccatgcccgggtgcttcttcctctacgctgcggtgacggcggctgcgtttgtgttcgtgtacacgcggctgccggagaccaagggccggagcctagaagacatggaagtgctcttccgcaagtgagggtggccggtggccacgtatagttgccattagcacaaggtcgcgtttggcagagttagtagaaattatccacaattaccagcagatttggaactccggtaccgcgcgctcgtcggtcgcaccgtcgcagtcgcagctacccccacggtcccacctagagatctcaacatcagatttaaacaccatatactacccatacctatgaagttatatctatctctatctccg

SEQ ID NO: 25161 - protein, 380 aa, Zea mays subsp. mays
  misc_feature (1)..(380): Ceres Seq. ID no. 12566327
MAGALAMSLGTSFAALMAARFVTSVGSGFARVVAPVYNAEISQAATRGVLSSMLDIFINVGILLSYVSNYAFAGLPVHIGWRLMYAVGVIPPVLIAAGVLVIMPESPRWLAMQGRHADARAVLLRTSDSPADADFRLGEIKRAADAPSPAAAARHGGGGVWRELFVRPSTTTTSVRRILGCVLGLQFFVQASGVDAILLYSPLVFKAVGVASTSAVLGATVSIGAVKTCFILVAMLFTDRLGRRPLLLASTAGVAVTVTALAVTLCVGTASPATAAACLASVLAFVAAYSIGYGSVVSTYSAEVLPLRLRAQGSSLGVAVNRLTCGVVSMTFISLADAITMPGCFFLYAAVTAAAFVFVYTRLPETKGRSLEDMEVLFRK

SEQ ID NO: 25162 - protein, 374 aa, Zea mays subsp. mays
  misc_feature (1)..(374): Ceres Seq. ID no. 12566328
MSLGTSFAALMAARFVTSVGSGFARVVAPVYNAEISQAATRGVLSSMLDIFINVGILLSYVSNYAFAGLPVHIGWRLMYAVGVIPPVLIAAGVLVIMPESPRWLAMQGRHADARAVLLRTSDSPADADFRLGEIKRAADAPSPAAAARHGGGGVWRELFVRPSTTTTSVRRILGCVLGLQFFVQASGVDAILLYSPLVFKAVGVASTSAVLGATVSIGAVKTCFILVAMLFTDRLGRRPLLLASTAGVAVTVTALAVTLCVGTASPATAAACLASVLAFVAAYSIGYGSVVSTYSAEVLPLRLRAQGSSLGVAVNRLTCGVVSMTFISLADAITMPGCFFLYAAVTAAAFVFVYTRLPETKGRSLEDMEVLFRK

SEQ ID NO: 25163 - protein, 364 aa, Zea mays subsp. mays
  misc_feature (1)..(364): Ceres Seq. ID no. 12566329
MAARFVTSVGSGFARVVAPVYNAEISQAATRGVLSSMLDIFINVGILLSYVSNYAFAGLPVHIGWRLMYAVGVIPPVLIAAGVLVIMPESPRWLAMQGRHADARAVLLRTSDSPADADFRLGEIKRAADAPSPAAAARHGGGGVWRELFVRPSTTTTSVRRILGCVLGLQFFVQASGVDAILLYSPLVFKAVGVASTSAVLGATVSIGAVKTCFILVAMLFTDRLGRRPLLLASTAGVAVTVTALAVTLCVGTASPATAAACLASVLAFVAAYSIGYGSVVSTYSAEVLPLRLRAQGSSLGVAVNRLTCGVVSMTFISLADAITMPGCFFLYAAVTAAAFVFVYTRLPETKGRSLEDMEVLFRK

SEQ ID NO: 25164 - DNA, 808 bp, Zea mays subsp. mays
  misc_feature (1)..(808): Ceres Seq. ID no. 12566346
aattaatccaacgtagccatgcacaacacgtcaacacacacgcacgcaggctgctgctgggcgttctcggcggtggcggcggtggaagggctgaacaagatccggacggggcggctggtgtcgctgtcggagcaggagctggtggactgcgacgtcagcggcgtggaccagggctgcgacggcggcctcatggacaacgccttccagttcgtcgcgcgccgcggcgggctggcctcggagtcgggctacccgtaccagggccgggacgggccctgccgctcgtcggccgccgccgccgccgcgtccatccggggccacgaggacgtgccgcgcaacaacgaggccgcgctcgcggccgccgtggcccaccagcccgtgtccgtggccatcaacggcgaggacatggcgttccgcttctacgacagcggcgtgctgggcggggcctgcggcacggacctcaaccacgccatcacggccgtcgggtacggcacggcggccgacggcacaaggtactggctgatgaagaactcctggggcgcgtcgtggggcgagggcggatacgtccggatccgccgcggcgtccgcggggagggcgtctgcggtctcgccaagttgccgtcttaccccgtctagagccaggcttattcccgtcggttttaggccgacgagaattaagtgttttcctgtagtaataactatgtccaaaaatatgttaaacaaacaataattgcaactgctgtctggtgtaattgcaacttctgatctggtgtgattgcaacttctatataactatgtccaaaaatctgtt

SEQ ID NO: 25165 - protein, 228 aa, Zea mays subsp. mays
  misc_feature (1)..(228): Ceres Seq. ID no. 12566347
LIQRSHAQHVNTHARRLLLGVLGGGGGGRAEQDPDGAAGVAVGAGAGGLRRQRRGPGLRRRPHGQRLPVRRAPRRAGLGVGLPVPGPGRALPLVGRRRRRVHPGPRGRAAQQRGRARGRRGPPARVRGHQRRGHGVPLLRQRRAGRGLRHGPQPRHHGRRVRHGGRRHKVLADEELLGRVVGRGRIRPDPPRRPRGGRLRSRQVAVLPRLEPGLFPSVLGRRELSVFL

SEQ ID NO: 25166 - protein, 204 aa, Zea mays subsp. mays
  misc_feature (1)..(204): Ceres Seq. ID no. 12566348
MHNTSTHTHAGCCWAFSAVAAVEGLNKIRTGRLVSLSEQELVDCDVSGVDQGCDGGLMDNAFQFVARRGGLASESGYPYQGRDGPCRSSAAAAAASIRGHEDVPRNNEAALAAAVAHQPVSVAINGEDMAFRFYDSGVLGGACGTDLNHAITAVGYGTAADGTRYWLMKNSWGASWGEGGYVRIRRGVRGEGVCGLAKLPSYPV

SEQ ID NO: 25167 - protein, 147 aa, Zea mays subsp. mays
  misc_feature (1)..(147): Ceres Seq. ID no. 12566349
MDNAFQFVARRGGLASESGYPYQGRDGPCRSSAAAAAASIRGHEDVPRNNEAALAAAVAHQPVSVAINGEDMAFRFYDSGVLGGACGTDLNHAITAVGYGTAADGTRYWLMKNSWGASWGEGGYVRIRRGVRGEGVCGLAKLPSYPV

SEQ ID NO: 25168 - DNA, 1468 bp, Zea mays subsp. mays
  misc_feature (1)..(1468): Ceres Seq. ID no. 12566388
gcacgagaccattacctagaacatcctaatcgaaaaacctcctcttctcgcctgtgccttttgcccctgtgctcgccacacgcggcgcaaccgcccacccacccagccaggagaagaagatctccgtcgcctgctcttcgcttcgcttcgaatcggaggtgtcgagtagccagtggtgtccctatggattcagcttttagaagagctctcaatgagcctatgtgcttggaagaaaccgtcgtccaacaaggaattgaaaggtgcccattcctgaggaacatcaatgagcctacaagtttttccttctcgtccgtcaacttccctattcccgcaagaggagccaagggaccgattttcgaagatgggcctaattttgacatggcatttcgagttttccatggtagagatggggttgttccactttcagaagggtcattggcccagattgagaagccactgccaaagcccaatcctgagttcaacccattggcagccaaagcagcaaccatcagtctatctgcatttggagggtttttcagctttggtgacttctcaaataagcgcaataagaaaaactccaacaagaagaaccccaacaacctcccccagaataaaggccagcctaacaataacaaccatgaagcactgagcaacgagtggctggagatgggccaatgtccacttgcgaaatcttatagggcattaagtggaattgtgccacttgtcgcaaagatgatgacacccccagctggtatgaaacttaagtgcccacctgccgtggttgctgcccgcgcagcactatcccgcacagcctttgctaaggggcttcgccctcagcccctgccaacaaaaatactggtgattgcattgcttggtatggcagcaaatgttcctctgggcatctggagggagcacacacagaagttttcattgcagtggtttgccgcagtacatgctgcagtgccgttcatagggatgctcaggaaatctgtgctgatgcctaagacagccatggcccttactatagccgcctcgatattgggtcagacaatcgggtcaagagctgaacgtatcagactgaagagggccgcggcagcaaaattagcaagagagagccatggtgacgctgctgactacatcaaagcaccaatgagtctgaaaacagggaaccacactgttcagttttgggatccgctttccctcagagctgaaagcacagtggctgcaggtaccacagcagttcttgtccctgccatttctgctttcaactgatgacaggaatggattcattacgattgtaccagcatcgctggttggtgtattcttttttttctcctattctaaataatctgattgttgtatccattactgtacttttgagcttaagaaagaaatacttcacggcaaactcttcatcctgttttggtggccacatgacagcgaataaattagagaacacgttgagctg

SEQ ID NO: 25169 - protein, 423 aa, Zea mays subsp. mays
  misc_feature (1)..(423): Ceres Seq. ID no. 12566389
ARDHYLEHPNRKTSSSRLCLLPLCSPHAAQPPTHPARRRRSPSPALRFASNRRCRVASGVPMDSAFRRALNEPMCLEETVVQQGIERCPFLRNINEPTSFSFSSVNFPIPARGAKGPIFEDGPNFDMAFRVFHGRDGVVPLSEGSLAQIEKPLPKPNPEFNPLAAKAATISLSAFGGFFSFGDFSNKRNKKNSNKKNPNNLPQNKGQPNNNNHEALSNEWLEMGQCPLAKSYRALSGIVPLVAKMMTPPAGMKLKCPPAVVAARAALSRTAFAKGLRPQPLPTKILVIALLGMAANVPLGIWREHTQKFSLQWFAAVHAAVPFIGMLRKSVLMPKTAMALTIAASILGQTIGSRAERIRLKRAAAAKLARESHGDAADYIKAPMSLKTGNHTVQFWDPLSLRAESTVAAGTTAVLVPAISAFN

SEQ ID NO: 25170 - protein, 362 aa, Zea mays subsp. mays
  misc_feature (1)..(362): Ceres Seq. ID no. 12566390
MDSAFRRALNEPMCLEETVVQQGIERCPFLRNINEPTSFSFSSVNFPIPARGAKGPIFEDGPNFDMAFRVFHGRDGVVPLSEGSLAQIEKPLPKPNPEFNPLAAKAATISLSAFGGFFSFGDFSNKRNKKNSNKKNPNNLPQNKGQPNNNNHEALSNEWLEMGQCPLAKSYRALSGIVPLVAKMMTPPAGMKLKCPPAVVAARAALSRTAFAKGLRPQPLPTKILVIALLGMAANVPLGIWREHTQKFSLQWFAAVHAAVPFIGMLRKSVLMPKTAMALTIAASILGQTIGSRAERIRLKRAAAAKLARESHGDAADYIKAPMSLKTGNHTVQFWDPLSLRAESTVAAGTTAVLVPAISAFN

SEQ ID NO: 25171 - protein, 350 aa, Zea mays subsp. mays
  misc_feature (1)..(350): Ceres Seq. ID no. 12566391
MCLEETVVQQGIERCPFLRNINEPTSFSFSSVNFPIPARGAKGPIFEDGPNFDMAFRVFHGRDGVVPLSEGSLAQIEKPLPKPNPEFNPLAAKAATISLSAFGGFFSFGDFSNKRNKKNSNKKNPNNLPQNKGQPNNNNHEALSNEWLEMGQCPLAKSYRALSGIVPLVAKMMTPPAGMKLKCPPAVVAARAALSRTAFAKGLRPQPLPTKILVIALLGMAANVPLGIWREHTQKFSLQWFAAVHAAVPFIGMLRKSVLMPKTAMALTIAASILGQTIGSRAERIRLKRAAAAKLARESHGDAADYIKAPMSLKTGNHTVQFWDPLSLRAESTVAAGTTAVLVPAISAFN

SEQ ID NO: 25172 - DNA, 1175 bp, Zea mays subsp. mays
  misc_feature (1)..(1175): Ceres Seq. ID no. 12566396
gacgtcgtcccgaccttcttttcaatcccgtctcggattcgttccgtctcagctaccgcgaccacgacgccgacgcgagagggcagggaacacagccactcgccgacgagaccccggcgcgcgcgagagaaagagaagagaggaggatcttttgttcgtgaaaaatattggaggcggagggaaggtgaaggagggggatcggagatgaacgtgttccggctggcgggggacatgacccacctcctcagcgtggtagtgctgctcctcaagatccataccatcaagtcctgcgcaggcatatctctgaagacacaggagctgtatgcacttgtttttgcagcacggtacctggacctgtttgttcattttgtgtctctgtataacactgtcatgaagctggtcttcttggcaagttctttctcgatagtttggtacatgaagcggcataagattgtgcggaggacatatgacaaggatcatgacacctttcgccattacgttttagtgttgccttgtcttcttctggctctcctcattaatgagaagtttacttttagagaggtgatgtgggcattctccatttatttggaagctgtcgcgatatttccacaacttgtgttgctacagcggacaaggaatattgacaacctgactggccaatatgtcttcttcttgggtgcctaccgtgtgctttatatccttaactggatttaccgatacttcactgagccccattttgtccactggataagttggatggcaggaatagtgcaaactctgttgtatgctgacttcttcttttattacataatgagctggaagaacaatgtgaagctagagctgccagcttaaggttgctgctcctgtccccaagatatagtagggtaatatatcagataggcaggccccatacacagcatgatcattgctatcgccaactgggttatgaaaaaagcattttagttgcgtggcttgtatcgccttgtatctctctgctattgttggaagaacaggaaagtcaggctcaccatgtaactttttacaataagctgcgtaagatcagcactagaaggttgtgaattgtgatcgtccttagggaattttgtgctgatgtaaccctttcggcaagtgattctcatacaatataatctcagactataattggtaattgtttc

SEQ ID NO: 25173 - protein, 283 aa, Zea mays subsp. mays
  misc_feature (1)..(283): Ceres Seq. ID no. 12566397
DVVPTFFSIPSRIRSVSATATTTPTREGREHSHSPTRPRRAREKEKRGGSFVREKYWRRREGEGGGSEMNVFRLAGDMTHLLSVVVLLLKIHTIKSCAGISLKTQELYALVFAARYLDLFVHFVSLYNTVMKLVFLASSFSIVWYMKRHKIVRRTYDKDHDTFRHYVLVLPCLLLALLINEKFTFREVMWAFSIYLEAVAIFPQLVLLQRTRNIDNLTGQYVFFLGAYRVLYILNWIYRYFTEPHFVHWISWMAGIVQTLLYADFFFYYIMSWKNNVKLELPA

SEQ ID NO: 25174 - protein, 215 aa, Zea mays subsp. mays
  misc_feature (1)..(215): Ceres Seq. ID no. 12566398
MNVFRLAGDMTHLLSVVVLLLKIHTIKSCAGISLKTQELYALVFAARYLDLFVHFVSLYNTVMKLVFLASSFSIVWYMKRHKIVRRTYDKDHDTFRHYVLVLPCLLLALLINEKFTFREVMWAFSIYLEAVAIFPQLVLLQRTRNIDNLTGQYVFFLGAYRVLYILNWIYRYFTEPHFVHWISWMAGIVQTLLYADFFFYYIMSWKNNVKLELPA

SEQ ID NO: 25175 - protein, 206 aa, Zea mays subsp. mays
  misc_feature (1)..(206): Ceres Seq. ID no. 12566399
MTHLLSVVVLLLKIHTIKSCAGISLKTQELYALVFAARYLDLFVHFVSLYNTVMKLVFLASSFSIVWYMKRHKIVRRTYDKDHDTFRHYVLVLPCLLLALLINEKFTFREVMWAFSIYLEAVAIFPQLVLLQRTRNIDNLTGQYVFFLGAYRVLYILNWIYRYFTEPHFVHWISWMAGIVQTLLYADFFFYYIMSWKNNVKLELPA

SEQ ID NO: 25176 - DNA, 1569 bp, Zea mays subsp. mays
  misc_feature (1)..(1569): Ceres Seq. ID no. 12566419
gcgcgtcttcattctttctccctgccctcccctgctgaaggaagccgcctttttggagtttggacgcgggaggacagcctccgcactttccgtccgtcgcgaggaattcctgcccgggcgggcgtagagcagggcgaagcattcgttggggacgaacgtttagggccggggatcggggaacacgaggctgcgcgttggcgcaagcaagcaaattttgggtcctagcttgaaggactgccatctttttttttggttggtgagctacacatcaaatgttaatcccccgtttccgtactcttatattgtgcttattattattatcttctgtaatactatagcatttattctgtctgtacataggtgggatcaaattatctgttaaggttccttcgtttatgatcttttacatctataatttgcaactcatctctttgtttgatttgatttgattgccctgcctgttgatggtgaaactagcgtctgtttgatagaacgcatttttgccggccagctccactcgagaatttgaaggaattttaccaacgtggggagctgaatatttttttctgctcctctcattttccactctccacccgcgcctgactgcagctggctgcgatccccctatctaccgcctgattcatctttgtctccgtcggtgccgccctctccgccagcctgaccccagggatggctggaaaaggaagctatgtacctccacaatatattcccttatacagcctagataccgaagaggatcgtgtccctgccgtggaagagaaccatgctacgcgccctaaactaaaccaggatccaacacaatggtcatctggcatctgtgcctgttttgatgacccccagagctgttgtattggtgcgacttgcccctgtttcctttttggaaagaatgcacaattcttgggatctggaactcttgctggatcatgcactacacattgcatgttgtggggccttctcacaagtctatgctgtgtatttactggaggtctagtattagcagttccaggatctgccgttgcttgttatgcttgcggatatcgcagtgcactaagaacaaagtacaatcttccggaagcaccctgtggcgatttgacgacacacttattctgtcacttgtgtgctatatgccaggagtacagggagatccgtgagagaacaggcagtggctcctcaccagctcctaatgtgactccacctccagttcagacgatggatgagctttgatctttaactgatatgaatgtatgttatctgacaaactttggtgtgtggcctggtggctagtgctgcctttgcctgttggcattttgacatatttttgttcttgggctctcacaacgctgctatgttgtttgtagagttgtaaacacgggttttgaactagtgaaccactgacagttcacggaagttgtaaacacagttgtaccatggaactgtagtagaattattaagtgtatttttttttggctatttatattggtgagaggatgggaagggaaaagaaaagaaatgcacttatcatgcagaatgtttcattgtgtttagttc

SEQ ID NO: 25177 - protein, 184 aa, Zea mays subsp. mays
  misc_feature (1)..(184): Ceres Seq. ID no. 12566420
MAGKGSYVPPQYIPLYSLDTEEDRVPAVEENHATRPKLNQDPTQWSSGICACFDDPQSCCIGATCPCFLFGKNAQFLGSGTLAGSCTTHCMLWGLLTSLCCVFTGGLVLAVPGSAVACYACGYRSALRTKYNLPEAPCGDLTTHLFCHLCAICQEYREIRERTGSGSSPAPNVTPPPVQTMDEL

SEQ ID NO: 25178 - protein, 94 aa, Zea mays subsp. mays
  misc_feature (1)..(94): Ceres Seq. ID no. 12566421
MLWGLLTSLCCVFTGGLVLAVPGSAVACYACGYRSALRTKYNLPEAPCGDLTTHLFCHLCAICQEYREIRERTGSGSSPAPNVTPPPVQTMDEL

SEQ ID NO: 25179 - DNA, 1732 bp, Zea mays subsp. mays
  misc_feature (1)..(1732): Ceres Seq. ID no. 12566433
acgtactgctctcctagctagcttagctactaccagctccgatcctgtgctgccgccgccatggagaatccctacacgagcttcttcaacagccatccgcagcaccaccgctactactaccaccccgcgccgccagcgccggcgccagccgcctaccacccctccctgcctttcttcgctgcgcaccgccagccacctgctccgacggcgcccgccccgccctcgccaccgctccgggaagccctgccgctgctctccctggcccccacgcggcatgaggagcgggagcgccgcgcccggccaccggcaccagcgttggaggattctgaagagaaccgggacgagggagaagaagagcaggaggaggaggagggccccaccgcgagcagcaagagcaaccacggccagcaccagcgcctgggagtgggacgacagcgagggttcttcgccgacctgaacgccagcgcggcgggtgacgatgacgacccgatggacgtggaggctgcagccgacggctccggctccgcggcggcgggcgacgacgtgaccgtggcgctgcgcatcggtctgccgctgccgggacctgccgagctggtctcggacctctcctcttccggcggcgcccgcaggcaacagcaccagcacgacggcggcggcggcgaggaggaggaggaggatgaggagggtgacggggagaacggtggcggcggcgaggaggaaggaaccaccgcggcggcgccgctagggttcccgtcctcgccgattgggcggctcaacaaggggcagtactggatcccgacgccgtcgcagatcctcatcggcccgacgcagttctcctgccccgtctgcttcaagaccttcaaccgctacaacaacatgcagatgcacatgtggggtcacgggtcacagtaccgcaagggcccggagtcgctgcggggcatccagccgacggccatgctgcggctgccgtgctactgctgctcgccggggtgccgcaacaacatcgaccacccgcgcgccaagccgctcaaggacttccgcacgctgcagacgcactacaagcgcaagcacggcctcaagcccttcctctgccgccgctgcggcaaggccttcgccgtcaagggcgactggcgcacgcacgagaagaactgcggcaggctctggtactgcctctgcggctccgagttcaagcacaagcgctcgctcaaggaccacgcccgcgccttcggccgcggccacggcttcgtcggcggcggccctcctggcgccgggtgcggcgggggactcgacgacgacgatgacggcgctgtttccgacgtcgagcacgacggtgccgccacggcggccaggtcgatgtgaccgatccatgcagctgccatctatggatcgatcgagctctctatattcctagccggccggcaggtcaatattatatatacttattagtaggccgaccgactggtgcaagtgcaaaagaaaatctgttgtaccatatagtaacagattatcaagctgttctttcattttgcagctgctgtagcgctactgctatatagagtcggttctcttcgtctgctccgtcctagttaagtgcagcacacggctcatccctggcacgagaaataaatcacgggcatgcgtgtgtcaacagctagaatatgtgctcgattgatgcacagtgtgttagaatttattgtccattttctaataatattttttactgttgaagttc

SEQ ID NO: 25180 - protein, 432 aa, Zea mays subsp. mays
  misc_feature (1)..(432): Ceres Seq. ID no. 12566434
MENPYTSFFNSHPQHHRYYYHPAPPAPAPAAYHPSLPFFAAHRQPPAPTAPAPPSPPLREALPLLSLAPTRHEERERRARPPAPALEDSEENRDEGEEEQEEEEGPTASSKSNHGQHQRLGVGRQRGFFADLNASAAGDDDDPMDVEAAADGSGSAAAGDDVTVALRIGLPLPGPAELVSDLSSSGGARRQQHQHDGGGGEEEEEDEEGDGENGGGGEEEGTTAAAPLGFPSSPIGRLNKGQYWIPTPSQILIGPTQFSCPVCFKTFNRYNNMQMHMWGHGSQYRKGPESLRGIQPTAMLRLPCYCCSPGCRNNIDHPRAKPLKDFRTLQTHYKRKHGLKPFLCRRCGKAFAVKGDWRTHEKNCGRLWYCLCGSEFKHKRSLKDHARAFGRGHGFVGGGPPGAGCGGGLDDDDDGAVSDVEHDGAATAARSM

SEQ ID NO: 25181 - protein, 289 aa, Zea mays subsp. mays
  misc_feature (1)..(289): Ceres Seq. ID no. 12566435
MDVEAAADGSGSAAAGDDVTVALRIGLPLPGPAELVSDLSSSGGARRQQHQHDGGGGEEEEEDEEGDGENGGGGEEEGTTAAAPLGFPSSPIGRLNKGQYWIPTPSQILIGPTQFSCPVCFKTFNRYNNMQMHMWGHGSQYRKGPESLRGIQPTAMLRLPCYCCSPGCRNNIDHPRAKPLKDFRTLQTHYKRKHGLKPFLCRRCGKAFAVKGDWRTHEKNCGRLWYCLCGSEFKHKRSLKDHARAFGRGHGFVGGGPPGAGCGGGLDDDDDGAVSDVEHDGAATAARSM

SEQ ID NO: 25182 - DNA, 1091 bp, Zea mays subsp. mays
  misc_feature (1)..(1091): Ceres Seq. ID no. 12566444
aaaacagatcccaagtgctgccggcgagccagccggcctccatcttgtagcgaccgttcgtgacgtcgatgggtgacttcgtgggccacgtgctgccgggcacgctgctgctggcggtgggcctgtggcgggtgtgggcgtcagtggcgcgcttcggggccgacccggcggcgttccgcgtccgctcctggaaccccgtcccggcggcggggccgcggctgctggagctgcacgtggtggccggcggcgcgttcctggacatgtgcgtggagctctactacgccaacccgctccgcgtcctcaccggcggcggggtcgacccgggccacctcggcggcctcgagcacgccagcatgctcctcatgttcttcctcttcggcgcgctcgccctcgtctccgagaagaccaggtacctgcctttatcggacggcgcgctgagcctggtgttcgcgagcgcattcacggcagagttcctgctcttctacttccactccaccacgcacgcggggctggagggctactaccaccgcctcctcctcgccgtcctcgccctctgcatcgccgcgctcgtcgccggcgcgctcctgcccgccagcttccccgccgacctcggcgccggcgtcctcatcgccgtccagggcctgtggttctaccaggccgcgctcacgctgtacggccccatgctccccgcgggctgcgtccgccacttcgactcccctcactccgacgcccgcatcgagtgccacggcggcgccgcgcaggagcgcgccgagcagctggccaacttccagctgttcgggctcgtgttcctcgcgttcttctacgcgctcgggtgctacgccgtgactgcggcaaggtatgggaataacctggagctgacgacggtccatcacacacatgtggctgcgactgccatgtagaaggagaacaaagtgcacgatctagtggccacggatctctttttttcttcttgttcagttcagagtacgtagggcaggcgagtacatgaatggctgggctgttcaaaagaagctcgagtgtgatcttacttaccgcatggacctgtcactgtaaaatgtcaagttcgagcc

SEQ ID NO: 25183 - protein, 283 aa, Zea mays subsp. mays
  misc_feature (1)..(283): Ceres Seq. ID no. 12566445
MGDFVGHVLPGTLLLAVGLWRVWASVARFGADPAAFRVRSWNPVPAAGPRLLELHVVAGGAFLDMCVELYYANPLRVLTGGGVDPGHLGGLEHASMLLMFFLFGALALVSEKTRYLPLSDGALSLVFASAFTAEFLLFYFHSTTHAGLEGYYHRLLLAVLALCIAALVAGALLPASFPADLGAGVLIAVQGLWFYQAALTLYGPMLPAGCVRHFDSPHSDARIECHGGAAQERAEQLANFQLFGLVFLAFFYALGCYAVTAARYGNNLELTTVHHTHVAATAM

SEQ ID NO: 25184 - protein, 219 aa, Zea mays subsp. mays
  misc_feature (1)..(219): Ceres Seq. ID no. 12566446
MCVELYYANPLRVLTGGGVDPGHLGGLEHASMLLMFFLFGALALVSEKTRYLPLSDGALSLVFASAFTAEFLLFYFHSTTHAGLEGYYHRLLLAVLALCIAALVAGALLPASFPADLGAGVLIAVQGLWFYQAALTLYGPMLPAGCVRHFDSPHSDARIECHGGAAQERAEQLANFQLFGLVFLAFFYALGCYAVTAARYGNNLELTTVHHTHVAATAM

SEQ ID NO: 25185 - protein, 188 aa, Zea mays subsp. mays
  misc_feature (1)..(188): Ceres Seq. ID no. 12566447
MLLMFFLFGALALVSEKTRYLPLSDGALSLVFASAFTAEFLLFYFHSTTHAGLEGYYHRLLLAVLALCIAALVAGALLPASFPADLGAGVLIAVQGLWFYQAALTLYGPMLPAGCVRHFDSPHSDARIECHGGAAQERAEQLANFQLFGLVFLAFFYALGCYAVTAARYGNNLELTTVHHTHVAATAM

SEQ ID NO: 25186 - DNA, 1544 bp, Zea mays subsp. mays
  misc_feature (1)..(1544): Ceres Seq. ID no. 12566452
aagtacacagagatacaaatacagagaggcagagggcaggcggaggcaccatctccctcccttcttcatcgcccacacaagtcctctcatctcctctctgtttcgtgcaagaaacttccttggacaaagatgggagtgcagagttactacaggttattctgctgcgggtgcggcgccaatgcggcggccggcgaccgggaaggcgacgaggacgggggtttcgaggcgttcgccgacaagggggccgccgaagccgggccgcgggggctgtcgtgggcgcaggtggaggcgatgacgggcaggttcacctcggccgtcgtcggcgagggcgggttcagcaccgtgtacctcgcgcgcctctccggcggcgcgctggccgccgtcaaggtccaccgcagcagcgagcgcctccaccgcgtgttccgccaggagctcgacgcgctccgacgcgtccgccacccgcacatcgtccgcctccttgccttctgcgaccagcaagaggaaggcgtgctggtgctggagttcgcggcgaacgggaacctgcacgagcggctccacggcgggggcaaggcggcgggcacgatgccgtgggcgcggcgggtgtcggcggcgctgcaggtggcgcgggcgctcgagtacctgcacgaccgctgcgagccgcaggtggtgcacggcgacgtgaaggcctccaacgtgctcctggacgcggccatgtccgccaagctgtgcgacttcgggtcggcgcggacggggttctcggccgccgtgcgcccgcggccgtccgcgcgcaccgccatgctcggctccccggggtacgtcgacccgcactacatccgctcgggcgtcgtcaccaagaagaccgacgtgtacagcttcggcgtcctgctcctggagctcctcacggggatggaggccttctgcgcggaggagggcggccgcctcctcaccgccgccgtcgcgccgcggctcagggccggcgacccgccccgcgggatggtcgacgagaggctcggcaccgcctacgacgccgccgaggccgccgccgtggcggcgctggccgctgcctgtgtcggcgagaaccccagcctccggccgtccatggccgacgtggtgcgcaccctggagcagagcgcgcagggatccatctccgccgtggggatggcatcggacggtcactggaaggtgtgagtcaccagtggaaagtcgtcgcctccgccgacgcgctcagatctggctccccgagtcgttaacttgcggtgctcatgcgcatgcgtcgcgcacgtggcgcccatccattggttgcgaggagaacaaagcgttgttagtaggcgagcatatcaaaaagaaagaggggacaaaagcgtggtgaaaaaacgttgatttccatagctaaattaggggaagacttggggagataaaaaggcagagctaagttgtgtgctgatggggatttccatcatattatgccaaagcggcatctacttgagagagacaaaaaaaagagaggatctttgcagcgcacgattccaagattttgttgattc

SEQ ID NO: 25187 - protein, 415 aa, Zea mays subsp. mays
  misc_feature (1)..(415): Ceres Seq. ID no. 12566453
VHRDTNTERQRAGGGTISLPSSSPTQVLSSPLCFVQETSLDKDGSAELLQVILLRVRRQCGGRRPGRRRGRGFRGVRRQGGRRSRAAGAVVGAGGGDDGQVHLGRRRRGRVQHRVPRAPLRRRAGRRQGPPQQRAPPPRVPPGARRAPTRPPPAHRPPPCLLRPARGRRAGAGVRGEREPARAAPRRGQGGGHDAVGAAGVGGAAGGAGARVPARPLRAAGGARRREGLQRAPGRGHVRQAVRLRVGADGVLGRRAPAAVRAHRHARLPGVRRPALHPLGRRHQEDRRVQLRRPAPGAPHGDGGLLRGGGRPPPHRRRRAAAQGRRPAPRDGRREARHRLRRRRGRRRGGAGRCLCRREPQPPAVHGRRGAHPGAERAGIHLRRGDGIGRSLEGVSHQWKVVASADALRSGSPSR

SEQ ID NO: 25188 - protein, 395 aa, Zea mays subsp. mays
  misc_feature (1)..(395): Ceres Seq. ID no. 12566454
KYTEIQIQRGRGQAEAPSPSLLHRPHKSSHLLSVSCKKLPWTKMGVQSYYRLFCCGCGANAAAGDREGDEDGGFEAFADKGAAEAGPRGLSWAQVEAMTGRFTSAVVGEGGFSTVYLARLSGGALAAVKVHRSSERLHRVFRQELDALRRVRHPHIVRLLAFCDQQEEGVLVLEFAANGNLHERLHGGGKAAGTMPWARRVSAALQVARALEYLHDRCEPQVVHGDVKASNVLLDAAMSAKLCDFGSARTGFSAAVRPRPSARTAMLGSPGYVDPHYIRSGVVTKKTDVYSFGVLLLELLTGMEAFCAEEGGRLLTAAVAPRLRAGDPPRGMVDERLGTAYDAAEAAAVAALAAACVGENPSLRPSMADVVRTLEQSAQGSISAVGMASDGHWKV

SEQ ID NO: 25189 - protein, 352 aa, Zea mays subsp. mays
  misc_feature (1)..(352): Ceres Seq. ID no. 12566455
MGVQSYYRLFCCGCGANAAAGDREGDEDGGFEAFADKGAAEAGPRGLSWAQVEAMTGRFTSAVVGEGGFSTVYLARLSGGALAAVKVHRSSERLHRVFRQELDALRRVRHPHIVRLLAFCDQQEEGVLVLEFAANGNLHERLHGGGKAAGTMPWARRVSAALQVARALEYLHDRCEPQVVHGDVKASNVLLDAAMSAKLCDFGSARTGFSAAVRPRPSARTAMLGSPGYVDPHYIRSGVVTKKTDVYSFGVLLLELLTGMEAFCAEEGGRLLTAAVAPRLRAGDPPRGMVDERLGTAYDAAEAAAVAALAAACVGENPSLRPSMADVVRTLEQSAQGSISAVGMASDGHWKV

SEQ ID NO: 25190 - DNA, 1421 bp, Zea mays subsp. mays
  misc_feature (1)..(1421): Ceres Seq. ID no. 12566476
aaacgaggatgtactaatgttgtggtaaataatatggacgatagtcgataacgtgaccagtggtggtgtggtgtatggtctgtattgattacatgcagcctaactaatttgccagcgagtgatgcggtgacgtgctgctgctgttgtagtaggtggtggagcaagcccagtccccaatcccaccctgccacccaaccttgcttcttctccgatagctatttctctggtttctccccaatcttcccgggtttccctgattaaagatggctgagtcctttgttctcaataccggctcgaggatcccatcggttgggcttggcgtatggcaaatacaacctgacgctgccaacgacgccatctacgctgctgtcaaggctgggtatcggcatattgactgtgcagcagcatacaacaatgagaaggaggtgggcctggctttgaagaaattatttgaagatggtgtggttaagcgtgatgatttgtttatcacctctaagctatgggctgctaatcatgcacctgaagatgtggaagagggaatcgacaccacacttcaagatttgcagcttgactacttggacttgtacctcatccatggtccaatccgcatcaaaaaaggaactagcacgatgacccctgaaaactttctccctacagatatccctgctacatgggcagcgatggagaagttatacgactctggcaaagctcgtgcaatcggcgtgagtaacttctcttgtaagaagctgcatgatttgcttgccgttgcacgagtgcctccagcagtcaaccaggttgagtgtcatccggtttggcagcaagacaagctccggaagctatgccaatccaatggtgttcatctttctgcattctcgcctttaggctcacctggatctccttggatcaatgggccaagtgtcctcaagaaccccattgtggtctctgttgcagacaagttgcagaaaacgcctgcccaggtcgctctacgctggggaatccaaatgggccatagtgtactcccgaaaagcgccaatgagtccaggattaaggagaacattgacatatttggctggtctattcctgaagatttgatggccaagttctctgaaatcaaacaggtcaggctgctgacagctgagtttgtagttcaccctcaggccggctacaatacattggaggacttttgggatggtgaaatataaaagcatacaaatttgttcagaataaaagagccaggcgaggaaacaaccacaaaaaaggggagatcgaatgcataggccccaatacgatgaatttgggggtttacgtgattgctgaacacaagtattgtgtgactaatctgtgttttgatgtggttcattggttgaagcatgatgtaaaccgtaaaggatattcatgaaaactaaggacgctatagagcg

SEQ ID NO: 25191 - protein, 312 aa, Zea mays subsp. mays
  misc_feature (1)..(312): Ceres Seq. ID no. 12566477
MAESFVLNTGSRIPSVGLGVWQIQPDAANDAIYAAVKAGYRHIDCAAAYNNEKEVGLALKKLFEDGVVKRDDLFITSKLWAANHAPEDVEEGIDTTLQDLQLDYLDLYLIHGPIRIKKGTSTMTPENFLPTDIPATWAAMEKLYDSGKARAIGVSNFSCKKLHDLLAVARVPPAVNQVECHPVWQQDKLRKLCQSNGVHLSAFSPLGSPGSPWINGPSVLKNPIVVSVADKLQKTPAQVALRWGIQMGHSVLPKSANESRIKENIDIFGWSIPEDLMAKFSEIKQVRLLTAEFVVHPQAGYNTLEDFWDGEI

SEQ ID NO: 25192 - protein, 190 aa, Zea mays subsp. mays
  misc_feature (1)..(190): Ceres Seq. ID no. 12566478
MTPENFLPTDIPATWAAMEKLYDSGKARAIGVSNFSCKKLHDLLAVARVPPAVNQVECHPVWQQDKLRKLCQSNGVHLSAFSPLGSPGSPWINGPSVLKNPIVVSVADKLQKTPAQVALRWGIQMGHSVLPKSANESRIKENIDIFGWSIPEDLMAKFSEIKQVRLLTAEFVVHPQAGYNTLEDFWDGEI

SEQ ID NO: 25193 - protein, 173 aa, Zea mays subsp. mays
  misc_feature (1)..(173): Ceres Seq. ID no. 12566479
MEKLYDSGKARAIGVSNFSCKKLHDLLAVARVPPAVNQVECHPVWQQDKLRKLCQSNGVHLSAFSPLGSPGSPWINGPSVLKNPIVVSVADKLQKTPAQVALRWGIQMGHSVLPKSANESRIKENIDIFGWSIPEDLMAKFSEIKQVRLLTAEFVVHPQAGYNTLEDFWDGEI

SEQ ID NO: 25194 - DNA, 1747 bp, Zea mays subsp. mays
  misc_feature (1)..(1747): Ceres Seq. ID no. 12566487
gcacgagaccattacctagaacatcctaatcgaaaactactgtagccgctgctgctcctctcctcccatctcaccacacaccgcagccccagcaagatcgcgcggaggccatggcgaagcccaagccttcctccgccggcgccaagccgaccgcggctgcgccaccggttacagtgcactcggcgctggtcacctacacctccatgctcgcgctcctctccctctgcccgcccttcgtcatcctcctgtggtacacgatggtgcacgcggacggatcggtggtgcggacttacgagcacctcagggatcacggcgtgctcgaggggctcaaggccatctggcccatgcccaccctcgtcgcgtggaagatcatcttcggcttcgggctcttcgaggccgtcctacagctgctgctccctgggaagcgcttcgaagggcccatctcgcctgccgggaacgtgccggtctacaaggcaaatggcttacaagcatatgcagtgaccttgataacttaccttggtttgtggtggttcggtatatttaaccctgcaatagtgtatgatcacttgggggagatatactctgctcttgtttttggaagctttgtgttctgtatttttctctacataaagggccatgtatttccatcttcatctgactctggatcctctgggaatgtgataattgacttctactggggtatggagctgtaccctcggattggcaagtactttgatatcaaagtattcaccaactgtcgtttcggtatgatgtcctgggctgttcttgccgtaacctattgcataaagcagtatgaaatgaatggcagagttgctgattctatgcttgtgaatactgcacttatgttgatctatatcactaagttcttttggtgggaatctggatattggtgtactatggacattgctcatgatagagctggtttctatatctgctggggatgcttggtatgggttccatccatatatacttcccctggaatgtaccttgtaaaccaccctttgaatttgggcccccagctagcactctcaattcttctagctggaatgttgtgcatatacataaactatgattgtgaccgtcagcgccaagaatttcgacggacgaatgggaaatgctcggtctggggcaaggctccatctaagattgttgcctcttatcagactacaaagggagaaactaaaaccagtcttctcttgacttctggatggtggggcttgtcacgtcacttccactatgtcccagagatactatctgcatttttctggactgttccagctcttttcaatcacttcctaccatacttctacgtgatctttctgactatattattgtttgaccgagcaaagagggatgatgaccggtgctcatcaaagtacgggaagtactggaagatttactgcaacaaagtaccatacagagtcattcctggcatttactgagcatctcgagttctggacgactcttgatattaagctcaacagatgccacgatatccagtcttcataccgatttgctactgattgtgtaatgtcgctggtaggcttgggctgtacgcagtattaggtgtaggcaacttggcttttggcatttaccttgtatgtgtcgtgtatctagggctggggcttgctccttcagttgttagacagtagggggtaatctcaggggtgcaatgtactccctccgtcctaaaataaaagcatatctagtatttaaattttgtttc

SEQ ID NO: 25195 - protein, 450 aa, Zea mays subsp. mays
  misc_feature (1)..(450): Ceres Seq. ID no. 12566488
MAKPKPSSAGAKPTAAAPPVTVHSALVTYTSMLALLSLCPPFVILLWYTMVHADGSVVRTYEHLRDHGVLEGLKAIWPMPTLVAWKIIFGFGLFEAVLQLLLPGKRFEGPISPAGNVPVYKANGLQAYAVTLITYLGLWWFGIFNPAIVYDHLGEIYSALVFGSFVFCIFLYIKGHVFPSSSDSGSSGNVIIDFYWGMELYPRIGKYFDIKVFTNCRFGMMSWAVLAVTYCIKQYEMNGRVADSMLVNTALMLIYITKFFWWESGYWCTMDIAHDRAGFYICWGCLVWVPSIYTSPGMYLVNHPLNLGPQLALSILLAGMLCIYINYDCDRQRQEFRRTNGKCSVWGKAPSKIVASYQTTKGETKTSLLLTSGWWGLSRHFHYVPEILSAFFWTVPALFNHFLPYFYVIFLTILLFDRAKRDDDRCSSKYGKYWKIYCNKVPYRVIPGIY

SEQ ID NO: 25196 - protein, 419 aa, Zea mays subsp. mays
  misc_feature (1)..(419): Ceres Seq. ID no. 12566489
MLALLSLCPPFVILLWYTMVHADGSVVRTYEHLRDHGVLEGLKAIWPMPTLVAWKIIFGFGLFEAVLQLLLPGKRFEGPISPAGNVPVYKANGLQAYAVTLITYLGLWWFGIFNPAIVYDHLGEIYSALVFGSFVFCIFLYIKGHVFPSSSDSGSSGNVIIDFYWGMELYPRIGKYFDIKVFTNCRFGMMSWAVLAVTYCIKQYEMNGRVADSMLVNTALMLIYITKFFWWESGYWCTMDIAHDRAGFYICWGCLVWVPSIYTSPGMYLVNHPLNLGPQLALSILLAGMLCIYINYDCDRQRQEFRRTNGKCSVWGKAPSKIVASYQTTKGETKTSLLLTSGWWGLSRHFHYVPEILSAFFWTVPALFNHFLPYFYVIFLTILLFDRAKRDDDRCSSKYGKYWKIYCNKVPYRVIPGIY

SEQ ID NO: 25197 - protein, 401 aa, Zea mays subsp. mays
  misc_feature (1)..(401): Ceres Seq. ID no. 12566490
MVHADGSVVRTYEHLRDHGVLEGLKAIWPMPTLVAWKIIFGFGLFEAVLQLLLPGKRFEGPISPAGNVPVYKANGLQAYAVTLITYLGLWWFGIFNPAIVYDHLGEIYSALVFGSFVFCIFLYIKGHVFPSSSDSGSSGNVIIDFYWGMELYPRIGKYFDIKVFTNCRFGMMSWAVLAVTYCIKQYEMNGRVADSMLVNTALMLIYITKFFWWESGYWCTMDIAHDRAGFYICWGCLVWVPSIYTSPGMYLVNHPLNLGPQLALSILLAGMLCIYINYDCDRQRQEFRRTNGKCSVWGKAPSKIVASYQTTKGETKTSLLLTSGWWGLSRHFHYVPEILSAFFWTVPALFNHFLPYFYVIFLTILLFDRAKRDDDRCSSKYGKYWKIYCNKVPYRVIPGIY

SEQ ID NO: 25198 - DNA, 592 bp, Zea mays subsp. mays
  misc_feature (1)..(592): Ceres Seq. ID no. 12566495
aaaaagcccaaacccgcatctacgttctactcccactcgcggtcgcggtagccggcggcggcggaggaggaaagcaggcaggccatggcgtcgtcgtcgtcgaccccggcggccgtccgcgagatgcagaaggatctcgaggtccaggccaacgccctcagcaagatccagaaagacatcgccaagaaccaccaggtccgcaagcagtacaccatccaggtcggcgagaacgagctcgtcctcaaggagctggagctgctcagcgatggggccaacgtgtacaagctcatcggaccggtgctggtcaagcaggacctcgcggaggccaaggccaacgtcaagaagcgcatcgagtacatctccgcagagctgaagcggatggatcgggcgctcaaagacttggaggaaaagcaaaacagcaagaaggaatcgatattcaagttgcagcagaggatgcaggctgtacaagctaaggcttagacaactgtttgttggttgcaactagtccaaggccatgcttcatttcatcccaattccctccaggtttttttttggtggggaggaatcaggtgtctgatgttctcgtctccgc

SEQ ID NO: 25199 - protein, 156 aa, Zea mays subsp. mays
  misc_feature (1)..(156): Ceres Seq. ID no. 12566496
KAQTRIYVLLPLAVAVAGGGGGGKQAGHGVVVVDPGGRPRDAEGSRGPGQRPQQDPERHRQEPPGPQAVHHPGRRERARPQGAGAAQRWGQRVQAHRTGAGQAGPRGGQGQRQEAHRVHLRRAEADGSGAQRLGGKAKQQEGIDIQVAAEDAGCTS

SEQ ID NO: 25200 - protein, 131 aa, Zea mays subsp. mays
  misc_feature (1)..(131): Ceres Seq. ID no. 12566497
MASSSSTPAAVREMQKDLEVQANALSKIQKDIAKNHQVRKQYTIQVGENELVLKELELLSDGANVYKLIGPVLVKQDLAEAKANVKKRIEYISAELKRMDRALKDLEEKQNSKKESIFKLQQRMQAVQAKA

SEQ ID NO: 25201 - protein, 123 aa, Zea mays subsp. mays
  misc_feature (1)..(123): Ceres Seq. ID no. 12566498
KSPNPHLRSTPTRGRGSRRRRRRKAGRPWRRRRRPRRPSARCRRISRSRPTPSARSRKTSPRTTRSASSTPSRSARTSSSSRSWSCSAMGPTCTSSSDRCWSSRTSRRPRPTSRSASSTSPQS

SEQ ID NO: 25202 - DNA, 1652 bp, Zea mays subsp. mays
  misc_feature (1)..(1652): Ceres Seq. ID no. 12566507
aacaaccacatctgcatctcccgtcatctactcgaactcaactcatcgcctcatccgtgtctcacccattccgtctccgtctccgtctccgtctgaactctccatctataaagcttctctgaggcacaagacgagaaggccacagcccacaagcatgcccggcgagttggaaaagcgcagaatctgcgagacaagaaagcactaggaagggagaaacagggagagaggttgcgtcccagccccacctgccatcgcctcttcttccgctccctcggcggctttccaggattcagattcagattgggggccttttgctgctgcgcggcaattctcgtcgctccagtccccacttcgctgttcctgagcgggaggcgccggccggactcgcgatggggcaggacggccagcagatccgccgcgacaagctcatcatcgacacggatcccggcatcgatgatagcatgacgatcctaatggcgttcagagcacctagtgtggaaatcattgggctcacgaccatattcggcaacgtcgacacaaagggtgcaacacgtaacgcgctattgctgtgtgagagagcaggatgccctgaagttccagtagcagagggcagccatgagcccctaaagggaggaaagccccgtgttgctgatttcgttcatgggtcagatggcattgggaatctgtttcttcctgcaccctctgctaagaaggttgaggaaagtgctgctgatttcctgattaataaggtctctgagtttccaggagaggtctctgtgcttgcgttgggacccctgacaaatgtagcattggccatcaaaagagacccttcctttgcaagcaaggttaagaaaatagttgtactgggtggagctttctttgcggctggaaatgtcaaccctgctgctgaagcaaatatccatggagacccagaagcagctgacatagtttttacttcaggagcagatatcgttgtggttggcattaacataacaacacaagtctgcctgacagatgaggatctcttggagctaagaaactcgaaggggaagcatgcagcgttcttatatgagatgtgcaagttctacagagattggcatgccaagtctgatggttttcatggaattttccttcatgatcctgtgagcttcactgccgtacttcatccagagtacttcacattcaagaagggtgtggtgagagtagagacccagggcatttgcactggccacactttgatggatcagggattgaaaaagtggaattcagagaacccatggtcagggtataaaccgatttcagttgcatggacggttgatgtgccaaaggtcatcagctttataaagaagctgctcatggcaccatgagcaaagtacaaccatttaacgacatgtcaacatcagcgctctctgatgtccaagaaaatttgacgagtacagatgctctttcttagctgcactgtaattagttcctggacctaggatggttcctattcctccaatagtaagaggaacctttcattgtgaaaggtcatgcagcagtctcgaataccatgaagcaaattctggcatacgacatcatgtctcacacatttgtatcaatacatttagaatcaataaagtttccctcactctttactgtgcacttttccc

SEQ ID NO: 25203 - protein, 325 aa, Zea mays subsp. mays
  misc_feature (1)..(325): Ceres Seq. ID no. 12566508
MGQDGQQIRRDKLIIDTDPGIDDSMTILMAFRAPSVEIIGLTTIFGNVDTKGATRNALLLCERAGCPEVPVAEGSHEPLKGGKPRVADFVHGSDGIGNLFLPAPSAKKVEESAADFLINKVSEFPGEVSVLALGPLTNVALAIKRDPSFASKVKKIVVLGGAFFAAGNVNPAAEANIHGDPEAADIVFTSGADIVVVGINITTQVCLTDEDLLELRNSKGKHAAFLYEMCKFYRDWHAKSDGFHGIFLHDPVSFTAVLHPEYFTFKKGVVRVETQGICTGHTLMDQGLKKWNSENPWSGYKPISVAWTVDVPKVISFIKKLLMAP

SEQ ID NO: 25204 - protein, 301 aa, Zea mays subsp. mays
  misc_feature (1)..(301): Ceres Seq. ID no. 12566509
MTILMAFRAPSVEIIGLTTIFGNVDTKGATRNALLLCERAGCPEVPVAEGSHEPLKGGKPRVADFVHGSDGIGNLFLPAPSAKKVEESAADFLINKVSEFPGEVSVLALGPLTNVALAIKRDPSFASKVKKIVVLGGAFFAAGNVNPAAEANIHGDPEAADIVFTSGADIVVVGINITTQVCLTDEDLLELRNSKGKHAAFLYEMCKFYRDWHAKSDGFHGIFLHDPVSFTAVLHPEYFTFKKGVVRVETQGICTGHTLMDQGLKKWNSENPWSGYKPISVAWTVDVPKVISFIKKLLMAP

SEQ ID NO: 25205 - protein, 297 aa, Zea mays subsp. mays
  misc_feature (1)..(297): Ceres Seq. ID no. 12566510
MAFRAPSVEIIGLTTIFGNVDTKGATRNALLLCERAGCPEVPVAEGSHEPLKGGKPRVADFVHGSDGIGNLFLPAPSAKKVEESAADFLINKVSEFPGEVSVLALGPLTNVALAIKRDPSFASKVKKIVVLGGAFFAAGNVNPAAEANIHGDPEAADIVFTSGADIVVVGINITTQVCLTDEDLLELRNSKGKHAAFLYEMCKFYRDWHAKSDGFHGIFLHDPVSFTAVLHPEYFTFKKGVVRVETQGICTGHTLMDQGLKKWNSENPWSGYKPISVAWTVDVPKVISFIKKLLMAP

SEQ ID NO: 25206 - DNA, 1250 bp, Zea mays subsp. mays
  misc_feature (1)..(1250): Ceres Seq. ID no. 12566511
gcacgagaccattacctagaacatcctaatcgaaaaacagaacagcccgtcgcgcgccgctgcgttgagccaaggcgcaatggcaacctccacctcagttcccgtcctcctgctcctcgccgccgccgccggcctcctcctgctccccggctcgctggcgtggcagagcagcaactgtgcaccgggcgcgcccggcagtggctcgccgacgtggccttcacccggctccggctccggcggcggccacagcaagccgcccaagcaccaccatggcaagccgcccaagtgcccgccgtgcaaccctccgtacgtgcctccgacgcctcggccgtcaccgccgtacgtgccaccgtatgtcccgccgacgcctcggccgtcaccgccctacgtgccaccatacgtccccgtcccgccgacgcctcggccctcaccgccgtacgtgccaccatacgtccccgtccccccgacgcctcggccctcaccgccctacgtgccaccatacgtccccgtcccgccgacgcctcggccgtcaccgccgtacgtacccccgacgccacggccgccgactccgccctacgtcccaccgacgccgccctacgtcccaccgacgcctcggccatcaccaccaccgtacgtgccaccctacgtccccccgacgcctcggccatcaccaccctacgtgccaccgtacgttccgccgacgccgccggcggtgcggacgtgcccgatcgacacgctgaagctgaacgcgtgcgtggacgtgctgagcgggctgatccacctggtgatcgggcaggaggccaggtccaagtgctgcccgctggtgcagggggtggcggacctggacgcggcgctgtgcctctgcaccaccatccgcgcgcgcctgctcaacatcaacatctacctccccatcgcgctcaacctgctcatcacctgcggcaagcacgcgccgtcgggcttccagtgcccgccgctctacgactgatgagcaccaccaccagccaacacttctatacgcgccgccatgcatgcatgatgtgatggcatcctgtgcaagctagcgctagcgctagtagtagcatgtccgtaatttctctagttcttgctctcgcgagtatgcgtacgtaatgcgttgcttctcgtcagtactcgggatcgatcgggaacttttccaactccgatgctaagcgtgtagcttgcttaatcagtcgatgtaccatgttaatcaagtgctagccctttctctgctc

SEQ ID NO: 25207 - protein, 346 aa, Zea mays subsp. mays
  misc_feature (1)..(346): Ceres Seq. ID no. 12566512
ARDHYLEHPNRKTEQPVARRCVEPRRNGNLHLSSRPPAPRRRRRPPPAPRLAGVAEQQLCTGRARQWLADVAFTRLRLRRRPQQAAQAPPWQAAQVPAVQPSVRASDASAVTAVRATVCPADASAVTALRATIRPRPADASALTAVRATIRPRPPDASALTALRATIRPRPADASAVTAVRTPDATAADSALRPTDAALRPTDASAITTTVRATLRPPDASAITTLRATVRSADAAGGADVPDRHAEAERVRGRAERADPPGDRAGGQVQVLPAGAGGGGPGRGAVPLHHHPRAPAQHQHLPPHRAQPAHHLRQARAVGLPVPAALRLMSTTTSQHFYTRRHACMM

SEQ ID NO: 25208 - protein, 301 aa, Zea mays subsp. mays
  misc_feature (1)..(301): Ceres Seq. ID no. 12566513
MATSTSVPVLLLLAAAAGLLLLPGSLAWQSSNCAPGAPGSGSPTWPSPGSGSGGGHSKPPKHHHGKPPKCPPCNPPYVPPTPRPSPPYVPPYVPPTPRPSPPYVPPYVPVPPTPRPSPPYVPPYVPVPPTPRPSPPYVPPYVPVPPTPRPSPPYVPPTPRPPTPPYVPPTPPYVPPTPRPSPPPYVPPYVPPTPRPSPPYVPPYVPPTPPAVRTCPIDTLKLNACVDVLSGLIHLVIGQEARSKCCPLVQGVADLDAALCLCTTIRARLLNINIYLPIALNLLITCGKHAPSGFQCPPLYD

SEQ ID NO: 25209 - DNA, 1060 bp, Zea mays subsp. mays
  misc_feature (1)..(1060): Ceres Seq. ID no. 12566522
ataacaaccccggcctgccatgtgccacaaccgtagcctgtagcttcatccgttgcgctgcgcccggttccctcgcgcggtgcggaatttaacatggccgtgccggaggtggtggtcgacggcgtcgtcttcccgccggtggcccgcccgccgggctccgccggctcgcacttcctcggcggcgcaggcgtgcgaggcgtcgagatcggaggcaacttcatcaagttcacggccatcggcgtgtacctggaggacgcggccgtgcccgcgctggccaagaagtggggcggcaagacggccgacgagctcgcctccgacgccgccttcttccgcgacgtcgtcacgggcgacttcgagaagttcacgagggtgacgatgatcctcccgctgacgggcgagcagtacgcggagaaagtgacggagaactgcgtggcgttctggaaggccgccggcctgtacacggacgccgagggcgtcgccgtggagaagttcagggaggtgttcaagccagagactttcgcgccgggcgcctccatcctcttcacgcactcgcccgccggagtcctcaccgtcgccttctccaaggactcgtcggtgccagcggccggcggcgtggcgatcgagaacaagcgcctctgcgaggccgtgctggagtccatcatcggggagcgcggcgtgtcgccggccgcgaagctgagcctcgccgcgagggtgtcggagctcctcgccaaggagaccgccgcggccgccgacgcgccgcaggcggagcccgtctccatcaccgcctgaggcgaggagcgggcgggcgggcgagcgaacgaaccgcgaggagaaagaaagcaaccagacggttgggcggcacggcgtctcacacctgccgcctgcgcttgcgtgctccggagtccggactggagagacgccgcgcgggtgcagtgcatccgtcgcgtcttgtctgtccgcgctatggcgtcgtgttcctgcctttctggtcgcgtagttgtcttgtgttcgctgttggtcgttctgggtaacatttgaataaaacaagcggatttgttgc

SEQ ID NO: 25210 - protein, 231 aa, Zea mays subsp. mays; identical to SEQ ID NO: 16941
  misc_feature (1)..(231): Ceres Seq. ID no. 12566523

SEQ ID NO: 25211 - protein, 137 aa, Zea mays subsp. mays; identical to SEQ ID NO: 16942
  misc_feature (1)..(137): Ceres Seq. ID no. 12566524

SEQ ID NO: 25212 - DNA, 1823 bp, Zea mays subsp. mays
  misc_feature (1)..(1823): Ceres Seq. ID no. 12566533
acatgccacattgccaccaagccacagttccacctttcgattcatgcacgctcagtcatgggcgccctccggagtttagccatctcctacccggagttcctcgtggccgggctgtgcttcgtctccctctcggccctgcgccacgcgatgcgtgagcggcggcaacgcgcccccctgagctggcctgtggtgggcatgctcccgttcgtgctcgcgaacctcgggcgcctctacgacgccatcaccgacgccctccacgggtccgggtgcacgctcatgttccgcgggccgtggctcgcccgcgcggacttcctgctgacgtgcgacccggcggccgtccagcactgcctggcgtccaaccacgggggctacgacaggggccgagactttgcggagatgttcgacctcctgggcgacgggctgctggttgcggacgccgcgtcgtgggcgcgccagcggcacgtcgccgccaccgtcttcggcaccccggcgttccggtccttcgtcctgtgcaccatggcgcgccagacggcgcggctgctcgtgccgttcctggactgcgccgccgcggatcaggaaggggacggtggcgtcgttgatctcgaggacgtgttcatgcggtactcgctcgatgtgacctacgcctccgtgttcgatgccgacctggacatgctgtgcgtcgccgccgcctcggcgccggtgccgccgttcggcctggcgaccagggtggccagcgaatctgtgctcttcaggcacatcgtgccggcctggtggtggaggctgctgaggtggctcaatgtcggctccgagaggaggctggccgaggccaaggcggtcctcaacgaattcgtctaccgcgagatcgccaaacgcaagtcacggctcgccaccacaagccaagcaggagaaggctacgacctcctgtcactgtacatggcgtggccgagggaacccggtatgagcgagcggcagagggatcagttcctccgggattccgccgtcagttacttgtttgcggccaaggacctcatcgtcgccgcgctcacctggttcttctacatgctctgcacgcacccgcacgtcgaggccaagatcctcgacgagctgaggtccctgcatcccacagccacggtcgcggccaccggcggcggcgagcatgccgtgttcgactctgacgcgctccagcccgcgtcctacctccacgcggcggtcctcgagacgctgcggctgttcccgccggcgcctttcgaggagaaagaggcagttcgcagcgatgtgctgcctgacggcaccacggtggccaagggcaccagggtcatcttctgcatctacgccatgggcaggatggaagggctatggggtagcgactgccacgagttccgaccggagcggtggctgtccgatattggccgagtccggcacgagcccagccacaagttcgccgtgttcaactgcggacccagaagctgcctcgggaagaacctggggctcagcaacatcaagattgccgccgccgcaatcttatacaactttcgggtggagctcatcgacggccatatcgttgagccacagaactcagtggtgcttctcaccaagaacgggatgagggttaggatcaagaggaggcacgcagcatgatgcactgtgctacttctacctttacatcagttaaactccaaaaaatggtggggaaacgaacaaaaggtgatagggcatatagaataaaaacgcagcacaaattttattccagattaatctgctcatgtgatttcagccatattggatacaagttctgaactttgatgcttctgattcggaaaatt

SEQ ID NO: 25213 - protein, 545 aa, Zea mays subsp. mays
  misc_feature (1)..(545): Ceres Seq. ID no. 12566534
TCHIATKPQFHLSIHARSVMGALRSLAISYPEFLVAGLCFVSLSALRHAMRERRQRAPLSWPVVGMLPFVLANLGRLYDAITDALHGSGCTLMFRGPWLARADFLLTCDPAAVQHCLASNHGGYDRGRDFAEMFDLLGDGLLVADAASWARQRHVAATVFGTPAFRSFVLCTMARQTARLLVPFLDCAAADQEGDGGVVDLEDVFMRYSLDVTYASVFDADLDMLCVAAASAPVPPFGLATRVASESVLFRHIVPAWWWRLLRWLNVGSERRLAEAKAVLNEFVYREIAKRKSRLATTSQAGEGYDLLSLYMAWPREPGMSERQRDQFLRDSAVSYLFAAKDLIVAALTWFFYMLCTHPHVEAKILDELRSLHPTATVAATGGGEHAVFDSDALQPASYLHAAVLETLRLFPPAPFEEKEAVRSDVLPDGTTVAKGTRVIFCIYAMGRMEGLWGSDCHEFRPERWLSDIGRVRHEPSHKFAVFNCGPRSCLGKNLGLSNIKIAAAAILYNFRVELIDGHIVEPQNSVVLLTKNGMRVRIKRRHAA

SEQ ID NO: 25214 - protein, 526 aa, Zea mays subsp. mays
  misc_feature (1)..(526): Ceres Seq. ID no. 12566535
MGALRSLAISYPEFLVAGLCFVSLSALRHAMRERRQRAPLSWPVVGMLPFVLANLGRLYDAITDALHGSGCTLMFRGPWLARADFLLTCDPAAVQHCLASNHGGYDRGRDFAEMFDLLGDGLLVADAASWARQRHVAATVFGTPAFRSFVLCTMARQTARLLVPFLDCAAADQEGDGGVVDLEDVFMRYSLDVTYASVFDADLDMLCVAAASAPVPPFGLATRVASESVLFRHIVPAWWWRLLRWLNVGSERRLAEAKAVLNEFVYREIAKRKSRLATTSQAGEGYDLLSLYMAWPREPGMSERQRDQFLRDSAVSYLFAAKDLIVAALTWFFYMLCTHPHVEAKILDELRSLHPTATVAATGGGEHAVFDSDALQPASYLHAAVLETLRLFPPAPFEEKEAVRSDVLPDGTTVAKGTRVIFCIYAMGRMEGLWGSDCHEFRPERWLSDIGRVRHEPSHKFAVFNCGPRSCLGKNLGLSNIKIAAAAILYNFRVELIDGHIVEPQNSVVLLTKNGMRVRIKRRHAA

SEQ ID NO: 25215 - protein, 496 aa, Zea mays subsp. mays
  misc_feature (1)..(496): Ceres Seq. ID no. 12566536
MRERRQRAPLSWPVVGMLPFVLANLGRLYDAITDALHGSGCTLMFRGPWLARADFLLTCDPAAVQHCLASNHGGYDRGRDFAEMFDLLGDGLLVADAASWARQRHVAATVFGTPAFRSFVLCTMARQTARLLVPFLDCAAADQEGDGGVVDLEDVFMRYSLDVTYASVFDADLDMLCVAAASAPVPPFGLATRVASESVLFRHIVPAWWWRLLRWLNVGSERRLAEAKAVLNEFVYREIAKRKSRLATTSQAGEGYDLLSLYMAWPREPGMSERQRDQFLRDSAVSYLFAAKDLIVAALTWFFYMLCTHPHVEAKILDELRSLHPTATVAATGGGEHAVFDSDALQPASYLHAAVLETLRLFPPAPFEEKEAVRSDVLPDGTTVAKGTRVIFCIYAMGRMEGLWGSDCHEFRPERWLSDIGRVRHEPSHKFAVFNCGPRSCLGKNLGLSNIKIAAAAILYNFRVELIDGHIVEPQNSVVLLTKNGMRVRIKRRHAA

SEQ ID NO: 25216 - DNA, 1672 bp, Zea mays subsp. mays
  misc_feature (1)..(1672): Ceres Seq. ID no. 12566560
aattccgctgcatacttgcattgcatctcatccctcctgctcctgcgtcctcctcctctatttctctcctgctgcttgctactacctcatcgatccattccatccatcgccgaggggggagggccgccgcccgcccgggtcgcatcgcatcgcccggtcggccggggactcggggcaggcgagcgacactagctataaaagacctcccgccgcctgcgactgggccgtgtgcaagcaaagcgcaaggccgatctggggttggagggccggccatggtgatgatgatgcggtcgtgcctcggcggcggcctgctaccggtggcggtcatgctctgcctcaacgtggtggcggcggtcatggtgtcgctcgtcaaggtggccatggacggcggcatgaaaccgctcgtgatcgtcaccctgcagcagctcaccgccgccgtcttcctcgcgccaatcgcattcttcaaggagaggaagtcgaggccaaagctgacgctggagatcttcgcctacatcttcgtcagtgcggcgctcggcctgcgccatatattgcagggcagctcttcgtcagtacatgatcttcgtggccctgcgctacaccacggccaccttcgtgaccgccttctccaacatcgcccccgtgctcaccttcctcctggccgtcgctacgcggtccgaagcgctggacctcaagagcaggacggggttggcgaagctgctgggcacgctggtgtcgctggccggcgccatggtgctcaccctctacaagggcgtggcgctcacccacgcggcggcagcctcgcaggaccaccagcagcactcccacggccggttgccgccgagcgccgccgacagccgcggcaagtggacgctgggcaccgtggccatcctgggcaactgcgtctgcctctcctgctggttcctgctccacggccgcctcgccaagaagtacccgcacgtctactcctgcaacgcgctcatgtccttgctcagcttcctccaggtcgccgtcgtcggcctctgcacccagcgcagcatctccccctggatcgtcaccagcaagttcaacatcctcaccgtcctatacgccggcatcgtcggctgcggcgtctcgttcgtgctggtgacatggtgcatcgagaagagaggagccgtgttcgtggccgccttcataccggtggtgcagatcatcgtctccgtcatcgacttctccatcctgcacgagcagctctacctcggaaggtacgcacggacacggtaccatgccatcactgaatggcaatcgacctgatcgaaagtgaagtcacctgctctgctctgctctgcttccccctttgtgctgtgcagcgtgctgggatcagtgctagtgataggtggcctttaccttctgctgtggggcaagaggcaggaggccctgcactgtcctcctcctcctccaaaggttgccgaagaagaccctgctgacaaagagcagcagcaagtgcagcacaactgaagacggacagcatcctctgactgtttggtcgtttggttgtaacagtgccagcaataagatctctctgcctccttttcttttcttttggtgtctcaggggggtgggcaatgttccttccttctcagatcgatcaccaacaaagtgtttagattctaatccaaaacagtagaatggtctt

SEQ ID NO: 25217 - protein, 423 aa, Zea mays subsp. mays
  misc_feature (1)..(423): Ceres Seq. ID no. 12566561
FRCILALHLIPPAPASSSSISLLLLATTSSIHSIHRRGGRAAARPGRIASPGRPGTRGRRATLAIKDLPPPATGPCASKAQGRSGVGGPAMVMMMRSCLGGGLLPVAVMLCLNVVAAVMVSLVKVAMDGGMKPLVIVTLQQLTAAVFLAPIAFFKERKSRPKLTLEIFAYIFVSAALGLRHILQGSSSSVHDLRGPALHHGHLRDRLLQHRPRAHLPPGRRYAVRSAGPQEQDGVGEAAGHAGVAGRRHGAHPLQGRGAHPRGGSLAGPPAALPRPVAAERRRQPRQVDAGHRGHPGQLRLPLLLVPAPRPPRQEVPARLLLQRAHVLAQLPPGRRRRPLHPAQHLPLDRHQQVQHPHRPIRRHRRLRRLVRAGDMVHREERSRVRGRLHTGGADHRLRHRLLHPARAALPRKVRTDTVPCHH

SEQ ID NO: 25218 - protein, 333 aa, Zea mays subsp. mays
  misc_feature (1)..(333): Ceres Seq. ID no. 12566562
MVMMMRSCLGGGLLPVAVMLCLNVVAAVMVSLVKVAMDGGMKPLVIVTLQQLTAAVFLAPIAFFKERKSRPKLTLEIFAYIFVSAALGLRHILQGSSSSVHDLRGPALHHGHLRDRLLQHRPRAHLPPGRRYAVRSAGPQEQDGVGEAAGHAGVAGRRHGAHPLQGRGAHPRGGSLAGPPAALPRPVAAERRRQPRQVDAGHRGHPGQLRLPLLLVPAPRPPRQEVPARLLLQRAHVLAQLPPGRRRRPLHPAQHLPLDRHQQVQHPHRPIRRHRRLRRLVRAGDMVHREERSRVRGRLHTGGADHRLRHRLLHPARAALPRKVRTDTVPCHH

SEQ ID NO: 25219 - protein, 331 aa, Zea mays subsp. mays
  misc_feature (1)..(331): Ceres Seq. ID no. 12566563
MMMRSCLGGGLLPVAVMLCLNVVAAVMVSLVKVAMDGGMKPLVIVTLQQLTAAVFLAPIAFFKERKSRPKLTLEIFAYIFVSAALGLRHILQGSSSSVHDLRGPALHHGHLRDRLLQHRPRAHLPPGRRYAVRSAGPQEQDGVGEAAGHAGVAGRRHGAHPLQGRGAHPRGGSLAGPPAALPRPVAAERRRQPRQVDAGHRGHPGQLRLPLLLVPAPRPPRQEVPARLLLQRAHVLAQLPPGRRRRPLHPAQHLPLDRHQQVQHPHRPIRRHRRLRRLVRAGDMVHREERSRVRGRLHTGGADHRLRHRLLHPARAALPRKVRTDTVPCHH

SEQ ID NO: 25220 - DNA, 1176 bp, Zea mays subsp. mays
  misc_feature (1)..(1176): Ceres Seq. ID no. 12566580
atctccatctccatcttcctcgcagcgccggcgatccatcttccgctgcctcccttcctcgcgctcgggctctcagtgacggcatcagcggtttcccctcccgcctctcgccagtcgcatcacgccctcgcctccggtccaccgcacaccggccggtgaccctgcattacttgctaatctttcttgagggcagatggccgtttcttttgcaaatgtcaacgccgaggcagggctgaaaaagcttgatgagtaccttctcactcgcagctacatcactggctaccaagcttccaaggatgacctggctgtctactcttcatttttggctgatccctcatccaagtatatcaatgtagcaaggtggtttaatcacattgatgcactcctgaggctgagtggagttaccgcagagggcctaggtgttaaggttgagccatcagcggttccttcagcttcaattcttgatgttgctgatggacaggccccagctgctgacgaggatgacgatgatgatgttgacctttttggcgaggagactgaagaggagaagaaggctgctgaagaacgtgctgcggctgccaaggcttctggcaagaagaaagaatctgggaaatcgtcagttttacttgatgtgaagccatgggacgatgagactgacatggccaagctcgaggaagctgttaggagtgtccagatggaaggactgctttggggcgcatccaagcttgtcccagttggatatggcatcaagaagctgcaaatcatgatgaccattgtcgatgaccttgtctctgttgacactctcatcgaggaccatctctgcgctgagccagtgagcgaatacgtccagagctgcgacattgtcgccttcaacaagatctaaatttccttgtgatggtggcaatggtggttggtgggcactgtaccagcctaatttataattttccatgagcatcttcaagagtttttctaaattatcatttggagtcatttacataaaaagcactttctatatctttttaatctcaacaacttttctatatcttgtttgcaccctggagagctatttacgttttctatatttagctagcgagaaacctggatggctggaatagaagataactatatttagacaatactttaaataagctgttggaagatagtaattcttgtgtc

SEQ ID NO: 25221 - protein, 229 aa, Zea mays subsp. mays
  misc_feature (1)..(229): Ceres Seq. ID no. 12566581
MAVSFANVNAEAGLKKLDEYLLTRSYITGYQASKDDLAVYSSFLADPSSKYINVARWFNHIDALLRLSGVTAEGLGVKVEPSAVPSASILDVADGQAPAADEDDDDDVDLFGEETEEEKKAAEERAAAAKASGKKKESGKSSVLLDVKPWDDETDMAKLEEAVRSVQMEGLLWGASKLVPVGYGIKKLQIMMTIVDDLVSVDTLIEDHLCAEPVSEYVQSCDIVAFNKI

SEQ ID NO: 25222 - DNA, 1855 bp, Zea mays subsp. mays
  misc_feature (1)..(1855): Ceres Seq. ID no. 12566608
gactcggatcagccgcagttgatctggaggcgcgggccggccatggaggagggtggcgagcacacgagtcttctggtcaaggatgatgcatcatgtcatggcgaggaaacacagagtctattggaagcaaatctagggccacagctgaaaagtaaatgctctgattggagagcaccggcactcatcctgggattggaatgcttggagagcatggctttcaatggcattgccacaaacctagttgtgtatctccgttcagttctccatgggggtattgcttccagtgcagcaactgtatctctttggtatgggacaagcttctttgtgccaattcttggagccgccatagcagatacttgcttgggaaattataagaccatcttgatctcccttatcatgtacctatttggaatagtactaattacagttgcaacattcatgccttctacttcagtcttgtgcgacgtcagttcatgcttgtcatcaaatggaactcaaaccatgattttctttgctggtttgtatctcactgctgttggatgtggaggagtaagatctgcattgcttccgtttggtgctaaccagttcaacaacgagaacagtctagacataaaaaagagaagaaatttcttcagcttgttctatatatgtgtcatctttggtgtgattacttctgggacaatcatagtttgggttcaggaaaatgttagctgggctattggatatggagtcgccactacatgcataggtcttgctttgataggatttctggtgggaacaccaatattccaagaagatgagccttgtggttctccagtgaagagtattttccaggttattgttgcctcttttaggaacatgagcttggaagtacctgctgatagctgtcttctgtatgaggtcgggagcaaccacatacaaaggacaaaacttgctcactctgatgattttaggttcttagataaggcggcagttatttctgatccaagcctggtgtatggaggctgtcgaagctcatggagcatatgtacagttactgaagttgaggaactgaaaatacttatccgcttgctcccaatatgggtgactggaatattctttggtgctgcgatctcgcaaatgcacaccacttttattcagcagggaactgtgatggacaccaagatcggttccctgtccattccaccagcatccttatactcatttgaagtgatatgtgtcacgctttgggtacttgctgtcaacaaagtgcttgtgccggcaatccgaacgtattttgcaaatggggtagagctcacacagttacagaggattgggatcggtcgtttcctgatgatctttgccatggcaatggcagcacttctagaaaccaagaggctgcatattgttcaggagggggaactgctaagcattgtatggcagcttccacagtacttcgtcattgctggggctgagtgcttcggtatcatcactcagctggagttctttcatggccaggcgccagactccatgaagagcattttaacggcatttgcattgctcaccactgcccttgggaattacttgagctcagctatcatcaccctcattgcaggggtgaccagggtatggcatagccctggttggataccagatgatctgaacaaaggacaccttgactactactactggtgtcttactaccctctcattggtgaattttgttgtgtatctgtattttgctagtaaatacaaattgaagaaagttgtttgttaatactaccaaacactaatgaaatatctttacgtgtaacatatgaaatataacgtttcaaatgtttatgtttattaatataaggtttcaaatgtttatgttt

SEQ ID NO: 25223 - protein, 584 aa, Zea mays subsp. mays
  misc_feature (1)..(584): Ceres Seq. ID no. 12566609
DSDQPQLIWRRGPAMEEGGEHTSLLVKDDASCHGEETQSLLEANLGPQLKSKCSDWRAPALILGLECLESMAFNGIATNLVVYLRSVLHGGIASSAATVSLWYGTSFFVPILGAAIADTCLGNYKTILISLIMYLFGIVLITVATFMPSTSVLCDVSSCLSSNGTQTMIFFAGLYLTAVGCGGVRSALLPFGANQFNNENSLDIKKRRNFFSLFYICVIFGVITSGTIIVWVQENVSWAIGYGVATTCIGLALIGFLVGTPIFQEDEPCGSPVKSIFQVIVASFRNMSLEVPADSCLLYEVGSNHIQRTKLAHSDDFRFLDKAAVISDPSLVYGGCRSSWSICTVTEVEELKILIRLLPIWVTGIFFGAAISQMHTTFIQQGTVMDTKIGSLSIPPASLYSFEVICVTLWVLAVNKVLVPAIRTYFANGVELTQLQRIGIGRFLMIFAMAMAALLETKRLHIVQEGELLSIVWQLPQYFVIAGAECFGIITQLEFFHGQAPDSMKSILTAFALLTTALGNYLSSAIITLIAGVTRVWHSPGWIPDDLNKGHLDYYYWCLTTLSLVNFVVYLYFASKYKLKKVVC

SEQ ID NO: 25224 - protein, 570 aa, Zea mays subsp. mays
  misc_feature (1)..(570): Ceres Seq. ID no. 12566610
MEEGGEHTSLLVKDDASCHGEETQSLLEANLGPQLKSKCSDWRAPALILGLECLESMAFNGIATNLVVYLRSVLHGGIASSAATVSLWYGTSFFVPILGAAIADTCLGNYKTILISLIMYLFGIVLITVATFMPSTSVLCDVSSCLSSNGTQTMIFFAGLYLTAVGCGGVRSALLPFGANQFNNENSLDIKKRRNFFSLFYICVIFGVITSGTIIVWVQENVSWAIGYGVATTCIGLALIGFLVGTPIFQEDEPCGSPVKSIFQVIVASFRNMSLEVPADSCLLYEVGSNHIQRTKLAHSDDFRFLDKAAVISDPSLVYGGCRSSWSICTVTEVEELKILIRLLPIWVTGIFFGAAISQMHTTFIQQGTVMDTKIGSLSIPPASLYSFEVICVTLWVLAVNKVLVPAIRTYFANGVELTQLQRIGIGRFLMIFAMAMAALLETKRLHIVQEGELLSIVWQLPQYFVIAGAECFGIITQLEFFHGQAPDSMKSILTAFALLTTALGNYLSSAIITLIAGVTRVWHSPGWIPDDLNKGHLDYYYWCLTTLSLVNFVVYLYFASKYKLKKVVC

SEQ ID NO: 25225 - protein, 514 aa, Zea mays subsp. mays
  misc_feature (1)..(514): Ceres Seq. ID no. 12566611
MAFNGIATNLVVYLRSVLHGGIASSAATVSLWYGTSFFVPILGAAIADTCLGNYKTILISLIMYLFGIVLITVATFMPSTSVLCDVSSCLSSNGTQTMIFFAGLYLTAVGCGGVRSALLPFGANQFNNENSLDIKKRRNFFSLFYICVIFGVITSGTIIVWVQENVSWAIGYGVATTCIGLALIGFLVGTPIFQEDEPCGSPVKSIFQVIVASFRNMSLEVPADSCLLYEVGSNHIQRTKLAHSDDFRFLDKAAVISDPSLVYGGCRSSWSICTVTEVEELKILIRLLPIWVTGIFFGAAISQMHTTFIQQGTVMDTKIGSLSIPPASLYSFEVICVTLWVLAVNKVLVPAIRTYFANGVELTQLQRIGIGRFLMIFAMAMAALLETKRLHIVQEGELLSIVWQLPQYFVIAGAECFGIITQLEFFHGQAPDSMKSILTAFALLTTALGNYLSSAIITLIAGVTRVWHSPGWIPDDLNKGHLDYYYWCLTTLSLVNFVVYLYFASKYKLKKVVC

SEQ ID NO: 25226 - DNA, 1318 bp, Zea mays subsp. mays
  misc_feature (1)..(1318): Ceres Seq. ID no. 12566620
agtcgtccagctggtttgcctcccacacaaagggtaaaacggccggaacgctaaaatctcaccccttccgcttggaagttggaacccatcgccgcctccatcgctacacaccacgacgcagcgcccgattccgccggccagcaacgatgcagagctccctcgcccggccgccggtactggccggatgcggcgagagacggggcctggcagccgtggcacggtgccgcgctgaggcggcggcgcccgtgtggacggcgtccagggcgcctgtggggccgtacaccgggagggacccggaggtgaagaagcccgcgtggctgcggcagcgcgctgcgcagggggagaagtacgctcgcctgcgggagtccatcggcgagctcaagctcaacaccgtctgcgtcgaggcacaatgccccaacatcggcgagtgttggaacggaggtggaggggccggcggcgaaggggacggcatcgcgacggccaccatcatggtgcttggtgacacctgcacgcgcgggtgtcgattctgcgctgtgaagaccagcaacaaaccgccgccgcctgatcccctggagcctctgaacacggctttggctgttgcaagctggggtgtagattatgttgtgctaaccagtgtcgatagagatgacttacctgatggtggaagtagccattttgctcagacagtgaaagctttaaaggagctcaaacctggaatactggtggagtgcttaacctcggattttcgaggtgacctggaggctatctcatctttggcaaactctggcctagatgtttatgcacacaacattgaaaccgtgaggagtctacagagggttgtgagggatccccgggcagggtatgatcagagcttagcagttctcaagcatgcaaaaggttccagggaggacatgattacgaagtcttctatcatgcttggtcttggagagactgatgaagaggtgaaacaagccatgatggatctacgggcaattggtgttgacatccttactttgggacagtacttgcagccatcagaaagacatctaacagtaagagagtatgtgactccccaaaagttccaattttggaaggagtatggagaatcggtgggtttccgatatgttgctagcggacccttggttcggtcttcctaccgtgcaggagagctatttgtccaaaatttagtcagaaataacaaaactgagtcgtccatggatccgtacgcagaaataacaaaatctaactaaatatcttgtgccagagcaatccatgggatcagtacacactgtttgttaagagcagcaaacaagagtag

SEQ ID NO: 25227 - protein, 415 aa, Zea mays subsp. mays
  misc_feature (1)..(415): Ceres Seq. ID no. 12566621
SSSWFASHTKGKTAGTLKSHPFRLEVGTHRRLHRYTPRRSARFRRPATMQSSLARPPVLAGCGERRGLAAVARCRAEAAAPVWTASRAPVGPYTGRDPEVKKPAWLRQRAAQGEKYARLRESIGELKLNTVCVEAQCPNIGECWNGGGGAGGEGDGIATATIMVLGDTCTRGCRFCAVKTSNKPPPPDPLEPLNTALAVASWGVDYVVLTSVDRDDLPDGGSSHFAQTVKALKELKPGILVECLTSDFRGDLEAISSLANSGLDVYAHNIETVRSLQRVVRDPRAGYDQSLAVLKHAKGSREDMITKSSIMLGLGETDEEVKQAMMDLRAIGVDILTLGQYLQPSERHLTVREYVTPQKFQFWKEYGESVGFRYVASGPLVRSSYRAGELFVQNLVRNNKTESSMDPYAEITKSN

SEQ ID NO: 25228 - protein, 367 aa, Zea mays subsp. mays
  misc_feature (1)..(367): Ceres Seq. ID no. 12566622
MQSSLARPPVLAGCGERRGLAAVARCRAEAAAPVWTASRAPVGPYTGRDPEVKKPAWLRQRAAQGEKYARLRESIGELKLNTVCVEAQCPNIGECWNGGGGAGGEGDGIATATIMVLGDTCTRGCRFCAVKTSNKPPPPDPLEPLNTALAVASWGVDYVVLTSVDRDDLPDGGSSHFAQTVKALKELKPGILVECLTSDFRGDLEAISSLANSGLDVYAHNIETVRSLQRVVRDPRAGYDQSLAVLKHAKGSREDMITKSSIMLGLGETDEEVKQAMMDLRAIGVDILTLGQYLQPSERHLTVREYVTPQKFQFWKEYGESVGFRYVASGPLVRSSYRAGELFVQNLVRNNKTESSMDPYAEITKSN

SEQ ID NO: 25229 - protein, 253 aa, Zea mays subsp. mays
  misc_feature (1)..(253): Ceres Seq. ID no. 12566623
MVLGDTCTRGCRFCAVKTSNKPPPPDPLEPLNTALAVASWGVDYVVLTSVDRDDLPDGGSSHFAQTVKALKELKPGILVECLTSDFRGDLEAISSLANSGLDVYAHNIETVRSLQRVVRDPRAGYDQSLAVLKHAKGSREDMITKSSIMLGLGETDEEVKQAMMDLRAIGVDILTLGQYLQPSERHLTVREYVTPQKFQFWKEYGESVGFRYVASGPLVRSSYRAGELFVQNLVRNNKTESSMDPYAEITKSN

SEQ ID NO: 25230 - DNA, 646 bp, Zea mays subsp. mays
  misc_feature (1)..(646): Ceres Seq. ID no. 12566664
tgaacagccatactcacggcgacaattatttgacaaggtaaatgagctgattgccggtgcgaaaccgtcaaattgccaaatatctggggacccaaagaatctggaggccagcctgcatgatctccatccagcgtcttggtattgtgttgcatggtatcccatataccggatacctgatggaaaattccaggctacattcttgacatatcactctcttggccactggattcgtcggagcagctcagcaggtggggccgctgttttgccagtcatgggcctgcagtcttacaatgccaaggcagagtggtggtttgagatgagcaagtccgaatctgaaggcgggcagtcgcaggccagtgaagcatccgagattctgaaggagagatcgcgcacgctgagtgaggctgcggccgtgttgtccagggccagcgtgctgaagaatgggcagatgagtagaaacagacatccagactacgagttcttcctctcccggagctgatttggaagtgcctcttcgtactcggatttagttaggtttcagtgtatgtatgtgttgttgacactaaagcttattctgcaaccgatgactggaagctgtttgcttagcttagcttagcaatataataataatgctcagttctcattc

SEQ ID NO: 25231 - protein, 165 aa, Zea mays subsp. mays
  misc_feature (1)..(165): Ceres Seq. ID no. 12566665
EQPYSRRQLFDKVNELIAGAKPSNCQISGDPKNLEASLHDLHPASWYCVAWYPIYRIPDGKFQATFLTYHSLGHWIRRSSSAGGAAVLPVMGLQSYNAKAEWWFEMSKSESEGGQSQASEASEILKERSRTLSEAAAVLSRASVLKNGQMSRNRHPDYEFFLSRS

SEQ ID NO: 25232 - protein, 75 aa, Zea mays subsp. mays
  misc_feature (1)..(75): Ceres Seq. ID no. 12566666
MGLQSYNAKAEWWFEMSKSESEGGQSQASEASEILKERSRTLSEAAAVLSRASVLKNGQMSRNRHPDYEFFLSRS

SEQ ID NO: 25233 - DNA, 1693 bp, Zea mays subsp. mays
  misc_feature (1)..(1693): Ceres Seq. ID no. 12566679
actactctggtcgtcctcgcgccgccgcagcagcagcagcgacgcgaccgccggtaatggcttccaccgttgtgctccggaacgccggctcccgccgactcttctgctactccactctccgcgccgccgcaatattgggacccgccgcgccacctgatgcgcccgcggcggcgtcggcccagccgccaccgatggcaggaaccctctgggcgaggtccatggccactttcacgcgcacgaagccacatgtgaacgtcggcaccattgggcacgtcgatcacggcaaaaccacactcactgccgccattaccaaggttctggcagaggcagggaaggccaaagcagttgcttttgacgagatcgacaaggccccggaagagagagccagaggaatcaccattgcaacagctcatgtcgagtatgagacggctaaaaggcattatgctcatgttgattgtccaggtcacgcagattatgtcaagaacatgatcactggagctgctcaaatggatggtggtattcttgtcgtgtcagctcctgatggcccaatgccacaaacaaaggagcacattcttcttgcccgtcaggttggtgtaccttcccttgtgtgcttcttaaacaaagttgatgctgttgatgacccagagctactggaacttgtagagatggagcttcgggagctcctcagtttctacaagttccctggtgatgagattccgatcatccgtgggtctgcgttgtctgctttgcaagggaacaacgatgagataggaaagaatgccattttgaaactaatggatgcagttgatgagtacattcctgatcctgtaaggcagcttgataaggctttcttgatgccgatagaagatgtgttttctatccagggtcgtggaactgttgttactgggcgtgttgagcagggaacaattaaaactggcgaagatgttgagatcttgggtttgacacagagtggtcccttgaagactacagttactggtgttgagatgttcaaaaagatactggaccatggagaggctggtgacaacgttggtcttcttcttcgtggtctaaagcgtggtgatgtcgagcgtggccaggtggtgtgcaaacctggtagtctgaagacatacaaaaagtttgaggcagaaatatacgtcctgacaaaggatgaaggtggccggcacactgcctttgtcacaaattacacaccccaattctacttcaggactgctgatgtcactggaaaggttgagttgcttggtgagacgaagatggttttgcccggtgacaatgtaaccgcgaatttcgagttgatatcgcctgttcctcttgaaactgggcaaagatttgcgatgagggaaggagggaggacagttggtgccggggttgtctccaaagttattagctgatgagtttccagtttcttgcccgtagcaatttagtaaagaaatgaatgctgacatgtttcttggaatgcatgggcaaaaaggcagagctggctggtctggccgccattcattctggacagtaccttgtgctttcttgttgaggtggctcatcataaagcatattttgtagccacttttccgagttgatattagtgggttcttaccaaatttaccgcgaaaattgctggtcatgttgggccgatgcgtcgttcttcgataggagatgaagtgctgttatcagtgcc

SEQ ID NO: 25234 - protein, 468 aa, Zea mays subsp. mays
  misc_feature (1)..(468): Ceres Seq. ID no. 12566680
YSGRPRAAAAAAATRPPVMASTVVLRNAGSRRLFCYSTLRAAAILGPAAPPDAPAAASAQPPPMAGTLWARSMATFTRTKPHVNVGTIGHVDHGKTTLTAAITKVLAEAGKAKAVAFDEIDKAPEERARGITIATAHVEYETAKRHYAHVDCPGHADYVKNMITGAAQMDGGILVVSAPDGPMPQTKEHILLARQVGVPSLVCFLNKVDAVDDPELLELVEMELRELLSFYKFPGDEIPIIRGSALSALQGNNDEIGKNAILKLMDAVDEYIPDPVRQLDKAFLMPIEDVFSIQGRGTVVTGRVEQGTIKTGEDVEILGLTQSGPLKTTVTGVEMFKKILDHGEAGDNVGLLLRGLKRGDVERGQVVCKPGSLKTYKKFEAEIYVLTKDEGGRHTAFVTNYTPQFYFRTADVTGKVELLGETKMVLPGDNVTANFELISPVPLETGQRFAMREGGRTVGAGVVSKVIS

SEQ ID NO: 25235 - protein, 450 aa, Zea mays subsp. mays
  misc_feature (1)..(450): Ceres Seq. ID no. 12566681
MASTVVLRNAGSRRLFCYSTLRAAAILGPAAPPDAPAAASAQPPPMAGTLWARSMATFTRTKPHVNVGTIGHVDHGKTTLTAAITKVLAEAGKAKAVAFDEIDKAPEERARGITIATAHVEYETAKRHYAHVDCPGHADYVKNMITGAAQMDGGILVVSAPDGPMPQTKEHILLARQVGVPSLVCFLNKVDAVDDPELLELVEMELRELLSFYKFPGDEIPIIRGSALSALQGNNDEIGKNAILKLMDAVDEYIPDPVRQLDKAFLMPIEDVFSIQGRGTVVTGRVEQGTIKTGEDVEILGLTQSGPLKTTVTGVEMFKKILDHGEAGDNVGLLLRGLKRGDVERGQVVCKPGSLKTYKKFEAEIYVLTKDEGGRHTAFVTNYTPQFYFRTADVTGKVELLGETKMVLPGDNVTANFELISPVPLETGQRFAMREGGRTVGAGVVSKVIS

SEQ ID NO: 25236 - protein, 405 aa, Zea mays subsp. mays
  misc_feature (1)..(405): Ceres Seq. ID no. 12566682
MAGTLWARSMATFTRTKPHVNVGTIGHVDHGKTTLTAAITKVLAEAGKAKAVAFDEIDKAPEERARGITIATAHVEYETAKRHYAHVDCPGHADYVKNMITGAAQMDGGILVVSAPDGPMPQTKEHILLARQVGVPSLVCFLNKVDAVDDPELLELVEMELRELLSFYKFPGDEIPIIRGSALSALQGNNDEIGKNAILKLMDAVDEYIPDPVRQLDKAFLMPIEDVFSIQGRGTVVTGRVEQGTIKTGEDVEILGLTQSGPLKTTVTGVEMFKKILDHGEAGDNVGLLLRGLKRGDVERGQVVCKPGSLKTYKKFEAEIYVLTKDEGGRHTAFVTNYTPQFYFRTADVTGKVELLGETKMVLPGDNVTANFELISPVPLETGQRFAMREGGRTVGAGVVSKVIS

SEQ ID NO: 25237 - DNA, 1107 bp, Zea mays subsp. mays
  misc_feature (1)..(1107): Ceres Seq. ID no. 12566683
gcacgagaccattacctagaacatcctaatcgaaaagtctcatcagtcatcacccaccgcctccgccgccgacaacagcgtagtgtagtgtagttccggagagggttggggagagtagtagtgatccgcaatgtcgacggaggaggctgttgtggctgaggtcccggtgaccgaggtgccagcggaggtcccggcggcccaggtggccgaggcgcccaaggcgaagaaggcgcccaaggagaagaaggcgcctaaggagaagaagctttccgcggcgaagaagccggcggcgcaccctccctacgctgagatgattgtagaggcgatcgctgccctcaaggagaggaaggggtcgagctcggtggccatcagcaagtacgtcgaggggaagcatggcggcaagctccccaccaacttccgcaagcagctcactgtgcagctgaagaagctcgctgccgccggcaagctgacgagggtgaagaactccttcaagctgccggccaccgacgccaagcccaaggccgccaagcccaaggcacccaaggccgcgcccaagcccaagccctcgccgaaggcgaaggccaagaccgcttcgaagcccaaggcggcgtcgcccaaacccaaggccaaggccaaggccaagcctgtcgctcctgccgccgcgtcgcccaagccccgcgggcgccctcccaaggtcgccaagacctccgccaaggcctcccccgccaaggcagccaagaaggcggctgctcctgccaagaagggaaaggcagcggcggctcctaagaaggtggcaaccccgaagaaggctgctgctgctgccgccccggccaggaagggcgtggccaggaaggccaagaagtagtctgcctgccttgtcgctggcgagatccccccctcaattccgcctatagattcccctctttcatggattttgatccaatcgtaatattgtcagtagctctagattcgtcggtagctccagcatgagtgtcggtggtagttctgtgcctgtaaaaacttgggatagttgatcgcgtgtgatcagccgtcatgctcctccagtctctatgaacaagctaagctataatagtattttgctatccc

SEQ ID NO: 25238 - protein, 244 aa, Zea mays subsp. mays
  misc_feature (1)..(244): Ceres Seq. ID no. 12566684
MSTEEAVVAEVPVTEVPAEVPAAQVAEAPKAKKAPKEKKAPKEKKLSAAKKPAAHPPYAEMIVEAIAALKERKGSSSVAISKYVEGKHGGKLPTNFRKQLTVQLKKLAAAGKLTRVKNSFKLPATDAKPKAAKPKAPKAAPKPKPSPKAKAKTASKPKAASPKPKAKAKAKPVAPAAASPKPRGRPPKVAKTSAKASPAKAAKKAAAPAKKGKAAAAPKKVATPKKAAAAAAPARKGVARKAKK

SEQ ID NO: 25239 - protein, 184 aa, Zea mays subsp. mays
  misc_feature (1)..(184): Ceres Seq. ID no. 12566685
MIVEAIAALKERKGSSSVAISKYVEGKHGGKLPTNFRKQLTVQLKKLAAAGKLTRVKNSFKLPATDAKPKAAKPKAPKAAPKPKPSPKAKAKTASKPKAASPKPKAKAKAKPVAPAAASPKPRGRPPKVAKTSAKASPAKAAKKAAAPAKKGKAAAAPKKVATPKKAAAAAAPARKGVARKAKK

SEQ ID NO: 25240 - DNA, 1597 bp, Zea mays subsp. mays
  misc_feature (1)..(1597): Ceres Seq. ID no. 12566728
gcacgagaccattacctagaacatcctaatcgaaaaggctcgtcggcaacgctagggtttttggctactccgcctccgctctcccccctgctgcgcgctactcgcccgatctcgcggtgctggtagcggtgaaaatatctgagatcgagtgaagctagcttttcatcgatatggcgcttgtactgcatgctggcagtagtaacaaaaatgcattcaaaacactaattgccgcggattacagcggcatcaaggttgagttggtaaaagactttcaaatgggggtttccaacaaaacaccagagttcctcaagatgaaccctattgggaaggttcctgtcctggagacacctgatggtcctgtctttgagagcaatgcaatagcaagatatgttactcgcttgaaggctaacaacccactttacggatcttcactgattgattatgcccatattgagcagtggatggactttgctgcgacagaggttgatgccagcattggaaagtggttgtacccacgtatggggttttatccctatgctgctgtgacagaagaatcagccattgctgctttgaagagagcattcggttccctgaacacccatcttgcatcaaacacattccttgttgggcattcagtgacacttgcggatattgtgctgacatgcaatctttatatgggctttagccgtatcttgactaagagttttacctcagagttccctcatattgagaggtacttctggaccatggttaaccagccaaacttcaaaaaggtcattggtgacgtgaagcaggcagaagctgtgccacttcttccaaagaagattgctccggccaaagagcagaagcctaaggaagccaaaaaggaggccccgaagcctaaggaagctgagaaaccagcagaggaagaggaggctccaaagcctaagccaaagaatccccttgatttgcttcctccgagcaagttgattcttgacgattggaagaggctgtattctaacacgaaaaccaacttccgtgaggttgctattaaaggtttctgggacatgtatgacccagagggctactccctgtggttctgtgactacaagtacaatgacgagaacacagtgtcgtttgtgactatgaacaaggttggtggcttcctgcagcggatggatctgttccgcaaatacgcctttggcaagatgcttgtggttggctctgagccccctttcaaggtcaaggggctctggctcttccgtggccccgaaatccccaagtttgtcatggatgaggtctatgacatggagctctatgagtggaccaaggtcgacctctctgatgaggcccagaaggagcgggtcaatgccatgatcgaggaccaggagccttttgagggcgaggccttgctagatgcaaaatgcttcaagtgagcctcatctctttggagtgctgctcaggaaagagttgtttaggtttttgggtctaattctaaaacagctatgaatgttagttttgatctggggttattttctgtgctgtgttgagacttttggtcatggtaagggaatcggggaaggttttaggcgcgtgcaatattatggattatcgcatt

SEQ ID NO: 25241 - protein, 414 aa, Zea mays subsp. mays
  misc_feature (1)..(414): Ceres Seq. ID no. 12566729
MALVLHAGSSNKNAFKTLIAADYSGIKVELVKDFQMGVSNKTPEFLKMNPIGKVPVLETPDGPVFESNAIARYVTRLKANNPLYGSSLIDYAHIEQWMDFAATEVDASIGKWLYPRMGFYPYAAVTEESAIAALKRAFGSLNTHLASNTFLVGHSVTLADIVLTCNLYMGFSRILTKSFTSEFPHIERYFWTMVNQPNFKKVIGDVKQAEAVPLLPKKIAPAKEQKPKEAKKEAPKPKEAEKPAEEEEAPKPKPKNPLDLLPPSKLILDDWKRLYSNTKTNFREVAIKGFWDMYDPEGYSLWFCDYKYNDENTVSFVTMNKVGGFLQRMDLFRKYAFGKMLVVGSEPPFKVKGLWLFRGPEIPKFVMDEVYDMELYEWTKVDLSDEAQKERVNAMIEDQEPFEGEALLDAKCFK

SEQ ID NO: 25242 - protein, 379 aa, Zea mays subsp. mays
  misc_feature (1)..(379): Ceres Seq. ID no. 12566730
MGVSNKTPEFLKMNPIGKVPVLETPDGPVFESNAIARYVTRLKANNPLYGSSLIDYAHIEQWMDFAATEVDASIGKWLYPRMGFYPYAAVTEESAIAALKRAFGSLNTHLASNTFLVGHSVTLADIVLTCNLYMGFSRILTKSFTSEFPHIERYFWTMVNQPNFKKVIGDVKQAEAVPLLPKKIAPAKEQKPKEAKKEAPKPKEAEKPAEEEEAPKPKPKNPLDLLPPSKLILDDWKRLYSNTKTNFREVAIKGFWDMYDPEGYSLWFCDYKYNDENTVSFVTMNKVGGFLQRMDLFRKYAFGKMLVVGSEPPFKVKGLWLFRGPEIPKFVMDEVYDMELYEWTKVDLSDEAQKERVNAMIEDQEPFEGEALLDAKCFK

SEQ ID NO: 25243 - protein, 367 aa, Zea mays subsp. mays
  misc_feature (1)..(367): Ceres Seq. ID no. 12566731
MNPIGKVPVLETPDGPVFESNAIARYVTRLKANNPLYGSSLIDYAHIEQWMDFAATEVDASIGKWLYPRMGFYPYAAVTEESAIAALKRAFGSLNTHLASNTFLVGHSVTLADIVLTCNLYMGFSRILTKSFTSEFPHIERYFWTMVNQPNFKKVIGDVKQAEAVPLLPKKIAPAKEQKPKEAKKEAPKPKEAEKPAEEEEAPKPKPKNPLDLLPPSKLILDDWKRLYSNTKTNFREVAIKGFWDMYDPEGYSLWFCDYKYNDENTVSFVTMNKVGGFLQRMDLFRKYAFGKMLVVGSEPPFKVKGLWLFRGPEIPKFVMDEVYDMELYEWTKVDLSDEAQKERVNAMIEDQEPFEGEALLDAKCFK

SEQ ID NO: 25244 - DNA, 1807 bp, Zea mays subsp. mays
  misc_feature (1)..(1807): Ceres Seq. ID no. 12566732
atcgaaaatttggtcgaaataaacaagcagagcagaaaacccccacacgcttttagttggccgtccgtccgtccgtctctgaggagcacacagcagtcgattttaaactgcagctacagtctacagaggtcaggtcaggggacacagcctgagcggctggctagcgggggctagcgagcggcgccacagcgcagcacgcagagagccagggcggcggccatggcgagcgcggcgagtggcggcggcgggtcgctgaagcggatgggcccgctccgggtacagtactacatcgtgatgggcgcggtggcagcggctgtggtgctggccacgctgcgctacatgccggggccagccgtcccggcgaccaccgcccgtaccagcggaggcggcgtcgtgcgctcggccccagcagccgcggccgtccccgtgcccgtgcccgccgtggaggaagaaacgggggaggatgagcaggcgcagaggaggaggaggagaaggaagaagaagggggacggggtcgtgctcttcaacttcggcgactccaacagcgacacgggcggcgtggcggcggtcatggggatccgcatcgcaccgccggagggcagggcctacttccaccaccccacggggcggctctccgacggacgcgtcatcctcgacttcatctgtgagagccctgggcacgccgcacctgagtccgttcatgaagccgctgggctccaacttctccaacggcgtcaacttcgccattgcagggtccacggccatgccgggagtaaccaccttctcgctggacgtgcaggtggatcagttcgtcttcttcaaggagagatgcctcgactccatcgagagaggtgagagtgccccgattgttgagaaggcgttcccagatgctatatacaccatggacatcgggcacaacgatataaacggtgttctccacttgccctatcatacaatgctcgaaaatctccccccagtaattgctgaaatcaagaaagccatcgagaggttgcacgagaatggagccaggaagttctggatacatggaacgggagcattagggtgcatgcctcagaagctttctatgccgagggatgacgacagcggcctcgatgagcatggatgcatcgcaagcattaataatgtctgcaagaagttcaattccttgctgagtgaagccttggacgagctgcgtttgacactgaaaagttcgactatcgtctttgtggatatgttcgctatcaagtatgatcttgttgccaaccacacgaaatatgggattgagaagccattgatgacatgttgtggtcatggaggccccccttacaactatgaccccaaggagagctgcatgacttcggacaaatacctgtgcaagcttggcgaaaagttcataagctgggacggggttcacttcaccgatgctgcaaatggcattgtggcttccaaagtactcagtggtgagtacaacattcccagggtcaagctggccagcctcgtccccgttccaaaatctgacgattaatggtgatgcagcatcttaattagcctttagtttggcctatcaaggatgatgaagatgaaactactaacaaaactgacaccaccaaagtttaattattttgaggttcttacgttacatccattgtagaagaagacttttcttttgtttccttctctttttgtacaatcggcgcatatgtatatcctaggggttaatatatggcgatgcatgtgtctgtaccatgtataattcttttcttttgaattttgggtctgttggtgcgatttagtcgccaaacacttg

SEQ ID NO: 25245 - protein, 353 aa, Zea mays subsp. mays
  misc_feature (1)..(353): Ceres Seq. ID no. 12566733
MSRRRGGGGEGRRRGTGSCSSTSATPTATRAAWRRSWGSASHRRRAGPTSTTPRGGSPTDASSSTSSVRALGTPHLSPFMKPLGSNFSNGVNFAIAGSTAMPGVTTFSLDVQVDQFVFFKERCLDSIERGESAPIVEKAFPDAIYTMDIGHNDINGVLHLPYHTMLENLPPVIAEIKKAIERLHENGARKFWIHGTGALGCMPQKLSMPRDDDSGLDEHGCIASINNVCKKFNSLLSEALDELRLTLKSSTIVFVDMFAIKYDLVANHTKYGIEKPLMTCCGHGGPPYNYDPKESCMTSDKYLCKLGEKFISWDGVHFTDAANGIVASKVLSGEYNIPRVKLASLVPVPKSDD

SEQ ID NO: 25246 - protein, 274 aa, Zea mays subsp. mays
  misc_feature (1)..(274): Ceres Seq. ID no. 12566734
MKPLGSNFSNGVNFAIAGSTAMPGVTTFSLDVQVDQFVFFKERCLDSIERGESAPIVEKAFPDAIYTMDIGHNDINGVLHLPYHTMLENLPPVIAEIKKAIERLHENGARKFWIHGTGALGCMPQKLSMPRDDDSGLDEHGCIASINNVCKKFNSLLSEALDELRLTLKSSTIVFVDMFAIKYDLVANHTKYGIEKPLMTCCGHGGPPYNYDPKESCMTSDKYLCKLGEKFISWDGVHFTDAANGIVASKVLSGEYNIPRVKLASLVPVPKSDD

SEQ ID NO: 25247 - protein, 253 aa, Zea mays subsp. mays
  misc_feature (1)..(253): Ceres Seq. ID no. 12566735
MPGVTTFSLDVQVDQFVFFKERCLDSIERGESAPIVEKAFPDAIYTMDIGHNDINGVLHLPYHTMLENLPPVIAEIKKAIERLHENGARKFWIHGTGALGCMPQKLSMPRDDDSGLDEHGCIASINNVCKKFNSLLSEALDELRLTLKSSTIVFVDMFAIKYDLVANHTKYGIEKPLMTCCGHGGPPYNYDPKESCMTSDKYLCKLGEKFISWDGVHFTDAANGIVASKVLSGEYNIPRVKLASLVPVPKSDD

SEQ ID NO: 25248 - DNA, 1108 bp, Zea mays subsp. mays
  misc_feature (1)..(1108): Ceres Seq. ID no. 12566751
aatcccctcctccgccctccgcctcctcagtgctccggcgcctagcgacctgctcctgcccccgccgccgccgtgcacgcacagccggagcaggagcagcgctgcccgcctttaccgttgcccatggagaactctgccgccgccgccgccgcccggccgcgcctcacccgcgcagccgccaagcgctcagccgtcgtcacggctgtggccgtcgccgccaagcgcaagcgcgtcgcgctcagccagctgcccacgctccccaacgccgtgctcggcgcgcacgacgacgacgacgacaagcccgtcaggaagcagcgcctcctccccgccgccaagcccaagcccaagcccaaggcagcgcccgcgcctgccgcgcccgccgccgcggatgacacggatgacgacattcagctctgcaagccctacgcttccgacatctactcctacctccgctccatggagtcgcaggccaagcgccgcctcgctgttgactacatcgcggcggtgcagatcgacgtcacgcccaacatgcgtggcatcctcatcgactggctcgtcgaggtcgccgaggagtacaagctcgtctccgacacgctctacctcaccgtctcctacatcgaccgcttcctctctgccaaagttctcaacaggcagaagctgcagctcctcggcgtctccgccatgctcatcgcatccaagtatgaggagatcagcccgcccaacgtggaggatttctgctacatcaccgataacacctacaccaagcaggaggtagttaagatggagagtgatatactgaatgtcctcaagtttgaggtgggcagtcctaccgccaagacgttcctgaggatgttcatcagatctgcccaagaagacaacaagaagtatcctagcctccagttggagttcctggggagctacctttctgagctgagcttgctggattatggcttgattcgctccttgccgtcacttgttgcagcctcagccgtctttgttgcaaggctgaccctggatccacacacccatccctggagcaagaagatgcaaacgctaacaggctataagccatctgagttgaaggactgtgttgctgccatacataatt

SEQ ID NO: 25249 - protein, 328 aa, Zea mays subsp. mays
  misc_feature (1)..(328): Ceres Seq. ID no. 12566752
MENSAAAAAARPRLTRAAAKRSAVVTAVAVAAKRKRVALSQLPTLPNAVLGAHDDDDDKPVRKQRLLPAAKPKPKPKAAPAPAAPAAADDTDDDIQLCKPYASDIYSYLRSMESQAKRRLAVDYIAAVQIDVTPNMRGILIDWLVEVAEEYKLVSDTLYLTVSYIDRFLSAKVLNRQKLQLLGVSAMLIASKYEEISPPNVEDFCYITDNTYTKQEVVKMESDILNVLKFEVGSPTAKTFLRMFIRSAQEDNKKYPSLQLEFLGSYLSELSLLDYGLIRSLPSLVAASAVFVARLTLDPHTHPWSKKMQTLTGYKPSELKDCVAAIHN

SEQ ID NO: 25250 - protein, 257 aa, Zea mays subsp. mays
  misc_feature (1)..(257): Ceres Seq. ID no. 12566753
IPSSALRLLSAPAPSDLLLPPPPPCTHSRSRSSAARLYRCPWRTLPPPPPPGRASPAQPPSAQPSSRLWPSPPSASASRSASCPRSPTPCSARTTTTTTSPSGSSASSPPPSPSPSPRQRPRLPRPPPRMTRMTTFSSASPTLPTSTPTSAPWSRRPSAASLLTTSRRCRSTSRPTCVASSSTGSSRSPRSTSSSPTRSTSPSPTSTASSLPKFSTGRSCSSSASPPCSSHPSMRRSARPTWRISATSPITPTPSRR

SEQ ID NO: 25251 - protein, 217 aa, Zea mays subsp. mays
  misc_feature (1)..(217): Ceres Seq. ID no. 12566754
MESQAKRRLAVDYIAAVQIDVTPNMRGILIDWLVEVAEEYKLVSDTLYLTVSYIDRFLSAKVLNRQKLQLLGVSAMLIASKYEEISPPNVEDFCYITDNTYTKQEVVKMESDILNVLKFEVGSPTAKTFLRMFIRSAQEDNKKYPSLQLEFLGSYLSELSLLDYGLIRSLPSLVAASAVFVARLTLDPHTHPWSKKMQTLTGYKPSELKDCVAAIHN

SEQ ID NO: 25252 - DNA, 1462 bp, Zea mays subsp. mays
  misc_feature (1)..(1462): Ceres Seq. ID no. 12566755
aaaaagttcagcaacaacaacaacacaaatcatcggttccgttccgtcgcagaaatagaaaaaaggctttcttgtcccacagggcagggagaccgagagagcagtctagtgattagttgatcaccagacgtccagacaccatgagctcccgcatggctggagcagcgcttctgcgccacctaggcccgcgcctgttcgcggccgggcctgcggtgtccgggctcaccgcgaggggcggcatgcccgcggccgcgaggcttctccccgcgcggatggccagcaccgccgcggaggctgccagagaggacgccggtgcaaataaacggcacggcggcaccgagaagcatgagggaggaggcagcaggcgggcagagcaagaaggccgtcgtcagctactggggcatcgacacgcccaagctcgtgaaggaagacggcacggagtggaagtggaccagcttccggccgtgggacgcgtacacgtcggacacgtccatcgacatagggaagcaccacgcgccgacgacgctgcccgacaaggcggcgtacctgatcgtcaagtcgctgcacgtgccccatggacctcttcttccagcgccggcacgccagccacgcgctgctgctcgagacggtggcggccgtgccgggcatggtgggcggcatgctcctccacctgcgctcgctccgccgcttcgagcacagcggcggctggatccgcgcgctgctcgaggaggccgagaacgagcgcatgcacctcatgacgttcctcgaggtcacgcagccgcgctggtgggagcgcgcgctcgtgctcaccgcgcagggcgtcttcttcaacgcctacttcgtcggctacctcctctcccccaagttcgcgcaccgcgtcgtcggctacctccgaggaggaggcagtgcactcgtacaccgagtacctcaaggacctcgaggccggcatcatcgacaacaccccggcgccggccatcgccatcgactactggcgcctccccgccgacgccaagctcaaggacgtcgtcaccgtcgtgcgcgccgacgaggcgcaccaccgcgacgtcaaccacttcgcgtcggtacgcactctgcaccttgcaacaggattcattgctgtgagcaatctccagcagttctagctaattcattggtttatgtttgcttaatggagtacattattttgcaggacatccattaccaggggatgaagctcaaggacacgcccgcaccgctcagttatcactgacaagtaggcgttgcctgcctgctgctcaattcagagttcttacacgttagactgtcattggtcttaatatgttgttgtgctagccaaagttgcttagcagatcaagactggtttgctactcggaggtgaactagttgcctatatggtttgtacgtaccagtatattgtagatatttgaaataacaaatataagaatccggtgtgatgttactt

SEQ ID NO: 25253 - protein, 258 aa, Zea mays subsp. mays
  misc_feature (1)..(258): Ceres Seq. ID no. 12566756
MREEAAGGQSKKAVVSYWGIDTPKLVKEDGTEWKWTSFRPWDAYTSDTSIDIGKHHAPTTLPDKAAYLIVKSLHVPHGPLLPAPARQPRAAARDGGGRAGHGGRHAPPPALAPPLRAQRRLDPRAARGGRERAHAPHDVPRGHAAALVGARARAHRAGRLLQRLLRRLPPLPQVRAPRRRLPPRRRQCTRTPSTSRTSRPASSTTPRRRPSPSTTGASPPTPSSRTSSPSCAPTRRTTATSTTSRRYALCTLQQDSLL

SEQ ID NO: 25254 - protein, 224 aa, Zea mays subsp. mays
  misc_feature (1)..(224): Ceres Seq. ID no. 12566757
MDLFFQRRHASHALLLETVAAVPGMVGGMLLHLRSLRRFEHSGGWIRALLEEAENERMHLMTFLEVTQPRWWERALVLTAQGVFFNAYFVGYLLSPKFAHRVVGYLRGGGSALVHRVPQGPRGRHHRQHPGAGHRHRLLAPPRRRQAQGRRHRRARRRGAPPRRQPLRVGTHSAPCNRIHCCEQSPAVLANSLVYVCLMEYIILQDIHYQGMKLKDTPAPLSYH

SEQ ID NO: 25255 - protein, 205 aa, Zea mays subsp. mays
  misc_feature (1)..(205): Ceres Seq. ID no. 12566758
MSSRMAGAALLRHLGPRLFAAGPAVSGLTARGGMPAAARLLPARMASTAAEAAREDAGANKRHGGTEKHEGGGSRRAEQEGRRQLLGHRHAQAREGRRHGVEVDQLPAVGRVHVGHVHRHREAPRADDAARQGGVPDRQVAARAPWTSSSSAGTPATRCCSRRWRPCRAWWAACSSTCARSAASSTAAAGSARCSRRPRTSACTS

SEQ ID NO: 25256 - DNA, 1203 bp, Zea mays subsp. mays
  misc_feature (1)..(1203): Ceres Seq. ID no. 12566771
aggattcacaagtgctcgtagcaaatctacaaaatccccaaccgcctctcaacaaagtctccccacgggaggtacacagctacgcgcaaacccgcgtctcgcgcgaagaatccgcatttccccttccccgcaccgcaccgcacccaacccccgtcggagagagagatggcatcggtggcggagatgcagcccctcgcgccggcggggtaccgccgcgcgccggagatgaaggagaaggtggaggcgtcggtggtggacctggaggccgggaccggggagacgctgtacccggggatctcgcgcggggagagcgccctccgatggggcttcgtccgcaaggtctacggcatcctccgctgcgcagctgctcctcaccaccgccgtctccgccctcaccgttctccaccccaccctcaacgccacgctctccgactccccgggcctcgcgctcgtgctcgccgtcctgcccttcatcctgatgatcccattgtatcattatcagcacaagcacccacacaattccgttttcctgggtctgttcacgttgtgcttgagcttcagcatcggcgtggcttgtgctaacacccaagggaaaatcgttctggaggctttagtgctgacggctggcgtggtggtttcgctgactgcgtatgctttctgggcgtcaaagaagggcaaggaattcgggtacctggggcctatcctgtcttccgcgcttactatcctcgtcctaactagctttcttcaggttttcttcccactgggacccgtgtcggtgggcttgttcggtgggctaggggctctggtcttctcaggcttcatcctgtacgacaccgagaacctgattaggcgccacacctacgacgagtacatctgggcgtcggttgggctgtacctcgacatcctgaacctgttcctctccatcctgaacatgctcaggagcatgcaatccgacaactagccggtcaaagcaccgcaccgcggcctcttgatatcgaacacggtatacccccgcggtcctgtgctctggttgttaagaagacgggatcgaagtgcgacatatgtattgtctattgtatgagcccactcgtgtcaacactgcaaacaattgtggtcatgtcaccttgtatgttcttcgtcactttgcaaacaactgtaagtacctgatatcgttttgcgctcgtgctattcgcgctaaaaatc

SEQ ID NO: 25257 - protein, 160 aa, Zea mays subsp. mays
  misc_feature (1)..(160): Ceres Seq. ID no. 12566772
MIPLYHYQHKHPHNSVFLGLFTLCLSFSIGVACANTQGKIVLEALVLTAGVVVSLTAYAFWASKKGKEFGYLGPILSSALTILVLTSFLQVFFPLGPVSVGLFGGLGALVFSGFILYDTENLIRRHTYDEYIWASVGLYLDILNLFLSILNMLRSMQSDN

SEQ ID NO: 25258 - protein, 158 aa, Zea mays subsp. mays
  misc_feature (1)..(158): Ceres Seq. ID no. 12566773
DSQVLVANLQNPQPPLNKVSPREVHSYAQTRVSREESAFPLPRTAPHPTPVGERDGIGGGDAAPRAGGVPPRAGDEGEGGGVGGGPGGRDRGDAVPGDLARGERPPMGLRPQGLRHPPLRSCSSPPPSPPSPFSTPPSTPRSPTPRASRSCSPSCPSS

SEQ ID NO: 25259 - protein, 138 aa, Zea mays subsp. mays
  misc_feature (1)..(138): Ceres Seq. ID no. 12566774
MASVAEMQPLAPAGYRRAPEMKEKVEASVVDLEAGTGETLYPGISRGESALRWGFVRKVYGILRCAAAPHHRRLRPHRSPPHPQRHALRLPGPRARARRPALHPDDPIVSLSAQAPTQFRFPGSVHVVLELQHRRGLC

SEQ ID NO: 25260 - DNA, 1990 bp, Zea mays subsp. mays
  misc_feature (1)..(1990): Ceres Seq. ID no. 12566790
gcacgagaccattacctagaacatcctaatcgaaaaattaaaccaccgagctgggcgcctccccgtggcgctcgcggccgcattagcgcggagatcgagagacaagagagggaaggcggcggcttgccggcttaagccttctctccctccgtcgtcgcctcctccttacgtccgcttcttcctcctgaatggagacgtcagcgccgcccaatgcccccgctccgccggcgcagccacggaggcggttgccggacttccagcagtcagtgcggctcaagtacgtgaagctggggtaccactacctcatatcccacgggatgtacctgctgctgtcgccgctgatggcgctcgtcgccgtgcagctctccaccgtctccccgcatgacctcgccgacctgtgggagcagctccgcttcaacctcctctccgtcgtcgcctgctccacgctgctcgtcttcctctccaccgtttacttcctcacccgcccgcgccccgtgtacctgctcgacttcgcctgctacaagccggagtcggagcgcaagtgcacgcgcgagaccttcatgcactgctccaagctcaccggatccttcacggacgagaacctcgagttccagcgcaagatcctcgagcgctccggcctcggcgaggacacgtaccttccccccgccgtgctccgggtgccccctaacccgtgcatggacgaggcgcgtaaggaggcgcgcgccttcatgttcggcgccatcgaccagctgctcgagaagaccggtgtcaggcccaaggacattggcgtcctagtggtcaactgcagcttgttcaacccgacgccgtcgctgtcagccatggtggtgaaccattacaagctgagggggaatattgtgagctacaacctcggcgggatgggctgcagcgccgggcttctgtccatcgacctcgccaaggatctgctgcaggtgcaccccaactcttacgccctggtgatcagcatggagaacatcacactgaattggtactttgggaacaaccggtccatgcttgtgtcgaattgcctgttccggatgggtggcgcggccatcctgctctcgaacaggcggtctgacaggcggaggtccaagtatgagctggtgcacacggtgcgcacgcacaagggcgccgacgacaagtgctttggctgcgtgacacaggaggaagatgatattggcaagattggcgtgtcactgtccaaggacctcatggcagtggccggagacgcacttaagaccaacatcaccacgctggggccgttggtgctcccattatcagagcaacttctcttcatgggcacattgattgccaagaaggtgctcaagatgaagatcaagccatacatccctgacttcaagctggctttcgagcacttctgcatccacgctggcggacgcgccgtgctggatgagctggagaagaacctggagctcaccgactggcacatggagccatcgaggatgaccctgtacaggtttagcaacacatcaagcagctcactctggtacgagctggcgtacactgaggcaaagggtaggatcaggaagcgcgacaggatctggcagatcgcattcggttctggattcaagtgcaacagcgccgtctggaaggcactccggacggtgaacccggccaaggagaagagcccctggatggatgagattgacaacttcccggtggatgttccaaagatttcaaaggttggtggcgcttgaagaaccattcttcttattattaggtggcaagtggagttgggtgattgtcaggggctgggcagagatttattccatcgtttccaccgttggttcttgtattcagttgtagcatggcatctgtgaaggaacttgagtagatgattcggttaggtagaaagggtgtgttcttcggctcgctagggttgtctgaatgcctgatatgtcctatttattcagattggagagagcaatcgatttgcattctttgctgcctg

SEQ ID NO: 25261 - protein, 515 aa, Zea mays subsp. mays
  misc_feature (1)..(515): Ceres Seq. ID no. 12566791
METSAPPNAPAPPAQPRRRLPDFQQSVRLKYVKLGYHYLISHGMYLLLSPLMALVAVQLSTVSPHDLADLWEQLRFNLLSVVACSTLLVFLSTVYFLTRPRPVYLLDFACYKPESERKCTRETFMHCSKLTGSFTDENLEFQRKILERSGLGEDTYLPPAVLRVPPNPCMDEARKEARAFMFGAIDQLLEKTGVRPKDIGVLVVNCSLFNPTPSLSAMVVNHYKLRGNIVSYNLGGMGCSAGLLSIDLAKDLLQVHPNSYALVISMENITLNWYFGNNRSMLVSNCLFRMGGAAILLSNRRSDRRRSKYELVHTVRTHKGADDKCFGCVTQEEDDIGKIGVSLSKDLMAVAGDALKTNITTLGPLVLPLSEQLLFMGTLIAKKVLKMKIKPYIPDFKLAFEHFCIHAGGRAVLDELEKNLELTDWHMEPSRMTLYRFSNTSSSSLWYELAYTEAKGRIRKRDRIWQIAFGSGFKCNSAVWKALRTVNPAKEKSPWMDEIDNFPVDVPKISKVGGA

SEQ ID NO: 25262 - protein, 472 aa, Zea mays subsp. mays
  misc_feature (1)..(472): Ceres Seq. ID no. 12566792
MYLLLSPLMALVAVQLSTVSPHDLADLWEQLRFNLLSVVACSTLLVFLSTVYFLTRPRPVYLLDFACYKPESERKCTRETFMHCSKLTGSFTDENLEFQRKILERSGLGEDTYLPPAVLRVPPNPCMDEARKEARAFMFGAIDQLLEKTGVRPKDIGVLVVNCSLFNPTPSLSAMVVNHYKLRGNIVSYNLGGMGCSAGLLSIDLAKDLLQVHPNSYALVISMENITLNWYFGNNRSMLVSNCLFRMGGAAILLSNRRSDRRRSKYELVHTVRTHKGADDKCFGCVTQEEDDIGKIGVSLSKDLMAVAGDALKTNITTLGPLVLPLSEQLLFMGTLIAKKVLKMKIKPYIPDFKLAFEHFCIHAGGRAVLDELEKNLELTDWHMEPSRMTLYRFSNTSSSSLWYELAYTEAKGRIRKRDRIWQIAFGSGFKCNSAVWKALRTVNPAKEKSPWMDEIDNFPVDVPKISKVGGA

SEQ ID NO: 25263 - protein, 464 aa, Zea mays subsp. mays
  misc_feature (1)..(464): Ceres Seq. ID no. 12566793
MALVAVQLSTVSPHDLADLWEQLRFNLLSVVACSTLLVFLSTVYFLTRPRPVYLLDFACYKPESERKCTRETFMHCSKLTGSFTDENLEFQRKILERSGLGEDTYLPPAVLRVPPNPCMDEARKEARAFMFGAIDQLLEKTGVRPKDIGVLVVNCSLFNPTPSLSAMVVNHYKLRGNIVSYNLGGMGCSAGLLSIDLAKDLLQVHPNSYALVISMENITLNWYFGNNRSMLVSNCLFRMGGAAILLSNRRSDRRRSKYELVHTVRTHKGADDKCFGCVTQEEDDIGKIGVSLSKDLMAVAGDALKTNITTLGPLVLPLSEQLLFMGTLIAKKVLKMKIKPYIPDFKLAFEHFCIHAGGRAVLDELEKNLELTDWHMEPSRMTLYRFSNTSSSSLWYELAYTEAKGRIRKRDRIWQIAFGSGFKCNSAVWKALRTVNPAKEKSPWMDEIDNFPVDVPKISKVGGA

SEQ ID NO: 25264 - DNA, 1930 bp, Zea mays subsp. mays
  misc_feature (1)..(1930): Ceres Seq. ID no. 12566856
gcacgagaccattacctagaacatcctaatcaaaaaaatttctcgcggcgtcgttccgtcccaaatatcgccccgcgatcccccacctcgccgactggctcccccgctccacctcgtcgacgggcagaggagacccctcagggccgggatcggactcctctttcaccgccaacgcataccagtgatgaagatcttccgctgaagcttgctcaagctgcaataaagcatgacggttgtgcacataatgatgcttaatcattcatgttgcgaaaccctccagtggaacttccttcttctgatgcaaccatgtataggtggacctagttttgaggtggatgcgctgagttttgaaggtggcgagggatctttgctgcggggttctatttgttctcagtgatttttggcaaacactctttggttagattaagaatcatggaaaggtacaaattgatacggaagataggtgatggaacctgtgggaatgtttttatggcttctaatgtagaaactaatgaaattgttgctgttaaaaaaatgaagagaaaattttgtcattgggaagaatgtattagtctgcgagaagtgaaggcccttcagaaactatttcaccctaacattgtgaagctgaaggaagtgacgatggaaaaccatgagctgttcttcatctttgaacacatggagtgcaatttatatgatgtcataagggaaaggcaagttgctttccctgaaagggatataaggaactttatggtccagatactgcaaggtcttgcatatatgcataataatgggtattttcaccgtgatttaaaacctgagaatttgttggtgacaaatggtattattaaaattgctgactttgggttggcaagagaaatatcttccaatcctccttacactgattatgtttccaccagatggtatcgggctccagaggttctactgcaatcttcagtttatacacctgctattgacatgtgggcggttggtgctattttggctgagctttttacactgtccccactttttcctggtgaaagtgaaactgaccagctttacaaaatatgcactgtgcttgggacccctgattgcactatttggccagagggaatgaacctgcctcgttcatgcagctttaagttttttcagaatcctccaagaaacttatgggagcttattcctaatgcttcatctgaagcaatcgatttgatccagcaactttgttcctgggatcctcgaaggaggccaactgctgagcaagcattacaacatcctttcttcaatgtatgcaattgggtaccaagacctgtacatgatgcttaccatacaaaaacaaacggacctaaagctgaaccaagattggaactgaacctgtgggatttcagcacagaacctgatgattgtgtccttgatttaactctcagtctgaagccaagtttttctggaacagaccttggtaagcatgttccacgacgtacagaagaggaaattctcctgtacccgggatttgagaatacccctgtgaagtccggtttttggcctctggtgccatctgatcgtcccgttggtgatgttccggccataccatcctggcagcaggcgtacatggttgacagccaaggcgcattttctggctctccgttcttgcagtcgaacctgttggagaaccgttcgttagcacctatccggcaggtgaatttcttctgacggagacaggattaacagattcatacgattcttgatacgtccagcttctcgctgtatacacactatcttgaataaagtgttgccagtagaggaaatgtatatacagttcgttcgtagctcttgagcttctttctttctagagtacctctttttttttaatcgtctgttcatattccacaccactcctatgtaaataacggcatgcatgataatctctctccct

SEQ ID NO: 25265 - protein, 424 aa, Zea mays subsp. mays
  misc_feature (1)..(424): Ceres Seq. ID no. 12566857
MERYKLIRKIGDGTCGNVFMASNVETNEIVAVKKMKRKFCHWEECISLREVKALQKLFHPNIVKLKEVTMENHELFFIFEHMECNLYDVIRERQVAFPERDIRNFMVQILQGLAYMHNNGYFHRDLKPENLLVTNGIIKIADFGLAREISSNPPYTDYVSTRWYRAPEVLLQSSVYTPAIDMWAVGAILAELFTLSPLFPGESETDQLYKICTVLGTPDCTIWPEGMNLPRSCSFKFFQNPPRNLWELIPNASSEAIDLIQQLCSWDPRRRPTAEQALQHPFFNVCNWVPRPVHDAYHTKTNGPKAEPRLELNLWDFSTEPDDCVLDLTLSLKPSFSGTDLGKHVPRRTEEEILLYPGFENTPVKSGFWPLVPSDRPVGDVPAIPSWQQAYMVDSQGAFSGSPFLQSNLLENRSLAPIRQVNFF

SEQ ID NO: 25266 - protein, 405 aa, Zea mays subsp. mays
  misc_feature (1)..(405): Ceres Seq. ID no. 12566858
MASNVETNEIVAVKKMKRKFCHWEECISLREVKALQKLFHPNIVKLKEVTMENHELFFIFEHMECNLYDVIRERQVAFPERDIRNFMVQILQGLAYMHNNGYFHRDLKPENLLVTNGIIKIADFGLAREISSNPPYTDYVSTRWYRAPEVLLQSSVYTPAIDMWAVGAILAELFTLSPLFPGESETDQLYKICTVLGTPDCTIWPEGMNLPRSCSFKFFQNPPRNLWELIPNASSEAIDLIQQLCSWDPRRRPTAEQALQHPFFNVCNWVPRPVHDAYHTKTNGPKAEPRLELNLWDFSTEPDDCVLDLTLSLKPSFSGTDLGKHVPRRTEEEILLYPGFENTPVKSGFWPLVPSDRPVGDVPAIPSWQQAYMVDSQGAFSGSPFLQSNLLENRSLAPIRQVNFF

SEQ ID NO: 25267 - protein, 390 aa, Zea mays subsp. mays
  misc_feature (1)..(390): Ceres Seq. ID no. 12566859
MKRKFCHWEECISLREVKALQKLFHPNIVKLKEVTMENHELFFIFEHMECNLYDVIRERQVAFPERDIRNFMVQILQGLAYMHNNGYFHRDLKPENLLVTNGIIKIADFGLAREISSNPPYTDYVSTRWYRAPEVLLQSSVYTPAIDMWAVGAILAELFTLSPLFPGESETDQLYKICTVLGTPDCTIWPEGMNLPRSCSFKFFQNPPRNLWELIPNASSEAIDLIQQLCSWDPRRRPTAEQALQHPFFNVCNWVPRPVHDAYHTKTNGPKAEPRLELNLWDFSTEPDDCVLDLTLSLKPSFSGTDLGKHVPRRTEEEILLYPGFENTPVKSGFWPLVPSDRPVGDVPAIPSWQQAYMVDSQGAFSGSPFLQSNLLENRSLAPIRQVNFF

SEQ ID NO: 25268 - DNA, 1848 bp, Zea mays subsp. mays
  misc_feature (1)..(1848): Ceres Seq. ID no. 12566909
gcacgagaccattacctagaacatcctaatcgaaaaatacacaaacacacggagctagcagcacggatcgagagaacaatggaggaaacaagcaggatccctgggtacttcaagaacaagggcatcctgatcacgggcgcaacaggcttccttggaaagagtaagcattcctcgtggagaagatactgagggtccagccggacgtaaagaggatctacctccccgtgcgtgcgccggatgctgcatcagccaagaaacgggtggagactgaggtgatcgggaaggagctgtttgggcttctccgagagacgcacggcaagaggttccactccttcatcgaggagaaggtggtcccgttggccggcgacatcatccacgagaacctgggcgtggaggggccccagctgaggcggatgactcgggagctcaacgtcatcgtcaatggagctgccacaacaaacttctacgagaggtacgacgtggccctggacgtgaacgtgatgggagtgaagcatatctgccagttggccaagcagtgccccaatctggaggtcgtcctccatgtgtccacggcctatgtggtgggggagaagcaggggatgatcctggagcgggcgttcaagcagggcgagaccctgcggatggagacggagctggacatggacgccgagctgcgggtggccagggactaccagcagcaggtcgccggggacgacgccgagcagaagaacgagaggaaggccatgaaggagctgggcctcgccagggcccgggagttgggctggcccaacacgtacgtcttcaccaaggcgctaggggagatgatgctggcgcgggagctgggcggcgtcgtccccgccgtgatcgtgcggcccagcatcatcacaagcatccataaggagccgctgccggggtggatggaagggaccaggaccatcgacgccatcctcattggctacgccaagcagagcctctcctgcttcctagccgacctccagctcaccatggacgtgatccccggggacatggtggtgaacgcgatgatggccgcgacggtggcgcacgcgtccgcccccggcggccacaaggaggagtcgccgacggtgtaccacgcgacgtcttccctccgcaaccctgcgccgtacgcggtgctgtaccggacgggaatccgctacttctgcgaccacccgcgcgtgggcaaggacggccgccccgtgcgtacccgcaaggtgcacttcttcggcaccgtcgcagccttcaccgcctacatgctgctccgctacaggctgccgctggagcttctgcgcctgctcagcctcctctccggcggcctcctcttctcgcgcctctacgccgacctggaccgcaagtacaggttcgtcatgcatctcgtcgacctctacgggcccttcgcgctcttcaagggcatcttcgacgacgccaacatggagagactcaggatggccatgcctgttgccgaccggctggagttcaacttcgacccaaacaccatcgactgggacgactacttctacaagatccacattccaggggtcatgaagtacgtcctcaagtagcagctacatgcactgatcgccgtcgttcgtactacctacatgtacatcatgatccatccagattagtactattaattaattaaatccaccaattggcgcgcgtttgtatacacattgctatatattgttgctacgctcgacgtggatcccacccatcctctctattcctcatcaaaatgtatccagttattagcagctctgctttagctaccactacgtacttctgctctggcttgtttatttagtgttaatttagcaggacctgatgatg

SEQ ID NO: 25269 - protein, 387 aa, Zea mays subsp. mays
  misc_feature (1)..(387): Ceres Seq. ID no. 12566910
MTRELNVIVNGAATTNFYERYDVALDVNVMGVKHICQLAKQCPNLEVVLHVSTAYVVGEKQGMILERAFKQGETLRMETELDMDAELRVARDYQQQVAGDDAEQKNERKAMKELGLARARELGWPNTYVFTKALGEMMLARELGGVVPAVIVRPSIITSIHKEPLPGWMEGTRTIDAILIGYAKQSLSCFLADLQLTMDVIPGDMVVNAMMAATVAHASAPGGHKEESPTVYHATSSLRNPAPYAVLYRTGIRYFCDHPRVGKDGRPVRTRKVHFFGTVAAFTAYMLLRYRLPLELLRLLSLLSGGLLFSRLYADLDRKYRFVMHLVDLYGPFALFKGIFDDANMERLRMAMPVADRLEFNFDPNTIDWDDYFYKIHIPGVMKYVLK

SEQ ID NO: 25270 - protein, 358 aa, Zea mays subsp. mays
  misc_feature (1)..(358): Ceres Seq. ID no. 12566911
MGVKHICQLAKQCPNLEVVLHVSTAYVVGEKQGMILERAFKQGETLRMETELDMDAELRVARDYQQQVAGDDAEQKNERKAMKELGLARARELGWPNTYVFTKALGEMMLARELGGVVPAVIVRPSIITSIHKEPLPGWMEGTRTIDAILIGYAKQSLSCFLADLQLTMDVIPGDMVVNAMMAATVAHASAPGGHKEESPTVYHATSSLRNPAPYAVLYRTGIRYFCDHPRVGKDGRPVRTRKVHFFGTVAAFTAYMLLRYRLPLELLRLLSLLSGGLLFSRLYADLDRKYRFVMHLVDLYGPFALFKGIFDDANMERLRMAMPVADRLEFNFDPNTIDWDDYFYKIHIPGVMKYVLK

SEQ ID NO: 25271 - protein, 325 aa, Zea mays subsp. mays
  misc_feature (1)..(325): Ceres Seq. ID no. 12566912
MILERAFKQGETLRMETELDMDAELRVARDYQQQVAGDDAEQKNERKAMKELGLARARELGWPNTYVFTKALGEMMLARELGGVVPAVIVRPSIITSIHKEPLPGWMEGTRTIDAILIGYAKQSLSCFLADLQLTMDVIPGDMVVNAMMAATVAHASAPGGHKEESPTVYHATSSLRNPAPYAVLYRTGIRYFCDHPRVGKDGRPVRTRKVHFFGTVAAFTAYMLLRYRLPLELLRLLSLLSGGLLFSRLYADLDRKYRFVMHLVDLYGPFALFKGIFDDANMERLRMAMPVADRLEFNFDPNTIDWDDYFYKIHIPGVMKYVLK

SEQ ID NO: 25272 - DNA, 1863 bp, Zea mays subsp. mays
  misc_feature (1)..(1863): Ceres Seq. ID no. 12566913
gcgggaaactctcaaaatcatcttctccgtttccagtccacaaccttctccattcctcaataccgcaaaccctagaaaaatctcgctccgcaaaaccatgagcgcccctatggagatctccttcactgcgcccccaccccctccggacgcagcgtctaccgccgacgcttccccgctgctggaacctgccgccgcgcagatgctgccccctgtcgccgcagtctcctcctcgcagccgatgcagcagacagctgcggctgcggccgtggttgctccttccccggccgacgataaggtcctcgtgtcagttgaggtactgttgcacgccacgagcgtagctcgccacgaggacgtccaggtggcggtcgagaggatgctcgaagctcgaagcttaagctatgttgatgggcctgtgccaattcctgccgataattcttttcttcttgaaaatgtcaaaaggatacaaataagtgatactgatgagtgggttgagaatcacaaagttctcttattttggcaagtcaagcctgttgtgcatgtgttccagctgagtgaagatggtccaggtgaggaaccaagcgaggatgatacactctctagctttaatgagtgggccttaccggccaaagaatttgatggtctgtgggaaagtttactatatgaagttggtctcaagcagaggttgctgagatatgctgtcagtgctttgctttttactgaaagaggtgtggacacatgtctggtttcatggaaccggattgtacttttgcatggtccacctggaacaggaaagacttccttgtgtaaagcactagcacagaaactttctattcggttcaaatcaaggtattctatgtgtcaattgattgaagtcaatgctcattcattgttcagcaagtggttttctgaaagtggaaaactggttgccaaacttttccagaagatccaggagatggtggaggaagaaagcaacctagtatttgtattaatagatgaagttgaaagccttgctgctgccagacaagctgccatatctggctctgaaccttcagactccattagagttgtgaatgcactgctaacacaaatggacaaactgaagtcttggccaaatgttatcattttgacaacatcgaatattactacagcaatagatattgcatttgttgacagggcagacattaaggcatatgtcggaccccctacgcttcaagcacgatacgagatcttgaggtcatgcatacaggaactcttaagagttggtattcttacatatcctcagggtagtagtgtgccatgtattctgaactattcgaccctgaaggagaagaagcactgtcctgaggctgcagaaccccatggtgcgcttcatctatccaatctactgtatgaagccgcaaaactgtgtgagggacttagtggccggtcattgaggaaactccctttcctgacacatgcctctgttaccaatccgtcatgctgcgatgcttctactttcttgcatacattgatacagactgcacggagagaagtcttggagtcacgtggttagttcacccttgaaaccttggcgtcttttggaagagcaaaatgctaacagttcattccaaacaccatgtcctggagtcccctgatgtgatcaattgccgggtcgttaaaaccataagaaagtccatcccatcgctagagttaggttagtgttaaatgtagagagacaagaacaaagaatgaatgaattggcttaattccattgattgatcggtatgtatatacatggcgaacagtcgccttgacgttccttagggatgtcacacggttaatagtaagcctagtcacaaatccgtttgaagatagatccgttgg

SEQ ID NO: 25273 - protein, 516 aa, Zea mays subsp. mays
  misc_feature (1)..(516): Ceres Seq. ID no. 12566914
RETLKIIFSVSSPQPSPFLNTANPRKISLRKTMSAPMEISFTAPPPPPDAASTADASPLLEPAAAQMLPPVAAVSSSQPMQQTAAAAAVVAPSPADDKVLVSVEVLLHATSVARHEDVQVAVERMLEARSLSYVDGPVPIPADNSFLLENVKRIQISDTDEWVENHKVLLFWQVKPVVHVFQLSEDGPGEEPSEDDTLSSFNEWALPAKEFDGLWESLLYEVGLKQRLLRYAVSALLFTERGVDTCLVSWNRIVLLHGPPGTGKTSLCKALAQKLSIRFKSRYSMCQLIEVNAHSLFSKWFSESGKLVAKLFQKIQEMVEEESNLVFVLIDEVESLAAARQAAISGSEPSDSIRVVNALLTQMDKLKSWPNVIILTTSNITTAIDIAFVDRADIKAYVGPPTLQARYEILRSCIQELLRVGILTYPQGSSVPCILNYSTLKEKKHCPEAAEPHGALHLSNLLYEAAKLCEGLSGRSLRKLPFLTHASVTNPSCCDASTFLHTLIQTARREVLESRG

SEQ ID NO: 25274 - protein, 484 aa, Zea mays subsp. mays
  misc_feature (1)..(484): Ceres Seq. ID no. 12566915
MSAPMEISFTAPPPPPDAASTADASPLLEPAAAQMLPPVAAVSSSQPMQQTAAAAAVVAPSPADDKVLVSVEVLLHATSVARHEDVQVAVERMLEARSLSYVDGPVPIPADNSFLLENVKRIQISDTDEWVENHKVLLFWQVKPVVHVFQLSEDGPGEEPSEDDTLSSFNEWALPAKEFDGLWESLLYEVGLKQRLLRYAVSALLFTERGVDTCLVSWNRIVLLHGPPGTGKTSLCKALAQKLSIRFKSRYSMCQLIEVNAHSLFSKWFSESGKLVAKLFQKIQEMVEEESNLVFVLIDEVESLAAARQAAISGSEPSDSIRVVNALLTQMDKLKSWPNVIILTTSNITTAIDIAFVDRADIKAYVGPPTLQARYEILRSCIQELLRVGILTYPQGSSVPCILNYSTLKEKKHCPEAAEPHGALHLSNLLYEAAKLCEGLSGRSLRKLPFLTHASVTNPSCCDASTFLHTLIQTARREVLESRG

SEQ ID NO: 25275 - protein, 480 aa, Zea mays subsp. mays
  misc_feature (1)..(480): Ceres Seq. ID no. 12566916
MEISFTAPPPPPDAASTADASPLLEPAAAQMLPPVAAVSSSQPMQQTAAAAAVVAPSPADDKVLVSVEVLLHATSVARHEDVQVAVERMLEARSLSYVDGPVPIPADNSFLLENVKRIQISDTDEWVENHKVLLFWQVKPVVHVFQLSEDGPGEEPSEDDTLSSFNEWALPAKEFDGLWESLLYEVGLKQRLLRYAVSALLFTERGVDTCLVSWNRIVLLHGPPGTGKTSLCKALAQKLSIRFKSRYSMCQLIEVNAHSLFSKWFSESGKLVAKLFQKIQEMVEEESNLVFVLIDEVESLAAARQAAISGSEPSDSIRVVNALLTQMDKLKSWPNVIILTTSNITTAIDIAFVDRADIKAYVGPPTLQARYEILRSCIQELLRVGILTYPQGSSVPCILNYSTLKEKKHCPEAAEPHGALHLSNLLYEAAKLCEGLSGRSLRKLPFLTHASVTNPSCCDASTFLHTLIQTARREVLESRG

SEQ ID NO: 25276 - DNA, 1412 bp, Zea mays subsp. mays
  misc_feature (1)..(1412): Ceres Seq. ID no. 12566951
atctctcatttcccttgcaactggaagcgagctctctgcctcgtacgtcgtcggcgctgcgggagcgtgcattgttgagcgagtgcggccaagcaacgcgggctcgaggagatgatgctgagcgggcacggcggcgagaggcgcctgttcacggcgtcgcagtggcaggagctcgagcaccaggcgctcatcttcaagtacatggcctcgggcgcgcccgtgccgcacgacctcgtcctaccgctccgcctcgccaccggcgtcgacaccgcgccctccctcgccttcccgccgcagccttcgccgtcgctggcgtactggggctgctacggcgcgggggcgccgttcggccgcaaggcggcggaggacacggagccggggcggtgccggcggacggacggcaagaagtggcggtgctccagggaggcccacggcgactccaagtactgcgagaagcacattcaccgcgggaagagccgttcaagaaagcctgtggaagtgacctcctcccccgccgccggcgccgctgcggcgtaccgaccgtccgcgatctccaccatctcgccgccccgcgcggccgacgcgccgccgccgagcctcgcctacccgcagcagcatctcctccacggcgcctcctcctccgcagcagcccgcgcccccgctggcgctctccagctccacctcgacgcgagcctgcacgcggcggcggcggcggcgtcgccatcgccgccgccgtcctaccacaggtacgcccactacacaccgccagcgtcgtcgctcttcccgggcggcggctacggctacgactacgactacgggcagtccaaggagctccgggacgcggcggagctcaggcgacggcacttccacgcgctcggggccgacctgagcctcgacaagccgctgcccgagcccgacaccggctccgacgagaagcagcccctgcggcgtttcctcgacgagtggccgcgggagagcggcgacatggcggcggacgacgccacgcagctttccatctccatccccgcggcctcgccctccgacctcgctgctgcctccgccgccgccgcgcgattccacaacggggagtgatcggtccatctcctagctgcagccctgcaacatcgtggattgaccgctggctgcaactgcaagcctgcaacagcgagcagtaagccagtgacgtggatgcatctcgtagcggcaaaccctgcttctgcctctgcgctgcgcgggacggctcaggctgaggctcaaaaaagtctgaaccgagtcattgagtcaagcagtactagggactctatgacttggtcttttgttcttttgtagcagtacgttactcgtaccaaatgttgtttattttttgtgtgacatttttcatttcttccggttccagtctgtgatgcaagccc

SEQ ID NO: 25277 - protein, 390 aa, Zea mays subsp. mays
  misc_feature (1)..(390): Ceres Seq. ID no. 12566952
LSFPLQLEASSLPRTSSALRERALLSECGQATRARGDDAERARRREAPVHGVAVAGARAPGAHLQVHGLGRARAARPRPTAPPRHRRRHRALPRLPAAAFAVAGVLGLLRRGGAVRPQGGGGHGAGAVPADGRQEVAVLQGGPRRLQVLREAHSPREEPFKKACGSDLLPRRRRRCGVPTVRDLHHLAAPRGRRAAAEPRLPAAASPPRRLLLRSSPRPRWRSPAPPRREPARGGGGGVAIAAAVLPQVRPLHTASVVALPGRRLRLRLRLRAVQGAPGRGGAQATALPRARGRPEPRQAAARARHRLRREAAPAAFPRRVAAGERRHGGGRRHAAFHLHPRGLALRPRCCLRRRRAIPQRGVIGPSPSCSPATSWIDRWLQLQACNSEQ

SEQ ID NO: 25278 - protein, 326 aa, Zea mays subsp. mays
  misc_feature (1)..(326): Ceres Seq. ID no. 12566953
MMLSGHGGERRLFTASQWQELEHQALIFKYMASGAPVPHDLVLPLRLATGVDTAPSLAFPPQPSPSLAYWGCYGAGAPFGRKAAEDTEPGRCRRTDGKKWRCSREAHGDSKYCEKHIHRGKSRSRKPVEVTSSPAAGAAAAYRPSAISTISPPRAADAPPPSLAYPQQHLLHGASSSAAARAPAGALQLHLDASLHAAAAAASPSPPPSYHRYAHYTPPASSLFPGGGYGYDYDYGQSKELRDAAELRRRHFHALGADLSLDKPLPEPDTGSDEKQPLRRFLDEWPRESGDMAADDATQLSISIPAASPSDLAAASAAAARFHNGE

SEQ ID NO: 25279 - protein, 325 aa, Zea mays subsp. mays
  misc_feature (1)..(325): Ceres Seq. ID no. 12566954
MLSGHGGERRLFTASQWQELEHQALIFKYMASGAPVPHDLVLPLRLATGVDTAPSLAFPPQPSPSLAYWGCYGAGAPFGRKAAEDTEPGRCRRTDGKKWRCSREAHGDSKYCEKHIHRGKSRSRKPVEVTSSPAAGAAAAYRPSAISTISPPRAADAPPPSLAYPQQHLLHGASSSAAARAPAGALQLHLDASLHAAAAAASPSPPPSYHRYAHYTPPASSLFPGGGYGYDYDYGQSKELRDAAELRRRHFHALGADLSLDKPLPEPDTGSDEKQPLRRFLDEWPRESGDMAADDATQLSISIPAASPSDLAAASAAAARFHNGE

SEQ ID NO: 25280 - DNA, 473 bp, Zea mays subsp. mays
  misc_feature (1)..(473): Ceres Seq. ID no. 12567013
  misc_feature (39)..(39): n is a, c, t, g, unknown, or other
  misc_feature (47)..(47): n is a, c, t, g, unknown, or other
  misc_feature (48)..(48): n is a, c, t, g, unknown, or other
atacccattttctcgcaaatccccgccacccccatttynaccgccannttcggtgccgtcagatcgatttcttgtgcatcttggagcatctacaaggggtgggcgactcagcaaaatctgctggcatctcctctcttttcttgcatcgaattttgtaattgccgactgaaccgtgcagagaagtcttgacaagcgcatgggcggaggtggaaatggggaatcgttgcgatctcctccaagtcctttttgagggggccttggctggaggagctgctggtgttgttgttgaaacagctttatatcctattgatacaataaagaccaggcttcaggctgcacaaggcggaagtaaaattcaatggaaaggcatgtatgatgggttagctggaaatattgtcggtgttcttcccgcttctgcaatttttgttggagtatatgaaccagctaaaagaaaactactggaattgtttcct

SEQ ID NO: 25281 - protein, 87 aa, Zea mays subsp. mays
  misc_feature (1)..(87): Ceres Seq. ID no. 13577844
MGNRCDLLQVLFEGALAGGAAGVVVETALYPIDTIKTRLQAAQGGSKIQWKGMYDGLAGNIVGVLPASAIFVGVYEPAKRKLLELFP

SEQ ID NO: 25282 - protein, 62 aa, Zea mays subsp. mays
  misc_feature (1)..(62): Ceres Seq. ID no. 13577845
  misc_feature (13)..(13): Xaa is any aa, unknown or other
  misc_feature (16)..(16): Xaa is any aa, unknown or other
IPIFSQIPATPIXTAXFGAVRSISCASWSIYKGWATQQNLLASPLFSCIEFCNCRLNRAEKS

SEQ ID NO: 25283 - protein, 55 aa, Zea mays subsp. mays
  misc_feature (1)..(55): Ceres Seq. ID no. 13577846
  misc_feature (13)..(13): Xaa is any aa, unknown or other
  misc_feature (16)..(16): Xaa is any aa, unknown or other
YPFSRKSPPPPFXPPXSVPSDRFLVHLGASTRGGRLSKICWHLLSFLASNFVIAD

SEQ ID NO: 25284 - DNA, 1486 bp, Zea mays subsp. mays
  misc_feature (1)..(1486): Ceres Seq. ID no. 12567030
gtccctgtctcgggtatcgtcgctggtcgctgccgcagccttcgtcctccctctcccactcccgatcgcatccaccctggaaccctagcggcccagcccgcgaccatggcgcggcggtcgacccctctcctacgccgccttctcgccccgtcaccttccctctccactcctctagccgacgccgtatcccgccgcaccgtcacgtacatgccccgcccgggggacggcgctccgcgggcgtcaccctcatcccgggcgacggcatcgggcccctcgtcacgggcgccgtgcggcaggtgatggaggcgatgcacgcgccggtctatttcgagacgtacgaggtccacggcgacatgcccacggtccccgccgaggtcatcgagtccatccgccgcaacaaggtctgcctcaagggcggcctcgccacccccgtaggcggtggtgtgtcctccctcaacgtgcagctccggaaggagctcgacctctacgccgcgctcgtcaactgtttcaacctccctggcctgcctaccaggcacgacaacgtggacatcgtcgtcattcgggagaacagtgagggagagtactcggggctcgagcatgaggtcgttcctggcgtcgtggagagtctcaaggtgataacaaaattctgctctgaaagaattgcaaagtatgcttttgagtatgcataccttaacaatcgaaagaaagtgacagcagtgcataaagccaatatcatgaagcttgctgatggtttgttcttggagtcttgccgtgaggttgcaaagaagtaccctggaattaaatataatgaaatcattgtggacaactgttgtatgcagcttgttgcaaagcctgaacaatttgatgttatggtcaccccaaatctttatggcaatctggtggctaatgtagctgcaggtattgctggaggcactggtgtcatgcctggaggcaatgtgggtcaggaccatgctatcttcgagcaaggtgcttctgcaggaaatgttggaaatgagaaaattgtggagaagaagagagctaaccctgttgcgctgctgctatcttctgccatgatgttgaggcacttgcaatttccatcatttgctgaccgtttggagacggcagttaagcgtgtcatagcagaaggcaagtacagaaccaaagatttgggcggcaccagcacaacccaggaagtgatagatgctgtcattgccaaactgggttaaacacaaaccgtgtgtttaatacattttttttcctcatggactaggtaactagtccttactaaatgtttgttcttcgtataggtttagactttagaccaccattttgttcggcaaattcttgtacaatcttcaggtatcttgtttctggcctggtttgggtgtgtggtgtaactgagcaaactcgtattaatttttacgcaaatttttgtgaccttaattcttaactggaaataagagaaaaatatggaacagttctccgt

SEQ ID NO: 25285 - protein, 407 aa, Zea mays subsp. mays
  misc_feature (1)..(407): Ceres Seq. ID no. 12567031
PCLGYRRWSLPQPSSSLSHSRSHPPWNPSGPARDHGAAVDPSPTPPSRPVTFPLHSSSRRRIPPHRHVHAPPGGRRSAGVTLIPGDGIGPLVTGAVRQVMEAMHAPVYFETYEVHGDMPTVPAEVIESIRRNKVCLKGGLATPVGGGVSSLNVQLRKELDLYAALVNCFNLPGLPTRHDNVDIVVIRENSEGEYSGLEHEVVPGVVESLKVITKFCSERIAKYAFEYAYLNNRKKVTAVHKANIMKLADGLFLESCREVAKKYPGIKYNEIIVDNCCMQLVAKPEQFDVMVTPNLYGNLVANVAAGIAGGTGVMPGGNVGQDHAIFEQGASAGNVGNEKIVEKKRANPVALLLSSAMMLRHLQFPSFADRLETAVKRVIAEGKYRTKDLGGTSTTQEVIDAVIAKLG

SEQ ID NO: 25286 - protein, 308 aa, Zea mays subsp. mays
  misc_feature (1)..(308): Ceres Seq. ID no. 12567032
MEAMHAPVYFETYEVHGDMPTVPAEVIESIRRNKVCLKGGLATPVGGGVSSLNVQLRKELDLYAALVNCFNLPGLPTRHDNVDIVVIRENSEGEYSGLEHEVVPGVVESLKVITKFCSERIAKYAFEYAYLNNRKKVTAVHKANIMKLADGLFLESCREVAKKYPGIKYNEIIVDNCCMQLVAKPEQFDVMVTPNLYGNLVANVAAGIAGGTGVMPGGNVGQDHAIFEQGASAGNVGNEKIVEKKRANPVALLLSSAMMLRHLQFPSFADRLETAVKRVIAEGKYRTKDLGGTSTTQEVIDAVIAKLG

SEQ ID NO: 25287 - protein, 305 aa, Zea mays subsp. mays
  misc_feature (1)..(305): Ceres Seq. ID no. 12567033
MHAPVYFETYEVHGDMPTVPAEVIESIRRNKVCLKGGLATPVGGGVSSLNVQLRKELDLYAALVNCFNLPGLPTRHDNVDIVVIRENSEGEYSGLEHEVVPGVVESLKVITKFCSERIAKYAFEYAYLNNRKKVTAVHKANIMKLADGLFLESCREVAKKYPGIKYNEIIVDNCCMQLVAKPEQFDVMVTPNLYGNLVANVAAGIAGGTGVMPGGNVGQDHAIFEQGASAGNVGNEKIVEKKRANPVALLLSSAMMLRHLQFPSFADRLETAVKRVIAEGKYRTKDLGGTSTTQEVIDAVIAKLG

SEQ ID NO: 25288 - DNA, 1648 bp, Zea mays subsp. mays
  misc_feature (1)..(1648): Ceres Seq. ID no. 12567042
aaaacggtcacccgttctacgcttggcttggctgcgctgcgcacaccgaacccctcgccgtcgcggctcgcctcggctccgccccgaccgaccgatcgatccggccggcggtgggcgccatggcctcccccaaccccgaggccgcggggctgcaggccgtggctgtggcgggggcaggggagggcggctcgtcctcgtcgctcagcgccgttgcgggagcggctgcgttgtccggggagctggtgcccaggagggcgttggcgctgcgcaaggagcgcgtgtgcacggccaaggagcgcatcagccgcatgcctccctgtgcggcggggaagcggagctccatctaccgcggggtcacccggcataggtggacaggtcgatatgaggctcacctttgggacaaaagcacgtggaatcagaatcagaacaaaaagggcaaacaggtatatctaggtgcatatgatgatgaagaggctgcagcaagggccctatgaccttgctgcattaaaatactggggagctggaacacaaataaatttcccagtatctgactatgcaagagaccttgaagagatgcagatgatatccaaggaggattatctcgtgtctcttaggagaaagagcagtgccttctacagggggttaccaaaatatcgtgggcttcttaggcaacttcataattccagatgggatacatctttgggactcggcaatgactacatgagccttagttgtggcaaggatatcatgttggatgggaaatttgcaggaagctttggtctagagaggaaaattgatcttacaaattacatccggtggtggctaccaaagaagacaaggcagtcagatacatctaaaacagaagaaattgctgatgaaattcgagctattgaaagttcaatgcaacagactgaaccctataagttgccttctcttggcttcagttctccatcaaagccctcttcaatgggcttatcagcatgcagcatattatctcagtctgatgcctttaaaagcttcttggagaagtctacaaaattatctgaagaatgtagtcttagcaaagaaattgttgaaggaaagactgttgcctcggtacctgctactggatatgatacaggggcaattaatattaacatgaatgagttgctagtacaaagatctacttactcaatggcccctgttatgcctacaccaatgaagagtacctggagccctgctgatccttccgtggatccacttttttggagcaactttgttttgccatcgagtcaacctgttacaatggcgacaataacaacaacaacgtttgcaaagaatgaggtaagttcaagtgatccattccagagccaagagtgactgcacgagcttactgaagcaggatattttagattggtcaaagacagcatcccgtgcgtcaactagattctttttgtcaagcttttgatgtcgcaacttgtgagcaatactccttgtttatccatacttcataggacatgaatagaaggtatgacaagtgcaagcatagttatgtaatatacagtggctagttgccagaaaatgagatttagttgtgtagagctgtttgtacatattgagatggttgtttcagttcaatctcaacaggtttgaggaaaatatccaacgg

SEQ ID NO: 25289 - protein, 299 aa, Zea mays subsp. mays
  misc_feature (1)..(299): Ceres Seq. ID no. 12567043
MMMKRLQQGPYDLAALKYWGAGTQINFPVSDYARDLEEMQMISKEDYLVSLRRKSSAFYRGLPKYRGLLRQLHNSRWDTSLGLGNDYMSLSCGKDIMLDGKFAGSFGLERKIDLTNYIRWWLPKKTRQSDTSKTEEIADEIRAIESSMQQTEPYKLPSLGFSSPSKPSSMGLSACSILSQSDAFKSFLEKSTKLSEECSLSKEIVEGKTVASVPATGYDTGAININMNELLVQRSTYSMAPVMPTPMKSTWSPADPSVDPLFWSNFVLPSSQPVTMATITTTTFAKNEVSSSDPFQSQE

SEQ ID NO: 25290 - protein, 298 aa, Zea mays subsp. mays
  misc_feature (1)..(298): Ceres Seq. ID no. 12567044
MMKRLQQGPYDLAALKYWGAGTQINFPVSDYARDLEEMQMISKEDYLVSLRRKSSAFYRGLPKYRGLLRQLHNSRWDTSLGLGNDYMSLSCGKDIMLDGKFAGSFGLERKIDLTNYIRWWLPKKTRQSDTSKTEEIADEIRAIESSMQQTEPYKLPSLGFSSPSKPSSMGLSACSILSQSDAFKSFLEKSTKLSEECSLSKEIVEGKTVASVPATGYDTGAININMNELLVQRSTYSMAPVMPTPMKSTWSPADPSVDPLFWSNFVLPSSQPVTMATITTTTFAKNEVSSSDPFQSQE

SEQ ID NO: 25291 - protein, 297 aa, Zea mays subsp. mays
  misc_feature (1)..(297): Ceres Seq. ID no. 12567045
MKRLQQGPYDLAALKYWGAGTQINFPVSDYARDLEEMQMISKEDYLVSLRRKSSAFYRGLPKYRGLLRQLHNSRWDTSLGLGNDYMSLSCGKDIMLDGKFAGSFGLERKIDLTNYIRWWLPKKTRQSDTSKTEEIADEIRAIESSMQQTEPYKLPSLGFSSPSKPSSMGLSACSILSQSDAFKSFLEKSTKLSEECSLSKEIVEGKTVASVPATGYDTGAININMNELLVQRSTYSMAPVMPTPMKSTWSPADPSVDPLFWSNFVLPSSQPVTMATITTTTFAKNEVSSSDPFQSQE

SEQ ID NO: 25292 - DNA, 1895 bp, Zea mays subsp. mays
  misc_feature (1)..(1895): Ceres Seq. ID no. 12567136
acccgtcctccacttgcccttctccgccaacagactgtccccggccgctgccattgccgattgctcacatccgcgttcgtgttcgcatccgcatcagggtcacctgcgccggcgagccatttgaaagggaggagtagcagactctcagaggtggacatgacgctgttgtgcgtgccgctggtggggcggacggtggaggagatgattacagacgcggcggcggccgccgccaccggcggcgacatggtcgagatccggcttgacttcatccaggggttccgcccgcgtgagcacctaccgcccctgctccgcggctgcccactcccggccctcgtcacctatcgacctgtctgggaaggaggccaatatgaaggtgatgacaccacaagatttgagacactacgtttagcaatggaattaggtgtagactatgttgatattgaattgaaggttgcagacaaatttatgagctttattgctggccataagccagagaaatgtaaacttattgtttcttcacataattatgaatatactccatcatgtgaggaaattacaaatcttgtcgctagtatacaagcagttggagctgatatagtgaaagttgcaacaaccgccaaggacattgtcgatgtatcacggatgttccaagtgatggtacactgccaagtgcctatgattggactcgtaatgagtgaaaaaggtttaatgtcaagagtgttagcgcccaagtttggtggatatcttacatttgggatactgaatgctacaaagacatcagcttctggacaaccaacagttgaggacttactggacatttacaacataaagtgtattgggcctgatacaaagattcttggtcttatagccaacccagtaaaacagagcaagagcccaattttacacaataaatgtcttcagtccattggatataatgctgtttatcttccacttcttggagataatcttgctagttttctggagacatactcatctcctgacttttcaggatttagttgctcacttcctttcaaagtagatgctgtacagtgttgtgatgaacatgatccagttgctaagtcaataggagccataaacactataattagaagaccagatggcaaattagtggggtacaatacggactacattggagctatatctgctattgaggatggcattggaggtccagggtcaaaggatgctgtcatctcaccattggctggtaggcttattgttgttgtaggagctgggggtgctggtaaggcaattgcttatggggcaaaggagaagggtgcgagggtagttatagcaaatcgcacctatgagaaggctgtacgtcttgccaatgcaattggtggtcaggccctgagattagaagacctggaaactttcagacctgaagaagggatgatccttgctaatgcaacatcattggggatgtacccaaatgttgatggtactcctattccaaagaaagccttgggtttctatgatgtggtatttgatgccgtatatgccccaaaagttactcggcttcttcgagaagcagaagaatgtggagttaaagttgttagtggtgtggaaatgtttattagacaagccatgggtcaatttgagcatttcaccggtggtatagaagctcctgaaagcctgatgcgtgagatagcagcaaaatacacctagcaggctaatggcgaaaacctatctttgatgaatatttgcccaaagattttctcgggctgagtgaataaatgttttgcagttatcatgtttgctgttatgttagatttagccgacttgtcacctgcacactgtaagattatgttgccatgctatagtgttcttgtacctgcaatagaagagttgcaagaataaagagtcagcttagaacc

SEQ ID NO: 25293 - protein, 561 aa, Zea mays subsp. mays
  misc_feature (1)..(561): Ceres Seq. ID no. 12567137
TRPPLALLRQQTVPGRCHCRLLTSAFVFASASGSPAPASHLKGRSSRLSEVDMTLLCVPLVGRTVEEMITDAAAAAATGGDMVEIRLDFIQGFRPREHLPPLLRGCPLPALVTYRPVWEGGQYEGDDTTRFETLRLAMELGVDYVDIELKVADKFMSFIAGHKPEKCKLIVSSHNYEYTPSCEEITNLVASIQAVGADIVKVATTAKDIVDVSRMFQVMVHCQVPMIGLVMSEKGLMSRVLAPKFGGYLTFGILNATKTSASGQPTVEDLLDIYNIKCIGPDTKILGLIANPVKQSKSPILHNKCLQSIGYNAVYLPLLGDNLASFLETYSSPDFSGFSCSLPFKVDAVQCCDEHDPVAKSIGAINTIIRRPDGKLVGYNTDYIGAISAIEDGIGGPGSKDAVISPLAGRLIVVVGAGGAGKAIAYGAKEKGARVVIANRTYEKAVRLANAIGGQALRLEDLETFRPEEGMILANATSLGMYPNVDGTPIPKKALGFYDVVFDAVYAPKVTRLLREAEECGVKVVSGVEMFIRQAMGQFEHFTGGIEAPESLMREIAAKYT

SEQ ID NO: 25294 - protein, 509 aa, Zea mays subsp. mays
  misc_feature (1)..(509): Ceres Seq. ID no. 12567138
MTLLCVPLVGRTVEEMITDAAAAAATGGDMVEIRLDFIQGFRPREHLPPLLRGCPLPALVTYRPVWEGGQYEGDDTTRFETLRLAMELGVDYVDIELKVADKFMSFIAGHKPEKCKLIVSSHNYEYTPSCEEITNLVASIQAVGADIVKVATTAKDIVDVSRMFQVMVHCQVPMIGLVMSEKGLMSRVLAPKFGGYLTFGILNATKTSASGQPTVEDLLDIYNIKCIGPDTKILGLIANPVKQSKSPILHNKCLQSIGYNAVYLPLLGDNLASFLETYSSPDFSGFSCSLPFKVDAVQCCDEHDPVAKSIGAINTIIRRPDGKLVGYNTDYIGAISAIEDGIGGPGSKDAVISPLAGRLIVVVGAGGAGKAIAYGAKEKGARVVIANRTYEKAVRLANAIGGQALRLEDLETFRPEEGMILANATSLGMYPNVDGTPIPKKALGFYDVVFDAVYAPKVTRLLREAEECGVKVVSGVEMFIRQAMGQFEHFTGGIEAPESLMREIAAKYT

SEQ ID NO: 25295 - protein, 494 aa, Zea mays subsp. mays
  misc_feature (1)..(494): Ceres Seq. ID no. 12567139
MITDAAAAAATGGDMVEIRLDFIQGFRPREHLPPLLRGCPLPALVTYRPVWEGGQYEGDDTTRFETLRLAMELGVDYVDIELKVADKFMSFIAGHKPEKCKLIVSSHNYEYTPSCEEITNLVASIQAVGADIVKVATTAKDIVDVSRMFQVMVHCQVPMIGLVMSEKGLMSRVLAPKFGGYLTFGILNATKTSASGQPTVEDLLDIYNIKCIGPDTKILGLIANPVKQSKSPILHNKCLQSIGYNAVYLPLLGDNLASFLETYSSPDFSGFSCSLPFKVDAVQCCDEHDPVAKSIGAINTIIRRPDGKLVGYNTDYIGAISAIEDGIGGPGSKDAVISPLAGRLIVVVGAGGAGKAIAYGAKEKGARVVIANRTYEKAVRLANAIGGQALRLEDLETFRPEEGMILANATSLGMYPNVDGTPIPKKALGFYDVVFDAVYAPKVTRLLREAEECGVKVVSGVEMFIRQAMGQFEHFTGGIEAPESLMREIAAKYT

SEQ ID NO: 25296 - DNA, 2394 bp, Zea mays subsp. mays
  misc_feature (1)..(2394): Ceres Seq. ID no. 12567160
  misc_feature (481)..(481): n is a, c, t, g, unknown, or other
  misc_feature (601)..(601): n is a, c, t, g, unknown, or other
  misc_feature (1506)..(1506): n is a, c, t, g, unknown, or other
  misc_feature (1522)..(1522): n is a, c, t, g, unknown, or other
  misc_feature (1523)..(1523): n is a, c, t, g, unknown, or other
  misc_feature (1535)..(1535): n is a, c, t, g, unknown, or other
  misc_feature (1572)..(1572): n is a, c, t, g, unknown, or other
  misc_feature (1596)..(1596): n is a, c, t, g, unknown, or other
  misc_feature (1647)..(1647): n is a, c, t, g, unknown, or other
  misc_feature (1672)..(1672): n is a, c, t, g, unknown, or other
  misc_feature (1694)..(1694): n is a, c, t, g, unknown, or other
  misc_feature (1713)..(1713): n is a, c, t, g, unknown, or other
  misc_feature (1736)..(1736): n is a, c, t, g, unknown, or other
  misc_feature (1785)..(1785): n is a, c, t, g, unknown, or other
  misc_feature (1870)..(1870): n is a, c, t, g, unknown, or other
  misc_feature (1903)..(1903): n is a, c, t, g, unknown, or other
  misc_feature (1972)..(1972): n is a, c, t, g, unknown, or other
accacatcccacgccgagcgcgacgccagcagcaggctagctccgctgtccgctccgccgctcactagctagctgctggactgcgcctccctccatcgcgccggcgcgcgcgcctagctagcggagccgccttttcatggtccccgccgtggtcgggacgagatgcctcgcctcgcattcctccgccgctccctccccgcgaggcttctcgcgcgagcgtgtggtggtggtggtggagtccgggggagccctggccaggtggcgcgggacgaggaggccggaggcagcggcggaatgagcgggcggtcgtcggcgggtgggccgtccggcggggagtgctacgcgtgcacgcagcccggggtgccggcgttccactccacgacgtgcgaccaggtgcactcgccggactgggacgccgacgcggggtcctcgctcgtgccggtccaagggccaggcgcaggcggcggcggcgccgcggcancggcacgcggcgcggtggctgttggggcccgtgctggacccgcggagcaggcgcgtgcagcgctggaaccgctggatcctgctgggccgcgccgccgcgctggcggtggacccgctcttnttctacgcgctctccatcggccgcgccggccagccctgcctctacatggacgccgggctcgcctccgcggtcacggcgctgcggacctgcgccgacgtggcgcacctcgcgcacgtgctcctgcagctccgcctcgcctacgtctcccgcgagtccctcgtcgtcgggtgcggcaagctcgtgtgggacgcccgcgccgtcgccgcgcactacgcacgctccgtcaagggcctctgcttcgacctcttcgtcatcctccccatcccgcaggttatcttctggctggttataccaaagttaatcagggaggagcaggttaagcttatcatgacaatactgctgctcatgttcatagttcaatttctccccaaggtctaccatagtatacacatcatgaggaaaatgcagaagattgcgggtgggtgctggtatgttcttgcgatccagcgcatcgcttcctgcctccaggaagaatgcaagagaaacaacagttgcgatctaatatcgctagcttgttccaaggagatatgttttcaccctccgtggtcatcgaatgttaacggattcgcgtgcgatacgaacatgacctcctttagccaacaaaatgtgtctacttgcttgagtggaaaaggttccttcgcttatggaatctatttgggggctcttcctgttatatcgagcaattcgcttgctgtcaaaatactgtatcctatattttggggcctcatgacactcagtacttttggtaacgatcttgccccaacaagcaatggtattgaggtgatattcagcataatcaatgtcctcagtggccttatgctcttcacgttgctgatcggaaacatacaggtatttctgcacgcggtcctggcaaggaagcggaagatgcagctgcggttccgggnacatggaatggtggannaggcggaggcanctgccgtcccggctgaggcaaagggtgcgcaaatacnagcgcgaacgctgggccgccgtcncgggagacgaggagatggagatgatcaaggatctgcctgaagggctgagangggacatcaagcgctacctgtgccntgagctagttaagcaggttccnctgttccatggcatggacnacctgatcctggacaacatctgngaccggctgcggcctctggtgttgtccagcggggagaaggtgatccggnagggcgaccccgtgcagcgcatggtgttcatcctgcagggcaagctccggagcacgcagccgctgaccaaaggcgtggtggcgangtgcatgctgggcgcgggcagcttcctgggcgncgagctgctgtcgtggtgcctgcgccgccgccttcttggaccggctccccgcgtcgtcggccacgttcnagtgcgtggaccccgcgcaggcgttctgcctcggcgcgccggacctgcggttcatcaccgagcacttccggtacaacttcgccaacgagaagctcaagcgcacggcgcggtactactcgtccaactggcggacgtgggccgccgtcaacatccagctcgcgtggcgcaggtacagggcccggacgtcggcggacctggcggcgcaggccgcgcctccgttggtgggcgggcccgacgacggggaccggcggctcagacactacgcggccatgttcatgtcgctacggccgcatgaccacctagagtgagcaggagggaccatcctagctgtgccggccgcgtcatggtgactgtacagtgtgcactgtaatagtatattgctgccatcttttgcgtaagtgaattagtggttccgaattgtc

SEQ ID NO: 25297 - protein, 329 aa, Zea mays subsp. mays
  misc_feature (1)..(329): Ceres Seq. ID no. 12567161
  misc_feature (287)..(287): Xaa is any aa, unknown or other
  misc_feature (292)..(292): Xaa is any aa, unknown or other
  misc_feature (293)..(293): Xaa is any aa, unknown or other
  misc_feature (297)..(297): Xaa is any aa, unknown or other
  misc_feature (309)..(309): Xaa is any aa, unknown or other
  misc_feature (317)..(317): Xaa is any aa, unknown or other
MDAGLASAVTALRTCADVAHLAHVLLQLRLAYVSRESLVVGCGKLVWDARAVAAHYARSVKGLCFDLFVILPIPQVIFWLVIPKLIREEQVKLIMTILLLMFIVQFLPKVYHSIHIMRKMQKIAGGCWYVLAIQRIASCLQEECKRNNSCDLISLACSKEICFHPPWSSNVNGFACDTNMTSFSQQNVSTCLSGKGSFAYGIYLGALPVISSNSLAVKILYPIFWGLMTLSTFGNDLAPTSNGIEVIFSIINVLSGLMLFTLLIGNIQVFLHAVLARKRKMQLRFRXHGMVXXAEAXAVPAEAKGAQIXARTLGRRXGRRGDGDDQGSA

SEQ ID NO: 25298 - protein, 252 aa, Zea mays subsp. mays
  misc_feature (1)..(252): Ceres Seq. ID no. 12567162
  misc_feature (107)..(107): Xaa is any aa, unknown or other
  misc_feature (147)..(147): Xaa is any aa, unknown or other
MPRLAFLRRSLPARLLARACGGGGGVRGSPGQVARDEEAGGSGGMSGRSSAGGPSGGECYACTQPGVPAFHSTTCDQVHSPDWDADAGSSLVPVQGPGAGGGGAAAXARGAVAVGARAGPAEQARAALEPLDPAGPRRRAGGGPALXLRALHRPRRPALPLHGRRARLRGHGAADLRRRGAPRARAPAAPPRLRLPRVPRRRVRQARVGRPRRRRALRTLRQGPLLRPLRHPPHPAGYLLAGYTKVNQGGAG

SEQ ID NO: 25299 - protein, 252 aa, Zea mays subsp. mays
  misc_feature (1)..(252): Ceres Seq. ID no. 12567163
  misc_feature (5)..(5): Xaa is any aa, unknown or other
  misc_feature (9)..(9): Xaa is any aa, unknown or other
  misc_feature (22)..(22): Xaa is any aa, unknown or other
  misc_feature (30)..(30): Xaa is any aa, unknown or other
  misc_feature (47)..(47): Xaa is any aa, unknown or other
  misc_feature (55)..(55): Xaa is any aa, unknown or other
  misc_feature (62)..(62): Xaa is any aa, unknown or other
  misc_feature (69)..(69): Xaa is any aa, unknown or other
  misc_feature (76)..(76): Xaa is any aa, unknown or other
  misc_feature (93)..(93): Xaa is any aa, unknown or other
  misc_feature (121)..(121): Xaa is any aa, unknown or other
  misc_feature (132)..(132): Xaa is any aa, unknown or other
  misc_feature (155)..(155): Xaa is any aa, unknown or other
MEWWXRRRXLPSRLRQRVRKYXRERWAAVXGDEEMEMIKDLPEGLRXDIKRYLCXELVKQVXLFHGMDXLILDNIXDRLRPLVLSSGEKVIRXGDPVQRMVFILQGKLRSTQPLTKGVVAXCMLGAGSFLGXELLSWCLRRRLLGPAPRVVGHVXVRGPRAGVLPRRAGPAVHHRALPVQLRQREAQAHGAVLLVQLADVGRRQHPARVAQVQGPDVGGPGGAGRASVGGRARRRGPAAQTLRGHVHVATAA

SEQ ID NO: 25300 - DNA, 1017 bp, Zea mays subsp. mays
  misc_feature (1)..(1017): Ceres Seq. ID no. 12567193
gaggcctttaaatgccggcacagatgttggccggagcaggacgccacgaggcgaacaaccaactgcttccttccgcgccgccgccgcctacaacgaccacatcacgtgacttacctcttctccgcctcaagtgttcacggctccatcctctctagagtctaagcccatctcgcgaagccgctaacgccgaaaacgaccctacatatggaggcgaagaagtcgggtcccgccgctgccggagccgcggcgccgccgccggctaacgggtacttcagcaccgtcttctccgcgtcgcctgcggggagcgcaaatgacgcaaagcaggccgacctgtacacgatgctgaacaagcagacctccagagggcagaatggcagtggcattacagatggcaaatcacacggccgccctacttacaaggatggaaaacatgcttatccaaatgactcgtcagaatccccttactttggctcgtccgtgcattacggtggtcgggaattctacagcaacacgttacagaagcagccagccaatgaaccccagacaaaatacaaggaggacaagccggatggctctgctactagaggtgattggtggcaaggttcactttattactgaacaatctgctgggaactctccttttttttgtgaacaaggaataaaaaggagtggagctgagcttggtttgtcataatagtgttggaactgttgatgcgagccgttaggcatatggatcgaaagtaatagatgtaatccggtcggtggaggcagtatttagatgcatcatcacacctggacagacgtggatgtaggctgcgtccttttgtgttcctgttttcgctaagtgtgttcttgtggttttagatgtgcagtcgtgcagtgctgaacttactaatgaactggtaggtcagcctgaagtagttttgataaaagcagttgccaaagagtctgcagctcgcaggatcacctgctatatgtgcatgttcctgctatctttcggaaagatttgggttgtgc

SEQ ID NO: 25301 - protein, 137 aa, Zea mays subsp. mays
  misc_feature (1)..(137): Ceres Seq. ID no. 12567194
MEAKKSGPAAAGAAAPPPANGYFSTVFSASPAGSANDAKQADLYTMLNKQTSRGQNGSGITDGKSHGRPTYKDGKHAYPNDSSESPYFGSSVHYGGREFYSNTLQKQPANEPQTKYKEDKPDGSATRGDWWQGSLYY

SEQ ID NO: 25302 - protein, 107 aa, Zea mays subsp. mays
  misc_feature (1)..(107): Ceres Seq. ID no. 12567195
MAVALQMANHTAALLTRMENMLIQMTRQNPLTLARPCITVVGNSTATRYRSSQPMNPRQNTRRTSRMALLLEVIGGKVHFITEQSAGNSPFFCEQGIKRSGAELGLS

SEQ ID NO: 25303 - protein, 101 aa, Zea mays subsp. mays
  misc_feature (1)..(101): Ceres Seq. ID no. 12567196
MANHTAALLTRMENMLIQMTRQNPLTLARPCITVVGNSTATRYRSSQPMNPRQNTRRTSRMALLLEVIGGKVHFITEQSAGNSPFFCEQGIKRSGAELGLS

SEQ ID NO: 25304 - DNA, 1252 bp, Zea mays subsp. mays
  misc_feature (1)..(1252): Ceres Seq. ID no. 12577727
gcacgagaccattacctagaacatcctaatcgaaaaatcgaattcctcgtcaccaacacgcacgcggcctctgcctccgcgatccgcgtctccatcctgaggctccgaatcgatctcccttcctcaccaaaccggagcacttcggaggccggacccggcgagaagcgaccgaccgcagccagctcacgtctccctcttcatccaccatgctgagggtcgcgggcaggcgcctctcgtccgctctcgcctggcgccccgccgccgccgcctcaggctcccggggccctctcgccggtacactacccggccgcgacgacgacgacacacgcgactgcagggcgcgtttcgccatcgaatctcccttcttcgccgctgccagagggttttctgcagagactcttgctccaagaaaccaggatgtgggcttatccgagctcccagcaactgtggcagctgtgaagaatccaagtggaaaaatcgtgtatgatgagtataaccatgagcgctacccgcctggagaccccagcaagcgtgcatttgcctactttgtgctgagtggtgggaggttcatttacgcatctttgctgcgacttctcgtcttaaaatttgtcctgagcatgtcagcaagtaaggatgttctcgcgcttgcctcacttgaggttgacctctcaagcattgagcctggaaccacggtgacggtgaagtggcgtggcaagccggtcttcataaggcggaggacagaggatgatatcaagttggccaacagtgttgacgtcgcatccctccgccacccagagcaggatgcagagcgtgtcaagaaccccgaatggctggtcgtcattggggtctgcactcacctgggctgcatcccgctccctaatgcaggagactttggtggctggttctgcccgtgccacggctcgcactacgacatttctggtaggatccgcaagggcccggcacccttcaacctggaagtgccgacatacagcttcttggaagagaacaagcttctcatcggctgagattgctgttagtgttgttcgtgtggccctgtcgtttttgtttgatcaacaacttcaccttttctcttgcctgggttagggcatacctttgtgggttgtttctgagtgcagtgttgttgctagcacctgacagtaatgaataacctgctgctacataaaggatactgttaattgttgtcaaatttggttctgtttttttcctgacagcaatgaacaaacttctgctg

SEQ ID NO: 25305 - protein, 272 aa, Zea mays subsp. mays; identical to SEQ ID NO: 17399
  misc_feature (1)..(272): Ceres Seq. ID no. 12577728

SEQ ID NO: 25306 - DNA, 1078 bp, Zea mays subsp. mays
  misc_feature (1)..(1078): Ceres Seq. ID no. 12577742
agttcgccactctcgccatcggggacgagggactgggagccaggatacttctgccgcgcggcgaccggtcgagcgaaatcgatctaccccaggtgcggcgggcgcggctttattctcaagattttttctgtgttctttagagagcagccatggacgagtggattcgccaaaccgaggtgtgggtgcaccaaaccgacagctggatccggcagcagcccccggagcagatctatgtagcggccgcggtggttgccgtcacaatcctgttgcttatcgtagcatcttgtctgaaatcgtctagaccaaacaccatagttctatctgggcttagtggcagtggcaaaaccactatttactaccagcttcgggatggatcatcacatcaaggaactgttacttcaatggaagaaaacagtgatacttttgtgctgcattcggagcaagaaaggaaagacaaagtaaaacctgtgcatattattgatgttcctggtcatgctaggctcaaacccaaacttgatgaagtcctgcctaaagctgctgcggttgtctttgttgttgatgctcaagatttcttgtctagcatgcaagctgctgcagagtacctttatgacattctgacaaaggcaactgtagtgaagaaaaaggtccctgtgcttatattctgcaacaagacagataaagttaccgcccactcgaaggaattcatcaagaagcagttggagaaagaattgaacaagcttagggaatctaggaacgccgtatcgtcagccgacatctctgatgaagtccagcttggggtccctggagaggcattcaacttcagccagtgccagaacaaggtggctgttgcggagggtgctggtttgacaggtgatgtttcggccgtggaacaattcatccgtgaacatgtgaaggcataggttgttcttattgtttttggggctccaaatggctatcctgatgagataagatgtacattgcgtcaatgtggttgttacctttcatgcatgtacaccttcatccggtgctctgaagttgcttagagacagtgaagcacagtcatattttgaactggttc

SEQ ID NO: 25307 - protein, 256 aa, Zea mays subsp. mays
  misc_feature (1)..(256): Ceres Seq. ID no. 12577743
MDEWIRQTEVWVHQTDSWIRQQPPEQIYVAAAVVAVTILLLIVASCLKSSRPNTIVLSGLSGSGKTTIYYQLRDGSSHQGTVTSMEENSDTFVLHSEQERKDKVKPVHIIDVPGHARLKPKLDEVLPKAAAVVFVVDAQDFLSSMQAAAEYLYDILTKATVVKKKVPVLIFCNKTDKVTAHSKEFIKKQLEKELNKLRESRNAVSSADISDEVQLGVPGEAFNFSQCQNKVAVAEGAGLTGDVSAVEQFIREHVKA

SEQ ID NO: 25308 - protein, 172 aa, Zea mays subsp. mays
  misc_feature (1)..(172): Ceres Seq. ID no. 12577744
MEENSDTFVLHSEQERKDKVKPVHIIDVPGHARLKPKLDEVLPKAAAVVFVVDAQDFLSSMQAAAEYLYDILTKATVVKKKVPVLIFCNKTDKVTAHSKEFIKKQLEKELNKLRESRNAVSSADISDEVQLGVPGEAFNFSQCQNKVAVAEGAGLTGDVSAVEQFIREHVKA

SEQ ID NO: 25309 - DNA, 880 bp, Zea mays subsp. mays
  misc_feature (1)..(880): Ceres Seq. ID no. 12578653
gttcggacttccgccgcgcttcgccctctcgctccagccgcttcacagcgccgccgctcgcctctccgaccgccgcgagaatgccgttcaagaggttcgtggagatcgggcgcgtggccctggtgaactacggcaaagactatggccgcctcgtcgtcatcgtctttgccgtagttcacctgggcacggacgaccactccctccacaacgccttcagcacctacggcgaggtcctcgagtccaagatcatcctcgatcgggagangcagaggtcccgcggcttcggcttcgtcaccttctccacggaggaggcgatgcggaacgcatcgagggcatgaacggcaaggagctggacggccgcaacatcaccgtcanngaggcccagtcccgcgncggccgtggaggcggcggcggcggcgggtacggtggtggccgtggaggcggcggctacggcggtggcgggccccgtgatggcggcggcggctacggcggtggcggcggctacggtggtggcggcggcggctacggtggtggtggcggcggctacggcggtggcaaccgtggcggcggctacggcaactccgacgggaactggaggaactgagcggtggggcccgcgcggccaagttatcctgttcgctaccgtgttgtttaccctagtccagagtgtttatcttcgttcgtctcgtgtttgttgttgcccatctgtgtttttgattgaaggtcgctctgtgtcagttgttagtgctgtgttcatcctcggctccagcagacccatgcatcaaccagcatggactgcggatcgatgggtgctgttacccccgtcaggctttattctaagttaaatcctaaggaaaaaaatggtgcttcttggtgctgc

SEQ ID NO: 25310 - protein, 200 aa, Zea mays subsp. mays
  misc_feature (1)..(200): Ceres Seq. ID no. 12578654
  misc_feature (88)..(88): Xaa is any aa, unknown or other
  misc_feature (125)..(125): Xaa is any aa, unknown or other
  misc_feature (131)..(131): Xaa is any aa, unknown or other
FGLPPRFALSLQPLHSAAARLSDRRENAVQEVRGDRARGPGELRQRLWPPRRHRLCRSSPGHGRPLPPQRLQHLRRGPRVQDHPRSGXAEVPRLRLRHLLHGGGDAERIEGMNGKELDGRNITVXEAQSRXGRGGGGGGGYGGGRGGGGYGGGGPRDGGGGYGGGGGYGGGGGGYGGGGGGYGGGNRGGGYGNSDGNWRN

SEQ ID NO: 25311 - protein, 124 aa, Zea mays subsp. mays
  misc_feature (1)..(124): Ceres Seq. ID no. 12578655
MAAAATAVAAATVVAAAATVVVAAATAVATVAAATATPTGTGGTERWGPRGQVILFATVLFTLVQSVYLRSSRVCCCPSVFLIEGRSVSVVSAVFILGSSRPMHQPAWTADRWVLLPPSGFILS

SEQ ID NO: 25312 - protein, 111 aa, Zea mays subsp. mays
  misc_feature (1)..(111): Ceres Seq. ID no. 12578656
  misc_feature (88)..(88): Xaa is any aa, unknown or other
SDFRRASPSRSSRFTAPPLASPTAARMPFKRFVEIGRVALVNYGKDYGRLVVIVFAVVHLGTDDHSLHNAFSTYGEVLESKIILDREXQRSRGFGFVTFSTEEAMRNASRA

SEQ ID NO: 25313 - DNA, 1484 bp, Zea mays subsp. mays
  misc_feature (1)..(1484): Ceres Seq. ID no. 12578861
gcacgagaccattacctagaacatcctaatcgaaaagacctcgcatccggcccgattcgactagggttttagcactcccagtcccggctcccgccgtcgcctcgacgcttcccccctcttcctccgccgccaacccagcgagagagctcccagtccgcgaagacatggcggggaagaagcgcaagtccggctccgagaagccgacgaagcaccgcctcccgctgggagccgatgccgacgctgtcgccgaagcctcgaagcgccgccgatcgggcgccaccaagcagcaccaggcggacgaggaagcgtccatcccgccctctctcagcgccaagatcctccgcgaggcgcgcaagcagcaggaagaggagatgcgcgccgactccagcgacgaacagcgaccctcagccgtcgaggcgaccgcggggccgtccacgtcgtcctcgtttcccgtccccgccgccgacggcgagaatgagggggacgacgtcgatgagttcgacgggtttgacgcgcctgagcgagtacgatggcggtgaggtggagatcaacgaggaggacgagaaggccctcgctgctttcatgtcaaaggacaaagctgccgagcgcacccttggcgatatcattctccagaagatcagggagaaggacgccgaggtcgcaactggtgaaggacgacctcgtgtaaaattggacaacagcattattgaactttataaagaggttgggaagttcttaagccggtacacgagtggggctggcttctcctccccctcttaccaagtcctcctcgggttagggttccttagggttttgtggaggggcgatggcggcggctgatgtggagtaccgttgcttcgtcggcgggcttgcctgggccaccagcaacgagtcgctggagaatgccttcgcctcctacggcgagatcctcgactccaaggtcatcaccgaccgggagacggggaggtctcgcggcttcggcttcgttaccttctcctccgagaactccatgctcgacgctatcgagaacatgaacggcaaggagctcgacggccgtaacatcaccgttaaccaggcccagtcccgtggcggtggcggtggcggcggtggccgcggcggtcgcggcggcggcggctatggtggcgggcgccgtgacggcggttatggcggcggtggcggctacggcggtcggcgcgagggtggtggcggcggctacggaggcggtggcggctacggcggtcggcgcgagggtggtggtggcggctacggcggcggcggcggcggctggagggactgatgtgtgggcccatcctggcttcggccgagttatcttatctatctatagtatcgtgttaccgttcgcttctgtcaccgtgttagtgtccgttctacctttggattaggtgttggtacccctgttgttccctttgtttgctcccgctatgaaacgagacgagagaagaatgagcaaggtttttgttcgc

SEQ ID NO: 25314 - protein, 202 aa, Zea mays subsp. mays
  misc_feature (1)..(202): Ceres Seq. ID no. 12578862
MPTLSPKPRSAADRAPPSSTRRTRKRPSRPLSAPRSSARRASSRKRRCAPTPATNSDPQPSRRPRGRPRRPRFPSPPPTARMRGTTSMSSTGLTRLSEYDGGEVEINEEDEKALAAFMSKDKAAERTLGDIILQKIREKDAEVATGEGRPRVKLDNSIIELYKEVGKFLSRYTSGAGFSSPSYQVLLGLGFLRVLWRGDGGG

SEQ ID NO: 25315 - protein, 156 aa, Zea mays subsp. mays
  misc_feature (1)..(156): Ceres Seq. ID no. 12578863
MAAADVEYRCFVGGLAWATSNESLENAFASYGEILDSKVITDRETGRSRGFGFVTFSSENSMLDAIENMNGKELDGRNITVNQAQSRGGGGGGGGRGGRGGGGYGGGRRDGGYGGGGGYGGRREGGGGGYGGGGGYGGRREGGGGGYGGGGGGWRD

SEQ ID NO: 25316 - protein, 124 aa, Zea mays subsp. mays
  misc_feature (1)..(124): Ceres Seq. ID no. 12578864
MAGKKRKSGSEKPTKHRLPLGADADAVAEASKRRRSGATKQHQADEEASIPPSLSAKILREARKQQEEEMRADSSDEQRPSAVEATAGPSTSSSFPVPAADGENEGDDVDEFDGFDAPERVRWR

SEQ ID NO: 25317 - DNA, 1068 bp, Zea mays subsp. mays
  misc_feature (1)..(1068): Ceres Seq. ID no. 12578882
acacggcagccggattccgaagcgcaccccctcggccccagccaaaagcatcgcagtttctaatcgtttggagagcacacaagaatgtcgttcgtgcagctctctggtgctggagtcgctgcagtggccttcacgaacaagagcctagtctctcggcacgcagcgctacgggtctgctcgtcgaggcgctcgatccgtagcctggtcgttaaggctgcaactgtcgtcaccccaaagtacacttcactgaagcctctgggagatagggtgcttgtgaagcttggtgccgcagaggagaagacagttggtggcattttgcttccatctactgcccagactaaaccacaaggaggtgaggttgttgctgttggagcaggaaggaccatcggggacaagaaaatagctgtggatatagagactggagcacaagtagtatactcaaagtatgctgggactgaggttgaattcaatgactcaaagcatcttattctcaaagaagacgatatcattggtattcttgagacagatgatgtgaaggacatgaagcctctcaatgaccgtgttctcatcaaggttgcagaagccgaagacaaaactcctgggggccttatcctcactgaaacaactaaagagaagccgtccataggaacggttgtagctgttggcccgggtcctctggacgaggaaggcaagagacagccactgtcagtgtcggcgggcagcacagtgctgtactccaagtatgcagggagtgagttcaagggcgcggatggcacggcctacattgtgttgagagcgtcggatgtgatggctgtcctgtcttgagcatttcgtttccggctcgttaatgtagtttgcagccaatagtttgtcatgtggtatgaaacgatcgctttgtggtggtcatcacaccatgctggtgatcatcacaacatatgctgatactgttccggacaatcggctagaatttgttgtgtggcaggtataaacgtcagcatctgatagtgagagcactcggttacttctacagatggtatttaaggggtgatagtcacgcctctttgctgg

SEQ ID NO: 25318 - protein, 246 aa, Zea mays subsp. mays; identical to SEQ ID NO: 22244
  misc_feature (1)..(246): Ceres Seq. ID no. 12578883

SEQ ID NO: 25319 - DNA, 478 bp, Zea mays subsp. mays
  misc_feature (1)..(478): Ceres Seq. ID no. 12578891
atcccaaagagcaagagcacgcagtagtgcagcagcactgaagcactacttcctgcactcactgtgctagctgctcaaaccgtagtagtaacagtccatcaccayaccayaccaccaatggctcccaaggttgcgctcttccttgccctaagcctcctgttcgctgccaccgcgcatggctgcgaaccctactgttccggcccagtcgtcccaacaccaccagtcgtgccgactccgtcgtcgcatagccacgggcgctgcccgatcgacgcgctcaagctcaaggtgtgcgccaatgtgctgggcctcgtcaaggtcggcctaccgcaatacgagcaatgctgcccattgctggaggggctggtggaccttgacgccgcattgtgcctctgcaccgccatcaaggcaaacgtcctcggcatccacctcaacgtgccccttagcctcaacctcatcctcaacaactgcggcaagattt

SEQ ID NO: 25320 - protein, 120 aa, Zea mays subsp. mays
  misc_feature (1)..(120): Ceres Seq. ID no. 13580079
MAPKVALFLALSLLFAATAHGCEPYCSGPVVPTPPVVPTPSSHSHGRCPIDALKLKVCANVLGLVKVGLPQYEQCCPLLEGLVDLDAALCLCTAIKANVLGIHLNVPLSLNLILNNCGKI

SEQ ID NO: 25321 - protein, 101 aa, Zea mays subsp. mays
  misc_feature (1)..(101): Ceres Seq. ID no. 13580080
MAANPTVPAQSSQHHQSCRLRRRIATGAARSTRSSSRCAPMCWASSRSAYRNTSNAAHCWRGWWTLTPHCASAPPSRQTSSASTSTCPLASTSSSTTAARF

SEQ ID NO: 25322 - protein, 61 aa, Zea mays subsp. mays
  misc_feature (1)..(61): Ceres Seq. ID no. 13580081
MCWASSRSAYRNTSNAAHCWRGWWTLTPHCASAPPSRQTSSASTSTCPLASTSSSTTAARF

SEQ ID NO: 25323 - DNA, 976 bp, Zea mays subsp. mays
  misc_feature (1)..(976): Ceres Seq. ID no. 12578960
acatggacgtcgacaaggtcagcttcaccgggtccacggaggtcggccgcctcgtcatgagggccgcggccgagagcaacctcaagcccgtgtcgctcgagctgggcggcaagtctcccgtcatcgtcttcgacgacgccgacctcgacatggccgttaacctcgtcaacttcgccacctacaccaacaagggcgagatctgtgtggccggcacgcgcatctacgtgcaggaagggatctacgacgagttcgtgaagaaggccgccgagctcgccagcaagtccgtggtcggagacccgttcaacccgagtgtcagccaaggcccccaggttgacaaggaccagtacgagaaggtcctcaggtacattgacatcgggaagcgcgaaggcgccacgctggtcaccggagggaagccctgcggcgacaataagggctactacatcgagcccaccatcttcacggacgtcaaggacgacatgacgatcgcacaggatgaaatctttgggccggtgatggctctcatgaaattcaagaccgtggaggaggtgatccagaaagcgaacaacacccggtacggcctggccgccggcatcgtgaccaagaacatcgacgtcgccaacaccgtgtcgcggtccatccgcgccggcgccatttggatcaactgctacttcgcgttcgacccggacgcgccgttcggcgggtacaagatgagcgggttcggcaaggacatgggcatggacgcgctcgacaagtacctgcagaccaagaccgtcgtcactccgctgtacaacactccatggctctgaccgacctcatcctgtccgatgaacagttcaacatcacaaacaagaagaaacatgtcttgtaagatactcctccaaaggatcggttgcctgtacctgtactcttacacctgcatggattgatgatgcagtgcaatgtagcattcagaacaataaagacatgtttcggactg

SEQ ID NO: 25324 - protein, 267 aa, Zea mays subsp. mays
  misc_feature (1)..(267): Ceres Seq. ID no. 12578961
MDVDKVSFTGSTEVGRLVMRAAAESNLKPVSLELGGKSPVIVFDDADLDMAVNLVNFATYTNKGEICVAGTRIYVQEGIYDEFVKKAAELASKSVVGDPFNPSVSQGPQVDKDQYEKVLRYIDIGKREGATLVTGGKPCGDNKGYYIEPTIFTDVKDDMTIAQDEIFGPVMALMKFKTVEEVIQKANNTRYGLAAGIVTKNIDVANTVSRSIRAGAIWINCYFAFDPDAPFGGYKMSGFGKDMGMDALDKYLQTKTVVTPLYNTPWL

SEQ ID NO: 25325 - protein, 249 aa, Zea mays subsp. mays
  misc_feature (1)..(249): Ceres Seq. ID no. 12578962
MRAAAESNLKPVSLELGGKSPVIVFDDADLDMAVNLVNFATYTNKGEICVAGTRIYVQEGIYDEFVKKAAELASKSVVGDPFNPSVSQGPQVDKDQYEKVLRYIDIGKREGATLVTGGKPCGDNKGYYIEPTIFTDVKDDMTIAQDEIFGPVMALMKFKTVEEVIQKANNTRYGLAAGIVTKNIDVANTVSRSIRAGAIWINCYFAFDPDAPFGGYKMSGFGKDMGMDALDKYLQTKTVVTPLYNTPWL

SEQ ID NO: 25326 - protein, 218 aa, Zea mays subsp. mays
  misc_feature (1)..(218): Ceres Seq. ID no. 12578963
MAVNLVNFATYTNKGEICVAGTRIYVQEGIYDEFVKKAAELASKSVVGDPFNPSVSQGPQVDKDQYEKVLRYIDIGKREGATLVTGGKPCGDNKGYYIEPTIFTDVKDDMTIAQDEIFGPVMALMKFKTVEEVIQKANNTRYGLAAGIVTKNIDVANTVSRSIRAGAIWINCYFAFDPDAPFGGYKMSGFGKDMGMDALDKYLQTKTVVTPLYNTPWL

SEQ ID NO: 25327 - DNA, 1372 bp, Zea mays subsp. mays
  misc_feature (1)..(1372): Ceres Seq. ID no. 12579063
aaacgcactcgagctcgagccctcgcccgctcagtcacaaagcctcagatctcagtcacctgcgccgccgcttcgttcgtgtggaggggagaagacaggaaatggcggcgactgagggcgtgctcttggggatgggcaaccccctcctcgacatctccgccgtcgtcgatgacgccttcctgacaaagtatgacatcaagctgaacaatgccattctcgctgaggagaagcacttgcctatgtatgacgagttggctagcaagagcaatgttgaatatattgccggaggagccacccagaactctatcagggttgcccaatggatgcttcaaactcctggtgcaacaagttacatgggatgcattggaaaggacaagtttggtgaggaaatgaagaaaaacgctcaagctgcaggagttactgctcattactacgaggatgagactgctcctactggcacatgtgctgtatgtgttgttggtggtgaaaggtcattgattgcaaatctgtcagcggcaaactgttacaaatctgagcatctaaagagaccagagaactgggcactagttgaaaaggcaaaatacatctacattgctggatttttccttacagtgtcgcctgattctatccagctagtcgctgagcatgctgcagcaaataacaaggtgttcctgatgaacctctctgctcccttcatctgtgagttcttccgtgatgcccaagagaaggtcctcccgtatgctgactacatcttcggcaacgaaactgaggcaaagatctttgccaaagtcagaggatgggagactgagaatattgaggagattgctttgaagatctctcaacttcctttggcttcaggcaagcaaaagaggattgctgtgattactcaaggtgctgatccagtggttgttgctgaggatgggaaggtgaaaacgttccctgtgatcctattgcccaaggagaagcttgttgacaccaacggcgcaggtgatgctttcgttggaggcttcctctcacagttggttctaggcaagggcattgaagactgcgtgagggcaggttgctatgccgcaaacgttatcatccagcgcccgggctgtacttacccggagaagcctgacttcaactagtgcaaaaactgacgcacgtcatgagaggcactgttataggcacactttattgttaaccagtgcgtggttcggtgtctacacaccctgtattcttccgagccttctcttctgatccggccaatatttttgccgtgaaatttgtgttctgcgactatggacgtctcctttgtcgctgtataaggcatgatttgccatcattctgttgcttcggtgatgcttgcaatgcaatgagaatgtgttgg

SEQ ID NO: 25328 - protein, 375 aa, Zea mays subsp. mays
  misc_feature (1)..(375): Ceres Seq. ID no. 12579064
THSSSSPRPLSHKASDLSHLRRRFVRVEGRRQEMAATEGVLLGMGNPLLDISAVVDDAFLTKYDIKLNNAILAEEKHLPMYDELASKSNVEYIAGGATQNSIRVAQWMLQTPGATSYMGCIGKDKFGEEMKKNAQAAGVTAHYYEDETAPTGTCAVCVVGGERSLIANLSAANCYKSEHLKRPENWALVEKAKYIYIAGFFLTVSPDSIQLVAEHAAANNKVFLMNLSAPFICEFFRDAQEKVLPYADYIFGNETEAKIFAKVRGWETENIEEIALKISQLPLASGKQKRIAVITQGADPVVVAEDGKVKTFPVILLPKEKLVDTNGAGDAFVGGFLSQLVLGKGIEDCVRAGCYAANVIIQRPGCTYPEKPDFN

SEQ ID NO: 25329 - protein, 342 aa, Zea mays subsp. mays
  misc_feature (1)..(342): Ceres Seq. ID no. 12579065
MAATEGVLLGMGNPLLDISAVVDDAFLTKYDIKLNNAILAEEKHLPMYDELASKSNVEYIAGGATQNSIRVAQWMLQTPGATSYMGCIGKDKFGEEMKKNAQAAGVTAHYYEDETAPTGTCAVCVVGGERSLIANLSAANCYKSEHLKRPENWALVEKAKYIYIAGFFLTVSPDSIQLVAEHAAANNKVFLMNLSAPFICEFFRDAQEKVLPYADYIFGNETEAKIFAKVRGWETENIEEIALKISQLPLASGKQKRIAVITQGADPVVVAEDGKVKTFPVILLPKEKLVDTNGAGDAFVGGFLSQLVLGKGIEDCVRAGCYAANVIIQRPGCTYPEKPDFN

SEQ ID NO: 25330 - protein, 332 aa, Zea mays subsp. mays
  misc_feature (1)..(332): Ceres Seq. ID no. 12579066
MGNPLLDISAVVDDAFLTKYDIKLNNAILAEEKHLPMYDELASKSNVEYIAGGATQNSIRVAQWMLQTPGATSYMGCIGKDKFGEEMKKNAQAAGVTAHYYEDETAPTGTCAVCVVGGERSLIANLSAANCYKSEHLKRPENWALVEKAKYIYIAGFFLTVSPDSIQLVAEHAAANNKVFLMNLSAPFICEFFRDAQEKVLPYADYIFGNETEAKIFAKVRGWETENIEEIALKISQLPLASGKQKRIAVITQGADPVVVAEDGKVKTFPVILLPKEKLVDTNGAGDAFVGGFLSQLVLGKGIEDCVRAGCYAANVIIQRPGCTYPEKPDFN

SEQ ID NO: 25331 - DNA, 823 bp, Zea mays subsp. mays
  misc_feature (1)..(823): Ceres Seq. ID no. 12579071
acaagtccacaaccgtaccagcaccaccgcgccatggcgtcctccgccgatcccgatgccgccacgccaccatccgcgccgcagccggagcccgcacgaaaggcagtccgcgtggtggtgaaggggcgcgtcacgggggtggggttccgcgactggactgcgtccacggccgagtcgctcggcctccgccggctgggtccgcaaccgccgtgacggcagtgtggaggccctcctctccggagaccccgcgaagatcgaagacatgataacccgccgcctcccggtcggccccccagccgccaccgtcaccgccgtcgtcccgtccacggccgagcccgtggatccgtccaccgggttcgagatcaagttcaccgtctgatcccccgtcccccccgtcccgcgacaggttcgcgtctcgccgcgcgttcttggacggtctattcgtgcactactactgcgaatctgcgattaaagatcagaggcgacatctaatgtaccggagtctgtttacctgaaaagctctgctatctgctttgggggggaattcatgccagattgtgggtgcaaacctatttccttactacctagtgtccaagtcggaatattaataagctatgccaggattcagatcgaaatatttctgtcactgagaaatgtgttgcgtgacaactttcgaagactgttgcctctctgtgtttatccctagatcctaatgtacaaacagagtcttatacagtactatgcattaacgtcaagtttcagagttcagacatgtgcctcgtgcctgctttctaattacaaatatagtcgagttgtgttttgc

SEQ ID NO: 25332 - protein, 87 aa, Zea mays subsp. mays
  misc_feature (1)..(87): Ceres Seq. ID no. 12579072
KSTTVPAPPRHGVLRRSRCRHATIRAAAGARTKGSPRGGEGARHGGGVPRLDCVHGRVARPPPAGSATAVTAVWRPSSPETPRRSKT

SEQ ID NO: 25333 - protein, 70 aa, Zea mays subsp. mays
  misc_feature (1)..(70): Ceres Seq. ID no. 12579073
TSPQPYQHHRAMASSADPDAATPPSAPQPEPARKAVRVVVKGRVTGVGFRDWTASTAESLGLRRLGPQPP

SEQ ID NO: 25334 - protein, 59 aa, Zea mays subsp. mays
  misc_feature (1)..(59): Ceres Seq. ID no. 12579074
MASSADPDAATPPSAPQPEPARKAVRVVVKGRVTGVGFRDWTASTAESLGLRRLGPQPP

SEQ ID NO: 25335 - DNA, 757 bp, Zea mays subsp. mays
  misc_feature (1)..(757): Ceres Seq. ID no. 12579198
aattccgtttgtttccgacggcacaaggaaaaaaaaagaccagactgagggctcctctcccgttccgatcgccaattcgccttccaccgcctgcaaccctttcttcccttctcggtcatcgtgacggcatcacgcgcgcgctctcctcttccacgagtccgtcagcctgctaagtcttaagatggcgtcaagcaatggtcagacagaagctccagcaccatctgtccccaaaaatcctgctatggcatcatgccggaagaagaaaacagatgatgctaccttccttgaagatctgaaagaccacatggatgagttcattcacgcctccatggatgagcacaagagctgctttaagaagacaattcagaagatgtttgggatgtcgaaggctgttgcagagagatccgcggcggaagcaaacaaagctgaagttgaaagtgctttgccacttcagaccagtgtctcgcagtagaatttcatgcagtagaatttcatgttggtagtttcttgctcgtgccaatagttttatataagggtttttgttgctgtgttttctgaaacgcataagcgtgtcagtagcatgttttcataaccggattgtagtgcttcattatctatagttttctgtacgtgtaaaatagaccagcgtaacagcgtagtttgcttcattctccgaagtattgtatggctgtacacccaggcatctgggcatcatgaacccaactgattggctaaatgaaataaatctcctccatcc

SEQ ID NO: 25336 - protein, 96 aa, Zea mays subsp. mays
  misc_feature (1)..(96): Ceres Seq. ID no. 12579199
MASSNGQTEAPAPSVPKNPAMASCRKKKTDDATFLEDLKDHMDEFIHASMDEHKSCFKKTIQKMFGMSKAVAERSAAEANKAEVESALPLQTSVSQ

SEQ ID NO: 25337 - protein, 76 aa, Zea mays subsp. mays
  misc_feature (1)..(76): Ceres Seq. ID no. 12579200
MASCRKKKTDDATFLEDLKDHMDEFIHASMDEHKSCFKKTIQKMFGMSKAVAERSAAEANKAEVESALPLQTSVSQ

SEQ ID NO: 25338 - protein, 64 aa, Zea mays subsp. mays
  misc_feature (1)..(64): Ceres Seq. ID no. 12579201
MSSFTPPWMSTRAALRRQFRRCLGCRRLLQRDPRRKQTKLKLKVLCHFRPVSRSRISCSRISCW

SEQ ID NO: 25339 - DNA, 1388 bp, Zea mays subsp. mays
  misc_feature (1)..(1388): Ceres Seq. ID no. 12588453
aacgcctcacgccatgcgactcgtcacggcctcggcgtgccgcctgcgtgcccggtgcccgtgcggccgtgacgaacgacactgacgagcaaagcaaagccaacggagccgagcgagacgacgagaccgcgattgctagctagctagttcgggcagcgagcggggtgagacggctatggcgtgctgctccgccgtcctgcaccatccgctgggcttctcactcaccccgtgctccgcctcccgagccccaccgcgcatccagcgcgtgggcgtggcaactccctcggccgcctccgcccgccctctttctcgcgccaggatctcaccgcgctgcacctactccggtggcgccagcgctgcccctggtcctggggagctacccgcggcggcgctccgacgggtccttgagatgccgggtgcgcaccaggcgcccgcctgctacgacgcgctgagcgcacgcctcgtcgagcgcgccgagttcagggcctgcttcacgagcggtttctcaatctctgccgcacggcttggattaccagatgttggtctcatctcgtacggggaaatgatcgatcaggggcgtctgatgactgaagcagtttcaatccctgtgatcggtgatgcggataatggttacggaaactgtatgaatgttaagaggacagtgaaaggatttattaatgctggttttgctggaattattcttgaagatcaggtgtcaccaaaggcatgtggacacacacaaggaaggaaggttgtctcaagggaggaagcaattatgcacataaaagctgctgttgatgccaggaatgagagtggctctgatattgttattgtggcaaggacagattctcgtcaagctgtgtctcttaatgaagcattatggagagtacgggcctttgctgatgctggagcagatgttctattcattgatgccctcgcctcaagggaagaaatgaaggcattttgcgctatcgcgcctggagttccaaaaatggccaacatgttagaaggtggtggtaaaactcctatactgagccctgttgaactggaagaaataggttataaaatcatagcctatccattatctctaattggtgtatcgatgcgtgcaatggagtttatggaggtgggctgcattggacaagctcgcatctggaaattgctgggtgtcttgaaccttttgggtgacagaaagttatctcatgtacaaaatgtttacacagcccagttgctaccaattgctgatttgtgtacttcttgggctttaccacttgcacggttcagaaacctgcactatgtaaggggatgttgatggcaattgacctcattttgtaaatgatcctcgtttatcttggattcatttttagtgttcagtttggcagttgacc

SEQ ID NO: 25340 - protein, 378 aa, Zea mays subsp. mays
  misc_feature (1)..(378): Ceres Seq. ID no. 12588454
MACCSAVLHHPLGFSLTPCSASRAPPRIQRVGVATPSAASARPLSRARISPRCTYSGGASAAPGPGELPAAALRRVLEMPGAHQAPACYDALSARLVERAEFRACFTSGFSISAARLGLPDVGLISYGEMIDQGRLMTEAVSIPVIGDADNGYGNCMNVKRTVKGFINAGFAGIILEDQVSPKACGHTQGRKVVSREEAIMHIKAAVDARNESGSDIVIVARTDSRQAVSLNEALWRVRAFADAGADVLFIDALASREEMKAFCAIAPGVPKMANMLEGGGKTPILSPVELEEIGYKIIAYPLSLIGVSMRAMEFMEVGCIGQARIWKLLGVLNLLGDRKLSHVQNVYTAQLLPIADLCTSWALPLARFRNLHYVRGC

SEQ ID NO: 25341 - protein, 300 aa, Zea mays subsp. mays
  misc_feature (1)..(300): Ceres Seq. ID no. 12588455
MPGAHQAPACYDALSARLVERAEFRACFTSGFSISAARLGLPDVGLISYGEMIDQGRLMTEAVSIPVIGDADNGYGNCMNVKRTVKGFINAGFAGIILEDQVSPKACGHTQGRKVVSREEAIMHIKAAVDARNESGSDIVIVARTDSRQAVSLNEALWRVRAFADAGADVLFIDALASREEMKAFCAIAPGVPKMANMLEGGGKTPILSPVELEEIGYKIIAYPLSLIGVSMRAMEFMEVGCIGQARIWKLLGVLNLLGDRKLSHVQNVYTAQLLPIADLCTSWALPLARFRNLHYVRGC

SEQ ID NO: 25342 - protein, 249 aa, Zea mays subsp. mays
  misc_feature (1)..(249): Ceres Seq. ID no. 12588456
MIDQGRLMTEAVSIPVIGDADNGYGNCMNVKRTVKGFINAGFAGIILEDQVSPKACGHTQGRKVVSREEAIMHIKAAVDARNESGSDIVIVARTDSRQAVSLNEALWRVRAFADAGADVLFIDALASREEMKAFCAIAPGVPKMANMLEGGGKTPILSPVELEEIGYKIIAYPLSLIGVSMRAMEFMEVGCIGQARIWKLLGVLNLLGDRKLSHVQNVYTAQLLPIADLCTSWALPLARFRNLHYVRGC

SEQ ID NO: 25343 - DNA, 711 bp, Zea mays subsp. mays
  misc_feature (1)..(711): Ceres Seq. ID no. 12588472
acggccatagaaatcgaccgagcgaatccctcgcatcgcattcgcagcctttgctgcatcacaccaccgcgaaaccccagcagccgcatcgatggcgcctaaggcggagaagaagccggctgcgaagaagccagcggaggaggagcccgctgccgcgaaggccccggcggggaagaagcccaaggccgagaagcgcctcccggcggccaagtcgtccggcaaagaaggcggcgacaagaagggtaagaagaaggcgaagaagtcggtggagacctacaagatctacatcttcaaggtgctgaagcaggtccacccggacatcggcatctcttccaaggccatgtccatcatgaactccttcatcaacgacatcttcgagaagctcgccggcgaggctgccaagcttgcgcgctacaacaagaagcccaccatcacctctcgggagattcaaacctctgtccgccttgtccttcccggcgagctcgccaagcacgcggtctccgagggcaccaaggccgtcactaagttcacatcatcttagatttgaggtagtagctattgggtggcgttggtagctgtgtctcaatttgtctgctactaatagtggtaggagtatccatgtgtagttgggttgcggtaagaattgtgttaaactggcaatatgtttgaaattgctttttatggatgtggaatagttgtgttgcttgttct

SEQ ID NO: 25344 - protein, 149 aa, Zea mays subsp. mays
  misc_feature (1)..(149): Ceres Seq. ID no. 12588473
MAPKAEKKPAAKKPAEEEPAAAKAPAGKKPKAEKRLPAAKSSGKEGGDKKGKKKAKKSVETYKIYIFKVLKQVHPDIGISSKAMSIMNSFINDIFEKLAGEAAKLARYNKKPTITSREIQTSVRLVLPGELAKHAVSEGTKAVTKFTSS

SEQ ID NO: 25345 - protein, 99 aa, Zea mays subsp. mays
  misc_feature (1)..(99): Ceres Seq. ID no. 12588474
GHRNRPSESLASHSQPLLHHTTAKPQQPHRWRLRRRRSRLRRSQRRRSPLPRRPRRGRSPRPRSASRRPSRPAKKAATRRVRRRRRSRWRPTRSTSSRC

SEQ ID NO: 25346 - DNA, 921 bp, Zea mays subsp. mays
  misc_feature (1)..(921): Ceres Seq. ID no. 12588519
atcagaaccgatccttacagagagacacacccagcgcgcgagatatctacatcgatcatcatcaccagcgagcgagccggccgagcagcaccgatggcggcgtacatgcgcgtgacgcaccgcgacgaggaaggcaagaaggtgacggagaagatgccggtcccggagacgcggcgcccggacacggccaagcacttcgagcgcaagctggaggagcagggcctccaccgcttcgagcggcacccggcgaacgcgccccggggcgtgggcatcggcgccccgccgcccaagtccgggcgcggcggcaagtacacctgggagggccccggcagcgtcgtcgaggaccagctcgacccggcgcccgcccgccatcgaccccaacgaccccaactacgaggagggaggggcggcggacgaggacgacgaggcggccagtgagatcgccggattcgtggtgggtgccctgctgctcggcgccaccatcgctgcccccaaggtcgacggcttcatcgcctcctcccagagaaggtcactagggatgtgtaagaggtgcggtgaccttcggattgtagcatgctcgcagtgcaagggaacaggatcagctcggagcggagggatgctcagtttgggcgtgctggatgacctctacgagtctcttggagccgaagccaagactgagaatctggttccctgcacaaagtgcaggtcgagaggccgtctcatgtgtccagaatgctccaaggtcgcatgaccctggcctggagccgtgtactcggtcagaacacatgtacggctctgacaaacacaaatcactgctgtcactgtttgtgtttgaacattattatgtgcatggaattcctgacccgactactggtggttagggatggtccactgtctcaatgcagttgttttcagtgcttt

SEQ ID NO: 25347 - protein, 177 aa, Zea mays subsp. mays
  misc_feature (1)..(177): Ceres Seq. ID no. 12588520
QNRSLQRDTPSARDIYIDHHHQRASRPSSTDGGVHARDAPRRGRQEGDGEDAGPGDAAPGHGQALRAQAGGAGPPPLRAAPGERAPGRGHRRPAAQVRARRQVHLGGPRQRRRGPARPGARPPSTPTTPTTRREGRRTRTTRRPVRSPDSWWVPCCSAPPSLPPRSTASSPPPREGH

SEQ ID NO: 25348 - protein, 145 aa, Zea mays subsp. mays
  misc_feature (1)..(145): Ceres Seq. ID no. 12588521
IRTDPYRETHPAREISTSIIITSERAGRAAPMAAYMRVTHRDEEGKKVTEKMPVPETRRPDTAKHFERKLEEQGLHRFERHPANAPRGVGIGAPPPKSGRGGKYTWEGPGSVVEDQLDPAPARHRPQRPQLRGGRGGGRGRRGGQ

SEQ ID NO: 25349 - protein, 114 aa, Zea mays subsp. mays
  misc_feature (1)..(114): Ceres Seq. ID no. 12588522
MAAYMRVTHRDEEGKKVTEKMPVPETRRPDTAKHFERKLEEQGLHRFERHPANAPRGVGIGAPPPKSGRGGKYTWEGPGSVVEDQLDPAPARHRPQRPQLRGGRGGGRGRRGGQ

SEQ ID NO: 25350 - DNA, 1185 bp, Zea mays subsp. mays
  misc_feature (1)..(1185): Ceres Seq. ID no. 12588534
catcgcgagcacccacccacctttgcttgcacggcccgcccattcaccggttgaggggagaagggagaggagaggtagctcagtcctcctctgaccgccgacccatccgccatggccgcctcctacgaccgcgagttctggaacttcagcgaccagctgcgcctgcacaacaacttctccaacctctccatcgccgaccctatctggtcctccaccacactggatcctccctcctccttcagcgacgccccgggcctcataggatccgccaagctcgcctttggcaacgccaccacggccaacgccgaccgctacaacgccaacgccgccggtgtcgccagcaagagcatgagcgtgggcatgatcgaccactacctcaacaagaacactaacaacgacgtcgtcaagagctacttcaacaagtccgtcggcagcaggccggccaacaacaacaccaccacaaccgtcaagaagaactccgccgcccaccacgacaagaagcacaagaactccggcaacggcgccggcgtcgacaagaggttcaagagcctgccggcggcggaggcgctgcccaggggcgaggccatcggcggctacatcttcgtctgcaacaacgacaccatggaggagaacctcaagaggcggctcttcgggctgccgtccaggtacagggattctgtgagggccatcaggcccggcctgcccctcttcctctacaactactccacccaccagctccacggcatctttgaggctgcaagcttcggaggatccaacatcgatccagcagcttgggaggacaagaagtgccccggcgagtcccgcttccctgctcaggtgagggttgcaacgcgcaagatctgttcgccgctggaggaggacgctttccgccccatcctccaccactacgacggccccaagttcaggctggagctcagtgtccctgaggcgctctcccttcttgatatatttgcggagaagatttttgacagacagacagcctgatgtctccatacttgcttccagttccagaggagtagtacatgtataatataaatataatatgctgattaccgacatctgattatctattctagtataagttacactcgaacttaggccctctttggaattatagtatttttatagttttaaaacaatactatgttatttggngatactata

SEQ ID NO: 25351 - protein, 297 aa, Zea mays subsp. mays
  misc_feature (1)..(297): Ceres Seq. ID no. 12588535
MAASYDREFWNFSDQLRLHNNFSNLSIADPIWSSTTLDPPSSFSDAPGLIGSAKLAFGNATTANADRYNANAAGVASKSMSVGMIDHYLNKNTNNDVVKSYFNKSVGSRPANNNTTTTVKKNSAAHHDKKHKNSGNGAGVDKRFKSLPAAEALPRGEAIGGYIFVCNNDTMEENLKRRLFGLPSRYRDSVRAIRPGLPLFLYNYSTHQLHGIFEAASFGGSNIDPAAWEDKKCPGESRFPAQVRVATRKICSPLEEDAFRPILHHYDGPKFRLELSVPEALSLLDIFAEKIFDRQTA

SEQ ID NO: 25352 - protein, 218 aa, Zea mays subsp. mays
  misc_feature (1)..(218): Ceres Seq. ID no. 12588536
MSVGMIDHYLNKNTNNDVVKSYFNKSVGSRPANNNTTTTVKKNSAAHHDKKHKNSGNGAGVDKRFKSLPAAEALPRGEAIGGYIFVCNNDTMEENLKRRLFGLPSRYRDSVRAIRPGLPLFLYNYSTHQLHGIFEAASFGGSNIDPAAWEDKKCPGESRFPAQVRVATRKICSPLEEDAFRPILHHYDGPKFRLELSVPEALSLLDIFAEKIFDRQTA

SEQ ID NO: 25353 - protein, 214 aa, Zea mays subsp. mays
  misc_feature (1)..(214): Ceres Seq. ID no. 12588537
MIDHYLNKNTNNDVVKSYFNKSVGSRPANNNTTTTVKKNSAAHHDKKHKNSGNGAGVDKRFKSLPAAEALPRGEAIGGYIFVCNNDTMEENLKRRLFGLPSRYRDSVRAIRPGLPLFLYNYSTHQLHGIFEAASFGGSNIDPAAWEDKKCPGESRFPAQVRVATRKICSPLEEDAFRPILHHYDGPKFRLELSVPEALSLLDIFAEKIFDRQTA

SEQ ID NO: 25354 - DNA, 1329 bp, Zea mays subsp. mays
  misc_feature (1)..(1329): Ceres Seq. ID no. 12588709
gcacgagaccattacctagaacatcctaatcgaaaacccacactcccctgcacacccaacccatccacatccactcgcccaagccggccttcgtccctgcccaacgctgcttcactctctccagcgatagatagcatcatcctctccacctgcacaggagacgacgaagcagcaccatcgtccgcggtcctttgcttcttctggcgccatgacgtcgccggtgccggagacgttcagcctgcaggaccagcagccgccgccgccgccgccagcggagcaggagcagatctgctacgtgcactgcagctactgcgacaccatcctcgcggtgggcgtgccgtgcagcagcctgttccagacggtcaccgtgcggtgcggccactgcgccaacctgctctacgtcaacctccgcgccctcctgctgccgccggcgacggcgcccgcggccgccaaccatctaccgcccttcggccaggctctcctctccccgacctcaccgcacggtctactcgatgctgagacgatgtcgtcgtcgtcgttccaagcgccgagcctgccgagcgctgaaccgccgagcgccgcctgcgtgagcggcatcacgagcatcaacaacaccgcctgcggtggcaacaacgccgcgtcggccatggcgccgccaccggccaaacctgcactgcacgagccgccgcagctgcccaggagcgcagcgtcagcgaacaagacttcagagaagcggcagagagttccttccgcatacaaccgtttcatcaaagatgagatccagcgcattaaggccagcaatcccgacatcactcacagggaagctttcagcgcggctgccaagaattgggcccatttcccacacatccatttcggcctcatgcccgatcagggtctgaagaagcaccccatgcaaactcaggagggagctgaatgcatgcttttcaaggacggtctatacgccgccgccgccgccgccacagcggcgtccagcatgggcatctctccattctgatgacttcagctccaccgcggaatggtctatagcgttctgcctctctgtgcgcgcctagccgcttagggttctgatgtctcagttccctcgttatctcccggttgcttgagtgagagatagcttcaatgtctatcccagccggagaatctcgaaatgtctctcagtacccatatatctctaatagttctcctcagtttccagcttcttactttgttaatttgttattatgcaacctctagagaggttgttatgtgtatgacgatgtgcggcctcttatctttatatggacataattcgagctggatattcggctg

SEQ ID NO: 25355 - protein, 268 aa, Zea mays subsp. mays
  misc_feature (1)..(268): Ceres Seq. ID no. 12588710
MTSPVPETFSLQDQQPPPPPPAEQEQICYVHCSYCDTILAVGVPCSSLFQTVTVRCGHCANLLYVNLRALLLPPATAPAAANHLPPFGQALLSPTSPHGLLDAETMSSSSFQAPSLPSAEPPSAACVSGITSINNTACGGNNAASAMAPPPAKPALHEPPQLPRSAASANKTSEKRQRVPSAYNRFIKDEIQRIKASNPDITHREAFSAAAKNWAHFPHIHFGLMPDQGLKKHPMQTQEGAECMLFKDGLYAAAAAATAASSMGISPF

SEQ ID NO: 25356 - protein, 172 aa, Zea mays subsp. mays
  misc_feature (1)..(172): Ceres Seq. ID no. 12588711
ARDHYLEHPNRKPTLPCTPNPSTSTRPSRPSSLPNAASLSPAIDSIILSTCTGDDEAAPSSAVLCFFWRHDVAGAGDVQPAGPAAAAAAASGAGADLLRALQLLRHHPRGGRAVQQPVPDGHRAVRPLRQPALRQPPRPPAAAGDGARGRQPSTALRPGSPLPDLTARSTRC

SEQ ID NO: 25357 - protein, 163 aa, Zea mays subsp. mays
  misc_feature (1)..(163): Ceres Seq. ID no. 12588712
MSSSSFQAPSLPSAEPPSAACVSGITSINNTACGGNNAASAMAPPPAKPALHEPPQLPRSAASANKTSEKRQRVPSAYNRFIKDEIQRIKASNPDITHREAFSAAAKNWAHFPHIHFGLMPDQGLKKHPMQTQEGAECMLFKDGLYAAAAAATAASSMGISPF

SEQ ID NO: 25358 - DNA, 520 bp, Zea mays subsp. mays
  misc_feature (1)..(520): Ceres Seq. ID no. 12588730
accgagagtggcagtggagtagtggtaggaaaagctcgtcgccgagtcgccgtacgggggctcggctcgggtgagcgagcggcggccggcgggtactgaggcctgagggcgaggcgatgggccgcctccgtgacgggcgagccttcctccaccgcgcgcttgtcctctcgtcgctgctccttctcgcctccggcgaaatcttcttcgaggaacggttcgatgatgggtgggatagccgctgggtgaaatctgattggaagaagagccaaggacaagctggaaccttccgacacacagcgggaacctactctggagaccctgacgataaaggtatacaaacaactggggatgccaaacattttgctatatcagcaaaattcccacaatttagtaacaaggaccggacattggttatccagtactctctaaagattgaacaagatattgaatgcggtggtgcttacatcaaacttatgtctggttaatctcaaccagaagaatttggtggcgacactcctta

SEQ ID NO: 25359 - protein, 122 aa, Zea mays subsp. mays
  misc_feature (1)..(122): Ceres Seq. ID no. 12588731
MGRLRDGRAFLHRALVLSSLLLLASGEIFFEERFDDGWDSRWVKSDWKKSQGQAGTFRHTAGTYSGDPDDKGIQTTGDAKHFAISAKFPQFSNKDRTLVIQYSLKIEQDIECGGAYIKLMSG

SEQ ID NO: 25360 - DNA, 1128 bp, Zea mays subsp. mays
  misc_feature (1)..(1128): Ceres Seq. ID no. 12588914
ctctccaagactccaatcccccaaccaccagaaccagcgccagctctaacgtcacctctgatttctctctcctctctattgctagctgctttattataagtagcagctgcagcaggcaggagctgcacacacccatccaattccagctgctgatcttgatcctgcaccccgagccgtacacaagagctagtcggtagaacttgcaggagcggagcagaactaagtgcagagaacaggacatatggctacgccggcggtgaaggtttacgggtgggctatctcgccgttcgtatcgcgggctctgctggccctggaggaggccggcgtcgactacgagctcgtccccatgagccgccaggacggcgaccaccgccgcccggagcacctcgccaggaaccctttcgggaaggtgccggtgctcgaggatggcgacctcacgctcttcgaatcacgtgcgatcgcgaggcatgttctccggaagcacaagccggagctgctgggcggcggcaggctggagcagacggcgatggtggacgtgtggctggaggtggaggcccaccagctgagcccgccggcgatcgccatcgtggtggagtgcgtgttcgcgccgttcctgggccgcgagcgcaaccaggcggtggtggacgagaacgtggagaagctcaagaaggtgctggaggtgtacgaggcgcggctggccacgtgcacgtacctcgccggcgacttcctcagcctcgccgacctcagccccttcaccatcatgcactgcctcatggccaccgagtacgccgctctcgtccatgcgctcccgcacgtcagcgcctggtggcagggcctcgccgcgcgcccggcggccaacaaggtggcgcagttcatgccggtcggcgccggagcgcccaaggaacaggagtgacgatgaagcgatcgaagcgacttgtgttgttgtgcttgattagttaattggaaaccttctcactcatctagtccatcatggtgcctgcttttctttatactatttgtcttaattttgctgctttctccacggaataatagtagagatttggaaatgtaatgtattttatccaaatatattggattttcaagcaatatagtatggttttcgctgcc

SEQ ID NO: 25361 - protein, 223 aa, Zea mays subsp. mays
  misc_feature (1)..(223): Ceres Seq. ID no. 12588915
MATPAVKVYGWAISPFVSRALLALEEAGVDYELVPMSRQDGDHRRPEHLARNPFGKVPVLEDGDLTLFESRAIARHVLRKHKPELLGGGRLEQTAMVDVWLEVEAHQLSPPAIAIVVECVFAPFLGRERNQAVVDENVEKLKKVLEVYEARLATCTYLAGDFLSLADLSPFTIMHCLMATEYAALVHALPHVSAWWQGLAARPAANKVAQFMPVGAGAPKEQE

SEQ ID NO: 25362 - protein, 188 aa, Zea mays subsp. mays
  misc_feature (1)..(188): Ceres Seq. ID no. 12588916
MSRQDGDHRRPEHLARNPFGKVPVLEDGDLTLFESRAIARHVLRKHKPELLGGGRLEQTAMVDVWLEVEAHQLSPPAIAIVVECVFAPFLGRERNQAVVDENVEKLKKVLEVYEARLATCTYLAGDFLSLADLSPFTIMHCLMATEYAALVHALPHVSAWWQGLAARPAANKVAQFMPVGAGAPKEQE

SEQ ID NO: 25363 - protein, 128 aa, Zea mays subsp. mays
  misc_feature (1)..(128): Ceres Seq. ID no. 12588917
MVDVWLEVEAHQLSPPAIAIVVECVFAPFLGRERNQAVVDENVEKLKKVLEVYEARLATCTYLAGDFLSLADLSPFTIMHCLMATEYAALVHALPHVSAWWQGLAARPAANKVAQFMPVGAGAPKEQE

SEQ ID NO: 25364 - DNA, 481 bp, Zea mays subsp. mays
  misc_feature (1)..(481): Ceres Seq. ID no. 12589015
attttcgaaagagaatctcagaaaagatcaatctagagagaccaaaaagagatcggaagagatggcttctacctccgcgatgtcattggtcacaccacttaaccagacccgttcgtctcctttcctcaagccattacctctgaaaccatccaaggctttggttgcaactggaggcagagcacagaggcttcaagttaaggccctcaagatggacaaggctttgaccggtatctccgcggctgctcttactgcttcgatggtgattccggagatagctgaagctgctggttctggaatctctccttccctcaagaatttcttgctcagcattgcttctggtggcctcgtcctcactgtcatcattggtgtcgtcgtcggcgtctccaactttgaccctgtcaagagaacctaagacctatatatctttnttacatcattattgtaatctgttctccttcctgtgtattcgtttcaactaagt

SEQ ID NO: 25365 - protein, 136 aa, Zea mays subsp. mays
  misc_feature (1)..(136): Ceres Seq. ID no. 12589016
FSKENLRKDQSRETKKRSEEMASTSAMSLVTPLNQTRSSPFLKPLPLKPSKALVATGGRAQRLQVKALKMDKALTGISAAALTASMVIPEIAEAAGSGISPSLKNFLLSIASGGLVLTVIIGVVVGVSNFDPVKRT

SEQ ID NO: 25366 - protein, 116 aa, Zea mays subsp. mays
  misc_feature (1)..(116): Ceres Seq. ID no. 12589017
MASTSAMSLVTPLNQTRSSPFLKPLPLKPSKALVATGGRAQRLQVKALKMDKALTGISAAALTASMVIPEIAEAAGSGISPSLKNFLLSIASGGLVLTVIIGVVVGVSNFDPVKRT

SEQ ID NO: 25367 - protein, 110 aa, Zea mays subsp. mays
  misc_feature (1)..(110): Ceres Seq. ID no. 12589018
MSLVTPLNQTRSSPFLKPLPLKPSKALVATGGRAQRLQVKALKMDKALTGISAAALTASMVIPEIAEAAGSGISPSLKNFLLSIASGGLVLTVIIGVVVGVSNFDPVKRT

SEQ ID NO: 25368 - DNA, 1608 bp, Zea mays subsp. mays
  misc_feature (1)..(1608): Ceres Seq. ID no. 12589090
ctattcattcatccggccaccaccgctctaactactcttcaagagacgacgaccaacaggcacgtcgatcgtcttccggcgagggcgacggaaggatgtccggcggcgagagtggtccggcagcggcggcggcggccgttccgttgctgcaggcgccggaggggaggacgacgaagtactacgagggatgccccgggtgccggctggacgaggccaacaagactaggaccggcgtcccctacctcaatttcttctacatctgggtcgtctgcctcgccgccgcactgccggtccagtcactgttcccttatctatacttcatgatcagggacttgaaagtggcgaaagaggagcaagacattgggttttatgctggttttgttggggctacctatttccttggaagggccatcagcgctgtgccatggggcatgttcgctgacaagtatggaaggaagccatgcattgtgatcagcatcctctcagtgattgtgttcaacacactgtttggacttagcacaacttactgnntggcaattgtgactaggggattacttgggttgctatgtggcatacttggacccatcaaggcctatgcttcagaagtctgcaggaaagagcaccaagctctgggaatctctcttgttacatcttcacgagccatanctcttgttattgggcctgctattggaggcttccttgcacagcctgcacagaagtacccaaatcttttctctgaagagtccatatttggaaggtttccatacttccttccttgctttgtaatatcgttgctagcagcaggatcatgtattgcatgcatttggcttccggaaacgctacactttcatggtgatgacaaagtagaagctattgaagaactggaggcacaagttcgtggctccgaatctacaaaagatctgcataagaattggcaattgatgtcagcaataatcctctactgtgtcttttctatgcatgacacagcttatcttgaggtattttcactgtgggctgtgagcagtagaaaatttcgggggcttagtttgacatcccaggatgttggtactgtgctagccatctcaggttttggtgtacttgtataccaactcgctatttatccttttcttgcgaagtattttggaccaatcaagacatttcggcctgccgcgatcctgtcgatcattctcctcactacgtaccccttcatggccaatttacatggcctggagcttaaaatactcatcaacattgcatctgttttgaagaacatgtttgcggctaccatcactattgcctgcaacatcctacagaacactgcagtgacgcaagagcagagaggcgttgctaatggcatctctgttaccctgatgtccgtgttcaaatctgtagctccagcagcagcaggaattctgttctcgtgggctcagaagcacatcagcggactgttcttaccaggggatcagatcttgttcctagcgataaacatggtgtcggtgattggcctggtgctgacgttcaagccatttttctccctaccgaatccaacgaggcattcataaatctgtgtagatgaagcccgttcctgtgaattgtatcgatgcactg

SEQ ID NO: 25369 - protein, 519 aa, Zea mays subsp. mays
  misc_feature (1)..(519): Ceres Seq. ID no. 12589091
  misc_feature (176)..(176): Xaa is any aa, unknown or other
  misc_feature (177)..(177): Xaa is any aa, unknown or other
  misc_feature (222)..(222): Xaa is any aa, unknown or other
IHSSGHHRSNYSSRDDDQQARRSSSGEGDGRMSGGESGPAAAAAAVPLLQAPEGRTTKYYEGCPGCRLDEANKTRTGVPYLNFFYIWVVCLAAALPVQSLFPYLYFMIRDLKVAKEEQDIGFYAGFVGATYFLGRAISAVPWGMFADKYGRKPCIVISILSVIVFNTLFGLSTTYXXAIVTRGLLGLLCGILGPIKAYASEVCRKEHQALGISLVTSSRAIXLVIGPAIGGFLAQPAQKYPNLFSEESIFGRFPYFLPCFVISLLAAGSCIACIWLPETLHFHGDDKVEAIEELEAQVRGSESTKDLHKNWQLMSAIILYCVFSMHDTAYLEVFSLWAVSSRKFRGLSLTSQDVGTVLAISGFGVLVYQLAIYPFLAKYFGPIKTFRPAAILSIILLTTYPFMANLHGLELKILINIASVLKNMFAATITIACNILQNTAVTQEQRGVANGISVTLMSVFKSVAPAAAGILFSWAQKHISGLFLPGDQILFLAINMVSVIGLVLTFKPFFSLPNPTRHS

SEQ ID NO: 25370 - protein, 488 aa, Zea mays subsp. mays
  misc_feature (1)..(488): Ceres Seq. ID no. 12589092
  misc_feature (145)..(145): Xaa is any aa, unknown or other
  misc_feature (146)..(146): Xaa is any aa, unknown or other
  misc_feature (191)..(191): Xaa is any aa, unknown or other
MSGGESGPAAAAAAVPLLQAPEGRTTKYYEGCPGCRLDEANKTRTGVPYLNFFYIWVVCLAAALPVQSLFPYLYFMIRDLKVAKEEQDIGFYAGFVGATYFLGRAISAVPWGMFADKYGRKPCIVISILSVIVFNTLFGLSTTYXXAIVTRGLLGLLCGILGPIKAYASEVCRKEHQALGISLVTSSRAIXLVIGPAIGGFLAQPAQKYPNLFSEESIFGRFPYFLPCFVISLLAAGSCIACIWLPETLHFHGDDKVEAIEELEAQVRGSESTKDLHKNWQLMSAIILYCVFSMHDTAYLEVFSLWAVSSRKFRGLSLTSQDVGTVLAISGFGVLVYQLAIYPFLAKYFGPIKTFRPAAILSIILLTTYPFMANLHGLELKILINIASVLKNMFAATITIACNILQNTAVTQEQRGVANGISVTLMSVFKSVAPAAAGILFSWAQKHISGLFLPGDQILFLAINMVSVIGLVLTFKPFFSLPNPTRHS

SEQ ID NO: 25371 - protein, 413 aa, Zea mays subsp. mays
  misc_feature (1)..(413): Ceres Seq. ID no. 12589093
  misc_feature (70)..(70): Xaa is any aa, unknown or other
  misc_feature (71)..(71): Xaa is any aa, unknown or other
  misc_feature (116)..(116): Xaa is any aa, unknown or other
MIRDLKVAKEEQDIGFYAGFVGATYFLGRAISAVPWGMFADKYGRKPCIVISILSVIVFNTLFGLSTTYXXAIVTRGLLGLLCGILGPIKAYASEVCRKEHQALGISLVTSSRAIXLVIGPAIGGFLAQPAQKYPNLFSEESIFGRFPYFLPCFVISLLAAGSCIACIWLPETLHFHGDDKVEAIEELEAQVRGSESTKDLHKNWQLMSAIILYCVFSMHDTAYLEVFSLWAVSSRKFRGLSLTSQDVGTVLAISGFGVLVYQLAIYPFLAKYFGPIKTFRPAAILSIILLTTYPFMANLHGLELKILINIASVLKNMFAATITIACNILQNTAVTQEQRGVANGISVTLMSVFKSVAPAAAGILFSWAQKHISGLFLPGDQILFLAINMVSVIGLVLTFKPFFSLPNPTRHS

SEQ ID NO: 25372 - DNA, 911 bp, Zea mays subsp. mays
  misc_feature (1)..(911): Ceres Seq. ID no. 12589186
acattctctctgaccgatcttgggctctcctataaatatataggaacgtacgtaaagtttctccaagcagatagcagcaagctaagcaagtgccaaccaacgagtagcaggaaacatgtctccgcccgtcaagatcctcggccactacgcgagcccgtactcgcaccgcgtcgaggccgctctgcggctcaagggcgtgccgtacgagctggtccaggaagacctgggcaacaagagcgagctgctgctcgccaagaaccctgtccacaagaaggtgcccgtgctcctccatggcgacatggccgtctgcgagtccctcctcatcgtcgagtacgtcgacgaggccttcgacgggccgtccatcctgccggccgacccccacgaccgtgccgtcgcccgtttctgggcgaacttcttggacaccaagttctcccagccgttctggctggcgtactgggcggagggcgaggcgcagaaggccgtggtgaaggaggccaaggagaacctggcgctcctggaggcgcagctcggcgggaagagcttcttcggcggcgacacgcccgggtacctcgacatagccgcgtgcgcgttgggtccttggatcggcgtgctcgaggaggtgactggagtggccttgctggacgccgacgagttccccgctctatgccagtgggccagggactacagctccagtgaagcgctcaggccatgcctgccggacagggaccgactcgttgcctacttcaccgagaacaaggagaagtacaagacatttgccaaggcaacgttgcatcagtatctgctagttgggtgcaaaccgcttgtttatctctgtgtggaataatgtatacgtacgtgctccctcgatatcaaataaatcagctaccggagttgactgtagtcaaattgct

SEQ ID NO: 25373 - protein, 242 aa, Zea mays subsp. mays
  misc_feature (1)..(242): Ceres Seq. ID no. 12589187
MSPPVKILGHYASPYSHRVEAALRLKGVPYELVQEDLGNKSELLLAKNPVHKKVPVLLHGDMAVCESLLIVEYVDEAFDGPSILPADPHDRAVARFWANFLDTKFSQPFWLAYWAEGEAQKAVVKEAKENLALLEAQLGGKSFFGGDTPGYLDIAACALGPWIGVLEEVTGVALLDADEFPALCQWARDYSSSEALRPCLPDRDRLVAYFTENKEKYKTFAKATLHQYLLVGCKPLVYLCVE

SEQ ID NO: 25374 - protein, 231 aa, Zea mays subsp. mays
  misc_feature (1)..(231): Ceres Seq. ID no. 12589188
TFSLTDLGLSYKYIGTYVKFLQADSSKLSKCQPTSSRKHVSARQDPRPLREPVLAPRRGRSAAQGRAVRAGPGRPGQQERAAARQEPCPQEGARAPPWRHGRLRVPPHRRVRRRGLRRAVHPAGRPPRPCRRPFLGELLGHQVLPAVLAGVLGGGRGAEGRGEGGQGEPGAPGGAARREELLRRRHARVPRHSRVRVGSLDRRARGGDWSGLAGRRRVPRSMPVGQGLQLQ

SEQ ID NO: 25375 - protein, 181 aa, Zea mays subsp. mays
  misc_feature (1)..(181): Ceres Seq. ID no. 12589189
MAVCESLLIVEYVDEAFDGPSILPADPHDRAVARFWANFLDTKFSQPFWLAYWAEGEAQKAVVKEAKENLALLEAQLGGKSFFGGDTPGYLDIAACALGPWIGVLEEVTGVALLDADEFPALCQWARDYSSSEALRPCLPDRDRLVAYFTENKEKYKTFAKATLHQYLLVGCKPLVYLCVE

SEQ ID NO: 25376 - DNA, 691 bp, Zea mays subsp. mays
  misc_feature (1)..(691): Ceres Seq. ID no. 12589525
cagctacgtaggccccccccccggggatatttcgaaaggccctgcaagacgttgagatcaaaggctatacgattccggcgggatggggcgtcatggtgtgcccaccggcagtgcacttaaaccccgacatctatgaagaccctctggcgttcaacccgtggagatggcagggcaaacctgaaatcaccggtgggacgaaacacttcatggcgtttggaggtggcctcaggttttgcgttggcactgatcttagcagggtcttgatggcaacattcatccacagcttggttacaaaatacagttggaggacggtaaaaggaggcaacatagtccggacccccggtctcggctttcctgatggcttccacatccaactttttcctagaaattgaaattggcccttttcaaacctctgactaggtcgtgcatgtaattaaattggataggtctcttaggaccaacgccgcaacagtaaaggattggaaatcatatacttagcctagtgttagcctgttagggtagacatcactagttacaagttcagtcatgttactggtactacctctaatctttgcaaggggtttttgtacttggttgtttgttttccatgtggttagtaatctacccatgtgtttgtatgtatatctggttatacatgtctaatgaaagaaaaaatacaggagctgtgctt

SEQ ID NO: 25377 - protein, 99 aa, Zea mays subsp. mays
  misc_feature (1)..(99): Ceres Seq. ID no. 12589526
MVCPPAVHLNPDIYEDPLAFNPWRWQGKPEITGGTKHFMAFGGGLRFCVGTDLSRVLMATFIHSLVTKYSWRTVKGGNIVRTPGLGFPDGFHIQLFPRN

SEQ ID NO: 25378 - protein, 61 aa, Zea mays subsp. mays
  misc_feature (1)..(61): Ceres Seq. ID no. 12589527
MAFGGGLRFCVGTDLSRVLMATFIHSLVTKYSWRTVKGGNIVRTPGLGFPDGFHIQLFPRN

SEQ ID NO: 25379 - DNA, 627 bp, Zea mays subsp. mays; identical to SEQ ID NO: 511
  misc_feature (1)..(627): Ceres Seq. ID no. 12589671

SEQ ID NO: 25380 - protein, 112 aa, Zea mays subsp. mays; identical to SEQ ID NO: 512
  misc_feature (1)..(112): Ceres Seq. ID no. 12589672

SEQ ID NO: 25381 - protein, 102 aa, Zea mays subsp. mays; identical to SEQ ID NO: 513
  misc_feature (1)..(102): Ceres Seq. ID no. 12589673

SEQ ID NO: 25382 - protein, 87 aa, Zea mays subsp. mays; identical to SEQ ID NO: 514
  misc_feature (1)..(87): Ceres Seq. ID no. 12589674

SEQ ID NO: 25383 - DNA, 558 bp, Zea mays subsp. mays
  misc_feature (1)..(558): Ceres Seq. ID no. 12590378
atcctgggttacgttcctcgcacggcggaggcaaacaaaccctagccgccaggcgcaggcggtcagggagcgagtaccgagcgccccagttcacacgtgagatgtcagaatacaagaacgtcgttggggggaggctaaagctgaagggtaaggcactggatgtgaaggaaggtggagtcaagaagaaaaaaaagaagcatcagcttgaagagtcgtctcagattgagcacgatgagctccacaaagggggaaactctggcttaccagctgatcacaacaatgagcttattgaagctggcaaggtgggagatgaagaaaggaatctacatccagactacgaccacctcacaccggcggagcgacgctatatagatcagaagcagaagatcgacatgcaaaagctgatgcttcttaatttcgtcattttcctccttccttctaataagatttctctctcaccctcggccccccttcacgtgcgattgtaggtgtttgacgcttttgtaataatgcatgctgacatgttgcataaattgctccccaaaaaaatcttatttc

SEQ ID NO: 25384 - protein, 161 aa, Zea mays subsp. mays
  misc_feature (1)..(161): Ceres Seq. ID no. 12590379
PGLRSSHGGGKQTLAARRRRSGSEYRAPQFTREMSEYKNVVGGRLKLKGKALDVKEGGVKKKKKKHQLEESSQIEHDELHKGGNSGLPADHNNELIEAGKVGDEERNLHPDYDHLTPAERRYIDQKQKIDMQKLMLLNFVIFLLPSNKISLSPSAPLHVRL

SEQ ID NO: 25385 - protein, 128 aa, Zea mays subsp. mays
  misc_feature (1)..(128): Ceres Seq. ID no. 12590380
MSEYKNVVGGRLKLKGKALDVKEGGVKKKKKKHQLEESSQIEHDELHKGGNSGLPADHNNELIEAGKVGDEERNLHPDYDHLTPAERRYIDQKQKIDMQKLMLLNFVIFLLPSNKISLSPSAPLHVRL

SEQ ID NO: 25386 - DNA, 519 bp, Zea mays subsp. mays
  misc_feature (1)..(519): Ceres Seq. ID no. 12590708
ccttgtcgctacagtcggcaaattcagcgtcatttggaattttcagcaagtcaaggacagcaaccatgagtgctaccgtgatcagcagggcctcaagagctgctactgctacaaagttgtcctcaaggatgaatcaatcgtcgacagccgtttcatgcacgagaagtttgcgacgagtgactctcctgaagctccgctcgttgtcgctacgccaatgaaagtcagctccttcagtatagcaaatcgacgctgactccgaagctcttttccccagttgtgcagaaataatttgagaagttgcaggtttttgttcagtttgttcctttttcctcttttagacggtttggttagttctgttggtacagaactgatcgaggttcctcccgagaagaactggtttttgtgtcgtgtgcatgtctggtcatttgtagcgggctagcggctcggtataatggtgtgtatgtctgttggataaaatgtaccatgtgacaaaaaaaagtaattttgatttgcgactcc

SEQ ID NO: 25387 - protein, 83 aa, Zea mays subsp. mays
  misc_feature (1)..(83): Ceres Seq. ID no. 12590709
LVATVGKFSVIWNFQQVKDSNHECYRDQQGLKSCYCYKVVLKDESIVDSRFMHEKFATSDSPEAPLVVATPMKVSSFSIANRR

SEQ ID NO: 25388 - protein, 71 aa, Zea mays subsp. mays
  misc_feature (1)..(71): Ceres Seq. ID no. 12590710
LSLQSANSASFGIFSKSRTATMSATVISRASRAATATKLSSRMNQSSTAVSCTRSLRRVTLLKLRSLSLRQ

SEQ ID NO: 25389 - protein, 50 aa, Zea mays subsp. mays
  misc_feature (1)..(50): Ceres Seq. ID no. 12590711
MSATVISRASRAATATKLSSRMNQSSTAVSCTRSLRRVTLLKLRSLSLRQ

SEQ ID NO: 25390 - DNA, 558 bp, Zea mays subsp. mays
  misc_feature (1)..(558): Ceres Seq. ID no. 12590716
acacgtacggggaatactacgaggacatgagagagttccmccagcmccttcctaagctactgaagcccggaggcatctactcgtacttcaacggcctytgcggcgacaacgcgttyttccacgccgtgtattgccagctcgtcgcgctggagctcgcgaaccttgggtactcgacgcagttcatccctctgccggtcaaagattgcctggcggaggaggtctggaagggcgtgaagcggaagtactggcaactggacacctactacctccctgcttgccagtcagaatcagaatctactatcaagtagtgatgagttatttytagtctgcgttctgaagttggttgtctgttttgagctacgtacatttttgttctgtgttacgaatgttaaccctttcactttcgggagctgaattttctttgggcgtgtggtgatttgccctctctcgtatgctcctgacgcgtgcgtgcattcgtggttcgaaaaatagaattgtcatggaaaaatttggttccctgacgatcattttccttgccatgttggaccgcgtggctyt

SEQ ID NO: 25391 - protein, 101 aa, Zea mays subsp. mays
  misc_feature (1)..(101): Ceres Seq. ID no. 12590717
  misc_feature (13)..(13): Xaa is any aa, unknown or other
  misc_feature (15)..(15): Xaa is any aa, unknown or other
  misc_feature (32)..(32): Xaa is any aa, unknown or other
  misc_feature (38)..(38): Xaa is any aa, unknown or other
TYGEYYEDMREFXQXLPKLLKPGGIYSYFNGXCGDNAXFHAVYCQLVALELANLGYSTQFIPLPVKDCLAEEVWKGVKRKYWQLDTYYLPACQSESESTIK

SEQ ID NO: 25392 - protein, 93 aa, Zea mays subsp. mays
  misc_feature (1)..(93): Ceres Seq. ID no. 12590718
  misc_feature (5)..(5): Xaa is any aa, unknown or other
  misc_feature (7)..(7): Xaa is any aa, unknown or other
  misc_feature (24)..(24): Xaa is any aa, unknown or other
  misc_feature (30)..(30): Xaa is any aa, unknown or other
MREFXQXLPKLLKPGGIYSYFNGXCGDNAXFHAVYCQLVALELANLGYSTQFIPLPVKDCLAEEVWKGVKRKYWQLDTYYLPACQSESESTIK

SEQ ID NO: 25393 - DNA, 1047 bp, Zea mays subsp. mays
  misc_feature (1)..(1047): Ceres Seq. ID no. 12593638
gcacgagaccattacctagaacatcctaatcgaaaaatcacccctcgttgtcatctcatatcctgagccagagatcaaagaaaccagagggagcgaggcatggcagcaggcttgcaggtgtttggccagccggcgtctactgatgtctccagggttctgacatgcctgtttgagaagaaactggagttcgatcttgtccgcatcgatacgttcaagacgcatcacaagcttcccgagttcatcaggcttcgggatcctaatgggcaagtgaccttgaagcacggcgacaaaactctcgttgattcgagggacatctgccggtacgtctgcacccagtttccaaacgatggaaacaagagcctttacggatccggcgctctagaacgggcgtcgatagaacagtggcttcaggcggaggctcagaacttcgggccccccagctccgcgctcgtcttccagctggcgttcgtccctcacctcactcacctgggcgttcgtcaggaccctgccgtgatcgccgagaacgaggataagctgaagcaggtccttgatgtctacgacgagatactctcgaggaacgagtacctggctggcgacgagttcaccctggccgacctctcccacctcccgaactcgcactacatcgtgaacaccgagagaggaaggaagctcttcactaacaagaagaacgtggccaagtggtacgagaagctctcgaagcgcgagacgtggaagcaggtcgctaagatgcagaaggaacatcctggtgcgttcgagtgattgcttgtcttggggggagctgcgagtgcaccatcatgaatggcttcatcgtctgtgtcggtctggctctacagttcattttgttttgagtgatccattgtttaattcctcctatcagtgttgtcgtgtgcaccaaaaataatgtgaagcccagctgtgatgtatatgatccttttgctctaatctatcatgacgtataagctcgatctctgaccttgtacgcacagtattttttttactgatgatttcgatcgagacatacagtcg

SEQ ID NO: 25394 - protein, 226 aa, Zea mays subsp. mays
  misc_feature (1)..(226): Ceres Seq. ID no. 12593639
MAAGLQVFGQPASTDVSRVLTCLFEKKLEFDLVRIDTFKTHHKLPEFIRLRDPNGQVTLKHGDKTLVDSRDICRYVCTQFPNDGNKSLYGSGALERASIEQWLQAEAQNFGPPSSALVFQLAFVPHLTHLGVRQDPAVIAENEDKLKQVLDVYDEILSRNEYLAGDEFTLADLSHLPNSHYIVNTERGRKLFTNKKNVAKWYEKLSKRETWKQVAKMQKEHPGAFE

SEQ ID NO: 25395 - DNA, 1824 bp, Zea mays subsp. mays
  misc_feature (1)..(1824): Ceres Seq. ID no. 12593647
gcacgagaccattacctagaacatcctaatcgaaaaatttcattctttgtttgtttcagcctttcacggaagaggggcggagtacgtaaggtgaacccggtcgtctgaagagaagcgaggacgacgtaggagaggggaggacagcgagatggccggcgggtttggcagcggcggggcagccgccgggagggccgagctctacgagggcaagatcaccggctacttcatcctcgcttgcatcgtcggctccttcggcggatccctcttcggctatgacctcggagtctccagcggcgtgacttccatggacgacttcctggtgaagttcttcccggacgtgtaccggcggaagcaggcgcacctccacgagacggactactgcaagtacgacaaccaggtgctgacgctcttcacctcgtcgctctacttcgcgggcctcgtctccaccttcggcgcctcctacgtgaccaagcgccacggccggcgcgccagcatcatggtgggcgccgccagcttcttcctcggcggcgccatcaacgcggccgccatgaacatcgccatgctcatcgtcggccgcgtgctcctcggcgtcggcatcggcttcggcaaccaggccgtgccgctctacctctcggagatcgcgccctaccgcatccgcggcgccgtgaaccagctcttccagctcaccacctgcctcggcatcctcgtcgccgacgtcatcaactacttcaccgaccgcctgcacccctgggggtggcgcctctcgctgggcctcgccatgggcccggccaccgccatcttcgtcggcgcgctcttccttcccgagacgcccaacagcctcgtcgagcgcgggcacctggaggaggcccgccgcgtgctggagaaggtgcgcggcacgcacaaggtggacgccgagttcgaggacctcaaggaggccagccaggccgcgcgcgccgtcacgggcacgttccggaacctgctcgccgtgcgcaaccgcccgcagctcatcatcggcgcgctcggcatcccggcgttccagcagctgtcgggcatgaactccatcctcttctactcgcccgtcatcttccagagccttggattcggctcctccgcggcgctctactcctccatcatcaccggctccatgctcgtcgtcggcgcgctcatctccatggttaccgtcgaccgccttggccgccgcttcctcttcatcgaggcgggcattcagatggtctcatccatggtcgtggtggctgtgatccttgccctcaagttcggaaaaggcgaggagctgagcaagggcgtgagcacggtgctggtggtggccatctgcctcttcgtggtggcctacggatggtcctgggggcccctcggatggctggtgccgagcgagctgttcccgctggagatgcggtcggcggggcagagcgtggtggtgtgcgtcaacctcttctggacggcttccgtagcgcagtgcttcctcgccgcgctgtgccacctccggtggggcgtcttcgtgctcttcgccgcgctcatcgtcgtcatgtccatcttcgtcatcctcctgctgccggagaccaagcaggtgcccatcgaggagatatggatgctctttgacaggcactggtactggaagcgcatcgtccgcagggacccaaaataccagggcaacctccaccagcagcaggagatgtccagaatatgaacatggttaattagcgatgtggtttaataagttttctatccctaaacatataggatatgatgattactactagattattaagacgaatgtggtgtgatccttgatgcaatccaaagagg

SEQ ID NO: 25396 - protein, 518 aa, Zea mays subsp. mays
  misc_feature (1)..(518): Ceres Seq. ID no. 12593648
MAGGFGSGGAAAGRAELYEGKITGYFILACIVGSFGGSLFGYDLGVSSGVTSMDDFLVKFFPDVYRRKQAHLHETDYCKYDNQVLTLFTSSLYFAGLVSTFGASYVTKRHGRRASIMVGAASFFLGGAINAAAMNIAMLIVGRVLLGVGIGFGNQAVPLYLSEIAPYRIRGAVNQLFQLTTCLGILVADVINYFTDRLHPWGWRLSLGLAMGPATAIFVGALFLPETPNSLVERGHLEEARRVLEKVRGTHKVDAEFEDLKEASQAARAVTGTFRNLLAVRNRPQLIIGALGIPAFQQLSGMNSILFYSPVIFQSLGFGSSAALYSSIITGSMLVVGALISMVTVDRLGRRFLFIEAGIQMVSSMVVVAVILALKFGKGEELSKGVSTVLVVAICLFVVAYGWSWGPLGWLVPSELFPLEMRSAGQSVVVCVNLFWTASVAQCFLAALCHLRWGVFVLFAALIVVMSIFVILLLPETKQVPIEEIWMLFDRHWYWKRIVRRDPKYQGNLHQQQEMSRI

SEQ ID NO: 25397 - protein, 466 aa, Zea mays subsp. mays
  misc_feature (1)..(466): Ceres Seq. ID no. 12593649
MDDFLVKFFPDVYRRKQAHLHETDYCKYDNQVLTLFTSSLYFAGLVSTFGASYVTKRHGRRASIMVGAASFFLGGAINAAAMNIAMLIVGRVLLGVGIGFGNQAVPLYLSEIAPYRIRGAVNQLFQLTTCLGILVADVINYFTDRLHPWGWRLSLGLAMGPATAIFVGALFLPETPNSLVERGHLEEARRVLEKVRGTHKVDAEFEDLKEASQAARAVTGTFRNLLAVRNRPQLIIGALGIPAFQQLSGMNSILFYSPVIFQSLGFGSSAALYSSIITGSMLVVGALISMVTVDRLGRRFLFIEAGIQMVSSMVVVAVILALKFGKGEELSKGVSTVLVVAICLFVVAYGWSWGPLGWLVPSELFPLEMRSAGQSVVVCVNLFWTASVAQCFLAALCHLRWGVFVLFAALIVVMSIFVILLLPETKQVPIEEIWMLFDRHWYWKRIVRRDPKYQGNLHQQQEMSRI

SEQ ID NO: 25398 - protein, 402 aa, Zea mays subsp. mays
  misc_feature (1)..(402): Ceres Seq. ID no. 12593650
MVGAASFFLGGAINAAAMNIAMLIVGRVLLGVGIGFGNQAVPLYLSEIAPYRIRGAVNQLFQLTTCLGILVADVINYFTDRLHPWGWRLSLGLAMGPATAIFVGALFLPETPNSLVERGHLEEARRVLEKVRGTHKVDAEFEDLKEASQAARAVTGTFRNLLAVRNRPQLIIGALGIPAFQQLSGMNSILFYSPVIFQSLGFGSSAALYSSIITGSMLVVGALISMVTVDRLGRRFLFIEAGIQMVSSMVVVAVILALKFGKGEELSKGVSTVLVVAICLFVVAYGWSWGPLGWLVPSELFPLEMRSAGQSVVVCVNLFWTASVAQCFLAALCHLRWGVFVLFAALIVVMSIFVILLLPETKQVPIEEIWMLFDRHWYWKRIVRRDPKYQGNLHQQQEMSRI

SEQ ID NO: 25399 - DNA, 1024 bp, Zea mays subsp. mays
  misc_feature (1)..(1024): Ceres Seq. ID no. 12593662
gccacaaccgtagcctgtagcttcatccgttgcgctgctcccggttccatcgcgcggtgcggaatttaacatggccgtgccggaggtggtggtcgacggcgtcgtcttcccgccggtggcccgcccgccgggctccgccggctcgcacttcctcggcggcgcaggcgtgcgaggcctcgagatcggaggcaacttcatcaagttcacggccatcggcgtgtacctggaggacgcggccgtgcccgcgctggccaagaagtggggcggcaagacggccgacgagctcgcctccgacgccgccttcttccgcgacgtcgtcacgggcgacttcgagaagttcacgagggtgacgatgatcctcccgctgacgggcgagcagtacgcggagaaagtgacggagaactgcgtggcgttctggaaggccgccggcctgtacacggacgccgagggcgtcgccgtggagaagttcagggaggtgttcaagccagagactttcgcgccgggcgcctccatcctcttcacgcactcgcccgccggagtcctcaccgtcgccttctccaaggactcgtcggtgccagcggccggcggcgtggcgatcgagaacaagcgcctctgcgaggccgtgctggagtccatcatcggggagcgcggcgtgtcgccggccgcgaagctgagcctcgccgcgagggtgtcggagctcctcgccaaggagaccgccgcgcccgccgacgcgccgcaggcggagcccgtctccatcaccgcctgaggcgaggagcgggcgggcgagcgaacgaaccgcgaggagaaagaaagcaaccagacggttgggcggcacggcgtctcacacctgccgcctgcgcttgcgtgctccggaccggagagatgccgcgcgggtgcagtgcagccgtcgcgtcatgtctgtccgcgctctggcgtcgtgttcctgcctttctggtcgcgtagttgtcttgtgttcgctgttggtcgttctgggtaacatttgaataaaacaagcggatttgtt

SEQ ID NO: 25400 - protein, 231 aa, Zea mays subsp. mays
  misc_feature (1)..(231): Ceres Seq. ID no. 12593663
MAVPEVVVDGVVFPPVARPPGSAGSHFLGGAGVRGLEIGGNFIKFTAIGVYLEDAAVPALAKKWGGKTADELASDAAFFRDVVTGDFEKFTRVTMILPLTGEQYAEKVTENCVAFWKAAGLYTDAEGVAVEKFREVFKPETFAPGASILFTHSPAGVLTVAFSKDSSVPAAGGVAIENKRLCEAVLESIIGERGVSPAAKLSLAARVSELLAKETAAPADAPQAEPVSITA

SEQ ID NO: 25401 - protein, 137 aa, Zea mays subsp. mays
  misc_feature (1)..(137): Ceres Seq. ID no. 12593664
MILPLTGEQYAEKVTENCVAFWKAAGLYTDAEGVAVEKFREVFKPETFAPGASILFTHSPAGVLTVAFSKDSSVPAAGGVAIENKRLCEAVLESIIGERGVSPAAKLSLAARVSELLAKETAAPADAPQAEPVSITA

SEQ ID NO: 25402 - DNA, 1319 bp, Zea mays subsp. mays
  misc_feature (1)..(1319): Ceres Seq. ID no. 12594090
atcaatcctccggacctccgtcctttataaaccgccggggagcgtggcggccattcgacgcaggcaccccagcagctcttgcggtcgtccctcagccgcgtcgcaccgcatcgcattctacgattcgaagctctctgctcgcaggggaccatggcgaagaactacccaaccgtgagcgccgagtacagcgaggccgtcgagaaggccaggcgcaagctccgcgccctcatcgccgagaagagctgcgcacccctcatgctccgcctcgcgtggcactccgcggggacgttcgacgtgtcgtcgaggaccggcggtcccttcggtactatgaagtgcccggcggaactggctcacggcgccaacgcggggctggacatcgcggtgcggctgctcgagcccatcaaggaggagttccccaccctctcctatgccgacttctaccagcttgccggagttgtggccgtcgaggtcaccggtgggcctgagatccccttccacccaggcagggaggacaagcctcagccgccacctgagggccgtcttcctgatgccaccaagggttctgaccacctgaggcaagtctttggcaagcagatgggtttgagtgatcaggacatcgttgccctctctggtggccacaccttgggaaggtgccacaaagagcggtctggttttgagggtgcctggactacgaaccctttggtctttgacaactcttacttcaaggaacttctgagtggtgacaaggagggccttcttcagctcccaagtgacaaagccctgctgagcgaccctgtcttccgccctcttgtggagaaatatgctgcagatgagaaggcattctttgatgactacaaagaggcccacctcaagctctccgaactggggtatgctgatgcttaaatggtccatatcctggagcgggacacaaactgctgcctgtatggactcgtgcgattcagggtgaaccatcagattgtctagtgtcttctctgtaataaatttatctgttcttggtactttgtctatggttgaatcggaacccattttccgtttgcctagattcttaatttctggtgctgtatccagctgaaactagtagatctatgatcttgtggctgcagcatgttcttgtcacttaccttttatctggtctccgttggttcggttcacaggttgtgtgctttaaaaggctgtgcttaagtcctgcaattcgagtccaccaaactgtagggtgcaagtcgagattttattagtgatgcaagttgctggtattggtgcattatcgggctaatacgcttgcgttgccttcggatttt

SEQ ID NO: 25403 - protein, 250 aa, Zea mays subsp. mays
  misc_feature (1)..(250): Ceres Seq. ID no. 12594091
MAKNYPTVSAEYSEAVEKARRKLRALIAEKSCAPLMLRLAWHSAGTFDVSSRTGGPFGTMKCPAELAHGANAGLDIAVRLLEPIKEEFPTLSYADFYQLAGVVAVEVTGGPEIPFHPGREDKPQPPPEGRLPDATKGSDHLRQVFGKQMGLSDQDIVALSGGHTLGRCHKERSGFEGAWTTNPLVFDNSYFKELLSGDKEGLLQLPSDKALLSDPVFRPLVEKYAADEKAFFDDYKEAHLKLSELGYADA

SEQ ID NO: 25404 - protein, 215 aa, Zea mays subsp. mays
  misc_feature (1)..(215): Ceres Seq. ID no. 12594092
MLRLAWHSAGTFDVSSRTGGPFGTMKCPAELAHGANAGLDIAVRLLEPIKEEFPTLSYADFYQLAGVVAVEVTGGPEIPFHPGREDKPQPPPEGRLPDATKGSDHLRQVFGKQMGLSDQDIVALSGGHTLGRCHKERSGFEGAWTTNPLVFDNSYFKELLSGDKEGLLQLPSDKALLSDPVFRPLVEKYAADEKAFFDDYKEAHLKLSELGYADA

SEQ ID NO: 25405 - protein, 191 aa, Zea mays subsp. mays
  misc_feature (1)..(191): Ceres Seq. ID no. 12594093
MKCPAELAHGANAGLDIAVRLLEPIKEEFPTLSYADFYQLAGVVAVEVTGGPEIPFHPGREDKPQPPPEGRLPDATKGSDHLRQVFGKQMGLSDQDIVALSGGHTLGRCHKERSGFEGAWTTNPLVFDNSYFKELLSGDKEGLLQLPSDKALLSDPVFRPLVEKYAADEKAFFDDYKEAHLKLSELGYADA

SEQ ID NO: 25406 - DNA, 1721 bp, Zea mays subsp. mays
  misc_feature (1)..(1721): Ceres Seq. ID no. 12594120
caccacaggtgcggcggcgcacactgctgcacactgcactccctccgtcccgcgtccccgttcggcgctctcggcacgaccgccggtagcccgggacgcacgtcgcacggccccatccctcctagcggccggtgacggcaccggcggccctttgctcggctgtgcccaagctgcgagggcgagatctacccccgcgtccgtgcatcttcgtcaggcccttctccggacgagcactcacaggatgtgttctgaagttcatgttgagggagatgcaagtgtcggacagaagggttgcaaggatataaggcgttacaaatgtgaattttgcacagttgtcaggtcaaagaaatgcctaattcaagctcacatggttgcacatcataaggatgaacttgataaatcagaaatatacaactcagatggggaaaagattgttcatgagcaggaacataggtgccaagagtgtggccgttgtttccagaaaccagctcatctgaagcagcacatgcaaagtcactcacatgagggcatagatagttaacagcgtgaagcattggatcccatttaaagaactccaaaatgcgacgaggtattttttattcttgcctgaactagtaacaggttgggatgacctcctgtgaagcttcaacaagattgcctcagtcacgctcactgagtagagactctttatttgcccactggaagactgccccttcagctataaaagaaaagatcacttgaaccgacacatgcttaagcatgagggcaaattgtttagttgcaccctggatggttgtgatatgaggttcagtatgaaggcagatatgcaacggcatgttaaggaaatccatgatagtaagaacccccatcaatttgtttgtaaggaggacggctgtaacaaggttttcaggtattcatcaaagctgaagaaacatgaggaatctcatgttaaattggactatgtggaggtagtgtgctgtgagccaggttgcatgaagatgttcagaaatgttgaatatctgagggctcataaccaatcttgccatcagtatgttcagtgtgagatatgtggagaaaagcacctgaagaagaacatcaagcggcatctgcaatcacatgacaaggtgccctctgatggaaggatgaaatgcacttttgatggttgtgaacacttcttttccaacaaatcaaatctgaccaagcatgtcaaggcatgccatgaccagctgaaacctttcaagtgcggaatcgttgggtgtggcaaggcgttcacctacaagcatgtcagggataaccatgagacatctggtgctcatgtatacatggaaggagactttgaagagttggatgagcagttgcgtgcccggccaagaggtggtcggaagaggaaagcattgacggtggaaacactgacacgcaagagggtgaccatctccggcgaggcttcatccttggatgatggagtggagtatcttcgctggttgctatctggtggggatgattcaattgattgtcagtagccggcgtctttttgctatcaccgctgctttgtacatgggttagattatgtaatgtaagttgtttggtagactacgatggtgttcatgacgcgtttgatatattgtcagcagtatggtagtgcagggctctcatagtaaagcttgccatttttgttgtatctttaacccacgtgggtccagatgatgtgtttattcctatgt

SEQ ID NO: 25407 - protein, 256 aa, Zea mays subsp. mays
  misc_feature (1)..(256): Ceres Seq. ID no. 12594121
MLKHEGKLFSCTLDGCDMRFSMKADMQRHVKEIHDSKNPHQFVCKEDGCNKVFRYSSKLKKHEESHVKLDYVEVVCCEPGCMKMFRNVEYLRAHNQSCHQYVQCEICGEKHLKKNIKRHLQSHDKVPSDGRMKCTFDGCEHFFSNKSNLTKHVKACHDQLKPFKCGIVGCGKAFTYKHVRDNHETSGAHVYMEGDFEELDEQLRARPRGGRKRKALTVETLTRKRVTISGEASSLDDGVEYLRWLLSGGDDSIDCQ

SEQ ID NO: 25408 - protein, 239 aa, Zea mays subsp. mays
  misc_feature (1)..(239): Ceres Seq. ID no. 12594122
MRFSMKADMQRHVKEIHDSKNPHQFVCKEDGCNKVFRYSSKLKKHEESHVKLDYVEVVCCEPGCMKMFRNVEYLRAHNQSCHQYVQCEICGEKHLKKNIKRHLQSHDKVPSDGRMKCTFDGCEHFFSNKSNLTKHVKACHDQLKPFKCGIVGCGKAFTYKHVRDNHETSGAHVYMEGDFEELDEQLRARPRGGRKRKALTVETLTRKRVTISGEASSLDDGVEYLRWLLSGGDDSIDCQ

SEQ ID NO: 25409 - protein, 235 aa, Zea mays subsp. mays
  misc_feature (1)..(235): Ceres Seq. ID no. 12594123
MKADMQRHVKEIHDSKNPHQFVCKEDGCNKVFRYSSKLKKHEESHVKLDYVEVVCCEPGCMKMFRNVEYLRAHNQSCHQYVQCEICGEKHLKKNIKRHLQSHDKVPSDGRMKCTFDGCEHFFSNKSNLTKHVKACHDQLKPFKCGIVGCGKAFTYKHVRDNHETSGAHVYMEGDFEELDEQLRARPRGGRKRKALTVETLTRKRVTISGEASSLDDGVEYLRWLLSGGDDSIDCQ

SEQ ID NO: 25410 - DNA, 609 bp, Zea mays subsp. mays
  misc_feature (1)..(609): Ceres Seq. ID no. 12594286
tgaatatcgatggcaatgtttgtactgtcatggtgactacattagttcttgagggctggcaacgtaagttggatccagattataatgttatgaagactctgcaaactttactttttaaggaagactgggcgaagtctcttcaatacactatccaagggctcatggcgccttagggtcgtccgcaatcctttctaaagttttgatctggtttgtgttcgaccggaggatcctcttctctcaccatcacgattctggcttcttttctacttaatttcacgtttcgtttctctgtacctgtcctggcgttgtgctgctaaagcagccttgatgataaagtaataactgcagtaaaaattttcagaagctaccagagtactatgctgctcagctctgggctgtcttcttatatgttcttgaagggccaaagaattaggtccttttcccccctcctaccaacacttttgacaatagctnttagatgatgtagcaaaaggcgttctgttctgatgatctttttgtaactggagaggttgtatccgtggactggagagttgcttatgtacagacagagatactgttaatctcgaaggaatccacttgtcaactgac

SEQ ID NO: 25411 - protein, 56 aa, Zea mays subsp. mays
  misc_feature (1)..(56): Ceres Seq. ID no. 12594287
NIDGNVCTVMVTTLVLEGWQRKLDPDYNVMKTLQTLLFKEDWAKSLQYTIQGLMAP

SEQ ID NO: 25412 - protein, 47 aa, Zea mays subsp. mays
  misc_feature (1)..(47): Ceres Seq. ID no. 12594288
MVTTLVLEGWQRKLDPDYNVMKTLQTLLFKEDWAKSLQYTIQGLMAP

SEQ ID NO: 25413 - protein, 34 aa, Zea mays subsp. mays
  misc_feature (1)..(34): Ceres Seq. ID no. 12594289
  misc_feature (33)..(33): Xaa is any aa, unknown or other
MLLSSGLSSYMFLKGQRIRSFSPLLPTLLTIAXR

SEQ ID NO: 25414 - DNA, 2015 bp, Zea mays subsp. mays
  misc_feature (1)..(2015): Ceres Seq. ID no. 12594596
aacaagtcatatgcacaaaatctcatttgagcgtgcaagctccttcgcctcgaaccctctcgcgcttggctttctttcactctccagggctccactcccatctcgccgccgcagccatggcgatcacagcgccaactcccgacatcctcggcgagcgccaatccggccaggacgtccgcacgcagaacgtgatggcttgcggggcggtggccaacatcgtcaaatcctcgctcggccccgtcggtctcgacaagatgctagtggacgatattggtgatgttacaatcacaaatgatggagcaaccatacttaagatgttggaagttgagcatccagccgccaaggttcttgttgagttggctgagctccaagaccgtgaggtaggagatggaactacttccgttgtcatcatagcggcagagttactcaagagaggcaatgatcttgtgaagaataagatccatccaacctctataatcagtggctacaggcttgctatgcgtgaagcctgcaaatatgttgaggaaaagttagcagtcaaggttgacaaacttggaaaagaatcccttatcaactctgcaaaaactagcatgtcttcgaaattgattaatagtgacagtgatttctttgcaactttggttgttgaggcagttcaagccgtgaagactacaaatgccaagggagacgtgaaatatccaatcaagagcatcaatattttgaaagctcatggtaaaagcgccaaggatagttatctgttgaatggctatgcactaaacacaggccgtgcagctcaaggaatgcctacgagagtaactcctgctagaattgcttgtcttgattttaaccttcagaagacaaaaatgcaacttggtgtccaagttcttgtaactgatccaagggaacttgagaagattcgtcagagagaatctgacataacaaaggagcgaattgagaaaattctcaaggctggagctaatgttgtgttgaccaccaagggaattgacgatatgtccttgaagtactttgttgaggctggtgcgattgcagtaaggcgtgtgcgcaaggaagatctgcgacatgttgccaaagccactggtgcaactatggtgtctacttttgcggacatggaaggtgaagaaacattcgattcatcattccttggccatgctgatgaagttgtggaggaaagaattgctgacgatgatgttattctggtgaaaggcacaaagaacaccagcgcggtctctataatacttaggggcgcaaatgactacatgcttgatgagattgaacggtccttgcatgatgccctgtgcattgtgaagagaaccctggaatcaaatatggttgttgctgggggtggtgcagttgaagctgcgttgtcagtttatctggagaaccttgcaacaaccctgggttctcgggaacaattggcaattgctgaatttgctgagtctttgttaatcataccaaaggtactatctgttaatgctgcaaaagatgcaactgagcttgtagcaaagcttagggcatatcatcatactgctcaaacaaaggccgacaagcaacattattcaagtatgggccttgacctctctaagggtatcattcgcaacaaccttgagtatggcgtgatagagccatcgatgagcaaagtaaagatcattcagtttgccacggaggctgccattactatcctgaggattgacgacatgatcaagcttaccaaggaagaagagggtaacgaagagtaagcagcccaccagtagtgggctagtggactcccatgggatggttgccatagcatgtagcacttgttttttcacttatcgtttacttttgcttgctgtgagcattcgtttgtaggaaaagtgagaacggatgtgtatcaatccgtgctgggtgacgatgactcacggatggatcaaatctttgcgtatattggggccaaaacagttctatctgacggatttaagttggaaaatgaaatggtttcgtgtagtgattatttgatt

SEQ ID NO: 25415 - protein, 583 aa, Zea mays subsp. mays
  misc_feature (1)..(583): Ceres Seq. ID no. 12594597
QVICTKSHLSVQAPSPRTLSRLAFFHSPGLHSHLAAAAMAITAPTPDILGERQSGQDVRTQNVMACGAVANIVKSSLGPVGLDKMLVDDIGDVTITNDGATILKMLEVEHPAAKVLVELAELQDREVGDGTTSVVIIAAELLKRGNDLVKNKIHPTSIISGYRLAMREACKYVEEKLAVKVDKLGKESLINSAKTSMSSKLINSDSDFFATLVVEAVQAVKTTNAKGDVKYPIKSINILKAHGKSAKDSYLLNGYALNTGRAAQGMPTRVTPARIACLDFNLQKTKMQLGVQVLVTDPRELEKIRQRESDITKERIEKILKAGANVVLTTKGIDDMSLKYFVEAGAIAVRRVRKEDLRHVAKATGATMVSTFADMEGEETFDSSFLGHADEVVEERIADDDVILVKGTKNTSAVSIILRGANDYMLDEIERSLHDALCIVKRTLESNMVVAGGGAVEAALSVYLENLATTLGSREQLAIAEFAESLLIIPKVLSVNAAKDATELVAKLRAYHHTAQTKADKQHYSSMGLDLSKGIIRNNLEYGVIEPSMSKVKIIQFATEAAITILRIDDMIKLTKEEEGNEE

SEQ ID NO: 25416 - protein, 545 aa, Zea mays subsp. mays
  misc_feature (1)..(545): Ceres Seq. ID no. 12594598
MAITAPTPDILGERQSGQDVRTQNVMACGAVANIVKSSLGPVGLDKMLVDDIGDVTITNDGATILKMLEVEHPAAKVLVELAELQDREVGDGTTSVVIIAAELLKRGNDLVKNKIHPTSIISGYRLAMREACKYVEEKLAVKVDKLGKESLINSAKTSMSSKLINSDSDFFATLVVEAVQAVKTTNAKGDVKYPIKSINILKAHGKSAKDSYLLNGYALNTGRAAQGMPTRVTPARIACLDFNLQKTKMQLGVQVLVTDPRELEKIRQRESDITKERIEKILKAGANVVLTTKGIDDMSLKYFVEAGAIAVRRVRKEDLRHVAKATGATMVSTFADMEGEETFDSSFLGHADEVVEERIADDDVILVKGTKNTSAVSIILRGANDYMLDEIERSLHDALCIVKRTLESNMVVAGGGAVEAALSVYLENLATTLGSREQLAIAEFAESLLIIPKVLSVNAAKDATELVAKLRAYHHTAQTKADKQHYSSMGLDLSKGIIRNNLEYGVIEPSMSKVKIIQFATEAAITILRIDDMIKLTKEEEGNEE

SEQ ID NO: 25417 - protein, 520 aa, Zea mays subsp. mays
  misc_feature (1)..(520): Ceres Seq. ID no. 12594599
MACGAVANIVKSSLGPVGLDKMLVDDIGDVTITNDGATILKMLEVEHPAAKVLVELAELQDREVGDGTTSVVIIAAELLKRGNDLVKNKIHPTSIISGYRLAMREACKYVEEKLAVKVDKLGKESLINSAKTSMSSKLINSDSDFFATLVVEAVQAVKTTNAKGDVKYPIKSINILKAHGKSAKDSYLLNGYALNTGRAAQGMPTRVTPARIACLDFNLQKTKMQLGVQVLVTDPRELEKIRQRESDITKERIEKILKAGANVVLTTKGIDDMSLKYFVEAGAIAVRRVRKEDLRHVAKATGATMVSTFADMEGEETFDSSFLGHADEVVEERIADDDVILVKGTKNTSAVSIILRGANDYMLDEIERSLHDALCIVKRTLESNMVVAGGGAVEAALSVYLENLATTLGSREQLAIAEFAESLLIIPKVLSVNAAKDATELVAKLRAYHHTAQTKADKQHYSSMGLDLSKGIIRNNLEYGVIEPSMSKVKIIQFATEAAITILRIDDMIKLTKEEEGNEE

SEQ ID NO: 25418 - DNA, 982 bp, Zea mays subsp. mays
  misc_feature (1)..(982): Ceres Seq. ID no. 12594984
aaaggaaactcactcccactttactcctatccactgcggcctggacgcgtgcgagaggcttgaccaagcagcagcagcagcagcagcgatggcgcctctgaagctgtacgggatgccgctgtcccccaacgtggtgcgcgtggccaccgtgctcaacgagaagggcctcgacttcgagatcgtccccgtcgacctcaccaccggcgcccacaagcagcccgacttcctcaccctcaaccctttcggccagatcccggctctcgtcgacggagacgaagtcctcttcgagtcccgcgcgatcaaccggtacatcgccagcaagtacgcgtcagggcacggacctgctccccgcgacggcgtcggcggcgaagctggaggtgtggctggaggtggagtcgcaccacttctacccgaacgcatcgccgctggtgttccagctgctcgtgaggccgctcctgggcggcgcccccgacgcggcggtggtggagaagcacgcggagcagctcgccaaggtgctcgacgtgtacgaggcgcacctggcccgcaacaagtaccctcgccggggacaagttcacgctcgccgacgccaaccacgcgtcctacctgctctacctcagcaagacccccaaggccgggctcgtcgccgcccgcccccacgtcaaggcctggtgggaggccatcgccgcccgccccgcgttccagaagaccgtcgccgccatccccttgcccccgccgccctcctcctcggcttgacctcgccttgcgctgcctgggtcgcggatgcgtcggagccccgagtcgaataaaagaggccgcatcctgtcttgcatttgctgctgcgccatgtgctataacagcctgtgtaataaacactgttgctttcgtgtgtgttcattgccttttggttggttggtccttgcatatcctactagtgctgatctttttgtgaagcttggattggatggacgcgttttcttcgccg

SEQ ID NO: 25419 - protein, 315 aa, Zea mays subsp. mays
  misc_feature (1)..(315): Ceres Seq. ID no. 12594985
KETHSHFTPIHCGLDACERLDQAAAAAAAMAPLKLYGMPLSPNVVRVATVLNEKGLDFEIVPVDLTTGAHKQPDFLTLNPFGQIPALVDGDEVLFESRAINRYIASKYASGHGPAPRDGVGGEAGGVAGGGVAPLLPERIAAGVPAAREAAPGRRPRRGGGGEARGAARQGARRVRGAPGPQQVPSPGTSSRSPTPTTRPTCSTSARPPRPGSSPPAPTSRPGGRPSPPAPRSRRPSPPSPCPRRPPPRLDLALRCLGRGCVGAPSRIKEAASCLAFAAAPCAITACVINTVAFVCVHCLLVGWSLHILLVLIFL

SEQ ID NO: 25420 - protein, 286 aa, Zea mays subsp. mays
  misc_feature (1)..(286): Ceres Seq. ID no. 12594986
MAPLKLYGMPLSPNVVRVATVLNEKGLDFEIVPVDLTTGAHKQPDFLTLNPFGQIPALVDGDEVLFESRAINRYIASKYASGHGPAPRDGVGGEAGGVAGGGVAPLLPERIAAGVPAAREAAPGRRPRRGGGGEARGAARQGARRVRGAPGPQQVPSPGTSSRSPTPTTRPTCSTSARPPRPGSSPPAPTSRPGGRPSPPAPRSRRPSPPSPCPRRPPPRLDLALRCLGRGCVGAPSRIKEAASCLAFAAAPCAITACVINTVAFVCVHCLLVGWSLHILLVLIFL

SEQ ID NO: 25421 - protein, 278 aa, Zea mays subsp. mays
  misc_feature (1)..(278): Ceres Seq. ID no. 12594987
MPLSPNVVRVATVLNEKGLDFEIVPVDLTTGAHKQPDFLTLNPFGQIPALVDGDEVLFESRAINRYIASKYASGHGPAPRDGVGGEAGGVAGGGVAPLLPERIAAGVPAAREAAPGRRPRRGGGGEARGAARQGARRVRGAPGPQQVPSPGTSSRSPTPTTRPTCSTSARPPRPGSSPPAPTSRPGGRPSPPAPRSRRPSPPSPCPRRPPPRLDLALRCLGRGCVGAPSRIKEAASCLAFAAAPCAITACVINTVAFVCVHCLLVGWSLHILLVLIFL

SEQ ID NO: 25422 - DNA, 1742 bp, Zea mays subsp. mays
  misc_feature (1)..(1742): Ceres Seq. ID no. 12595019
ctagaacatcctaatcgaaaagcaatgggaagcaaatggccaaccaatagcaaaaaggcagccgtgtatcgatcgccttatccgggtcctgtggcactggcacaccgcgcgtccggatttggctgagtagctgactagctgagcgagcaatccatcccttcgcccgccgcaccatggaagccctcgcctcggcgcctcgggcgctcttcccgcgcgcgtgcccagtggcgacgccggccggcccagcccggcgccgctccgccgctcctcacatctgcagggcctccgcggcggccggggaggagacgacgccgccgccgccgccggcggccgctcccaagaagatcctcaagaagaagcccgtctactcgatgaagaaagggcagattgtgcgcgtggacaaggagaagtacctgaacagcatcaattatctgtcagtgggacacccgcccttctacaaggggctggactacatataccaagaccgcggcgaggtcttggatatcaggaacttcgaaacaggagaatacgccctgatcgcttgggtggggatcccgacgccaccggcatggctaccaacctacatgctcattaagtcggacaagctcgactacgagaggatatatggccggccggcggcctcgcagggcaccgtagcgccgccgccgaattcatgcttcatttcgcatcaggagtcggccaagcaggacacacctcttgttgttgacttgttgtaggtatatacgtacatgccagtattgccagaacagtcgacagaggcaatctgagacctcagctgctggaataatcaggaagtagatcgagagcgacgtacgatgacgagattcataattgctgctgcacatcacctgaggccggggctgaagcacggcatgttctcccgagaggaagaggagaccgtcatgagcctccacgccaagctcggcaacaagtggtcccagatcgcacggcatctgccgggacggacggacaacgaggtgaagaactactggaactcctacctcaagaagcgtgtcgagggcggcgcgcaggcgaagggctcggcggacccggcgacacccgcccgctccgacgacgtgcacgggagcccggaccccagcgagaacggccagaggtccgtcagccggccggcgaactctggctcgtccgagccggcgggggagtcgtcctcggcggacgactctagctgcctcaccgtcaccgagcctgcgcccgcggtgcggaccgcacgcgcccgtgctccccaaggtcatgttcgcggactggctggacatggactacggaaccagcctgctggcgctgggtccggacgccggtttcttcgacgtggccggccgcagcccgggccagggcctgagccaccaggggtctgcgcaggttgacgggccgtgcggcgtcgtggattccctgcacggcctcggcgtcggcgtcggcgtcggcggcatgtgctgggagttcgacggcgcggcggcggagcagctggacgtgcagggaggagagttctgcgatttgctctccatgagcgagttcctcgggatcaactaggcgtcgggccgttctcttcttcccaacgattcatcttgaagcatccttgtcaaatctgtttcttccgtaggcgagagtgtaaaaaactgtgtgttataccaatgtgcagttactaaagtgtatagtatatgcagaggagctgagtaaagatgtgtgaggattgtcctttccggtcc

SEQ ID NO: 25423 - protein, 188 aa, Zea mays subsp. mays
  misc_feature (1)..(188): Ceres Seq. ID no. 12595020
MTRFIIAAAHHLRPGLKHGMFSREEEETVMSLHAKLGNKWSQIARHLPGRTDNEVKNYWNSYLKKRVEGGAQAKGSADPATPARSDDVHGSPDPSENGQRSVSRPANSGSSEPAGESSSADDSSCLTVTEPAPAVRTARARAPQGHVRGLAGHGLRNQPAGAGSGRRFLRRGRPQPGPGPEPPGVCAG

SEQ ID NO: 25424 - protein, 187 aa, Zea mays subsp. mays
  misc_feature (1)..(187): Ceres Seq. ID no. 12595021
MEALASAPRALFPRACPVATPAGPARRRSAAPHICRASAAAGEETTPPPPPAAAPKKILKKKPVYSMKKGQIVRVDKEKYLNSINYLSVGHPPFYKGLDYIYQDRGEVLDIRNFETGEYALIAWVGIPTPPAWLPTYMLIKSDKLDYERIYGRPAASQGTVAPPPNSCFISHQESAKQDTPLVVDLL

SEQ ID NO: 25425 - protein, 169 aa, Zea mays subsp. mays
  misc_feature (1)..(169): Ceres Seq. ID no. 12595022
MFSREEEETVMSLHAKLGNKWSQIARHLPGRTDNEVKNYWNSYLKKRVEGGAQAKGSADPATPARSDDVHGSPDPSENGQRSVSRPANSGSSEPAGESSSADDSSCLTVTEPAPAVRTARARAPQGHVRGLAGHGLRNQPAGAGSGRRFLRRGRPQPGPGPEPPGVCAG

SEQ ID NO: 25426 - DNA, 1648 bp, Zea mays subsp. mays
  misc_feature (1)..(1648): Ceres Seq. ID no. 12595157
acaaagagcgagcgagagagagagagagagagagcagctctcaaggtcatggtcttatggaggagcatggtggtgctacctagcaagagctccccactataaagcgcccccacacaccataccacagctcagagcttcttttcatcatcttgtagaaaagaaagagtgagagtgagattggcaagggtatagggttcttggtcgatcaaatatctttcccctcttggattctcctcttcctgcttcgttctcgccagatcgatctcactacgtgcctgcgtagctagccactctgtatgcaccatcaccaccaggaccaggccatgggcgacgcgctgtgggacctgctcggggaggagatggcagcggcgggcggggagcacgggctgcccccggggtttcggttccaccccaccgacgaggagctggtcaccttctacctcgccgccaaggtgttcaacggcgcctgctgtggcatcgacatcgccgaggtggacctcaaccggtgcgagccgtgggagctccccgacgcggcgcgtatgggggagcgcgagtggtacttcttcagcctccgcgaccgcaagtaccccacgggcctccgtaccaaccgcgccaccggcgccgggtactggaaggccaccgggaaggaccgcgaggtgctcaacgccgccaccggcgcgctcctcggcatgaagaagacgctcgtcttctacaagggccgggcgccgcgcggcgagaagaccaagtgggtcctgcacgagtatcgcctcgacggcgacttcgccgccgctcgccgcccctgcaaggaggaatgggtcatctgcaggatactgcacaaggcaggcgaccagtatagcaagctgatgatggtgaagagcccctactacctgcccatggcgatggacccttccagcttctgcttccaggaggacccaaccgggcatcccctcccgaaccctagtggctgcacccccttccaccacggncacccccaccacagcatgcagccgcctccattgccgccgagcaaccatgctggcaaggccgtcttcacgggagcagcagcctcctgctgcatgcaacaagagccggcagacggcagcaacagcgccgtgctgcccatgccgccgttccctcccttcaccaccatcgtcgccggcaagccggcggtcccggcgccgccgccccaggttgtcaacgccggtccacaggagccaccgccacctacctggctggaggcctacctgcagcacactggtgggatcctttatgagatgggtgtgggtccaactgcagcgcccaggggcgcgtgatccggaccgtcggttccttagggttacccccctacgtacgtactgaaacactgatgatccatcgatttacctggtctgtaatgtgcggtgaagcttagtatttccaagtgacatatttcgacaagcacttgtagttattaaaaaagagttatcttgtattcggtggcatcattagtcgtcgttgttatgaaatcatgtgtgcttataacatgcatgaatgcatgcatttggatcatcgatcagagctgtcctgagcttgtacgtgctacgtactgtgctcatgcatccatccacatgcaaagtggtgcttgctaaaatgtactatccaaatgtcc

SEQ ID NO: 25427 - protein, 338 aa, Zea mays subsp. mays
  misc_feature (1)..(338): Ceres Seq. ID no. 12595158
  misc_feature (230)..(230): Xaa is any aa, unknown or other
MHHHHQDQAMGDALWDLLGEEMAAAGGEHGLPPGFRFHPTDEELVTFYLAAKVFNGACCGIDIAEVDLNRCEPWELPDAARMGEREWYFFSLRDRKYPTGLRTNRATGAGYWKATGKDREVLNAATGALLGMKKTLVFYKGRAPRGEKTKWVLHEYRLDGDFAAARRPCKEEWVICRILHKAGDQYSKLMMVKSPYYLPMAMDPSSFCFQEDPTGHPLPNPSGCTPFHHXHPHHSMQPPPLPPSNHAGKAVFTGAAASCCMQQEPADGSNSAVLPMPPFPPFTTIVAGKPAVPAPPPQVVNAGPQEPPPPTWLEAYLQHTGGILYEMGVGPTAAPRGA

SEQ ID NO: 25428 - protein, 329 aa, Zea mays subsp. mays
  misc_feature (1)..(329): Ceres Seq. ID no. 12595159
  misc_feature (221)..(221): Xaa is any aa, unknown or other
MGDALWDLLGEEMAAAGGEHGLPPGFRFHPTDEELVTFYLAAKVFNGACCGIDIAEVDLNRCEPWELPDAARMGEREWYFFSLRDRKYPTGLRTNRATGAGYWKATGKDREVLNAATGALLGMKKTLVFYKGRAPRGEKTKWVLHEYRLDGDFAAARRPCKEEWVICRILHKAGDQYSKLMMVKSPYYLPMAMDPSSFCFQEDPTGHPLPNPSGCTPFHHXHPHHSMQPPPLPPSNHAGKAVFTGAAASCCMQQEPADGSNSAVLPMPPFPPFTTIVAGKPAVPAPPPQVVNAGPQEPPPPTWLEAYLQHTGGILYEMGVGPTAAPRGA

SEQ ID NO: 25429 - protein, 317 aa, Zea mays subsp. mays
  misc_feature (1)..(317): Ceres Seq. ID no. 12595160
  misc_feature (209)..(209): Xaa is any aa, unknown or other
MAAAGGEHGLPPGFRFHPTDEELVTFYLAAKVFNGACCGIDIAEVDLNRCEPWELPDAARMGEREWYFFSLRDRKYPTGLRTNRATGAGYWKATGKDREVLNAATGALLGMKKTLVFYKGRAPRGEKTKWVLHEYRLDGDFAAARRPCKEEWVICRILHKAGDQYSKLMMVKSPYYLPMAMDPSSFCFQEDPTGHPLPNPSGCTPFHHXHPHHSMQPPPLPPSNHAGKAVFTGAAASCCMQQEPADGSNSAVLPMPPFPPFTTIVAGKPAVPAPPPQVVNAGPQEPPPPTWLEAYLQHTGGILYEMGVGPTAAPRGA

SEQ ID NO: 25430 - DNA, 719 bp, Zea mays subsp. mays
  misc_feature (1)..(719): Ceres Seq. ID no. 12595462
ctcatcgcagaaattctccgcaacttcacagcgtatcatcgttttccatcgctcctactcctatcatccagaaaatctgagcggtattgatggcgcccaaggcggagaagaagccggcggcgaagaaggtggcggaggaggagccctcggagaaggcggctccggcggagaaggcccccgcggggaagaaggccaaggcggagaagcggctacctgcgggcaagtccgccggcaaggagggcggcgacaagaaggggaggaagaaggcgaagaagagcgtggagacctacaagatctacatcttcaaggtcctgaagcaggtgcaccccgacatcggcatctcctccaaggccatgtccatcatgaactccttcatcaacgacatcttcgagaagctcgccgcggaggccgccaagctcgcccggtacaacaagaagcccaccatcacctnccgcgagatccagacctccgtccgcctcgtcctccccggcgagctcgccaagcacgccgtctcggagggtaccaaggccgtcaccaagttcacctcgtcttagccgccttgtagtaggcgtcgttgttgtctgcttctcaagcaagcactgtgatgtgccgcttctcatggtagtagtggtggttggctggtgtgtgtaagtggtgcagtggcttttgcctgtgttatgaatttagtcatggtggtaatgcattgctatggttatttg

SEQ ID NO: 25431 - protein, 187 aa, Zea mays subsp. mays
  misc_feature (1)..(187): Ceres Seq. ID no. 12595463
  misc_feature (150)..(150): Xaa is any aa, unknown or other
SSQKFSATSQRIIVFHRSYSYHPENLSGIDGAQGGEEAGGEEGGGGGALGEGGSGGEGPRGEEGQGGEAATCGQVRRQGGRRQEGEEEGEEERGDLQDLHLQGPEAGAPRHRHLLQGHVHHELLHQRHLREARRGGRQARPVQQEAHHHXPRDPDLRPPRPPRRARQARRLGGYQGRHQVHLVLAAL

SEQ ID NO: 25432 - protein, 154 aa, Zea mays subsp. mays
  misc_feature (1)..(154): Ceres Seq. ID no. 12595464
  misc_feature (121)..(121): Xaa is any aa, unknown or other
MAPKAEKKPAAKKVAEEEPSEKAAPAEKAPAGKKAKAEKRLPAGKSAGKEGGDKKGRKKAKKSVETYKIYIFKVLKQVHPDIGISSKAMSIMNSFINDIFEKLAAEAAKLARYNKKPTITXREIQTSVRLVLPGELAKHAVSEGTKAVTKFTSS

SEQ ID NO: 25433 - DNA, 882 bp, Zea mays subsp. mays
  misc_feature (1)..(882): Ceres Seq. ID no. 12595582
gaatctatcgcactcgtagtcgtagctcaagcatcagcggcaggagctctgggcagcgtgcgcacgtggggtacctagctcgctctgctagcctaccatggctgatcaccaccggggcgcgacgggaggtggcgggggctacggcgacctccagcgcgggggcggcatgcacggcgaggcgcagcagcagcagaagcagggcgccatgatgacggcgctcaaggccgcgacggccgcgaccttcggcgggtcgatgctggtgctgtccgggctgatcctggccggcaccgtgatcgcgctcacggtggccacccccgtgctggtgatcttcagcccggtgctggtgccagccgccatcgcgctggcgctcatggcggccgggttcgtcacctccggcggcctcggcgtcgctgcgctgtccgtgttctcctggatgtacaagtacctgacgggcaagcacccgccgggcgccgaccagctggaccacgccaaggcgaggctggcgtccaaggcccgcgacatcaaggatgcagcacagcaccgcatcgaccaggcgcaggggtcttgagagaagaaccacactcgagcggaccgcgcgcgcgtcctccttgaaccactgccggcgcggcggcatatggcccttaaaggcggtggctgctgctacgtacgctgccgtagagtctcggtcgccgcgatagctctagctagtcgtttatgtgttgtgctttgtgtgtgcatgcatgtgtctgggggcatgcagtgcagtgcagtactatatgctgtatgcgtctctctttgatcggagaggcggatgtacagcatgctcgatatgtctagtttggatgtcatgtttatgatgaggaataaaatgcaggtcaggtg

SEQ ID NO: 25434 - protein, 156 aa, Zea mays subsp. mays
  misc_feature (1)..(156): Ceres Seq. ID no. 12595583
MADHHRGATGGGGGYGDLQRGGGMHGEAQQQQKQGAMMTALKAATAATFGGSMLVLSGLILAGTVIALTVATPVLVIFSPVLVPAAIALALMAAGFVTSGGLGVAALSVFSWMYKYLTGKHPPGADQLDHAKARLASKARDIKDAAQHRIDQAQGS

SEQ ID NO: 25435 - protein, 133 aa, Zea mays subsp. mays
  misc_feature (1)..(133): Ceres Seq. ID no. 12595584
MHGEAQQQQKQGAMMTALKAATAATFGGSMLVLSGLILAGTVIALTVATPVLVIFSPVLVPAAIALALMAAGFVTSGGLGVAALSVFSWMYKYLTGKHPPGADQLDHAKARLASKARDIKDAAQHRIDQAQGS

SEQ ID NO: 25436 - protein, 120 aa, Zea mays subsp. mays
  misc_feature (1)..(120): Ceres Seq. ID no. 12595585
MMTALKAATAATFGGSMLVLSGLILAGTVIALTVATPVLVIFSPVLVPAAIALALMAAGFVTSGGLGVAALSVFSWMYKYLTGKHPPGADQLDHAKARLASKARDIKDAAQHRIDQAQGS

SEQ ID NO: 25437 - DNA, 449 bp, Zea mays subsp. mays
  misc_feature (1)..(449): Ceres Seq. ID no. 12595631
aaaaagcggcgtgatgcagttcctccgaggcagcggcggcggggcgggggcggtgggttcccgggggtggcgtgggaggtgttgcggcggcacttctctaagaagcggtccgttgcacgtgaggcggatcaaccccaaggtgcccaaggaggaggccgtcgccatttccggccgactcctccagatcctctccgaccatgggcccctcaccgtcggcaacacctggaaccacgccaaggatgctggcatcgctggtctgaacagcaagacgcacatgaagatcctgctgaaatggatnacggggaaaatgtcgtnaagctgaccctgcgtgcacgtgggcaacgcgaanaagttcctctactccccgtccactgaaagcagcagcagcgccggcgcatcaccgtcatccacatcggcctcgcagtgacggtcaatcgccgttaagcctt

SEQ ID NO: 25438 - protein, 124 aa, Zea mays subsp. mays
  misc_feature (1)..(124): Ceres Seq. ID no. 12595632
  misc_feature (100)..(100): Xaa is any aa, unknown or other
  misc_feature (105)..(105): Xaa is any aa, unknown or other
  misc_feature (117)..(117): Xaa is any aa, unknown or other
KKRRDAVPPRQRRRGGGGGFPGVAWEVLRRHFSKKRSVAREADQPQGAQGGGRRHFRPTPPDPLRPWAPHRRQHLEPRQGCWHRWSEQQDAHEDPAEMDXGENVXKLTLRARGQREXVPLLPVH

SEQ ID NO: 25439 - protein, 106 aa, Zea mays subsp. mays
  misc_feature (1)..(106): Ceres Seq. ID no. 12595633
  misc_feature (99)..(99): Xaa is any aa, unknown or other
  misc_feature (105)..(105): Xaa is any aa, unknown or other
KSGVMQFLRGSGGGAGAVGSRGWRGRCCGGTSLRSGPLHVRRINPKVPKEEAVAISGRLLQILSDHGPLTVGNTWNHAKDAGIAGLNSKTHMKILLKWXTGKMSXS

SEQ ID NO: 25440 - protein, 102 aa, Zea mays subsp. mays
  misc_feature (1)..(102): Ceres Seq. ID no. 12595634
  misc_feature (95)..(95): Xaa is any aa, unknown or other
  misc_feature (101)..(101): Xaa is any aa, unknown or other
MQFLRGSGGGAGAVGSRGWRGRCCGGTSLRSGPLHVRRINPKVPKEEAVAISGRLLQILSDHGPLTVGNTWNHAKDAGIAGLNSKTHMKILLKWXTGKMSXS

SEQ ID NO: 25441 - DNA, 1015 bp, Zea mays subsp. mays
  misc_feature (1)..(1015): Ceres Seq. ID no. 12595679
agcttcgtcatttccggcgccctcctcctttcctttatctctctccccacgcccccacgtttcgccccccatttcgaagcccaccgaattccctgcgattcctctcccctcgcctcctcgtctccccctaggggatcgtcggagaggaatcgcaaagagggccgtctcatccgagttaaggaagccatggagcacaaggaggctgggtgccaggcccccgagggacccatcctctgcatcaataactgtggcttcttcggcagcgcggcgaccatgaacatgtgctccaagtgccacaaggagatgataacgaagcaggatcaggccaagctggctgcctcctctatcgacagcatcgtgaacggcagcgacgccgtcatggagccggttgttgctggcagcaacacgggtagtagctgttgcccaagttgagttgcaaacaatgaacgtgcagcagcccgctggatgttgccggacccagccgagggggtggcggcgatctccaaaggggggaaggtagggccgaaccggtgcagcgcctgcaggaagagggttggacttacgggattcaactgccggtgtgggaacttgtactgcgcactccaccgctactccgacaagcacgactgcaagttcgactaccggactgctgccagggacgccattgccaaggctaatccggtggtgaaggcagacaagctcgacaagatctagggggggttccctacggttgggtatcaggaagattgtaaaccgcggtaactcgtcatgcggaactgctgccttgccccccgcgcctttctcttccatgtttgctgctacaatcttgttgttgggcattgcagtgcacggtgcacacttgtgtagcccgcctcgagaattcctgcctctgcatctggtcagttctaaaatgatttgcatgttggctatgttgtgtaagctctatttatggtggtctcgctgagacgggtatttggcttcgcagttatctagctatgtgatgtactgttgtctt

SEQ ID NO: 25442 - protein, 143 aa, Zea mays subsp. mays
  misc_feature (1)..(143): Ceres Seq. ID no. 12595680
SFVISGALLLSFISLPTPPRFAPHFEAHRIPCDSSPLASSSPPRGSSERNRKEGRLIRVKEAMEHKEAGCQAPEGPILCINNCGFFGSAATMNMCSKCHKEMITKQDQAKLAASSIDSIVNGSDAVMEPVVAGSNTGSSCCPS

SEQ ID NO: 25443 - protein, 91 aa, Zea mays subsp. mays
  misc_feature (1)..(91): Ceres Seq. ID no. 12595681
ASSFPAPSSFPLSLSPRPHVSPPISKPTEFPAIPLPSPPRLPLGDRRRGIAKRAVSSELRKPWSTRRLGARPPRDPSSASITVASSAARRP

SEQ ID NO: 25444 - protein, 82 aa, Zea mays subsp. mays
  misc_feature (1)..(82): Ceres Seq. ID no. 12595682
MLPDPAEGVAAISKGGKVGPNRCSACRKRVGLTGFNCRCGNLYCALHRYSDKHDCKFDYRTAARDAIAKANPVVKADKLDKI

SEQ ID NO: 25445 - protein, 81 aa, Zea mays subsp. mays
  misc_feature (1)..(81): Ceres Seq. ID no. 12595683
MEHKEAGCQAPEGPILCINNCGFFGSAATMNMCSKCHKEMITKQDQAKLAASSIDSIVNGSDAVMEPVVAGSNTGSSCCPS

SEQ ID NO: 25446 - DNA, 481 bp, Zea mays subsp. mays
  misc_feature (1)..(481): Ceres Seq. ID no. 12633478
gcttctgctctcacctgtttcgctgctcgcccgatctcgcgctgccgatctgagatcgagcgamkaagctttttcatcgagatggtgcttgtactgcatgctaacagtggtaacaaaaatgcattcaaaacactaattgccgcagaatacagcggtgtcaaggttgagttggtgaaggactttcaaatgggtgtctccaacaaaactccagagttcctcaagatgaaccctattgggaagattcctgtcctggagactcctgatggtcctgtttttgagagcaatgcaattsaagatatgnnacncgcttgaaggctgataacccactttatggatcttcactgattgattatgcccatattgagcaatggattgactttgctgcaacagagattgatgcaaacattggaaagtggttgtacccacggatggggttttatccccatgctggtgtggtagaagaatcaactattgctgcctt

SEQ ID NO: 25447 - protein, 103 aa, Zea mays subsp. mays
  misc_feature (1)..(103): Ceres Seq. ID no. 12633479
  misc_feature (22)..(22): Xaa is any aa, unknown or other
  misc_feature (98)..(98): Xaa is any aa, unknown or other
  misc_feature (101)..(101): Xaa is any aa, unknown or other
  misc_feature (102)..(102): Xaa is any aa, unknown or other
ASALTCFAARPISRCRSEIERXSFFIEMVLVLHANSGNKNAFKTLIAAEYSGVKVELVKDFQMGVSNKTPEFLKMNPIGKIPVLETPDGPVFESNAIXDMXXA

SEQ ID NO: 25448 - protein, 76 aa, Zea mays subsp. mays
  misc_feature (1)..(76): Ceres Seq. ID no. 12633480
  misc_feature (71)..(71): Xaa is any aa, unknown or other
  misc_feature (74)..(74): Xaa is any aa, unknown or other
  misc_feature (75)..(75): Xaa is any aa, unknown or other
MVLVLHANSGNKNAFKTLIAAEYSGVKVELVKDFQMGVSNKTPEFLKMNPIGKIPVLETPDGPVFESNAIXDMXXA

SEQ ID NO: 25449 - DNA, 1346 bp, Zea mays subsp. mays
  misc_feature (1)..(1346): Ceres Seq. ID no. 12633565
aatcccattttcggtgcccgcgcccgtgccgtaccgtccctatcacaccggatcgccactcgctcccccccaccccactccgccccacctccgcgcctcagatccatccccaaccggcaaccctagcgccgggttcctcctcctcggatccgcccgccgccgcgcggactccattgccagaggtgatcgagggggagagatagagcttgggtggtcggattagggagagagggaggggaggatgtccagacggtcgttgaacccgagccggcgggtggcggacgggggtctgccgacagtcggaggcctgttccaccccaagtcacgctcgcctcccgtgcttactattgccctagtcgtcctgggtgtcattcttctcgtcgcctacttcaacagcggctcaggtcggttaaagattctcggtgtaactgttacaagcagagagtctgtgaccaggtctgaaggttcttgcacatcagaagttatgcgggtgcttccatatcttaaaaaggcatatggaaatgccatgcaaaaggttctccatgtaggccctgatagttgtacagtagtttctaatttgttgaaagaaggaaaggttgaagcttggggagtggagccttatgatttggaagatactgacagtacttgcaaaagcctcgtgcgcaagggctttgtccgtatgtctgatattaagttcccccttccgtaccgtccagattcttttaatcttgttgtggtgtcagatgctttagattatctgaccccaaggtatctgaacaaaacacttccagatttagcaagggtttccacagatggccttgttatttttgctggcaacccaggtcagcagaaagctaaggtctcagaactaccaaaatttggaagaccggcaaagttgcggagttcttcatggtggacacggtactttgtccagaccggcttgacagagaacgaagggccgctgaagaaattcgaagaggctacatccaagaacaaatacaaaccaggttgtcagatcttccacctgagttcgccaaggtgatgcgcatccatagcaccttgaattgttgtcacaccccctgccctcctccggttggcttgctcattgttcgtgtggaggaaatcgtcgcaaaaaaagccatcaggaataggttagcttatgtagagaggctccgacacttgttgctagaaattcactctggaaattaaattgtgtccccaatgattgcaaactggagccccgctgggatatatatgttagaactttcacgctgttgtaccgctgtgctatccatgtattgagcagtttgaaatgtaaagctcttgatgatcaaaaaaaaaaaaaa

SEQ ID NO: 25450 - protein, 266 aa, Zea mays subsp. mays
  misc_feature (1)..(266): Ceres Seq. ID no. 12633566
MSRRSLNPSRRVADGGLPTVGGLFHPKSRSPPVLTIALVVLGVILLVAYFNSGSGRLKILGVTVTSRESVTRSEGSCTSEVMRVLPYLKKAYGNAMQKVLHVGPDSCTVVSNLLKEGKVEAWGVEPYDLEDTDSTCKSLVRKGFVRMSDIKFPLPYRPDSFNLVVVSDALDYLTPRYLNKTLPDLARVSTDGLVIFAGNPGQQKAKVSELPKFGRPAKLRSSSWWTRYFVQTGLTENEGPLKKFEEATSKNKYKPGCQIFHLSSPR

SEQ ID NO: 25451 - protein, 185 aa, Zea mays subsp. mays
  misc_feature (1)..(185): Ceres Seq. ID no. 12633567
MRVLPYLKKAYGNAMQKVLHVGPDSCTVVSNLLKEGKVEAWGVEPYDLEDTDSTCKSLVRKGFVRMSDIKFPLPYRPDSFNLVVVSDALDYLTPRYLNKTLPDLARVSTDGLVIFAGNPGQQKAKVSELPKFGRPAKLRSSSWWTRYFVQTGLTENEGPLKKFEEATSKNKYKPGCQIFHLSSPR

SEQ ID NO: 25452 - protein, 171 aa, Zea mays subsp. mays
  misc_feature (1)..(171): Ceres Seq. ID no. 12633568
MQKVLHVGPDSCTVVSNLLKEGKVEAWGVEPYDLEDTDSTCKSLVRKGFVRMSDIKFPLPYRPDSFNLVVVSDALDYLTPRYLNKTLPDLARVSTDGLVIFAGNPGQQKAKVSELPKFGRPAKLRSSSWWTRYFVQTGLTENEGPLKKFEEATSKNKYKPGCQIFHLSSPR

SEQ ID NO: 25453 - DNA, 1489 bp, Zea mays subsp. mays
  misc_feature (1)..(1489): Ceres Seq. ID no. 12633927
gcacgagaccattacctagaacatcctaatcgaaaactatcttcctgcttcggacagttgagagagagagagagggatcgagagcgcggcggaggcgatggcgagcggagggaagggactcaacgcgactggggagttcttccggcggagggacgagtggaggaggcaccctatggcggggaaccagctgcgccacgccacacccgggctcggcatcgccatcgtcgccttcgggatctacctcgtcggcgaggccgcctacaaccgcctctaccgcccctccggcgtcgacttcactctctctcactcccaaaccaatctaccttccgcccatgggcccaccgccgcgccgccgccaactcctgctgtctctcgcgctgctcgccaccgcggccgcctgctgcgcggcgggggcggcgcccaggctgtcgcccaactactaccgccgcagctgcccgcgcgtggagcggatcgtgtcggacgccgtcgccgccaagcagcgcgccaacccgtccacggcggcgggcacgctgcggctcttcttccacgactgcttcgtcaacggctgcgacgcctcggtgctggtctcgccgctctcctccaccgacgccgcgccggagcgcgccgcggagatcaacctctccctgcccggggacgccttcgacgccgtggcccgcgccaaggcggcgctggaggccgcgtgcccgggcgtcgtctcctgcgccgacgcgctggcgctagcggcgcgcgacctcgtggccgccctgggcgggccccggttccccgtcgcgctgggccgccgcgactcccgccnntcnnacgcgcgcgacgtcgagggcaacctgccccgcaccaacatgtcggcgcgagccatggtgcgcctcttcgcccgcaagggcctcgcgccccgggagatggtggcgctggccggcgcccacaccgtcggcttctcccactgcgccgagttcgcgccccgcatctacggctaccggggcgccagccacgacccgcggctcaacccggagttcgcgcgcgcgctgcagcgctcctgcgcgggataccgcaccgaccccaccgtctccatcttcaacgacatcgtcacgccccgggacttcgacgagacctactacaagaacctgccccacggcctcggcctgctcgcctccgacgccgccatctgggagtacccgcccaccagggtcttcgcccagcgctacgccgccaaccgcaccgccttcttcgaggacttcgccgccgcgatgcagaggctcggcgccgtcggcgtcaagacggggcgccagggcgtcgtcaggcgccgctgcgacgcgctcgactgagtggcgtcgttcgacggcgttgcttattgtgctattgggtcggtcgatcgttggaaagcttcgaattcgattacgggatgtacttggaaaatggggcgtgtgctttttcagagtggtaactgaagtgatgaactgagggcaagctaattctg

SEQ ID NO: 25454 - protein, 452 aa, Zea mays subsp. mays
  misc_feature (1)..(452): Ceres Seq. ID no. 12633928
  misc_feature (239)..(239): Xaa is any aa, unknown or other
  misc_feature (240)..(240): Xaa is any aa, unknown or other
  misc_feature (241)..(241): Xaa is any aa, unknown or other
MASGGKGLNATGEFFRRRDEWRRHPMAGNQLRHATPGLGIAIVAFGIYLVGEAAYNRLYRPSGVDFTLSHSQTNLPSAHGPTAAPPPTPAVSRAARHRGRLLRGGGGAQAVAQLLPPQLPARGADRVGRRRRQAARQPVHGGGHAAALLPRLLRQRLRRLGAGLAALLHRRRAGARRGDQPLPARGRLRRRGPRQGGAGGRVPGRRLLRRRAGASGARPRGRPGRAPVPRRAGPPRLPXXXRARRRGQPAPHQHVGASHGAPLRPQGPRAPGDGGAGRRPHRRLLPLRRVRAPHLRLPGRQPRPAAQPGVRARAAALLRGIPHRPHRLHLQRHRHAPGLRRDLLQEPAPRPRPARLRRRHLGVPAHQGLRPALRRQPHRLLRGLRRRDAEARRRRRQDGAPGRRQAPLRRARLSGVVRRRCLLCYWVGRSLESFEFDYGMYLENGACAFSEW

SEQ ID NO: 25455 - protein, 427 aa, Zea mays subsp. mays
  misc_feature (1)..(427): Ceres Seq. ID no. 12633929
  misc_feature (214)..(214): Xaa is any aa, unknown or other
  misc_feature (215)..(215): Xaa is any aa, unknown or other
  misc_feature (216)..(216): Xaa is any aa, unknown or other
MAGNQLRHATPGLGIAIVAFGIYLVGEAAYNRLYRPSGVDFTLSHSQTNLPSAHGPTAAPPPTPAVSRAARHRGRLLRGGGGAQAVAQLLPPQLPARGADRVGRRRRQAARQPVHGGGHAAALLPRLLRQRLRRLGAGLAALLHRRRAGARRGDQPLPARGRLRRRGPRQGGAGGRVPGRRLLRRRAGASGARPRGRPGRAPVPRRAGPPRLPXXXRARRRGQPAPHQHVGASHGAPLRPQGPRAPGDGGAGRRPHRRLLPLRRVRAPHLRLPGRQPRPAAQPGVRARAAALLRGIPHRPHRLHLQRHRHAPGLRRDLLQEPAPRPRPARLRRRHLGVPAHQGLRPALRRQPHRLLRGLRRRDAEARRRRRQDGAPGRRQAPLRRARLSGVVRRRCLLCYWVGRSLESFEFDYGMYLENGACAFSEW

SEQ ID NO: 25456 - protein, 334 aa, Zea mays subsp. mays
  misc_feature (1)..(334): Ceres Seq. ID no. 12633930
  misc_feature (161)..(161): Xaa is any aa, unknown or other
  misc_feature (162)..(162): Xaa is any aa, unknown or other
  misc_feature (163)..(163): Xaa is any aa, unknown or other
MGPPPRRRQLLLSLALLATAAACCAAGAAPRLSPNYYRRSCPRVERIVSDAVAAKQRANPSTAAGTLRLFFHDCFVNGCDASVLVSPLSSTDAAPERAAEINLSLPGDAFDAVARAKAALEAACPGVVSCADALALAARDLVAALGGPRFPVALGRRDSRXXXARDVEGNLPRTNMSARAMVRLFARKGLAPREMVALAGAHTVGFSHCAEFAPRIYGYRGASHDPRLNPEFARALQRSCAGYRTDPTVSIFNDIVTPRDFDETYYKNLPHGLGLLASDAAIWEYPPTRVFAQRYAANRTAFFEDFAAAMQRLGAVGVKTGRQGVVRRRCDALD

SEQ ID NO: 25457 - DNA, 1417 bp, Zea mays subsp. mays
  misc_feature (1)..(1417): Ceres Seq. ID no. 12633968
gcacgagaccattacctagaacatcctaatcgaaaaagaaaaaggcttcgccttggtccttggatccccccacacaacgcagcacccgcactctccaggcgtctgccaatccgaaacgaaacccacccgtaggcaaaccaggactgagattgagctgagagcagcacagtcatggcggggcaggaggtggcgaacaagcgggtggtactgaagcgctacgtgacggggttccccggcgcggacgacatggaggtggtcaccggcaccgcgcgcgtggccgtgccgccggggtcgacggccatggtgctcaagaacctctacgtgtcgtgcgacccttacatgcgcggccgtatgaccaagcacgagaggcccagctacgtcccggacttcgtcgtgggggaggttttggaaaactttggcgtctgcaaggtgatagcatctgggcaccaggatttcaaggttggggatcttgtgtgggggatgaccggatgggaggagtacactctcatccataacccggagtcatttttcaagatcaatcatcctgaattgcctctgtcctactacacaggcgttcttggcatgccgggccttactgcttgggctggatttttcgatgtgggcaagcccaagaaaggcgataatgtcttcgtctcagcagcatcaggagccgttggtcagcttgttgggcagtttgctaagctcacaggatgttatgttgtcggcagtgctggttctgacgagaaggttaatcttctgaaaacaaagtttggcttcgatgaagcattcaactacaagaaagagcaggacctcgatgccgccttgagaaggtacttcccagagggcattgacatctacttcgagaacgtgggtggcagcacactggaagccgtgcttcccaacatgcgtatccatggtcggatccctacctgcggaatgatctcgcagtacaatctggaggagccagagggtgtgcacaacctattcgaaatcatcgctaagcgcctgcgcatggagggtttcatggtcttcgactactacggccagtaccacaagttcgagcaagagatggccgggtacctcaaggcggggaagatagcctacgtcgaggacattgctgaggggctagagaaggcgccggaggcactcatcgggctcttcaccgggcgcaacgtcggcaagcaactggtcgccattgcgcgggaatgaatgctggacatccatattatatctacgttgagaataatgtcagcatgcgtgttcagatgtgttaggaattgatgatttgtagtgcttgcagttttgtgctgttcgtgtgaaatgtttcgattttctgccgtttgttttctgggcgatatgcgtgtgaaaactcagcacacgcgcttcttctgaggagaaatagacaagcagtttgccg

SEQ ID NO: 25458 - protein, 345 aa, Zea mays subsp. mays
  misc_feature (1)..(345): Ceres Seq. ID no. 12633969
MAGQEVANKRVVLKRYVTGFPGADDMEVVTGTARVAVPPGSTAMVLKNLYVSCDPYMRGRMTKHERPSYVPDFVVGEVLENFGVCKVIASGHQDFKVGDLVWGMTGWEEYTLIHNPESFFKINHPELPLSYYTGVLGMPGLTAWAGFFDVGKPKKGDNVFVSAASGAVGQLVGQFAKLTGCYVVGSAGSDEKVNLLKTKFGFDEAFNYKKEQDLDAALRRYFPEGIDIYFENVGGSTLEAVLPNMRIHGRIPTCGMISQYNLEEPEGVHNLFEIIAKRLRMEGFMVFDYYGQYHKFEQEMAGYLKAGKIAYVEDIAEGLEKAPEALIGLFTGRNVGKQLVAIARE

SEQ ID NO: 25459 - protein, 320 aa, Zea mays subsp. mays
  misc_feature (1)..(320): Ceres Seq. ID no. 12633970
MEVVTGTARVAVPPGSTAMVLKNLYVSCDPYMRGRMTKHERPSYVPDFVVGEVLENFGVCKVIASGHQDFKVGDLVWGMTGWEEYTLIHNPESFFKINHPELPLSYYTGVLGMPGLTAWAGFFDVGKPKKGDNVFVSAASGAVGQLVGQFAKLTGCYVVGSAGSDEKVNLLKTKFGFDEAFNYKKEQDLDAALRRYFPEGIDIYFENVGGSTLEAVLPNMRIHGRIPTCGMISQYNLEEPEGVHNLFEIIAKRLRMEGFMVFDYYGQYHKFEQEMAGYLKAGKIAYVEDIAEGLEKAPEALIGLFTGRNVGKQLVAIARE

SEQ ID NO: 25460 - protein, 302 aa, Zea mays subsp. mays
  misc_feature (1)..(302): Ceres Seq. ID no. 12633971
MVLKNLYVSCDPYMRGRMTKHERPSYVPDFVVGEVLENFGVCKVIASGHQDFKVGDLVWGMTGWEEYTLIHNPESFFKINHPELPLSYYTGVLGMPGLTAWAGFFDVGKPKKGDNVFVSAASGAVGQLVGQFAKLTGCYVVGSAGSDEKVNLLKTKFGFDEAFNYKKEQDLDAALRRYFPEGIDIYFENVGGSTLEAVLPNMRIHGRIPTCGMISQYNLEEPEGVHNLFEIIAKRLRMEGFMVFDYYGQYHKFEQEMAGYLKAGKIAYVEDIAEGLEKAPEALIGLFTGRNVGKQLVAIARE

SEQ ID NO: 25461 - DNA, 936 bp, Zea mays subsp. mays
  misc_feature (1)..(936): Ceres Seq. ID no. 12634366
ctataactgaataaccgatcgaggagcgcaacgcacaccaccgaccagcgcgcgagaggacgtacggacgaacagctataggcggaggcgatggacggccaacgacgacggcaatggccgaggtcgcgctcgggagcggccgccgcgcgtctcctcctcctgctgctgctcctggcggtgtccttgggggccgggcatggtgatcacggcgcggcggctgcgggcgtcgccccggcagccggcaacggcatgacggagctgcagaagcacgtggcgttcttcgaccgcaaccacgacggcgtcatcaccttcgacgagacctaccaaggtctgcaggacgtcggagttggcgctgtcacggccaaagccagcgccgcgtacattaacggcgccctcgggcccaagaccagacctgataattcaaactcctcaacattggatatctacgtagagaacattcagaagggcaaacatggaagcgacacgggcgcctacgacgctcaaggaaggttcgttcccgcgaagctggacgagatgttcaccaagcacgccaagaccgtaccgaacgctctgacgaaagacgagctcgacgagatgctcaaggataaccgggagaagatggacgtcgcaggatggctgggagccaagtcggagtgggagatgctgtacaagctggccaaggacaaggacgggcgcctgcccaaggacaccgtcagggccgtgtacgacggatccctcttttaccagctggcggcgcaggggaagaagggctgattcggttacgttaatttcagtaatcaataacaagcgacgttttttttttgtcgtttctgaatgcttgcctgtgtggctgtgtaagaaagcgagtgggtcggactcaatggcaggcaacggttttgttttttttattattattttaacggatcggttctacct

SEQ ID NO: 25462 - protein, 227 aa, Zea mays subsp. mays
  misc_feature (1)..(227): Ceres Seq. ID no. 12634367
MDGQRRRQWPRSRSGAAAARLLLLLLLLAVSLGAGHGDHGAAAAGVAPAAGNGMTELQKHVAFFDRNHDGVITFDETYQGLQDVGVGAVTAKASAAYINGALGPKTRPDNSNSSTLDIYVENIQKGKHGSDTGAYDAQGRFVPAKLDEMFTKHAKTVPNALTKDELDEMLKDNREKMDVAGWLGAKSEWEMLYKLAKDKDGRLPKDTVRAVYDGSLFYQLAAQGKKG

SEQ ID NO: 25463 - protein, 174 aa, Zea mays subsp. mays
  misc_feature (1)..(174): Ceres Seq. ID no. 12634368
MTELQKHVAFFDRNHDGVITFDETYQGLQDVGVGAVTAKASAAYINGALGPKTRPDNSNSSTLDIYVENIQKGKHGSDTGAYDAQGRFVPAKLDEMFTKHAKTVPNALTKDELDEMLKDNREKMDVAGWLGAKSEWEMLYKLAKDKDGRLPKDTVRAVYDGSLFYQLAAQGKKG

SEQ ID NO: 25464 - DNA, 1080 bp, Zea mays subsp. mays
  misc_feature (1)..(1080): Ceres Seq. ID no. 12634491
actcaattatcaaaaccaaactagggacattcaaatggttggcttactttttgctacagagttgcctcttcgcatggctgatttcggagtgcttcatagaaatgagcttagtggtgcacttactggtttgacacgggttagaagattccagcaggatgatgctcatatcttctgcagagaggaccaaatcaaggacgaggttaaggctgttttggaattcatcaattatgtttacgagatatttggcttcaaatatgagttggagttgtctacgagaccagagaagtatctaggtgaagttgaaacttggaacaaagctgaacaacaattgacagaagctttaaatgagtttgggaagccatggaagattaatgaaggggatggtgctttctacggcccaaaaattgatattggtgtgtttgatgcccttaagaggaaatttcagtgtgcaaccctacagctggattttcagctgcccattcggttcaagctggcttattctgctgaggatgaagccaaaattgaaaggcctgtgatgatacacagggcaatcctaggttcggttgaaaggatgcttgccattcttttggagcattacaatggtaaatggcccttatggctaagccctcgccaggccattgtttgctcggtatcttctggttcagtggaatatgcgaaacaggttcttgccactctacatgaagctggttttcatgttgatattgacgcgagtgacaggacaatacaaaagaaggtacgggaagctcaactggcccaattcaactacattcttgtcgtaggtgcacaagaggccgagactggaaatatatgcgttagggtaagagacaatgctgacctggtcacaacgagtgtagatggcttcatcacacgtttgagggacgaaatcgcagccttcaaatgattttgatgctgcataatttcctactactcgtttgtgattttgacgagtttttagtgaccagcatcgagttcctcgtgttactgttcttgtttgtatgaagctaaaaggttgtctttttgttattaattacagatgcgaagttaaatactgccgctagt

SEQ ID NO: 25465 - protein, 306 aa, Zea mays subsp. mays
  misc_feature (1)..(306): Ceres Seq. ID no. 12634492
LNYQNQTRDIQMVGLLFATELPLRMADFGVLHRNELSGALTGLTRVRRFQQDDAHIFCREDQIKDEVKAVLEFINYVYEIFGFKYELELSTRPEKYLGEVETWNKAEQQLTEALNEFGKPWKINEGDGAFYGPKIDIGVFDALKRKFQCATLQLDFQLPIRFKLAYSAEDEAKIERPVMIHRAILGSVERMLAILLEHYNGKWPLWLSPRQAIVCSVSSGSVEYAKQVLATLHEAGFHVDIDASDRTIQKKVREAQLAQFNYILVVGAQEAETGNICVRVRDNADLVTTSVDGFITRLRDEIAAFK

SEQ ID NO: 25466 - protein, 295 aa, Zea mays subsp. mays
  misc_feature (1)..(295): Ceres Seq. ID no. 12634493
MVGLLFATELPLRMADFGVLHRNELSGALTGLTRVRRFQQDDAHIFCREDQIKDEVKAVLEFINYVYEIFGFKYELELSTRPEKYLGEVETWNKAEQQLTEALNEFGKPWKINEGDGAFYGPKIDIGVFDALKRKFQCATLQLDFQLPIRFKLAYSAEDEAKIERPVMIHRAILGSVERMLAILLEHYNGKWPLWLSPRQAIVCSVSSGSVEYAKQVLATLHEAGFHVDIDASDRTIQKKVREAQLAQFNYILVVGAQEAETGNICVRVRDNADLVTTSVDGFITRLRDEIAAFK

SEQ ID NO: 25467 - protein, 282 aa, Zea mays subsp. mays
  misc_feature (1)..(282): Ceres Seq. ID no. 12634494
MADFGVLHRNELSGALTGLTRVRRFQQDDAHIFCREDQIKDEVKAVLEFINYVYEIFGFKYELELSTRPEKYLGEVETWNKAEQQLTEALNEFGKPWKINEGDGAFYGPKIDIGVFDALKRKFQCATLQLDFQLPIRFKLAYSAEDEAKIERPVMIHRAILGSVERMLAILLEHYNGKWPLWLSPRQAIVCSVSSGSVEYAKQVLATLHEAGFHVDIDASDRTIQKKVREAQLAQFNYILVVGAQEAETGNICVRVRDNADLVTTSVDGFITRLRDEIAAFK

SEQ ID NO: 25468 - DNA, 676 bp, Zea mays subsp. mays
  misc_feature (1)..(676): Ceres Seq. ID no. 12635492
tttttcaaatggcctccgccgtcgtctccgctgcgttgcgactcccgctcgctacccgccgattctccaactcctcgccgcggattagcttgcaacattccacgatctggattcgtcatctccgtagcatcacaacagcttcctccatgagccaactaaccagcgaaaccgatgcctcccgtactaacgacgagaactcggctgagaaaccagacgacgtaccagacgacgtcgtggttcaatacgtggtgcttagacgagatctgatcgattcgtggccactcgggagcgtcgtaacccagggatgccacgcgtcggttgcggcgatatggtcgttcaaagacgatcccgttacgcttcagtactgtgatccacagcacattgactctatgcacaaggtcactctggaagttaaaggagaaactcagatgttgaatttgtcagagaagttgaagtcaggaggaatctctcataaggtgtggatggagcagccggagaatattccgacttgtattgctacaaagccttatctcaaatctcaagtctctcctttcttcaagaagctcaaactttgcaagtgattcttctccattttatattaaaaaatctcatttataaagggacactcttttgaatgttaagtttttgcatatagagtaaagaaaagaagcagatg

SEQ ID NO: 25469 - protein, 192 aa, Zea mays subsp. mays
  misc_feature (1)..(192): Ceres Seq. ID no. 12635493
FQMASAVVSAALRLPLATRRFSNSSPRISLQHSTIWIRHLRSITTASSMSQLTSETDASRTNDENSAEKPDDVPDDVVVQYVVLRRDLIDSWPLGSVVTQGCHASVAAIWSFKDDPVTLQYCDPQHIDSMHKVTLEVKGETQMLNLSEKLKSGGISHKVWMEQPENIPTCIATKPYLKSQVSPFFKKLKLCK

SEQ ID NO: 25470 - protein, 190 aa, Zea mays subsp. mays
  misc_feature (1)..(190): Ceres Seq. ID no. 12635494
MASAVVSAALRLPLATRRFSNSSPRISLQHSTIWIRHLRSITTASSMSQLTSETDASRTNDENSAEKPDDVPDDVVVQYVVLRRDLIDSWPLGSVVTQGCHASVAAIWSFKDDPVTLQYCDPQHIDSMHKVTLEVKGETQMLNLSEKLKSGGISHKVWMEQPENIPTCIATKPYLKSQVSPFFKKLKLCK

SEQ ID NO: 25471 - protein, 144 aa, Zea mays subsp. mays
  misc_feature (1)..(144): Ceres Seq. ID no. 12635495
MSQLTSETDASRTNDENSAEKPDDVPDDVVVQYVVLRRDLIDSWPLGSVVTQGCHASVAAIWSFKDDPVTLQYCDPQHIDSMHKVTLEVKGETQMLNLSEKLKSGGISHKVWMEQPENIPTCIATKPYLKSQVSPFFKKLKLCK

SEQ ID NO: 25472 - DNA, 976 bp, Zea mays subsp. mays
  misc_feature (1)..(976): Ceres Seq. ID no. 12635513
aacactaccactttgagtcttgaagaaggtcaacaacttcgagaataatggcttctctttgtgcttcttctgccatcgccgctatttcttctccaggtttcttgggagggaagaaactgaggctgaacaagaagttgaatgttccaactgtttctaggtccggtacgtcggtgcgcgctgtcgcagcggatccagatagaccaatttggttccctggaagcacacctccagagtggcttgacggtagcctccctggtgacttcgggtttgatcctcttggtctttcatctgacccggatagtctaaagtggaacgcacaagcagagctagtccactgccggtgggcaatgctcggcgccgccgggatttttatcccggagtttctaaccaagataggaatcctcaacacgccgtcgtggtacacggcgggagagcaagagtatttcaccgacaaaaccacactcttcgtcgttgagctcatcttaataggatgggccgagggacgtagatgggctgatatcattaagccaggtagtgtcaacactgacccaatcttcccaaacaacaaactgacggggacagacgttggatacccgggtgggttatggtttgacccgttgggttggggatccggtagcccggctaaaatcaaggagctgaggactaaggagataaaaaatggaaggttggctatgttggcagtgatgggtgcatggttccaacacatatacactgggaatggtcctattgataacctttttgcacatcttgctgatcctggccacgccactatcttcgctgctttcacacccaagtgagacgtcaaaaacgtcgaaaaaggatgggcttgtgtgatcatgtttgtacaaatattgtttttgaacttaaaactattatgtacttatataaactgtggtcgaatgcaaattagagtaacactgctcttttcttgactaaatgcgcatatctttctttt

SEQ ID NO: 25473 - protein, 256 aa, Zea mays subsp. mays
  misc_feature (1)..(256): Ceres Seq. ID no. 12635514
MASLCASSAIAAISSPGFLGGKKLRLNKKLNVPTVSRSGTSVRAVAADPDRPIWFPGSTPPEWLDGSLPGDFGFDPLGLSSDPDSLKWNAQAELVHCRWAMLGAAGIFIPEFLTKIGILNTPSWYTAGEQEYFTDKTTLFVVELILIGWAEGRRWADIIKPGSVNTDPIFPNNKLTGTDVGYPGGLWFDPLGWGSGSPAKIKELRTKEIKNGRLAMLAVMGAWFQHIYTGNGPIDNLFAHLADPGHATIFAAFTPK

SEQ ID NO: 25474 - protein, 156 aa, Zea mays subsp. mays
  misc_feature (1)..(156): Ceres Seq. ID no. 12635515
MLGAAGIFIPEFLTKIGILNTPSWYTAGEQEYFTDKTTLFVVELILIGWAEGRRWADIIKPGSVNTDPIFPNNKLTGTDVGYPGGLWFDPLGWGSGSPAKIKELRTKEIKNGRLAMLAVMGAWFQHIYTGNGPIDNLFAHLADPGHATIFAAFTPK

SEQ ID NO: 25475 - DNA, 610 bp, Zea mays subsp. mays
  misc_feature (1)..(610): Ceres Seq. ID no. 12635598
acaaacacatcaatcaagcaagcagcacattcttgtgggactctgatcagtctcggcctctcagggaaggaagagaagagactgcttggtgaagtcgctggtttcgtgtgatcaagagctcgggtatggagttggagatggtgagccagcacggggcgctgctgaaggtggggctgttcgtgctggtgcaggcgctggtgtacctcatcctcgcccagtcctcctccgtcttctccaccaccaagaccctctgtctgcccccggcgcgctccctcagcgcccgccgcatggtcgcgctgctctccgacctgccgctgccgctcggcggcgagccctcgccccgcgccgccttcgtggagccgccgtcgcccgtacccctcgcccaccagaagaaggattagttattaaccaagcgcgactggcggcagggacacggaccgagctagcaagcgatcgtttccgagctactagtagtagtactcggtgcgtgctgtaggagctattcacgccattctttcattgattggttattggtttgttctttgggattggatatgtaaactgagctacacgccgtttgggtttgtacaatcaagtgaagattatgttc

SEQ ID NO: 25476 - protein, 91 aa, Zea mays subsp. mays
  misc_feature (1)..(91): Ceres Seq. ID no. 12635599
MELEMVSQHGALLKVGLFVLVQALVYLILAQSSSVFSTTKTLCLPPARSLSARRMVALLSDLPLPLGGEPSPRAAFVEPPSPVPLAHQKKD

SEQ ID NO: 25477 - protein, 87 aa, Zea mays subsp. mays
  misc_feature (1)..(87): Ceres Seq. ID no. 12635600
MVSQHGALLKVGLFVLVQALVYLILAQSSSVFSTTKTLCLPPARSLSARRMVALLSDLPLPLGGEPSPRAAFVEPPSPVPLAHQKKD

SEQ ID NO: 25478 - DNA, 721 bp, Zea mays subsp. mays; identical to SEQ ID NO: 632
  misc_feature (1)..(721): Ceres Seq. ID no. 12635879

SEQ ID NO: 25479 - protein, 193 aa, Zea mays subsp. mays; identical to SEQ ID NO: 633
  misc_feature (1)..(193): Ceres Seq. ID no. 12635880

SEQ ID NO: 25480 - protein, 172 aa, Zea mays subsp. mays; identical to SEQ ID NO: 634
  misc_feature (1)..(172): Ceres Seq. ID no. 12635881

SEQ ID NO: 25481 - protein, 163 aa, Zea mays subsp. mays; identical to SEQ ID NO: 635
  misc_feature (1)..(163): Ceres Seq. ID no. 12635882

SEQ ID NO: 25482 - DNA, 936 bp, Zea mays subsp. mays
  misc_feature (1)..(936): Ceres Seq. ID no. 12636639
agagagagagagctcactagtccccccccccccccccgagcccatcaaggaggagttccccaccctctcctatgccgacttctaccagcttgccggagttgtggccgtcgaggtcaccggtgggcctgagatccccttccacccaggcagggaggacaagcctcagccgccacctgagggccgtcttcctgatgccaccaagggttctgaccacctgaggcaagtctttggcaagcagatgggtttgagtgatcaggacatcgttgccctctctggtggccacaccttgggaaggtgccacaaagagcggtctggttttgagggtgcctggactacgaaccctttggtctttgacaactcttacttcaaggaacttctgagtggtgacaaggagggccttcttcagctcccaagtgacaaagccctgctgagcgaccctgtcttccgccctcttgtggagaaatatgctgcagatgagaaggcattctttgatgactacaaagaggcccacctcaagctctccgaactggggtatgctgatgcttaaatggtccatatcctggagcgggacacaaactgctgcctgtatggactcgtgcgattcagggtgaaccatcagattgtctagtgtcttctctgtaataaatttatctgttcttggtactttgtctatggttgaatcggaacccattttccgtttgcctagattcttaatttctggtgctgtatccagctgaaactagtagatctatgatcttgtggctgcagcatgttcttgtcacttaccttttatctggtctccgttggttcggttcacaggttgtgtgctttaaaaggctgtgcttaagtcctgcaattcgagtccaccaaactgtagggtgcaagtcgagattttattagtgatgcaagttgctggtattggtgcattatcgggct

SEQ ID NO: 25483 - protein, 181 aa, Zea mays subsp. mays
  misc_feature (1)..(181): Ceres Seq. ID no. 12636640
ERESSLVPPPPPEPIKEEFPTLSYADFYQLAGVVAVEVTGGPEIPFHPGREDKPQPPPEGRLPDATKGSDHLRQVFGKQMGLSDQDIVALSGGHTLGRCHKERSGFEGAWTTNPLVFDNSYFKELLSGDKEGLLQLPSDKALLSDPVFRPLVEKYAADEKAFFDDYKEAHLKLSELGYADA

SEQ ID NO: 25484 - protein, 102 aa, Zea mays subsp. mays
  misc_feature (1)..(102): Ceres Seq. ID no. 12636641
MGLSDQDIVALSGGHTLGRCHKERSGFEGAWTTNPLVFDNSYFKELLSGDKEGLLQLPSDKALLSDPVFRPLVEKYAADEKAFFDDYKEAHLKLSELGYADA

SEQ ID NO: 25485 - DNA, 935 bp, Zea mays subsp. mays
  misc_feature (1)..(935): Ceres Seq. ID no. 12636872
aaaacttcgcagtcagcatctggactctggagtctgttgtctgcgtgtgtgcggctggttctctctgccaccgcacgagtcgcagcagagagggaaaaaccctagcagcctcccttcgtcccaactcccaaccccgcgaccccatggccgcatctaacggcggcggcggccccggcccgatctccgcagaggcggcgcttggagaggctatcaagctggtgttcgggcggtggacggcgctgcagatggcggtggagaaccagtggggcggccgcgactcccgcgccaaggccgaccagttgggcgagtccatcctattctggttctgccgcactaagggtccatattatttcgaagacttggttgatatgatgtatgacaaaatttctgaatcttttaatgcctactttgaggataatagtattgaggaggttgctgaacagtttttgatcatacatgaagaatgcctgcaaaacaacttttcgtctatagagaagctaaggaattctcgtgttccggggaatgctgtttctcaaagtagacagatagtgggcgatgacgacgatgacagtgatagctcagatgacggtgatgacacatcgatggtggctgatgaagaggctgggccagaagagatggcagtggacagaccaaggccccccaagcctactccagacgccgatgggtggactgttgtgcctcctaggcgtggtggtcgcagcaagaaatagagtacaatggtagctgctggctttctcgcggaatgtttgttgagtgctgcggttccatattcacttgtatcgctcgatatttgacacgacatggatgttgagtgtgtagtatgatgcttggtttgccaccgcccaccaatttggtgtaaacaaggtaattattatagatgcatcctgtgatcaggttttgagtgttgcagagtc

SEQ ID NO: 25486 - protein, 242 aa, Zea mays subsp. mays
  misc_feature (1)..(242): Ceres Seq. ID no. 12636873
NFAVSIWTLESVVCVCAAGSLCHRTSRSREGKTLAASLRPNSQPRDPMAASNGGGGPGPISAEAALGEAIKLVFGRWTALQMAVENQWGGRDSRAKADQLGESILFWFCRTKGPYYFEDLVDMMYDKISESFNAYFEDNSIEEVAEQFLIIHEECLQNNFSSIEKLRNSRVPGNAVSQSRQIVGDDDDDSDSSDDGDDTSMVADEEAGPEEMAVDRPRPPKPTPDADGWTVVPPRRGGRSKK

SEQ ID NO: 25487 - protein, 195 aa, Zea mays subsp. mays
  misc_feature (1)..(195): Ceres Seq. ID no. 12636874
MAASNGGGGPGPISAEAALGEAIKLVFGRWTALQMAVENQWGGRDSRAKADQLGESILFWFCRTKGPYYFEDLVDMMYDKISESFNAYFEDNSIEEVAEQFLIIHEECLQNNFSSIEKLRNSRVPGNAVSQSRQIVGDDDDDSDSSDDGDDTSMVADEEAGPEEMAVDRPRPPKPTPDADGWTVVPPRRGGRSKK

SEQ ID NO: 25488 - protein, 161 aa, Zea mays subsp. mays
  misc_feature (1)..(161): Ceres Seq. ID no. 12636875
MAVENQWGGRDSRAKADQLGESILFWFCRTKGPYYFEDLVDMMYDKISESFNAYFEDNSIEEVAEQFLIIHEECLQNNFSSIEKLRNSRVPGNAVSQSRQIVGDDDDDSDSSDDGDDTSMVADEEAGPEEMAVDRPRPPKPTPDADGWTVVPPRRGGRSKK

SEQ ID NO: 25489 - DNA, 1616 bp, Zea mays subsp. mays
  misc_feature (1)..(1616): Ceres Seq. ID no. 12637795
cttccttcctttccccgctcttctcccacacaaacgccaccgccgcatcgaatccgagacgccgatctcggattcgccgtcaccacacgctgccctcgtcgcgctctcccgccgccgccgctcgtctcgtcagccatggcaggattggcaccagaagggtcgcaatttgatgacaagcagtatgacaagaaaatgcaggagatattaactgaagacttcttcacttcatatgatgatgtttgtgaaagttttgacagcatgggactgcaagagaaccttctgagaggcatctatgcctatggttttgagaagccatcggctattcagcaaaggggaatagttcccttctgcaaggggcttgacgtgattcagcaagctcagtctggaactggaaaaacagctaccttctgttctggaatcttgcagcaacttgattatggattggttgaatgccaggcattggttcttgctccaacccgtgagcttgctcagcaaattgagaaggttatgcgtgctcttggggactatttgggtgtcaaagtgcatgcctgtgttggtggaacatctgttcgtgaggaccaaaggattcttgccagtggtgtgcatgttgttgtgggcacaccaggacgtgtgtttgatatgttgcgcaggcagtctctccgtcccgacaacatcaagatgtttgtgttggatgaggctgatgagatgctctcccgtggattcaaggatcagatctatgatatcttccagcttcttccatccaagattcaggtcggtgtcttctcagctaccatgccccctgaggcccttgagatcacgcgcaagttcatgaacaaacctgtgaggattctcgtcaagagagatgagctcacccttgagggtatcaagcaattctatgtcaatatcgacaaggaagattggaagctcgacactctgtgtgacctgtatgagaccctggcaatcacccagagtgtcatctttgtgaacacacgccgcaaggtggactggctcacggacaagatgaggagcagggaccacaccgtgtcagctacacacggtgatatggaccagaacaccagggacatcatcatgagggagttcaggtccgggtcctctcgtgtgctcatcaccaccgacctgctcgcccgtggtatcgacgtccagcaggtctcacttgtcatcaactacgacctgccgacccagccagagaactacctccaccgcatcggccgtagtggtcggtttggaaggaagggtgttgccatcaacttcgtcacccgcgacgacgagcgaatgctgtttgacatccagaggttctacaacgtgaccgttgaggagctgccggccaatgtcgccgaccttctctagatagtatggctgctaaggtttctggataaaggagtttgtttttgttaaaatacgccaacttttctctgctttggatgagtggtaaggtccggggtctgttcgtattgtggcgaaggatgggttttaagtttattttgtcgtatgcaacgtttcggaatttttgtagcgagtaggctacgtgccgctcctgggctagctgggtgctgagacactactgaagtatttttaccttagctgttgggcttatg

SEQ ID NO: 25490 - protein, 455 aa, Zea mays subsp. mays
  misc_feature (1)..(455): Ceres Seq. ID no. 12637796
LPSFPRSSPTQTPPPHRIRDADLGFAVTTRCPRRALPPPPLVSSAMAGLAPEGSQFDDKQYDKKMQEILTEDFFTSYDDVCESFDSMGLQENLLRGIYAYGFEKPSAIQQRGIVPFCKGLDVIQQAQSGTGKTATFCSGILQQLDYGLVECQALVLAPTRELAQQIEKVMRALGDYLGVKVHACVGGTSVREDQRILASGVHVVVGTPGRVFDMLRRQSLRPDNIKMFVLDEADEMLSRGFKDQIYDIFQLLPSKIQVGVFSATMPPEALEITRKFMNKPVRILVKRDELTLEGIKQFYVNIDKEDWKLDTLCDLYETLAITQSVIFVNTRRKVDWLTDKMRSRDHTVSATHGDMDQNTRDIIMREFRSGSSRVLITTDLLARGIDVQQVSLVINYDLPTQPENYLHRIGRSGRFGRKGVAINFVTRDDERMLFDIQRFYNVTVEELPANVADLL

SEQ ID NO: 25491 - protein, 410 aa, Zea mays subsp. mays
  misc_feature (1)..(410): Ceres Seq. ID no. 12637797
MAGLAPEGSQFDDKQYDKKMQEILTEDFFTSYDDVCESFDSMGLQENLLRGIYAYGFEKPSAIQQRGIVPFCKGLDVIQQAQSGTGKTATFCSGILQQLDYGLVECQALVLAPTRELAQQIEKVMRALGDYLGVKVHACVGGTSVREDQRILASGVHVVVGTPGRVFDMLRRQSLRPDNIKMFVLDEADEMLSRGFKDQIYDIFQLLPSKIQVGVFSATMPPEALEITRKFMNKPVRILVKRDELTLEGIKQFYVNIDKEDWKLDTLCDLYETLAITQSVIFVNTRRKVDWLTDKMRSRDHTVSATHGDMDQNTRDIIMREFRSGSSRVLITTDLLARGIDVQQVSLVINYDLPTQPENYLHRIGRSGRFGRKGVAINFVTRDDERMLFDIQRFYNVTVEELPANVADLL

SEQ ID NO: 25492 - protein, 391 aa, Zea mays subsp. mays
  misc_feature (1)..(391): Ceres Seq. ID no. 12637798
MQEILTEDFFTSYDDVCESFDSMGLQENLLRGIYAYGFEKPSAIQQRGIVPFCKGLDVIQQAQSGTGKTATFCSGILQQLDYGLVECQALVLAPTRELAQQIEKVMRALGDYLGVKVHACVGGTSVREDQRILASGVHVVVGTPGRVFDMLRRQSLRPDNIKMFVLDEADEMLSRGFKDQIYDIFQLLPSKIQVGVFSATMPPEALEITRKFMNKPVRILVKRDELTLEGIKQFYVNIDKEDWKLDTLCDLYETLAITQSVIFVNTRRKVDWLTDKMRSRDHTVSATHGDMDQNTRDIIMREFRSGSSRVLITTDLLARGIDVQQVSLVINYDLPTQPENYLHRIGRSGRFGRKGVAINFVTRDDERMLFDIQRFYNVTVEELPANVADLL

SEQ ID NO: 25493 - DNA, 454 bp, Zea mays subsp. mays
  misc_feature (1)..(454): Ceres Seq. ID no. 12637897
cactcgcgtccgcccccgccgccgcctttcgtcccagcccctaaaccattctccattcctctcatcagtttagcacaatggcactggctaataagcttggtggtctgctcaagaaagccacaagttcaaatctgtctgtctaccaagcaatcagatgcatgtcatccaagctctttgttggagggatttcttatcaaactgatgatcacagtctcagggacgagtttgccaaatatgggcaagtcattgaagctaggattatcattgaccttgaatctgggaggtctagaggttttggctttgtaacttacacgtcttctgaggaggcttcagctgccattactgccttggatggaaagactctcgatggacggagcatacgtgttaatcatgctaacgagaagacaggtgcgccaagagcaaggcgagtcgcgagaggaagatgctaggaggg

SEQ ID NO: 25494 - protein, 123 aa, Zea mays subsp. mays
  misc_feature (1)..(123): Ceres Seq. ID no. 12637898
MALANKLGGLLKKATSSNLSVYQAIRCMSSKLFVGGISYQTDDHSLRDEFAKYGQVIEARIIIDLESGRSRGFGFVTYTSSEEASAAITALDGKTLDGRSIRVNHANEKTGAPRARRVARGRC

SEQ ID NO: 25495 - protein, 101 aa, Zea mays subsp. mays
  misc_feature (1)..(101): Ceres Seq. ID no. 12637899
HSRPPPPPPFVPAPKPFSIPLISLAQWHWLISLVVCSRKPQVQICLSTKQSDACHPSSLLEGFLIKLMITVSGTSLPNMGKSLKLGLSLTLNLGGLEVLAL

SEQ ID NO: 25496 - protein, 96 aa, Zea mays subsp. mays
  misc_feature (1)..(96): Ceres Seq. ID no. 12637900
MSSKLFVGGISYQTDDHSLRDEFAKYGQVIEARIIIDLESGRSRGFGFVTYTSSEEASAAITALDGKTLDGRSIRVNHANEKTGAPRARRVARGRC

SEQ ID NO: 25497 - DNA, 448 bp, Zea mays subsp. mays
  misc_feature (1)..(448): Ceres Seq. ID no. 12637911
atttcccaattgaacaagacgttggaaaggaggcaacaaggctcagagctattacagatctttttagcaacattattgaagaaccatgctttgatcagctaagaaccaaggagcaacttggttatactgtggactctagcccaaggatgacttaccggatgctggcctattgttttcgagttatgtcctccaaatacagtcctatttatctgcaaagtcggattgataacttcattgatggtctatctgctctgctggacgagctcaatgaagagacttttgagcaccatagaagtggtttaatagctgataaactggaaaaggaaccttcacttagctaccaaactagtgattattggtctcagatcgctgataaaaggtacatgtttgatatgtcaaaactggaagctgaagagcttaagacagttcagaaggctgatgttatagc

SEQ ID NO: 25498 - protein, 148 aa, Zea mays subsp. mays
  misc_feature (1)..(148): Ceres Seq. ID no. 13624421
FPIEQDVGKEATRLRAITDLFSNIIEEPCFDQLRTKEQLGYTVDSSPRMTYRMLAYCFRVMSSKYSPIYLQSRIDNFIDGLSALLDELNEETFEHHRSGLIADKLEKEPSLSYQTSDYWSQIADKRYMFDMSKLEAEELKTVQKADVI

SEQ ID NO: 25499 - protein, 100 aa, Zea mays subsp. mays
  misc_feature (1)..(100): Ceres Seq. ID no. 13624422
MTYRMLAYCFRVMSSKYSPIYLQSRIDNFIDGLSALLDELNEETFEHHRSGLIADKLEKEPSLSYQTSDYWSQIADKRYMFDMSKLEAEELKTVQKADVI

SEQ ID NO: 25500 - protein, 96 aa, Zea mays subsp. mays
  misc_feature (1)..(96): Ceres Seq. ID no. 13624423
MLAYCFRVMSSKYSPIYLQSRIDNFIDGLSALLDELNEETFEHHRSGLIADKLEKEPSLSYQTSDYWSQIADKRYMFDMSKLEAEELKTVQKADVI

SEQ ID NO: 25501 - DNA, 506 bp, Zea mays subsp. mays
  misc_feature (1)..(506): Ceres Seq. ID no. 12637912
gttagggttattttttctactctgcctctgctctcacctgtttcgctgctcgcccgatctcgcgctgccggcagcgatctgagatcgagcgaagctaagctttttcatcgagatggcgcttgtactgcatgctaacagtggtaacaaaaatgcattcaaaacactaattgccgcagaatacagcggtgtcaaggttgagttggtgaaggactttcaaatgggtgtctcccacaaaactccagagttcctcaagatgaaccctattgggaagattcccgtcctggagactcctgatgatcctgtttttgagagcaatgcaattgcaagatatgttactcgcttgaaggctgataacccactttatggatcttcactgactgattatgcccatattgagcaatggattgactttgctgcnnnagagattgatgcaaacattggaaagtggttgtacccacggatggggttttatccccatgctggtgtggtagaagaatcaactattg

SEQ ID NO: 25502 - protein, 131 aa, Zea mays subsp. mays
  misc_feature (1)..(131): Ceres Seq. ID no. 13624424
  misc_feature (102)..(102): Xaa is any aa, unknown or other
  misc_feature (103)..(103): Xaa is any aa, unknown or other
MALVLHANSGNKNAFKTLIAAEYSGVKVELVKDFQMGVSHKTPEFLKMNPIGKIPVLETPDDPVFESNAIARYVTRLKADNPLYGSSLTDYAHIEQWIDFAXXEIDANIGKWLYPRMGFYPHAGVVEESTI

SEQ ID NO: 25503 - protein, 96 aa, Zea mays subsp. mays
  misc_feature (1)..(96): Ceres Seq. ID no. 13624425
  misc_feature (67)..(67): Xaa is any aa, unknown or other
  misc_feature (68)..(68): Xaa is any aa, unknown or other
MGVSHKTPEFLKMNPIGKIPVLETPDDPVFESNAIARYVTRLKADNPLYGSSLTDYAHIEQWIDFAXXEIDANIGKWLYPRMGFYPHAGVVEESTI

SEQ ID NO: 25504 - protein, 84 aa, Zea mays subsp. mays
  misc_feature (1)..(84): Ceres Seq. ID no. 13624426
  misc_feature (55)..(55): Xaa is any aa, unknown or other
  misc_feature (56)..(56): Xaa is any aa, unknown or other
MNPIGKIPVLETPDDPVFESNAIARYVTRLKADNPLYGSSLTDYAHIEQWIDFAXXEIDANIGKWLYPRMGFYPHAGVVEESTI

SEQ ID NO: 25505 - DNA, 831 bp, Zea mays subsp. mays; identical to SEQ ID NO: 674
  misc_feature (1)..(831): Ceres Seq. ID no. 12638203

SEQ ID NO: 25506 - protein, 191 aa, Zea mays subsp. mays; identical to SEQ ID NO: 675
  misc_feature (1)..(191): Ceres Seq. ID no. 12638204

SEQ ID NO: 25507 - protein, 166 aa, Zea mays subsp. mays; identical to SEQ ID NO: 676
  misc_feature (1)..(166): Ceres Seq. ID no. 12638205

SEQ ID NO: 25508 - protein, 152 aa, Zea mays subsp. mays; identical to SEQ ID NO: 677
  misc_feature (1)..(152): Ceres Seq. ID no. 12638206

SEQ ID NO: 25509 - DNA, 413 bp, Zea mays subsp. mays
  misc_feature (1)..(413): Ceres Seq. ID no. 12638286
aaccaggtgctcgaggaggtcgatcgatggcgtcggagaaagacgcggcgctcgcccccgtgcccaacgacaaccccaccatatttgacaagatcatcaaaaaggagataccttctacggtggtgtatgaggatgagaaggtcctcgctttcagagacataaatcctcaagctccgacccacattgtaatcattcccaaagtcaaggatggattaaccggcctttcaaaggcagaagagaggcatgtagagatacttggctgcctcctctacgctgcaaaagttatcgctaagcaggaaggacttgaagatggctaccgtattgtcatcaatgatggccctagtggatgtcaatctgtttaccacatccatgtccatctccttggagggaggcagatgaactggcccccaggc

SEQ ID NO: 25510 - protein, 137 aa, Zea mays subsp. mays
  misc_feature (1)..(137): Ceres Seq. ID no. 13624616
PGARGGRSMASEKDAALAPVPNDNPTIFDKIIKKEIPSTVVYEDEKVLAFRDINPQAPTHIVIIPKVKDGLTGLSKAEERHVEILGCLLYAAKVIAKQEGLEDGYRIVINDGPSGCQSVYHIHVHLLGGRQMNWPPG

SEQ ID NO: 25511 - protein, 129 aa, Zea mays subsp. mays
  misc_feature (1)..(129): Ceres Seq. ID no. 13624617
MASEKDAALAPVPNDNPTIFDKIIKKEIPSTVVYEDEKVLAFRDINPQAPTHIVIIPKVKDGLTGLSKAEERHVEILGCLLYAAKVIAKQEGLEDGYRIVINDGPSGCQSVYHIHVHLLGGRQMNWPPG

SEQ ID NO: 25512 - DNA, 733 bp, Zea mays subsp. mays
  misc_feature (1)..(733): Ceres Seq. ID no. 12638507
gtcccgagattcggattggatgatggagcagcttctgattttgaagctactctagttctggctactatgactgtatcacaattatctgacagcgatgatgcccnncaaccagctacatcagcacaaaacgcgggagaaccaggggctgctgcaccaacactagttcctgaaaatgtctcgaaccatactaaaatatggtcggagctttcaggtagtactcccaaaagcattgaagctaacagagaaaatcatgcccagaagaagagaaacgcaagcactaatatgctgaacgacatgtcaatgctgcccaatgttacaaatgctccaagcaagccaccagttgcagataatgcaaacaatataatgcagcctttgcaaatggatcacatggaagaacgtcctgaaggtatcagtggtattcctcgatcacaacaccacccgagcaactgggtcggtgctgatgataacgacgatgacaatgaagacgacgaggagcttttagtccagacaacaccctactatatggactgaggataaatgctgattctaaaatatgtaggtgcatttcagcgtagtgtactatacgaacgaattaggaactagctgaaggctttacgtgtactcttgtagtcttatttctagtagggctggagttggtgactttgactgacgcagtaagaactctcttaacttaggtcatgtttgaatgcgttagagctaatagttaactgct

SEQ ID NO: 25513 - protein, 176 aa, Zea mays subsp. mays
  misc_feature (1)..(176): Ceres Seq. ID no. 12638508
  misc_feature (35)..(35): Xaa is any aa, unknown or other
VPRFGLDDGAASDFEATLVLATMTVSQLSDSDDAXQPATSAQNAGEPGAAAPTLVPENVSNHTKIWSELSGSTPKSIEANRENHAQKKRNASTNMLNDMSMLPNVTNAPSKPPVADNANNIMQPLQMDHMEERPEGISGIPRSQHHPSNWVGADDNDDDNEDDEELLVQTTPYYMD

SEQ ID NO: 25514 - protein, 154 aa, Zea mays subsp. mays
  misc_feature (1)..(154): Ceres Seq. ID no. 12638509
  misc_feature (13)..(13): Xaa is any aa, unknown or other
MTVSQLSDSDDAXQPATSAQNAGEPGAAAPTLVPENVSNHTKIWSELSGSTPKSIEANRENHAQKKRNASTNMLNDMSMLPNVTNAPSKPPVADNANNIMQPLQMDHMEERPEGISGIPRSQHHPSNWVGADDNDDDNEDDEELLVQTTPYYMD

SEQ ID NO: 25515 - DNA, 647 bp, Zea mays subsp. mays
  misc_feature (1)..(647): Ceres Seq. ID no. 12638925
cgagaccaccggtccggagatatgggaggacacgctcgggcaggtcgacatcttcgtcatgggaatcggcagcggcggcaccgtcaccggcgtcggcaagtacctcaaggagaagaaccccaacgcaaagatctatggggttgaacctgccgaggcaaatgtactgaatggtggcaagccagggcctcacctcatcactggaaatggagttggatttaagccagatattttggacatggatatcatggagaaggttctggaggtgaaaggcgaggacgccgttaagatggcgaagcagttggcactgcaggagggcctgctggtggggatatcatcaggagccaacacagtggcagcgatcgaactcgcaaagaggccagaaaacaaggggaagctcatcgtgactgttcatccgagcgcaggagagcgatacttatcgtcggcgctattcgagggtctgaggaaggaggctgaggcaatgcagccagtgccagtggactaacttggagctatacagcgcatgtagaataaattcactgcaaccatgttgcaagtgctagtcatacctcattgcgattcttcagtttgttcatcatgtgtacctctgtaaacaatggttgaaatggtgaaaaaaggaattatctctc

SEQ ID NO: 25516 - protein, 166 aa, Zea mays subsp. mays
  misc_feature (1)..(166): Ceres Seq. ID no. 12638926
ETTGPEIWEDTLGQVDIFVMGIGSGGTVTGVGKYLKEKNPNAKIYGVEPAEANVLNGGKPGPHLITGNGVGFKPDILDMDIMEKVLEVKGEDAVKMAKQLALQEGLLVGISSGANTVAAIELAKRPENKGKLIVTVHPSAGERYLSSALFEGLRKEAEAMQPVPVD

SEQ ID NO: 25517 - protein, 147 aa, Zea mays subsp. mays
  misc_feature (1)..(147): Ceres Seq. ID no. 12638927
MGIGSGGTVTGVGKYLKEKNPNAKIYGVEPAEANVLNGGKPGPHLITGNGVGFKPDILDMDIMEKVLEVKGEDAVKMAKQLALQEGLLVGISSGANTVAAIELAKRPENKGKLIVTVHPSAGERYLSSALFEGLRKEAEAMQPVPVD

SEQ ID NO: 25518 - protein, 88 aa, Zea mays subsp. mays
  misc_feature (1)..(88): Ceres Seq. ID no. 12638928
MDIMEKVLEVKGEDAVKMAKQLALQEGLLVGISSGANTVAAIELAKRPENKGKLIVTVHPSAGERYLSSALFEGLRKEAEAMQPVPVD

SEQ ID NO: 25519 - DNA, 1376 bp, Zea mays subsp. mays
  misc_feature (1)..(1376): Ceres Seq. ID no. 13491083
atggaaaggctgggtggagtctcgccttcgcactcttgtattaaagattgagcgttattcacacgagatgatccttgcacacccatatcccaaagatttctcagacaaatccaggcccttacattgcttttacttcatgggtctttggagaaaacaaaccacccaagctcaagaagctgagcaatttgatatcaggggaattgtaaatgagtttaggaatactatttgtgcatatcaacattggaaagaaggaatggacattgaagtgtcccatgtaaaaagaaaagaaatccctttgtttgtttttcctggcggagtgcgtccttctcgtacttctagaacaacgcacaagaacagccgtgccattccaacacgtgatgtttcagctgatgatcaagtgggaaacctattgggcgttgccagttgtagtgatgctcaacatgtaccatgtaaaggcagctatatgaaacaaccagaaccagattttgctggaggctttcagttgccaggaagtatttctctgttgccccctagcttacccaataaagtagttctgaatgggtctgctaattttcatgcagaatctattgagagtgaacatccagaacactatcaggaaagtaagtttgtggctgtgcagaataccgtgtgccttgtagtcaagcaacctaacagtttgctcccaaattcaaacaacaattcacaattgtatggatctgattcctctcttaacagttcaaaaagggaatgtgcaggcagtgctgcaaacaacttgctgaagttatccccagctattccagccacacctgatgaacttgatgagctgatatcctatcaaactaatcagaaagatgtaaatgctgaaaataacttggagatcggttctgaaaataacttggaacaaatatgcagtctgaggccccaagaatctaataataatctgaagcgtaaagccaatcaagagctcgagccacttgagcttgccgtcccatccactggtgctgcgccgcaatcgacaggaactgccccaagaaaaccactcaggttgaggttaacgactttggggaaaccgaagccagctgaaggaacttcctgaatggaattgcccaggagccaacatacctagagcttgtttttccttgtattgaagcaaggatatgtggaagcgctcggcacatagcctgctttggcactgcgagttgaaacgaaatggaaaacggaggccgcctgacgtaaatgagtgcgattgtaataaattgtatgtagttcatagctgggttggtatcagagttcaccatttcgtttttgctgtagcgaatttcgtttttttaaccaaagtttgactcttatattttttgaatttggaaccaaaatcc

SEQ ID NO: 25520 - protein, 364 aa, Zea mays subsp. mays
  misc_feature (1)..(364): Ceres Seq. ID no. 13491084
WKGWVESRLRTLVLKIERYSHEMILAHPYPKDFSDKSRPLHCFYFMGLWRKQTTQAQEAEQFDIRGIVNEFRNTICAYQHWKEGMDIEVSHVKRKEIPLFVFPGGVRPSRTSRTTHKNSRAIPTRDVSADDQVGNLLGVASCSDAQHVPCKGSYMKQPEPDFAGGFQLPGSISLLPPSLPNKVVLNGSANFHAESIESEHPEHYQESKFVAVQNTVCLVVKQPNSLLPNSNNNSQLYGSDSSLNSSKRECAGSAANNLLKLSPAIPATPDELDELISYQTNQKDVNAENNLEIGSENNLEQICSLRPQESNNNLKRKANQELEPLELAVPSTGAAPQSTGTAPRKPLRLRLTTLGKPKPAEGTS

SEQ ID NO: 25521 - protein, 342 aa, Zea mays subsp. mays
  misc_feature (1)..(342): Ceres Seq. ID no. 13491085
MILAHPYPKDFSDKSRPLHCFYFMGLWRKQTTQAQEAEQFDIRGIVNEFRNTICAYQHWKEGMDIEVSHVKRKEIPLFVFPGGVRPSRTSRTTHKNSRAIPTRDVSADDQVGNLLGVASCSDAQHVPCKGSYMKQPEPDFAGGFQLPGSISLLPPSLPNKVVLNGSANFHAESIESEHPEHYQESKFVAVQNTVCLVVKQPNSLLPNSNNNSQLYGSDSSLNSSKRECAGSAANNLLKLSPAIPATPDELDELISYQTNQKDVNAENNLEIGSENNLEQICSLRPQESNNNLKRKANQELEPLELAVPSTGAAPQSTGTAPRKPLRLRLTTLGKPKPAEGTS

SEQ ID NO: 25522 - protein, 319 aa, Zea mays subsp. mays
  misc_feature (1)..(319): Ceres Seq. ID no. 13491086
MGLWRKQTTQAQEAEQFDIRGIVNEFRNTICAYQHWKEGMDIEVSHVKRKEIPLFVFPGGVRPSRTSRTTHKNSRAIPTRDVSADDQVGNLLGVASCSDAQHVPCKGSYMKQPEPDFAGGFQLPGSISLLPPSLPNKVVLNGSANFHAESIESEHPEHYQESKFVAVQNTVCLVVKQPNSLLPNSNNNSQLYGSDSSLNSSKRECAGSAANNLLKLSPAIPATPDELDELISYQTNQKDVNAENNLEIGSENNLEQICSLRPQESNNNLKRKANQELEPLELAVPSTGAAPQSTGTAPRKPLRLRLTTLGKPKPAEGTS

SEQ ID NO: 25523 - DNA, 567 bp, Zea mays subsp. mays
  misc_feature (1)..(567): Ceres Seq. ID no. 13491118
gccatctgcaaacctacttctatactttcaggaggatgtatctgtggtagatcattggcttgtcagtggcacgcattatgctagaactagcgaggagtggctaaaacgtatggacaagagcatcacttcagtaaggctgatcttcgaggaaacttatgggaaggaatcgactaccaaatggatagcttattggcggacgttcttcatctcggtagctgaactttttggatacaacaatggagatgaatggatggttgcccattacttgttccgaaagaagtagaggctactgcttggaagtacccaatcaaaaatcaatgttttcagtaattttgtcatgtacactgacgaacaactccttttctggcacgtagttgtatctcgtaccgacttcgtagtggtttcaaaaacaaaatctggaatccctgttgtgaaatttcatcttggacagcgcctgcatatgctttgcagagttacgctaattcttgcaactatgccttcagatgtttgtagagttaggctcattcttgaaagaaaacaaaggattgtttttttagataataatgg

SEQ ID NO: 25524 - protein, 93 aa, Zea mays subsp. mays
  misc_feature (1)..(93): Ceres Seq. ID no. 13491119
PSANLLLYFQEDVSVVDHWLVSGTHYARTSEEWLKRMDKSITSVRLIFEETYGKESTTKWIAYWRTFFISVAELFGYNNGDEWMVAHYLFRKK

SEQ ID NO: 25525 - protein, 76 aa, Zea mays subsp. mays
  misc_feature (1)..(76): Ceres Seq. ID no. 13491120
MYTDEQLLFWHVVVSRTDFVVVSKTKSGIPVVKFHLGQRLHMLCRVTLILATMPSDVCRVRLILERKQRIVFLDNN

SEQ ID NO: 25526 - protein, 57 aa, Zea mays subsp. mays
  misc_feature (1)..(57): Ceres Seq. ID no. 13491121
MDKSITSVRLIFEETYGKESTTKWIAYWRTFFISVAELFGYNNGDEWMVAHYLFRKK

SEQ ID NO: 25527 - DNA, 582 bp, Zea mays subsp. mays
  misc_feature (1)..(582): Ceres Seq. ID no. 13491138
gctgactgattggtgtggttcttccagaggatcaccgagatggccgggatcgtcctctccctcgacccgaagccgatcaagggcgactggaacggcgccggcgctcacaccaactacagcaccaagtcgatgagggaggccggtggctacgaggtgatcaaggaggcgatcgagaagctggggaggaggcacagggagcacatcgccgcgtacggcgagggcaacgagcgccgcctcacgggccgccacgagaccgccgacatcaacaccttcaaatggggcgtggcgaaccgcggcgcgtccatccgcgtcggccgcgacaccgagaaggagggcaagggatacttcgaggaccgcaggccggcttccaacatggacccctacgtcgtcaccggcatgatcgccgacaccaccatcctgtggaagggaaactgataaaaccactgttcttctcctgcacgcatgcatccgccccgtgctgtcactttttgtttttcaaatttcgattcccgtcctaaagtttgttaccacttattattacggtctccagtgtactgctcggaaagtccgaataaaaacggc

SEQ ID NO: 25528 - protein, 131 aa, Zea mays subsp. mays
  misc_feature (1)..(131): Ceres Seq. ID no. 13491139
MAGIVLSLDPKPIKGDWNGAGAHTNYSTKSMREAGGYEVIKEAIEKLGRRHREHIAAYGEGNERRLTGRHETADINTFKWGVANRGASIRVGRDTEKEGKGYFEDRRPASNMDPYVVTGMIADTTILWKGN

SEQ ID NO: 25529 - protein, 101 aa, Zea mays subsp. mays
  misc_feature (1)..(101): Ceres Seq. ID no. 13491140
MREAGGYEVIKEAIEKLGRRHREHIAAYGEGNERRLTGRHETADINTFKWGVANRGASIRVGRDTEKEGKGYFEDRRPASNMDPYVVTGMIADTTILWKGN

SEQ ID NO: 25530 - protein, 80 aa, Zea mays subsp. mays
  misc_feature (1)..(80): Ceres Seq. ID no. 13491141
MGRGEPRRVHPRRPRHREGGQGILRGPQAGFQHGPLRRHRHDRRHHHPVEGKLIKPLFFSCTHASAPCCHFLFFKFRFPS

SEQ ID NO: 25531 - DNA, 1243 bp, Zea mays subsp. mays
  misc_feature (1)..(1243): Ceres Seq. ID no. 13491142
gtccacagcagagtagagtagcacacgcactcgcctcttgtgtctttctttgtgagctgtggtgtggtggtcgagacacacacagcagcagcaacaacaacatacatacatgcacgctagcctcgcctcctacgccgcggcagctatgccggcgctggacctccgccccgagatagcgcacgcgcaccagcccgtcatgtcgccctctcaccacggctgggacggcaatggcgccacagccgtgcccacaccgatgcccaagaggctggacgggaaggtggccattgtgacgggcggcgcgcgcgggatcggcgaggccatcgtgcggctgttcgccaagcacggggcccgggtggtgatcgcggacatcgacgacgccgcgggggaggcgctggcgtcggcgctgggcccgcaggtcagcttcgtgcgctgcgacgtgtccgtggaggacgacgtccggcgcgccgtggactgggcgctgtcgcgccacggcggccgcctcgacgtctactgcaacaacgccggggtgctgggccgccagacgcgcgccgccaggagcatcctgtccttcgacgcggccgagttcgaccgcgtgctccgcgtcaacgcgctgggcgccgcgctcgggatgaagcacgcggcgcgcgccatggcgccgcgccgcgcggggagcatcgtctccgtcgccagcgtcgcggccgtgctgggcggcctcggcccgcacgcctacaccgcctccaagcacgccatcgtcgggctcaccaagaacgccgcctgcgagctgcgcgcgcacggggtccgggtcaactgcgtctcgcccttcggcgtcgccacgcccatgctcatcaacgcctggcgccagggccacgacgacgccaccgccgacgccgaccgagacctcgacctcgacctcgacgtcaccgtgcccagcgaccaggaggtggagaagatggaggaggtggtcaggggcctggccacgctcaagggccccacgctcaggcccagggacatcgccgaggcggtgctcttcctggccagcgacgaggccaggtatatatcgggccacaaccttgtcgtggacggcggcgtcaccacatccaggaacctcatcggcttgtgaatcaatgtcaatccgttccaaatatcccattcccatggctaggctaattagagaaggagagagagaaaactgctattagttgtacttgaagtgatcgattttcatttggttgattgattcatc

SEQ ID NO: 25532 - protein, 336 aa, Zea mays subsp. mays
  misc_feature (1)..(336): Ceres Seq. ID no. 13491143
MHASLASYAAAAMPALDLRPEIAHAHQPVMSPSHHGWDGNGATAVPTPMPKRLDGKVAIVTGGARGIGEAIVRLFAKHGARVVIADIDDAAGEALASALGPQVSFVRCDVSVEDDVRRAVDWALSRHGGRLDVYCNNAGVLGRQTRAARSILSFDAAEFDRVLRVNALGAALGMKHAARAMAPRRAGSIVSVASVAAVLGGLGPHAYTASKHAIVGLTKNAACELRAHGVRVNCVSPFGVATPMLINAWRQGHDDATADADRDLDLDLDVTVPSDQEVEKMEEVVRGLATLKGPTLRPRDIAEAVLFLASDEARYISGHNLVVDGGVTTSRNLIGL

SEQ ID NO: 25533 - protein, 324 aa, Zea mays subsp. mays
  misc_feature (1)..(324): Ceres Seq. ID no. 13491144
MPALDLRPEIAHAHQPVMSPSHHGWDGNGATAVPTPMPKRLDGKVAIVTGGARGIGEAIVRLFAKHGARVVIADIDDAAGEALASALGPQVSFVRCDVSVEDDVRRAVDWALSRHGGRLDVYCNNAGVLGRQTRAARSILSFDAAEFDRVLRVNALGAALGMKHAARAMAPRRAGSIVSVASVAAVLGGLGPHAYTASKHAIVGLTKNAACELRAHGVRVNCVSPFGVATPMLINAWRQGHDDATADADRDLDLDLDVTVPSDQEVEKMEEVVRGLATLKGPTLRPRDIAEAVLFLASDEARYISGHNLVVDGGVTTSRNLIGL

SEQ ID NO: 25534 - protein, 307 aa, Zea mays subsp. mays
  misc_feature (1)..(307): Ceres Seq. ID no. 13491145
MSPSHHGWDGNGATAVPTPMPKRLDGKVAIVTGGARGIGEAIVRLFAKHGARVVIADIDDAAGEALASALGPQVSFVRCDVSVEDDVRRAVDWALSRHGGRLDVYCNNAGVLGRQTRAARSILSFDAAEFDRVLRVNALGAALGMKHAARAMAPRRAGSIVSVASVAAVLGGLGPHAYTASKHAIVGLTKNAACELRAHGVRVNCVSPFGVATPMLINAWRQGHDDATADADRDLDLDLDVTVPSDQEVEKMEEVVRGLATLKGPTLRPRDIAEAVLFLASDEARYISGHNLVVDGGVTTSRNLIGL

SEQ ID NO: 25535 - DNA, 1807 bp, Zea mays subsp. mays
  misc_feature (1)..(1807): Ceres Seq. ID no. 13491298
atggtgaaggccgtggtggtgggcgcggcggtcgtggcgtgtgcggcggtcggggtggcggtggtgctggagcgccgccggcggaagcgagacgccgacctcctggggtccgcggaggcggagaggaggaggcgcgcggccgccgtcatcgaggaggtcgagagcagcctcgccacgcccacggcgctgctgcggggcatcgcggacgccatggtcgccgagatggagcgcggcctgcgcggggacatccacgcgcagctcaagatgctcattagctacgtcgacagcctccccaccggagatgaacatgggctgttttatgcactggatcttggagggaccaacttccgtgtgctgcgagtccagctaggaggaaaggagaaacgtgttgtcaaacaacagtatgaggaggtttccattccaccacatttgatggtcgggacttccatggaactatttgatttcattgctgctgcattggctaaatttgttggtactgaaggtgaagatttccaactcccagagggtaggcagagagaacttggtttcactttttccttcccggcgaaccaaacatcaatatcatcaggaacactcatcaagtggacaaagggcttttccatcaatggcacggttggtgaagatgttgtttctgagttgagcagggccatggagaggcagggactagatatgaaagttacggcattggtcaatgatacagttggcacattggctggtgggagatatatggataacgatgtagttgcagccgtaatattgggcactggtacaaatgcagcatatgtggagcatgcaaatgcaattcctaaatggactgggttactgcctaaatctggaaacatggtaattaatacagagtgggggagcttcaaatccaacaaacttcctctttcagaatatgacaaagccatggactttgaaagtttgaaccctggagagcagatatacgaaaaaatgatttctggtatgtatctcggagagattgttcgaagaattttactgaagttagcacatgaagcttctctatttggggatgttgttccacctaagctggagctgccatttatattgaggacgccagatatggcagccatgcatcatgactcctcacatgacctcaaaactcttggagctaaactgaaggacatagtcggggtcgcggacacttccctggaagtaaggtacatcactcgtcacatctgtgaccttgtcgcagagcgtgcagcacgcctggccgccgcaggcgtgtacagcatcctgaagaagataggccgggacaaagtaccaagcggtggcggtaaaatgccgaggaccgtagttgccttggacggtgggctctacgaacactacaagaagttcagcagttgcgtagaagcgactctcacagacttgctcggcgaggaggcttcttcctccgtggtcgccaagctggccaacgacggctctggcattggagctgcgcttctcgcagcctcacactcccagtatcagtatggcgcgagtgactagtagtcctgaaatgggcgcggatcgagattttgagtgtagctctcatttatcttttcttttttcccttttcaaaacatctttttggggatttttttcggcttccttttgttggctattccgtggatgcacttacggctntgcattgggatgtagctagtatagagccaatgagtttggaggttatctaatggcacaaggcaggagcatggnaatggaagcagagcantnccattcatgctgtgcccattcttttgttccccttgtatggtgtaatctg

SEQ ID NO: 25536 - protein, 509 aa, Zea mays subsp. mays
  misc_feature (1)..(509): Ceres Seq. ID no. 13491299
MVKAVVVGAAVVACAAVGVAVVLERRRRKRDADLLGSAEAERRRRAAAVIEEVESSLATPTALLRGIADAMVAEMERGLRGDIHAQLKMLISYVDSLPTGDEHGLFYALDLGGTNFRVLRVQLGGKEKRVVKQQYEEVSIPPHLMVGTSMELFDFIAAALAKFVGTEGEDFQLPEGRQRELGFTFSFPANQTSISSGTLIKWTKGFSINGTVGEDVVSELSRAMERQGLDMKVTALVNDTVGTLAGGRYMDNDVVAAVILGTGTNAAYVEHANAIPKWTGLLPKSGNMVINTEWGSFKSNKLPLSEYDKAMDFESLNPGEQIYEKMISGMYLGEIVRRILLKLAHEASLFGDVVPPKLELPFILRTPDMAAMHHDSSHDLKTLGAKLKDIVGVADTSLEVRYITRHICDLVAERAARLAAAGVYSILKKIGRDKVPSGGGKMPRTVVALDGGLYEHYKKFSSCVEATLTDLLGEEASSSVVAKLANDGSGIGAALLAASHSQYQYGASD

SEQ ID NO: 25537 - protein, 439 aa, Zea mays subsp. mays
  misc_feature (1)..(439): Ceres Seq. ID no. 13491300
MVAEMERGLRGDIHAQLKMLISYVDSLPTGDEHGLFYALDLGGTNFRVLRVQLGGKEKRVVKQQYEEVSIPPHLMVGTSMELFDFIAAALAKFVGTEGEDFQLPEGRQRELGFTFSFPANQTSISSGTLIKWTKGFSINGTVGEDVVSELSRAMERQGLDMKVTALVNDTVGTLAGGRYMDNDVVAAVILGTGTNAAYVEHANAIPKWTGLLPKSGNMVINTEWGSFKSNKLPLSEYDKAMDFESLNPGEQIYEKMISGMYLGEIVRRILLKLAHEASLFGDVVPPKLELPFILRTPDMAAMHHDSSHDLKTLGAKLKDIVGVADTSLEVRYITRHICDLVAERAARLAAAGVYSILKKIGRDKVPSGGGKMPRTVVALDGGLYEHYKKFSSCVEATLTDLLGEEASSSVVAKLANDGSGIGAALLAASHSQYQYGASD

SEQ ID NO: 25538 - protein, 435 aa, Zea mays subsp. mays
  misc_feature (1)..(435): Ceres Seq. ID no. 13491301
MERGLRGDIHAQLKMLISYVDSLPTGDEHGLFYALDLGGTNFRVLRVQLGGKEKRVVKQQYEEVSIPPHLMVGTSMELFDFIAAALAKFVGTEGEDFQLPEGRQRELGFTFSFPANQTSISSGTLIKWTKGFSINGTVGEDVVSELSRAMERQGLDMKVTALVNDTVGTLAGGRYMDNDVVAAVILGTGTNAAYVEHANAIPKWTGLLPKSGNMVINTEWGSFKSNKLPLSEYDKAMDFESLNPGEQIYEKMISGMYLGEIVRRILLKLAHEASLFGDVVPPKLELPFILRTPDMAAMHHDSSHDLKTLGAKLKDIVGVADTSLEVRYITRHICDLVAERAARLAAAGVYSILKKIGRDKVPSGGGKMPRTVVALDGGLYEHYKKFSSCVEATLTDLLGEEASSSVVAKLANDGSGIGAALLAASHSQYQYGASD

SEQ ID NO: 25539 - DNA, 625 bp, Zea mays subsp. mays
  misc_feature (1)..(625): Ceres Seq. ID no. 13491331
atttgactgggattcaggtgacggcacaagaagtgtcaacgatgctccggtgggggcacaacagcatcatcttcctgataaacaatggagggtacacaatcgaggtggagattcacgatggcccttataacgttatcaagaactggaactacaccggtctggtggaagcgttccacaatggcgagggcgcgtgctacacagcaaaggttcgaacagaggaggagctgacggaggcactggaggcagctctgggacctaagaaggactgcttatgcttcatcgaggtcatcgtgcataaggatgacaccagcaaagagcttctcgagtggggatctagggtttctgcggcgaatagccgtccacctaatcctcagtgaatacatcaggtctcccgaattgtcctgtaaaccgatccgctttctggtgacgtccatagcaagaagtctcggcgatgacatgctgccgatttctgaataaatcgtccctgcaattcactggtgttgaagtcctcgttgtaaagatacaaagacgtttggaagaatcactgacaacgtaaactctacgtatcttacgtgaaatagccccgtgatctacatatatataaagcagattttgagagtactag

SEQ ID NO: 25540 - protein, 124 aa, Zea mays subsp. mays
  misc_feature (1)..(124): Ceres Seq. ID no. 13491332
LTGIQVTAQEVSTMLRWGHNSIIFLINNGGYTIEVEIHDGPYNVIKNWNYTGLVEAFHNGEGACYTAKVRTEEELTEALEAALGPKKDCLCFIEVIVHKDDTSKELLEWGSRVSAANSRPPNPQ

SEQ ID NO: 25541 - protein, 111 aa, Zea mays subsp. mays
  misc_feature (1)..(111): Ceres Seq. ID no. 13491333
MLRWGHNSIIFLINNGGYTIEVEIHDGPYNVIKNWNYTGLVEAFHNGEGACYTAKVRTEEELTEALEAALGPKKDCLCFIEVIVHKDDTSKELLEWGSRVSAANSRPPNPQ

SEQ ID NO: 25542 - DNA, 1526 bp, Zea mays subsp. mays
  misc_feature (1)..(1526): Ceres Seq. ID no. 13492010
atccaaatggggcttatcgccaccatccaatcgaagctctggaacctcctccactcccagcttccgccgacgctcgcttcagctgctgctttccttcccatccttcaacaggtgcaatttgcatttcccatggagctcactgattaataacgtgtgagctgaacttgcttttctgtggacaatttggaacttcagtactagtttccgataggattcagggagaaatgatctcttttaacaatttattttggagctcccttcagccttctttcaagttttacagaaagtgcctgacaaactgcccatattttgcactgaccatgcattcaactacaaagcccttgggttcatctatgccggtaaagagggcgcatttgaagccacatgccgcagacatcaagaggaacccccatgtacatgagctttacaaattggtttaccgacttccggagaaccttagctggctgttggcaccaccagaaattcctaaaagacctgcctcaaagaagaaaaaacaaaaagacgaaatagtggccggtaacagctttggtgtgatcttggagtgggagggagttgttgtggatgatgatgatccagacttggagccccgggtttggtatgttctatcactagaagaggggaagtctttccctccagatgcattgctgaagaaaatcgagggaatgagaactgaccaggctattgcagaagtcttatgttggtcagaagatccagcagaaatccaaaggttggcaacacacaaggaggttatatatcaaaaacttcaaggtggatactaccagctgcgaccacatgtgcttgatttcttgaacacccttgtgggttttgacattccaatagcaattgcagctcctcgctcaaggaagagccttgaagaagggatcaaaactgttggtctgcaaggctacttcgatgctatagttgcattggaggacttctgcttagggaaacctgatggtgagatgtttgaagtcgcagcggagcaacttggtctggaaccagatgcctgtgttgtgtttggtaactcaaacttgacgacggaatctgcacataacgctgggatgaggtgtgtggcagttgcaggccgacaccctgcctatgagctccaatcagcaaaccatgttgtgagatggcttgatcagctctctattgttgacttgcagaggcttgctaatggtgaagttattggtcgcaggggtagagaatctgacatggatatggaaattgtgattgaggaatgatgatgtttctgcaaaaatgacgcactaatatattgttgtgcttataatctgatacacctaagtaatgcattacattttgtaaacaggccaagcagtgcaagttccggactaaggatactccggagtttgcattaccttcctggtttgcttgtgatgaattggaattcgcctaaaactcttttagtcattagagttggaagtgaagaaactcccacccgtaacttgtgtatgtacagtatatatatgtattacctattcttccct

SEQ ID NO: 25543 - protein, 345 aa, Zea mays subsp. mays
  misc_feature (1)..(345): Ceres Seq. ID no. 13492011
MISFNNLFWSSLQPSFKFYRKCLTNCPYFALTMHSTTKPLGSSMPVKRAHLKPHAADIKRNPHVHELYKLVYRLPENLSWLLAPPEIPKRPASKKKKQKDEIVAGNSFGVILEWEGVVVDDDDPDLEPRVWYVLSLEEGKSFPPDALLKKIEGMRTDQAIAEVLCWSEDPAEIQRLATHKEVIYQKLQGGYYQLRPHVLDFLNTLVGFDIPIAIAAPRSRKSLEEGIKTVGLQGYFDAIVALEDFCLGKPDGEMFEVAAEQLGLEPDACVVFGNSNLTTESAHNAGMRCVAVAGRHPAYELQSANHVVRWLDQLSIVDLQRLANGEVIGRRGRESDMDMEIVIEE

SEQ ID NO: 25544 - protein, 313 aa, Zea mays subsp. mays
  misc_feature (1)..(313): Ceres Seq. ID no. 13492012
MHSTTKPLGSSMPVKRAHLKPHAADIKRNPHVHELYKLVYRLPENLSWLLAPPEIPKRPASKKKKQKDEIVAGNSFGVILEWEGVVVDDDDPDLEPRVWYVLSLEEGKSFPPDALLKKIEGMRTDQAIAEVLCWSEDPAEIQRLATHKEVIYQKLQGGYYQLRPHVLDFLNTLVGFDIPIAIAAPRSRKSLEEGIKTVGLQGYFDAIVALEDFCLGKPDGEMFEVAAEQLGLEPDACVVFGNSNLTTESAHNAGMRCVAVAGRHPAYELQSANHVVRWLDQLSIVDLQRLANGEVIGRRGRESDMDMEIVIEE

SEQ ID NO: 25545 - protein, 302 aa, Zea mays subsp. mays
  misc_feature (1)..(302): Ceres Seq. ID no. 13492013
MPVKRAHLKPHAADIKRNPHVHELYKLVYRLPENLSWLLAPPEIPKRPASKKKKQKDEIVAGNSFGVILEWEGVVVDDDDPDLEPRVWYVLSLEEGKSFPPDALLKKIEGMRTDQAIAEVLCWSEDPAEIQRLATHKEVIYQKLQGGYYQLRPHVLDFLNTLVGFDIPIAIAAPRSRKSLEEGIKTVGLQGYFDAIVALEDFCLGKPDGEMFEVAAEQLGLEPDACVVFGNSNLTTESAHNAGMRCVAVAGRHPAYELQSANHVVRWLDQLSIVDLQRLANGEVIGRRGRESDMDMEIVIEE

SEQ ID NO: 25546 - DNA, 1285 bp, Zea mays subsp. mays
  misc_feature (1)..(1285): Ceres Seq. ID no. 13492017
agcaacagccatgacgacgacgaagcggcactgcttgcgcttcaccaccgtcctggcgacgacgcttctctccgccaccgccgcctgcctcgacgtcggcttctacgacaggacatgccccactgccgagaccatcgtgcagcagaccgtggcggccgcgttcaggaacaactccggcgtcgctccggcgctgatccgcatgcacttccatgactgctttgtcaggggctgcgatggctcggtgctgatcgacacggtaggcaacctgacggcggagaaggacgcgccacccaacaaccccagcctccggttcttcgacgtggtcgaccgtgccaaggcgtcactggaggctcagtgccccggcgtggtctcctgcgccgacgtgctcgccttcgcggccagggacagcgtcgtgctctccggtggcctcggctaccaggtgccgggcggacgccgtgacgggcggatatccaatgacaccgaagccctcaacaacctgcctccgccgttcttcaacgccaccgagctggcagacaggttcgcctccaagaacctcactatcgaggacctggtcgtgctctcgggcgcgcacaccatcggcgtctcgcactgcagcggcttcgccggcccgacagacctgaacggccccgttgaccggctctacaacttcagctcgcctgacgggattgacccgacgctgagcaaagcctacgcatttcttctcaagagcatctgcccggccaacaccagccagttcttcccgaacacgacggtgttcatggacctcatcacgccggaaaggtttgacaacaagtactacgtcggcctgaccaacaacctgggcctcttcaagtcagacgtggcgctgctgaccaacgcgacgatgaaggccctggtcgactccttcgtgcgcagcgaggcgactttcaggaccaagtttgccaggtccatgatcaagatggggcagatcgaggtgctgacggggacgcagggcgagatcaggcgcaactgcagggtcatcaaccccgttagtgccaccgatgatgtcgtcctcgcccgcccatcaggattcactggagtggctgcgagctagctaaccaactgtcggttcatgcacatgcattgtgcagtgtgtgatgtctagtgtgagttgatgtgtgaaattgtaataagtaatgagcagattatcttggtaagctcgcttgttactgtggcaaaagttgttttgttgcatgacaaaaatgtatactcatcggattattgaaaacaaaactgatatttgttc

SEQ ID NO: 25547 - protein, 363 aa, Zea mays subsp. mays
  misc_feature (1)..(363): Ceres Seq. ID no. 13492018
ATAMTTTKRHCLRFTTVLATTLLSATAACLDVGFYDRTCPTAETIVQQTVAAAFRNNSGVAPALIRMHFHDCFVRGCDGSVLIDTVGNLTAEKDAPPNNPSLRFFDVVDRAKASLEAQCPGVVSCADVLAFAARDSVVLSGGLGYQVPGGRRDGRISNDTEALNNLPPPFFNATELADRFASKNLTIEDLVVLSGAHTIGVSHCSGFAGPTDLNGPVDRLYNFSSPDGIDPTLSKAYAFLLKSICPANTSQFFPNTTVFMDLITPERFDNKYYVGLTNNLGLFKSDVALLTNATMKALVDSFVRSEATFRTKFARSMIKMGQIEVLTGTQGEIRRNCRVINPVSATDDVVLARPSGFTGVAAS

SEQ ID NO: 25548 - protein, 360 aa, Zea mays subsp. mays
  misc_feature (1)..(360): Ceres Seq. ID no. 13492019
MTTTKRHCLRFTTVLATTLLSATAACLDVGFYDRTCPTAETIVQQTVAAAFRNNSGVAPALIRMHFHDCFVRGCDGSVLIDTVGNLTAEKDAPPNNPSLRFFDVVDRAKASLEAQCPGVVSCADVLAFAARDSVVLSGGLGYQVPGGRRDGRISNDTEALNNLPPPFFNATELADRFASKNLTIEDLVVLSGAHTIGVSHCSGFAGPTDLNGPVDRLYNFSSPDGIDPTLSKAYAFLLKSICPANTSQFFPNTTVFMDLITPERFDNKYYVGLTNNLGLFKSDVALLTNATMKALVDSFVRSEATFRTKFARSMIKMGQIEVLTGTQGEIRRNCRVINPVSATDDVVLARPSGFTGVAAS

SEQ ID NO: 25549 - protein, 297 aa, Zea mays subsp. mays
  misc_feature (1)..(297): Ceres Seq. ID no. 13492020
MHFHDCFVRGCDGSVLIDTVGNLTAEKDAPPNNPSLRFFDVVDRAKASLEAQCPGVVSCADVLAFAARDSVVLSGGLGYQVPGGRRDGRISNDTEALNNLPPPFFNATELADRFASKNLTIEDLVVLSGAHTIGVSHCSGFAGPTDLNGPVDRLYNFSSPDGIDPTLSKAYAFLLKSICPANTSQFFPNTTVFMDLITPERFDNKYYVGLTNNLGLFKSDVALLTNATMKALVDSFVRSEATFRTKFARSMIKMGQIEVLTGTQGEIRRNCRVINPVSATDDVVLARPSGFTGVAAS

SEQ ID NO: 25550 - DNA, 1534 bp, Zea mays subsp. mays
  misc_feature (1)..(1534): Ceres Seq. ID no. 13492041
tccaaattccccggtcacctacctcctctgccctctcactctcagatccgcgtcctcggctcctcctcctcctcctcctcctcccttccttcgttccttccagatctccctcccagtcgagagtcgagatccaccgcctccgcgccccctcaccggtgcagcgcgaggaagcggggggccagaggccagccatgggcaaggaaggggccagcgacggcggcatgtcggagtcggtgatccgcaaggtcctggtctcgtacatgtacgtggcggtgtggatcttcctctccttctccgtgatcgtctacaacaagtacatcctcgaccccaagatgtacaactggcccttccccatctccctcaccatggtgcacatggccttctgctcctccctcgccgtggcgctcgtccgcgtcctccgcgtcgtcgacctcccgtcctcgcccgccatgacgtcgcagctctacgtctcctccgtgctccctatcggcgcgctctactcgctctcgctctggttctccaactccgcctacatctacctctccgtctccttcatccagatgctcaaggcgctcatgcccgtcgccgtctactccatcggggtcctcttcaagaaggagaccttcaagtcctccgccatgctcaacatgctctccatctcgttcggcgtcgccatcgccgcctacggagaggcccgcttcgacgcccgcggcgtcgccctgcagctcgccgccgtcgccttcgaggccacgcgcctcgtcctcatccagatcctcctcacctccaagggcatctccctcaaccccatcacctcgctctactacgtcgcgccctgctgcctcgctttcctcgtcgtgccctgggtcttcgtcgagctgcccaggctgcgcgccgtcggcatcttccagccggacctcttcgtcttcggcaccaactccctctgcgccttcgcgctcaacctcgccgtcttcctgctcgtcggcaagacgtcggctctcaccatgaacgtcgccggcgtcgtcaaggactggctgctcatcgccttctcctggtccgtcatccgcgacaccgtcacccccatcaacctcttcggctacgggatcgccttcctcggggtgggatactacaaccacgtcaagctgcaggcgctcaaggccaaggaggcgcagaagaaggcgacgcaggccgacgaggaggccgggtcgctgctgcaggagcgcgactcgcacggcgaccgcaagactgacaaccaggcctagcgagtgtgccggatctcatgatccaattcgctcggttctgaacccagtgtactccaaatatgtgatccaacccttacacgtttgatgcaaaatttgttcatttcttgtctttgacttgatctggtggtaccaaggaaataagcacgggaaagatgcaagctttgtgtcgaacatgtgaaaaaaaatatatatgtatgagcaattttttgtcttttttttggggccagttgtagctgttactaccattaaacagtaagcaaaactgtttgcatttt

SEQ ID NO: 25551 - protein, 418 aa, Zea mays subsp. mays
  misc_feature (1)..(418): Ceres Seq. ID no. 13492042
QIPRSPTSSALSLSDPRPRLLLLLLLLPSFVPSRSPSQSRVEIHRLRAPSPVQREEAGGQRPAMGKEGASDGGMSESVIRKVLVSYMYVAVWIFLSFSVIVYNKYILDPKMYNWPFPISLTMVHMAFCSSLAVALVRVLRVVDLPSSPAMTSQLYVSSVLPIGALYSLSLWFSNSAYIYLSVSFIQMLKALMPVAVYSIGVLFKKETFKSSAMLNMLSISFGVAIAAYGEARFDARGVALQLAAVAFEATRLVLIQILLTSKGISLNPITSLYYVAPCCLAFLVVPWVFVELPRLRAVGIFQPDLFVFGTNSLCAFALNLAVFLLVGKTSALTMNVAGVVKDWLLIAFSWSVIRDTVTPINLFGYGIAFLGVGYYNHVKLQALKAKEAQKKATQADEEAGSLLQERDSHGDRKTDNQA

SEQ ID NO: 25552 - protein, 414 aa, Zea mays subsp. mays
  misc_feature (1)..(414): Ceres Seq. ID no. 13492043
PNSPVTYLLCPLTLRSASSAPPPPPPPPFLRSFQISLPVESRDPPPPRPLTGAARGSGGPEASHGQGRGQRRRHVGVGDPQGPGLVHVRGGVDLPLLLRDRLQQVHPRPQDVQLALPHLPHHGAHGLLLLPRRGARPRPPRRRPPVLARHDVAALRLLRAPYRRALLALALVLQLRLHLPLRLLHPDAQGAHARRRLLHRGPLQEGDLQVLRHAQHALHLVRRRHRRLRRGPLRRPRRRPAARRRRLRGHAPRPHPDPPHLQGHLPQPHHLALLRRALLPRFPRRALGLRRAAQAARRRHLPAGPLRLRHQLPLRLRAQPRRLPARRQDVGSHHERRRRRQGLAAHRLLLVRHPRHRHPHQPLRLRDRLPRGGILQPRQAAGAQGQGGAEEGDAGRRGGRVAAAGARLARRPQD

SEQ ID NO: 25553 - protein, 355 aa, Zea mays subsp. mays
  misc_feature (1)..(355): Ceres Seq. ID no. 13492044
MGKEGASDGGMSESVIRKVLVSYMYVAVWIFLSFSVIVYNKYILDPKMYNWPFPISLTMVHMAFCSSLAVALVRVLRVVDLPSSPAMTSQLYVSSVLPIGALYSLSLWFSNSAYIYLSVSFIQMLKALMPVAVYSIGVLFKKETFKSSAMLNMLSISFGVAIAAYGEARFDARGVALQLAAVAFEATRLVLIQILLTSKGISLNPITSLYYVAPCCLAFLVVPWVFVELPRLRAVGIFQPDLFVFGTNSLCAFALNLAVFLLVGKTSALTMNVAGVVKDWLLIAFSWSVIRDTVTPINLFGYGIAFLGVGYYNHVKLQALKAKEAQKKATQADEEAGSLLQERDSHGDRKTDNQA

SEQ ID NO: 25554 - DNA, 1433 bp, Zea mays subsp. mays
  misc_feature (1)..(1433): Ceres Seq. ID no. 13492071
aagaaaaaaaaacgttttctttccttcgtttatgtatgcagggcctgcggttctatttaaagcttgttatcgcaggtagtagaggcacatcccagttggaagggcagccaataaggtaaggggtgacgaaaatggctccaacgaccgccaccaaggacgacagtggctacggcgacgagcgccggcgcgagctgcaggcgttcgacgacacgaagctgggggtgaaaggtctggtggactccggcgtcaagtccatcccgtccatcttccaccacccgccggaagccctgagcgacataatttctccggcgcctctgccgtcgtcgccaccctccggcgccgccatcccggtggtggacctctcggtgacgcggcgcgaggacctagtcgagcaggtgaggcacgcggccgggacggtgggcttcttctggctggtgaaccacggcgtggcggaggagctgatgggcggcatgctccgcggggtgcgccagttcaacgagggccccgtggaggcgaagcaggcgctctactccagggacctggctcgcaacctgcgcttcgcctccaacttcgacctcttcaaggccgctgcggccgactggcgcgacacgctcttctgcgaggtggctccgaacccgccgccgcgggaggagctgccggagccactgaggaacgtgatgctggagtacggcgcggcggtgacgaagctggcgcggttcgtgttcgagctgctgtccgagtccctcggcatgcccagcgaccacctgtacgagatggagtgcatgcagaacctgaacgtggtgtgccagtactacccgccgtgcccggagccgcaccgcaccgtgggcgtcaagaggcacacggaccctggcttcttcaccatcctcctgcaggacggcatgggcggcctgcaggtgcgcctcggcaacaacgggcagagcggcggctgctgggtggacatcgctccccggcctggggcgctcatggtcaacatcggtgatcttctgcagctcgtgaccaatgaccggttcaggagcgtggagcaccgggtgccagccaacaagagcagcgacacggcgagggtctccgtggcgtccttcttcaacacggacgtgaggaggtccgagaggatgtacggccccattccagaccccagcaagcccccgctgtacaggagcgtcagggcccgagacttcatcgcaaagttcaacaccataggactcgatggccgcgcgctcgaccacttcaggctctagctacctggctacgtttcagattcgtcctttcatttgctttggtctctaattaataattccaaataataagcccgcggatggacctctgtctgtctgtctgtaatttagtttccaagtttagtttgttgtggtaattcctgtatcaattatgtcataaataaaagctagggaaccttg

SEQ ID NO: 25555 - protein, 374 aa, Zea mays subsp. mays
  misc_feature (1)..(374): Ceres Seq. ID no. 13492072
MAPTTATKDDSGYGDERRRELQAFDDTKLGVKGLVDSGVKSIPSIFHHPPEALSDIISPAPLPSSPPSGAAIPVVDLSVTRREDLVEQVRHAAGTVGFFWLVNHGVAEELMGGMLRGVRQFNEGPVEAKQALYSRDLARNLRFASNFDLFKAAAADWRDTLFCEVAPNPPPREELPEPLRNVMLEYGAAVTKLARFVFELLSESLGMPSDHLYEMECMQNLNVVCQYYPPCPEPHRTVGVKRHTDPGFFTILLQDGMGGLQVRLGNNGQSGGCWVDIAPRPGALMVNIGDLLQLVTNDRFRSVEHRVPANKSSDTARVSVASFFNTDVRRSERMYGPIPDPSKPPLYRSVRARDFIAKFNTIGLDGRALDHFRL

SEQ ID NO: 25556 - protein, 264 aa, Zea mays subsp. mays
  misc_feature (1)..(264): Ceres Seq. ID no. 13492073
MGGMLRGVRQFNEGPVEAKQALYSRDLARNLRFASNFDLFKAAAADWRDTLFCEVAPNPPPREELPEPLRNVMLEYGAAVTKLARFVFELLSESLGMPSDHLYEMECMQNLNVVCQYYPPCPEPHRTVGVKRHTDPGFFTILLQDGMGGLQVRLGNNGQSGGCWVDIAPRPGALMVNIGDLLQLVTNDRFRSVEHRVPANKSSDTARVSVASFFNTDVRRSERMYGPIPDPSKPPLYRSVRARDFIAKFNTIGLDGRALDHFRL

SEQ ID NO: 25557 - protein, 261 aa, Zea mays subsp. mays
  misc_feature (1)..(261): Ceres Seq. ID no. 13492074
MLRGVRQFNEGPVEAKQALYSRDLARNLRFASNFDLFKAAAADWRDTLFCEVAPNPPPREELPEPLRNVMLEYGAAVTKLARFVFELLSESLGMPSDHLYEMECMQNLNVVCQYYPPCPEPHRTVGVKRHTDPGFFTILLQDGMGGLQVRLGNNGQSGGCWVDIAPRPGALMVNIGDLLQLVTNDRFRSVEHRVPANKSSDTARVSVASFFNTDVRRSERMYGPIPDPSKPPLYRSVRARDFIAKFNTIGLDGRALDHFRL

SEQ ID NO: 25558 - DNA, 1431 bp, Zea mays subsp. mays
  misc_feature (1)..(1431): Ceres Seq. ID no. 13492075
caaagatgatattagcgttgaagctggaactttagatgaattgctgcacaaggagtctgcagtacctacattagagaaggatcatagctctgacaatcctgagggtttatcaagggaagagttaggtcgcatggtagcttcacgttggactggagaaagtgtaagtgaggttagtaaagatgataagaagggacatgaagatgagcaagaaataccagaacctgcaaaagaagcacttgaagacgaattagaaattccagaacctgctgaagaaaattatgatggatatcattcagaagttgaggatgacaggcataaatatgaagatgaagagtttgatcataagtcagaagatgaatatgttgatgaccatgatgagcatgttgagtcctatagatctgatgatgaccagaaagatttaactgagccaggacatgcatcgtggttggacaaaattcagcagactgtacagaatgtttttcaaaaattcaacttttttaggacccctgtagatttgtcagaggcttctcgcgttcgtaaggagtatgacgatgccaactcaaagctttcaaaaattcagtctaagatatccaatttagctgagaagctaaaacatgattttggcaaagacaaggagttctattccttttatgatcagtgctttgagaccaaggaaggaaagtatacttacaaggtctgtgcatataagaaagcatcacaggctgaagggcacagttccaccaacctggggagatgggacaaatttgaagaatcgtacagagtaatgcacttttcaggtggagacaaatgctggaatggtcctgaccgaagcctaaaggttaggcttagatgtgggctgagcaatgagcttaatgatgtcgatgagcctagcagatgcgagtatgtggctgtattgtcgacgcccgcactctgcgttgaggagaagctgaaggagctgcaaaacaaactggatgccatgtcttcgaagcagcccgggcatgatgaactttaaacggttccggcgtggacaaagaaaatgtcaccaggaagcatagattgacagttacactcataaccttaagggtggaagtcaatggggcatatggacaggaaagggccaagctgaagaaatgggaatgtagggttcaggtcgcctacctggcaatgttagctggcatagagctgtttttttagctgaatttgattggatgctgcaatttttccaggctcatcccgagttgtttggtggaggcgactgcaaccgtgcttttctttgtggtttaacattgctctatttaattagggagagacgctaggcttttgcgtctccagcttcattgccagccattacacatttgatggaatatatagtaagaaacagtacactctgaaccatcataatttgaagatgccagttaaccccgggttgtc

SEQ ID NO: 25559 - protein, 336 aa, Zea mays subsp. mays
  misc_feature (1)..(336): Ceres Seq. ID no. 13492076
KDDISVEAGTLDELLHKESAVPTLEKDHSSDNPEGLSREELGRMVASRWTGESVSEVSKDDKKGHEDEQEIPEPAKEALEDELEIPEPAEENYDGYHSEVEDDRHKYEDEEFDHKSEDEYVDDHDEHVESYRSDDDQKDLTEPGHASWLDKIQQTVQNVFQKFNFFRTPVDLSEASRVRKEYDDANSKLSKIQSKISNLAEKLKHDFGKDKEFYSFYDQCFETKEGKYTYKVCAYKKASQAEGHSSTNLGRWDKFEESYRVMHFSGGDKCWNGPDRSLKVRLRCGLSNELNDVDEPSRCEYVAVLSTPALCVEEKLKELQNKLDAMSSKQPGHDEL

SEQ ID NO: 25560 - protein, 293 aa, Zea mays subsp. mays
  misc_feature (1)..(293): Ceres Seq. ID no. 13492077
MVASRWTGESVSEVSKDDKKGHEDEQEIPEPAKEALEDELEIPEPAEENYDGYHSEVEDDRHKYEDEEFDHKSEDEYVDDHDEHVESYRSDDDQKDLTEPGHASWLDKIQQTVQNVFQKFNFFRTPVDLSEASRVRKEYDDANSKLSKIQSKISNLAEKLKHDFGKDKEFYSFYDQCFETKEGKYTYKVCAYKKASQAEGHSSTNLGRWDKFEESYRVMHFSGGDKCWNGPDRSLKVRLRCGLSNELNDVDEPSRCEYVAVLSTPALCVEEKLKELQNKLDAMSSKQPGHDEL

SEQ ID NO: 25561 - DNA, 1845 bp, Zea mays subsp. mays
  misc_feature (1)..(1845): Ceres Seq. ID no. 13492086
atctgctctgctccggtccgttccgctccttcctccccctatctagctagccttcccgttcctgcatcgcggcggagatgggcgcctccaccacgccgctcgcgtcggcggcggcgctgcttctgctgctgctcgcgccgctcgccgcggcggcggacagcatgtcgatcgtctcctacggcgagcggagcgaggaggaggcgcggcggatgtacgccgagtggatggcggcgcacggccggacctacaacgccgtcggcgaggaggagcgcaggttcgaggtgttcagggacaacctccgctacgtcgacgcccacaacgccgccgccgacgcgggcgtccactccttccgcctcgggctcaaccgcttcgccgacctcaccaacgacgagtaccgcgccacctacctcggcgtcaggagcaggccgcagagggagaggaggctcggtgacaggtacctggccggcgacaacgaggacctgccggagtccgtcgactggcgggccaagggcgccgtcgcggagatcaaggaccagggcagctgcgggagttgctgggctttctcaacaatagcggctgtggaaggcatcaaccagattgttactggcgacatgatctccttgtctgagcaggagcttgttgactgtgacacttcatacaaccaggggtgcaatggaggtctgatggactatgcgtttgagttcatcatcaacaatggcggaatcgacaccgaggaggattacccttacaagggcacggacggacggtgtgatgtcaacaggaaaaacgccaaggttgttactatcgacagctatgaagatgtaccagcgaacagtgagaaaagtctgcagaaggcagttgcgaaccagcccatcagtgttgcaattgaggctggtggcagagcatttcagctctacaactcgggtatcttcacaggaacctgtggaacagcgttggaccatggtgtcacggccgtcggctacggcacagagaacggcaaggactactggatcgtgaagaactcttggggcagcagctggggcgagtccggctacgtcaggatggagcgcaacatcaaggcgtccagcggcaagtgtggtatcgccgttgagccgtcgtaccctctgaagaagggcgccaaccccccgaaccctgggccgaccccgccttcccccaccccgccgcccaccgtctgcgacaactactactcgtgccccgacagcaccacctgctgctgcatctacgagtacggcaagtactgcttcgcctggggctgctgcccgctcgagggcgccacctgctgcgacgaccactacagctgctgcccccatgactaccccgtctgcaacgtcaagcagggaacctgcctcatgggcaaggacagcccactgtcactgtcagtgaaggctacgaagcgcaccctggccaagccgcactgggctttctctggcaacacagctgctgatggcatgaagagcagcgcatgagaaaaacgcagcatggcattaggccgtcaacagccagcatgattagagcccccctgcatgcagaatgatcacccggtcccgtagttcacgacgaaagcatggctgggcggccgctgtttacggatttacttatatcactatagtaggtactcctcctgtacataagcctgaaaaaaaaatgggttcagttgtttatggaactctgccaaatttgcttttgcatgccatgtaaaaatccagctagctcttgccaagcttcacctgcgcagttcaacaggactgcgattgatattcggtgtaatggaagtatttatcggaacaatcagcaatgttatgctatattcatttcttggacgtg

SEQ ID NO: 25562 - protein, 469 aa, Zea mays subsp. mays
  misc_feature (1)..(469): Ceres Seq. ID no. 13492087
MGASTTPLASAAALLLLLLAPLAAAADSMSIVSYGERSEEEARRMYAEWMAAHGRTYNAVGEEERRFEVFRDNLRYVDAHNAAADAGVHSFRLGLNRFADLTNDEYRATYLGVRSRPQRERRLGDRYLAGDNEDLPESVDWRAKGAVAEIKDQGSCGSCWAFSTIAAVEGINQIVTGDMISLSEQELVDCDTSYNQGCNGGLMDYAFEFIINNGGIDTEEDYPYKGTDGRCDVNRKNAKVVTIDSYEDVPANSEKSLQKAVANQPISVAIEAGGRAFQLYNSGIFTGTCGTALDHGVTAVGYGTENGKDYWIVKNSWGSSWGESGYVRMERNIKASSGKCGIAVEPSYPLKKGANPPNPGPTPPSPTPPPTVCDNYYSCPDSTTCCCIYEYGKYCFAWGCCPLEGATCCDDHYSCCPHDYPVCNVKQGTCLMGKDSPLSLSVKATKRTLAKPHWAFSGNTAADGMKSSA

SEQ ID NO: 25563 - protein, 441 aa, Zea mays subsp. mays
  misc_feature (1)..(441): Ceres Seq. ID no. 13492088
MSIVSYGERSEEEARRMYAEWMAAHGRTYNAVGEEERRFEVFRDNLRYVDAHNAAADAGVHSFRLGLNRFADLTNDEYRATYLGVRSRPQRERRLGDRYLAGDNEDLPESVDWRAKGAVAEIKDQGSCGSCWAFSTIAAVEGINQIVTGDMISLSEQELVDCDTSYNQGCNGGLMDYAFEFIINNGGIDTEEDYPYKGTDGRCDVNRKNAKVVTIDSYEDVPANSEKSLQKAVANQPISVAIEAGGRAFQLYNSGIFTGTCGTALDHGVTAVGYGTENGKDYWIVKNSWGSSWGESGYVRMERNIKASSGKCGIAVEPSYPLKKGANPPNPGPTPPSPTPPPTVCDNYYSCPDSTTCCCIYEYGKYCFAWGCCPLEGATCCDDHYSCCPHDYPVCNVKQGTCLMGKDSPLSLSVKATKRTLAKPHWAFSGNTAADGMKSSA

SEQ ID NO: 25564 - protein, 425 aa, Zea mays subsp. mays
  misc_feature (1)..(425): Ceres Seq. ID no. 13492089
MYAEWMAAHGRTYNAVGEEERRFEVFRDNLRYVDAHNAAADAGVHSFRLGLNRFADLTNDEYRATYLGVRSRPQRERRLGDRYLAGDNEDLPESVDWRAKGAVAEIKDQGSCGSCWAFSTIAAVEGINQIVTGDMISLSEQELVDCDTSYNQGCNGGLMDYAFEFIINNGGIDTEEDYPYKGTDGRCDVNRKNAKVVTIDSYEDVPANSEKSLQKAVANQPISVAIEAGGRAFQLYNSGIFTGTCGTALDHGVTAVGYGTENGKDYWIVKNSWGSSWGESGYVRMERNIKASSGKCGIAVEPSYPLKKGANPPNPGPTPPSPTPPPTVCDNYYSCPDSTTCCCIYEYGKYCFAWGCCPLEGATCCDDHYSCCPHDYPVCNVKQGTCLMGKDSPLSLSVKATKRTLAKPHWAFSGNTAADGMKSSA

SEQ ID NO: 25565 - DNA, 1193 bp, Zea mays subsp. mays
  misc_feature (1)..(1193): Ceres Seq. ID no. 13492090
aactaatcgaaaaaaagttggctcacagaacacagcgcccgcccggacgcaaggggcacgagggagaagcgaggaacggcggcggcggcatcatggcggcgcggaacatccttcgcggtgcggcatgcggccaccgcttcctcgtgcccgtcccctcaggcgctcttgctggttctggaagccggagcatcggcgccgtcgctcagggccttcgtcattacgcagcagacgaagcagtgggaaacttggaactgcatgcacccaaggcaaaacgtcggtcatatatcccaacgaaaaatggaacagccatgatgcttccgctccatattcattacgaagatgtactacgtcaggatctgttgctcaaacagaatcatgccaatatcatgcaagttccagggttgtttgaggtcaaattagcaccaaaagccggctctgatctcaagatcccaattgggaaaatggccatggaggttttgagtggtcagagattcaaagaggcaaaaattgaccctttcgccaaagcaagaaagtcttctcgaaccaatccatttattggggccgacaaggacggtagcactgtcttcgcgcaaccaaccgttcttcgagggcatgcaatgtacaactttttggtgaggatgctgacagtgatgtccatgttaaattctcgggccgacattcgggagaacactgtgaagttcttcatggaaacggagttctgtgagttctctccagaattggaagaccatttcgagatatttgagcacatccgaggtttcaatgtgactatcgttacttcagccaatacaaaagatgagacctcactgctgtggagtggcttcatgctgaatgacgagggagagaccaagtaaggtagaactgttgatctttgtttctgcttaatctccctgatattgtagttgctgcccaactggaccttcagttggctgttgatgtcaaaaatgattttggaaatttggtgcttcgtgctctaggagtgcgcaatgtcgcagccttctgttttgtagactgaatgagatgacgtgattgtttttcatcttgacgcgtggagctcatgtttgataactacgtctagtaccatgtatgaacataataatcttggtctaataagcattgttttgcttattcctgtggttcctgctatagtaacatggaatgctcgtttctgtttg

SEQ ID NO: 25566 - protein, 289 aa, Zea mays subsp. mays
  misc_feature (1)..(289): Ceres Seq. ID no. 13492091
LIEKKLAHRTQRPPGRKGHEGEARNGGGGIMAARNILRGAACGHRFLVPVPSGALAGSGSRSIGAVAQGLRHYAADEAVGNLELHAPKAKRRSYIPTKNGTAMMLPLHIHYEDVLRQDLLLKQNHANIMQVPGLFEVKLAPKAGSDLKIPIGKMAMEVLSGQRFKEAKIDPFAKARKSSRTNPFIGADKDGSTVFAQPTVLRGHAMYNFLVRMLTVMSMLNSRADIRENTVKFFMETEFCEFSPELEDHFEIFEHIRGFNVTIVTSANTKDETSLLWSGFMLNDEGETK

SEQ ID NO: 25567 - protein, 259 aa, Zea mays subsp. mays
  misc_feature (1)..(259): Ceres Seq. ID no. 13492092
MAARNILRGAACGHRFLVPVPSGALAGSGSRSIGAVAQGLRHYAADEAVGNLELHAPKAKRRSYIPTKNGTAMMLPLHIHYEDVLRQDLLLKQNHANIMQVPGLFEVKLAPKAGSDLKIPIGKMAMEVLSGQRFKEAKIDPFAKARKSSRTNPFIGADKDGSTVFAQPTVLRGHAMYNFLVRMLTVMSMLNSRADIRENTVKFFMETEFCEFSPELEDHFEIFEHIRGFNVTIVTSANTKDETSLLWSGFMLNDEGETK

SEQ ID NO: 25568 - protein, 187 aa, Zea mays subsp. mays
  misc_feature (1)..(187): Ceres Seq. ID no. 13492093
MMLPLHIHYEDVLRQDLLLKQNHANIMQVPGLFEVKLAPKAGSDLKIPIGKMAMEVLSGQRFKEAKIDPFAKARKSSRTNPFIGADKDGSTVFAQPTVLRGHAMYNFLVRMLTVMSMLNSRADIRENTVKFFMETEFCEFSPELEDHFEIFEHIRGFNVTIVTSANTKDETSLLWSGFMLNDEGETK

SEQ ID NO: 25569 - DNA, 1019 bp, Zea mays subsp. mays
  misc_feature (1)..(1019): Ceres Seq. ID no. 13492109
acttcacaccatttcagcattgtaccctatgttcatgccaccatggaagggcttcgtattggagcaccgattatgcaggtttatcatgagaaatcttttatcttacctgatgtttcaagggtgcttgcttgcctttatgagaaggatgtcaagtttgagactcacacagcctcatacaggagcctactcggattgcaggcatcatctcatgctccagttccattctatgaaggccctacttttctagaagaatccagagaaatctgccgttatatagcagaaaagtatgaaaatcaaggatatccgttcctccttggaaaggatgcccttgagagggcttcaattgaacaatggctccacaacgaggagcatgctttcaaccctccgagccgggccttgttctttcatttggcctttcccctgggtgaaggagaagatgatgatattgatgttcatacaaggaagctagaagaggttctggaagtttatgagcaaaggctcagtgacagcgaattccttgttggaaacaagttcactcttgccgaccttgttcacctgccaaattcccactatatcaaagcatctaacaagtttctttacctttatgattcgaggaaaaatgtaaggaggtggtgggatgctatttctgaccggagttcttggaagaaagtgctgaggtatatgaagagcgtggaggagaagaacaaacaagaagaactcaagaagcagcagcagcagcaggaagaggctcctagaacctccaccgacccaactcgggtagactcgagaaagcagagcagaacagagcctcggacaatattggttcctcctgctgataacgagtcatcagcttcgatagttcctcgaacaaagaagcctcttcctggtgatcacttagtgtctactcaacaaattgatggtgttggtatgccagccacaaattgatggtgatggtcgtcttagtggtgtttgtcttgtcttttattgtttggttctttaacaagagttatatttttacc

SEQ ID NO: 25570 - protein, 314 aa, Zea mays subsp. mays
  misc_feature (1)..(314): Ceres Seq. ID no. 13492110
TSHHFSIVPYVHATMEGLRIGAPIMQVYHEKSFILPDVSRVLACLYEKDVKFETHTASYRSLLGLQASSHAPVPFYEGPTFLEESREICRYIAEKYENQGYPFLLGKDALERASIEQWLHNEEHAFNPPSRALFFHLAFPLGEGEDDDIDVHTRKLEEVLEVYEQRLSDSEFLVGNKFTLADLVHLPNSHYIKASNKFLYLYDSRKNVRRWWDAISDRSSWKKVLRYMKSVEEKNKQEELKKQQQQQEEAPRTSTDPTRVDSRKQSRTEPRTILVPPADNESSASIVPRTKKPLPGDHLVSTQQIDGVGMPATN

SEQ ID NO: 25571 - protein, 300 aa, Zea mays subsp. mays; identical to SEQ ID NO: 15211
  misc_feature (1)..(300): Ceres Seq. ID no. 13492111

SEQ ID NO: 25572 - protein, 290 aa, Zea mays subsp. mays; identical to SEQ ID NO: 15212
  misc_feature (1)..(290): Ceres Seq. ID no. 13492112

SEQ ID NO: 25573 - DNA, 620 bp, Zea mays subsp. mays
  misc_feature (1)..(620): Ceres Seq. ID no. 13492231
aagagacaaaacaagttattggggctctaaaggagaagggagtgtctgctgttggagctgcagggtattgctggggtgcaaaggttgttgtggagttggcaaaagctcatgagatccaggctgctgtgctgttgcacccttcttttgttaccgttgacgatatcaaagaggtcaagtgcgcaatttctatcctcggagctgagattgacaaaatgtccccaccggagctaatcaagcagttcgagcaggtcctttctttgaactcaggggttggccacttcgtcaagatcttccctggtgtggcgcatggatggagcgtgagatacaaccacgacgacgcagctgccgtgaagagtgctgaggaagcctttgcggacatgctcgactggttcaacaagaatctgaaataaactctgcaattgcatcctgccttgtaataatgcgtgttccagtgccctgggatcgaatctgctgtgtttgggcttttgcatggtcaggctattcagagttgtcatggacttagggttgtgttagtagattggttgcgctgaatctataataaaaacgaggtaaactaggacaatgatgatgtggccgtgtgtatttaatgtattctgttc

SEQ ID NO: 25574 - protein, 135 aa, Zea mays subsp. mays
  misc_feature (1)..(135): Ceres Seq. ID no. 13492232
ETKQVIGALKEKGVSAVGAAGYCWGAKVVVELAKAHEIQAAVLLHPSFVTVDDIKEVKCAISILGAEIDKMSPPELIKQFEQVLSLNSGVGHFVKIFPGVAHGWSVRYNHDDAAAVKSAEEAFADMLDWFNKNLK

SEQ ID NO: 25575 - DNA, 773 bp, Zea mays subsp. mays
  misc_feature (1)..(773): Ceres Seq. ID no. 13492259
aagtcagtctcactcaagtaaagtggacgccaagtcagtcacactcacaccaccgtagcacacaccagtacaccacacactcgcctttccgatcccatccctctccagccaccttcctccgctcgccgtgcttctgcttcctccgccaccaccgccggcatggctgcgcgctgcccctacttcgccgtcgaggagtcctcccgcggcatccgctcgggggagtccccggccgcggcgctccgccggatcctcgcgacgcctggtgcgcaccaggcgccctgctgctacgacgcgctcggcgcgcgcctcgtcgagcgcgcggggtttccgatcgggttcatgggcggtttctgtgtttctgccgcgcgacttggcttgcctgatgttggcctcatttcctatggagaaatggtagatcaagggcgtctcatcaatgaagctgtttcaatcccagtgattggtgatggagacaatggttacggaaactctatgaatatcaagagaaccataaaaggatatatcaatgctggttttgctggaattatgcttgaggatcaggtggcacctaaagcatgtggacatactgaaggaaggaaagtcatatcaagggaggaagctgtcatgcacataaaagctgctgtagatgctaggaaagagagtggtagtagggggcacgagtaaggaggggtttatacaatgatctaatctagtgtgttaagtctgggtgcaatttatttggtggatttagtggagcttgagtgagatgatttggt

SEQ ID NO: 25576 - protein, 173 aa, Zea mays subsp. mays
  misc_feature (1)..(173): Ceres Seq. ID no. 13492260
MAARCPYFAVEESSRGIRSGESPAAALRRILATPGAHQAPCCYDALGARLVERAGFPIGFMGGFCVSAARLGLPDVGLISYGEMVDQGRLINEAVSIPVIGDGDNGYGNSMNIKRTIKGYINAGFAGIMLEDQVAPKACGHTEGRKVISREEAVMHIKAAVDARKESGSRGHE

SEQ ID NO: 25577 - protein, 126 aa, Zea mays subsp. mays
  misc_feature (1)..(126): Ceres Seq. ID no. 13492261
VSLTQVKWTPSQSHSHHRSTHQYTTHSPFRSHPSPATFLRSPCFCFLRHHRRHGCALPLLRRRGVLPRHPLGGVPGRGAPPDPRDAWCAPGALLLRRARRAPRRARGVSDRVHGRFLCFCRATWLA

SEQ ID NO: 25578 - protein, 113 aa, Zea mays subsp. mays
  misc_feature (1)..(113): Ceres Seq. ID no. 13492262
MGGFCVSAARLGLPDVGLISYGEMVDQGRLINEAVSIPVIGDGDNGYGNSMNIKRTIKGYINAGFAGIMLEDQVAPKACGHTEGRKVISREEAVMHIKAAVDARKESGSRGHE

SEQ ID NO: 25579 - DNA, 1206 bp, Zea mays subsp. mays
  misc_feature (1)..(1206): Ceres Seq. ID no. 13492266
aaaagagagagggggaggtcgacgagacagagagagaaggccaagaggcttcctctccccattcctcccttccgtgccctagccgagccagccgcgaggaaggaggcatcccgccgtctcgcctggcgcccgcccgtcggccgaccttctgccgcagcttccaattgtaaaaagatcatagatttttgtgcaagagcgagtggatatggaaccatcccctcagcctatgggtgtcgctgccggtgggtcacaagtgtatcctgcctctgcctatccgcctgcagcaacagtagctcctgcttctgttgtatctgctggtttacagtcagggcagccattcccagccaatcctggtcatatgagtgctcagcaccagattgtctaccaacaagctcaacaattccaccaacagctccagcagcaacaacaacagcagcttcagcagttctgggttgaacgcatgactgaaattgaggcgacgactgatttcaagaaccacaacttgccacttgcgaggataaagaagatcatgaaggccgatgaagatgttcgcatgatctcagctgaagctcctgtagtctttgcaaaagcttgtgagatattcatactggagctgacacttaggtcgtggatgcacactgaggagaacaagcgccgcaccttgcaaaagaatgacattgcagcagcgatcactaggactgacatttatgacttcttggtcgacattgttcccagggatgagatgaaggaggacggaattgggcttcctagggctggtctgccacccatgggagccccagctgatgcatatccatactactacatgccacagcagcaggtgcctggttctggaatggtttatggtgcccagcaagggcacccagtgacttatttgtggcaggagcctcagcaacagcaggagcaagctcctgaagagcagcaatctgcatgaaagtggctgagaatattgctcagaagctatcacctgattcagagttctcattttaggttgtccaaactgcaggttttcttagtaatatcgttggttatcaaactgaaacaggcgattctaagtagggtgtagcatcatggtagtttcatttctgcttgtgatgttagttgaaaggataatgattagtggctagtggattaaagttaccataccatttccttctattccgaaagtttgcctccatgaggcctctg

SEQ ID NO: 25580 - protein, 248 aa, Zea mays subsp. mays
  misc_feature (1)..(248): Ceres Seq. ID no. 13492267
MEPSPQPMGVAAGGSQVYPASAYPPAATVAPASVVSAGLQSGQPFPANPGHMSAQHQIVYQQAQQFHQQLQQQQQQQLQQFWVERMTEIEATTDFKNHNLPLARIKKIMKADEDVRMISAEAPVVFAKACEIFILELTLRSWMHTEENKRRTLQKNDIAAAITRTDIYDFLVDIVPRDEMKEDGIGLPRAGLPPMGAPADAYPYYYMPQQQVPGSGMVYGAQQGHPVTYLWQEPQQQQEQAPEEQQSA

SEQ ID NO: 25581 - protein, 241 aa, Zea mays subsp. mays
  misc_feature (1)..(241): Ceres Seq. ID no. 13492268
MGVAAGGSQVYPASAYPPAATVAPASVVSAGLQSGQPFPANPGHMSAQHQIVYQQAQQFHQQLQQQQQQQLQQFWVERMTEIEATTDFKNHNLPLARIKKIMKADEDVRMISAEAPVVFAKACEIFILELTLRSWMHTEENKRRTLQKNDIAAAITRTDIYDFLVDIVPRDEMKEDGIGLPRAGLPPMGAPADAYPYYYMPQQQVPGSGMVYGAQQGHPVTYLWQEPQQQQEQAPEEQQSA

SEQ ID NO: 25582 - protein, 197 aa, Zea mays subsp. mays
  misc_feature (1)..(197): Ceres Seq. ID no. 13492269
MSAQHQIVYQQAQQFHQQLQQQQQQQLQQFWVERMTEIEATTDFKNHNLPLARIKKIMKADEDVRMISAEAPVVFAKACEIFILELTLRSWMHTEENKRRTLQKNDIAAAITRTDIYDFLVDIVPRDEMKEDGIGLPRAGLPPMGAPADAYPYYYMPQQQVPGSGMVYGAQQGHPVTYLWQEPQQQQEQAPEEQQSA

SEQ ID NO: 25583 - DNA, 1958 bp, Zea mays subsp. mays
  misc_feature (1)..(1958): Ceres Seq. ID no. 13492276
aaaccaaaatcatttcatccccggaaccggacgccgaacggcagtgctgcaaaagtccggacaaagctcgcgccgcccaccgcacccgatccgcctcgcccaggcgtgctgccgtccgctcccttctcccgcgccgtcgcctccgcctacgcccgggccgacccgctggacccagcgtgcgccgctccactcggacgcgccgccgccctctcgggttgaggcggaggtgcttggggacccgcccccatggcgagcgccggcaacagcggcagcggggacgacgatgcaggagggaagctcctggcggatcgctaccagaagggcgaggtcctcggcgagggcacgtatggagtcgtcttcaaggccatcgacaccaagactggaaatacagtcgcggtaaagcgaatccggataggaaaggacaagaaggaaggtgtcaacttcactgcgttgagggaaattaaactacttaaggagctgaaagatcctaatattatagagctgattgattgtttcccttacaaggaaaatttgcaccttgtgtttgagtttatggagaccgatctggaagctctcataaaagataagaacataatactctctccagctgacacaaaatcatatgtccagatgatgttaaaaggtctagcgttctgccataagaaatgggtgctacacagggatatgaaaccaaataatttactcattggtgccgatgggcagctcaagcttgctgacttcggtctggcccgtgtgttcgggagtccaggaaggaacttcactcaccaggtctttgcacgttggtaccgggcaccagaattattatttggctcgaagcagtacggatctggggtggatatttgggccgctggatgtatttttgctgaactgcttactcgcagagcctttctccagggttctagtgacattgatcaacttgggaagattttcgcagcacttgggaccccaaaatcttctcaatggcctgacatggtttatcttcctgattatgttgaataccaatatgttgctgcacctccactacgtacgttgtttccaatggccagcgatgatgctttggatcttctgtcaaaaatgcttacctatgatccaaaagcaagaatcagtgctcagcaggctctagaacacaggtacttttcatcgttacctgcaccaacaagaccatcgcagcttccaaggccacgtcggaaaggagatcaagggaataacaagattcctgatctcaacctgcaggatggccctatggtgctctccccgccaagaaagttacgtagggtgacagcgcatgaagggatggaaggtatgcacaggacagataaagtggacgaacatccttctgggatgaggcacaccgatgacatgcccagtcagagttctagaattccaatgtcagttgatgttggggctgtgtttggcacacgacctgcacctaggccaacattgaacagtgcggacaagtctcgtttaaaacggaaacttgatatggatccagagtttggatacgcggagtagaaggaacacatgtttacatgcaccattcttttcttattggggatgttgatttttaaaataagattctgacacaatcaactgagatgttaccgtcatcgcctcacgaagaggaaaactgaagagagattattctaatttatcccgagtcacatagggtattacagctaaccaattccgtaaggcaggctcttgaaaacagtagactcaatgggatattcattagtggagagtgttatggggaattggaggatggaaaagcttgctccatgcgtgtttgtacgtgttttgccaagattgtgctgaagcatctgatctatctactgattctctattttccgtactgtcaattcccgttcttgtatggacagagctttgagcatgttttcagtcagacaccttaggcagtgattcttattgtacaactc

SEQ ID NO: 25584 - protein, 428 aa, Zea mays subsp. mays
  misc_feature (1)..(428): Ceres Seq. ID no. 13492277
MASAGNSGSGDDDAGGKLLADRYQKGEVLGEGTYGVVFKAIDTKTGNTVAVKRIRIGKDKKEGVNFTALREIKLLKELKDPNIIELIDCFPYKENLHLVFEFMETDLEALIKDKNIILSPADTKSYVQMMLKGLAFCHKKWVLHRDMKPNNLLIGADGQLKLADFGLARVFGSPGRNFTHQVFARWYRAPELLFGSKQYGSGVDIWAAGCIFAELLTRRAFLQGSSDIDQLGKIFAALGTPKSSQWPDMVYLPDYVEYQYVAAPPLRTLFPMASDDALDLLSKMLTYDPKARISAQQALEHRYFSSLPAPTRPSQLPRPRRKGDQGNNKIPDLNLQDGPMVLSPPRKLRRVTAHEGMEGMHRTDKVDEHPSGMRHTDDMPSQSSRIPMSVDVGAVFGTRPAPRPTLNSADKSRLKRKLDMDPEFGYAE

SEQ ID NO: 25585 - protein, 326 aa, Zea mays subsp. mays
  misc_feature (1)..(326): Ceres Seq. ID no. 13492278
METDLEALIKDKNIILSPADTKSYVQMMLKGLAFCHKKWVLHRDMKPNNLLIGADGQLKLADFGLARVFGSPGRNFTHQVFARWYRAPELLFGSKQYGSGVDIWAAGCIFAELLTRRAFLQGSSDIDQLGKIFAALGTPKSSQWPDMVYLPDYVEYQYVAAPPLRTLFPMASDDALDLLSKMLTYDPKARISAQQALEHRYFSSLPAPTRPSQLPRPRRKGDQGNNKIPDLNLQDGPMVLSPPRKLRRVTAHEGMEGMHRTDKVDEHPSGMRHTDDMPSQSSRIPMSVDVGAVFGTRPAPRPTLNSADKSRLKRKLDMDPEFGYAE

SEQ ID NO: 25586 - protein, 300 aa, Zea mays subsp. mays
  misc_feature (1)..(300): Ceres Seq. ID no. 13492279
MMLKGLAFCHKKWVLHRDMKPNNLLIGADGQLKLADFGLARVFGSPGRNFTHQVFARWYRAPELLFGSKQYGSGVDIWAAGCIFAELLTRRAFLQGSSDIDQLGKIFAALGTPKSSQWPDMVYLPDYVEYQYVAAPPLRTLFPMASDDALDLLSKMLTYDPKARISAQQALEHRYFSSLPAPTRPSQLPRPRRKGDQGNNKIPDLNLQDGPMVLSPPRKLRRVTAHEGMEGMHRTDKVDEHPSGMRHTDDMPSQSSRIPMSVDVGAVFGTRPAPRPTLNSADKSRLKRKLDMDPEFGYAE

SEQ ID NO: 25587 - DNA, 745 bp, Zea mays subsp. mays
  misc_feature (1)..(745): Ceres Seq. ID no. 13492365
tcgggaagaggagcaaaacaaaccctatctaaaccgcggcggactcttcgtccagcaaggtttcccatccaaatccggccacgccacttgttctttttttccgcaacaccgatggtgtacgtggattcttgggaggagttcgtggagcgttccgtgcagctcttccgcggcgaccccaacgccacccgctacgtgatgaagtaccggcactgcgaggggaagctcgtgctcaaggtcaccgacgaccgcgagtgcttgaagttcaagacagatcaagctcaagacgcaaagaagatggagaagctcaacaacatcttttttgctctcatgacacgtgggcctgatgttgatatcagtgaagtttcagggaaggaacaggcagagcaacagcaagcgaagaaaggtcggggaaggaggcaataatgcggtctgatccttatttgttacagaaaattcacaactggaatgatggattaacatttcatggactttattgtaattctgaagaaagtttttccagtacagaaccgagaacaaactaaatgcactctatcatgaatgaatgcatgattgagaaacgcccaaggcttcaaccctgcttcgtttttctgcacgggaagcgttttcatccatgttttctggtagaggaatgtagcttgatactctgcctgatcttatattgcgcactgcctgttggggttgggccatacgattttaggctattctcaatgggaatgaatttcct

SEQ ID NO: 25588 - protein, 140 aa, Zea mays subsp. mays
  misc_feature (1)..(140): Ceres Seq. ID no. 13492366
SGRGAKQTLSKPRRTLRPARFPIQIRPRHLFFFSATPMVYVDSWEEFVERSVQLFRGDPNATRYVMKYRHCEGKLVLKVTDDRECLKFKTDQAQDAKKMEKLNNIFFALMTRGPDVDISEVSGKEQAEQQQAKKGRGRRQ

SEQ ID NO: 25589 - protein, 103 aa, Zea mays subsp. mays
  misc_feature (1)..(103): Ceres Seq. ID no. 13492367
MVYVDSWEEFVERSVQLFRGDPNATRYVMKYRHCEGKLVLKVTDDRECLKFKTDQAQDAKKMEKLNNIFFALMTRGPDVDISEVSGKEQAEQQQAKKGRGRRQ

SEQ ID NO: 25590 - protein, 75 aa, Zea mays subsp. mays
  misc_feature (1)..(75): Ceres Seq. ID no. 13492368
MKYRHCEGKLVLKVTDDRECLKFKTDQAQDAKKMEKLNNIFFALMTRGPDVDISEVSGKEQAEQQQAKKGRGRRQ

SEQ ID NO: 25591 - DNA, 528 bp, Zea mays subsp. mays
  misc_feature (1)..(528): Ceres Seq. ID no. 13492510
ctcgtctccactgctctgctgctcctcgcaccgccgccgccgccgccgcagcgacgtaatggcttccgccgcggtgctccggaacgccggctcccggcgcctcttctcctaccctactctccgcgccgctgcgatatatgtaccttctgcgctacccgatgcgcccgcggcggcggcagcgccggcccagccgccaccgacggccgggaccctctgggcgaggtctatggccaccttcacgcgcacgaagccccatgtgaatgtcggcaccattgggcacgtcgatcacggcaaaaccactctcactgctgccattaccaaggtcctggccgaggcagggaaggccaaagccgttgctttcgacgagatcgacaaggctccggaggagaaagccagaggaatcaccattgcgacagctcacgtcgagtatgagacggctaaaaggcattatgctcacgttgattgtccaggtcacgcagattatgtcaagaacatgatcactggagctgctcagcgtttcctgtgttc

SEQ ID NO: 25592 - protein, 175 aa, Zea mays subsp. mays
  misc_feature (1)..(175): Ceres Seq. ID no. 13492511
SSPLLCCSSHRRRRRRSDVMASAAVLRNAGSRRLFSYPTLRAAAIYVPSALPDAPAAAAAPAQPPPTAGTLWARSMATFTRTKPHVNVGTIGHVDHGKTTLTAAITKVLAEAGKAKAVAFDEIDKAPEEKARGITIATAHVEYETAKRHYAHVDCPGHADYVKNMITGAAQRFLC

SEQ ID NO: 25593 - protein, 156 aa, Zea mays subsp. mays
  misc_feature (1)..(156): Ceres Seq. ID no. 13492512
MASAAVLRNAGSRRLFSYPTLRAAAIYVPSALPDAPAAAAAPAQPPPTAGTLWARSMATFTRTKPHVNVGTIGHVDHGKTTLTAAITKVLAEAGKAKAVAFDEIDKAPEEKARGITIATAHVEYETAKRHYAHVDCPGHADYVKNMITGAAQRFLC

SEQ ID NO: 25594 - protein, 143 aa, Zea mays subsp. mays
  misc_feature (1)..(143): Ceres Seq. ID no. 13492513
LVSTALLLLAPPPPPPQRRNGFRRGAPERRLPAPLLLPYSPRRCDICTFCATRCARGGGSAGPAATDGRDPLGEVYGHLHAHEAPCECRHHWARRSRQNHSHCCHYQGPGRGREGQSRCFRRDRQGSGGESQRNHHCDSSRRV

SEQ ID NO: 25595 - DNA, 1402 bp, Zea mays subsp. mays
  misc_feature (1)..(1402): Ceres Seq. ID no. 13492514
atgtgacagttcgggcaccgacgtccgtctccgtacttccggctgtgtgcgaaactgcgaacgcgtgatatctccgcgtacgcaaacgcgacgcgaaggtcagcacggacaactctacccctccgcctcgaccctgaccccccacctcgtcggcgatgagttcctcttccaacggcgggaagaagccggctcccggcggcggccgcaggggtcccgccatccgcacgctcgctgacataagccgtgggcccaccggcttcccaggtgccggaggcggcgacagcggcagcgacgacgacgagccacaggaatactacaccggtggcgagaagagtggaatgcttgttcaagatccaacaagaagaaatgatgtggatgcgatatttgaacaagccagacaagcgggtatcaaaggaatgcctcctcttcttgatggcgagtcttccagctctaggagctttacagggactgggccgacttcttacaggggagacaatatcatctgctgcacctcaggaaccagtaccaattcgagtacgccacaatatacatttgtggaacaatggctttagtgtggatgatggtccactgagatactacgacgatcctgaaaatgcagagttccttgagagccttaagatgtcaaagtgccccaaggagctggtgcctactgatggagaacatgttgatgcgtctgttattagaaggatggaagattacagggaacctgtaaggcctcgatcagctttccagggtgttggaagaacccttggtggtggaccttccccagatgagagcgcaacagctgctcctgcatcagcggcccctgctgcttcgaggtccgctggcgttgtcgtggatgactcccagccatttacgtccatacagctgaggctggctgacggcactcgcatggtcgcccggttcaacatgcaccacaccgtgggagacatcaggtcctttatagacgcagctcggcctggagctgcaaggccttatcagctgcagacgggtttccctcccaagcagctggctgacccaacgcagaccgtggagcaagctgggcttgcaaactctgttatcatgcagaagatgtaaatgcttcggctggcaacctggggagctcggatgcatcgtactgcatcttctgaaaaccgtaatattatggttgatcatgttatcagatactgctctggtgcatcattctcagtcatggttacttacagtagcatctggtgcctcgttgggagcacaggagtttataattcatctaggaactgaagtatgctttcttgcatcactattgcatcacttttttcatttttaatattggtgttatgatatttcgtgtttccatggccgcttccttgcaagttgaagcgcgactcgcaagtcgcagcat

SEQ ID NO: 25596 - protein, 243 aa, Zea mays subsp. mays
  misc_feature (1)..(243): Ceres Seq. ID no. 13492515
MMWMRYLNKPDKRVSKECLLFLMASLPALGALQGLGRLLTGETISSAAPQEPVPIRVRHNIHLWNNGFSVDDGPLRYYDDPENAEFLESLKMSKCPKELVPTDGEHVDASVIRRMEDYREPVRPRSAFQGVGRTLGGGPSPDESATAAPASAAPAASRSAGVVVDDSQPFTSIQLRLADGTRMVARFNMHHTVGDIRSFIDAARPGAARPYQLQTGFPPKQLADPTQTVEQAGLANSVIMQKM

SEQ ID NO: 25597 - protein, 242 aa, Zea mays subsp. mays
  misc_feature (1)..(242): Ceres Seq. ID no. 13492516
MWMRYLNKPDKRVSKECLLFLMASLPALGALQGLGRLLTGETISSAAPQEPVPIRVRHNIHLWNNGFSVDDGPLRYYDDPENAEFLESLKMSKCPKELVPTDGEHVDASVIRRMEDYREPVRPRSAFQGVGRTLGGGPSPDESATAAPASAAPAASRSAGVVVDDSQPFTSIQLRLADGTRMVARFNMHHTVGDIRSFIDAARPGAARPYQLQTGFPPKQLADPTQTVEQAGLANSVIMQKM

SEQ ID NO: 25598 - protein, 240 aa, Zea mays subsp. mays
  misc_feature (1)..(240): Ceres Seq. ID no. 13492517
MRYLNKPDKRVSKECLLFLMASLPALGALQGLGRLLTGETISSAAPQEPVPIRVRHNIHLWNNGFSVDDGPLRYYDDPENAEFLESLKMSKCPKELVPTDGEHVDASVIRRMEDYREPVRPRSAFQGVGRTLGGGPSPDESATAAPASAAPAASRSAGVVVDDSQPFTSIQLRLADGTRMVARFNMHHTVGDIRSFIDAARPGAARPYQLQTGFPPKQLADPTQTVEQAGLANSVIMQKM

SEQ ID NO: 25599 - DNA, 1297 bp, Zea mays subsp. mays
  misc_feature (1)..(1297): Ceres Seq. ID no. 13492533
acgcatcgatcaccctcctcgctcccggtcaacagcagcggcgcagagcacgacgccgacacgcgccatggcggcggtgaggcaccggcagctggaggccaacggcatcacgatgcacgtcgcggaggccggccccgtgaacgcctccgcgccggcggtgctgttcgtgcacggcttcccggagctctggtactcgtggcgccaccagatgggctacctcgccgcgcgcggctaccgctgcgtggcacccgacctccgaggctacggcggcaccaccgcgccgccggaaccgacctcctacaccgtcttccatatcgtcggcgacatcgtcgcgctcctcgacgccctccacctcccgcaggtgttcgttgtcggccacgactggggcgccatcgtgtcgtggaacctctgcctgctgcggccggatcgggtgcgcgcgctcgtcaacctcagcgttgccttcatgccccggaggcccggcgtcaagcctcttgagtacttccgcgccgcatacggggatgagtactacgtctgccgattccaggaaccaggactcgaagcagaatttgctacgtttgacttgaagagtttcttcacattagcattgactcttcgggcaacaggttcttcagctatggaccttcgaaaaatgcaaacttatagtaagcaaatggtgctaccttcttggctatctgaggaagatgtcagttaccttgcaagtgtgtactcaaaaactggatttgctggtggagtaaattactatcgctgcttggacctgaactgggaactgatggcgccatggacaggagcaaaggtgcaagttccaaccaagttcatcgttggggacggtgacctggcgtaccatcaccctggagtgaagaggtacatccacaagggcgggttcaagagggacgtgcccatgcttgaggaggtggtggtcatcaagggcgctggggcacttcatccagcaggaaagagcgcaggaaatcagtgagcacatccatgactacatcaagaagttcgaagcttgtggtctgccgccactgagagtttcaaagctatgagagacctgatggcttctgtacataactcaaatggtctgggagctattgtagttgtttgtagtgctgcagatctatatattatgaatggtatggagtactgacgatctattcaatggacccacgttgcgttgtgctgtgtggggggcacgggtccccacttaattttcttgtttcagtggacatcttattttatttgatgtagctacaaaggttcattagggcatgtacaatcc

SEQ ID NO: 25600 - protein, 330 aa, Zea mays subsp. mays
  misc_feature (1)..(330): Ceres Seq. ID no. 13492534
RIDHPPRSRSTAAAQSTTPTRAMAAVRHRQLEANGITMHVAEAGPVNASAPAVLFVHGFPELWYSWRHQMGYLAARGYRCVAPDLRGYGGTTAPPEPTSYTVFHIVGDIVALLDALHLPQVFVVGHDWGAIVSWNLCLLRPDRVRALVNLSVAFMPRRPGVKPLEYFRAAYGDEYYVCRFQEPGLEAEFATFDLKSFFTLALTLRATGSSAMDLRKMQTYSKQMVLPSWLSEEDVSYLASVYSKTGFAGGVNYYRCLDLNWELMAPWTGAKVQVPTKFIVGDGDLAYHHPGVKRYIHKGGFKRDVPMLEEVVVIKGAGALHPAGKSAGNQ

SEQ ID NO: 25601 - protein, 308 aa, Zea mays subsp. mays
  misc_feature (1)..(308): Ceres Seq. ID no. 13492535
MAAVRHRQLEANGITMHVAEAGPVNASAPAVLFVHGFPELWYSWRHQMGYLAARGYRCVAPDLRGYGGTTAPPEPTSYTVFHIVGDIVALLDALHLPQVFVVGHDWGAIVSWNLCLLRPDRVRALVNLSVAFMPRRPGVKPLEYFRAAYGDEYYVCRFQEPGLEAEFATFDLKSFFTLALTLRATGSSAMDLRKMQTYSKQMVLPSWLSEEDVSYLASVYSKTGFAGGVNYYRCLDLNWELMAPWTGAKVQVPTKFIVGDGDLAYHHPGVKRYIHKGGFKRDVPMLEEVVVIKGAGALHPAGKSAGNQ

SEQ ID NO: 25602 - protein, 293 aa, Zea mays subsp. mays
  misc_feature (1)..(293): Ceres Seq. ID no. 13492536
MHVAEAGPVNASAPAVLFVHGFPELWYSWRHQMGYLAARGYRCVAPDLRGYGGTTAPPEPTSYTVFHIVGDIVALLDALHLPQVFVVGHDWGAIVSWNLCLLRPDRVRALVNLSVAFMPRRPGVKPLEYFRAAYGDEYYVCRFQEPGLEAEFATFDLKSFFTLALTLRATGSSAMDLRKMQTYSKQMVLPSWLSEEDVSYLASVYSKTGFAGGVNYYRCLDLNWELMAPWTGAKVQVPTKFIVGDGDLAYHHPGVKRYIHKGGFKRDVPMLEEVVVIKGAGALHPAGKSAGNQ

SEQ ID NO: 25603 - DNA, 1201 bp, Zea mays subsp. mays
  misc_feature (1)..(1201): Ceres Seq. ID no. 13492541
gcgcgcccgtggcccgtaaaagacaccaacccacttctcgaatcgaatccaggtccagggacgccgctacccgccgtccttcacccccgccatgccaacgctcggcatctcgccgctgctggacgcctacttccggcgccgcttcgccgcagcgggcctcgtggaggcctccgtcccgctggacggcggcgccaccacggtccactgctggcgcttcccgccggggtccgccgacggcgaggacgacgcccgtcccgtcctggtgctcctgcacggcttcgggcccccggcaacgtggcagtggaggcgccaggtgggccctctctcgcgccggttccgcctcgtcgtcccggacctgctcttcttcggcggctcgtccacgtcggcggcggcgcccggcgccgggcgggtgtccgaggcgcggcaggcggaggcggtggcgaagctcgtggcggccctggtggcgccgccggcgcgcgtgtcggtggccggcaccagctacggcgggttcgtggcgtaccacctggcgcggctgctgggccccggcgcggtggaccgggtggtgatcgccagctccgacctcctcaaggccgacgccgacgaccgcgccctgctccgccgcggcgccgccgagcgcgtcgaggacgtcatgctgccccgctcccccgagcggatgcggcgcctgatgcagctcgcctaccaccgcccgcgccgcttcacgccgggcttcgtgctccgggatctcgcccagtatctgtacagcgacaaagtagaagagaagaaggagctaatcaaggggataacgctgggcaacaaagacaagttccagcttacacctctcccccaggaagtccttgtgttgtggggagagcacgaccagatattcccagtcgagaaggcatttcaagtggcaaggaaacttggagcgaatgctaggctggaggtcctcaaggacaccggccacatgcctcaagaagaggatccaaagcggttcaacgaggcaatcctcaacttcttgcttccagctccaaagtcgtccttgtaacgcgatatatatcccatagttattcacttattattcaggcccaaggagagttcacgatttcgatatgcacattctgcccgatcagtgcagtctttgtcgctttggtatcacctcaccttcaagattgatcatggaaactattgctatttatctgcc

SEQ ID NO: 25604 - protein, 317 aa, Zea mays subsp. mays
  misc_feature (1)..(317): Ceres Seq. ID no. 13492542
MPTLGISPLLDAYFRRRFAAAGLVEASVPLDGGATTVHCWRFPPGSADGEDDARPVLVLLHGFGPPATWQWRRQVGPLSRRFRLVVPDLLFFGGSSTSAAAPGAGRVSEARQAEAVAKLVAALVAPPARVSVAGTSYGGFVAYHLARLLGPGAVDRVVIASSDLLKADADDRALLRRGAAERVEDVMLPRSPERMRRLMQLAYHRPRRFTPGFVLRDLAQYLYSDKVEEKKELIKGITLGNKDKFQLTPLPQEVLVLWGEHDQIFPVEKAFQVARKLGANARLEVLKDTGHMPQEEDPKRFNEAILNFLLPAPKSSL

SEQ ID NO: 25605 - protein, 311 aa, Zea mays subsp. mays
  misc_feature (1)..(311): Ceres Seq. ID no. 13492543
ARPWPVKDTNPLLESNPGPGTPLPAVLHPRHANARHLAAAGRLLPAPLRRSGPRGGLRPAGRRRHHGPLLALPAGVRRRRGRRPSRPGAPARLRAPGNVAVEAPGGPSLAPVPPRRPGPALLRRLVHVGGGARRRAGVRGAAGGGGGEARGGPGGAAGARVGGRHQLRRVRGVPPGAAAGPRRGGPGGDRQLRPPQGRRRRPRPAPPRRRRARRGRHAAPLPRADAAPDAARLPPPAPLHAGLRAPGSRPVSVQRQSRREEGANQGDNAGQQRQVPAYTSPPGSPCVVGRARPDIPSREGISSGKETWSEC

SEQ ID NO: 25606 - protein, 187 aa, Zea mays subsp. mays
  misc_feature (1)..(187): Ceres Seq. ID no. 13492544
APVARKRHQPTSRIESRSRDAATRRPSPPPCQRSASRRCWTPTSGAASPQRASWRPPSRWTAAPPRSTAGASRRGPPTARTTPVPSWCSCTASGPRQRGSGGARWALSRAGSASSSRTCSSSAARPRRRRRPAPGGCPRRGRRRRWRSSWRPWWRRRRACRWPAPATAGSWRTTWRGCWAPARWTGW

SEQ ID NO: 25607 - DNA, 1859 bp, Zea mays subsp. mays
  misc_feature (1)..(1859): Ceres Seq. ID no. 13492557
aaaactttagtctactcgtcctcggtcctcctcttctcgcagcagccagcagaccaatcgggacaagcaaactcccccgattagtttaagcagcccgggcccggcgacgaccagctccgttccgcgcggggatttaaacgcgcgaagcgagaaggcacgcagcaggcggcagcggcaagcaacgaacgcgatcgcgcgccgacgacgacgcgcggtgccggcgcctggtggtgccgtgttgcggactccgctgcatcgtctcggtcggtcgtcgtcgttatcatgggtgtccggctgccggtggcgtggtccgccgtcctcgtcctcctcgtgcgggcggccgtggcgcgggagtacgcggccatcttcaacttcggggactccctggtggacgccggcaacctggtggtggacggcatcccggactacctggccacggcgcgcctgccctacggcatgacccacttcggctaccccaccggccgctgctccgacggccgcctcgtcgttgacttcatcgcgcaggagctgggcgtgccgctgctgccgccgtccaaggcgaagaacgcgacgttccaccgcggcgccaacttcgcgatcacgggcgccacgtcgctggacacgcccttcttcgtggagcgcgggctggggaagacggtctggaactcggggtccctgcacacgcagatccagtggttccaggacatgaagcccaagctgtgcgggcaggagcaggagtgccgggacctgttccggcggtcgctgttcatcgtgggcgagttcggcgggaacgactacaactcgccgctgttcgcgttccggccgctggcggaggcgcacgacatggtgccgcacgtggtggagtccatcgggcggggcgtggagcggctgatcgcggagggcgccgcggagctggtggtgcccggggtgctccccatcggctgcttccccgtctacctctccatcttccgcaggcagccggccggcggctacggcgcccgcagcggctgcgtcaaggagctgaacacgctgtcgtgggtgcacaacgccgcgctgcgccgcaaggtcgaggagctccgcgccaggcaccccggcgtgcgcatcgtgtacgccgactactacacgccggccatccagttcgtcctccacgccgagaaatacgggatgctgaagcagacgccgcgggcgtgctgcggcgcgccgggcgtgggcgagtacaacttcaacctgacgtccaagtgcggcgagccgggggcgtacgcgtgcccggacccctccaaccactggagttgggacggcatccacctcacggaggccgcctacggccacatcgccaggggctggctctacgggcccttcgccgacccgcccatcctcgacgccaagcacctcggctaacgtcgtccatccaccgtcttctccagcgccggccccgcccgcacggccagtacagactactcctccggctctgggcgccgtcgtatgtgcgtccttattaccgacctgcaaaattggattggttgcttgtagtagaagtgtagagagagcgagacagagatagatgacaaacacgaaacgaaccggaaggaggacgataaggcgcgcgtgccggccggtcttttactcctctctgttcatagctgtcccatatcgtagtcaagaaaactgagcagggaaacaaaccgggcgatatttctgttgcatcttgctttgtttgagagtgtgcgtgcgtgtgcggccagctcgatctgaactcgataggcaggtgcgtcgcgtcgtggatgaactggtccgtggacgtgatcttgtttatttttttaaggagcaggtgttgtcaaaagtccatcgctaagatgtgc

SEQ ID NO: 25608 - protein, 371 aa, Zea mays subsp. mays
  misc_feature (1)..(371): Ceres Seq. ID no. 13492558
MGVRLPVAWSAVLVLLVRAAVAREYAAIFNFGDSLVDAGNLVVDGIPDYLATARLPYGMTHFGYPTGRCSDGRLVVDFIAQELGVPLLPPSKAKNATFHRGANFAITGATSLDTPFFVERGLGKTVWNSGSLHTQIQWFQDMKPKLCGQEQECRDLFRRSLFIVGEFGGNDYNSPLFAFRPLAEAHDMVPHVVESIGRGVERLIAEGAAELVVPGVLPIGCFPVYLSIFRRQPAGGYGARSGCVKELNTLSWVHNAALRRKVEELRARHPGVRIVYADYYTPAIQFVLHAEKYGMLKQTPRACCGAPGVGEYNFNLTSKCGEPGAYACPDPSNHWSWDGIHLTEAAYGHIARGWLYGPFADPPILDAKHLG

SEQ ID NO: 25609 - protein, 313 aa, Zea mays subsp. mays
  misc_feature (1)..(313): Ceres Seq. ID no. 13492559
MTHFGYPTGRCSDGRLVVDFIAQELGVPLLPPSKAKNATFHRGANFAITGATSLDTPFFVERGLGKTVWNSGSLHTQIQWFQDMKPKLCGQEQECRDLFRRSLFIVGEFGGNDYNSPLFAFRPLAEAHDMVPHVVESIGRGVERLIAEGAAELVVPGVLPIGCFPVYLSIFRRQPAGGYGARSGCVKELNTLSWVHNAALRRKVEELRARHPGVRIVYADYYTPAIQFVLHAEKYGMLKQTPRACCGAPGVGEYNFNLTSKCGEPGAYACPDPSNHWSWDGIHLTEAAYGHIARGWLYGPFADPPILDAKHLG

SEQ ID NO: 25610 - protein, 230 aa, Zea mays subsp. mays
  misc_feature (1)..(230): Ceres Seq. ID no. 13492560
MKPKLCGQEQECRDLFRRSLFIVGEFGGNDYNSPLFAFRPLAEAHDMVPHVVESIGRGVERLIAEGAAELVVPGVLPIGCFPVYLSIFRRQPAGGYGARSGCVKELNTLSWVHNAALRRKVEELRARHPGVRIVYADYYTPAIQFVLHAEKYGMLKQTPRACCGAPGVGEYNFNLTSKCGEPGAYACPDPSNHWSWDGIHLTEAAYGHIARGWLYGPFADPPILDAKHLG

SEQ ID NO: 25611 - DNA, 1324 bp, Zea mays subsp. mays
  misc_feature (1)..(1324): Ceres Seq. ID no. 13492565
aacaagaaagcgaccaccgctgtgaatcagcagagctgcagtgagagcaagtgagaggatcagaggaggcatccgtgaccaaagatcgagtagccaagaagaagagagatgaacgccgacttcggcgcgccccaaggagctcgcgggaggcctgcagcagcggcgggccctctaccagccccgcctcccgccatgcctccagggaccgacggtaagggcggagtacggtgacgcgaccacaaccatagatcccacctgtgcccaagccgtcgcgcaggccttcccgcacacctttggccagccgctcgtcagcttcgtcgcgccggccgccggcgccggcgccgttgaggagcgccacccgatcagggtgggcgtggtgttctctgggaggcagtcgccgggagggcacaacgtcgtctggggcctccatgacgcacttaaagcctacaatcctcagagcttgctctacggattcgtcggtggcacggagggactgtttgcaaacaagacgttggagatcacagacgatgttcttgcttcctataagaaccaaggtggtttcgatttgctcggtaggagtatcgatcagatccgcactactaagcaagtgaatgctgcaatgacaacatgccacagtctgaacttggatgggttggtcatcattggaggtgtgacctccaattcagatgctgcacagcttgcggagacccttattcagaataactgtaagaccaaggttgttggtgtgccagtttcattgaatggtgacctcaagaaccagtttgttgaaacaacagttggatttgatacagtatgtaaggttaattcacagcttgtaagcaatgtttgtcttgatgcgatctcagctggaaagtactattattttgttcgtctgatgggacgaaaagcatctcatgttgcctttgaatgtgcacttcaatcacacccaaacatgctcatcttaggcgaggaggtagcattgtcaaaactcacactgatggaaattataagcaagatttgtgatggagtacaagcaagggcaaaattagggaaatatcatggtgtgcttgttattcccgaaggacttatagaaagcattccagaaatgtatgctcttattcaggaaatcaatatccttcacaacagtaatgttcctgtggctgagatgtcatcacaactgtctccgtgggcagctgctctgttccagttcttgccacccttcatcaggagagagctgctgctccaccaagaatcagataactctgcgcagctgtcccaaattgacacggagcaactgctggcccatctagtagaaacagaaatg

SEQ ID NO: 25612 - protein, 235 aa, Zea mays subsp. mays
  misc_feature (1)..(235): Ceres Seq. ID no. 13492566
MTTCHSLNLDGLVIIGGVTSNSDAAQLAETLIQNNCKTKVVGVPVSLNGDLKNQFVETTVGFDTVCKVNSQLVSNVCLDAISAGKYYYFVRLMGRKASHVAFECALQSHPNMLILGEEVALSKLTLMEIISKICDGVQARAKLGKYHGVLVIPEGLIESIPEMYALIQEINILHNSNVPVAEMSSQLSPWAAALFQFLPPFIRRELLLHQESDNSAQLSQIDTEQLLAHLVETEM

SEQ ID NO: 25613 - protein, 143 aa, Zea mays subsp. mays
  misc_feature (1)..(143): Ceres Seq. ID no. 13492567
MGRKASHVAFECALQSHPNMLILGEEVALSKLTLMEIISKICDGVQARAKLGKYHGVLVIPEGLIESIPEMYALIQEINILHNSNVPVAEMSSQLSPWAAALFQFLPPFIRRELLLHQESDNSAQLSQIDTEQLLAHLVETEM

SEQ ID NO: 25614 - protein, 124 aa, Zea mays subsp. mays
  misc_feature (1)..(124): Ceres Seq. ID no. 13492568
MLILGEEVALSKLTLMEIISKICDGVQARAKLGKYHGVLVIPEGLIESIPEMYALIQEINILHNSNVPVAEMSSQLSPWAAALFQFLPPFIRRELLLHQESDNSAQLSQIDTEQLLAHLVETEM

SEQ ID NO: 25615 - DNA, 1220 bp, Zea mays subsp. mays
  misc_feature (1)..(1220): Ceres Seq. ID no. 13492573
agccgctttacaactccccaccccatcccatccacacacacttcacccagcgcggcggccgccggccgccggcaatggaggccgtggcgcacagcggcgactacctttggcggttcgtggcggagacagagtggtacaacgaggttgtcctcagcgccgtggcgccaggcgactggtggcgcggcctgccgcacccggtgcagtcatggatgcgcaactgcgtcggcggttacctcctctatttcatctctggtttcctctggtgcttcgtcatctactactggaagcgccacgcctacatccccaaagatgccatccccacaaatgacgctatgaagaagcaaatagttgtagcatcgaaggctatgcctttttactgcgctcttccaactttatctgaatatatgattgagagcggatggactcagtgctacttcaatatcagcgaaattggtttttctatgtacctctgttatatggctatgtatctcatctttgtggagtttggaatttactggatgcacagggagttgcatgacataaaaccattatacaaatatctgcatgcaacccaccatatttacaacaaggagaataccttgtctccatttgctggacttgcatttcatccactggatggtattctgcaagcaataccacatgtgttcgcgctcttcctctttccaacgcacttcaggacacatattgcactcttgttcctagaggctgtgtggacaacaaacatccacgactgcattcatggcaagatatggccagtcatgggtgctggatatcacaccattcaccatacgacttaccgtcacaactatggccactacaccatctggatggactggatgtttggtacgctcaatgagccagaagatatcctcaagaaggcttgagtttctcggagctgtggtattcctatggtgctgctgctggaactgctcgatctgttcccagtgtttctaatccgttgagcctgttcagcactgtctgtttatgtaggcatcagtgtgttaattactttgctaggttcatatggctttgtgcttattctgtaatttagcgatgtttgtctcatgacgcaacggagttcaggacgaataaaactttgctagacacattctggattccagttgcttgtacaatgttggaactcaactgtcaatataggatgtaaaacggattccttctagtcttgtacctggtgagtt

SEQ ID NO: 25616 - protein, 300 aa, Zea mays subsp. mays
  misc_feature (1)..(300): Ceres Seq. ID no. 13492574
PLYNSPPHPIHTHFTQRGGRRPPAMEAVAHSGDYLWRFVAETEWYNEVVLSAVAPGDWWRGLPHPVQSWMRNCVGGYLLYFISGFLWCFVIYYWKRHAYIPKDAIPTNDAMKKQIVVASKAMPFYCALPTLSEYMIESGWTQCYFNISEIGFSMYLCYMAMYLIFVEFGIYWMHRELHDIKPLYKYLHATHHIYNKENTLSPFAGLAFHPLDGILQAIPHVFALFLFPTHFRTHIALLFLEAVWTTNIHDCIHGKIWPVMGAGYHTIHHTTYRHNYGHYTIWMDWMFGTLNEPEDILKKA

SEQ ID NO: 25617 - protein, 276 aa, Zea mays subsp. mays; identical to SEQ ID NO: 16122
  misc_feature (1)..(276): Ceres Seq. ID no. 13492575

SEQ ID NO: 25618 - protein, 231 aa, Zea mays subsp. mays; identical to SEQ ID NO: 16123
  misc_feature (1)..(231): Ceres Seq. ID no. 13492576

SEQ ID NO: 25619 - DNA, 1422 bp, Zea mays subsp. mays
  misc_feature (1)..(1422): Ceres Seq. ID no. 13492589
gaccaacccaaccgtgggggtgccgggtgccctacggcctacgggccggagcagcgcttgggagccgcggcacggaggcatcgacgccgttgagctcgaggcgaccggcggctggcggccccgccacagcgttgctgtggcagtgtggcttcttctggtttctgcgggctcagcgcggaggcctattgcaggattaaatggcaaatagggcaagatggatgatgaagtacgaaaagggtcttgttgatatacttcatgagaacaacacttcacattatcgtacccaaaacggttggagaacataggggtggaggaaaattgttagggatttcaatgtacggtaccctgaagcaaagtttagtaaaatgcaaatccaggaacatgagactcaattgaagaaagactacaggtcgataaaatatatcctccaacgtgatggtgtctcgtgggaccagagtgcgtccatgtttagaacaacagatgaaatctgggatgagattatcgaggatatgcccaaggcacggaagtaccaaagcaagagctttccattgcttgactcactagaaccgttatttgatggtcctattcctgaaggggcacaaaaatcaccttccagcatacctcagaatgttggtggaaacgttggtgatggaggcaacaatatcagcacagtcccagacttgtctgaaagacctagtggaacaattaacacaagcgttaatgaggcatggaataatatcagcctacttaagcaaacagcattgggaccccaaggtatagacaatctcgattctcgacacgctgcaaaatcgtgataaagaggtgctggaacggctacagcatggctcggaccggaggccgaagagagcggatgaacaggcacagtcaagttcttgcgtagaactgcagagagacaggcgcaagaagcggaaggccccagacatccagcagatcatggagacctatatgaatttcagaatgaagcaacctcgcgtcaaacaacgaagagcaaaggacggtgaccagttcacgatttcaagctgtatcaaggctctgcacaccatggctgatatgtcagatgaggtcaaggtattagcctctgatgttttcaaggacgctgagaacagggagacctttctttcgtatgaacccaggctgcgcaccttgtggctgaagagggaagttggcaagctactctcctatagaagtggcagcccttgcttgttttgtttgctacccgtgcctaggcttcatttaacaaactctactagtgacttaacttgttccatgcacagtacgtcactatactgcttagtcattcatgatcaatgatgtgcttgctgcatgtagtgcttccaaaattttgcatctgtgccaatacactgttaaaaaatgcgacagaatgcttgtttcttgacagct

SEQ ID NO: 25620 - protein, 149 aa, Zea mays subsp. mays
  misc_feature (1)..(149): Ceres Seq. ID no. 13492590
MQIQEHETQLKKDYRSIKYILQRDGVSWDQSASMFRTTDEIWDEIIEDMPKARKYQSKSFPLLDSLEPLFDGPIPEGAQKSPSSIPQNVGGNVGDGGNNISTVPDLSERPSGTINTSVNEAWNNISLLKQTALGPQGIDNLDSRHAAKS

SEQ ID NO: 25621 - protein, 125 aa, Zea mays subsp. mays
  misc_feature (1)..(125): Ceres Seq. ID no. 13492591
METYMNFRMKQPRVKQRRAKDGDQFTISSCIKALHTMADMSDEVKVLASDVFKDAENRETFLSYEPRLRTLWLKREVGKLLSYRSGSPCLFCLLPVPRLHLTNSTSDLTCSMHSTSLYCLVIHDQ

SEQ ID NO: 25622 - protein, 121 aa, Zea mays subsp. mays
  misc_feature (1)..(121): Ceres Seq. ID no. 13492592
MNFRMKQPRVKQRRAKDGDQFTISSCIKALHTMADMSDEVKVLASDVFKDAENRETFLSYEPRLRTLWLKREVGKLLSYRSGSPCLFCLLPVPRLHLTNSTSDLTCSMHSTSLYCLVIHDQ

SEQ ID NO: 25623 - DNA, 1765 bp, Zea mays subsp. mays
  misc_feature (1)..(1765): Ceres Seq. ID no. 13492636
ctccccaaaattctcatctagtcaccggccattccgttgtgtccataggctgtcagtcacttccagtcctagcccactcctccgatgctccaatcatcaacactctctacctgtgtccgtgtgctcttctcctctgcaccaccaaccaaccagtgctgtcctccgccgatccactgacctaccgcgagcgccaatggcgacccgccgcggtcctcgccgccacattagcgctgttcctcggcgccgccgccgcaacggccgcgacggctgcggcggaggcggaccggatcggcaggctgccgggccagccgccggtcaacttctccatgtactccggctacgtcaccgtggacgcggcggcggggcgggccctcttctactggttcatcgaggcggccggcgtgcccgcggagtccgcgccgctcgtgctgtggctcaacggcgggcccgggtgctcctccgtcggctacggcgcgtcagaggagctcggcgccttccggatcaacgccgacggcaggacgctctacttgaacccctacccctggaataaagtggcgaacatgctgttcttggactcgccggccggcgtcggctactcatactccaactccacctccgatctgtacactgccggtgacaacaagacagcccatgactcgtacaatttcttggtgaactggctggagcggtttccacaatacaagcatcgcgatttctacatcacaggagagagctacgcaggccactacgtgcctcagttgtctcagctagtctaccggaacaacaaaggcatcgagaagccgatcctaaacttcaaaggcttcatggttggaaatgcggtaattgacgattaccacgacttcatcggcacattcgagtacttgtggacgcacgggctgatctctgacgaaacctacgagaagctgcggcttgcctgccagttcgacgtatctgagcatgcgtcgaaggagtgcaacaaggtcttcgacatcgccgaggccgaggaaggcaatatcgatgcgtacagcatctacacgccgacttgcaagaagacttcactccacaagcgcaggctaatcagaggaagaacgccctggttgcccagagggtacgatccctgcacggagaagtactccacgaagtactacaacctacctgaggtgcagagagctctacacgccaatgtcaccggaataccgtatccctgggtaacctgcagtgacccagtgtatgatttttggaaagattcaccgaggtccatgcttcctatctaccgtgaactcatcgccgcgggcataaggatatgggttttcagtggcgacgctgattccgttgtcccgctcaccgcgacaaggtactccattgacgccctctttctaccgactatcacgaactggtatccttggtacgacgacgaagaggtcggtgggtggtgccaggtgtacgaggggctgacactggtgacggtccgaggcgcagggcacgaggttcccctgcaccggccgcggcagggcctgaagctgttcgagcacttcctgcggggtgagcccatgcccaggcctgtagatagcgtccagtcgttttagaactggttgctgtctccccgcttggtgaaggaggagacctggctgcgctgcgcattcttgttgctgtaaactcatccgtcacactccgttgttaggatggatttgctgaaaatcagaacataatgttgctcgtttcagtgagcagattgggtatttagcaatgtctcgttttgacagtg

SEQ ID NO: 25624 - protein, 527 aa, Zea mays subsp. mays
  misc_feature (1)..(527): Ceres Seq. ID no. 13492637
PQNSHLVTGHSVVSIGCQSLPVLAHSSDAPIINTLYLCPCALLLCTTNQPVLSSADPLTYRERQWRPAAVLAATLALFLGAAAATAATAAAEADRIGRLPGQPPVNFSMYSGYVTVDAAAGRALFYWFIEAAGVPAESAPLVLWLNGGPGCSSVGYGASEELGAFRINADGRTLYLNPYPWNKVANMLFLDSPAGVGYSYSNSTSDLYTAGDNKTAHDSYNFLVNWLERFPQYKHRDFYITGESYAGHYVPQLSQLVYRNNKGIEKPILNFKGFMVGNAVIDDYHDFIGTFEYLWTHGLISDETYEKLRLACQFDVSEHASKECNKVFDIAEAEEGNIDAYSIYTPTCKKTSLHKRRLIRGRTPWLPRGYDPCTEKYSTKYYNLPEVQRALHANVTGIPYPWVTCSDPVYDFWKDSPRSMLPIYRELIAAGIRIWVFSGDADSVVPLTATRYSIDALFLPTITNWYPWYDDEEVGGWCQVYEGLTLVTVRGAGHEVPLHRPRQGLKLFEHFLRGEPMPRPVDSVQSF

SEQ ID NO: 25625 - protein, 419 aa, Zea mays subsp. mays
  misc_feature (1)..(419): Ceres Seq. ID no. 13492638
MYSGYVTVDAAAGRALFYWFIEAAGVPAESAPLVLWLNGGPGCSSVGYGASEELGAFRINADGRTLYLNPYPWNKVANMLFLDSPAGVGYSYSNSTSDLYTAGDNKTAHDSYNFLVNWLERFPQYKHRDFYITGESYAGHYVPQLSQLVYRNNKGIEKPILNFKGFMVGNAVIDDYHDFIGTFEYLWTHGLISDETYEKLRLACQFDVSEHASKECNKVFDIAEAEEGNIDAYSIYTPTCKKTSLHKRRLIRGRTPWLPRGYDPCTEKYSTKYYNLPEVQRALHANVTGIPYPWVTCSDPVYDFWKDSPRSMLPIYRELIAAGIRIWVFSGDADSVVPLTATRYSIDALFLPTITNWYPWYDDEEVGGWCQVYEGLTLVTVRGAGHEVPLHRPRQGLKLFEHFLRGEPMPRPVDSVQSF

SEQ ID NO: 25626 - protein, 341 aa, Zea mays subsp. mays
  misc_feature (1)..(341): Ceres Seq. ID no. 13492639
MLFLDSPAGVGYSYSNSTSDLYTAGDNKTAHDSYNFLVNWLERFPQYKHRDFYITGESYAGHYVPQLSQLVYRNNKGIEKPILNFKGFMVGNAVIDDYHDFIGTFEYLWTHGLISDETYEKLRLACQFDVSEHASKECNKVFDIAEAEEGNIDAYSIYTPTCKKTSLHKRRLIRGRTPWLPRGYDPCTEKYSTKYYNLPEVQRALHANVTGIPYPWVTCSDPVYDFWKDSPRSMLPIYRELIAAGIRIWVFSGDADSVVPLTATRYSIDALFLPTITNWYPWYDDEEVGGWCQVYEGLTLVTVRGAGHEVPLHRPRQGLKLFEHFLRGEPMPRPVDSVQSF

SEQ ID NO: 25627 - DNA, 1793 bp, Zea mays subsp. mays
  misc_feature (1)..(1793): Ceres Seq. ID no. 13492648
tttccttcgacagatcgaatcgtgcttaccgagctttataccatcgtcatctcccgccagctgccgtgccgtctgctcgtccgattgttcgtgttcctcgcgtgcgcggatcggatcggttcctctggattggcgcgcacgctcagcaagtagtagcaggtctttcgccgtcgcatgttactgcagcaggccaccggaagagcgcgccgtcatcagctagctgcctcctcctcctcgtcgtctcgaccaccggcggtggatgggcggcgtgctcggcgcgctgctgcaccggcggtccgggggcaggccgccaccggcgcgggccacgaggcgccgggcgctcacccgccagccgtcggcctatgacgccggcggcgggcaccggagggcgatgctgtccaagaagtactcgtacataccggacacctacacgtcgcttgacgaggtggcggcggcgctgcgcgagcaggggctggagtcgtcgaacctcatcctgggcatagacttcaccaagagcaacgagtggacagggaggcagtcgttcggcgggcagagcctgcacagggtcggcgacacgcccaacccctacgagcaggccatcagcatcatcggcaagacgctggctcccttcgacgaggacaacctcatcccctgcttcggcttcggagacggtgactgacgactgacgacggccttcctccgatcctgctgttgatgcatccatccatcttctcgcgtgtcgatcgcttgtccttctccttaatctatctaacctctcttcttgcattatattggttgcgtcgggactcgcgcctgcactgngcagccaccacccatgactacaacgtgtttcagcttccacccggacaactcgccgtgccacggcttcgaggaggtcctcgcctgctaccgcaagatcgtgccgcacctcaagctttccgggcngacgtcgttcgcgcccatcgtggaggcggccgtngacatcgtggaccggagcggggggcagtaccacgtgctcgtcgtggtcgcggacgggcaggtgaccaggagcgtcgacaccggtgacggcgacctcagcccgcaggagaagagaacggtagagtccattgtcacggcaagctcctacccgctgtccatcgttctggttggggtcggggacggcccctgggacgacatgcgcagattcgacgacaagctccccgcgcgcgacttcgacaacttccagttcgtcaacttcaccgccatcatggcccgcgccgcgacggcacagcagaaggagtcggcgttcgcgctcgccgcgctcatggaggtccccatccagtacaaggccaccatggagctcggcatcctgggacggtccacggggaacgccaagcgagtcgcccccgcgccgccgccactgccgcacgcgcagcggcaggcgtcgtcgctgaggaggggcgccagcaacgtcggcggcgccgccgcggcgccgagagatgaccaggtgtgcccgatctgcctgaccaatgccaaggatctggcgttcggctgtgggcatatgtgctgcagggagtgcggggaaagcctcaccagatgcccgatatgccggcagccgatacggtcgaagctgaggctatattcaggatgaagtggctatgctacaacagaggccacgaagaggaaaaaggatatatagcttactcgccgttaaaatgtacatgtgaatctgtcaaaacgtgtaagaaggaaccaccggtcgaggtcagtcctgttcgtctccaaatttggatgaaccgatgttccattttgtc

SEQ ID NO: 25628 - protein, 264 aa, Zea mays subsp. mays
  misc_feature (1)..(264): Ceres Seq. ID no. 13492649
  misc_feature (37)..(37): Xaa is any aa, unknown or other
  misc_feature (48)..(48): Xaa is any aa, unknown or other
MTTTCFSFHPDNSPCHGFEEVLACYRKIVPHLKLSGXTSFAPIVEAAXDIVDRSGGQYHVLVVVADGQVTRSVDTGDGDLSPQEKRTVESIVTASSYPLSIVLVGVGDGPWDDMRRFDDKLPARDFDNFQFVNFTAIMARAATAQQKESAFALAALMEVPIQYKATMELGILGRSTGNAKRVAPAPPPLPHAQRQASSLRRGASNVGGAAAAPRDDQVCPICLTNAKDLAFGCGHMCCRECGESLTRCPICRQPIRSKLRLYSG

SEQ ID NO: 25629 - protein, 166 aa, Zea mays subsp. mays
  misc_feature (1)..(166): Ceres Seq. ID no. 13492650
SFDRSNRAYRALYHRHLPPAAVPSARPIVRVPRVRGSDRFLWIGAHAQQVVAGLSPSHVTAAGHRKSAPSSASCLLLLVVSTTGGGWAACSARCCTGGPGAGRHRRGPRGAGRSPASRRPMTPAAGTGGRCCPRSTRTYRTPTRRLTRWRRRCASRGWSRRTSSWA

SEQ ID NO: 25630 - protein, 151 aa, Zea mays subsp. mays
  misc_feature (1)..(151): Ceres Seq. ID no. 13492651
MRRFDDKLPARDFDNFQFVNFTAIMARAATAQQKESAFALAALMEVPIQYKATMELGILGRSTGNAKRVAPAPPPLPHAQRQASSLRRGASNVGGAAAAPRDDQVCPICLTNAKDLAFGCGHMCCRECGESLTRCPICRQPIRSKLRLYSG

SEQ ID NO: 25631 - DNA, 1083 bp, Zea mays subsp. mays
  misc_feature (1)..(1083): Ceres Seq. ID no. 13492652
ccacacagcaaaaccacccgcgctccgccaatccagagagccagccagcccgaggtcacacagcagcgagctcggtcttctcgccaggacacgaacacgaccccagcaggcggcaggcaagccacgctctctcgacggacggacgttaatcgagacatggggcgctctccgtgctgcgagaagatggggctgaagaggggtccgtggacggccgaggaggacaggattctggtggcgcacgtcgagcgccacggccacagcaactggcgcgcgctgcccaagcaggcgggcctgctccgctgcggcaagagctgccgcctccgctggatcaactacctgcgccccgacatcaagcgcggcaacttcagccgggaggaggaggacgccatcatacagctccaccaaatgctcggcaacagatggtcgacaatcgctgccaggctgccggggaggacggacaacgagatcaagaacgtctggcacacccacctcaagaagcgcctggagccaaagccagccagccagcaggcgcccaagcgcaagcccacgaagaagcagcagccgcagccggagcccgtaacggcgctcgaggggccgaccggggccgtgccggtgtcgccggagcggtcactctccacgacgacgtcgaccaccaccagcaccgcggactactcggccgcctcgtcgctggagaacgcaggcgacagcttcacctcggaggaggactactaccagatcgacgacagcttctggtccgagacgctggcgatgacgacgacggtggacagcttcgagtccggggtgcagcaggcggagggaagcttcggcaagtcggcggcgccgccgtcgtcgaccaacgacgacatggacttctggctcaagctgttcatgcaggccagcgacatgcagaatttgccccagattatttaggcgggaaacggacctagacggttggttatctctcggctgatgatgatattcattggcgcgcgctcacgattctttgaatctttgttctgctccgttttcggtggatgcatatatcccactgaaaccttgtgaagcggaaagcaattgcttcgt

SEQ ID NO: 25632 - protein, 309 aa, Zea mays subsp. mays
  misc_feature (1)..(309): Ceres Seq. ID no. 15222886
PHSKTTRAPPIQRASQPEVTQQRARSSRQDTNTTPAGGRQATLSRRTDVNRDMGRSPCCEKMGLKRGPWTAEEDRILVAHVERHGHSNWRALPKQAGLLRCGKSCRLRWINYLRPDIKRGNFSREEEDAIIQLHQMLGNRWSTIAARLPGRTDNEIKNVWHTHLKKRLEPKPASQQAPKRKPTKKQQPQPEPVTALEGPTGAVPVSPERSLSTTTSTTTSTADYSAASSLENAGDSFTSEEDYYQIDDSFWSETLAMTTTVDSFESGVQQAEGSFGKSAAPPSSTNDDMDFWLKLFMQASDMQNLPQII

SEQ ID NO: 25633 - protein, 257 aa, Zea mays subsp. mays
  misc_feature (1)..(257): Ceres Seq. ID no. 15222887
MGRSPCCEKMGLKRGPWTAEEDRILVAHVERHGHSNWRALPKQAGLLRCGKSCRLRWINYLRPDIKRGNFSREEEDAIIQLHQMLGNRWSTIAARLPGRTDNEIKNVWHTHLKKRLEPKPASQQAPKRKPTKKQQPQPEPVTALEGPTGAVPVSPERSLSTTTSTTTSTADYSAASSLENAGDSFTSEEDYYQIDDSFWSETLAMTTTVDSFESGVQQAEGSFGKSAAPPSSTNDDMDFWLKLFMQASDMQNLPQII

SEQ ID NO: 25634 - protein, 248 aa, Zea mays subsp. mays
  misc_feature (1)..(248): Ceres Seq. ID no. 15222888
MGLKRGPWTAEEDRILVAHVERHGHSNWRALPKQAGLLRCGKSCRLRWINYLRPDIKRGNFSREEEDAIIQLHQMLGNRWSTIAARLPGRTDNEIKNVWHTHLKKRLEPKPASQQAPKRKPTKKQQPQPEPVTALEGPTGAVPVSPERSLSTTTSTTTSTADYSAASSLENAGDSFTSEEDYYQIDDSFWSETLAMTTTVDSFESGVQQAEGSFGKSAAPPSSTNDDMDFWLKLFMQASDMQNLPQII

SEQ ID NO: 25635 - DNA, 1911 bp, Zea mays subsp. mays
  misc_feature (1)..(1911): Ceres Seq. ID no. 13492653
atcccacgccccctcggcgctgcgcctggacccggcacctacctcccccctccccacctcgccgccggcgggtggagtcgggctggagcagccgctctcctctgttacccccctaaccccctataaagaaaaaaaaaaaaaaacagagagagagagcgagcgaccggcggctcggcagccatggggcacggcgtcagctgcgcccgcaccggcgacgagcacgactacttccgcgcggcgcaggtcggggacctcgaggccctggacgcgctcctcgacgccgacccctctctcgcccgccgcgccacgctctacgaccgcctctccgcgctccacatcgccgccgcgaatggccgcctcgaggtgctgtcaatggtcttggatcacggggtgccgccggacgtggtgaatcggcacaagcagacgccgctgatgctcgcggcgatgcacggcaagactgactgcgtgctgaagctcctgcaggccggcgccaatatcctcatgttcgattcccagcacgggcggacctgcctgcaccacgcgtcctacttcggccacgtcggctgcctgcaggccatcctcacggcggcgcggaccacgccggtggccgactcatggggtttcgcccggttcgtcaacgtgagggacgaccacggcgccacgccgctccacctcgccgccaggcagggccgccccggctgcgtgcaggcgctgctggagaacggcgccatcgtctccgctttgaccggctcatacgggtttcctggtagcacagtcgctgcacctcgccgctcgcagcgggagcctggattgcacccggaagctgctcgcctggggagcggatcgtctccggagggattcagcagggaggatcccttacgccgtggcgctgaagcgcaaccacgaggcgtgcgcagcgctgctgaacccgtcggcggcggagcccatggtgtggccgtccccgctcaagttcatcagcgagctggagccggaggccaaggcgctcctggaagcggcgctgacggaagccaacagggagagggaggagaagatcctcaggggcaccaagcactctccgcctcctcccacctgggaccacgcgagcgacgccgccgacgccgacgccatcgacgacgcgtcctcagatgccagcgccagcgacgcggagctgtgctgcatctgcttcgaccaggcgtgcaccatggaggtgcaggactgcgggcaccagatgtgcgcgccgtgcacgctcgcgctgtgctgccacagcaagcccgacccggtgactctggcgctgccgtcgccagcctgcccgttctgccgcggcagcatctcgcggctgctcctggtggcccgggcaagcagcgacgacgcggacaccgagaagtcggcggcggcggcagcgggctgcctcctccccgcagctcgtccggcggcggtcccggcggtcgcacaacctcagcgacggcggcagcagcagcttcaaggggctgtcgtccgccgtggccggttccttctccaagatcgggcgcgggtcgagccggacgatggccgacagcgacggctgcggcgtggacaagcccgagcacgacccgtgatcggcattggatcctgcgcatgtggagccgagcgcggggccattgcggacatccaatcgaatccaagccaagcgtgactgcttgctgcgaaaataaccgcatccttttcttcttcttctccccatgtccctgtctgtcaatcctattcttgggcgtgccaggatttgttcacctggccattgccgtattccattgtcaccgaccggctatagtatatagtactagattccatttccaaaaaaaaaaaaaaaaaaaaaaaaaaaaaaaaaaaaaaagaaaaaaaaaaaaaaaaaacggcacgagaagccggcacgag

SEQ ID NO: 25636 - protein, 577 aa, Zea mays subsp. mays
  misc_feature (1)..(577): Ceres Seq. ID no. 13492654
MGHGVSCARTGDEHDYFRAAQVGDLEALDALLDADPSLARRATLYDRLSALHIAAANGRLEVLSMVLDHGVPPDVVNRHKQTPLMLAAMHGKTDCVLKLLQAGANILMFDSQHGRTCLHHASYFGHVGCLQAILTAARTTPVADSWGFARFVNVRDDHGATPLHLAARQGRPGCVQALLENGAIVSALTGSYGFPGSTVAAPRRSQREPGLHPEAARLGSGSSPEGFSREDPLRRGAEAQPRGVRSAAEPVGGGAHGVAVPAQVHQRAGAGGQGAPGSGADGSQQGEGGEDPQGHQALSASSHLGPRERRRRRRRHRRRVLRCQRQRRGAVLHLLRPGVHHGGAGLRAPDVRAVHARAVLPQQARPGDSGAAVASLPVLPRQHLAAAPGGPGKQRRRGHREVGGGGSGLPPPRSSSGGGPGGRTTSATAAAAASRGCRPPWPVPSPRSGAGRAGRWPTATAAAWTSPSTTRDRHWILRMWSRARGHCGHPIESKPSVTACCENNRILFFFFSPCPCLSILFLGVPGFVHLAIAVFHCHRPAIVYSTRFHFQKKKKKKKKKKKKRKKKKKNGTRSRHE

SEQ ID NO: 25637 - protein, 513 aa, Zea mays subsp. mays
  misc_feature (1)..(513): Ceres Seq. ID no. 13492655
MVLDHGVPPDVVNRHKQTPLMLAAMHGKTDCVLKLLQAGANILMFDSQHGRTCLHHASYFGHVGCLQAILTAARTTPVADSWGFARFVNVRDDHGATPLHLAARQGRPGCVQALLENGAIVSALTGSYGFPGSTVAAPRRSQREPGLHPEAARLGSGSSPEGFSREDPLRRGAEAQPRGVRSAAEPVGGGAHGVAVPAQVHQRAGAGGQGAPGSGADGSQQGEGGEDPQGHQALSASSHLGPRERRRRRRRHRRRVLRCQRQRRGAVLHLLRPGVHHGGAGLRAPDVRAVHARAVLPQQARPGDSGAAVASLPVLPRQHLAAAPGGPGKQRRRGHREVGGGGSGLPPPRSSSGGGPGGRTTSATAAAAASRGCRPPWPVPSPRSGAGRAGRWPTATAAAWTSPSTTRDRHWILRMWSRARGHCGHPIESKPSVTACCENNRILFFFFSPCPCLSILFLGVPGFVHLAIAVFHCHRPAIVYSTRFHFQKKKKKKKKKKKKRKKKKKNGTRSRHE

SEQ ID NO: 25638 - protein, 493 aa, Zea mays subsp. mays
  misc_feature (1)..(493): Ceres Seq. ID no. 13492656
MLAAMHGKTDCVLKLLQAGANILMFDSQHGRTCLHHASYFGHVGCLQAILTAARTTPVADSWGFARFVNVRDDHGATPLHLAARQGRPGCVQALLENGAIVSALTGSYGFPGSTVAAPRRSQREPGLHPEAARLGSGSSPEGFSREDPLRRGAEAQPRGVRSAAEPVGGGAHGVAVPAQVHQRAGAGGQGAPGSGADGSQQGEGGEDPQGHQALSASSHLGPRERRRRRRRHRRRVLRCQRQRRGAVLHLLRPGVHHGGAGLRAPDVRAVHARAVLPQQARPGDSGAAVASLPVLPRQHLAAAPGGPGKQRRRGHREVGGGGSGLPPPRSSSGGGPGGRTTSATAAAAASRGCRPPWPVPSPRSGAGRAGRWPTATAAAWTSPSTTRDRHWILRMWSRARGHCGHPIESKPSVTACCENNRILFFFFSPCPCLSILFLGVPGFVHLAIAVFHCHRPAIVYSTRFHFQKKKKKKKKKKKKRKKKKKNGTRSRHE

SEQ ID NO: 25639 - DNA, 1289 bp, Zea mays subsp. mays
  misc_feature (1)..(1289): Ceres Seq. ID no. 13492669
ctttgttgcctacagcctgtaacctactaccacaccaagctaatctgggtgaggtatcccgtgctcagcgcactattgaagccgtggagaagctgttgctgcaggggatgggttcagttattgaatccaaggacattattggaatctacaggactccattattggatgaccacggacaagtccgttaccatattcaccaaaagcaagtacaggttaccggatgtcatcgtggaaacgcaaatgtccgttatgcatggcttccttgctccaaaagcactgtgcatgtaatgatgctgaatggtgttttgcaagttgataagcctcccaataagtgtgcagcctatggagagggcactctccttacaccagcaaatcgttcggatgcctgtgtgaaatactctgatgttgatgaaaatggcattgtccgtatgatgttgtgccgtgtaataatggggaacgtagaaatagttcaccctggatctaagcagtgccaacctagtaataagtattttgatagtggagtagacgaccttaaaaatccacggcattacgttgtgtgggatatgaatctgaatagtcatatctattctgagtttgtagtcactgtcaaattgccttctaaaaccaaagattcctttgtatcgcaagaaaactgtcagaattcgtctgatctatcactggtgttgaactctagttcacctgattgtatttcacaggagatgaacctggaggcacctccagcattgggaggtggatgtgcagcccccatgctaggagattcgatggaaaaggctccaagctcaccttggatgcctttctccatgctgtttgcagcgatctctaccaaagtgtctcctgagaatatggacgtgattattggttgctatgaagagtttaagagcaagaaaataagccgaggtgaactagtgaagaagctgaggcatgtagttggtgatagagtgctaatatcgacgataatgcgtctccaagataagttacctccagtggataagcgtgaggaaccagacacatcggcgtccaaggtggtggcggaaccatgagatgggtgtcaggaggtgggcgaggaatgcagaaagggaggaaccagccgacttgacatagaaaaccctgtgggaagcagcaactatgaagcctcttgcatcagtcttgtgcatggaggctgctgtttgttctctgtatcgtaggtgtctacgtttgcgaggaaattgtatccggtgtttctctttcttcaaattaaaccacgcacatgcagctgccgtactttttgg

SEQ ID NO: 25640 - protein, 352 aa, Zea mays subsp. mays
  misc_feature (1)..(352): Ceres Seq. ID no. 13492670
LLPTACNLLPHQANLGEVSRAQRTIEAVEKLLLQGMGSVIESKDIIGIYRTPLLDDHGQVRYHIHQKQVQVTGCHRGNANVRYAWLPCSKSTVHVMMLNGVLQVDKPPNKCAAYGEGTLLTPANRSDACVKYSDVDENGIVRMMLCRVIMGNVEIVHPGSKQCQPSNKYFDSGVDDLKNPRHYVVWDMNLNSHIYSEFVVTVKLPSKTKDSFVSQENCQNSSDLSLVLNSSSPDCISQEMNLEAPPALGGGCAAPMLGDSMEKAPSSPWMPFSMLFAAISTKVSPENMDVIIGCYEEFKSKKISRGELVKKLRHVVGDRVLISTIMRLQDKLPPVDKREEPDTSASKVVAEP

SEQ ID NO: 25641 - protein, 317 aa, Zea mays subsp. mays
  misc_feature (1)..(317): Ceres Seq. ID no. 13492671
MGSVIESKDIIGIYRTPLLDDHGQVRYHIHQKQVQVTGCHRGNANVRYAWLPCSKSTVHVMMLNGVLQVDKPPNKCAAYGEGTLLTPANRSDACVKYSDVDENGIVRMMLCRVIMGNVEIVHPGSKQCQPSNKYFDSGVDDLKNPRHYVVWDMNLNSHIYSEFVVTVKLPSKTKDSFVSQENCQNSSDLSLVLNSSSPDCISQEMNLEAPPALGGGCAAPMLGDSMEKAPSSPWMPFSMLFAAISTKVSPENMDVIIGCYEEFKSKKISRGELVKKLRHVVGDRVLISTIMRLQDKLPPVDKREEPDTSASKVVAEP

SEQ ID NO: 25642 - protein, 257 aa, Zea mays subsp. mays
  misc_feature (1)..(257): Ceres Seq. ID no. 13492672
MMLNGVLQVDKPPNKCAAYGEGTLLTPANRSDACVKYSDVDENGIVRMMLCRVIMGNVEIVHPGSKQCQPSNKYFDSGVDDLKNPRHYVVWDMNLNSHIYSEFVVTVKLPSKTKDSFVSQENCQNSSDLSLVLNSSSPDCISQEMNLEAPPALGGGCAAPMLGDSMEKAPSSPWMPFSMLFAAISTKVSPENMDVIIGCYEEFKSKKISRGELVKKLRHVVGDRVLISTIMRLQDKLPPVDKREEPDTSASKVVAEP

SEQ ID NO: 25643 - DNA, 1159 bp, Zea mays subsp. mays
  misc_feature (1)..(1159): Ceres Seq. ID no. 13492677
ggccacaccttccgtcccccggcctccgctcgcctcgccgcccgcctgtccctgtctgtctctctctctcctcgctgagtcgccgccagccatgaacaacctcctcacggattcctttgagctcccccggcgggactcctcaagagatgcagacattgaaatgggaatgcatcaagctgatgcttcagacaacttaaaagatttcttgaagaaggtcgatacaattgagagtttaattgcaaagctgacaaatctattgaataagctacagactgcaaatgaggaatccaaagcagttacaaaagcaagttccatgaaagcaattaagcagcggatggagaaagatattgatgaagtggggaaaattgctcgtcaggcgaagacaaaagttgatgaattggaaaaagacaacttatcaaataggcaaaaacctggatgtggaaaaggttctgccgtggaccgatcaagagagcaaactactggagcagtgaaaaagaaattgaaggagcggatggatgactttcagaccttgagagaagcaatcaggcaagagtatcgggaggttgttgaaagaagggtttttactgtaactggtaatcgtcctgatgaagagacaattgatgacttgatagagaccggaaaaagtgagcaaatattcaaagatgctatccaacatcagggaagaggccagatactagacactgttgctgaaatacaggagcgacatgatgctgtaagggatctagagaggaagcttctggagttgcaacagatattcatggacatggcagttcttgttgaggcgcaaggagacatgatcaacaacatcgagacccatgtctcgaacgccaccaaccacatacagcaaggtgtgagcgcgctccagaacgcgaagaaactgcagaggaattcgaggaagtggatgtgctacgccatcatcatactgctggtgatagtcgtggtcattgtcgtcgcagtcatccagccatggaagaagggcacctagcgtggtggtgccttttttcctgtttgtgtaatatgtgtgcagttttttttgtgggtgattcgtgatttgttgttgtacctatagtcgacgcaacaggagctctggcatttcgattcattctgtctagtgaaaggacactgccatcatatgccg

SEQ ID NO: 25644 - protein, 334 aa, Zea mays subsp. mays
  misc_feature (1)..(334): Ceres Seq. ID no. 13492678
ATPSVPRPPLASPPACPCLSLSLLAESPPAMNNLLTDSFELPRRDSSRDADIEMGMHQADASDNLKDFLKKVDTIESLIAKLTNLLNKLQTANEESKAVTKASSMKAIKQRMEKDIDEVGKIARQAKTKVDELEKDNLSNRQKPGCGKGSAVDRSREQTTGAVKKKLKERMDDFQTLREAIRQEYREVVERRVFTVTGNRPDEETIDDLIETGKSEQIFKDAIQHQGRGQILDTVAEIQERHDAVRDLERKLLELQQIFMDMAVLVEAQGDMINNIETHVSNATNHIQQGVSALQNAKKLQRNSRKWMCYAIIILLVIVVVIVVAVIQPWKKGT

SEQ ID NO: 25645 - protein, 304 aa, Zea mays subsp. mays
  misc_feature (1)..(304): Ceres Seq. ID no. 13492679
MNNLLTDSFELPRRDSSRDADIEMGMHQADASDNLKDFLKKVDTIESLIAKLTNLLNKLQTANEESKAVTKASSMKAIKQRMEKDIDEVGKIARQAKTKVDELEKDNLSNRQKPGCGKGSAVDRSREQTTGAVKKKLKERMDDFQTLREAIRQEYREVVERRVFTVTGNRPDEETIDDLIETGKSEQIFKDAIQHQGRGQILDTVAEIQERHDAVRDLERKLLELQQIFMDMAVLVEAQGDMINNIETHVSNATNHIQQGVSALQNAKKLQRNSRKWMCYAIIILLVIVVVIVVAVIQPWKKGT

SEQ ID NO: 25646 - protein, 281 aa, Zea mays subsp. mays
  misc_feature (1)..(281): Ceres Seq. ID no. 13492680
MGMHQADASDNLKDFLKKVDTIESLIAKLTNLLNKLQTANEESKAVTKASSMKAIKQRMEKDIDEVGKIARQAKTKVDELEKDNLSNRQKPGCGKGSAVDRSREQTTGAVKKKLKERMDDFQTLREAIRQEYREVVERRVFTVTGNRPDEETIDDLIETGKSEQIFKDAIQHQGRGQILDTVAEIQERHDAVRDLERKLLELQQIFMDMAVLVEAQGDMINNIETHVSNATNHIQQGVSALQNAKKLQRNSRKWMCYAIIILLVIVVVIVVAVIQPWKKGT

SEQ ID NO: 25647 - DNA, 1624 bp, Zea mays subsp. mays
  misc_feature (1)..(1624): Ceres Seq. ID no. 13492681
aacttggccccaaatcgtggagtggaaaccctactcgtccccttccgcatcgccgcccaattcccccacccaattcccactctccgctcgacagatccatacatgatgggagaggccaaggagaacgacgtttatgaggaggagctcctggactacgaggaggacgacgacaagacggtcgatggctccgctgctaagcccaccggagaggtcgcaaagaagggctacgtcgggatccacagttccggtttcagagacttcctgctcaagccagagctgctccgtgctatccaggattgtggttttgagcatccttccgaagtgcaacacgagtgtatccctcaagccattcttggaatggatgtcatctgtcaagctaaatctgggatggggaaaactgctgtttttgtcctttcatccctccaacaaattgaccctgttgcgggtcaggtagcagcacttgtactgtgccacacaagggaactggcttatcagatatgccacgaatttgagaggttcagcaaatatcttactgaagttaaagttgctgtcttctatggaggtgttcacatcaggaagcataaagatttgttgaagaatgaatgccctcatattgtggttggcacgcctggtaggatacttgctcttgccagggataaggatctctccttgaagaatgtgaggcacttcattcttgatgaatgtgacaaaatgctggaatcacttgacatgcggagagatgttcaggagatcttcaaaatgactcctcatgataagcaagtcatgatgttttcagcaacgctcagcaaggagatccgtcctgtatgcaagaaatttatgcaagatccgatggaaatatatgttgatgatgaggcaaagttgaccctccatggtcttgtacagcactatataaaacttagcgaggcagagaagaaccggaaactgaatgatctcttggacgctcttgatttcaaccaagttgtgatattcgtgaagagtgttagcagagctgccgaactgaataagttactttgtgaatgcaacttcccatcaatctgcattcattctggaatgactcaggaagaaaggctaacaagatataagaacttcaaggaaggccacaagaaaattcttgtggctacagatttagttggcaggggcattgacattgagcgtgtcaacattgtgataaactatgacatgccagactcagctgatacttatttgcacagggttggaagggctggacgttttggcacgaagggacttgcaattacctttgtttcctctgcttcggattctgatgttcttaaccaggtgcaagaaaggtttgaggtagacataaaggaactgcctgagcaaattgacacctcgacctacatgccatcataaatgggaaggacaactgagaagagaggaggataggggagtgagcagccgtctggagatggttacctttgaactatccgatctggaggatttgatttgcctcctttgtgtactttaaaaagggcagccaggatgatgatctgtattttaagacaatgctgtctgtttgggtttaggattttgctttgtcgaaaactagcacacttattgtactactgagcagcatatttgtttt

SEQ ID NO: 25648 - protein, 463 aa, Zea mays subsp. mays
  misc_feature (1)..(463): Ceres Seq. ID no. 13492682
NLAPNRGVETLLVPFRIAAQFPHPIPTLRSTDPYMMGEAKENDVYEEELLDYEEDDDKTVDGSAAKPTGEVAKKGYVGIHSSGFRDFLLKPELLRAIQDCGFEHPSEVQHECIPQAILGMDVICQAKSGMGKTAVFVLSSLQQIDPVAGQVAALVLCHTRELAYQICHEFERFSKYLTEVKVAVFYGGVHIRKHKDLLKNECPHIVVGTPGRILALARDKDLSLKNVRHFILDECDKMLESLDMRRDVQEIFKMTPHDKQVMMFSATLSKEIRPVCKKFMQDPMEIYVDDEAKLTLHGLVQHYIKLSEAEKNRKLNDLLDALDFNQVVIFVKSVSRAAELNKLLCECNFPSICIHSGMTQEERLTRYKNFKEGHKKILVATDLVGRGIDIERVNIVINYDMPDSADTYLHRVGRAGRFGTKGLAITFVSSASDSDVLNQVQERFEVDIKELPEQIDTSTYMPS

SEQ ID NO: 25649 - protein, 429 aa, Zea mays subsp. mays
  misc_feature (1)..(429): Ceres Seq. ID no. 13492683
MMGEAKENDVYEEELLDYEEDDDKTVDGSAAKPTGEVAKKGYVGIHSSGFRDFLLKPELLRAIQDCGFEHPSEVQHECIPQAILGMDVICQAKSGMGKTAVFVLSSLQQIDPVAGQVAALVLCHTRELAYQICHEFERFSKYLTEVKVAVFYGGVHIRKHKDLLKNECPHIVVGTPGRILALARDKDLSLKNVRHFILDECDKMLESLDMRRDVQEIFKMTPHDKQVMMFSATLSKEIRPVCKKFMQDPMEIYVDDEAKLTLHGLVQHYIKLSEAEKNRKLNDLLDALDFNQVVIFVKSVSRAAELNKLLCECNFPSICIHSGMTQEERLTRYKNFKEGHKKILVATDLVGRGIDIERVNIVINYDMPDSADTYLHRVGRAGRFGTKGLAITFVSSASDSDVLNQVQERFEVDIKELPEQIDTSTYMPS

SEQ ID NO: 25650 - protein, 428 aa, Zea mays subsp. mays
  misc_feature (1)..(428): Ceres Seq. ID no. 13492684
MGEAKENDVYEEELLDYEEDDDKTVDGSAAKPTGEVAKKGYVGIHSSGFRDFLLKPELLRAIQDCGFEHPSEVQHECIPQAILGMDVICQAKSGMGKTAVFVLSSLQQIDPVAGQVAALVLCHTRELAYQICHEFERFSKYLTEVKVAVFYGGVHIRKHKDLLKNECPHIVVGTPGRILALARDKDLSLKNVRHFILDECDKMLESLDMRRDVQEIFKMTPHDKQVMMFSATLSKEIRPVCKKFMQDPMEIYVDDEAKLTLHGLVQHYIKLSEAEKNRKLNDLLDALDFNQVVIFVKSVSRAAELNKLLCECNFPSICIHSGMTQEERLTRYKNFKEGHKKILVATDLVGRGIDIERVNIVINYDMPDSADTYLHRVGRAGRFGTKGLAITFVSSASDSDVLNQVQERFEVDIKELPEQIDTSTYMPS

SEQ ID NO: 25651 - DNA, 1387 bp, Zea mays subsp. mays
  misc_feature (1)..(1387): Ceres Seq. ID no. 13492693
acttccaaactgcaacgaaaacccacgtctaaaacaggtggcccaccaacgattcacttccccgatcccagggggcggcgatcggaattcgcaacttctcccacgcggcgaacacggcagagatgatgagctcccgggccggatccatcctcctccgccacgccggctcccgtctcttcaccgcagcggcgatctctccggcggcggcctcgaggccactgctcgccggcggcaatggtgttccggcagtcatgctacggcttatgtccacgtcctcccccgccgctcccacggaggcgaaggacgaggcagccaaggcctccaaggtgggaggagacaagaaggcggtggtgatcaacagctactgggggatcgagcaaaacaacaagctagcgcgggacgacggcaccgagtggaagtggacttgctttaggccatgggagacgtacacggcggacacgtccattgacctcaccagacaccatgagcccaagacgctgatggataaggtcgcatactggaccgtcaagtcgctgcgcttccccacggacatcttcttccagaggcggtatggctgccgggcgatgatgctggaaaccgtggctgcggtgcctgggatggtgggcggcatgctgctccacctgcgctcactccgccgcttcgagcagagcggcggctggatccgcgctttgctggaggaggccgagaacgagcgcatgcacctcatgaccttcatggaggtggcgaagccgaggtggtacgagcgcgcgctcgttatcaccgtccagggcgtcttcttcaacgcatacttcctcggctacctcttgtccccgaagttcgcgcaccgcgtcgtcggctacctggaggaggaggccatccactcgtacaccgagtacctcaaggatctggaggccggcaagatcgagaacgtccccgccccggccatcgccatcgactactggcgcctccccgctaacgccacgctcaaggacgtagtcaccgtcgtccgcgccgacgaggctcaccaccgcgacgtcaaccactttgcatcggacatccattgccagggaatgcagctgaagcagtcccctgcgccgatcggataccactgaggatgtttgtgctcttcttaattttgcatcgctaataagcaattgtctttaagggaaggaaaggatgcttattgagttacgagtactgctacggcgattaggatattttccaaccagttgtttgagagtgaaacctattatatgtacgcatgttacatgtacatatctctaagtgcgagaggtgcttttctggcgtttatcacttcttcctggagttcctttgttcttcatgtcagctgaattgggctcgctaatatcgaatgtacaatttttgc

SEQ ID NO: 25652 - protein, 329 aa, Zea mays subsp. mays
  misc_feature (1)..(329): Ceres Seq. ID no. 13492694
MMSSRAGSILLRHAGSRLFTAAAISPAAASRPLLAGGNGVPAVMLRLMSTSSPAAPTEAKDEAAKASKVGGDKKAVVINSYWGIEQNNKLARDDGTEWKWTCFRPWETYTADTSIDLTRHHEPKTLMDKVAYWTVKSLRFPTDIFFQRRYGCRAMMLETVAAVPGMVGGMLLHLRSLRRFEQSGGWIRALLEEAENERMHLMTFMEVAKPRWYERALVITVQGVFFNAYFLGYLLSPKFAHRVVGYLEEEAIHSYTEYLKDLEAGKIENVPAPAIAIDYWRLPANATLKDVVTVVRADEAHHRDVNHFASDIHCQGMQLKQSPAPIGYH

SEQ ID NO: 25653 - protein, 328 aa, Zea mays subsp. mays
  misc_feature (1)..(328): Ceres Seq. ID no. 13492695
MSSRAGSILLRHAGSRLFTAAAISPAAASRPLLAGGNGVPAVMLRLMSTSSPAAPTEAKDEAAKASKVGGDKKAVVINSYWGIEQNNKLARDDGTEWKWTCFRPWETYTADTSIDLTRHHEPKTLMDKVAYWTVKSLRFPTDIFFQRRYGCRAMMLETVAAVPGMVGGMLLHLRSLRRFEQSGGWIRALLEEAENERMHLMTFMEVAKPRWYERALVITVQGVFFNAYFLGYLLSPKFAHRVVGYLEEEAIHSYTEYLKDLEAGKIENVPAPAIAIDYWRLPANATLKDVVTVVRADEAHHRDVNHFASDIHCQGMQLKQSPAPIGYH

SEQ ID NO: 25654 - protein, 286 aa, Zea mays subsp. mays
  misc_feature (1)..(286): Ceres Seq. ID no. 13492696
MLRLMSTSSPAAPTEAKDEAAKASKVGGDKKAVVINSYWGIEQNNKLARDDGTEWKWTCFRPWETYTADTSIDLTRHHEPKTLMDKVAYWTVKSLRFPTDIFFQRRYGCRAMMLETVAAVPGMVGGMLLHLRSLRRFEQSGGWIRALLEEAENERMHLMTFMEVAKPRWYERALVITVQGVFFNAYFLGYLLSPKFAHRVVGYLEEEAIHSYTEYLKDLEAGKIENVPAPAIAIDYWRLPANATLKDVVTVVRADEAHHRDVNHFASDIHCQGMQLKQSPAPIGYH

SEQ ID NO: 25655 - DNA, 1207 bp, Zea mays subsp. mays
  misc_feature (1)..(1207): Ceres Seq. ID no. 13492697
aaccatttggacaccgatccatccatccatccagccccgtacgtgtctcgctggccgtccgtatatatagagagaggcatcggagattggccgccacgttgccatcgcgcgcggcgcccgccggccaaggccaaccatgctggcgagggctcctccgccgcggcccgtgctccagcggcgtttgcatcgcccgcgcacatccaagagccgccgccgtcgcggccaggccggggacgacgaggacgacgacgacggtcgcggcggcggcggcagaggccgcttctaacgggtcagcggcggcggccgtcgcagggatcagcagcagcagcagcgcgctggtgacctcgaccgtcgggaaatcgacgaacatcctgtggcatgagtgcgccatcgggcagaaggagcgacagggtctgctgaaccagaagggctgcgtcgtgtggatcactggcctaagcggttcagggaaaagcacgctcgcgtgcgcgctgagccgcgagctgcacggcagaggccacctcacgtacgtcctcgacggcgacaacctcaggcacgggctgaacagggacctcagcttcggagcagaggaccgcgccgagaacatccgcagagtaggggaagtagcgaagctgttcgccgacgctggcctcgtctgcatcgccagcctcatatcgccctacagaagcgaccgaagcgcgtgtcgcgatctgctgcccaagcactcgtttatcgaggtgttcctggacgtgccgcttcaagtgtgcgaagccagggaccccaaaggcctctacaagctcgcacgcgccggcaaaatcaaagggttcaccggcatcgacgatccttacgaaccgccgtcggactgtgagatagtgatccagtgtaaagtcggcgactgcccttcgcctgaatcgatggctggtcacgttgtgtcgtaccttgagacgaatggtttcctccaggactagacatggaatgcgatcgatgcgtctgatgtgtatatatgtagcagcagccggagcggcattgccaaggctgtgtaatctcatggctgtctttctctttaagaccaaaacaaacaagagatggcagtgtaaaaaggaaaaaaaaaactgcgtctgacagagtcgctgaatcaaccatgcttctgataaaagctattgtttgtaggtacggcgttgattcttacgacatttatgacaatgctttc

SEQ ID NO: 25656 - protein, 320 aa, Zea mays subsp. mays
  misc_feature (1)..(320): Ceres Seq. ID no. 13492698
PFGHRSIHPSSPVRVSLAVRIYRERHRRLAATLPSRAAPAGQGQPCWRGLLRRGPCSSGVCIARAHPRAAAVAARPGTTRTTTTVAAAAAEAASNGSAAAAVAGISSSSSALVTSTVGKSTNILWHECAIGQKERQGLLNQKGCVVWITGLSGSGKSTLACALSRELHGRGHLTYVLDGDNLRHGLNRDLSFGAEDRAENIRRVGEVAKLFADAGLVCIASLISPYRSDRSACRDLLPKHSFIEVFLDVPLQVCEARDPKGLYKLARAGKIKGFTGIDDPYEPPSDCEIVIQCKVGDCPSPESMAGHVVSYLETNGFLQD

SEQ ID NO: 25657 - DNA, 1193 bp, Zea mays subsp. mays
  misc_feature (1)..(1193): Ceres Seq. ID no. 13492699
agattcctcgcccaaccctaccccaggcgatctcgcatcgcatggccaccggaccgcggtctctccacgccctcctcggcggcggtgcagttgccgacttgctgctgtggcgacggaggaatgcctcggcggcagccgtggtgggcgccaccacggtctggttcgtcttcgagcgcgcggggtacagcttcccctccgtcctctccaacgccctgctcctcctcgtcgccatcctcttcttctgggccaagtctgcgtcgctgctcaacaggcctcttccacctcttcctaatcttgaggtctcagatgcgattgttgaaaaagctgcaaatcatgctcttgtatggatcaataggctgctggctgttggtcatgacatcgccatcaagagagataggaaagtttttataaaggtgatactgattttgtgggtggtttcattcattggaatgctcttcaattttcttacgcttatttacattggtgtaatgctttctctgttggttccaccactctatgagaagtaccaggaccaggttgatgagaaggttggtgtagcgtacagtgtactatcaaggcacatagataccatcattaccagggctgggcaatcagccaagcagaagaagactgagtaaaagaaacgttttgctgtattgtggaacatctctggttgtcaagtgaagttgacagtgggcctttcatctttgaccctctattccactaatatgaaccctcgatatgctgatctgaggttctgatgtgcattatgggaaatgaggcggcttgtgtatttcctttttgaacatggggtttactatgggtgcatatcgcactcggaatgatatcgagaaattgcgactcgtacatgcaattatgcaggctgcttgctctgttagtcatatgatctttccgtcagtgattttaaattttaggctgctccgaggaactttgcaggctgctccgagcaattatgcaggctgcttgctcattcgatgcccatctactggtagctcgttttctgaaatactagtacctaataaggtgtattctacgtagacagttgcatatcatgtgaataaataggtattttctggcggcagttctgtttttgctttacctgtgtttatactcccaccgtttattttgacaatgcgtacaaggtctagataagtcttttttagtgcgcttct

SEQ ID NO: 25658 - protein, 211 aa, Zea mays subsp. mays
  misc_feature (1)..(211): Ceres Seq. ID no. 13492700
IPRPTLPQAISHRMATGPRSLHALLGGGAVADLLLWRRRNASAAAVVGATTVWFVFERAGYSFPSVLSNALLLLVAILFFWAKSASLLNRPLPPLPNLEVSDAIVEKAANHALVWINRLLAVGHDIAIKRDRKVFIKVILILWVVSFIGMLFNFLTLIYIGVMLSLLVPPLYEKYQDQVDEKVGVAYSVLSRHIDTIITRAGQSAKQKKTE

SEQ ID NO: 25659 - protein, 198 aa, Zea mays subsp. mays
  misc_feature (1)..(198): Ceres Seq. ID no. 13492701
MATGPRSLHALLGGGAVADLLLWRRRNASAAAVVGATTVWFVFERAGYSFPSVLSNALLLLVAILFFWAKSASLLNRPLPPLPNLEVSDAIVEKAANHALVWINRLLAVGHDIAIKRDRKVFIKVILILWVVSFIGMLFNFLTLIYIGVMLSLLVPPLYEKYQDQVDEKVGVAYSVLSRHIDTIITRAGQSAKQKKTE

SEQ ID NO: 25660 - protein, 136 aa, Zea mays subsp. mays
  misc_feature (1)..(136): Ceres Seq. ID no. 13492702
RFLAQPYPRRSRIAWPPDRGLSTPSSAAVQLPTCCCGDGGMPRRQPWWAPPRSGSSSSARGTASPPSSPTPCSSSSPSSSSGPSLRRCSTGLFHLFLILRSQMRLLKKLQIMLLYGSIGCWLLVMTSPSREIGKFL

SEQ ID NO: 25661 - DNA, 1362 bp, Zea mays subsp. mays
  misc_feature (1)..(1362): Ceres Seq. ID no. 13492731
caacaacttgggcgcgcgcgcggccgggtagcaaaagctcgcgatctgtgcgcccaccaccgggaggagcgaagatgcggatgagctgcaatggctgccgcgtcctgcgcaagggctgcggcgacgcctgcaccatccgcccctgcctgcagtggatcgaggcccccgaggcgcaggccaacgccaccgtcttcctcgcaaagttctacggccgggcgggcctgctcaacctgctcgccgccgcgcccgacgacggcgtccgccccgcggtcttccgctccctgctctacgaggcgtgcggccgcatcgtcaacccggtctacggctccgtcggcctgctctggtcgcgccagtggcacaggtgcgccgacgccgtcgaggccgtgctcaggggggaccccgtcgtgcaggtcgacgccgggtccgacgccgccgctgccccgccgctgctcgccggcgncaggccgccgccgccggccgccttcgacatccgccacgtccccagggatcccgacgccaccgccgccgacctcctccgcgccggccgcaagaggttcaagcgcgcgggttcgtcttccaacgcctccaaggcgaagcccctgcccctcgagctcgagggcaaggccggcaacaacgaacgcgcgtcgcccagccctcnnccgacgnnacaactgagaggcggaggagctgcagccggtgccgatggtcgtcgagccagaacacggcgaggagtccgccggcagccacgaccaccacctgcagctgcaggggtggtcggaggaggacaccgacgtggaggcggcctcacacgtgagccaagccgaggctgagccgccagccagcagccagagccaggtgctggtagcggatcaggaggaagaggaggttgggctcgagctcacgcttgggttcgagcctgtcgtcaggcagcagccgaggtcgtcgcgctgcgacaagagcggcttgagcgcggcatcgagcctcatcggcctgcggctgcagctgccggccgcctaagcacaggcacagctcgcacctaaacgaatagagcagttttgcgaccctgcgcctgcggtgtttgcttaaaaataagcttttggacccccgggtgccaggagacacacagtagccaacttcaaattttctaggttttgtttatctttttcaatttttcttcttgtctttaactgtaaaagttgatggactgcacaattactcaggtagagggggtttggttccccgatcaaagagggcgtttggttactcggtttagttcttatatcgaatgtttaaatgccagttataagtattatatgtagtatatttaaaaattaattatataaatgaagactaaacattagt

SEQ ID NO: 25662 - protein, 275 aa, Zea mays subsp. mays
  misc_feature (1)..(275): Ceres Seq. ID no. 13492732
  misc_feature (153)..(153): Xaa is any aa, unknown or other
  misc_feature (219)..(219): Xaa is any aa, unknown or other
  misc_feature (222)..(222): Xaa is any aa, unknown or other
TTWARARPGSKSSRSVRPPPGGAKMRMSCNGCRVLRKGCGDACTIRPCLQWIEAPEAQANATVFLAKFYGRAGLLNLLAAAPDDGVRPAVFRSLLYEACGRIVNPVYGSVGLLWSRQWHRCADAVEAVLRGDPVVQVDAGSDAAAAPPLLAGXRPPPPAAFDIRHVPRDPDATAADLLRAGRKRFKRAGSSSNASKAKPLPLELEGKAGNNERASPSPXPTXQLRGGGAAAGADGRRARTRRGVRRQPRPPPAAAGVVGGGHRRGGGLTREPSRG

SEQ ID NO: 25663 - protein, 251 aa, Zea mays subsp. mays
  misc_feature (1)..(251): Ceres Seq. ID no. 13492733
  misc_feature (129)..(129): Xaa is any aa, unknown or other
  misc_feature (195)..(195): Xaa is any aa, unknown or other
  misc_feature (198)..(198): Xaa is any aa, unknown or other
MRMSCNGCRVLRKGCGDACTIRPCLQWIEAPEAQANATVFLAKFYGRAGLLNLLAAAPDDGVRPAVFRSLLYEACGRIVNPVYGSVGLLWSRQWHRCADAVEAVLRGDPVVQVDAGSDAAAAPPLLAGXRPPPPAAFDIRHVPRDPDATAADLLRAGRKRFKRAGSSSNASKAKPLPLELEGKAGNNERASPSPXPTXQLRGGGAAAGADGRRARTRRGVRRQPRPPPAAAGVVGGGHRRGGGLTREPSRG

SEQ ID NO: 25664 - protein, 249 aa, Zea mays subsp. mays
  misc_feature (1)..(249): Ceres Seq. ID no. 13492734
  misc_feature (127)..(127): Xaa is any aa, unknown or other
  misc_feature (193)..(193): Xaa is any aa, unknown or other
  misc_feature (196)..(196): Xaa is any aa, unknown or other
MSCNGCRVLRKGCGDACTIRPCLQWIEAPEAQANATVFLAKFYGRAGLLNLLAAAPDDGVRPAVFRSLLYEACGRIVNPVYGSVGLLWSRQWHRCADAVEAVLRGDPVVQVDAGSDAAAAPPLLAGXRPPPPAAFDIRHVPRDPDATAADLLRAGRKRFKRAGSSSNASKAKPLPLELEGKAGNNERASPSPXPTXQLRGGGAAAGADGRRARTRRGVRRQPRPPPAAAGVVGGGHRRGGGLTREPSRG

SEQ ID NO: 25665 - DNA, 1818 bp, Zea mays subsp. mays
  misc_feature (1)..(1818): Ceres Seq. ID no. 13492735
atcccgggatcctcgttttgtttcccttcccccacccttcctcttcctccctatctatcagcactgctcgccggcgccgcctctgcaaaaggctcacttttgcctccggaacccagcggaatccgccggcggaccggaaacactccctcgcccccctcaccccctgtctgcccggccgtcggagcgcgtcgcctccgggcgtgcagcagcagtccgtggaggtggagccgggaggaggaggaggaggacgaggacgaggcataatctgccgagagcgggacagcaggagtgggctgctccgctcgcgctggagccaaagctactgattgccttgtcctgaccagcgaaagagggatctttgggaggcaatcagaggtgttcggtttggtcaaacaaagctcagctctcttgggatgcttgctgcgagctgcttgtgttcatacttgagagaataaaacagtgcatcatcttgctgtcttgtccttcgtgattggaagagaaaacgtgctgctgttcttgctatgtctgtctcggagaaggtggcgccatcgaagtcatcagtttcttcgtcgtcagatttggatccgctgctgaaggatctcacggagaagaagttgacctttaggaggaacgtggtgtcattggcagctgagctcaaggatgcgaggaacaagcttgcctcccaggagcagctgtttgtaaaggaatctcaaactagaaaggttgttgagacaaaggcaaggagcatggaagaggaagtaagcaagctgcagaaatgcttgcaggacaaggatgagcaactgcgttcatccgcaagtagcacggaacagtacctccatgagttggatgatcttagaacacaactgtcaattactcaagctacagcagaagcgagtgctgcatcagccaagtcagctcaggtgcagtgcttgtcattgctgaaagagctgaatgagaaggacatctcgctcaaagagcatgagcttcgagtgaacaagctaggtgagcagctcgatcttctccagaaggatctacaagcaagggagctctcacaaatgcaacttaaggatgaagttctaagaattgagaccgacatcatggatgcaattgccaaagctgggtctaggtctgacaaagacaatgagcttttaaagatcttatctgacgtttcaccaaggaatgtccagaacctcaacagccttttgaatgctaagaatacagaaattgcgaggttgagagaggaaatcagaatattatctgctcactggacgaacaaaaccaaggaacttgaatcacagttagaaaagcagcgaagaactgatcaggagctgaagaagagggtcctgaagcttgaattttgccttcaagaatctcagtcccagatgcgaaaattaaagaggatgggggagaaaagagacaaggctctcaaggagctcatggaccaggtggccatgaagcagcccaacagcatgtgccatggaaacaaggataatttctgggagagccagggcttcaggttcattgcctctatgtcgatgctggcgctagtgatcctcgcaaagcgttgaagcggcatagtttaagcagatgtgaatgtagcgtttacattagcttgtaggcttgggcagttgtgcatactgcatgccaaaatttgccgacatccaatcctagtctgtaaactgtaaaaatagttgtggcctgtaatccgtagcgcagtttctgctagttcatgtaaacccatataagctgtcttgtagtcacagctagtgaatgtcagctcatgtagtcaagaatctacaaccttataatttcagttcc

SEQ ID NO: 25666 - protein, 348 aa, Zea mays subsp. mays
  misc_feature (1)..(348): Ceres Seq. ID no. 13492736
MSVSEKVAPSKSSVSSSSDLDPLLKDLTEKKLTFRRNVVSLAAELKDARNKLASQEQLFVKESQTRKVVETKARSMEEEVSKLQKCLQDKDEQLRSSASSTEQYLHELDDLRTQLSITQATAEASAASAKSAQVQCLSLLKELNEKDISLKEHELRVNKLGEQLDLLQKDLQARELSQMQLKDEVLRIETDIMDAIAKAGSRSDKDNELLKILSDVSPRNVQNLNSLLNAKNTEIARLREEIRILSAHWTNKTKELESQLEKQRRTDQELKKRVLKLEFCLQESQSQMRKLKRMGEKRDKALKELMDQVAMKQPNSMCHGNKDNFWESQGFRFIASMSMLALVILAKR

SEQ ID NO: 25667 - protein, 273 aa, Zea mays subsp. mays
  misc_feature (1)..(273): Ceres Seq. ID no. 13492737
MEEEVSKLQKCLQDKDEQLRSSASSTEQYLHELDDLRTQLSITQATAEASAASAKSAQVQCLSLLKELNEKDISLKEHELRVNKLGEQLDLLQKDLQARELSQMQLKDEVLRIETDIMDAIAKAGSRSDKDNELLKILSDVSPRNVQNLNSLLNAKNTEIARLREEIRILSAHWTNKTKELESQLEKQRRTDQELKKRVLKLEFCLQESQSQMRKLKRMGEKRDKALKELMDQVAMKQPNSMCHGNKDNFWESQGFRFIASMSMLALVILAKR

SEQ ID NO: 25668 - DNA, 747 bp, Zea mays subsp. mays
  misc_feature (1)..(747): Ceres Seq. ID no. 13492760
gccgtgtgcatagcagcaaatagtggtcggcctgttggtactctatatcgtcccttccagtgtacccgtcctccagcccattatacatcatacttgctccagataagaccaagagcatcatggccaacgccttgcctctcatcgtcgcgctggtcgccgccgccgggtgcgcggcgctggcttcggccacgtcgtacaccgtcggcgactcgcagggctggacgaccaccggcgtcgactacagcagctgggccagccgcaacactttcgtcgtcggagacacactagtgttcaactacgtgagcaaggcgcacacggtgacggaggtgagcaaggccggctacgacgcctgctccggcgccaacgcgctcagcgacgacgacaccggctccaccaccatcacgctccagaccccgggcacgcactatttcatctgcaacgtccccggccactgcgccagcggcatgaagctagcggtcgccgtctccgcctcgccctcgggcacggccccttccaccggagccctgcaggttccggcgatggcatccgtcgtcgccgcggccgcgggcgctgccatcaagctcgcgctcttctgacggagcacggccgggtcgtctcaggggagagacagtgcatgcagactacgttcttggcggttgatagtttcccgctggcgattgttcgccgcgcagttcatgtacgtatgtatgtgtgtatgctactctgcggtggcgaatgctttttctg

SEQ ID NO: 25669 - protein, 158 aa, Zea mays subsp. mays
  misc_feature (1)..(158): Ceres Seq. ID no. 13492761
MANALPLIVALVAAAGCAALASATSYTVGDSQGWTTTGVDYSSWASRNTFVVGDTLVFNYVSKAHTVTEVSKAGYDACSGANALSDDDTGSTTITLQTPGTHYFICNVPGHCASGMKLAVAVSASPSGTAPSTGALQVPAMASVVAAAAGAAIKLALF

SEQ ID NO: 25670 - protein, 95 aa, Zea mays subsp. mays
  misc_feature (1)..(95): Ceres Seq. ID no. 13492762
AVCIAANSGRPVGTLYRPFQCTRPPAHYTSYLLQIRPRASWPTPCLSSSRWSPPPGARRWLRPRRTPSATRRAGRPPASTTAAGPAATLSSSETH

SEQ ID NO: 25671 - DNA, 1704 bp, Zea mays subsp. mays
  misc_feature (1)..(1704): Ceres Seq. ID no. 13492801
acaaattagatgggcattcacatcagatcgagtgttttgattactttagtggtggtgattttgataagctatatatagtcaccggctctcaagataaaactgccaagatctgggactgcgagaatgcgggctgtgtccagacactggaaggacatgcaggtcccgttagagctgtctgttaccatcagaatctctcgttattaattacagggtgctctgacggatcaattcatctatggaactccactaccttcaggcttgagcataaactgaactttgctgacttcggattactgagttctgtagcttgtttgaaaggatcgaaaaggattgcaatcagaagcagggaaggattagcacttgtagacatagacatagaggacaagaaggatagcgatgtggagagcatcacgactactgcttccatgaacgacacaggtccaattacagaagagaacggagtggcagcagaccatatctctgatgaccacctggcgcagggcgtagtatatgtacatacagagattataggcaaagtcaattcagcatgcaccatagacgtccatccgacaaagccatggatggtcatcactcaagctaacaagtttgttcatgtttgggactaccatacaaaggtagtggaatggacgattcagattaagggagcgaaagttagttcagctaaatttatagccagccaggattggattgtggcgggtactacccgtggattcctccacgtgtacgattgcgaatcgaggaaggaaatacgccgtctttgtgaacacccgaaatctatcacgtcattggctgttgacgatgatgcccttgagctggtgctgtcagcgtccatcgatggcaagattttgatctggagctactggcactactatcacgcacgtagacgtagtacctggcatttggaaaaaacatttgacgcgggaagccagtgtctgaagcaagtcgcgtttattgctccaagtgtccatcgcagcagcagcactatcatcgctactgctcgagacggaacagtaaagatttgggatcccgatcgttctgacggatgccgtgagttcacattggctgcggattcaggtcagattgttgaatgtttcgattggtttagtcgtggtactgatatatacttggtcaccggttctcgagacaacactgccaagatctgggacatagaggatgggagttgtgtccgaacactggaaggacacgcagatcatgttaccgttgtctgttaccatccggatctttcaatgctcattacaggttcaagggacggctcgattcgtctgtggaactccactaccttcaggtttgagcatgagctgaactttgacctcgggtctctgagttctttagcttgtatcaagggatcaacaaggattgcaatcggatatgaaagaggtctagtactggcagacatttgcactcaggaacatagagcatgatctataaagcggcataataccttgagagcgacagaataaaatctaaacattgataaagcggcaaaaatccctggcaaacatttgctgatgcgatgggattgcatccaaacatttttcttggtaagctaatagactgcaataagtttttccatggacttgggaggtgtcgatctgcggatatgcttttgtatggtttaaacatatcatcggatagaaatttatactactatattaaaaattt

SEQ ID NO: 25672 - protein, 486 aa, Zea mays subsp. mays
  misc_feature (1)..(486): Ceres Seq. ID no. 13492802
KLDGHSHQIECFDYFSGGDFDKLYIVTGSQDKTAKIWDCENAGCVQTLEGHAGPVRAVCYHQNLSLLITGCSDGSIHLWNSTTFRLEHKLNFADFGLLSSVACLKGSKRIAIRSREGLALVDIDIEDKKDSDVESITTTASMNDTGPITEENGVAADHISDDHLAQGVVYVHTEIIGKVNSACTIDVHPTKPWMVITQANKFVHVWDYHTKVVEWTIQIKGAKVSSAKFIASQDWIVAGTTRGFLHVYDCESRKEIRRLCEHPKSITSLAVDDDALELVLSASIDGKILIWSYWHYYHARRRSTWHLEKTFDAGSQCLKQVAFIAPSVHRSSSTIIATARDGTVKIWDPDRSDGCREFTLAADSGQIVECFDWFSRGTDIYLVTGSRDNTAKIWDIEDGSCVRTLEGHADHVTVVCYHPDLSMLITGSRDGSIRLWNSTTFRFEHELNFDLGSLSSLACIKGSTRIAIGYERGLVLADICTQEHRA

SEQ ID NO: 25673 - protein, 345 aa, Zea mays subsp. mays
  misc_feature (1)..(345): Ceres Seq. ID no. 13492803
MNDTGPITEENGVAADHISDDHLAQGVVYVHTEIIGKVNSACTIDVHPTKPWMVITQANKFVHVWDYHTKVVEWTIQIKGAKVSSAKFIASQDWIVAGTTRGFLHVYDCESRKEIRRLCEHPKSITSLAVDDDALELVLSASIDGKILIWSYWHYYHARRRSTWHLEKTFDAGSQCLKQVAFIAPSVHRSSSTIIATARDGTVKIWDPDRSDGCREFTLAADSGQIVECFDWFSRGTDIYLVTGSRDNTAKIWDIEDGSCVRTLEGHADHVTVVCYHPDLSMLITGSRDGSIRLWNSTTFRFEHELNFDLGSLSSLACIKGSTRIAIGYERGLVLADICTQEHRA

SEQ ID NO: 25674 - protein, 293 aa, Zea mays subsp. mays
  misc_feature (1)..(293): Ceres Seq. ID no. 13492804
MVITQANKFVHVWDYHTKVVEWTIQIKGAKVSSAKFIASQDWIVAGTTRGFLHVYDCESRKEIRRLCEHPKSITSLAVDDDALELVLSASIDGKILIWSYWHYYHARRRSTWHLEKTFDAGSQCLKQVAFIAPSVHRSSSTIIATARDGTVKIWDPDRSDGCREFTLAADSGQIVECFDWFSRGTDIYLVTGSRDNTAKIWDIEDGSCVRTLEGHADHVTVVCYHPDLSMLITGSRDGSIRLWNSTTFRFEHELNFDLGSLSSLACIKGSTRIAIGYERGLVLADICTQEHRA

SEQ ID NO: 25675 - DNA, 1005 bp, Zea mays subsp. mays
  misc_feature (1)..(1005): Ceres Seq. ID no. 13492805
aggagagcacaacgttacaaggacgcatcgaggagactacctacggccatggcgaggagaaggcttctcgcgctcgcctcccggctctacgggaggcctcaggcgacgcagccgtggcggcgacccccgccccggtttctctcctcagctgcgtccggcaccctcgatcacctgaagtcgccgcctttcgcgcgtccggctgcccggaaccccgcctcctatccatgggatcgattcggaggagggcagaagaggaccatgttcatccagacacagtcgaccccgaacccgcagtcactcatgttctatcctggaaagccagttatggagattgggagctctgatttccctaatgctcggactgcgatgacatcccctttggctaagtcgctttttgctattgatggagtaaccagggtattctttggatctgattttgtaactgttacaaaatcagaagaaacttcatgggattgcctcaaacctgaggtttttgctgcaataatggacttctactcatctgggcaaccactttttctggactcaaatgctgcagcttctatggacacagcaattcacgaggatgattctgaaatagttgccatgataaaagaattattggagactcgtattcgaccagctgttcaagatgacggcggtgacattgaataccgaggattcgacccagaaacaggaacagttaagcttaaaatgcaaggtgcctgcagcggctgtccaagttcgtcagtcacattgaagtctgggatagaaaacatgcttatgcactatgtgcctgaggtgaaaggagtagaacaggagttcgatggtgatgaggaagctgaagtggctggatagatcgagagagtttttacaggttttgagggtcaacacagcctgatgttatagcaacttcgcacgtacggtattgccgatcctgatgtatgcaggaggcaggcttagatagcagaggcgtcaatagtctnaaataacatccgttgcnctagt

SEQ ID NO: 25676 - protein, 284 aa, Zea mays subsp. mays
  misc_feature (1)..(284): Ceres Seq. ID no. 13492806
RRAQRYKDASRRLPTAMARRRLLALASRLYGRPQATQPWRRPPPRFLSSAASGTLDHLKSPPFARPAARNPASYPWDRFGGGQKRTMFIQTQSTPNPQSLMFYPGKPVMEIGSSDFPNARTAMTSPLAKSLFAIDGVTRVFFGSDFVTVTKSEETSWDCLKPEVFAAIMDFYSSGQPLFLDSNAAASMDTAIHEDDSEIVAMIKELLETRIRPAVQDDGGDIEYRGFDPETGTVKLKMQGACSGCPSSSVTLKSGIENMLMHYVPEVKGVEQEFDGDEEAEVAG

SEQ ID NO: 25677 - protein, 268 aa, Zea mays subsp. mays
  misc_feature (1)..(268): Ceres Seq. ID no. 13492807
MARRRLLALASRLYGRPQATQPWRRPPPRFLSSAASGTLDHLKSPPFARPAARNPASYPWDRFGGGQKRTMFIQTQSTPNPQSLMFYPGKPVMEIGSSDFPNARTAMTSPLAKSLFAIDGVTRVFFGSDFVTVTKSEETSWDCLKPEVFAAIMDFYSSGQPLFLDSNAAASMDTAIHEDDSEIVAMIKELLETRIRPAVQDDGGDIEYRGFDPETGTVKLKMQGACSGCPSSSVTLKSGIENMLMHYVPEVKGVEQEFDGDEEAEVAG

SEQ ID NO: 25678 - protein, 198 aa, Zea mays subsp. mays
  misc_feature (1)..(198): Ceres Seq. ID no. 13492808
MFIQTQSTPNPQSLMFYPGKPVMEIGSSDFPNARTAMTSPLAKSLFAIDGVTRVFFGSDFVTVTKSEETSWDCLKPEVFAAIMDFYSSGQPLFLDSNAAASMDTAIHEDDSEIVAMIKELLETRIRPAVQDDGGDIEYRGFDPETGTVKLKMQGACSGCPSSSVTLKSGIENMLMHYVPEVKGVEQEFDGDEEAEVAG

SEQ ID NO: 25679 - DNA, 1746 bp, Zea mays subsp. mays
  misc_feature (1)..(1746): Ceres Seq. ID no. 13492837
gttctcccccaaccccaattcgccttcacctcgccgcttcctccattgaccgccaccgttgacgtcgtcttccggcgaggtagctcgccggaagacctcacctggactttcccgaagcaccctccacacactctttaaccctccggaatggccgcctgcttctagctcgtcgacgccccaatctccgcttgcttcctcgacagccccatccgcctcttctcgctctcgctacggctcctctgcctgttcgccatggcgatccgcatcaccgtctcctactccggctacgtggcgcagaacctcgccgcgtcgctcggccaccgcttctcctccgcctccgcctcgggcagccgcctcctccatgacggcgcctggcgccccttctgcatcttcacctccacccgccagcccgagaagcaccgcagtagcggcagcgaccgccatgacggaggcgactacaaccacccgaagccccaggccatcgccgccggagctcactcgttgctgctcacgcgtgcgtgcttatcgtccaagtcgccgccgccgtctcttgccgtgggggctgctctcggtgctcgcgcagaggacgggaccgacgcctggaaccaccggatcggcggcatctctctcaggctcgtcgccgatttccctcggtttcaaccccacctccttcctcccgttcctgcagacagcgaggtggctcccgtgcagcgaccttgccacctcgtcgtcttcggcaccctcttcccctccccgctcgcttgcgccttcggctccccccaagaaggcgttgattggtgctgctactggttctaccggaattgcgacgagcagtggtgctggtgcagcgatgagcaggagcaactggctgtcgaggtgggtcagctcctgctccgatgacgccaagacggcgtttgcggctgtgaccgtgccacttctctacggctcgtccctggccgagccgaagtccatcccgtccaagtccatgtacccgaccttcgatgtcggtgatcggattcttgctgagaaggtctcatacatattccgggatccagaaatttcggacatcgtgatcttccgggctcccccaggacttcaggtttatggctacagctcaggtgatgtgttcatcaagagagttgttgccaagggaggagactatgtcgaagtgcgtgatggcaagctgtttgttaatggagtagttcaggatgaggattttgtgctggagccacacaactacgagatggaaccagtgcttgtgccggaaggttatgtgttcgtgctgggagacaaccgcaacaacagctttgattcccacaactggggtccacttccagtgaggaacattgtcgggagatctatcctccggtattggccgccatcgaagatcaatgatacaatttatgagcctgatgtgtcccgcctcgcggtgccgtcctcgtagtagtcgttgcagtgatgctggatatccagtgtgtgtgtacaatgaccttattacttcgtggagcctcatttgatgagctgagctccagttccaattctctcagaatattttgtctcctgagtgttccctgtaaattctctttgcctgacagatttgttttccctgccgcttggcagatgcttgttcaaagcacgggaaagtgtagtaccttgcatcttgcaatataaactaattaaaccggttacccttttttttcttttatcgagataaactctgcttttaagaaagcaataaggtttcgt

SEQ ID NO: 25680 - protein, 360 aa, Zea mays subsp. mays
  misc_feature (1)..(360): Ceres Seq. ID no. 13492838
MTAPGAPSASSPPPASPRSTAVAAATAMTEATTTTRSPRPSPPELTRCCSRVRAYRPSRRRRLLPWGLLSVLAQRTGPTPGTTGSAASLSGSSPISLGFNPTSFLPFLQTARWLPCSDLATSSSSAPSSPPRSLAPSAPPKKALIGAATGSTGIATSSGAGAAMSRSNWLSRWVSSCSDDAKTAFAAVTVPLLYGSSLAEPKSIPSKSMYPTFDVGDRILAEKVSYIFRDPEISDIVIFRAPPGLQVYGYSSGDVFIKRVVAKGGDYVEVRDGKLFVNGVVQDEDFVLEPHNYEMEPVLVPEGYVFVLGDNRNNSFDSHNWGPLPVRNIVGRSILRYWPPSKINDTIYEPDVSRLAVPSS

SEQ ID NO: 25681 - protein, 333 aa, Zea mays subsp. mays
  misc_feature (1)..(333): Ceres Seq. ID no. 13492839
MTEATTTTRSPRPSPPELTRCCSRVRAYRPSRRRRLLPWGLLSVLAQRTGPTPGTTGSAASLSGSSPISLGFNPTSFLPFLQTARWLPCSDLATSSSSAPSSPPRSLAPSAPPKKALIGAATGSTGIATSSGAGAAMSRSNWLSRWVSSCSDDAKTAFAAVTVPLLYGSSLAEPKSIPSKSMYPTFDVGDRILAEKVSYIFRDPEISDIVIFRAPPGLQVYGYSSGDVFIKRVVAKGGDYVEVRDGKLFVNGVVQDEDFVLEPHNYEMEPVLVPEGYVFVLGDNRNNSFDSHNWGPLPVRNIVGRSILRYWPPSKINDTIYEPDVSRLAVPSS

SEQ ID NO: 25682 - protein, 215 aa, Zea mays subsp. mays
  misc_feature (1)..(215): Ceres Seq. ID no. 13492840
MAIRITVSYSGYVAQNLAASLGHRFSSASASGSRLLHDGAWRPFCIFTSTRQPEKHRSSGSDRHDGGDYNHPKPQAIAAGAHSLLLTRACLSSKSPPPSLAVGAALGARAEDGTDAWNHRIGGISLRLVADFPRFQPHLLPPVPADSEVAPVQRPCHLVVFGTLFPSPLACAFGSPQEGVDWCCYWFYRNCDEQWCWCSDEQEQLAVEVGQLLLR

SEQ ID NO: 25683 - DNA, 1280 bp, Zea mays subsp. mays
  misc_feature (1)..(1280): Ceres Seq. ID no. 13492847
aaatccttctctcggctacctccaccactgctctgctcagctcgaacgaacaaaaagaactcccctcggccctctcctcttgtgcttctgcttccccaaccgagtctcctcaaccccaggcactcgccctctttcccctcgcctcggcccgcgactccgatgccgccgccgctcctcgagccgcgcgactacctcggcgccggcgccacctcgtcgtgctgctcgtcgtcctgctcctccggccgcgagggcgcggggccccacctcgcgctgcggctcgggcttccggggtccgacgactcccccggccgcggcgcggacgcggagcacgcccgcgcccacgtcgacgccgcgctcaccctcggccccgcccccgcccccgcccccgcgcctcccaggggcagcgccaagcgcgggttcgccgactccctcgaccggtccgcgaagcgggacggcgttgccgcggatgacgctgctgggggcgtcacacgggtagctgaagctgctgccggagctccgcccgctgccaaggcacaagttgttggatggccgcctgttaggagctaccggaagaataccctagctgccagtgccacaaagacaaatgggggagatgaaggtaggagtgaggcgggatgctgttatgtcaaggtcagcatggatggagccccatacctaaggaaggtggacctcaagacctattcaagctatgaggatctctcgcttggtctggagaaaatgttcagttgcttcatcactggtcaaaacagttcatgcaagacatcaagaagggataggcttactgatggttctagggctgatgcccttcaggaccaagaatatgtcctcacttacgaagataaagatgctgactggatgctcgttggtgatctgccctgggacttgttcaccacattttgccggaaacttaggatcatgagaggctctgatgctgctggcatggctcctccaagaccaccggaacagacagttcggaacaaatgagggcggacagcttacttacctggcgctgaactgaagggagagcgacgctgccttggtcaggccttctttcacttgtgcagtgggaactgcgtcctgctgtctcggacgcccattttgcccacgagctggtcgtcacgtgctgtcgctttttgtctgggaaagatagcgtactgcttgctgtatgatactttcatctgtgttcggaagtttgtagcgcttcatatcctggaagggagtaaagaaaatgtccatgctgtccggtgagaatttcttcc

SEQ ID NO: 25684 - protein, 334 aa, Zea mays subsp. mays
  misc_feature (1)..(334): Ceres Seq. ID no. 13492848
KSFSRLPPPLLCSARTNKKNSPRPSPLVLLLPQPSLLNPRHSPSFPSPRPATPMPPPLLEPRDYLGAGATSSCCSSSCSSGREGAGPHLALRLGLPGSDDSPGRGADAEHARAHVDAALTLGPAPAPAPAPPRGSAKRGFADSLDRSAKRDGVAADDAAGGVTRVAEAAAGAPPAAKAQVVGWPPVRSYRKNTLAASATKTNGGDEGRSEAGCCYVKVSMDGAPYLRKVDLKTYSSYEDLSLGLEKMFSCFITGQNSSCKTSRRDRLTDGSRADALQDQEYVLTYEDKDADWMLVGDLPWDLFTTFCRKLRIMRGSDAAGMAPPRPPEQTVRNK

SEQ ID NO: 25685 - protein, 281 aa, Zea mays subsp. mays
  misc_feature (1)..(281): Ceres Seq. ID no. 13492849
MPPPLLEPRDYLGAGATSSCCSSSCSSGREGAGPHLALRLGLPGSDDSPGRGADAEHARAHVDAALTLGPAPAPAPAPPRGSAKRGFADSLDRSAKRDGVAADDAAGGVTRVAEAAAGAPPAAKAQVVGWPPVRSYRKNTLAASATKTNGGDEGRSEAGCCYVKVSMDGAPYLRKVDLKTYSSYEDLSLGLEKMFSCFITGQNSSCKTSRRDRLTDGSRADALQDQEYVLTYEDKDADWMLVGDLPWDLFTTFCRKLRIMRGSDAAGMAPPRPPEQTVRNK

SEQ ID NO: 25686 - DNA, 1001 bp, Zea mays subsp. mays
  misc_feature (1)..(1001): Ceres Seq. ID no. 13492971
ctcaggctctcagctcagctgcgtcctcctgccacccatggcaaacgcttctctgcaatccttccttctcccgcacgaccattctttcgccggcgccggcggcagccgtgacggctccgcgtccgccgtgcacaagctctccaccaacaccagcggcagcatttccttcaggctctacaccaaaacctccccctcggtgacagcagcctcagccaccaattcgtcagctccgactccagttgccccggcatctgcaccagcggcaggggacgaagaagaagaagaaggcccctctctcgacctcctccgccgccagctcgccgcgggcgactaccggcaggcggacgagaccacgcgggcgctgatcatcgacctcgccggcgagcccgcgaggcgccgagggtacgtcttcttctccgaggtccagttcatcccggccgaggacctcgccgccatcgacgggctctggaaggagcacagcggcggcaggttcgggtacagcgtgcagcggcggctctgggagaagtcgcggcgcgacttcacccgcttcttcatccgggtcggctggatgaggaagctggacacggaggtggagcagtacaactacagggccttccccgacgagttcatgtgggaattgacggacgacacgcccgagggacacctgccgctcaccaacgccctcaggggcacgcagctcctggcgaacatcctcacccacccggccttccaggaggaggaccagggagacggagctgctgctgcagaagagagtgcaaacaccaaagatgataacaaagggagggagagacccaggtccatgagagatttcaagcctgattattctttttgattcaggctggcgaaggaaaccaaaaaaaaaaggggcatgggagtttgtggtgcagagatgctggcatggtgtaattgatttaaaagatcatgtatccgtagttctgtttgggttacttttgtcttaaaacatgcatggaagcttgtgt

SEQ ID NO: 25687 - protein, 283 aa, Zea mays subsp. mays
  misc_feature (1)..(283): Ceres Seq. ID no. 13492972
SGSQLSCVLLPPMANASLQSFLLPHDHSFAGAGGSRDGSASAVHKLSTNTSGSISFRLYTKTSPSVTAASATNSSAPTPVAPASAPAAGDEEEEEGPSLDLLRRQLAAGDYRQADETTRALIIDLAGEPARRRGYVFFSEVQFIPAEDLAAIDGLWKEHSGGRFGYSVQRRLWEKSRRDFTRFFIRVGWMRKLDTEVEQYNYRAFPDEFMWELTDDTPEGHLPLTNALRGTQLLANILTHPAFQEEDQGDGAAAAEESANTKDDNKGRERPRSMRDFKPDYSF

SEQ ID NO: 25688 - protein, 271 aa, Zea mays subsp. mays
  misc_feature (1)..(271): Ceres Seq. ID no. 13492973
MANASLQSFLLPHDHSFAGAGGSRDGSASAVHKLSTNTSGSISFRLYTKTSPSVTAASATNSSAPTPVAPASAPAAGDEEEEEGPSLDLLRRQLAAGDYRQADETTRALIIDLAGEPARRRGYVFFSEVQFIPAEDLAAIDGLWKEHSGGRFGYSVQRRLWEKSRRDFTRFFIRVGWMRKLDTEVEQYNYRAFPDEFMWELTDDTPEGHLPLTNALRGTQLLANILTHPAFQEEDQGDGAAAAEESANTKDDNKGRERPRSMRDFKPDYSF

SEQ ID NO: 25689 - DNA, 779 bp, Zea mays subsp. mays
  misc_feature (1)..(779): Ceres Seq. ID no. 13492985
ccacctcaattattgcccacccatccccgctccctcctctcctctcctcccgtcccacccatctcctcgcaccagcgccggggaaatggcggccgcgctgtggacgctgctgctggtggtggccctgtcggcggcgctggcgctggcctcgaaccgccccgtggcggcggcggcgaccgcggcggcggaggcggcgaacgaggtgctccgcgcgcaccagctgccggggggcctgctgccggcggggatcacggcgttccggcacgacgccgccacgggagcgttcgaggcccggctggacgcgccctgcacggcgcgcttcgaggtcggcctccgctacaacgccaccgtctccggggtcatcagccccggccagatcgccgacatctccggcgtcgccgcgcaggacctcttcatgtggttccccgtccacgacatcaaggtcgacatcccctcctccggcgtcatctacttcaacgtcggcgtcgtcaagaagcacctcccgctcgccgtcttcgacgcgccgccggcctgcacgcccgacccgctcctgcaggtcatttctcatcctagcctcactctctcgatggcacgagctctaattcatcgatcttgggaccagtgacctccttgacatcattcaatcctcaatgatcttgaatgttggcacaacctttatacccagtttctttactgaaagctgcaagtagcatgcgcaggagcttttcagcatgtcatattccacggagcagagagtcgtgaatacacaagagatacgg

SEQ ID NO: 25690 - protein, 207 aa, Zea mays subsp. mays
  misc_feature (1)..(207): Ceres Seq. ID no. 13492986
HLNYCPPIPAPSSPLLPSHPSPRTSAGEMAAALWTLLLVVALSAALALASNRPVAAAATAAAEAANEVLRAHQLPGGLLPAGITAFRHDAATGAFEARLDAPCTARFEVGLRYNATVSGVISPGQIADISGVAAQDLFMWFPVHDIKVDIPSSGVIYFNVGVVKKHLPLAVFDAPPACTPDPLLQVISHPSLTLSMARALIHRSWDQ

SEQ ID NO: 25691 - protein, 199 aa, Zea mays subsp. mays
  misc_feature (1)..(199): Ceres Seq. ID no. 13492987
TSIIAHPSPLPPLLSSRPTHLLAPAPGKWRPRCGRCCWWWPCRRRWRWPRTAPWRRRRPRRRRRRTRCSARTSCRGACCRRGSRRSGTTPPRERSRPGWTRPARRASRSASATTPPSPGSSAPARSPTSPASPRRTSSCGSPSTTSRSTSPPPASSTSTSASSRSTSRSPSSTRRRPARPTRSCRSFLILASLSRWHEL

SEQ ID NO: 25692 - protein, 190 aa, Zea mays subsp. mays
  misc_feature (1)..(190): Ceres Seq. ID no. 13492988
PPQLLPTHPRSLLSSPPVPPISSHQRRGNGGRAVDAAAGGGPVGGAGAGLEPPRGGGGDRGGGGGERGAPRAPAAGGPAAGGDHGVPARRRHGSVRGPAGRALHGALRGRPPLQRHRLRGHQPRPDRRHLRRRRAGPLHVVPRPRHQGRHPLLRRHLLQRRRRQEAPPARRLRRAAGLHARPAPAGHFSS

SEQ ID NO: 25693 - protein, 179 aa, Zea mays subsp. mays
  misc_feature (1)..(179): Ceres Seq. ID no. 13492989
MAAALWTLLLVVALSAALALASNRPVAAAATAAAEAANEVLRAHQLPGGLLPAGITAFRHDAATGAFEARLDAPCTARFEVGLRYNATVSGVISPGQIADISGVAAQDLFMWFPVHDIKVDIPSSGVIYFNVGVVKKHLPLAVFDAPPACTPDPLLQVISHPSLTLSMARALIHRSWDQ

SEQ ID NO: 25694 - DNA, 1191 bp, Zea mays subsp. mays
  misc_feature (1)..(1191): Ceres Seq. ID no. 13492990
cttccagttcgcaagggtttcccagccaaagaaccagcatcctggttgtgaaaatggggggtgtgcgtagctacttcttcatcatcgccgccgcggtcgttgccgtcgtcctcgcgcttctcccggccggcgccacaggtgccggcctcaaggtcggcttctacagcaagacatgcccgtcggcggagtccctggtgcagcaggcggtggctgccgccttcaagaacaacagcggcatcgccgccggcctcatccgcctgcacttccatgactgcttcgtcaggggctgcgacggctcggtgctgatcgactcgacggcgaacaacacggcggagaaggacgcggtcccgaacaacccgagcctgcggggcttcgaggtcatcgacgccgccaagaaggcggtggaggcacggtgccccaagacggtgtcctgcgccgacatcctggcgttcgcggcgcgggacagcatcgcgctggcggggaacaacctgacgtacaaggtccccgcggggcggcgcgacgggcgggtgtccagggacacggacgccaacagcaacctcccctcgccgctctccaccgccgccgagctcgtcggcaacttcacgcgcaagaacctcaccgccgaggacatggtggtgctctccggcgcgcacaccgtcggccgctcccactgctcctccttcaccaaccgcctctacggcttcagcaacgccagcgacgtcgaccccaccatcagctccgcctacgccctcctgctgcgggccatctgcccgtccaacaccagccagttcttccccaacaccaccaccgacatggacctcatcacgcccgcgctgctcgacaacaggtactacgtcggcctcgccaacaacctcggcctcttcacgtccgaccaggctctgctcaccaacgccacgctcaagaagtccgtcgacgccttcgtcaagagcgaaagcgcgtggaagaccaagttcgccaagtccatggtcaagatgggcaatatcgacgtgctcacgggcaccaagggggagatcaggctcaactgcagggtcatcaacagcggcagcagcagctctggattattccagcttcacacggcaaccgcctctgacgaggaattcgcccacgttgcaactaactagcagctactatatctctatccgtagaggatctagtgatctactgctaccc

SEQ ID NO: 25695 - protein, 379 aa, Zea mays subsp. mays
  misc_feature (1)..(379): Ceres Seq. ID no. 13492991
SSSQGFPSQRTSILVVKMGGVRSYFFIIAAAVVAVVLALLPAGATGAGLKVGFYSKTCPSAESLVQQAVAAAFKNNSGIAAGLIRLHFHDCFVRGCDGSVLIDSTANNTAEKDAVPNNPSLRGFEVIDAAKKAVEARCPKTVSCADILAFAARDSIALAGNNLTYKVPAGRRDGRVSRDTDANSNLPSPLSTAAELVGNFTRKNLTAEDMVVLSGAHTVGRSHCSSFTNRLYGFSNASDVDPTISSAYALLLRAICPSNTSQFFPNTTTDMDLITPALLDNRYYVGLANNLGLFTSDQALLTNATLKKSVDAFVKSESAWKTKFAKSMVKMGNIDVLTGTKGEIRLNCRVINSGSSSSGLFQLHTATASDEEFAHVATN

SEQ ID NO: 25696 - protein, 362 aa, Zea mays subsp. mays
  misc_feature (1)..(362): Ceres Seq. ID no. 13492992
MGGVRSYFFIIAAAVVAVVLALLPAGATGAGLKVGFYSKTCPSAESLVQQAVAAAFKNNSGIAAGLIRLHFHDCFVRGCDGSVLIDSTANNTAEKDAVPNNPSLRGFEVIDAAKKAVEARCPKTVSCADILAFAARDSIALAGNNLTYKVPAGRRDGRVSRDTDANSNLPSPLSTAAELVGNFTRKNLTAEDMVVLSGAHTVGRSHCSSFTNRLYGFSNASDVDPTISSAYALLLRAICPSNTSQFFPNTTTDMDLITPALLDNRYYVGLANNLGLFTSDQALLTNATLKKSVDAFVKSESAWKTKFAKSMVKMGNIDVLTGTKGEIRLNCRVINSGSSSSGLFQLHTATASDEEFAHVATN

SEQ ID NO: 25697 - DNA, 1677 bp, Zea mays subsp. mays
  misc_feature (1)..(1677): Ceres Seq. ID no. 13492998
acaccgggccgtgccgatgggtgtttacgagtagcagctgtatctcgttgacctcaccgcctgcagggcaccaaggaggagatgacttccccgaagcgggcagcagggcgggaagggtgcggatgcttggccgccgtcgcgcggggcctccgcggggcgtgcttccggccggcggtgacggcggacggtgacggcggcggctcggccaagggcagccacgttcacgacgcagcagagacaagatatctgaatgctagcaatcgggagcttggtgatcattttcagacaaaacgtgatggtgaaaatggtgttgatgcatcaattgaaaagagaacacccaagctacttcagtttacctttcaagagttgaaatctgccacgcttaacttcaggccagacagtattcttggggagggtgggttcggttatgtattcaaggggtggattgagccaaacagcactgctcctgcaaaacctggcacaggggttactgtggcagtcaaaagtttgaagccagatgcgcttcaaggtcatagagaatgggtggcagaagttgactttctgggacagttgcatcataaacaccttgttaagctgattggattgtattgaggatgatcaaaggttacttgtatatgaattcatggcacggggaagtcttgaaaatcatcttttcagaagggctcttcccctaccttggtccaacaggatgaagattgctctaggtgccgcgaaaggactagccttcctccatggaggtcccaaacctgttatttacagggattttaagacatcgaatgttcttcttgatgtggagtacaacgcaaaactatctgatttcggtttagcaaaagctggtcctcagggtgataaaactcatgtatctactcgggttgttggcacctatggttatgctgcaccagagtatgtaatgacagggcacttgacatctaagagtgatgtttatagcttcggagttgtgctactcgagatgttgactgggagaagatcaatggacaagaagcggcctacgggggagcagaacctggttgcatgggcaaggccttacctaaatgatcggcgaaggctctatcagcttgtagatcctcgcttggggctgaactactctgtcaaaggggtgcaaaaggtcgctcagatctgccactactgccttacccgtgacagtaagtctcgcccatcgatggatgaagttgtcaagcaactcacaccattacaagatctaaacgacatggcatctgcttcgccaaggcctcgctcaactcagcgcggaaaggtgcatcgatgacaacccggttctgttgtaagaagagcagtgtggtcctggttgcttgatgcttgtttggtttaattgtatagcaaaattaggtgttgcctgccgatacctggagatgtgactccgcctgatgtgtcgctcaggtcagtcacactgctctgctgtttggctggttgccaaagcaagataacgatgtatctggttgcatcatgtaataattattataattaccatttaacttctggcgggggtacatcatgtaatggttggtgtacacccaggttagtaatcttaatagtgtttggctgacaggctgagggtcagtagacggtttgcagttcgcttttttcaggggaaaggtacaggtgttaaattgtgattgt

SEQ ID NO: 25698 - protein, 220 aa, Zea mays subsp. mays
  misc_feature (1)..(220): Ceres Seq. ID no. 13492999
MARGSLENHLFRRALPLPWSNRMKIALGAAKGLAFLHGGPKPVIYRDFKTSNVLLDVEYNAKLSDFGLAKAGPQGDKTHVSTRVVGTYGYAAPEYVMTGHLTSKSDVYSFGVVLLEMLTGRRSMDKKRPTGEQNLVAWARPYLNDRRRLYQLVDPRLGLNYSVKGVQKVAQICHYCLTRDSKSRPSMDEVVKQLTPLQDLNDMASASPRPRSTQRGKVHR

SEQ ID NO: 25699 - protein, 198 aa, Zea mays subsp. mays
  misc_feature (1)..(198): Ceres Seq. ID no. 13493000
MKIALGAAKGLAFLHGGPKPVIYRDFKTSNVLLDVEYNAKLSDFGLAKAGPQGDKTHVSTRVVGTYGYAAPEYVMTGHLTSKSDVYSFGVVLLEMLTGRRSMDKKRPTGEQNLVAWARPYLNDRRRLYQLVDPRLGLNYSVKGVQKVAQICHYCLTRDSKSRPSMDEVVKQLTPLQDLNDMASASPRPRSTQRGKVHR

SEQ ID NO: 25700 - protein, 176 aa, Zea mays subsp. mays
  misc_feature (1)..(176): Ceres Seq. ID no. 13493001
MTSPKRAAGREGCGCLAAVARGLRGACFRPAVTADGDGGGSAKGSHVHDAAETRYLNASNRELGDHFQTKRDGENGVDASIEKRTPKLLQFTFQELKSATLNFRPDSILGEGGFGYVFKGWIEPNSTAPAKPGTGVTVAVKSLKPDALQGHREWVAEVDFLGQLHHKHLVKLIGLY

SEQ ID NO: 25701 - DNA, 1653 bp, Zea mays subsp. mays
  misc_feature (1)..(1653): Ceres Seq. ID no. 13493002
actgttcaaacaaaccctccactgccctccccactctccccttcaccgcgccgcactcccaagtcccaacaggcctaaatggcggcggccggaacaattcccggcgccgccgcagccattggcgcttctgtgtcccaacgccaacgtcgcgtcggcgctccttctttcgtagctgcctacgtctccgagggcacccgcctcgtctgccggaggcagctccgtccggctccggtcctcgcttcttccttcatctccctttctcatccagcgaggcggcggttcctctgcgatgctgcggccggagcctcctcaggtcccgctggagaagccaagccccagggatttgcagagagatacccagctcttgtcacaggtttcttcttcttcttgtggtattttctgaatgtaatatttaacatcctcaacaagaagatcttcgactacttcccctatccatattttgtgtcagtgagccatctttttattggagtactatacttccttattggctggagcttcggcatcccaaagcgcgcgccaatcaactcaacacttctgaagcagcttgttccagttgcggtttgccatgccattggccatgtaacaagcactgtgtcatttgctgctgtagctgtgtcatttgcccacactattaaagctctcgagccattcttcaatgcggctgcttcccagtttatccttggacaaccagttccattgacactctggctgtctcttgttccagtggtgattggtgtctcggtagcatccctcactgaactctcatttaattggactggcttcattaatgccatgatctcaaatatttctttcacctaccgaagcatctattctaagaaggctatgactgacatggatagtaccaacttgtatgcatacatatcaataattgctctctttgtctgcatcccccctgcaattattattgaaggacctcaattagtgcagcatggttttaaagatgcaattgccaaagttggattaacaaagttgatttctaatttttttgtggtgggcttattctatcacctttataaccaggttgctacaaacacattggagcgggtagcccctttaacacatgccatcggcaatgtgttgaaacgtgttttcgtcattggcttttccatcatcgcattcggcaacaagatcaccacacagactggaattggcacttccattgctgtttctggtgttgccctctactcatttataaaggctaagattgaggagaaaaagcaaataaagagtgcataaggtgttggctgatgtggatgcggttggtttgtcgctttgatggacctctattctctcggtgaacgaacaaacttgcaagatggataaaatcttgctatctcctagtacatttgattgttattcccagtctggtactgaggtgtgcggttgttgttggctaacttgtttatttgaagcaaatttgagcaatgctcagtggcatggaatttccatttctgttttccttcgctcatttattctgacttgacatggtgctattgtaatcttaagcagtagtgtctctagaatgttttccccaaggagatttcagtaccaaatttgaacaatcctcaaactagaaattttgatttccatgcaccccactcagcaattctg

SEQ ID NO: 25702 - protein, 399 aa, Zea mays subsp. mays
  misc_feature (1)..(399): Ceres Seq. ID no. 13493003
MAAAGTIPGAAAAIGASVSQRQRRVGAPSFVAAYVSEGTRLVCRRQLRPAPVLASSFISLSHPARRRFLCDAAAGASSGPAGEAKPQGFAERYPALVTGFFFFLWYFLNVIFNILNKKIFDYFPYPYFVSVSHLFIGVLYFLIGWSFGIPKRAPINSTLLKQLVPVAVCHAIGHVTSTVSFAAVAVSFAHTIKALEPFFNAAASQFILGQPVPLTLWLSLVPVVIGVSVASLTELSFNWTGFINAMISNISFTYRSIYSKKAMTDMDSTNLYAYISIIALFVCIPPAIIIEGPQLVQHGFKDAIAKVGLTKLISNFFVVGLFYHLYNQVATNTLERVAPLTHAIGNVLKRVFVIGFSIIAFGNKITTQTGIGTSIAVSGVALYSFIKAKIEEKKQIKSA

SEQ ID NO: 25703 - DNA, 2165 bp, Zea mays subsp. mays
  misc_feature (1)..(2165): Ceres Seq. ID no. 13493004
tacctagaacatcctaatcgaaaaatgcgttactgtaccaatggctccccacctcctggccgtggccgtggccgtggcggccatcatcgccaccgtctcgttgctggcgcccggcgccgctgcctacccgtggccagtttgtgggacgagcaacgacttcgagcccaacagcacataccaggccaacctcaacctcctcgccgccatgctgcccaacaacgtgtccgcatccccggtcctctacgccaccgccgtcgtcggcgccgtcccggagcaggtctggggcatgggactctgccgcggcgacgccaacgccagcagctgcctcgcctgcctcacccaggcgttccaggacctgcccaacgactgctcctacaacaaggacgccgccatctactacgacccctgcaccctccactactccgacgtccacaccctcgccgacgacgacaccggcccgacgaccatgtcgtacaacatcaacaacaacgccaacgtcacctcggacccggcccggttcgagcgcctcctcgccgccctcgtcaacgccaccgccgagcacgccgcgtccaactccacccggcgattcgccacgggggaggccgacgccgacttcgaccggcagttccccaaggtgtacgcgctggcgcagtgcacgccggaccagacgccggcgcagtgccgcaagtgcctcgccggcctcatatcgcagtcgctggacgggttccagaacaacatcggaggcagggtgctctgggtcaactgcacctggcggtacgagacctcgcccttcttcaatggaccggccatggtgcgcctggcatcgtcgtcgagccctccggcagcggcagcggcaggtggaggggagaggaagtacagcgtgttcatcgtggttcttgcagttgtgctgcccactctagctgccctgaatcttgtgttttgcttctgtttctggcggcggccagcaccacaggcaaagcagtcacagcccatgtattccaccgaagcagaggacgtggaaacggtggactccatgatgatcgacgtctccgccctgcgagccgcaacagggaatttcgacgagagcaacaagctcggcgaaggcgggtttggcgcggtgtacaagggcgtcctcccggacggcgacgagatagcggtgaagcgtctgtcgaagagctcgacgcagggagtggaggagctgaagaacgagctcgcgctggtcgccaggctgaggcacaggaacctcgtcaggctcgtcggcgtgtgcctggagcagcaagaacggctgctcgtctacgagtttgtccccaaccggagcctcgacctggtactcttcggtaccgacacgcgtgagccgctcagctgggagcagaggtacaggatcataaacggcatcgctcgaggcctgcagtacctccacgaggactcccagctcaaggtagtccaccgtgatctcaaggccagcaacatcctgctagacgtggagatgaaccccaagatctcagatttcggcctcgcgaggatcttcggccgggaccagacgcaggccgtcaccagccgcgttgtcggaacctatgggtacctagcaccagaatacctgatgcgcgggaactactccgtgaaatcggacgccttcagcttcggcgtcatggtgctggagatcgtcaccgggaggaagaacaacggcagctcccacaagtccggagacctcttgaccaccgtatgggagcactgggaggccgggacggtggcggagctggtggacccgtccctgggcggaagcttcccggagggcgacgtgctgaggtgcatccacatcggtctgctctgcgtccagggggaccccgctgcccgcccggtgatgtcgtccgtcgtgacgatgcttggaaccgacacggtcaccctccaggctccatccaagccgggattcttcgccagaaagagtggcactagcacgaccgtgtccgctgatgatgggtcgatttagagattgccactagagtacagagttgccagaaagagtagctcctttttttaacgatagccatctctatcgctaataagatcctgcgttttattagtatgggaggcatgggattattgaaggtctccttgactctaaagaaaatgtcttaggacagacttgagcctaaacgtctttgttc

SEQ ID NO: 25704 - protein, 648 aa, Zea mays subsp. mays
  misc_feature (1)..(648): Ceres Seq. ID no. 13493005
MAPHLLAVAVAVAAIIATVSLLAPGAAAYPWPVCGTSNDFEPNSTYQANLNLLAAMLPNNVSASPVLYATAVVGAVPEQVWGMGLCRGDANASSCLACLTQAFQDLPNDCSYNKDAAIYYDPCTLHYSDVHTLADDDTGPTTMSYNINNNANVTSDPARFERLLAALVNATAEHAASNSTRRFATGEADADFDRQFPKVYALAQCTPDQTPAQCRKCLAGLISQSLDGFQNNIGGRVLWVNCTWRYETSPFFNGPAMVRLASSSSPPAAAAAGGGERKYSVFIVVLAVVLPTLAALNLVFCFCFWRRPAPQAKQSQPMYSTEAEDVETVDSMMIDVSALRAATGNFDESNKLGEGGFGAVYKGVLPDGDEIAVKRLSKSSTQGVEELKNELALVARLRHRNLVRLVGVCLEQQERLLVYEFVPNRSLDLVLFGTDTREPLSWEQRYRIINGIARGLQYLHEDSQLKVVHRDLKASNILLDVEMNPKISDFGLARIFGRDQTQAVTSRVVGTYGYLAPEYLMRGNYSVKSDAFSFGVMVLEIVTGRKNNGSSHKSGDLLTTVWEHWEAGTVAELVDPSLGGSFPEGDVLRCIHIGLLCVQGDPAARPVMSSVVTMLGTDTVTLQAPSKPGFFARKSGTSTTVSADDGSI

SEQ ID NO: 25705 - protein, 593 aa, Zea mays subsp. mays
  misc_feature (1)..(593): Ceres Seq. ID no. 13493006
MLPNNVSASPVLYATAVVGAVPEQVWGMGLCRGDANASSCLACLTQAFQDLPNDCSYNKDAAIYYDPCTLHYSDVHTLADDDTGPTTMSYNINNNANVTSDPARFERLLAALVNATAEHAASNSTRRFATGEADADFDRQFPKVYALAQCTPDQTPAQCRKCLAGLISQSLDGFQNNIGGRVLWVNCTWRYETSPFFNGPAMVRLASSSSPPAAAAAGGGERKYSVFIVVLAVVLPTLAALNLVFCFCFWRRPAPQAKQSQPMYSTEAEDVETVDSMMIDVSALRAATGNFDESNKLGEGGFGAVYKGVLPDGDEIAVKRLSKSSTQGVEELKNELALVARLRHRNLVRLVGVCLEQQERLLVYEFVPNRSLDLVLFGTDTREPLSWEQRYRIINGIARGLQYLHEDSQLKVVHRDLKASNILLDVEMNPKISDFGLARIFGRDQTQAVTSRVVGTYGYLAPEYLMRGNYSVKSDAFSFGVMVLEIVTGRKNNGSSHKSGDLLTTVWEHWEAGTVAELVDPSLGGSFPEGDVLRCIHIGLLCVQGDPAARPVMSSVVTMLGTDTVTLQAPSKPGFFARKSGTSTTVSADDGSI

SEQ ID NO: 25706 - protein, 566 aa, Zea mays subsp. mays
  misc_feature (1)..(566): Ceres Seq. ID no. 13493007
MGLCRGDANASSCLACLTQAFQDLPNDCSYNKDAAIYYDPCTLHYSDVHTLADDDTGPTTMSYNINNNANVTSDPARFERLLAALVNATAEHAASNSTRRFATGEADADFDRQFPKVYALAQCTPDQTPAQCRKCLAGLISQSLDGFQNNIGGRVLWVNCTWRYETSPFFNGPAMVRLASSSSPPAAAAAGGGERKYSVFIVVLAVVLPTLAALNLVFCFCFWRRPAPQAKQSQPMYSTEAEDVETVDSMMIDVSALRAATGNFDESNKLGEGGFGAVYKGVLPDGDEIAVKRLSKSSTQGVEELKNELALVARLRHRNLVRLVGVCLEQQERLLVYEFVPNRSLDLVLFGTDTREPLSWEQRYRIINGIARGLQYLHEDSQLKVVHRDLKASNILLDVEMNPKISDFGLARIFGRDQTQAVTSRVVGTYGYLAPEYLMRGNYSVKSDAFSFGVMVLEIVTGRKNNGSSHKSGDLLTTVWEHWEAGTVAELVDPSLGGSFPEGDVLRCIHIGLLCVQGDPAARPVMSSVVTMLGTDTVTLQAPSKPGFFARKSGTSTTVSADDGSI

SEQ ID NO: 25707 - DNA, 1362 bp, Zea mays subsp. mays
  misc_feature (1)..(1362): Ceres Seq. ID no. 13493020
agttcaccgtccctccctgtccttgccatggccatccccaccgcccccgccctcctcttcccctccgttctccctaactcattcccccgccggacaccctggcgacacctcgtccggcggcaaccgcgtcacctccgcgcgggccgcccgcgcctgcaggcgccggcgccggctcctcccccggtggcggaggtcgcggcggagcgggacgacacgcctccgctcaggctgctcgagccgccgcaggaggacgaccccttcccgcccgagatggagcccgcggaccctgatttctaccggataggatatgcgcggatgatgcgcgcctatgggatcgagttcctcgaaggccccgacgggatgggcgtctacgcttcccgggacgtggagccacttcgcagagctagagtgattatggagattccgttggagctgatgctgactataactcaaaagaaaccttggatgtttttccctgacattattccactaggccatcctatatttgatgttatcgagtcaacagatccagagacagattgggatctaagattagcatgtcttcttctatatgcatttgatatagaagacaacttttggcagttatattctgattttttgccaagtgttgatgaatgcactagtttgctgctggcaccaaaggaagatctaatggaactagaagatgaagatcttgcttcacaaatgttaaaacaccaggaacgagcaattgacttttggcaaaagcattgggacaaaccaattcctctaaagctgaaacgccttgcacgtgaccatgagagatttctctgggcactgagtatagtacagtctcgttctgtcaacttgaagttgagaatgggagccttcatccaagatgcaaatgtgctagctccttatgctgatatgttgaaccactcacccaatgctaattgcttcctgcattggcgttttaaagaccgtatgcttgaagttatgattaaggctggacaagctatcaagaaaggagacgagatgacgatagattatatgagtggcgtcaacagcaaatttatggaaagatatgggttctcatcaccaacgaatccttgggagctcataaatttctcgagtcctgcaacaattcacatggattccttcttatcggtcttcaatatcgctggcttgcatgatgagctgtaccacaattctgcattgacctcagtagtagaaaccgactttgtggacggagcagtcgtagcagcagccagagcattgccgacatggtcagatggtgatgttcctgcaattcctagtgtggagagaaaatctgctcaggcactgcaagaggagtgccgccaaatgttggattcattcccaact

SEQ ID NO: 25708 - protein, 454 aa, Zea mays subsp. mays
  misc_feature (1)..(454): Ceres Seq. ID no. 13493021
SSPSLPVLAMAIPTAPALLFPSVLPNSFPRRTPWRHLVRRQPRHLRAGRPRLQAPAPAPPPVAEVAAERDDTPPLRLLEPPQEDDPFPPEMEPADPDFYRIGYARMMRAYGIEFLEGPDGMGVYASRDVEPLRRARVIMEIPLELMLTITQKKPWMFFPDIIPLGHPIFDVIESTDPETDWDLRLACLLLYAFDIEDNFWQLYSDFLPSVDECTSLLLAPKEDLMELEDEDLASQMLKHQERAIDFWQKHWDKPIPLKLKRLARDHERFLWALSIVQSRSVNLKLRMGAFIQDANVLAPYADMLNHSPNANCFLHWRFKDRMLEVMIKAGQAIKKGDEMTIDYMSGVNSKFMERYGFSSPTNPWELINFSSPATIHMDSFLSVFNIAGLHDELYHNSALTSVVETDFVDGAVVAAARALPTWSDGDVPAIPSVERKSAQALQEECRQMLDSFPT

SEQ ID NO: 25709 - protein, 445 aa, Zea mays subsp. mays
  misc_feature (1)..(445): Ceres Seq. ID no. 13493022
MAIPTAPALLFPSVLPNSFPRRTPWRHLVRRQPRHLRAGRPRLQAPAPAPPPVAEVAAERDDTPPLRLLEPPQEDDPFPPEMEPADPDFYRIGYARMMRAYGIEFLEGPDGMGVYASRDVEPLRRARVIMEIPLELMLTITQKKPWMFFPDIIPLGHPIFDVIESTDPETDWDLRLACLLLYAFDIEDNFWQLYSDFLPSVDECTSLLLAPKEDLMELEDEDLASQMLKHQERAIDFWQKHWDKPIPLKLKRLARDHERFLWALSIVQSRSVNLKLRMGAFIQDANVLAPYADMLNHSPNANCFLHWRFKDRMLEVMIKAGQAIKKGDEMTIDYMSGVNSKFMERYGFSSPTNPWELINFSSPATIHMDSFLSVFNIAGLHDELYHNSALTSVVETDFVDGAVVAAARALPTWSDGDVPAIPSVERKSAQALQEECRQMLDSFPT

SEQ ID NO: 25710 - protein, 364 aa, Zea mays subsp. mays
  misc_feature (1)..(364): Ceres Seq. ID no. 13493023
MEPADPDFYRIGYARMMRAYGIEFLEGPDGMGVYASRDVEPLRRARVIMEIPLELMLTITQKKPWMFFPDIIPLGHPIFDVIESTDPETDWDLRLACLLLYAFDIEDNFWQLYSDFLPSVDECTSLLLAPKEDLMELEDEDLASQMLKHQERAIDFWQKHWDKPIPLKLKRLARDHERFLWALSIVQSRSVNLKLRMGAFIQDANVLAPYADMLNHSPNANCFLHWRFKDRMLEVMIKAGQAIKKGDEMTIDYMSGVNSKFMERYGFSSPTNPWELINFSSPATIHMDSFLSVFNIAGLHDELYHNSALTSVVETDFVDGAVVAAARALPTWSDGDVPAIPSVERKSAQALQEECRQMLDSFPT

SEQ ID NO: 25711 - DNA, 1624 bp, Zea mays subsp. mays
  misc_feature (1)..(1624): Ceres Seq. ID no. 13493048
cattacctagaacatcctaatcgaaaacaacagaagctagaaacagccagtactgaagaaaaggacatggttttttcagaaataatgcctcaagctctcacattgatgactgatgtatttggaaattatgttgtccaaaagttttttgagcatggaagcactacccagataaaggaattggctggtcagcttattggacgtgtccttgctcttagtcttcagatgtatgggtgccgggttatacagaaggctatagaagttgttgatttggatctgcagactaaaatggttgcggagctggagggccatgtcatgcgctgtgtacgtgatcaaaatgggaaccatgttatacagaaatgcatagagtgcattcctcagcatgctatcgagttcattgtctcgacattctatggccaagttgtaatgttatccactcatccatatggttgccgagttattcagagggttctagagcattgtgatgatcctaagacacagcaaataatgatggatgagattctccagtctgtttgcttgctagctcaggatcagtatggcaactatgtggttcagcatgttctggaacatggcaaaccccatgagagatcagccattattgagaagctaattggccaagttgtgcaaatgagccagcaaaagtttgcctcaaatgtcattgagaagtgcttagcctttggaaatcctgtagaacgtcaggttctgattggtgagatgcttggatccactagcgaaagcgaacctcttgaggtaatgatgaaagaccagtttgcaaactatgtggtgcagaaggtgctagaaacttgtgacgatcagcagagggagatgatcctaacaaggataaagacacacctgaacacactcaagaagtacacatacgggaagcacatagtagcgcgtgtagagaagcttgttgctgctggagagaagcgccttgggcttcaaccagcatgcaccgccgcctgaagggcaaactctctaagttgtacagctaacagttgctaggtttgcgctcatgtttttttctctactaaaaaccttatatgaaggccccttttggcctcgccaggaaaaaaaatactgtatgtttgcggggaagagtgtacattaattctttagcagaaagaccccccctacccatgcggcggaatcaagggaggagtgatgcgtgagtccgatcgatctgaaggctgctgtaaagaggaagatggaaggaaggagtgagaagcatgtcagttactctgctgctgtacaaattaaacttagctcttagagtgaggagaaagtaagctgttagctgtctgcctaaaggaaagaaaggaaaaaaaagaagctggaggccattggcaccctgtttcatgtgttggtatagctgctgtggctctcctgttgtctgtctggcctttgttgtaacataaagctgaggcgcactagcctgccttcgttttcacagttaagctgaagttattagtatcagctttcctgaactgcttggtatgtaatgtgactgtgttttcttccttgtactaatgcttgtctcatgtaatccattcccctaatgtctgaatgttttaatctcaattttcacctctgaaacgttttttct

SEQ ID NO: 25712 - protein, 327 aa, Zea mays subsp. mays
  misc_feature (1)..(327): Ceres Seq. ID no. 13493049
HYLEHPNRKQQKLETASTEEKDMVFSEIMPQALTLMTDVFGNYVVQKFFEHGSTTQIKELAGQLIGRVLALSLQMYGCRVIQKAIEVVDLDLQTKMVAELEGHVMRCVRDQNGNHVIQKCIECIPQHAIEFIVSTFYGQVVMLSTHPYGCRVIQRVLEHCDDPKTQQIMMDEILQSVCLLAQDQYGNYVVQHVLEHGKPHERSAIIEKLIGQVVQMSQQKFASNVIEKCLAFGNPVERQVLIGEMLGSTSESEPLEVMMKDQFANYVVQKVLETCDDQQREMILTRIKTHLNTLKKYTYGKHIVARVEKLVAAGEKRLGLQPACTAA

SEQ ID NO: 25713 - protein, 305 aa, Zea mays subsp. mays
  misc_feature (1)..(305): Ceres Seq. ID no. 13493050
MVFSEIMPQALTLMTDVFGNYVVQKFFEHGSTTQIKELAGQLIGRVLALSLQMYGCRVIQKAIEVVDLDLQTKMVAELEGHVMRCVRDQNGNHVIQKCIECIPQHAIEFIVSTFYGQVVMLSTHPYGCRVIQRVLEHCDDPKTQQIMMDEILQSVCLLAQDQYGNYVVQHVLEHGKPHERSAIIEKLIGQVVQMSQQKFASNVIEKCLAFGNPVERQVLIGEMLGSTSESEPLEVMMKDQFANYVVQKVLETCDDQQREMILTRIKTHLNTLKKYTYGKHIVARVEKLVAAGEKRLGLQPACTAA

SEQ ID NO: 25714 - protein, 299 aa, Zea mays subsp. mays
  misc_feature (1)..(299): Ceres Seq. ID no. 13493051
MPQALTLMTDVFGNYVVQKFFEHGSTTQIKELAGQLIGRVLALSLQMYGCRVIQKAIEVVDLDLQTKMVAELEGHVMRCVRDQNGNHVIQKCIECIPQHAIEFIVSTFYGQVVMLSTHPYGCRVIQRVLEHCDDPKTQQIMMDEILQSVCLLAQDQYGNYVVQHVLEHGKPHERSAIIEKLIGQVVQMSQQKFASNVIEKCLAFGNPVERQVLIGEMLGSTSESEPLEVMMKDQFANYVVQKVLETCDDQQREMILTRIKTHLNTLKKYTYGKHIVARVEKLVAAGEKRLGLQPACTAA

SEQ ID NO: 25715 - DNA, 1168 bp, Zea mays subsp. mays
  misc_feature (1)..(1168): Ceres Seq. ID no. 13493084
atcgaaaacttcaatgtgcacaatataaactagctgggatcaaatacaggagcacctcgagtctgagagaatggctaacactgctaagggtaaggtctgtgtcactggggcgtctggtttcatcgcctcctggctcgtcaagcggcttcttgagtctgggtaccatgtcctgggaacagtcagagacccagggaatggcaagaaagtagggcacctctggggcctggaaggcgcaaaggaaaggctgcagctcgtgagagctgatctcttggaggaagggagcttcgacgacgctgtgatggcttgcgagggcgtcttccacaccgcatcgcccgtcgtcaccggatctaattccaaggaggagatgcttgattcagcaataaacggcacgatgaacgtgctacgctcgtgcaagaagaacccatcgctcangagggttgtcctgacatcctcgtcgtcgacagtgaggatcaaggacgaagccgacctgccccctaacgtgctgctggacgaatcgtcgtggagctccatcgagttctgcgaaagtctccagatatggtacgccgtcgcaaagatcctcgccgagaaggcagcctgggagttcgccggagagcacaggatcgacctcgtcaccgttcttccgaccttcgttgtcggacctactctgtctcctgagctcggccccaccgcttctgatgtcctcggcctgttccaaggagagacggggaagttcacgacgtacgggaggatggggtacgtccacatcgacgacgtggcgaggtgccacatgctggcgtacgaggccgcgggcgcccgagggaggtacatctgcagcgcggcggtgctggactgcggcgacctcgccgccctgctcgcgcggcggttcccagcgtaccccgtcccgaggagcctgccccgcgcctacggcgagcagtcgtacggcttcgacacgtccaaggcccgcgcgctggggctggcggaattcaagggcgtcgaggagatgttcgacgacgccgtcgcctcgttcataggccatggccatctccccgccgccgaggaacgccggcacgcgtagcctcttggtctgaaactacatgaatgaacgtatcatgtactaattaaattatttaatacttttaactagcatctaatcatgccgtttagtctc

SEQ ID NO: 25716 - protein, 334 aa, Zea mays subsp. mays
  misc_feature (1)..(334): Ceres Seq. ID no. 13493085
  misc_feature (121)..(121): Xaa is any aa, unknown or other
MANTAKGKVCVTGASGFIASWLVKRLLESGYHVLGTVRDPGNGKKVGHLWGLEGAKERLQLVRADLLEEGSFDDAVMACEGVFHTASPVVTGSNSKEEMLDSAINGTMNVLRSCKKNPSLXRVVLTSSSSTVRIKDEADLPPNVLLDESSWSSIEFCESLQIWYAVAKILAEKAAWEFAGEHRIDLVTVLPTFVVGPTLSPELGPTASDVLGLFQGETGKFTTYGRMGYVHIDDVARCHMLAYEAAGARGRYICSAAVLDCGDLAALLARRFPAYPVPRSLPRAYGEQSYGFDTSKARALGLAEFKGVEEMFDDAVASFIGHGHLPAAEERRHA

SEQ ID NO: 25717 - protein, 258 aa, Zea mays subsp. mays
  misc_feature (1)..(258): Ceres Seq. ID no. 13493086
  misc_feature (45)..(45): Xaa is any aa, unknown or other
MACEGVFHTASPVVTGSNSKEEMLDSAINGTMNVLRSCKKNPSLXRVVLTSSSSTVRIKDEADLPPNVLLDESSWSSIEFCESLQIWYAVAKILAEKAAWEFAGEHRIDLVTVLPTFVVGPTLSPELGPTASDVLGLFQGETGKFTTYGRMGYVHIDDVARCHMLAYEAAGARGRYICSAAVLDCGDLAALLARRFPAYPVPRSLPRAYGEQSYGFDTSKARALGLAEFKGVEEMFDDAVASFIGHGHLPAAEERRHA

SEQ ID NO: 25718 - protein, 236 aa, Zea mays subsp. mays
  misc_feature (1)..(236): Ceres Seq. ID no. 13493087
  misc_feature (23)..(23): Xaa is any aa, unknown or other
MLDSAINGTMNVLRSCKKNPSLXRVVLTSSSSTVRIKDEADLPPNVLLDESSWSSIEFCESLQIWYAVAKILAEKAAWEFAGEHRIDLVTVLPTFVVGPTLSPELGPTASDVLGLFQGETGKFTTYGRMGYVHIDDVARCHMLAYEAAGARGRYICSAAVLDCGDLAALLARRFPAYPVPRSLPRAYGEQSYGFDTSKARALGLAEFKGVEEMFDDAVASFIGHGHLPAAEERRHA

SEQ ID NO: 25719 - DNA, 1747 bp, Zea mays subsp. mays
  misc_feature (1)..(1747): Ceres Seq. ID no. 13493123
taatcgaaaaacctccacccgccccgtcccgttttgacggccctttctcccctctcctccgcgagcgccgccgcagtagaacccggtggtaacccactgccgcaagcatcccaccgcgccgagctacgcgacggacgcggcgcgcggcccacaacccaaccgcagcggcaacaaccgctctataaagcaatccccccacctaccggctccgcggcctcgctcgcttcgctttcccccaaatccaccgcgggctcgagctcggaggagaggagacgagacgacccaagactttctcacccccctttgcttcctgcgcaattcctgcggcagcgcctttctctctttcaatggacagcgactacgttgctagcctgctcatgggcatgggctcatccgcccctgcgctcgacttcgccgcgctggacgccgggttcctcgaaacgctctgcggcggcggcggcggcctcttcggggtgtccggggtcgccgcgggggccgggtgtggcggcgtgtccccggaggggtcgtcggtgtccgacccggcgtgggcgcgcgccagggacgatgacaatgtcaggaagcgcaaggagccgcccacggggtccgccggcggcaaggaggcctgcccgggcaaggctgcggaggccaagggtccggacgggaagaggtgcagagtgggcggcagcgacagcccggtgaagccgaaggtagaggaggtggcggcgagcgacgcctcggttgaactcaaagcgcagaagaagggcaaggggaagaccgccaagccggcagtcgaaccgcccaaggactacgtccatgtccgggcgcggcgagggcaggcgactgacagccacagcctcgcagagagggttagaagagagaagatcagccagaggatgaagtttctgcaggacctagtgccaggatgcaacaaggtggttggcaaggcactcatgctcgatgagatcataaactacgtccagtcgctgcagcagcaagtcgagttcctgtccatgaagctcgccactgtgaacccacagcttgacttcagcaacctgtcgacactcctacacaaagacatgtaccaaccatgtggcccttcggcaaattcggtctttccactggaaagtgacggtgcagctttcccattctgcgaccaagcggatcttttccacagctttggttcgggttcggctgctatggaggatcagtgctctctaagcctgctagacacggctctgccccacgcggccaacccacagtttgcttttcaaaagcagcagagggacttctgggaggatggcctacagaacgcattgcctaccggtagtgagcaaagacaggaggaggatgggcttttagtacccaactttgatggccagttacatgctgaccagacaaaggttgagttctagtccctggtgctcctcccaaggttgatatttttgtatataggtggggtaccaagacctgtggcaagcaaagctctctctttctctctgtgtccgaagctgaccatcattagagtctaggcctgcgaactgatttcgttccgtgataatgctgcatgtatggcatctcgattcttcccacagagatcatgtgatgtgatcgacctcgagaaattaaaagtagattgtgtactagatatggcgcaaatattacatgcgccatcttctaaagttgtactgattggtatgtaagggcgctgggtggtgttggaacggataccgtgtactgtttgttgctt

SEQ ID NO: 25720 - protein, 354 aa, Zea mays subsp. mays
  misc_feature (1)..(354): Ceres Seq. ID no. 13493124
MDSDYVASLLMGMGSSAPALDFAALDAGFLETLCGGGGGLFGVSGVAAGAGCGGVSPEGSSVSDPAWARARDDDNVRKRKEPPTGSAGGKEACPGKAAEAKGPDGKRCRVGGSDSPVKPKVEEVAASDASVELKAQKKGKGKTAKPAVEPPKDYVHVRARRGQATDSHSLAERVRREKISQRMKFLQDLVPGCNKVVGKALMLDEIINYVQSLQQQVEFLSMKLATVNPQLDFSNLSTLLHKDMYQPCGPSANSVFPLESDGAAFPFCDQADLFHSFGSGSAAMEDQCSLSLLDTALPHAANPQFAFQKQQRDFWEDGLQNALPTGSEQRQEEDGLLVPNFDGQLHADQTKVEF

SEQ ID NO: 25721 - protein, 344 aa, Zea mays subsp. mays
  misc_feature (1)..(344): Ceres Seq. ID no. 13493125
MGMGSSAPALDFAALDAGFLETLCGGGGGLFGVSGVAAGAGCGGVSPEGSSVSDPAWARARDDDNVRKRKEPPTGSAGGKEACPGKAAEAKGPDGKRCRVGGSDSPVKPKVEEVAASDASVELKAQKKGKGKTAKPAVEPPKDYVHVRARRGQATDSHSLAERVRREKISQRMKFLQDLVPGCNKVVGKALMLDEIINYVQSLQQQVEFLSMKLATVNPQLDFSNLSTLLHKDMYQPCGPSANSVFPLESDGAAFPFCDQADLFHSFGSGSAAMEDQCSLSLLDTALPHAANPQFAFQKQQRDFWEDGLQNALPTGSEQRQEEDGLLVPNFDGQLHADQTKVEF

SEQ ID NO: 25722 - protein, 342 aa, Zea mays subsp. mays
  misc_feature (1)..(342): Ceres Seq. ID no. 13493126
MGSSAPALDFAALDAGFLETLCGGGGGLFGVSGVAAGAGCGGVSPEGSSVSDPAWARARDDDNVRKRKEPPTGSAGGKEACPGKAAEAKGPDGKRCRVGGSDSPVKPKVEEVAASDASVELKAQKKGKGKTAKPAVEPPKDYVHVRARRGQATDSHSLAERVRREKISQRMKFLQDLVPGCNKVVGKALMLDEIINYVQSLQQQVEFLSMKLATVNPQLDFSNLSTLLHKDMYQPCGPSANSVFPLESDGAAFPFCDQADLFHSFGSGSAAMEDQCSLSLLDTALPHAANPQFAFQKQQRDFWEDGLQNALPTGSEQRQEEDGLLVPNFDGQLHADQTKVEF

SEQ ID NO: 25723 - DNA, 677 bp, Zea mays subsp. mays
  misc_feature (1)..(677): Ceres Seq. ID no. 13493127
atagaaatcgaccgagcgaatcctcgcttcgcagtcgcagcctttcctgcatcacaccaccgcgaaaccccagcagccgcatcgatggcgcccaaggcggagaagaagcccgctgcgaagaagccagcggaggaggagcccgctgccgcgaaggccccggcggggaagaagcccaaggccgagaagcgcctcccggcggccaagtcgtccggcaaagaaggcggcgacaagaagggcaagaagaaggcgaagaagtcggtggagacctacaagatctacatcttcaaggtgctgaagcaggtccaccccgacatcggcatctcttccaaggccatgtccatcatgaactccttcatcaacgacatcttcgagaagctcgccggcgaggctgccaagcttgcgcgctacaacaagaagcccaccatcacctctcgggagattcaaacctctgttcgccttgtccttcccggcgagctcgccaagcacgctgtctctgagggcaccaaggccgtcactaagttcacatcatcttagatttgaggtagtagctattgggtggcgttggtagttgtgtctcaatttgtctgctactaatagtggtaggagtatccatgtgtagttgggttgcggtaagaattgtgttaaactggtaatatgtttgaaattgctttttgtgg

SEQ ID NO: 25724 - protein, 177 aa, Zea mays subsp. mays
  misc_feature (1)..(177): Ceres Seq. ID no. 13493128
IEIDRANPRFAVAAFPASHHRETPAAASMAPKAEKKPAAKKPAEEEPAAAKAPAGKKPKAEKRLPAAKSSGKEGGDKKGKKKAKKSVETYKIYIFKVLKQVHPDIGISSKAMSIMNSFINDIFEKLAGEAAKLARYNKKPTITSREIQTSVRLVLPGELAKHAVSEGTKAVTKFTSS

SEQ ID NO: 25725 - protein, 164 aa, Zea mays subsp. mays
  misc_feature (1)..(164): Ceres Seq. ID no. 13493129
RNRPSESSLRSRSLSCITPPRNPSSRIDGAQGGEEARCEEASGGGARCREGPGGEEAQGREAPPGGQVVRQRRRRQEGQEEGEEVGGDLQDLHLQGAEAGPPRHRHLFQGHVHHELLHQRHLREARRRGCQACALQQEAHHHLSGDSNLCSPCPSRRARQARCL

SEQ ID NO: 25726 - protein, 149 aa, Zea mays subsp. mays; identical to SEQ ID NO: 25344
  misc_feature (1)..(149): Ceres Seq. ID no. 13493130

SEQ ID NO: 25727 - DNA, 1917 bp, Zea mays subsp. mays
  misc_feature (1)..(1917): Ceres Seq. ID no. 13493155
tagaacatcctaatcaaaaacacataagaggcgacatcacatcgcgttccgccgcctcacacgctagttggagctgtagtattagccaaccagccagcctccgatctccatccatatggaggaggctgcgcccgcggcggtcatggagcgggagcgcctcacggccgagatggccttccgcggcgcggacgaagctcggcgggaaggcggcgacccggcgcccagcatcgtcatcaagatccgccgccggctcccggacttcgcccgcaacatcaagctcaagtacgtgaagctcgggatccgccacggcggcagccccacgtcgctgctgccggcgctctgcgtgccggcggtcgccgccgccgcctactcgttcgtccgcctcgacgtcatctactactccgtcgacctgctcacctgcgtcgcctggctcggcaccgcgctgctgctgctcaccgtctactacctcaagcggccccgccccgtgtacctcgtcgagttcgcgtgctacaagccggaggagcggctcaagatctccaagtcggccttcctcgagatgaccgagagcaccggctccttcaatgaggcggctctggacttccagaccaagatcaccagccgctccgcgctcggggacgagacgtacctgcccccgggcgtccaggcgcgcccgcccaggctaaacatggcggaggcgcggaaggaggccgaggcggtcatgttcgggtgcctggacgcgctgttcgagtccacggggatcgacccgcgccgcgacgtgcgcatcctcatcgtcaactgcagcctcttcaacccgacgccgtcgctggcgtccatggtcatcaaccactacaggatgagggaggacgtcaagtcgttcaacctcggcggcatggggtgcagcgccggcctcatcgccgtcgacctcgccaaggacatgctccaggcgaaccccggatcgtacgccgtggtgctcagcaccgagaacatcaccctcaactggtacttcggcaacgaccgctccatgctcctctccaactgcatcttccgcatgggcggggccgcggcgctgctgtccaacaggcgcgcggacgccgggcgcgccaagtaccggctgctccacacggtgcgcacccacaaggcgccaccgacgagtgcttcaactgcgtgtaccagcgcgaggacgaggccggcaaggcgggcgtctcgctggcgcgggagctcatggcggtggccggcgacgcgctcaagaccaacatcacgacgctggggcccctggtgctgcccctgagcgagcagctcaagttcctcaggtcgctgatgatgcgccgcgtgttccgcgtcaggggcgtgcgcccctacatcccggacttccggcgcgcgttcgagcacttctgcgtgcacgccggcgggcgcgcggtgctggaggaggtgcagcgcagcctgagcctgcgggacacggacatggagcccagcaagtgctccctccaccggttcggcaacaccagcagcagctcgctgtggtacgagctggcgtacgccgaggccaagggccgggtaaggcgcggccaccgcgtgtggcagatcggcttcggctcggggttcaagtgcaacagcgccgtgtggcgcgctctacgcgacgtgccgccgctgccgtcgtcgcccggcgccgcggcggggccgggggccaggaagggcgcgccgcagagctgctgcaatccctgggtggacgacgtggacaggtaccctcccaaggcgtacgtctgatgggccacgtcacgtggccacaacaattgcatgatcccaatcccattcggatttcctcacgacgaattaatgaagaagggcgtgtgagtgtgagggagaaagttatacttgtatgtattttttttttcagttttattttgtcgtttcgttttc

SEQ ID NO: 25728 - protein, 390 aa, Zea mays subsp. mays
  misc_feature (1)..(390): Ceres Seq. ID no. 13493156
MEEAAPAAVMERERLTAEMAFRGADEARREGGDPAPSIVIKIRRRLPDFARNIKLKYVKLGIRHGGSPTSLLPALCVPAVAAAAYSFVRLDVIYYSVDLLTCVAWLGTALLLLTVYYLKRPRPVYLVEFACYKPEERLKISKSAFLEMTESTGSFNEAALDFQTKITSRSALGDETYLPPGVQARPPRLNMAEARKEAEAVMFGCLDALFESTGIDPRRDVRILIVNCSLFNPTPSLASMVINHYRMREDVKSFNLGGMGCSAGLIAVDLAKDMLQANPGSYAVVLSTENITLNWYFGNDRSMLLSNCIFRMGGAAALLSNRRADAGRAKYRLLHTVRTHKAPPTSASTACTSARTRPARRASRWRGSSWRWPATRSRPTSRRWGPWCCP

SEQ ID NO: 25729 - protein, 381 aa, Zea mays subsp. mays
  misc_feature (1)..(381): Ceres Seq. ID no. 13493157
MERERLTAEMAFRGADEARREGGDPAPSIVIKIRRRLPDFARNIKLKYVKLGIRHGGSPTSLLPALCVPAVAAAAYSFVRLDVIYYSVDLLTCVAWLGTALLLLTVYYLKRPRPVYLVEFACYKPEERLKISKSAFLEMTESTGSFNEAALDFQTKITSRSALGDETYLPPGVQARPPRLNMAEARKEAEAVMFGCLDALFESTGIDPRRDVRILIVNCSLFNPTPSLASMVINHYRMREDVKSFNLGGMGCSAGLIAVDLAKDMLQANPGSYAVVLSTENITLNWYFGNDRSMLLSNCIFRMGGAAALLSNRRADAGRAKYRLLHTVRTHKAPPTSASTACTSARTRPARRASRWRGSSWRWPATRSRPTSRRWGPWCCP

SEQ ID NO: 25730 - protein, 372 aa, Zea mays subsp. mays
  misc_feature (1)..(372): Ceres Seq. ID no. 13493158
MAFRGADEARREGGDPAPSIVIKIRRRLPDFARNIKLKYVKLGIRHGGSPTSLLPALCVPAVAAAAYSFVRLDVIYYSVDLLTCVAWLGTALLLLTVYYLKRPRPVYLVEFACYKPEERLKISKSAFLEMTESTGSFNEAALDFQTKITSRSALGDETYLPPGVQARPPRLNMAEARKEAEAVMFGCLDALFESTGIDPRRDVRILIVNCSLFNPTPSLASMVINHYRMREDVKSFNLGGMGCSAGLIAVDLAKDMLQANPGSYAVVLSTENITLNWYFGNDRSMLLSNCIFRMGGAAALLSNRRADAGRAKYRLLHTVRTHKAPPTSASTACTSARTRPARRASRWRGSSWRWPATRSRPTSRRWGPWCCP

SEQ ID NO: 25731 - DNA, 1346 bp, Zea mays subsp. mays
  misc_feature (1)..(1346): Ceres Seq. ID no. 13493167
gcacgagaccattacctagaacatcctaatcgaaaaatcccagcagcaggtagcagcagcgcatgactttgtatctgcaactcgtttcgactagcctgcacgccgggagccctcgtctcgcccttctccacctccgaaggtagggtacctgatacttccctgccccgcgcatcgcatccgcggttttagtttgctggcctcggttccgatcgattcctatcctccctccgggcgggcgtccaccgacttcatcatccactcgccggccgaaccgatttgtttcgtttgccgttcgatccgcagatcctgcgagttcaacccgcgagtgagcatgtcgtcctactccccgccgccgccgccgccgcgggaccagtccatggacaccgaggcacccaacgcgcccatcaccagggagcggaggctcaaccccgatctgcaggagcagctccccaagccatatctcgcgagagctctcgaggcggtggacccgagccacccgcaggggaccaaggggcgcgacccccgcggcatgagcgtgcttcagcagcacgccgccttcttcgaccgcaatggcgacggcgtcatctacccctgggagacgtttcaaggactgcgagcgataggatgtggactcactgtatcattcgcgttctccatactgatcaacctcttcctcagttatcccactcagccgggatggttaccttctcctttgctgtccatccgtatagacaacatccacaagggtaagcacgggagtgattctgaaacctacgacactgaagggaggtttgatccatcaaagttcgatgctatattcagtaagtacggtcgaacccatcctaatgctataacaagagacgagttaagctcaatgcttcaaggaaaccgcaatacgtacgatttccttggctggttggccgctgccggtgaatggctcttactctacagcttggcgaaagacaaggatggcctcttgcagcgcgaaactgtccgtggtctatttgatgggagcctatttgagcgactggaagacgacaacaacaagaagaaatcgtcatgaatgctgagcagccttgtacagctcagggaagtgctgtcagtacaaaactaccagatataccattggtcgtgttcaaataacaaatgcttcggctttgttcatccgtcattaactatgagtgctgggatttgtttgtatgtgtgtcgtgctaccagtttcttctcctgtcgtctcacacaggtactgaattacgcatgtgttttctagtgttcgtgcggaagctgtattataagctgaaaaatgtgcgtttgaaatttatgggcaaaactgtcttcttggtctt

SEQ ID NO: 25732 - protein, 243 aa, Zea mays subsp. mays
  misc_feature (1)..(243): Ceres Seq. ID no. 13493168
MSSYSPPPPPPRDQSMDTEAPNAPITRERRLNPDLQEQLPKPYLARALEAVDPSHPQGTKGRDPRGMSVLQQHAAFFDRNGDGVIYPWETFQGLRAIGCGLTVSFAFSILINLFLSYPTQPGWLPSPLLSIRIDNIHKGKHGSDSETYDTEGRFDPSKFDAIFSKYGRTHPNAITRDELSSMLQGNRNTYDFLGWLAAAGEWLLLYSLAKDKDGLLQRETVRGLFDGSLFERLEDDNNKKKSS

SEQ ID NO: 25733 - protein, 228 aa, Zea mays subsp. mays
  misc_feature (1)..(228): Ceres Seq. ID no. 13493169
MDTEAPNAPITRERRLNPDLQEQLPKPYLARALEAVDPSHPQGTKGRDPRGMSVLQQHAAFFDRNGDGVIYPWETFQGLRAIGCGLTVSFAFSILINLFLSYPTQPGWLPSPLLSIRIDNIHKGKHGSDSETYDTEGRFDPSKFDAIFSKYGRTHPNAITRDELSSMLQGNRNTYDFLGWLAAAGEWLLLYSLAKDKDGLLQRETVRGLFDGSLFERLEDDNNKKKSS

SEQ ID NO: 25734 - protein, 177 aa, Zea mays subsp. mays
  misc_feature (1)..(177): Ceres Seq. ID no. 13493170
MSVLQQHAAFFDRNGDGVIYPWETFQGLRAIGCGLTVSFAFSILINLFLSYPTQPGWLPSPLLSIRIDNIHKGKHGSDSETYDTEGRFDPSKFDAIFSKYGRTHPNAITRDELSSMLQGNRNTYDFLGWLAAAGEWLLLYSLAKDKDGLLQRETVRGLFDGSLFERLEDDNNKKKSS

SEQ ID NO: 25735 - DNA, 1865 bp, Zea mays subsp. mays
  misc_feature (1)..(1865): Ceres Seq. ID no. 13493199
taatcgaaaaacacacgcgggcgcgctagctagtgagagtcggagatgtcgtcgccgcggccacacttcctcgtgctcaccttccctttccagggccacatcgccccggctctccgcctcgccaggcagctgctcgcggcggcgcccgacgcgctcgtgaccttctccaccaccgaggtcgcgcacaggcgcatgttcccggcaaagcccaacgacggcgccaaggactccgacgaagacggccgcctcgagttcctcccgttctccgacggcacggaggccgggtacgtccggagcgccgacctgggctcgttcaacgcctacatgacgtctttccacgccgcgggggcgcgcagcgccgcggagatcgtggacgcgctcgcggcgcggggccgccccgtgtcccgcgtcgtgtacacgctgctcctcccgtgggcggccgacgtcgcgcgggaccgcgggatcccgtccgcgctctactggatccagccggtctccgtgttcgccatctaccaccactacttccacggccacgccggcgtcgtcgccgaccaccttcacgacccgtcgttcgtcgtggagatgccgggcctggcgccacagccggtcggcgacctgccgtccttcctcaccgactccaccgacccttccaatatgttccacagcgtcttcaccacgatccgagacctgatcgaaacgcttgacaaggaaagccccaggtccactgtcctcgtcaacacgtgccgagagctcgaggtgggcgcgctcgccgccgtgggggcgcaccacgacgtgctccccgtcggcccggtgctcccatccggcggcgacgccggcatcttcaagcaggacgacgacgccaagtacatggagtggctcgacgccaaaccggcgaattccgtggtgtacgtctccttcggcagtctgaccacggtggcgagagaacatctcgaggagctgctccggggccttgaggagagcggcaggccgtacctctgcgtcatccggaaggacaacaaggctgcactcgcggatgccgagacgaaggtagacgaggagctcaagaacggcatcgtagtggagtggtgcgaccaggtgcgggtgctgtcgcacgcggcggtcgggtgcttcgtgacgcactgtggctggaactcggtgctggagagcctggcggcgggggtgcccatggtgtgcgtgccccggatgtcggaccagcgcaccaacgctcaacttgtcgtgcgcgagtggcgcgtcggcgtgcgcgcgcaggtggacgatggtggcgtgctgcgagcggcggaggtgcggcggtgcatcgacgaggcgatggggaatttggaggccgccgcggaggtgcgacgcatggcggcggagtggaagcaggtagtgacaaaggccatgggaaaaggagggtcgtcggatcgtaatctcatgacgttcgtggatggcgcgaggaacgccgtttgaagattggcatgtgtttctttctttcttcacgttcggttacaccaatccagaaaaagattagcttgttcggttacattaatccaaaagagaattgggggagaattggttacatcaatcaaccaatcctattatgaattggtgtaaccgaacaaaccataagtggtcaaaggcggatggcttccggccattgacgtacggggccagacaaccgctggctccacgcgttattgactggtccacaactacttttctagaagttacggtataggatccagttgtgttaactgtggacattatgttgtcagtagctgttaagcttttcaacgtctgcttgactggacgactgctcccgataaactaggttatcttatattcatacagaactaaatcttagacct

SEQ ID NO: 25736 - protein, 473 aa, Zea mays subsp. mays
  misc_feature (1)..(473): Ceres Seq. ID no. 13493200
MSSPRPHFLVLTFPFQGHIAPALRLARQLLAAAPDALVTFSTTEVAHRRMFPAKPNDGAKDSDEDGRLEFLPFSDGTEAGYVRSADLGSFNAYMTSFHAAGARSAAEIVDALAARGRPVSRVVYTLLLPWAADVARDRGIPSALYWIQPVSVFAIYHHYFHGHAGVVADHLHDPSFVVEMPGLAPQPVGDLPSFLTDSTDPSNMFHSVFTTIRDLIETLDKESPRSTVLVNTCRELEVGALAAVGAHHDVLPVGPVLPSGGDAGIFKQDDDAKYMEWLDAKPANSVVYVSFGSLTTVAREHLEELLRGLEESGRPYLCVIRKDNKAALADAETKVDEELKNGIVVEWCDQVRVLSHAAVGCFVTHCGWNSVLESLAAGVPMVCVPRMSDQRTNAQLVVREWRVGVRAQVDDGGVLRAAEVRRCIDEAMGNLEAAAEVRRMAAEWKQVVTKAMGKGGSSDRNLMTFVDGARNAV

SEQ ID NO: 25737 - protein, 424 aa, Zea mays subsp. mays
  misc_feature (1)..(424): Ceres Seq. ID no. 13493201
MFPAKPNDGAKDSDEDGRLEFLPFSDGTEAGYVRSADLGSFNAYMTSFHAAGARSAAEIVDALAARGRPVSRVVYTLLLPWAADVARDRGIPSALYWIQPVSVFAIYHHYFHGHAGVVADHLHDPSFVVEMPGLAPQPVGDLPSFLTDSTDPSNMFHSVFTTIRDLIETLDKESPRSTVLVNTCRELEVGALAAVGAHHDVLPVGPVLPSGGDAGIFKQDDDAKYMEWLDAKPANSVVYVSFGSLTTVAREHLEELLRGLEESGRPYLCVIRKDNKAALADAETKVDEELKNGIVVEWCDQVRVLSHAAVGCFVTHCGWNSVLESLAAGVPMVCVPRMSDQRTNAQLVVREWRVGVRAQVDDGGVLRAAEVRRCIDEAMGNLEAAAEVRRMAAEWKQVVTKAMGKGGSSDRNLMTFVDGARNAV

SEQ ID NO: 25738 - protein, 380 aa, Zea mays subsp. mays
  misc_feature (1)..(380): Ceres Seq. ID no. 13493202
MTSFHAAGARSAAEIVDALAARGRPVSRVVYTLLLPWAADVARDRGIPSALYWIQPVSVFAIYHHYFHGHAGVVADHLHDPSFVVEMPGLAPQPVGDLPSFLTDSTDPSNMFHSVFTTIRDLIETLDKESPRSTVLVNTCRELEVGALAAVGAHHDVLPVGPVLPSGGDAGIFKQDDDAKYMEWLDAKPANSVVYVSFGSLTTVAREHLEELLRGLEESGRPYLCVIRKDNKAALADAETKVDEELKNGIVVEWCDQVRVLSHAAVGCFVTHCGWNSVLESLAAGVPMVCVPRMSDQRTNAQLVVREWRVGVRAQVDDGGVLRAAEVRRCIDEAMGNLEAAAEVRRMAAEWKQVVTKAMGKGGSSDRNLMTFVDGARNAV

SEQ ID NO: 25739 - DNA, 1900 bp, Zea mays subsp. mays
  misc_feature (1)..(1900): Ceres Seq. ID no. 13493214
aacttcacataacggctgtgtcctgttcctgtagctgctctcttttatggttgatggttacgacctgaacagatcgatcgtccttcctgtcgtttcgttttctcgccggcagggcactgggtacgccgccgccgcctcaacgccaccacgctgccgccgcgccagttcgtcaccgcgagacacaagacacgtgcctcgcttccctcgggccggttggccgtggccggccgtcgctgttctgttcctatttcttggcaactccgcccgtttcacctccggaggaccgacagcgacggcgccagtagatagatgcactactgacgccactggccacctcgagttcgagtgccaagggacgccacgagaccaaccgtgaggacaggacaacggtcgcctttgcccgcggatccgcggatttcgtcttcttgggtgccatggatccagtcgccggcacggcggagcatcggggcccgttggaagtgcgcgcccgcgcgcccggcaagatcatcctcgcgggcgagcacgccgtcgtccacggctccgccgccgtcgccgctgccatcgatctctacaccaactcctccctcctcctccgccccgcaggcccaggagatggtggcggcgctggctccggcgcggtggagctggacctcagggactcgggcctcaccttctcgtggccgtgctcgcgcctccgcggggcgctgggggaggagatcagcgccaaccccggggctccggcgccgtgctcccctgaccagctggccgccattgccaggctcttgcaggaccaggagatccctgaggccaagatctggctctccgccggcctctccgccttccttttcctctacgcctccattttgggatgcaggcctggcaaggcagtggtgtcctcggacctgcccatgggcgcagggctcggctcatcagcggcattttgtgtctccatgtcgggggcgctattgactgctgctggtgcagtaagtgttggagcatgcatgggtgctgagggttgggaggtgttggagaagggtgctcttgagctggtcaaccaatgggcgttccaaggggaaaagattattcatggcaagccttctggcattgacaattccgtcagcacttttgggaaaatgatcaaattcaagaagggggaactgacaaaccttgagtcctggaacccagtcaaaatgcttattactgatacaagagttggtaggaacacaaaggcattggttgctggtgtgtctgaaagggcgtctaggcatccagatgctatggcttctgtcttccatgcagtgaactctattagtgaagagctttcaagcattgtcgagttagcagccgaggatgagatagccatcacctctaaggaggataagctagcggagcttatggagatgaaccaaggtttgcttcagtgtatgggagtcagccattcttctatagaaactgtgttgcggaccactctgaaatatagcttggtctcaaagctaactggagctggtggtggaggctgtgtgttgactctaatacccgacgttatcggccaatactgttctggagaaagtcaccacagatctcgaatctcacggttatcgctgcttcaaagttgaggttggtgggcgaggtctccaagtattccgtgtataacactcatcctatttcaaggagatgttgtaccaaacttagatggcttacctgcactgaagctgtttagattctcttcttgagttattccaagatcatgataggatattcttctcctaagcctagcggctagcaggttctgtatccagtacttgagttgctccaggattaggacattcttatgctatccctagcgatcttgtatcaaataagctcatagatgcatgatcattgctggtgtgattgttgt

SEQ ID NO: 25740 - protein, 393 aa, Zea mays subsp. mays
  misc_feature (1)..(393): Ceres Seq. ID no. 13493215
MDPVAGTAEHRGPLEVRARAPGKIILAGEHAVVHGSAAVAAAIDLYTNSSLLLRPAGPGDGGGAGSGAVELDLRDSGLTFSWPCSRLRGALGEEISANPGAPAPCSPDQLAAIARLLQDQEIPEAKIWLSAGLSAFLFLYASILGCRPGKAVVSSDLPMGAGLGSSAAFCVSMSGALLTAAGAVSVGACMGAEGWEVLEKGALELVNQWAFQGEKIIHGKPSGIDNSVSTFGKMIKFKKGELTNLESWNPVKMLITDTRVGRNTKALVAGVSERASRHPDAMASVFHAVNSISEELSSIVELAAEDEIAITSKEDKLAELMEMNQGLLQCMGVSHSSIETVLRTTLKYSLVSKLTGAGGGGCVLTLIPDVIGQYCSGESHHRSRISRLSLLQS

SEQ ID NO: 25741 - protein, 235 aa, Zea mays subsp. mays
  misc_feature (1)..(235): Ceres Seq. ID no. 13493216
MGAGLGSSAAFCVSMSGALLTAAGAVSVGACMGAEGWEVLEKGALELVNQWAFQGEKIIHGKPSGIDNSVSTFGKMIKFKKGELTNLESWNPVKMLITDTRVGRNTKALVAGVSERASRHPDAMASVFHAVNSISEELSSIVELAAEDEIAITSKEDKLAELMEMNQGLLQCMGVSHSSIETVLRTTLKYSLVSKLTGAGGGGCVLTLIPDVIGQYCSGESHHRSRISRLSLLQS

SEQ ID NO: 25742 - protein, 221 aa, Zea mays subsp. mays
  misc_feature (1)..(221): Ceres Seq. ID no. 13493217
MSGALLTAAGAVSVGACMGAEGWEVLEKGALELVNQWAFQGEKIIHGKPSGIDNSVSTFGKMIKFKKGELTNLESWNPVKMLITDTRVGRNTKALVAGVSERASRHPDAMASVFHAVNSISEELSSIVELAAEDEIAITSKEDKLAELMEMNQGLLQCMGVSHSSIETVLRTTLKYSLVSKLTGAGGGGCVLTLIPDVIGQYCSGESHHRSRISRLSLLQS

SEQ ID NO: 25743 - DNA, 1342 bp, Zea mays subsp. mays
  misc_feature (1)..(1342): Ceres Seq. ID no. 13493226
aagctagctagcagctgtaacttccaccaccagtactcagtactcacatcaaacacacacgaaccatcaataacccctctgcaggctgagggaaacgtgaacacaccatggcgaggccgccgtgctgcgacaaggagggcgtcaagaagggcccgtggacgccggaggaggacctcgtcctcgtctcctacatccaggaccacggccccggcaactggcgcgccgtccccaccagaaccgggctgatgcggtgcagcaagagctgccggcttcggtggaccaactacctccggccgggcatcaggcgcggcaacttcacggagcaggaggagaagctcatcgtccacctccaggccctcctcggcaacaggtgggcggccatcgcgtcgtacctgccggagcggacggacaacgacgtcaagaactactggaacacgcacctcaagcgcaagctgcaggccggcagcggcgacggcgacggcgacggggcggccaagccgccggcgcacaggccgccgccgtccaactccaaggggcagtgggagaggaggctgcagacggacatcaacctggcgcgccgcgcgctccgcgaggcgctcaccccgctcggcgacctcaagccgcagccgcagccgcagccgcagccgcagcgcgacggcgctggcgtgggcatcgtcggcggtgacagcccggcggcctcgagcttgtcgtcgcagtgctccccgccgccagcgcctgccgccttggggacgtacgttctcaccgcggacaacgtctcccggatgctggacggatgggccggcttgaactggaagcgccgcggcggggctccgggcacgcccggcggcgccgagaccgcgtccaccgggtcctcctcggaggtgtcgtacggcggtggcaccgccgtcgtcgcgccggccgctggtggcccggtgttcgagtacgagacgaagccgccggccgctccgttccagctgatgatgccgctgtctgcgatcgagtcgtggctgttcgacgacgacacccacttccaccgtcctgtccagagcgccagcttgctggacgccgcccccatggattattacctgttgtagctagcgtgtccagcagctgatccagaccaagctaatccgttcaagcaaggaagtcggtggctgattagtcggctagctagctacctgtttctaaagttgttagttttcattatatttagccttttctcttctaggtgggtaaaagctgagtgcgtacttccccttgtgcaagctgcataatgttgcgtgggaaaataacatatatagctcttgagaccactaacatatatatagcagatagttttwcc

SEQ ID NO: 25744 - protein, 328 aa, Zea mays subsp. mays
  misc_feature (1)..(328): Ceres Seq. ID no. 15222902
MARPPCCDKEGVKKGPWTPEEDLVLVSYIQDHGPGNWRAVPTRTGLMRCSKSCRLRWTNYLRPGIRRGNFTEQEEKLIVHLQALLGNRWAAIASYLPERTDNDVKNYWNTHLKRKLQAGSGDGDGDGAAKPPAHRPPPSNSKGQWERRLQTDINLARRALREALTPLGDLKPQPQPQPQPQRDGAGVGIVGGDSPAASSLSSQCSPPPAPAALGTYVLTADNVSRMLDGWAGLNWKRRGGAPGTPGGAETASTGSSSEVSYGGGTAVVAPAAGGPVFEYETKPPAAPFQLMMPLSAIESWLFDDDTHFHRPVQSASLLDAAPMDYYLL

SEQ ID NO: 25745 - protein, 282 aa, Zea mays subsp. mays
  misc_feature (1)..(282): Ceres Seq. ID no. 15222903
MRCSKSCRLRWTNYLRPGIRRGNFTEQEEKLIVHLQALLGNRWAAIASYLPERTDNDVKNYWNTHLKRKLQAGSGDGDGDGAAKPPAHRPPPSNSKGQWERRLQTDINLARRALREALTPLGDLKPQPQPQPQPQRDGAGVGIVGGDSPAASSLSSQCSPPPAPAALGTYVLTADNVSRMLDGWAGLNWKRRGGAPGTPGGAETASTGSSSEVSYGGGTAVVAPAAGGPVFEYETKPPAAPFQLMMPLSAIESWLFDDDTHFHRPVQSASLLDAAPMDYYLL

SEQ ID NO: 25746 - DNA, 2102 bp, Zea mays subsp. mays
  misc_feature (1)..(2102): Ceres Seq. ID no. 13493251
taatcgaaaaataatcgacacacacctaacagagtaacagacaccaaacaacgcccatcactcgcgccgtacatcctgcctcctcccgcgcgcgcgcgtgcgtgcacgctagctagctgccggtcgcctcgccaccatggtgttcgacgcgagcggcagcaggtcggcggcggcggcgtcggggaaccctctccgcgtgatcctgacgcgcgggttcgcgcggcaggtgctcgtggggcggtggttgacggtgttcgcgagcctgctcatcatggcgtcctccggcgcgacgtacatcttcgggagctactccggcacgctcaagtcgtcgctcgggtacgaccagcgcacgctcaacaccgtgtccttcttcaaggacctcggcgccaacctgggcgtcttctcggggctcatcaacgaggtgaccccgccgtgggtggtgctggccatgggcgccgccatgaacctgtccgggtacctcatggtgtacctggccgtgtccgggcgcaccgcgccgccgccgctgtggctcgtctgcctctacttcttcgtgggcgccaactcgcagtcgttcgccaacaccggcgcgctggtgacctgcgtcaagaacttccccgacagccgcggggtggtgctcggcatcctcaagggcttcgtcggcctcagcggcgccgtgtacacgcagctgtacctggccctgtacggcggcgacgacgccgagtcgctgatcctcctcgtcgcctggctccccgcggcggtgtccgtcgtgttcgtccacaccatccggtacatgccgtacccgcgccgccgtgggcaggagacgagctccgactccgaccccttcttctgcttcctctacctctccatcgcgctggcgtgcttcctcctcgtcatgatcgtggtgcagaagcaggtgcccttctcccgcgccgcgtacggcgtggccgccacgccgctgctcatcctcctcctcatgcccctcggcgtcgtcgtcaagcaggagtacaagatctaccgggagcgccagctcgacgccgccgacccgccgccgccgaccatcgtctccgcgtcggcaacggacgccatcaagaaaacagagcagcagccggcgtcgtcgtcgttctgtgggtgcgtgaggaccatgttccgtccgccggctcgtggggaggactacacgatcctgcaggcgctggtgagcgtggacatgctggtgctgttcgtggcgacaatctgcggcgtgggcgggacgctgacggcgatcgacaacatggggcagatcggggagtcgctgggctacccagccaggagcgtcaacacgttcgtgtccctgatcagcatctggaactacgcggggcgcgtgacggcgggctacgcctcggaggcggcgctggcccggtaccgcgtgccgcggccgctgctgctgacgggggtgctggcgctggcgtgcgcggggcacgtgctgatcgcgctgggcgcgccgcggtccctgtacgcggcgtcggtggtcgtcgggttctgcttcggcgcgcagtggccgctggtgttcgccatcatctcggaggtgttcgggctcaagtactactccacgctctacaacttgggcggcatggccagccccgtgggctcctacatcctgaacgtgcgcgtggcggggcggctctacgacgcggcggccgcgcggcagcgcggccgcggcaggatctgcctcggggtggagtgctaccggcggtcgttcctgatcgtcacggcggaccacggtggtcggcgcgctggtgtcgctcgtgctggtgtggcggacgtggacgttctacaggggcgacatctacgcgaggttccgggacggagacgagggcccggggcgggacgggcgcctgccggtcgaccagaaacgggaggaggagcagagggagaaggcggcggccaacggcaggaaggcgtgaggtggtgagcgggagcgggaaggcatggtcagggacgacgacgagtggggtgtacttgtacatgtgaatatagtactttttttgttgcattcacccgtgatgaccgacccttgttacctttcaaatttaaatagcctaaaaaaagccttcttgtccgtttcc

SEQ ID NO: 25747 - protein, 603 aa, Zea mays subsp. mays
  misc_feature (1)..(603): Ceres Seq. ID no. 13493252
MVFDASGSRSAAAASGNPLRVILTRGFARQVLVGRWLTVFASLLIMASSGATYIFGSYSGTLKSSLGYDQRTLNTVSFFKDLGANLGVFSGLINEVTPPWVVLAMGAAMNLSGYLMVYLAVSGRTAPPPLWLVCLYFFVGANSQSFANTGALVTCVKNFPDSRGVVLGILKGFVGLSGAVYTQLYLALYGGDDAESLILLVAWLPAAVSVVFVHTIRYMPYPRRRGQETSSDSDPFFCFLYLSIALACFLLVMIVVQKQVPFSRAAYGVAATPLLILLLMPLGVVVKQEYKIYRERQLDAADPPPPTIVSASATDAIKKTEQQPASSSFCGCVRTMFRPPARGEDYTILQALVSVDMLVLFVATICGVGGTLTAIDNMGQIGESLGYPARSVNTFVSLISIWNYAGRVTAGYASEAALARYRVPRPLLLTGVLALACAGHVLIALGAPRSLYAASVVVGFCFGAQWPLVFAIISEVFGLKYYSTLYNLGGMASPVGSYILNVRVAGRLYDAAAARQRGRGRICLGVECYRRSFLIVTADHGGRRAGVARAGVADVDVLQGRHLREVPGRRRGPGAGRAPAGRPETGGGAEGEGGGQRQEGVRW

SEQ ID NO: 25748 - protein, 558 aa, Zea mays subsp. mays
  misc_feature (1)..(558): Ceres Seq. ID no. 13493253
MASSGATYIFGSYSGTLKSSLGYDQRTLNTVSFFKDLGANLGVFSGLINEVTPPWVVLAMGAAMNLSGYLMVYLAVSGRTAPPPLWLVCLYFFVGANSQSFANTGALVTCVKNFPDSRGVVLGILKGFVGLSGAVYTQLYLALYGGDDAESLILLVAWLPAAVSVVFVHTIRYMPYPRRRGQETSSDSDPFFCFLYLSIALACFLLVMIVVQKQVPFSRAAYGVAATPLLILLLMPLGVVVKQEYKIYRERQLDAADPPPPTIVSASATDAIKKTEQQPASSSFCGCVRTMFRPPARGEDYTILQALVSVDMLVLFVATICGVGGTLTAIDNMGQIGESLGYPARSVNTFVSLISIWNYAGRVTAGYASEAALARYRVPRPLLLTGVLALACAGHVLIALGAPRSLYAASVVVGFCFGAQWPLVFAIISEVFGLKYYSTLYNLGGMASPVGSYILNVRVAGRLYDAAAARQRGRGRICLGVECYRRSFLIVTADHGGRRAGVARAGVADVDVLQGRHLREVPGRRRGPGAGRAPAGRPETGGGAEGEGGGQRQEGVRW

SEQ ID NO: 25749 - protein, 499 aa, Zea mays subsp. mays
  misc_feature (1)..(499): Ceres Seq. ID no. 13493254
MGAAMNLSGYLMVYLAVSGRTAPPPLWLVCLYFFVGANSQSFANTGALVTCVKNFPDSRGVVLGILKGFVGLSGAVYTQLYLALYGGDDAESLILLVAWLPAAVSVVFVHTIRYMPYPRRRGQETSSDSDPFFCFLYLSIALACFLLVMIVVQKQVPFSRAAYGVAATPLLILLLMPLGVVVKQEYKIYRERQLDAADPPPPTIVSASATDAIKKTEQQPASSSFCGCVRTMFRPPARGEDYTILQALVSVDMLVLFVATICGVGGTLTAIDNMGQIGESLGYPARSVNTFVSLISIWNYAGRVTAGYASEAALARYRVPRPLLLTGVLALACAGHVLIALGAPRSLYAASVVVGFCFGAQWPLVFAIISEVFGLKYYSTLYNLGGMASPVGSYILNVRVAGRLYDAAAARQRGRGRICLGVECYRRSFLIVTADHGGRRAGVARAGVADVDVLQGRHLREVPGRRRGPGAGRAPAGRPETGGGAEGEGGGQRQEGVRW

SEQ ID NO: 25750 - DNA, 897 bp, Zea mays subsp. mays
  misc_feature (1)..(897): Ceres Seq. ID no. 13493255
aatctatacacgattgacctgagctgagccgcctcccgtctcgagagggagggagagcgagagcgagagcgagagagctagcgcgcgcgatcgcaaagagatcggtgaagatgaaggtgcagtgcgacgtgtgcgcggccgaggcggcgtctgtgttctgctgcgccgacgaggccgcgctgtgcgaggcgtgcgaccgccgcgtgcaccgcgccaacaagctcgccggcaagcaccgccggctctcgctgctcggcccggcggcgccgtcctcgtcggcgcagcagacaccgccgcctccgctctgcgacatctgccaggagaagcgcgggctcctgttctgcaaggaggaccgggcgatcctgtgccgcgactgcgacgtgccggtgcacacggccagcgagctggccatgcgccacacccggttcctgctcacgggcgtgcgcctctccgcagagcccgccgcgcgcccgccgccntcggaggaggacgagaacgacagcagcggcagcagcatctccgagtacctgaccaagacgctgcccgggtggcatgtcgaggacttcctggtggacgagaccgccgccgccgcaactaccattggcgtctccacagacgtgtcgtatcaggcgggagggctagctcggacaggcgacggctactactccgcgtggatggcgccggagcagatcttctgcgagggcaagggcagcaggatgccgcagatggcgatgtgcagcagcagcaagagacccagagccacgtcctcctattcttactggtgaacaacccaacaggagacgaccgtgtcagagccgtcagccgtctgtctgtattattatttcgttcatgcatatgcctcggctggtgcattattcttaccgctagtctgcctgc

SEQ ID NO: 25751 - protein, 224 aa, Zea mays subsp. mays
  misc_feature (1)..(224): Ceres Seq. ID no. 13493256
  misc_feature (123)..(123): Xaa is any aa, unknown or other
MKVQCDVCAAEAASVFCCADEAALCEACDRRVHRANKLAGKHRRLSLLGPAAPSSSAQQTPPPPLCDICQEKRGLLFCKEDRAILCRDCDVPVHTASELAMRHTRFLLTGVRLSAEPAARPPXSEEDENDSSGSSISEYLTKTLPGWHVEDFLVDETAAAATTIGVSTDVSYQAGGLARTGDGYYSAWMAPEQIFCEGKGSRMPQMAMCSSSKRPRATSSYSYW

SEQ ID NO: 25752 - protein, 124 aa, Zea mays subsp. mays
  misc_feature (1)..(124): Ceres Seq. ID no. 13493257
  misc_feature (23)..(23): Xaa is any aa, unknown or other
MRHTRFLLTGVRLSAEPAARPPXSEEDENDSSGSSISEYLTKTLPGWHVEDFLVDETAAAATTIGVSTDVSYQAGGLARTGDGYYSAWMAPEQIFCEGKGSRMPQMAMCSSSKRPRATSSYSYW

SEQ ID NO: 25753 - DNA, 1575 bp, Zea mays subsp. mays
  misc_feature (1)..(1575): Ceres Seq. ID no. 13493270
gcacgagaccattacctagaacatcctaatcgaaaacagtcaccaccacggccaccctcctcttgtatagtcaaaccggccctctccttgtaaccttgggcaagaggagcagaaaggtcccagctttccgtgttcttctgcttctttccccgcctcgccttcgttccccccgtcaccagatctcgaggcagcggagtccggggacgccgttctttccgttgtgcttcctttgcctcttgctgccggcggccggtgattttcccgaggtctgtttgggcggcaggtagaggctattttcttggcggctggtgggatggatagccacgccgccgggtcgagctccggcgggtccggggatggcggcgcgcagcccaggaggagctccaggaagcccaagtattccaagtttactcagcaggagcttccagcttgcaagccgattcttactccaaaatgggttatttcagtattcgttcttgttggcgtgatttttgtcccgattggtattgtttcgctgcaagcttcacgacaggttgtcgagatcgttgatcggtatgatgatgcatgtgtccctgctggtgtgactgacaagcttgcttacatccggaatgatagtataccaaaaagctgcacaaggaatctgacgattacaaaggatatgaagcagccgatttttgtgtattatcagctggatgacttttaccagaatcataggaggtatgtcaagagtcgtaatgatgcacagctaagagataaaagtaaagcgactgactttaccaattgtgatcctgaggccaaaacggtagatggaaaaccaattgtgccttgtggtcttattgcatggagcctgttcaatgatacatataaactcattcacaacaatgtaaccttgagagtggagaagaaggacatctcttggaagagtgacagagaccacaaatttgggagtgatgtcttcccaacgaactttcagaaaggacctcttaaaggtggaaaaacacttgatccaagtatcccgttgagtaagcaagaggacctcattgtttggatgcggactgcagcacttccgacattcagaaagctgtatggaaggatatatgttgatctcaaggaaaacgatacaatcacagtccagttggacaacaactacaacacctatagctttggtggcaagaagaagctggtgctttctaccgcaacctggctcgggggaaagaacgattttctgggccttgcgtacctcaccgtcggcggactctgcttcttcttggcattcgcgttcaccttgctatacttgataaagccaaggaaaatgggagataacagctacctgtcatggaacagacccccttcaggtcgctgatgatgtgctttggaagttaaatgcgatacacaggcagcaccaaacagattcagattatggtcggaatgtatcttgtaccacagagaaattttatccgtgctcgtcggtgtagaatatatacggcacccttgcacatattgtacattacatcgaaacacatagctttgttttctacaaaattgtatactcaaaattgtatactcaaaagtttc

SEQ ID NO: 25754 - protein, 349 aa, Zea mays subsp. mays
  misc_feature (1)..(349): Ceres Seq. ID no. 13493271
MDSHAAGSSSGGSGDGGAQPRRSSRKPKYSKFTQQELPACKPILTPKWVISVFVLVGVIFVPIGIVSLQASRQVVEIVDRYDDACVPAGVTDKLAYIRNDSIPKSCTRNLTITKDMKQPIFVYYQLDDFYQNHRRYVKSRNDAQLRDKSKATDFTNCDPEAKTVDGKPIVPCGLIAWSLFNDTYKLIHNNVTLRVEKKDISWKSDRDHKFGSDVFPTNFQKGPLKGGKTLDPSIPLSKQEDLIVWMRTAALPTFRKLYGRIYVDLKENDTITVQLDNNYNTYSFGGKKKLVLSTATWLGGKNDFLGLAYLTVGGLCFFLAFAFTLLYLIKPRKMGDNSYLSWNRPPSGR

SEQ ID NO: 25755 - protein, 234 aa, Zea mays subsp. mays
  misc_feature (1)..(234): Ceres Seq. ID no. 13493272
MKQPIFVYYQLDDFYQNHRRYVKSRNDAQLRDKSKATDFTNCDPEAKTVDGKPIVPCGLIAWSLFNDTYKLIHNNVTLRVEKKDISWKSDRDHKFGSDVFPTNFQKGPLKGGKTLDPSIPLSKQEDLIVWMRTAALPTFRKLYGRIYVDLKENDTITVQLDNNYNTYSFGGKKKLVLSTATWLGGKNDFLGLAYLTVGGLCFFLAFAFTLLYLIKPRKMGDNSYLSWNRPPSGR

SEQ ID NO: 25756 - DNA, 946 bp, Zea mays subsp. mays
  misc_feature (1)..(946): Ceres Seq. ID no. 13493291
aaggcccagatcaaaagaaaagagcagcggagcggagcatgctcttcctccggtgccagcctcgcgtctcgtccccgtccgcatccgcgtccgcgccgccttttcgtccccgcgtcggcgtcgcggctccactgggcgtacgcgtcaccggcggaaggcgagggcaggcggtggtcgcgatggcgtccgccgacgcgcgcttggcggggattgcctcctccatccgcgtcatccccgacttccccaagccagggatcatgttccaggacatcacgacactgctgctcgaccccaaggcgttgacaccatcgacgtcttcgttgagcggtacaaggaccaagggatcaccgtagttgctggtgtggaagctagagggttcatttttggtcctcctatcgctctagccatcagtgcgaaatttgtacctttgaggaagcctaagaagttgccaggcgaggtgatctccgaagaatattctctggaatacggaactgacaagatagagatgcatgttggagctgtacaggccaacgatcgggctcttgtagtcgatgatcttattgccaccggtggaacactctgtgcagctgtcaaacttattgaacgtgttggagcaaaggttgttgagtgtgcttgcgtcattgaattggcagaactgaagggccgagacaaacttggggacaggccagtttttgttcttgtcgaagcagatgcttgagcggaacttgggacttctcttctcagtgagttagagttggtgctgttgatgctacctctctgtcaacaacaaagtttcccatgttggctatattcttgctgacacgtaataaagtttcattccaaattgtgatcccctgaatgatttgtcaatgtagacatgattgctggtccttgtatactgtggcttattattcacatcaattaaggataatcctgattggagctc

SEQ ID NO: 25757 - protein, 238 aa, Zea mays subsp. mays
  misc_feature (1)..(238): Ceres Seq. ID no. 13493292
RPRSKEKSSGAEHALPPVPASRLVPVRIRVRAAFSSPRRRRGSTGRTRHRRKARAGGGRDGVRRRALGGDCLLHPRHPRLPQARDHVPGHHDTAARPQGVDTIDVFVERYKDQGITVVAGVEARGFIFGPPIALAISAKFVPLRKPKKLPGEVISEEYSLEYGTDKIEMHVGAVQANDRALVVDDLIATGGTLCAAVKLIERVGAKVVECACVIELAELKGRDKLGDRPVFVLVEADA

SEQ ID NO: 25758 - DNA, 1635 bp, Zea mays subsp. mays
  misc_feature (1)..(1635): Ceres Seq. ID no. 13493312
actgcagcaatcacagacagacacgagcaagtgtgagtgaggaggtttgcctgcccatctccatcggccatcgctgcctccccagtccccacatccgcacacatttttacccctcgcggcggccccaccgaccgccggggcgcagcggcgtcgccgcgggcaacgccgtcacgtcacgtgcatcacgacaatctcctcctccgcctcgtcttcctgccaggccgcgggagcaccagcccagcggcagatcagtcgaggcgggcgattccagggtttagagaggagcggagatggtgaaggtcatccaggggcgcccggccgagatggggttccggatgccggcggagtgggagccgcacgagcagtgctggatgggatggcctgagcgtccagataactggagggagaatgctggtccagctcaagaggtatttgctnnaactgcaattgccatttcaaagtttgaacccgtcacgttatgtgcaagtgccaagcagtaccccaaagtccacgagctgatggaacatgaaaccaacatcagggtcgttgagatgagcatgaacgattcctggttccgcgacatgggccccacttttgtcactcataaaggggattcaggaattgcagaacaaacaatagcaggaattgattggcaattcaatgcctggggaggaatctatgacgactggagtcttgacagcgatgttgccaagaaaatagtcgagatcgagaggatccctaggtttccccaaaaaaattatccttgagggtggaagcattcatgtagatggagaaggtacatgcattacaacggaagaatgcttgctgaatcctaataggaaccccaacatgaccaaactagagatagagaatgagctgaaggattttcttggagtctcgaaggtcatctggatacctcgtggactttatggtgacgaggatacaaacggccacgttgacaacctgtgctgcttcatcaaacccggtgtgatcctgctgtcgtggaccgacgacgagaaggaccatcagtacgaacggtcggtcgaggcgctgtctgttctctcccagtccgtcgacgcgaaagggcggcagctccaagtggtgaagatccacgtccccgggcctctgtacatgacagaggaataggcacagggcgttgtttcatcggggcattctgtaccgaggccagcgggcacgaggttggccgcctcgtacgtcaacttctacatcgccaatggggggatcatagcgccttccttcggtgacaggtgggacgaggaggcgtatgcggttctccagaaggcgtttcctgatcacgaggtggtgatggtcgaaggcggacgggagatcgcgctgggaggtgggaacattcactgcatcacgcagcagcagcccgtgcgcccgtcctaggtgaaaccggcgtcgacgcgaagcgatgaagagtatgctgctcctgtgtttaagcaggtgggttggtcccctgtcgttattacgctcaccaatacgcgcgcgaaataagccgtaggtacaagttccttgacaaatactgtatgagtactattaggccttgttggtgggtcggaacgattcctaaccgaattgtttatctaatttatataaattttgattagctgg

SEQ ID NO: 25759 - protein, 158 aa, Zea mays subsp. mays
  misc_feature (1)..(158): Ceres Seq. ID no. 13493313
  misc_feature (50)..(50): Xaa is any aa, unknown or other
MVKVIQGRPAEMGFRMPAEWEPHEQCWMGWPERPDNWRENAGPAQEVFAXTAIAISKFEPVTLCASAKQYPKVHELMEHETNIRVVEMSMNDSWFRDMGPTFVTHKGDSGIAEQTIAGIDWQFNAWGGIYDDWSLDSDVAKKIVEIERIPRFPQKNYP

SEQ ID NO: 25760 - protein, 147 aa, Zea mays subsp. mays
  misc_feature (1)..(147): Ceres Seq. ID no. 13493314
  misc_feature (39)..(39): Xaa is any aa, unknown or other
MGFRMPAEWEPHEQCWMGWPERPDNWRENAGPAQEVFAXTAIAISKFEPVTLCASAKQYPKVHELMEHETNIRVVEMSMNDSWFRDMGPTFVTHKGDSGIAEQTIAGIDWQFNAWGGIYDDWSLDSDVAKKIVEIERIPRFPQKNYP

SEQ ID NO: 25761 - protein, 143 aa, Zea mays subsp. mays
  misc_feature (1)..(143): Ceres Seq. ID no. 13493315
  misc_feature (35)..(35): Xaa is any aa, unknown or other
MPAEWEPHEQCWMGWPERPDNWRENAGPAQEVFAXTAIAISKFEPVTLCASAKQYPKVHELMEHETNIRVVEMSMNDSWFRDMGPTFVTHKGDSGIAEQTIAGIDWQFNAWGGIYDDWSLDSDVAKKIVEIERIPRFPQKNYP

SEQ ID NO: 25762 - DNA, 960 bp, Zea mays subsp. mays
  misc_feature (1)..(960): Ceres Seq. ID no. 13493320
aaaacaaaatgctgtggccgagcgaatgagaggaagatggctgctaccagcctcagctcctcgttgcccagggccactgcaaaactaacaggagtgccaagatcttcgtcgtactacacccagctgatcttttgctcgaggcatcctttccagaaggcggcggcagctgcagctttccagaagctcccacccgagctcctccggctaagctacccggcgaggaataataagcatgcaagaaccagctggcggcgggccacggacaacgaccaagcggcgccggccgcggcacaaggaactaccagcacccctcctctcccaggctctcccgttccgagcgccgagagatccccggtgacgcccggcaacggccagccgcagcagccggtcgccgacgccaacggcagcgcgccgagcgagccgccgaagcgggcgccgctgacggcgcgggagcggctgcgggcggcgcgcgtgctggggaagtacgcagagccgtcggtgaaagggtcttcgtcgaaaccggccaaaccggagttcgggagcggtgtgctggacgcgctgcgcgaggcggacgcgaagaaggccgggggcgggggcgggggcgggcggcgtgggtcgcgcctacccgaggcgccgggcaacctgttcgacgacagcaagcgcgggatgcccaaggacgggtggacgttcgagctgccgttcggggtggacgtcttcctcgtcctcgtctccttcacgctcatcaccaccatcatgttcggcaccgccttcctcgtgtggaagctcggcgccatacacttcaacgagtactagcctttagactgtctctacttgattggaggataaagggcgattatgcagtgctagacgagagaattgtgtgtattcgtaatgtactgtattgaccacagacactggtctgccgaagattttcgagaaaacatagaaatgtgtgattgc

SEQ ID NO: 25763 - protein, 270 aa, Zea mays subsp. mays
  misc_feature (1)..(270): Ceres Seq. ID no. 13493321
KTKCCGRANERKMAATSLSSSLPRATAKLTGVPRSSSYYTQLIFCSRHPFQKAAAAAAFQKLPPELLRLSYPARNNKHARTSWRRATDNDQAAPAAAQGTTSTPPLPGSPVPSAERSPVTPGNGQPQQPVADANGSAPSEPPKRAPLTARERLRAARVLGKYAEPSVKGSSSKPAKPEFGSGVLDALREADAKKAGGGGGGGRRGSRLPEAPGNLFDDSKRGMPKDGWTFELPFGVDVFLVLVSFTLITTIMFGTAFLVWKLGAIHFNEY

SEQ ID NO: 25764 - protein, 258 aa, Zea mays subsp. mays
  misc_feature (1)..(258): Ceres Seq. ID no. 13493322
MAATSLSSSLPRATAKLTGVPRSSSYYTQLIFCSRHPFQKAAAAAAFQKLPPELLRLSYPARNNKHARTSWRRATDNDQAAPAAAQGTTSTPPLPGSPVPSAERSPVTPGNGQPQQPVADANGSAPSEPPKRAPLTARERLRAARVLGKYAEPSVKGSSSKPAKPEFGSGVLDALREADAKKAGGGGGGGRRGSRLPEAPGNLFDDSKRGMPKDGWTFELPFGVDVFLVLVSFTLITTIMFGTAFLVWKLGAIHFNEY

SEQ ID NO: 25765 - DNA, 1046 bp, Zea mays subsp. mays
  misc_feature (1)..(1046): Ceres Seq. ID no. 13493323
taatcgaaaaatcgccgccgcatccacccacgggcccaccaaacgacctcgctgcgcccacccgtccgcccccatctagctcagcggtcccgcacaaccgaccactcggcagaatgccgccgcttcggcctccgccgccgcggctcctgctcaacaacgtctcgtgcatgcggaacgcgcagacggtgctccgcgacatcaacctcagcgtccacgacggcacagccctcgtcctgaccggtgcgaacggctccggcaagaccaccctcctccgcatgctggcgggcttttcgcgtccctcggcgggggagatcctctggaatggtcacgacatcacctccccgggcgttttccagcagtacaagctgcagctcaactggatgtcgctcaaggacgccgtcaaagagaagctcacggtgctcgagaacgtccagtggttcgagctcctcgaggggaaggacggcagcaggtcgggcccagccatcgagctcatgggcctcggcaggctcatgaacgagaaggccaggatgctctccatggggcagaggaagcggctgcagctcgccaggctgctcgctatcgaccgacccatctggctgctggacgagccctcagtcgcgctggacgcagagggtaccaggctgcttgaatacattatcgcagagcatcggaagaagggtggcatcgtgtttgtggccacacatctgcccattcagattgaggattctatgtcgcttcggcttccgcagaggtttccccggaggaagacgctggttgatcttgtccgctgatgtcaatgtgagattgtgagcacaggaatttagctgtatctctctaattcctctccagctatctgtctgattgctgttggagcaattactctggtgctgcatttgtcatcctatttttgacaacatggcaacacattgtcgatgttgataatctgtaggggtctttgtgatcaccgattcgatgcattggcccatgtatttggggacactagaaagcatttgccatggctgatatatgtatggctgttctttgtg

SEQ ID NO: 25766 - protein, 262 aa, Zea mays subsp. mays
  misc_feature (1)..(262): Ceres Seq. ID no. 13493324
IEKSPPHPPTGPPNDLAAPTRPPPSSSAVPHNRPLGRMPPLRPPPPRLLLNNVSCMRNAQTVLRDINLSVHDGTALVLTGANGSGKTTLLRMLAGFSRPSAGEILWNGHDITSPGVFQQYKLQLNWMSLKDAVKEKLTVLENVQWFELLEGKDGSRSGPAIELMGLGRLMNEKARMLSMGQRKRLQLARLLAIDRPIWLLDEPSVALDAEGTRLLEYIIAEHRKKGGIVFVATHLPIQIEDSMSLRLPQRFPRRKTLVDLVR

SEQ ID NO: 25767 - protein, 225 aa, Zea mays subsp. mays
  misc_feature (1)..(225): Ceres Seq. ID no. 13493325
MPPLRPPPPRLLLNNVSCMRNAQTVLRDINLSVHDGTALVLTGANGSGKTTLLRMLAGFSRPSAGEILWNGHDITSPGVFQQYKLQLNWMSLKDAVKEKLTVLENVQWFELLEGKDGSRSGPAIELMGLGRLMNEKARMLSMGQRKRLQLARLLAIDRPIWLLDEPSVALDAEGTRLLEYIIAEHRKKGGIVFVATHLPIQIEDSMSLRLPQRFPRRKTLVDLVR

SEQ ID NO: 25768 - protein, 207 aa, Zea mays subsp. mays
  misc_feature (1)..(207): Ceres Seq. ID no. 13493326
MRNAQTVLRDINLSVHDGTALVLTGANGSGKTTLLRMLAGFSRPSAGEILWNGHDITSPGVFQQYKLQLNWMSLKDAVKEKLTVLENVQWFELLEGKDGSRSGPAIELMGLGRLMNEKARMLSMGQRKRLQLARLLAIDRPIWLLDEPSVALDAEGTRLLEYIIAEHRKKGGIVFVATHLPIQIEDSMSLRLPQRFPRRKTLVDLVR

SEQ ID NO: 25769 - DNA, 1580 bp, Zea mays subsp. mays
  misc_feature (1)..(1580): Ceres Seq. ID no. 13493331
agctccccactctctctccgctgctgcctccgcggacggattccatccccggccctataagtgtggcttcgggacggcgcttcccatccgacaccggcgccttcgcggactgggtcgcctcctncgncgccgcggcgcgcggggacgacctctccctcggcttcaatgccagcgcggcggccgccgnngccgcggcnncctcnngcgcctcgctgggcgcgggcctctggggcccggcgtcctccgcctccgccgccatgcgccaggcggccgccatgaactacgggatggccgacgtggggatggtcgtcgtcgcgcccgccgcctccttccaccacacgcaccancaccaccaccaccacgaggccgccgccgccgccgccgccgcggctgcggcggcctccggcgaccccatcttcccgctgctctccggcggcccctgcgtgcttgatccggacaagtcggcctccgccagcgccatccagttctggcagcagcagcctccgccgccgtcgtcgccggctgctgcagcgggcgctaaccctaaccctagcgccagccccttcgcctacctcaagaagcccctcccgatgctggacgccggcgccggctcctcaggctccggcgccaccacgtgccaggactgcggcaaccaagcgaagaaggactgcggccacaaccggtgccgcacctgctgcaagagccgcggcttcgactgctccacgcacgtcaagagcacctgggtccccgccgcccgccgccgcgagcgccagcagctcgccgcctccggctccgcctcctcctcccccgccaccgcatccgcggcggccgtcgccgcgtccgcgtccaagaagccccgcctcctctcgtcgcagaccaccacctcgcacacgtccacctccaacgccaccacgccccgaagcttcgacaccacgtccagccaccaagacgcgtcgttcagggacagcctcccgaggcaggtgcgcgcgccggcggtgttcaagtgcgtgcgcgtgacgtccatcgaggacggcgaggacgagtacgcgtaccaggcgacggtcaccatcaacggccacctgttcaaggggttcctgtacgaccagggccccgacgacgggcgccacgcggcccaccagcaacgacgactgcacggcccggcgggtgcccaacatctccgagctccatctcggagcggcgtctggttccggcgccggcaccggcacctcgatgtcgatggctcctcccacggggctgtacggtgggggtggcggaggacatcatccgcacattctcggcgggtcgtcgagctacggtaacaccatgaactgatggagtacgttcctcccttctacaccggaagagtcccggcccgttaatttccattccttgttgctcttcattttccacgctatagtagcagagttcaattttctcagccttgtcacccggcgccatagatagcggggcatcaatgcatggcgttattctgttctacctccttcattccatcgtcctactgtgttatttagccattcgttggtgtataataacatcgatgagttgttttttcttcttcc

SEQ ID NO: 25770 - protein, 438 aa, Zea mays subsp. mays
  misc_feature (1)..(438): Ceres Seq. ID no. 13493332
  misc_feature (41)..(41): Xaa is any aa, unknown or other
  misc_feature (42)..(42): Xaa is any aa, unknown or other
  misc_feature (62)..(62): Xaa is any aa, unknown or other
  misc_feature (65)..(65): Xaa is any aa, unknown or other
  misc_feature (66)..(66): Xaa is any aa, unknown or other
  misc_feature (67)..(67): Xaa is any aa, unknown or other
  misc_feature (68)..(68): Xaa is any aa, unknown or other
  misc_feature (115)..(115): Xaa is any aa, unknown or other
LPTLSPLLPPRTDSIPGPISVASGRRFPSDTGAFADWVASXXAAARGDDLSLGFNASAAAAXAAXXXXASLGAGLWGPASSASAAMRQAAAMNYGMADVGMVVVAPAASFHHTHXHHHHHEAAAAAAAAAAAASGDPIFPLLSGGPCVLDPDKSASASAIQFWQQQPPPPSSPAAAAGANPNPSASPFAYLKKPLPMLDAGAGSSGSGATTCQDCGNQAKKDCGHNRCRTCCKSRGFDCSTHVKSTWVPAARRRERQQLAASGSASSSPATASAAAVAASASKKPRLLSSQTTTSHTSTSNATTPRSFDTTSSHQDASFRDSLPRQVRAPAVFKCVRVTSIEDGEDEYAYQATVTINGHLFKGFLYDQGPDDGRHAAHQQRRLHGPAGAQHLRAPSRSGVWFRRRHRHLDVDGSSHGAVRWGWRRTSSAHSRRVVELR

SEQ ID NO: 25771 - protein, 353 aa, Zea mays subsp. mays
  misc_feature (1)..(353): Ceres Seq. ID no. 13493333
  misc_feature (30)..(30): Xaa is any aa, unknown or other
MRQAAAMNYGMADVGMVVVAPAASFHHTHXHHHHHEAAAAAAAAAAAASGDPIFPLLSGGPCVLDPDKSASASAIQFWQQQPPPPSSPAAAAGANPNPSASPFAYLKKPLPMLDAGAGSSGSGATTCQDCGNQAKKDCGHNRCRTCCKSRGFDCSTHVKSTWVPAARRRERQQLAASGSASSSPATASAAAVAASASKKPRLLSSQTTTSHTSTSNATTPRSFDTTSSHQDASFRDSLPRQVRAPAVFKCVRVTSIEDGEDEYAYQATVTINGHLFKGFLYDQGPDDGRHAAHQQRRLHGPAGAQHLRAPSRSGVWFRRRHRHLDVDGSSHGAVRWGWRRTSSAHSRRVVELR

SEQ ID NO: 25772 - protein, 347 aa, Zea mays subsp. mays
  misc_feature (1)..(347): Ceres Seq. ID no. 13493334
  misc_feature (24)..(24): Xaa is any aa, unknown or other
MNYGMADVGMVVVAPAASFHHTHXHHHHHEAAAAAAAAAAAASGDPIFPLLSGGPCVLDPDKSASASAIQFWQQQPPPPSSPAAAAGANPNPSASPFAYLKKPLPMLDAGAGSSGSGATTCQDCGNQAKKDCGHNRCRTCCKSRGFDCSTHVKSTWVPAARRRERQQLAASGSASSSPATASAAAVAASASKKPRLLSSQTTTSHTSTSNATTPRSFDTTSSHQDASFRDSLPRQVRAPAVFKCVRVTSIEDGEDEYAYQATVTINGHLFKGFLYDQGPDDGRHAAHQQRRLHGPAGAQHLRAPSRSGVWFRRRHRHLDVDGSSHGAVRWGWRRTSSAHSRRVVELR

SEQ ID NO: 25773 - DNA, 1099 bp, Zea mays subsp. mays
  misc_feature (1)..(1099): Ceres Seq. ID no. 13493423
aactgcagccgtcggatactcccacaggagcgttccgaagccctaatgctcgcccttcccataagtactctcctctgaccacgccgccgccatttccttcctcctcccacctcggcggccggcctcctcttctcttcacccacacgctggtcatagagatgtcggctgcagaggcgaaggcggcggcggtcccggagtctgtgctgcggaagcgcaagcgggaggagcaatgggcagcggacaagaaggagaaggcgctcgcggacaggaagaaggcgctcgagagccgcaagatcatcttcgcccgcgccaagcagtacgccgaggagtaccacgcccaggagaaggagcttgtgcagctcaagcgtgaggcccggttgaagggtgggttctatgtgagcccagaggccaagcttctgtttgtggttcgcatccgtggtatcaatgccatgcaccccaagacccgcaagatcttgcagctcctgcgattgaggcagatcttcaacggtgtcttcctcaaggttaacaaggcaaccattaacatgctgcgcagggtggagccatatgttgcgtacggataccccaacctgaagagcgttagggagttgatctacaagagaggttacgggaagctgaacaagcagaggattccacttagcaacaacagtgtcatcgaggagggcctcgggaagcacaatatcatctgcattgaggaccttgtccacgagatcatgacggtgggcccgcacttcaaggaggccaacaacttcctctggccgttcaagctgaaggcacccctcggcggcctcaagaagaagaggaaccactacgtggagggcggtgacgccggaaaccgtgagaactacatcaacgagctcatcaagaggatgaactaggttctctcttgtatcctgtgagaatgcttttctgtgtcagcgtggttgtttttgctctagtaagttgacggataatgatggatatgcaattttttttggtgttcattggctctaatacagccagacttcactaggaactgtgtcgctgtttatgttggcagtagcttctggaggtttttgtgtacttttgttatttttattct

SEQ ID NO: 25774 - protein, 297 aa, Zea mays subsp. mays
  misc_feature (1)..(297): Ceres Seq. ID no. 13493424
LQPSDTPTGAFRSPNARPSHKYSPLTTPPPFPSSSHLGGRPPLLFTHTLVIEMSAAEAKAAAVPESVLRKRKREEQWAADKKEKALADRKKALESRKIIFARAKQYAEEYHAQEKELVQLKREARLKGGFYVSPEAKLLFVVRIRGINAMHPKTRKILQLLRLRQIFNGVFLKVNKATINMLRRVEPYVAYGYPNLKSVRELIYKRGYGKLNKQRIPLSNNSVIEEGLGKHNIICIEDLVHEIMTVGPHFKEANNFLWPFKLKAPLGGLKKKRNHYVEGGDAGNRENYINELIKRMN

SEQ ID NO: 25775 - protein, 245 aa, Zea mays subsp. mays
  misc_feature (1)..(245): Ceres Seq. ID no. 13493425
MSAAEAKAAAVPESVLRKRKREEQWAADKKEKALADRKKALESRKIIFARAKQYAEEYHAQEKELVQLKREARLKGGFYVSPEAKLLFVVRIRGINAMHPKTRKILQLLRLRQIFNGVFLKVNKATINMLRRVEPYVAYGYPNLKSVRELIYKRGYGKLNKQRIPLSNNSVIEEGLGKHNIICIEDLVHEIMTVGPHFKEANNFLWPFKLKAPLGGLKKKRNHYVEGGDAGNRENYINELIKRMN

SEQ ID NO: 25776 - protein, 148 aa, Zea mays subsp. mays
  misc_feature (1)..(148): Ceres Seq. ID no. 13493426
MHPKTRKILQLLRLRQIFNGVFLKVNKATINMLRRVEPYVAYGYPNLKSVRELIYKRGYGKLNKQRIPLSNNSVIEEGLGKHNIICIEDLVHEIMTVGPHFKEANNFLWPFKLKAPLGGLKKKRNHYVEGGDAGNRENYINELIKRMN

SEQ ID NO: 25777 - DNA, 1057 bp, Zea mays subsp. mays
  misc_feature (1)..(1057): Ceres Seq. ID no. 13493461
ggtgccccccacccccacccccacccccaccccgtgtgtgcgcggaaatgtcgccgacgaagtcatcgtgcctcgcggacgccggcgcggagccgttccgggtgttcgtgggctacgactcccgcgaggacgtggcgtaccgcgtgtgccggcgctcccttctgcgccgctcgtccatcccgctggagatcaccccgatcgtgcagcaggagctccgcgaggcggggctgtactggcgggagcgcggcccgacggagagcaccgagttctccttcacccgcttcctgacgccctacctggcggggtaccgcgggtgggcgctgttcgtggactgcgacttcctgttcgtggccgacgtagccgggctggtggcgctggcgcgcgccgacccgcggcgcgcggtgctgtgcgtgcaccacgactacacgcccacggaggccaccaagatggacggcgccgtgcagacggcgtaccctcgcaagaactggtcctccatggtgctcttcaactgcggccaccccaagaaccgcgccgcgctcacgccggaggccgtcagcacgcgcagccggtgcgtacctgcaccgcttcatgtggctcgacgaccgacgagatcggcgaggtgccgttcgtgtggaacttcctcgtggggcacaaccgcgtcgaccccgccgacgaggctggcacggcgccgcgcgctatacactacacgtccggcgggccgtggttcgataggtacaaggactgcgaattcgccgacctctgggtccaggagcgcgacgcctacgaggtcgacaaggacgtggatgatggatccatgcccatacgagaggcacctgcaatggtgtcggtggatgcacgcgattgagacggtcgaccatctccctgctgcccacgcgcgcggtcgtgtgctgtttgttgtttacgttgtgtgctgtctcctgtgcgcgcgcgcgctaccagtgtagtaccagtaccacatgtccatgtccatgcatgtactgtctgtcacgttggtgcgttatcgatggtagaataaagaggcgaccgttgcatgccc

SEQ ID NO: 25778 - protein, 320 aa, Zea mays subsp. mays
  misc_feature (1)..(320): Ceres Seq. ID no. 13493462
CPPPPPPPPPRVCAEMSPTKSSCLADAGAEPFRVFVGYDSREDVAYRVCRRSLLRRSSIPLEITPIVQQELREAGLYWRERGPTESTEFSFTRFLTPYLAGYRGWALFVDCDFLFVADVAGLVALARADPRRAVLCVHHDYTPTEATKMDGAVQTAYPRKNWSSMVLFNCGHPKNRAALTPEAVSTRSRCVPAPLHVARRPTRSARCRSCGTSSWGTTASTPPTRLARRRALYTTRPAGRGSIGTRTANSPTSGSRSATPTRSTRTWMMDPCPYERHLQWCRWMHAIETVDHLPAAHARGRVLFVVYVVCCLLCARALPV

SEQ ID NO: 25779 - protein, 305 aa, Zea mays subsp. mays
  misc_feature (1)..(305): Ceres Seq. ID no. 13493463
MSPTKSSCLADAGAEPFRVFVGYDSREDVAYRVCRRSLLRRSSIPLEITPIVQQELREAGLYWRERGPTESTEFSFTRFLTPYLAGYRGWALFVDCDFLFVADVAGLVALARADPRRAVLCVHHDYTPTEATKMDGAVQTAYPRKNWSSMVLFNCGHPKNRAALTPEAVSTRSRCVPAPLHVARRPTRSARCRSCGTSSWGTTASTPPTRLARRRALYTTRPAGRGSIGTRTANSPTSGSRSATPTRSTRTWMMDPCPYERHLQWCRWMHAIETVDHLPAAHARGRVLFVVYVVCCLLCARALPV

SEQ ID NO: 25780 - protein, 287 aa, Zea mays subsp. mays
  misc_feature (1)..(287): Ceres Seq. ID no. 13493464
VPPTPTPTPTPCVRGNVADEVIVPRGRRRGAVPGVRGLRLPRGRGVPRVPALPSAPLVHPAGDHPDRAAGAPRGGAVLAGARPDGEHRVLLHPLPDALPGGVPRVGAVRGLRLPVRGRRSRAGGAGARRPAARGAVRAPRLHAHGGHQDGRRRADGVPSQELVLHGALQLRPPQEPRRAHAGGRQHAQPVRTCTASCGSTTDEIGEVPFVWNFLVGHNRVDPADEAGTAPRAIHYTSGGPWFDRYKDCEFADLWVQERDAYEVDKDVDDGSMPIREAPAMVSVDARD

SEQ ID NO: 25781 - DNA, 758 bp, Zea mays subsp. mays
  misc_feature (1)..(758): Ceres Seq. ID no. 13493495
atcaaccctaaaccacccactatacccacccgcccggctagggttttgccaccatggccgccgccgcggccgccgcccggaggctcctctcccgccgcgcctcctcgaactcgctctccgcgttcctccgccgcggcgctgccccggagcagtcgctgctgcgcccggccgtcgtcgcggcggcctcccgcctcggcttcccgcgcgggatggcgcggcggcctggcggggacggctacggcgcgggccgggaccgcgcgcccacggagatggcgccgctgttccccggctgcgactacgagcactggctcatcgtgatggacaagcccggcggggagggcgccaccaagcagcagatgatcgactgctacatccagaccctcgccaaggtcctcggaagtgaggaggaggcgaagaagaagatctacaacgtctcgtgcgagcgctatttcgggttcgggtgcgagatcgatgaggagacatctaacaagctcgaggggctccctggtgttctctttgtgctaccggattcgtatgttgaccctgagtacaaggactacggagctgaactgcttgttaacggtgagattgttcagaggcctcctgagaggcagagaagggtcgagcccgtgccacagagggctgcagacaggcctaggtacaatgacaggacccgctacgcacgcaggagggagaaccagcgatgagatgaaaaaagtccacaataacaagttcaggtggtttgagctctgtaattc

SEQ ID NO: 25782 - protein, 217 aa, Zea mays subsp. mays
  misc_feature (1)..(217): Ceres Seq. ID no. 13493496
MAAAAAAARRLLSRRASSNSLSAFLRRGAAPEQSLLRPAVVAAASRLGFPRGMARRPGGDGYGAGRDRAPTEMAPLFPGCDYEHWLIVMDKPGGEGATKQQMIDCYIQTLAKVLGSEEEAKKKIYNVSCERYFGFGCEIDEETSNKLEGLPGVLFVLPDSYVDPEYKDYGAELLVNGEIVQRPPERQRRVEPVPQRAADRPRYNDRTRYARRRENQR

SEQ ID NO: 25783 - protein, 165 aa, Zea mays subsp. mays
  misc_feature (1)..(165): Ceres Seq. ID no. 13493497
MARRPGGDGYGAGRDRAPTEMAPLFPGCDYEHWLIVMDKPGGEGATKQQMIDCYIQTLAKVLGSEEEAKKKIYNVSCERYFGFGCEIDEETSNKLEGLPGVLFVLPDSYVDPEYKDYGAELLVNGEIVQRPPERQRRVEPVPQRAADRPRYNDRTRYARRRENQR

SEQ ID NO: 25784 - protein, 145 aa, Zea mays subsp. mays
  misc_feature (1)..(145): Ceres Seq. ID no. 13493498
MAPLFPGCDYEHWLIVMDKPGGEGATKQQMIDCYIQTLAKVLGSEEEAKKKIYNVSCERYFGFGCEIDEETSNKLEGLPGVLFVLPDSYVDPEYKDYGAELLVNGEIVQRPPERQRRVEPVPQRAADRPRYNDRTRYARRRENQR

SEQ ID NO: 25785 - DNA, 1358 bp, Zea mays subsp. mays
  misc_feature (1)..(1358): Ceres Seq. ID no. 13493529
aaaccaacccacgccatcatcatccgtcaatccatccatccatccgcttgtccctaccacctccaccaaccaaaacccccaaccgccgaggtcaccggcgactccgtcctcgccgcgccgcgccgtgaggatgtcgttccactaccacgaccacgggctgtccatggacgccgcggcagcggcggccgccgccgcgtcgtcgccgaaccctagcggcttctcccccggcatcggcggggaaagggagaaggcggccatcgcggcgcacccgctgtacgagcgcctcctggaggcgcacgtcgcctgcctacgcgtcgccacccccgtcgaccagctcccccgcatcgacgcgcagatcgccgcgcgccccccgccgctcgccgcggccgccggggccgcggccgcgggaggcccgtccggcggggaggagctcgacctcttcatgacgcactatgtattgctcctttgctcattcaaggagcagttgcagcagcatgtacgtgttcatgcaatggaagcagtgatgggttgctgggagcttgaacaatctttacaaagcctaacaggggcatctccgggtgaaggcactggaggaaccatgtctgacgatgaagataaccaggtggatagtgaagccaacatgttcgatggaaatgatggatcagacggtatgggctttggccccctaatactgacagagggtgaacggtccttagttgagcgtgtacggaaggagctgaagaacgagcttaagcagggttacaaggaaaagcttgtcgatatcagggaagagatcatgcgcaaacgcagggctgggaaacttcctggagataccgcatctgtactgaaagcttggtggcaagctcattcgaagtggccgtacccaactgaagacgacaaggccagactggtgcaggaaacggggttgcagctaaagcagatcaacaactggttcattaaccaacgcaaacggaactggcacagcaacccaacatcctcggctgaaaagaccaagaagaaaaggtgatgatggcccagagcaatcttggcaaaaagctagacatgtccactatactttattatggcgaagtacattctccctcacttcgtaggcaagagggaaaggtatcttgggtgacttgagtggccacctaatgcgcaagtttgaccacgtgtggggctggggttgggtagtgacctcagcagtatagcattcgctaacgtgatgtgggaatcacgtgttgcagtagaaccggcgagcgggaggggggtaatttatgttgtattgtaattactatatatgaaagacggacacaaacgtcgctcctcgtacgtccacgtcgtcacttttttcagcg

SEQ ID NO: 25786 - protein, 341 aa, Zea mays subsp. mays
  misc_feature (1)..(341): Ceres Seq. ID no. 13493530
NQPTPSSSVNPSIHPLVPTTSTNQNPQPPRSPATPSSPRRAVRMSFHYHDHGLSMDAAAAAAAAASSPNPSGFSPGIGGEREKAAIAAHPLYERLLEAHVACLRVATPVDQLPRIDAQIAARPPPLAAAAGAAAAGGPSGGEELDLFMTHYVLLLCSFKEQLQQHVRVHAMEAVMGCWELEQSLQSLTGASPGEGTGGTMSDDEDNQVDSEANMFDGNDGSDGMGFGPLILTEGERSLVERVRKELKNELKQGYKEKLVDIREEIMRKRRAGKLPGDTASVLKAWWQAHSKWPYPTEDDKARLVQETGLQLKQINNWFINQRKRNWHSNPTSSAEKTKKKR

SEQ ID NO: 25787 - protein, 298 aa, Zea mays subsp. mays
  misc_feature (1)..(298): Ceres Seq. ID no. 13493531
MSFHYHDHGLSMDAAAAAAAAASSPNPSGFSPGIGGEREKAAIAAHPLYERLLEAHVACLRVATPVDQLPRIDAQIAARPPPLAAAAGAAAAGGPSGGEELDLFMTHYVLLLCSFKEQLQQHVRVHAMEAVMGCWELEQSLQSLTGASPGEGTGGTMSDDEDNQVDSEANMFDGNDGSDGMGFGPLILTEGERSLVERVRKELKNELKQGYKEKLVDIREEIMRKRRAGKLPGDTASVLKAWWQAHSKWPYPTEDDKARLVQETGLQLKQINNWFINQRKRNWHSNPTSSAEKTKKKR

SEQ ID NO: 25788 - protein, 287 aa, Zea mays subsp. mays
  misc_feature (1)..(287): Ceres Seq. ID no. 13493532
MDAAAAAAAAASSPNPSGFSPGIGGEREKAAIAAHPLYERLLEAHVACLRVATPVDQLPRIDAQIAARPPPLAAAAGAAAAGGPSGGEELDLFMTHYVLLLCSFKEQLQQHVRVHAMEAVMGCWELEQSLQSLTGASPGEGTGGTMSDDEDNQVDSEANMFDGNDGSDGMGFGPLILTEGERSLVERVRKELKNELKQGYKEKLVDIREEIMRKRRAGKLPGDTASVLKAWWQAHSKWPYPTEDDKARLVQETGLQLKQINNWFINQRKRNWHSNPTSSAEKTKKKR

SEQ ID NO: 25789 - DNA, 1112 bp, Zea mays subsp. mays
  misc_feature (1)..(1112): Ceres Seq. ID no. 13493585
cttccctagaacatcctaatcgaaaaaccagccactagctaggacgtcgctgcttgcttccacgcctccttacggtttatccaagcacagcgagagacctttgcgcgtgtgcgctctcgttcgagctagcagcggcggcatgctgacgaggcggcacggagggttccggctcggccggaagctgctcagcgtctggcgctgggcgctctgccgccgccggcgccgccgcgttcgcggccgcgggtacctccgcctgcagccgtgccaacgaggaggaggcaccaccaaatccccgtccccgtcccccatggcggcgcatgcagtggtaagcatcaagatgatgcagcagcagcagcagaagcacgacgactctgctggctcgccgcggatgctcacgtgggggcggtcgctggcgcggcgggtgaggctcctgcgccggcgcgggggaggaggagggaaggaccggctgctggaggacgccgccgcggatgccaccacgcccaaggggcaggtggccgtgtacgtggtcggcgggggcgagtcgatgcgctacgtggtccccgtggtgtacttcaaccacccgctcttcggggagctgctgcgcgaggccgaggaggagttcggcttccagcaccccggcgggatcaccatcccgtgcgcggcctcgcggttcgagcgcgccgccgccgtggccgccgcaggcggcggcgccgccgccgggaagaaggtgccttctgtctggtggtagcagcacgtggccacacggtggccggtgtacatacatacacacgtgcatgcccatcaggatcaggccgcagccggccctcaggaggatcccgatcgattcccatgggaaatggggactgacgatccttctatatattttttctctccttctcgtttgacttttcctttttgccctcttgcgccgtttgcttgtgtggattgagcatgtgcatgggatgcgaggaggatggatagttgtagtttgtttgagagatgaacaaggcttttttttaatttagggtcagcataaacatgttcccattccccccccaacttgcaaagtccatcatcatatatatccatttattagagagcatctaatatgc

SEQ ID NO: 25790 - protein, 202 aa, Zea mays subsp. mays
  misc_feature (1)..(202): Ceres Seq. ID no. 13493586
MLTRRHGGFRLGRKLLSVWRWALCRRRRRRVRGRGYLRLQPCQRGGGTTKSPSPSPMAAHAVVSIKMMQQQQQKHDDSAGSPRMLTWGRSLARRVRLLRRRGGGGGKDRLLEDAAADATTPKGQVAVYVVGGGESMRYVVPVVYFNHPLFGELLREAEEEFGFQHPGGITIPCAASRFERAAAVAAAGGGAAAGKKVPSVWW

SEQ ID NO: 25791 - protein, 146 aa, Zea mays subsp. mays
  misc_feature (1)..(146): Ceres Seq. ID no. 13493587
MAAHAVVSIKMMQQQQQKHDDSAGSPRMLTWGRSLARRVRLLRRRGGGGGKDRLLEDAAADATTPKGQVAVYVVGGGESMRYVVPVVYFNHPLFGELLREAEEEFGFQHPGGITIPCAASRFERAAAVAAAGGGAAAGKKVPSVWW

SEQ ID NO: 25792 - protein, 138 aa, Zea mays subsp. mays
  misc_feature (1)..(138): Ceres Seq. ID no. 13493588
MPPRPRGRWPCTWSAGASRCATWSPWCTSTTRSSGSCCARPRRSSASSTPAGSPSRARPRGSSAPPPWPPQAAAPPPGRRCLLSGGSSTWPHGGRCTYIHTCMPIRIRPQPALRRIPIDSHGKWGLTILLYIFSLLLV

SEQ ID NO: 25793 - DNA, 1401 bp, Zea mays subsp. mays
  misc_feature (1)..(1401): Ceres Seq. ID no. 13493590
aatcgaaaaccaccacaggcacacacacctccctttttcattcgagttcgaggagaaggcggcggaggcggccatggagctcgacgagcaggccttcctggaggagatcctctccctgcgcagggacgcctgggactgcaatgtgtccatgggggacctcttcgccccggcggcggccgccgccattgactgctccttccacaaccagcaggcgcccaccgtcagcgtcctccccaccttcaccgcctcctgcgccgagccgccggccttcgactgcctcagcgaggtctacggcgccgccgccgcgttcggcgggcccaatgccggcgacgagatggcgttcctccacgtcgcggagcccaaggaggcgctgcagctggacgacaacgccggcctcggggtgtgcaaggtggagcccggcctggtggagagcgacggcggcggcgccgccgcgccgacgcccgcccctgcggcgtccaagaagaagaggaccgaggggatgccgtctaagaacctcatggccgagcgccgccgccgcaagcgcctcaacgaccgcctctccatgctgcgctccgtcgtgcccaagatcagcaagatggaccggacgtcgatcctgggcgacacgatcgactacatgaaggagctgctggagaggatcaagctgctgcaggaggagatcgagcagcagggggaggcgccggcgggcatgctcagcgtcttccgggagctcaaccccaacgagatggtggccaggaacacccccaagttggacgtggagcggaaggagggcggcgacacacgggtggagatctactgcggcgccaggccggggctgctgctgtccacggtgagcacgctggacgcgctagggctggacatccagcagtgcgtcgtcagctgcttcaacgacttcggcatgcacgcctcctgctccgagatgcagagggacatgatcagcgccgacgcgataaagcaggagctgttgaagaccgctggctatggcggaggctgcatgtagagggcatggcgcggctgtagcctggaggaaggagaagaagaggaggagcaggaggaggcggcaataaattcagctctattagacgacagcgctagtaacaaggagcagcagcagtatcggttcaggtccagtccagtagctgaaaaggcaggcagggcatgaggccagtgaagatatggcatgggggaactttttgcaatccaatctccccatcagaacccacttcgagttagcagtgtgtgtccgcctgaatctttctcctatatactgctgtatttaattagcaagagcaaagctctcactgcctttctaatgattgatcagaagtgcctttggcgaccccttgtctttctgggacatctatatataatgttcttcattct

SEQ ID NO: 25794 - protein, 338 aa, Zea mays subsp. mays
  misc_feature (1)..(338): Ceres Seq. ID no. 13493591
IENHHRHTHLPFSFEFEEKAAEAAMELDEQAFLEEILSLRRDAWDCNVSMGDLFAPAAAAAIDCSFHNQQAPTVSVLPTFTASCAEPPAFDCLSEVYGAAAAFGGPNAGDEMAFLHVAEPKEALQLDDNAGLGVCKVEPGLVESDGGGAAAPTPAPAASKKKRTEGMPSKNLMAERRRRKRLNDRLSMLRSVVPKISKMDRTSILGDTIDYMKELLERIKLLQEEIEQQGEAPAGMLSVFRELNPNEMVARNTPKLDVERKEGGDTRVEIYCGARPGLLLSTVSTLDALGLDIQQCVVSCFNDFGMHASCSEMQRDMISADAIKQELLKTAGYGGGCM

SEQ ID NO: 25795 - protein, 314 aa, Zea mays subsp. mays
  misc_feature (1)..(314): Ceres Seq. ID no. 13493592
MELDEQAFLEEILSLRRDAWDCNVSMGDLFAPAAAAAIDCSFHNQQAPTVSVLPTFTASCAEPPAFDCLSEVYGAAAAFGGPNAGDEMAFLHVAEPKEALQLDDNAGLGVCKVEPGLVESDGGGAAAPTPAPAASKKKRTEGMPSKNLMAERRRRKRLNDRLSMLRSVVPKISKMDRTSILGDTIDYMKELLERIKLLQEEIEQQGEAPAGMLSVFRELNPNEMVARNTPKLDVERKEGGDTRVEIYCGARPGLLLSTVSTLDALGLDIQQCVVSCFNDFGMHASCSEMQRDMISADAIKQELLKTAGYGGGCM

SEQ ID NO: 25796 - protein, 289 aa, Zea mays subsp. mays
  misc_feature (1)..(289): Ceres Seq. ID no. 13493593
MGDLFAPAAAAAIDCSFHNQQAPTVSVLPTFTASCAEPPAFDCLSEVYGAAAAFGGPNAGDEMAFLHVAEPKEALQLDDNAGLGVCKVEPGLVESDGGGAAAPTPAPAASKKKRTEGMPSKNLMAERRRRKRLNDRLSMLRSVVPKISKMDRTSILGDTIDYMKELLERIKLLQEEIEQQGEAPAGMLSVFRELNPNEMVARNTPKLDVERKEGGDTRVEIYCGARPGLLLSTVSTLDALGLDIQQCVVSCFNDFGMHASCSEMQRDMISADAIKQELLKTAGYGGGCM

SEQ ID NO: 25797 - DNA, 785 bp, Zea mays subsp. mays
  misc_feature (1)..(785): Ceres Seq. ID no. 13493594
ccattacctagaacatcctaatcaaaaaatgagccagactgctaccactttcgtccagcaggggaacgcgatgaacactaagatcgggtccttctcggtgccggcggcctccatgaactccgccgaggtgatcttcatgctcgtctgggttgtgttccaggacagcgtcgtcatcccgatagccaggaggtacacggggaacccgatggggctgacgctgctgcagcggatgggcgtcgggcggttgctggcgatcccatctctggcggccgccgcactggtggagacgtggaggctgcgcagcgtgaaggccgggcataacctgagcatcgggtggcagctcccgcagttcgtgatcctggcctgctccgacgtgttctgcggcatcgcgcagctggagttcttctacgcggaggcgcctgcgtccatgcgcagcctgtgctcggcattccagttcctggccatgtcgctggcgtactacgtgaacacgctggtggtcgcattggtggcgtccgtgaccacggcctggggcggcaagggctggctcccccgctgacctcaacgacggccacctggactactacttctggctgtggacggggatcagtgtggtgaactacgtcgtgtacacggcatttgcaaggcgttatacggtcaagaaggttgtcggtcagtaaggatccagactatctgtatgatcaattactgtatcttattgtattttgcagtgtacactactccggaaccgagacttttggtgttcatttgaatgcatggtcctctgt

SEQ ID NO: 25798 - protein, 184 aa, Zea mays subsp. mays
  misc_feature (1)..(184): Ceres Seq. ID no. 13493595
HYLEHPNQKMSQTATTFVQQGNAMNTKIGSFSVPAASMNSAEVIFMLVWVVFQDSVVIPIARRYTGNPMGLTLLQRMGVGRLLAIPSLAAAALVETWRLRSVKAGHNLSIGWQLPQFVILACSDVFCGIAQLEFFYAEAPASMRSLCSAFQFLAMSLAYYVNTLVVALVASVTTAWGGKGWLPR

SEQ ID NO: 25799 - protein, 175 aa, Zea mays subsp. mays
  misc_feature (1)..(175): Ceres Seq. ID no. 13493596
MSQTATTFVQQGNAMNTKIGSFSVPAASMNSAEVIFMLVWVVFQDSVVIPIARRYTGNPMGLTLLQRMGVGRLLAIPSLAAAALVETWRLRSVKAGHNLSIGWQLPQFVILACSDVFCGIAQLEFFYAEAPASMRSLCSAFQFLAMSLAYYVNTLVVALVASVTTAWGGKGWLPR

SEQ ID NO: 25800 - protein, 161 aa, Zea mays subsp. mays
  misc_feature (1)..(161): Ceres Seq. ID no. 13493597
MNTKIGSFSVPAASMNSAEVIFMLVWVVFQDSVVIPIARRYTGNPMGLTLLQRMGVGRLLAIPSLAAAALVETWRLRSVKAGHNLSIGWQLPQFVILACSDVFCGIAQLEFFYAEAPASMRSLCSAFQFLAMSLAYYVNTLVVALVASVTTAWGGKGWLPR

SEQ ID NO: 25801 - DNA, 1422 bp, Zea mays subsp. mays
  misc_feature (1)..(1422): Ceres Seq. ID no. 13493622
agaccattacctagaacatcctaatcgaaaaagaatctctctttaagagggatacagagtaggaaagagacagagggggcaaagagcgatggacgccgcggtgcggaaggccgcgggcgccggcatcgcgcgcgcgccggcgctggtgctagcgctggtggcggcgggggcgttcctgatctcctacaacttcttcaccatgctgttccacggcggcggcggaataggcgcggcggccgaccgctgggacgagggaccctgtggtggccatgccagcgtggatgcgcgcggcggcggacaccgaggcgcggcggcggcccgttccatgtggcgctcacggccacggacgcgccctacagccggtggcagtgccgggtcatgtacttctggtacaagcggatgcaggcgcggccgggcggagaggccatgggcgggttcacgcgcgtgctgcactcggggaagcccgacgggctcatggacgagatccccaccttcgtcgtcgacccgctgcccgctggcaaggaccacggatatgtggtcctaaataggccgtgggcatttgtgcagtggcttcagaaagcaaagattgaagaagagtatatactaatggcagaaccagaccatatatttgtgaaacctctaccaaatttggcccatgacgatgatccggcagcatttcccttcttttacattacaccatcagaacatgaaaaaattatcaggaaatactatgctaaagaaagaggtcctgtcacagatatcgatccgattgggaattctcctgtgataattaagaagacaattcttgagaagattgcccccacatggatgaatgtgtcaattcaaatgaaagaggatgaagaaacagataaagtttttggatgggtgttggaaatgtatgcatacgctgttgctagcgcattgcatggagttcatcatatccttcgtaaagatttcatgatccagccaccttttgatacaaagctccagaatacatttataatccacttcacttatggatgtgactactcactaaagggtgaactgacctatggtaaagttggtgaatggcgatttgacaaaagatcattcccagataggccaccaccaagaaatcttacattgccccctcctggagtaccagaaagtgtggttactctagtgaaaatggtcaatgaagctagtgcaaaccttcctcggtgggatgatggaatataaactttggatgatatcaattatatcttaggttcctttgatctgcccttgtatatggggaatatcaaagtatcaggtgcagtcggttgtttggtttacatccaaaatagctgcttgcacttgcacaccatacctgatagaagaagatacataattttctcagtgtactttttatgaaaagaaaagaaatgaaagtaaaagttagct

SEQ ID NO: 25802 - protein, 279 aa, Zea mays subsp. mays
  misc_feature (1)..(279): Ceres Seq. ID no. 13493623
MYFWYKRMQARPGGEAMGGFTRVLHSGKPDGLMDEIPTFVVDPLPAGKDHGYVVLNRPWAFVQWLQKAKIEEEYILMAEPDHIFVKPLPNLAHDDDPAAFPFFYITPSEHEKIIRKYYAKERGPVTDIDPIGNSPVIIKKTILEKIAPTWMNVSIQMKEDEETDKVFGWVLEMYAYAVASALHGVHHILRKDFMIQPPFDTKLQNTFIIHFTYGCDYSLKGELTYGKVGEWRFDKRSFPDRPPPRNLTLPPPGVPESVVTLVKMVNEASANLPRWDDGI

SEQ ID NO: 25803 - protein, 272 aa, Zea mays subsp. mays
  misc_feature (1)..(272): Ceres Seq. ID no. 13493624
MQARPGGEAMGGFTRVLHSGKPDGLMDEIPTFVVDPLPAGKDHGYVVLNRPWAFVQWLQKAKIEEEYILMAEPDHIFVKPLPNLAHDDDPAAFPFFYITPSEHEKIIRKYYAKERGPVTDIDPIGNSPVIIKKTILEKIAPTWMNVSIQMKEDEETDKVFGWVLEMYAYAVASALHGVHHILRKDFMIQPPFDTKLQNTFIIHFTYGCDYSLKGELTYGKVGEWRFDKRSFPDRPPPRNLTLPPPGVPESVVTLVKMVNEASANLPRWDDGI

SEQ ID NO: 25804 - protein, 263 aa, Zea mays subsp. mays
  misc_feature (1)..(263): Ceres Seq. ID no. 13493625
MGGFTRVLHSGKPDGLMDEIPTFVVDPLPAGKDHGYVVLNRPWAFVQWLQKAKIEEEYILMAEPDHIFVKPLPNLAHDDDPAAFPFFYITPSEHEKIIRKYYAKERGPVTDIDPIGNSPVIIKKTILEKIAPTWMNVSIQMKEDEETDKVFGWVLEMYAYAVASALHGVHHILRKDFMIQPPFDTKLQNTFIIHFTYGCDYSLKGELTYGKVGEWRFDKRSFPDRPPPRNLTLPPPGVPESVVTLVKMVNEASANLPRWDDGI

SEQ ID NO: 25805 - DNA, 1386 bp, Zea mays subsp. mays
  misc_feature (1)..(1386): Ceres Seq. ID no. 13493626
gaaggaaggaagccatgatgatgatgggcgaaggcgtgagcatgccgccgtggtcccaccacgtccctgtgagcggcgtcgacgaaggcgacgagatgacgccgtacctgctcgcggcgctgcgccagtacctgccgtgcaacgacgccggcgccgaggccgaggaggatgaggcggccgccgccatggcggcgggcgtggacggctacggctgcgacgagttccgcatgtacgagttcaaggtccggcggtgcgcgcgcgcgcgcagccacgactggaccgagtgccccttcgcgcacccgggggagaaggcgcggcgccgcgacccgcgcaagtaccactactccggcgccacctgcccggacttccgcaagggcgggtgcaagcgcggcgacggctgcgacatggcgcacggcgtcttcgagtgctggctccacccggcgcgctaccgcacccagccctgcaaggacggcacggcctgccgccgccgggtctgcttcttcgcgcacaccgcggaccagctgcgcgtgctcccgcccacgccgnancancantccanccccagggggcgccgnctgctcttcccccgctcgccgagtcctacgacggctccccgctccggcgccaggcgttcgagagctacctcaccaagagcatcatgtgctcgtcgccgaccagcaccctcctatcgccgcccaagtcgcccccgtcggagtccccgccattgtcgcccgacttccgccgtgggtgctggccgggcgccgggtcccccgtcaacgacgtgctcgcctcgctccgtcagctccgcctcagcagggccaactcgtccccgtcgggcggctggtgcagctaccctgcatccgcggtcgcgtacggatcgcctacggggggcgcgctctacggcctgtcctccaccccgagggccaccgccggctccggctacatggccaacctggaccctctcgacgtcaccttcggcggcgacgaggagcccgtggagagggtggagtccggccgcgcactccgcgcgaaggtgttcgagcggcttagcagggagggcgctgtttccggcgacgccggtggccccgacgtcgggtgggtctccgacctcatcaactgaggcggcggcgggtccctggcatggcaggtggcaatggcaatgggcatgggcatggagaaaggtgatggtgagccgtatcggagaaggatggcatccaaaaaaatatttccctgcatttgatttcgttcctcagttaattccgctaatccccgtgtacatatctatcaccctgtgaatattctcggttggtaagagggaggatgatgctaggcggtggatggatgggtggatttgttttggggttcttgaggtagcggaaaatatcc

SEQ ID NO: 25806 - protein, 430 aa, Zea mays subsp. mays
  misc_feature (1)..(430): Ceres Seq. ID no. 13493627
  misc_feature (182)..(182): Xaa is any aa, unknown or other
  misc_feature (183)..(183): Xaa is any aa, unknown or other
  misc_feature (184)..(184): Xaa is any aa, unknown or other
  misc_feature (186)..(186): Xaa is any aa, unknown or other
  misc_feature (191)..(191): Xaa is any aa, unknown or other
RKEAMMMMGEGVSMPPWSHHVPVSGVDEGDEMTPYLLAALRQYLPCNDAGAEAEEDEAAAAMAAGVDGYGCDEFRMYEFKVRRCARARSHDWTECPFAHPGEKARRRDPRKYHYSGATCPDFRKGGCKRGDGCDMAHGVFECWLHPARYRTQPCKDGTACRRRVCFFAHTADQLRVLPPTPXXXSXPRGRXLLFPRSPSPTTAPRSGARRSRATSPRASCARRRPAPSYRRPSRPRRSPRHCRPTSAVGAGRAPGPPSTTCSPRSVSSASAGPTRPRRAAGAATLHPRSRTDRLRGARSTACPPPRGPPPAPATWPTWTLSTSPSAATRSPWRGWSPAAHSARRCSSGLAGRALFPATPVAPTSGGSPTSSTEAAAGPWHGRWQWQWAWAWRKVMVSRIGEGWHPKKYFPAFDFVPQLIPLIPVYISITL

SEQ ID NO: 25807 - protein, 426 aa, Zea mays subsp. mays
  misc_feature (1)..(426): Ceres Seq. ID no. 13493628
  misc_feature (178)..(178): Xaa is any aa, unknown or other
  misc_feature (179)..(179): Xaa is any aa, unknown or other
  misc_feature (180)..(180): Xaa is any aa, unknown or other
  misc_feature (182)..(182): Xaa is any aa, unknown or other
  misc_feature (187)..(187): Xaa is any aa, unknown or other
MMMMGEGVSMPPWSHHVPVSGVDEGDEMTPYLLAALRQYLPCNDAGAEAEEDEAAAAMAAGVDGYGCDEFRMYEFKVRRCARARSHDWTECPFAHPGEKARRRDPRKYHYSGATCPDFRKGGCKRGDGCDMAHGVFECWLHPARYRTQPCKDGTACRRRVCFFAHTADQLRVLPPTPXXXSXPRGRXLLFPRSPSPTTAPRSGARRSRATSPRASCARRRPAPSYRRPSRPRRSPRHCRPTSAVGAGRAPGPPSTTCSPRSVSSASAGPTRPRRAAGAATLHPRSRTDRLRGARSTACPPPRGPPPAPATWPTWTLSTSPSAATRSPWRGWSPAAHSARRCSSGLAGRALFPATPVAPTSGGSPTSSTEAAAGPWHGRWQWQWAWAWRKVMVSRIGEGWHPKKYFPAFDFVPQLIPLIPVYISITL

SEQ ID NO: 25808 - protein, 425 aa, Zea mays subsp. mays
  misc_feature (1)..(425): Ceres Seq. ID no. 13493629
  misc_feature (177)..(177): Xaa is any aa, unknown or other
  misc_feature (178)..(178): Xaa is any aa, unknown or other
  misc_feature (179)..(179): Xaa is any aa, unknown or other
  misc_feature (181)..(181): Xaa is any aa, unknown or other
  misc_feature (186)..(186): Xaa is any aa, unknown or other
MMMGEGVSMPPWSHHVPVSGVDEGDEMTPYLLAALRQYLPCNDAGAEAEEDEAAAAMAAGVDGYGCDEFRMYEFKVRRCARARSHDWTECPFAHPGEKARRRDPRKYHYSGATCPDFRKGGCKRGDGCDMAHGVFECWLHPARYRTQPCKDGTACRRRVCFFAHTADQLRVLPPTPXXXSXPRGRXLLFPRSPSPTTAPRSGARRSRATSPRASCARRRPAPSYRRPSRPRRSPRHCRPTSAVGAGRAPGPPSTTCSPRSVSSASAGPTRPRRAAGAATLHPRSRTDRLRGARSTACPPPRGPPPAPATWPTWTLSTSPSAATRSPWRGWSPAAHSARRCSSGLAGRALFPATPVAPTSGGSPTSSTEAAAGPWHGRWQWQWAWAWRKVMVSRIGEGWHPKKYFPAFDFVPQLIPLIPVYISITL

SEQ ID NO: 25809 - DNA, 1618 bp, Zea mays subsp. mays
  misc_feature (1)..(1618): Ceres Seq. ID no. 13493644
gaaaagaatataataaaataaaaacccagcagcatttctccgccgcccatacgacgacgacggccactcggcgcagtgatttgggcgccccgcaaagcggtggctccaccggccagcgcatcaaaggccctgtggaatatggcgccgcgccgcttgccggggccgggccctcctctttatatatggcgtggcgagcaaacccaaaaccctcgcaggcagaaggcaaacgcggctgcgagcgcggcgccccctcccactatccagccgccgccagcccgcacacccctccctcgcgcgctcagggtttcggaatggaggccgatgcggcggccaagaggacgcgggagagcggggaggacgccaccgcggcggggatctccgccgtcatcccgggatggttctccgagatcagccccatgtggcccggtgaggcgcactctttgaaggtggagaaggtgctgttccaagggaagtcagactaccaaaacgttatggtctttcagtcctctacgtacgggaaggtgctcgtccttgatggagttattcaggttacggagagggatgagtgtgcgtaccaagagatgatcactcacctgcccctttgctccatcaaagatcccaagaaggtgttggttattggagggggtgatggtggtgttctgcgtgaggtttcacggcattcctctgtggaacaaattgacatctgtgaaattgacaagatggtggtagatgtatccaaacaatttttccctcatttagctgttggatttgaagaccctcgtgtgtcattacacattggagatggggttgcctttttgaaaaatgctccagaaggtacttatgacgcagtaattgtggactcatctgatccgataggtcctgctcaagagctttttgagaagcctttcttccagttggtggccagagctttgcgtccaggtggagttgtatgcacccaagcagagagcatatggctacatatacacattattgaagatattgttgtcaattgtcgacaagttttcaaaggctcggttaactatgcttggacaacggtgcctacataccctagcggagttattgggttcatgctttgctccaccgaagggcctgctgttgatttccagcaccctgttttcaacatcgaggaggatgaacatcctatgaaatcaaaaggaccccttaagttctacaactcggagatccacacggcatcattctgtttgccttcttttgcaaagagggtaatcgagtcaaaagcgaactagacgtgaaggtatctccaagggctaagtaccttaggtgcgcaacacagaatttgttgtagtgtgaaaagcggatgcctccctcccttttctccccctttgatgaatagtataagcacaggagatgagatgcaacagttatcggagttatcagtctacatggtcctgaccagtcgtatgtctcggctgcctggtgcagctatgaaaacgttttgcaatagcttttttcggcagtcctcacatcatcacggttgtgtttccgcttccacatcagaatggaatatatatacgtatgaaataaaactgtgtaatggctgctgccatcggatcctttttaaaacaggttcagctct

SEQ ID NO: 25810 - protein, 421 aa, Zea mays subsp. mays
  misc_feature (1)..(421): Ceres Seq. ID no. 13493645
KEYNKIKTQQHFSAAHTTTTATRRSDLGAPQSGGSTGQRIKGPVEYGAAPLAGAGPSSLYMAWRANPKPSQAEGKRGCERGAPSHYPAAASPHTPPSRAQGFGMEADAAAKRTRESGEDATAAGISAVIPGWFSEISPMWPGEAHSLKVEKVLFQGKSDYQNVMVFQSSTYGKVLVLDGVIQVTERDECAYQEMITHLPLCSIKDPKKVLVIGGGDGGVLREVSRHSSVEQIDICEIDKMVVDVSKQFFPHLAVGFEDPRVSLHIGDGVAFLKNAPEGTYDAVIVDSSDPIGPAQELFEKPFFQLVARALRPGGVVCTQAESIWLHIHIIEDIVVNCRQVFKGSVNYAWTTVPTYPSGVIGFMLCSTEGPAVDFQHPVFNIEEDEHPMKSKGPLKFYNSEIHTASFCLPSFAKRVIESKAN

SEQ ID NO: 25811 - protein, 361 aa, Zea mays subsp. mays
  misc_feature (1)..(361): Ceres Seq. ID no. 13493646
MAWRANPKPSQAEGKRGCERGAPSHYPAAASPHTPPSRAQGFGMEADAAAKRTRESGEDATAAGISAVIPGWFSEISPMWPGEAHSLKVEKVLFQGKSDYQNVMVFQSSTYGKVLVLDGVIQVTERDECAYQEMITHLPLCSIKDPKKVLVIGGGDGGVLREVSRHSSVEQIDICEIDKMVVDVSKQFFPHLAVGFEDPRVSLHIGDGVAFLKNAPEGTYDAVIVDSSDPIGPAQELFEKPFFQLVARALRPGGVVCTQAESIWLHIHIIEDIVVNCRQVFKGSVNYAWTTVPTYPSGVIGFMLCSTEGPAVDFQHPVFNIEEDEHPMKSKGPLKFYNSEIHTASFCLPSFAKRVIESKAN

SEQ ID NO: 25812 - protein, 318 aa, Zea mays subsp. mays
  misc_feature (1)..(318): Ceres Seq. ID no. 13493647
MEADAAAKRTRESGEDATAAGISAVIPGWFSEISPMWPGEAHSLKVEKVLFQGKSDYQNVMVFQSSTYGKVLVLDGVIQVTERDECAYQEMITHLPLCSIKDPKKVLVIGGGDGGVLREVSRHSSVEQIDICEIDKMVVDVSKQFFPHLAVGFEDPRVSLHIGDGVAFLKNAPEGTYDAVIVDSSDPIGPAQELFEKPFFQLVARALRPGGVVCTQAESIWLHIHIIEDIVVNCRQVFKGSVNYAWTTVPTYPSGVIGFMLCSTEGPAVDFQHPVFNIEEDEHPMKSKGPLKFYNSEIHTASFCLPSFAKRVIESKAN

SEQ ID NO: 25813 - DNA, 1402 bp, Zea mays subsp. mays
  misc_feature (1)..(1402): Ceres Seq. ID no. 13493652
aaaaaattctagggaacccccactacgcctgcacgcgcccactagctagccaccttagatcggtcgatacagctagctatacccgctagctgcacctctcgctgccgccgcccggccgggccgcgcgagaccgctcaaaattcgcgcgcaccgccacgcggcgcggacatgctgcgggcggcggggagcagctagcaggtagccgagcacggcagggcgacccggcgcgcgatccgccgctgcccgcgtgggcggccgcctatggatctggccgcatggcgggcttccctctaggcggaggaggccacggccgcggcgaccaccaccaccctcacgtgaacccttcctccggctccggctccgactccgcggccgccgcctacctctacacggccgccgccgcgccgcgcggcggcttccagctatggccgcctcacccggcgcaggagcaccaccaccacttctacgcccccaacatcatccgcttcgccgatgaccccgccgcgggctcctcgcgcggcggcaggggctccgccagcggcgccggcgcgggcaccatcagctgccaggactgcggcaaccaggccaagaaggactgcgtccacatgcgctgccgcacctgctgcaagagccggggcttcgactgccccacccatgtcaagtccacctgggtgcccgccgccaagcgccgggagcgccagcagcagcaggccaccggcgccgccgagccctccaagcgccaccgtgacgccgctaccggtgcccagccctcctctaccaccgccacaaccacttcctcgggtgagcagcagcagatggcggtggtggcggagcggttcccgcgggaagtgagctcggaggcgctgttccgctgcgtccgcctgggcccggtcgacgagcccgacgccgaggtggcgtaccagaccagcgtcagcatcgccggccacgtcttcaagggcatcctgcacgacgtcggcccggagccgtcgacggtcgctgcgggcggcggcttccgccacgccaccgaggggtcctcccctagcacggccgcggcgggcgaaggcagcgtcgtggggcccgtctcgtcatcggctgtggtcatggacccgtacccgacgcccggcccgtacggcgccgctcatttcttccacggccatccgaggtgatgatcaaacggccaccatgattgacacggctagctagcctagctgaatctgatgggtttcgttccctttggacatgccatgcatctttccatccactgcttcaatatttgctttactagagggattatcgatcgtcacaaaattgttactagtagcttttatttgtctccgtcctccatccctgttctcgacgatcgatgcataaactgatgagcaccattcatcactgtttcttt

SEQ ID NO: 25814 - protein, 296 aa, Zea mays subsp. mays
  misc_feature (1)..(296): Ceres Seq. ID no. 13493653
MAGFPLGGGGHGRGDHHHPHVNPSSGSGSDSAAAAYLYTAAAAPRGGFQLWPPHPAQEHHHHFYAPNIIRFADDPAAGSSRGGRGSASGAGAGTISCQDCGNQAKKDCVHMRCRTCCKSRGFDCPTHVKSTWVPAAKRRERQQQQATGAAEPSKRHRDAATGAQPSSTTATTTSSGEQQQMAVVAERFPREVSSEALFRCVRLGPVDEPDAEVAYQTSVSIAGHVFKGILHDVGPEPSTVAAGGGFRHATEGSSPSTAAAGEGSVVGPVSSSAVVMDPYPTPGPYGAAHFFHGHPR

SEQ ID NO: 25815 - protein, 186 aa, Zea mays subsp. mays
  misc_feature (1)..(186): Ceres Seq. ID no. 13493654
MRCRTCCKSRGFDCPTHVKSTWVPAAKRRERQQQQATGAAEPSKRHRDAATGAQPSSTTATTTSSGEQQQMAVVAERFPREVSSEALFRCVRLGPVDEPDAEVAYQTSVSIAGHVFKGILHDVGPEPSTVAAGGGFRHATEGSSPSTAAAGEGSVVGPVSSSAVVMDPYPTPGPYGAAHFFHGHPR

SEQ ID NO: 25816 - DNA, 1056 bp, Zea mays subsp. mays
  misc_feature (1)..(1056): Ceres Seq. ID no. 13493663
ctcttattctcattcgattacacacacacacggagagatcaaattgatacactgcgatctcgatcaaacaaatcaaaaaaaaaaaaaaatcttgcgagacattactgaccgatgaagttcggcaagcgcctcaagaagcagatcgaggagagcctgccggagtggcggagccagttcctcaactacaaggagctgaagcggcgcgtgaatgccgtgtcctcccgcgggtcggcggcggatccgtcgtcgtccagcgccgcggaggccgacttcctgacgctcctggacgccgagatcgacaagttcaacgccttcttcctggagcgggaggaggagttcgtgatccggcagagggagctccaggagcgcatcgggcgtgcgggcgggcccgaggccacgctggcgcgcgtccggcgcgaggtggtggacttgcacggcgagatggtgctgctgctcaactacagcagcgtcaactacacgggcctcgccaagatcctcaagaagttcgacaagcgcaccggcggcgtgctccgcctccccgtcatcgcgcgggtgctgcggcagcccttcttcaccaccgacctcatctccgagctggtcagggactgcgaggccgcgatggaggccgtcttcccgcccgccgccagcagggacctccacgggcgccaggcgctggccgtcgccgggcagggcatcttccgcaacaccgtcgccgctctgctcaccatgcaggaggtgcgcagcgggagctccaccgtcggccatttctcgctgccgcccatgcagccgctgccggagtcggactggctcgtccagtccgttgacagcacgccgacggcgtcgcccctcatccccacccagtgactgacgacaccatggtccacttccagttccatggcactacagtgctacaccacagcggcgtattatatagtatgcaatatatataatctacatactgtagtagtggtgctcggtatgcggctgatgtgtacagtagtagtatttttttctctccttttgttgatgagacttgagaggtgtcctttttgctct

SEQ ID NO: 25817 - protein, 250 aa, Zea mays subsp. mays
  misc_feature (1)..(250): Ceres Seq. ID no. 13493664
MKFGKRLKKQIEESLPEWRSQFLNYKELKRRVNAVSSRGSAADPSSSSAAEADFLTLLDAEIDKFNAFFLEREEEFVIRQRELQERIGRAGGPEATLARVRREVVDLHGEMVLLLNYSSVNYTGLAKILKKFDKRTGGVLRLPVIARVLRQPFFTTDLISELVRDCEAAMEAVFPPAASRDLHGRQALAVAGQGIFRNTVAALLTMQEVRSGSSTVGHFSLPPMQPLPESDWLVQSVDSTPTASPLIPTQ

SEQ ID NO: 25818 - protein, 140 aa, Zea mays subsp. mays
  misc_feature (1)..(140): Ceres Seq. ID no. 13493665
MVLLLNYSSVNYTGLAKILKKFDKRTGGVLRLPVIARVLRQPFFTTDLISELVRDCEAAMEAVFPPAASRDLHGRQALAVAGQGIFRNTVAALLTMQEVRSGSSTVGHFSLPPMQPLPESDWLVQSVDSTPTASPLIPTQ

SEQ ID NO: 25819 - DNA, 1284 bp, Zea mays subsp. mays
  misc_feature (1)..(1284): Ceres Seq. ID no. 13493673
gtcacttcattcccttgtcactagctagatcgactgactggagaggagctatcgtctactacctctgggcgagctgcgtgtcctgtcgtccttctcgctcctgtggtcgccgcgcgcggcggtgcgatggggcggtcgccgtgctgcgagaaggaggccgggctgaagaaggggccgtggacgtccgaggaggaccagaaactgctggccttcatcgagcagcacggacacggctgctggcgctcgctgccggctaaggccggtctgcggcggtgcggcaagagctgccggctccggtggaccaactacctgcggccggacatcaagcggggcaagttcacgctgcaggaggagcagaccatcatccagctccacgctctcctcggcaacaggtggtcgtcgatcgcgacgcacctgcccaagcgcacggacaacgagatcaagaactactggaacacgcacctcaagaagcggctcgccaagatgggcatcgaccccgtcacgcacaaggcccgcgccgacgtggggggctcctctggcgcaggcaacaactctggagcgcgctacagggcagccgcgcacctcagccacacggcgcagtgggagagcgcgcgcctcgaggccgaggcgcgtctggcgcgcgaggccaggctgcgtgcccttgcctcgccgccgccgccgccagggccagggccgggacccgcgtttagcgggctcgagtcgccgacatcgactntgagcttctccgagagcgtgctgttcgccagtgcggcgcacgacacccacgccctgacgtcacgcgcttacgcagaggcgttcggggcggagcagcaacagcgcttcgctgacactgccgccgccgccgacgccgcgccaggcttccttgcaggcgtccttctcggctgctccgtcgccggcgcggagaaggggttcgcggcctcgtcgacggacgccagcgtctgtgagcagcagcaggaggaagaggacaagggctactggagcagcatactgaacatggtcaactcctccatgtcgtcgtccacgtcctcgctgacttctgatgctgtcacggaccccgccgccgcgtacttgccgccggcgacggcggcggccgagttctgagtgattgtcgtccaataataacgaacctgtgctaatgttaccttgtcatgtgtgttgcttactagtaggtgcgttttggtgctagttagtttatttacgtgctaatgggctgtcgcccacgtgtgcttgtgctttatgatgtgcaataataaacatgtacgt

SEQ ID NO: 25820 - protein, 331 aa, Zea mays subsp. mays
  misc_feature (1)..(331): Ceres Seq. ID no. 13493674
  misc_feature (204)..(204): Xaa is any aa, unknown or other
MGRSPCCEKEAGLKKGPWTSEEDQKLLAFIEQHGHGCWRSLPAKAGLRRCGKSCRLRWTNYLRPDIKRGKFTLQEEQTIIQLHALLGNRWSSIATHLPKRTDNEIKNYWNTHLKKRLAKMGIDPVTHKARADVGGSSGAGNNSGARYRAAAHLSHTAQWESARLEAEARLAREARLRALASPPPPPGPGPGPAFSGLESPTSTXSFSESVLFASAAHDTHALTSRAYAEAFGAEQQQRFADTAAAADAAPGFLAGVLLGCSVAGAEKGFAASSTDASVCEQQQEEEDKGYWSSILNMVNSSMSSSTSSLTSDAVTDPAAAYLPPATAAAEF

SEQ ID NO: 25821 - protein, 212 aa, Zea mays subsp. mays
  misc_feature (1)..(212): Ceres Seq. ID no. 13493675
  misc_feature (85)..(85): Xaa is any aa, unknown or other
MGIDPVTHKARADVGGSSGAGNNSGARYRAAAHLSHTAQWESARLEAEARLAREARLRALASPPPPPGPGPGPAFSGLESPTSTXSFSESVLFASAAHDTHALTSRAYAEAFGAEQQQRFADTAAAADAAPGFLAGVLLGCSVAGAEKGFAASSTDASVCEQQQEEEDKGYWSSILNMVNSSMSSSTSSLTSDAVTDPAAAYLPPATAAAEF

SEQ ID NO: 25822 - DNA, 1378 bp, Zea mays subsp. mays
  misc_feature (1)..(1378): Ceres Seq. ID no. 13493680
gcacgagaccattacctagaaacatcctaatcgaaaaatgacaacttttcctttattcttggtgctcagattgcatcctttaatcatcaccattcaccatagacaagttaacaagtcaagctgatcgagacgctcgcaccagaggcttcttccaaagcaggggagaagaggagagaagagcgagcgagctatggggttcggcatggctgtccctcctcgacggtttcttccggcgcgcgctcacgtccgccggcctccgcgcaggctccgccgccgtggacgccgacaccaccatccacttctgggcgcacccctccctcctccaggcccaggcccagccctcctccgcggctccgcggccggtggtggtgctgatccacgggttcgggccggacccgacgtggcagtgggcggcgcaggcgggcccgctgtcgcgccacttcgacctgctggtgccggcagctgctcttcttcggcgcgtccgccacgcgcgcccccgngcggtccgacgcgttccaggccgccgcgctcgccgcgctgctcgcgggcggcggccacgtcccgggcctcggcggccggaccgtgcacctcgtgggcgccaactacggcggcctggtggcgtaccacctcgcccgggagctggagcagcgaggcgtccgcgtcgggaaggtggcgctgtgcgacgcggacgcgtgctggggcggcgaggacggccgcgcgctggcggcccggagcggcgcggcggacgtggtggacctgctggcgcctggcgacaccgccgcggtgcggcggaggtggatgatgagcgcctaccgccccttcaaacacatccccaagtgcttcctccgcgacctctttcagaaacacttcgcggacaacagggaggagaaggtggcgctagtcaaagggatcactgccaaagaaggcttcgagctgactcctctacctcaggaggtgctcatcatctggggtgagttcgaccagatctacccggtcgagaaagcacacaagatgggagagaagctcggggagaaggcgacggtgaaggtgatcccgggcacgggacacctgccgcagcaacaggacatcaagctcttcaaccgcgtcctcctcgacttcctgctgcagcctgctgctgcttccacctccaatggcagcgctgccgccaagtagctcgggttcttttcttggttctccacttgtattgtctcccgcgtggcacgagcttgctgttgtgttattgtgtatataaaattctctgcagctgggttttattccgcctcttcgttttctatccagctggtttggaaatagaggcaatgcacattgttgtgtttagcaagatgtgaaataaatgacgaggcattgttttttcttc

SEQ ID NO: 25823 - protein, 203 aa, Zea mays subsp. mays
  misc_feature (1)..(203): Ceres Seq. ID no. 13493681
  misc_feature (104)..(104): Xaa is any aa, unknown or other
MGFGMAVPPRRFLPARAHVRRPPRRLRRRGRRHHHPLLGAPLPPPGPGPALLRGSAAGGGADPRVRAGPDVAVGGAGGPAVAPLRPAGAGSCSSSARPPRAPPXGPTRSRPPRSPRCSRAAATSRASAAGPCTSWAPTTAAWWRTTSPGSWSSEASASGRWRCATRTRAGAARTAARWRPGAARRTWWTCWRLATPPRCGGGG

SEQ ID NO: 25824 - protein, 199 aa, Zea mays subsp. mays
  misc_feature (1)..(199): Ceres Seq. ID no. 13493682
  misc_feature (100)..(100): Xaa is any aa, unknown or other
MAVPPRRFLPARAHVRRPPRRLRRRGRRHHHPLLGAPLPPPGPGPALLRGSAAGGGADPRVRAGPDVAVGGAGGPAVAPLRPAGAGSCSSSARPPRAPPXGPTRSRPPRSPRCSRAAATSRASAAGPCTSWAPTTAAWWRTTSPGSWSSEASASGRWRCATRTRAGAARTAARWRPGAARRTWWTCWRLATPPRCGGGG

SEQ ID NO: 25825 - protein, 124 aa, Zea mays subsp. mays
  misc_feature (1)..(124): Ceres Seq. ID no. 13493683
MMSAYRPFKHIPKCFLRDLFQKHFADNREEKVALVKGITAKEGFELTPLPQEVLIIWGEFDQIYPVEKAHKMGEKLGEKATVKVIPGTGHLPQQQDIKLFNRVLLDFLLQPAAASTSNGSAAAK

SEQ ID NO: 25826 - DNA, 998 bp, Zea mays subsp. mays
  misc_feature (1)..(998): Ceres Seq. ID no. 13494376
ataaaggggcattggcttgggatcacctctgcatcttacctgggatctgctagcttgatctctcctagtcctagcccattcgcttctcctgttcgtcgctcttaatttgcttgctcgatccctggcagtggcagctgctgcaatggcttccggtggcgcgtcgtcactggccttggccttggccgcgctgctcctcgtgagctgcgcctcggcggcggtggcgaccaagtacaccgtcggggacgcgtccggctggacgaccaccggcgactacgccacctgggccagcggcaagaagttcaaagtcggcgacagtctcgagttcaaatacgccggcggggcgcacacggtggacgaggtgagcgcggcggactacgccgcctgctcctccagcaacgcgctcagcaccgacagcgccggcgccacgaccgtgaccctcaagacggccggcaagcactacttcatctgcggcgtggcgggccattgcagcagcggcatgaagctcgtggtggacgtggccaaggcggtgaccgccccggngccggccccagccgcggccccggccccggccgcggacaccgcnccagacgcccccgacaccacgccgtcgaccccgacgtccccctcgagctccggcggccgcacgcccaagagcccagacacgacggtcctctcgccgccggacaagaagtccacctcctctggcgccaccgggctcagcgccgcagtgtgggccggcttgggccttgccgggctcgtggccgtgcacctcggcgcgttctaggccagcccgctggcctggccagggaggagacagtgccgtgtgttgttgttaggctgcacgtcatgaattggattggtgtattggttgagggacttgactgcttaccagagagagatctctttttggttcagggaacttattgacgatgctttggctgtgctgtagacatgtagttggataccttggatgttatgctatcagttttgctgttgct

SEQ ID NO: 25827 - protein, 213 aa, Zea mays subsp. mays
  misc_feature (1)..(213): Ceres Seq. ID no. 13494377
  misc_feature (133)..(133): Xaa is any aa, unknown or other
  misc_feature (147)..(147): Xaa is any aa, unknown or other
MASGGASSLALALAALLLVSCASAAVATKYTVGDASGWTTTGDYATWASGKKFKVGDSLEFKYAGGAHTVDEVSAADYAACSSSNALSTDSAGATTVTLKTAGKHYFICGVAGHCSSGMKLVVDVAKAVTAPXPAPAAAPAPAADTXPDAPDTTPSTPTSPSSSGGRTPKSPDTTVLSPPDKKSTSSGATGLSAAVWAGLGLAGLVAVHLGAF

SEQ ID NO: 25828 - DNA, 1064 bp, Zea mays subsp. mays
  misc_feature (1)..(1064): Ceres Seq. ID no. 13494390
gaacctcctccactccagcacgtacaagagctctcgccaaagcctaaatttagctacgacccgcgtagcttctcacgtactcaccacccatggcgaagccaagtagctacggtcttgcgcttcttgcttgcgccgccgtcgccgctgcggtcgccggcggaacgcagttcacggtcggcggcgcccaatggctggagcgtgcccgccgccggcgcggagcccttcaatgcttgggcggagaggacgaggtttcagatcggagacgccctagtgttcgtgtaccccaaggaccaagacgcggtgctgctggtggagccggcgggctacaacgcgtgcaacacgtcgtcgtacgtgaggaagttcgacgacggcgacaccgtggtcgcgctcgacagcgccggcccgctcttcttcatcagtggcgtcgaggccaactgccgcgccgacgagaagctcatcgtcatggtcctcgccgcccgcagcaacggcaccggcgcgccggctccgagcacggcgcccccgcctccggctcccgccagctccgcgccgcccacgccggcgtcgcccgctcctaagggcgcccccccgaccacggcggcgtcgcctccgccgccctcggcctctgctcccgcaacgacaccggccacgccgccgcccgccgcgtcggcggcgccccctgctccgagggcgtcgtcaaccccgccgcctccatctgccccggccggtgccccgccggcgcccgcggcaagctctccggctccgagcgcacatggggcgacggataactccacgggcacgccgtcgtcgcctcccgccggctcctccaaggacaagaacggcgccgccttcacggtggccacaggtttggccagctcgttcggaacctgcatcncttgtacgccatgcttgctctctgaagtgaagtgggccgccgtggaagactccagtaaatatgtgtgtgtttacgtgtaatttaattgagacatgcgatttgtgcatgttattgctagatcttgcattcgttttccgccggatgaataagaaatcaaccattcgttattcct

SEQ ID NO: 25829 - protein, 323 aa, Zea mays subsp. mays
  misc_feature (1)..(323): Ceres Seq. ID no. 13494391
  misc_feature (298)..(298): Xaa is any aa, unknown or other
EPPPLQHVQELSPKPKFSYDPRSFSRTHHPWRSQVATVLRFLLAPPSPLRSPAERSSRSAAPNGWSVPAAGAEPFNAWAERTRFQIGDALVFVYPKDQDAVLLVEPAGYNACNTSSYVRKFDDGDTVVALDSAGPLFFISGVEANCRADEKLIVMVLAARSNGTGAPAPSTAPPPPAPASSAPPTPASPAPKGAPPTTAASPPPPSASAPATTPATPPPAASAAPPAPRASSTPPPPSAPAGAPPAPAASSPAPSAHGATDNSTGTPSSPPAGSSKDKNGAAFTVATGLASSFGTCIXCTPCLLSEVKWAAVEDSSKYVCVYV

SEQ ID NO: 25830 - protein, 169 aa, Zea mays subsp. mays
  misc_feature (1)..(169): Ceres Seq. ID no. 13494392
  misc_feature (144)..(144): Xaa is any aa, unknown or other
MVLAARSNGTGAPAPSTAPPPPAPASSAPPTPASPAPKGAPPTTAASPPPPSASAPATTPATPPPAASAAPPAPRASSTPPPPSAPAGAPPAPAASSPAPSAHGATDNSTGTPSSPPAGSSKDKNGAAFTVATGLASSFGTCIXCTPCLLSEVKWAAVEDSSKYVCVYV

SEQ ID NO: 25831 - protein, 161 aa, Zea mays subsp. mays
  misc_feature (1)..(161): Ceres Seq. ID no. 13494393
MAKPSSYGLALLACAAVAAAVAGGTQFTVGGAQWLERARRRRGALQCLGGEDEVSDRRRPSVRVPQGPRRGAAGGAGGLQRVQHVVVREEVRRRRHRGRARQRRPALLHQWRRGQLPRRREAHRHGPRRPQQRHRRAGSEHGAPASGSRQLRAAHAGVARS

SEQ ID NO: 25832 - DNA, 1283 bp, Zea mays subsp. mays
  misc_feature (1)..(1283): Ceres Seq. ID no. 13494403
gcgctctgtgcacagacgaccttcttcccatcccttcccttccctctgctagtctgcttcgttcctcggccatggtggtcctcgccaagggtgagctcgagcagatcgccctcccggctgcagagccgcccccggccgacgtgcggtcggtggacctgtccgccccggcgggccccgcgcgcgaggccgcggcgcgcgcgctggtggcggcgtgcgaggagcacgggttcttccgggtgacgggccacggcgtgccgkgccagactcgtgcgcgccgcggaggccgcggcggccggngttcttcgcgcggccacagggcgagaaggaggaggagggccccacgctcgggtacggaagcaagcgcatcggcggcaacggcgacctcggctgggtcgagtacctcctgctcggtggcacacccgccgccgccgcgtcctcctcggcattattgccctgcgccgccgccccgtcgccgtccgcgccggccgggccgttacgggaccttctggacgagtacacggtggcggtgcggcggatggcgtgcgcggtgctggagctgatggcggaggggctgggcatcgccggggacgcgccgcagctggcgcggctggtggcgcgcgcggacagcgactgcatgctgcgggtgaaccactacccgccgcggccggcgctcaaccccagcctcacggggttcggcgagcacaccgacccgcagatcatctcggtgctccgcgccaacggcacctccggcctggagatcgcgctgcgggacggcgcctgggcctccgtcccgcccgacggggacgccttcttcgtcaacgtcggcgacaccctgcaggtgttgacgaacgggaggttcaggagcgtgaggcacagggtggtggtgaacagcgagaagtcccgggtgtccatggtcttcttcggcggcccgccgcccggcgagaggctgggcccgctgccgcagctcctgggcgacggcggccggagccggtaccgggacttcacctggagcgagttcaagaccagcgggtgcaggaccaggctcgcggaagaccgcctgtcccgcttcgagaagaagtagctagaggctacgtcatttgcatgaccggcggtaggatcgattaccatgtatgcttctctgtatatgtcagttgcattgccacagctctagctactggcgcccgtacgtgtatattagtggccatgctcgtattgtacgtgcacgtgtatgcacgcatatacatggtggcaccacacagggtatcatgcatccattgttatct

SEQ ID NO: 25833 - protein, 185 aa, Zea mays subsp. mays
  misc_feature (1)..(185): Ceres Seq. ID no. 15222925
  misc_feature (86)..(86): Xaa is any aa, unknown or other
  misc_feature (99)..(99): Xaa is any aa, unknown or other
ALCTDDLLPIPSLPSASLLRSSAMVVLAKGELEQIALPAAEPPPADVRSVDLSAPAGPAREAAARALVAACEEHGFFRVTGHGVPXQTRARRGGRGGRXSSRGHRARRRRRAPRSGTEASASAATATSAGSSTSCSVAHPPPPRPPRHYCPAPPPRRRPRRPGRYGTFWTSTRWRCGGWRARCWS

SEQ ID NO: 25834 - protein, 181 aa, Zea mays subsp. mays
  misc_feature (1)..(181): Ceres Seq. ID no. 15222926
MACAVLELMAEGLGIAGDAPQLARLVARADSDCMLRVNHYPPRPALNPSLTGFGEHTDPQIISVLRANGTSGLEIALRDGAWASVPPDGDAFFVNVGDTLQVLTNGRFRSVRHRVVVNSEKSRVSMVFFGGPPPGERLGPLPQLLGDGGRSRYRDFTWSEFKTSGCRTRLAEDRLSRFEKK

SEQ ID NO: 25835 - protein, 173 aa, Zea mays subsp. mays
  misc_feature (1)..(173): Ceres Seq. ID no. 15222927
MAEGLGIAGDAPQLARLVARADSDCMLRVNHYPPRPALNPSLTGFGEHTDPQIISVLRANGTSGLEIALRDGAWASVPPDGDAFFVNVGDTLQVLTNGRFRSVRHRVVVNSEKSRVSMVFFGGPPPGERLGPLPQLLGDGGRSRYRDFTWSEFKTSGCRTRLAEDRLSRFEKK

SEQ ID NO: 25836 - DNA, 2161 bp, Zea mays subsp. mays
  misc_feature (1)..(2161): Ceres Seq. ID no. 13494407
  misc_feature (1981)..(1981): n is a, c, t, g, unknown, or other
agaagaggcctccccgctccgcgttccccagcgccagcggtaacccaacccaactcctctgagctgtgacacagctgtcctcctccccccactccaggcgctcacacaccctccacttccctccacaggaatccgccgccataatctcctccgctccgctccactccgcattgcaggattgcgccgagcacgagcaccctcctccccgaagcctcttctttgctctgctttcggtggtatggtgggatgatgagcagggcggcagtgctgctgtgtctcctctgctgcctcgccgccgtcggcgaggcggcgtcagtggtgggcgagggcgaggcggcggagctggccgtgtcggtggacccgtcgtggcggttccctagccagcggctgcgggacgcgtacgtcgcgctgcagacctggaagcagcaggccatcttctccgaccccaggggtttcaccgccgactgggtgggcccgggggtatgcaactacaccggggtcttctgcgcgccgctgccgcgcggggtgccgggcgccggggagctcgccgtcgcgggcctcgacctcaaccacggcgacatcgcgggctacctcccgccggagctcggcctgctcgctgacctctcgctgctccacctcaactccaaccgcttctgcggcctcgtccccgccactctgcgccgcctccagcttctcgtcgagctcgacctcagcaacaaccgcctcgtcggggcattcccggccgtcgtgctggagctcccggcgctcaagttcctcgacctccgcttcaacgacttcgagggcgccatcccgccggagctcttcgaccgcccgctcgacgccatcttcctcaaccacaaccgcctccgctccccgctccccgacaacttcggcaactccccggcctccgttatcgtactcgccgacaacagcttcggcggatgcctcccggccagcctcggcaacatgtccggcacactcaacgagatcctcctcatcaacaacggcctcgactcctgcgtcccgccggaggtcggcttgctccgggaggtgaccgtcttcgacgtcagcttcaactcgctcgtcggcccgctgccgcagcaggtggccgggatgcgcaaggtggagcagctggacgtcgcgcacaaccgcctgtccggggccgtcccggaggccatctgcgccctcccgcggctcaagaacctgaccatctcctacaacttcttcaccggcgagccgccgtcctgcgcgcgcgtcgtgccttcggacggtgacaggaggaactgcctgcccaaccgccccacacagcgcacgccgcagcagtgcgccgcgttctactcgcagccgcccgtcgactgcgccgcgttccagtgcaagccgtttgtccctgttccgccgccgccgccgccatcataccccggcccgttgccaccggtataccctatgccgtacgcatcgcctccgccacctgcgcagtaccgatgattcgtcgaggagggagaagcactatcactttcaccttaattcaccaccaccgctgctgcgctggatgaagacagcaaagtttcaccgtcacaattgtacgtggtcagtcattgttgtgcttagattagtagtgttcttgattgatagctaccggcatatagaagattatattattataaggtgcatatatcgctcttgcttttgcattggtcgttctctgtttttcgcgttgatcggggtttgcgtcacggtgatggtgaaatagatggtcagatggaggtgaaaaggattggaaggaacnatttgagtttggattgattgctaattggctgactgcttgagagagagatcaggatgacgaggaggattggttggtgacttggcgccnccttgggcctcggatgtatagggggaattaagcttaagttnttcagttaagctactgctttcagttgggagcccggagataagttttcagaccaaggaatgtaccccncttaactattctttttgcatttttatgtcacagctacttactgttaatcgattgttatgatatatctgttttgattcttagaaggttttggtcctttgcttgctactcaatgttgtttagttcacatatttgtaacgcaatattcgtttaagtctaaccgtaatcagataccttaccgtg

SEQ ID NO: 25837 - protein, 412 aa, Zea mays subsp. mays
  misc_feature (1)..(412): Ceres Seq. ID no. 13494408
MMSRAAVLLCLLCCLAAVGEAASVVGEGEAAELAVSVDPSWRFPSQRLRDAYVALQTWKQQAIFSDPRGFTADWVGPGVCNYTGVFCAPLPRGVPGAGELAVAGLDLNHGDIAGYLPPELGLLADLSLLHLNSNRFCGLVPATLRRLQLLVELDLSNNRLVGAFPAVVLELPALKFLDLRFNDFEGAIPPELFDRPLDAIFLNHNRLRSPLPDNFGNSPASVIVLADNSFGGCLPASLGNMSGTLNEILLINNGLDSCVPPEVGLLREVTVFDVSFNSLVGPLPQQVAGMRKVEQLDVAHNRLSGAVPEAICALPRLKNLTISYNFFTGEPPSCARVVPSDGDRRNCLPNRPTQRTPQQCAAFYSQPPVDCAAFQCKPFVPVPPPPPPSYPGPLPPVYPMPYASPPPPAQYR

SEQ ID NO: 25838 - protein, 411 aa, Zea mays subsp. mays
  misc_feature (1)..(411): Ceres Seq. ID no. 13494409
MSRAAVLLCLLCCLAAVGEAASVVGEGEAAELAVSVDPSWRFPSQRLRDAYVALQTWKQQAIFSDPRGFTADWVGPGVCNYTGVFCAPLPRGVPGAGELAVAGLDLNHGDIAGYLPPELGLLADLSLLHLNSNRFCGLVPATLRRLQLLVELDLSNNRLVGAFPAVVLELPALKFLDLRFNDFEGAIPPELFDRPLDAIFLNHNRLRSPLPDNFGNSPASVIVLADNSFGGCLPASLGNMSGTLNEILLINNGLDSCVPPEVGLLREVTVFDVSFNSLVGPLPQQVAGMRKVEQLDVAHNRLSGAVPEAICALPRLKNLTISYNFFTGEPPSCARVVPSDGDRRNCLPNRPTQRTPQQCAAFYSQPPVDCAAFQCKPFVPVPPPPPPSYPGPLPPVYPMPYASPPPPAQYR

SEQ ID NO: 25839 - DNA, 1488 bp, Zea mays subsp. mays
  misc_feature (1)..(1488): Ceres Seq. ID no. 13494410
aactccccaccccagccgatcccaacgcacactgcacccagtccggcggccgccggcaatggcggtgcacggcggcgactacctgcggcggttcgttgcggagacggagtggtwcaacgaggtcgtcctcaacgccgtggcgccaggcgactggtggcgcggcctgccgcacccggtgcagtcgtggatgcgcaactgcgtcggcggttacctcctctacttcatctctggtttcctctggtgtttcgtcatctactactggaagcgccacgcctacatccccaaagatgccatccccacaaacgaagctatgaagaagcaaatagctgtagcatccaaggctatgcctttttactgtgctcttccaactttatctgagtatatgatcgasagcggatggacccggtgttactttaatatcagcgaahtgggtttttctgcgtacctttgttatatggctatgtatctcatttttgtggagtttggaatttactggatgcacagagagttgcatgacataaagccactatacaaacatctgcatgcgacccaccatatttacaacaaggagaacaccttgtctccgtttgctggactcgcgtttcacccactggatggtattctgcaagcgataccgcatgtgcttgcgctcttcctcctcccaacgcacttcaggacgcacatcgctctcgtgttcttggagggcgtgtggacgacaaacatccacgactgcattcacggcaaggtatggccagtcatgggcgctgggtatcacaccatccaccatacgacttaccgccacaactatggccactacaccgtctggatggactggatgtttggtacgctccgtgagccagatgatatcctcaagaaggcctgagttcgtcgtagctgtggttttcctacggtgctggatgtgcttggtctgttstgtccccagtgcctctaatccgctgagcctgttcagcgctctgtttctgtaggctttggtgtgctatttagtttgctaggttttatatgttgtgcttattctgtaatttagtgatgtttgtctgatgacgcaacggagttcaggacgaataaaaagaaagatttsctacacacattctggattccaaaaaaaaaaaaaaaaaaaaaaaaaaaaaaaaaaaaaaaaaaaaaaaaaaaaaaaataaaaaaaaaaaaaaaaaaktttttttttttttttttgtctgttctaggtttagaagcctatgctatgctgctggttcacctaagcatttgktggaaggtaacaccaagcagccgtgaacagccacggtcacctgaggagccttctcgcagtgtctggatgtggttgtttgagcctctgaggggaaatgccctgcgcgcttctgtgcttctcgtgtttctacctggcaaccacgtgcacataattttaccagaatccgattgtttccattcgtgtagcagtatttctctataaaatgccagaaagtttcaggc

SEQ ID NO: 25840 - protein, 293 aa, Zea mays subsp. mays
  misc_feature (1)..(293): Ceres Seq. ID no. 15222928
  misc_feature (38)..(38): Xaa is any aa, unknown or other
  misc_feature (130)..(130): Xaa is any aa, unknown or other
  misc_feature (143)..(143): Xaa is any aa, unknown or other
TPHPSRSQRTLHPVRRPPAMAVHGGDYLRRFVAETEWXNEVVLNAVAPGDWWRGLPHPVQSWMRNCVGGYLLYFISGFLWCFVIYYWKRHAYIPKDAIPTNEAMKKQIAVASKAMPFYCALPTLSEYMIXSGWTRCYFNISEXGFSAYLCYMAMYLIFVEFGIYWMHRELHDIKPLYKHLHATHHIYNKENTLSPFAGLAFHPLDGILQAIPHVLALFLLPTHFRTHIALVFLEGVWTTNIHDCIHGKVWPVMGAGYHTIHHTTYRHNYGHYTVWMDWMFGTLREPDDILKKA

SEQ ID NO: 25841 - protein, 274 aa, Zea mays subsp. mays
  misc_feature (1)..(274): Ceres Seq. ID no. 15222929
  misc_feature (19)..(19): Xaa is any aa, unknown or other
  misc_feature (111)..(111): Xaa is any aa, unknown or other
  misc_feature (124)..(124): Xaa is any aa, unknown or other
MAVHGGDYLRRFVAETEWXNEVVLNAVAPGDWWRGLPHPVQSWMRNCVGGYLLYFISGFLWCFVIYYWKRHAYIPKDAIPTNEAMKKQIAVASKAMPFYCALPTLSEYMIXSGWTRCYFNISEXGFSAYLCYMAMYLIFVEFGIYWMHRELHDIKPLYKHLHATHHIYNKENTLSPFAGLAFHPLDGILQAIPHVLALFLLPTHFRTHIALVFLEGVWTTNIHDCIHGKVWPVMGAGYHTIHHTTYRHNYGHYTVWMDWMFGTLREPDDILKKA

SEQ ID NO: 25842 - protein, 231 aa, Zea mays subsp. mays
  misc_feature (1)..(231): Ceres Seq. ID no. 15222930
  misc_feature (68)..(68): Xaa is any aa, unknown or other
  misc_feature (81)..(81): Xaa is any aa, unknown or other
MRNCVGGYLLYFISGFLWCFVIYYWKRHAYIPKDAIPTNEAMKKQIAVASKAMPFYCALPTLSEYMIXSGWTRCYFNISEXGFSAYLCYMAMYLIFVEFGIYWMHRELHDIKPLYKHLHATHHIYNKENTLSPFAGLAFHPLDGILQAIPHVLALFLLPTHFRTHIALVFLEGVWTTNIHDCIHGKVWPVMGAGYHTIHHTTYRHNYGHYTVWMDWMFGTLREPDDILKKA

SEQ ID NO: 25843 - DNA, 1486 bp, Zea mays subsp. mays
  misc_feature (1)..(1486): Ceres Seq. ID no. 13494425
agaaataggcgcgcgtgccgcctcggccgctcgctcctctggttaatcccccctcgccacgactcgcagccatcccttcacattatccgcgcgcgcgcgagcgagcggacgtagcgtgtgggtagcgtcgccgtgcggacggtctcttggtgccggtgcgggccgcgtgacggtgcgtgtgccgcccgcggggaggaggtcgttcggttggttggccctcggcgacgatggcggtccacggcggagaggcggtctccgtcgcgctcctcttctccctcgctttcttctgcgctcgcctcctgctcgaccgcctcgtctacaagccattagcagtctaccttttcaacaccaaagcttctaagttgatgaataatgaggccaggcaagcaaagattgtcaagttctcagagtccatttggaaacttacctactatgcttctgttcaagcatgggtcctcatgataataaagcaggaaccatggtcattggatatgatgcaatactttgatggctggccgaaccaacccatcgtgtcttcattgatgcttttctatatgtgccagtgtggattttatatctatagcatcggtgctcttgttgcttgggaaacccgcagaaaagattttgctgtaatgatgtctcatcatgtaataacatctactctaattggagtttcatatctgactggatttttccgaattgggaccatcattctcgctcttcatgatgcaagtgatgtgtttcttgagactgccaaattgtgcaaatacacagaaaaagagctgggtgctagcttgttttttggtctcttcgctatctcctggcttctattgcgtctgatttacttcccattttggataatcaaagcctctagctatcattccatcacattcttgaggaagctggatgaattcccaacaactttgtactacatcttgaacacaatgcttctcacattgcttgtattccatatgtactggtggaaactcatatgtttgatgataatgagacagctgaataataaaggacaagttacagacgatgtccgatctgattctgaggatgaggagtgatgggagattcattctttgacatctgcaacgtggcatttcctcgtcaatacttttctatgcctgcttccagaattgattgcttttaatcttggcaagtctcgggaacgtataggaaagtttaatctctgtatattgccttatgatatcaaacatggctagaccgggaatggatctatacatgatgacgggcatagctagcaagcttacttcaaggttccttaaaaaattttggttcacctttatttgatatggggaaagacatgagagggtgtacagctttttcctgaagcttgcagaacccccctctgtaccatgatcaatatacttcacttgtgagtagatttagttctaattgatgataataaattgattcttttgattgggaatgaatctcacctgaaccttgatgatct

SEQ ID NO: 25844 - protein, 281 aa, Zea mays subsp. mays
  misc_feature (1)..(281): Ceres Seq. ID no. 13494426
MAVHGGEAVSVALLFSLAFFCARLLLDRLVYKPLAVYLFNTKASKLMNNEARQAKIVKFSESIWKLTYYASVQAWVLMIIKQEPWSLDMMQYFDGWPNQPIVSSLMLFYMCQCGFYIYSIGALVAWETRRKDFAVMMSHHVITSTLIGVSYLTGFFRIGTIILALHDASDVFLETAKLCKYTEKELGASLFFGLFAISWLLLRLIYFPFWIIKASSYHSITFLRKLDEFPTTLYYILNTMLLTLLVFHMYWWKLICLMIMRQLNNKGQVTDDVRSDSEDEE

SEQ ID NO: 25845 - protein, 235 aa, Zea mays subsp. mays
  misc_feature (1)..(235): Ceres Seq. ID no. 13494427
MNNEARQAKIVKFSESIWKLTYYASVQAWVLMIIKQEPWSLDMMQYFDGWPNQPIVSSLMLFYMCQCGFYIYSIGALVAWETRRKDFAVMMSHHVITSTLIGVSYLTGFFRIGTIILALHDASDVFLETAKLCKYTEKELGASLFFGLFAISWLLLRLIYFPFWIIKASSYHSITFLRKLDEFPTTLYYILNTMLLTLLVFHMYWWKLICLMIMRQLNNKGQVTDDVRSDSEDEE

SEQ ID NO: 25846 - protein, 204 aa, Zea mays subsp. mays
  misc_feature (1)..(204): Ceres Seq. ID no. 13494428
MIIKQEPWSLDMMQYFDGWPNQPIVSSLMLFYMCQCGFYIYSIGALVAWETRRKDFAVMMSHHVITSTLIGVSYLTGFFRIGTIILALHDASDVFLETAKLCKYTEKELGASLFFGLFAISWLLLRLIYFPFWIIKASSYHSITFLRKLDEFPTTLYYILNTMLLTLLVFHMYWWKLICLMIMRQLNNKGQVTDDVRSDSEDEE

SEQ ID NO: 25847 - DNA, 1378 bp, Zea mays subsp. mays
  misc_feature (1)..(1378): Ceres Seq. ID no. 13494429
aaaacacccacttcacctccgaccacttcacctccgatcccgccaccactacccaccctttcctttgacgtcccgatggcacctgtagatctaacccccaagcagcccaggaaggcctacggcggcgacggcggcgcctactacgagtggagccccgccgacctgcccatgctcggcgtcgcctccatcggcgcagccaagctctcgctcgccgccggcgggctcgcgctccccagctactccgactcagccaaggtcgcctacgtcctccaaggcacgggcacctgcggcatcgtcctcccagaggcgacgaaggagaaggtggtggccgtgaaggagggcgacgcgctggcgctgcccttcggcgtggtgacgtggtggcacaacggccccgccgcgccgaccccgctcacggtgctcttcctcggcgacacctccaagggccacaggccggggcaattcaccaacttccagctgacgggcgcgaccggcatcttcacgggcttctccaccgagttcgtgtcgcgcgcgtgggaccttccggaggcggacgcggcggcgctggtgtcgagccagccggcctcgggcatcgtccgggcgtcctcgtccccgctgccggcgccgtcgccgcgggaccgcgagggggtggcgctcaactgcctggaggcgccgctggacgtggacatcccgggcgggggccgcgtcgtggtgctcaacacggccaacctgccgctggtcaaggaggtcgggctgggcgccgacctggtccgcatcgacgcccactccatgtgctccccgggcttctcgtgcgactcggcgtaccaggtcacctacatcgtccgcggcagcggccgcgtccaggtggtcgggcccgacggggtgcgcgtcctggagacgcgcgtcgagggcggcttcctcttcatcgtgccccgcttccacgtcgtctccaagatcgccgacgcgtccggcatggagtggttctccatcatcaccacccccaacccgatcttcagccacctggccgggaagacgtcggtgtggaaggccatctcggcggaggtgctgcaggcgtcgttcaacaccacgccggagatggagaagctgttccggtccaagaggctcgactcggagatcttcttcgctcccccatccaactgagaaaataggccggaagccccacggtggagtcctctcgttaggtcgtcgtgcttagattaggttagctagcttgcctttaataaaaagagagtggtggtcgtcggcgtcggcttcggcggtctgcttcttcttcattcagtgcgtcggtcggtttagagtctgtcacgtgtcccgtcattgaactgcagtttttgttaataaagtattgttattattaggt

SEQ ID NO: 25848 - protein, 385 aa, Zea mays subsp. mays
  misc_feature (1)..(385): Ceres Seq. ID no. 13494430
KTPTSPPTTSPPIPPPLPTLSFDVPMAPVDLTPKQPRKAYGGDGGAYYEWSPADLPMLGVASIGAAKLSLAAGGLALPSYSDSAKVAYVLQGTGTCGIVLPEATKEKVVAVKEGDALALPFGVVTWWHNGPAAPTPLTVLFLGDTSKGHRPGQFTNFQLTGATGIFTGFSTEFVSRAWDLPEADAAALVSSQPASGIVRASSSPLPAPSPRDREGVALNCLEAPLDVDIPGGGRVVVLNTANLPLVKEVGLGADLVRIDAHSMCSPGFSCDSAYQVTYIVRGSGRVQVVGPDGVRVLETRVEGGFLFIVPRFHVVSKIADASGMEWFSIITTPNPIFSHLAGKTSVWKAISAEVLQASFNTTPEMEKLFRSKRLDSEIFFAPPSN

SEQ ID NO: 25849 - protein, 360 aa, Zea mays subsp. mays
  misc_feature (1)..(360): Ceres Seq. ID no. 13494431
MAPVDLTPKQPRKAYGGDGGAYYEWSPADLPMLGVASIGAAKLSLAAGGLALPSYSDSAKVAYVLQGTGTCGIVLPEATKEKVVAVKEGDALALPFGVVTWWHNGPAAPTPLTVLFLGDTSKGHRPGQFTNFQLTGATGIFTGFSTEFVSRAWDLPEADAAALVSSQPASGIVRASSSPLPAPSPRDREGVALNCLEAPLDVDIPGGGRVVVLNTANLPLVKEVGLGADLVRIDAHSMCSPGFSCDSAYQVTYIVRGSGRVQVVGPDGVRVLETRVEGGFLFIVPRFHVVSKIADASGMEWFSIITTPNPIFSHLAGKTSVWKAISAEVLQASFNTTPEMEKLFRSKRLDSEIFFAPPSN

SEQ ID NO: 25850 - protein, 329 aa, Zea mays subsp. mays
  misc_feature (1)..(329): Ceres Seq. ID no. 13494432
MLGVASIGAAKLSLAAGGLALPSYSDSAKVAYVLQGTGTCGIVLPEATKEKVVAVKEGDALALPFGVVTWWHNGPAAPTPLTVLFLGDTSKGHRPGQFTNFQLTGATGIFTGFSTEFVSRAWDLPEADAAALVSSQPASGIVRASSSPLPAPSPRDREGVALNCLEAPLDVDIPGGGRVVVLNTANLPLVKEVGLGADLVRIDAHSMCSPGFSCDSAYQVTYIVRGSGRVQVVGPDGVRVLETRVEGGFLFIVPRFHVVSKIADASGMEWFSIITTPNPIFSHLAGKTSVWKAISAEVLQASFNTTPEMEKLFRSKRLDSEIFFAPPSN

SEQ ID NO: 25851 - DNA, 1658 bp, Zea mays subsp. mays
  misc_feature (1)..(1658): Ceres Seq. ID no. 13494433
atcaaacgcccacgcagcgccggggatggagcgcggccggcaccagatgagagctgcctcccacacatggcatcgtggccagcagcgtcaaggaggcggtccagcggcggcatgaaaagcgccgagctttcgggctccggtgcttcttacggctatggccggacgtcctcctcccctgatgcctgcggctacggccggcagctctcggcctacagcgcccgctcctcccaggtcagcaggagtggctccttcagtgcggcggcgcagcgggtcgccggcgccttcaccggctgcttcgtgccgcgccggcaggtcaaagccggggaagaggaggaggaggaggagaagaagagcaagcgctccatggattcaggatcctatcatggatggaatgaagcaaacttgagtgcagcagcaggatcatggcaggaaggcagggctctcaccatcgctgacgtgtcgaaggcaacatcaaacttcagcgaaaagaacgtgataaggcagggacgctcaagcaccatgtacagaggaaagctcagggatggttctcagatcgccgtcaaatgtgtcacgaagctgaacgaccagagtccgacggctgaactctggagggagcttgagaagatccagcacaggaatctggcgaggctctttggattcttcgaacgcgcagctgatagtctcgtcgtagtcgagtatgtcggcaatggttccttgagggaacatttggatgaatcatgtggaaatggtttagagctcgcgcaacggctcaacatcgcgatcgacgttgctcaggccatcacctacctgcacgagtacaaagagcgtccgatcatccatggcggcatccggtcgtcgggcgtgctactgaccgacgcgctgacggcgaaggtggccggctttgggctggccgggactgcggcctcggggtcgggctcaggctccgacgcaacgccggcgaggagcgccgccgggtacgtggacccggagtacctgagcacgtaccagctgaccgacaagagcgacgtgtacgccttcggcgtcctcctcgtcgagctagccaccggccggccgcccgtcgagcgcacccgcggcggcgaggcccggctcaccaccaaatgggcgttgcagaggtgcagagcaggggaagccgtggtggccatggaccccaggatgcggcggagcccggcgtcggtggccgccgtggagagggcgctggcgctggcagcgcagagcgtcgcggcggccagggatgagcggccgtccatgcggcggtgcagcgagctgctgtggaccatccggagagactaccaccgccaggaggagccgcgctgcggcgccgtcgctgaggaacgtagcgacgagtgggtcatcaggtagcttagcttgccagttgaatggatatgattctgctttggattgatcggcatggaactgtaactagcctgtaagtggatgcgaagttctaggaagctgcagattttttttagcacgtacaacttctgtgattactatcaaatgatgtagtcattgcagccaatacctgcgaatttctagaaaacagtagacgttgtaaacaatcagacgactttgctgaagtagccacttgatccctcaatcaaatataaataaccatcgaaggatgaggatgttgatgc

SEQ ID NO: 25852 - protein, 459 aa, Zea mays subsp. mays
  misc_feature (1)..(459): Ceres Seq. ID no. 13494434
IKRPRSAGDGARPAPDESCLPHMASWPAASRRRSSGGMKSAELSGSGASYGYGRTSSSPDACGYGRQLSAYSARSSQVSRSGSFSAAAQRVAGAFTGCFVPRRQVKAGEEEEEEEKKSKRSMDSGSYHGWNEANLSAAAGSWQEGRALTIADVSKATSNFSEKNVIRQGRSSTMYRGKLRDGSQIAVKCVTKLNDQSPTAELWRELEKIQHRNLARLFGFFERAADSLVVVEYVGNGSLREHLDESCGNGLELAQRLNIAIDVAQAITYLHEYKERPIIHGGIRSSGVLLTDALTAKVAGFGLAGTAASGSGSGSDATPARSAAGYVDPEYLSTYQLTDKSDVYAFGVLLVELATGRPPVERTRGGEARLTTKWALQRCRAGEAVVAMDPRMRRSPASVAAVERALALAAQSVAAARDERPSMRRCSELLWTIRRDYHRQEEPRCGAVAEERSDEWVIR

SEQ ID NO: 25853 - protein, 437 aa, Zea mays subsp. mays
  misc_feature (1)..(437): Ceres Seq. ID no. 13494435
MASWPAASRRRSSGGMKSAELSGSGASYGYGRTSSSPDACGYGRQLSAYSARSSQVSRSGSFSAAAQRVAGAFTGCFVPRRQVKAGEEEEEEEKKSKRSMDSGSYHGWNEANLSAAAGSWQEGRALTIADVSKATSNFSEKNVIRQGRSSTMYRGKLRDGSQIAVKCVTKLNDQSPTAELWRELEKIQHRNLARLFGFFERAADSLVVVEYVGNGSLREHLDESCGNGLELAQRLNIAIDVAQAITYLHEYKERPIIHGGIRSSGVLLTDALTAKVAGFGLAGTAASGSGSGSDATPARSAAGYVDPEYLSTYQLTDKSDVYAFGVLLVELATGRPPVERTRGGEARLTTKWALQRCRAGEAVVAMDPRMRRSPASVAAVERALALAAQSVAAARDERPSMRRCSELLWTIRRDYHRQEEPRCGAVAEERSDEWVIR

SEQ ID NO: 25854 - protein, 422 aa, Zea mays subsp. mays
  misc_feature (1)..(422): Ceres Seq. ID no. 13494436
MKSAELSGSGASYGYGRTSSSPDACGYGRQLSAYSARSSQVSRSGSFSAAAQRVAGAFTGCFVPRRQVKAGEEEEEEEKKSKRSMDSGSYHGWNEANLSAAAGSWQEGRALTIADVSKATSNFSEKNVIRQGRSSTMYRGKLRDGSQIAVKCVTKLNDQSPTAELWRELEKIQHRNLARLFGFFERAADSLVVVEYVGNGSLREHLDESCGNGLELAQRLNIAIDVAQAITYLHEYKERPIIHGGIRSSGVLLTDALTAKVAGFGLAGTAASGSGSGSDATPARSAAGYVDPEYLSTYQLTDKSDVYAFGVLLVELATGRPPVERTRGGEARLTTKWALQRCRAGEAVVAMDPRMRRSPASVAAVERALALAAQSVAAARDERPSMRRCSELLWTIRRDYHRQEEPRCGAVAEERSDEWVIR

SEQ ID NO: 25855 - DNA, 1345 bp, Zea mays subsp. mays
  misc_feature (1)..(1345): Ceres Seq. ID no. 13494449
gttgagaccgcagagcgctcgccgaagcccgtcctgtcctgtagctagctgatctccctccgaaactctctgctcgcccgctgcctgctggaagcttggcgcggtcccggcggcggcattctccggcaatggggtgcaaggcgtgcgacaagcccaagcccagctaccgcaagggcctgtggtcgccggaggaggaccagaagctccgcgactacatcctcctccacggccacggctgctggagcgcgctccccgccaaagccgggctccagcggaacggcaagagctgcaggctgcggtggatcaactacctccggccgggcctgaagcacggcaccttctccccggaggaggaggagacggtgatgagcctccacgccacgctcggcaacaagtggtctaggatcgccaaacacctgcctggcaggaccgacaacgaggtcaagaaccactggaactcgtacctcaagaagagggtcgagggcaaggatggacccagcacgccgccgtccgattcagacgactcgcattgcgccaagcccgggggcggaagcacggcgcgggagacgggagacgaccgcccagcggactactccggctcgtcggagccgcgcgagccgtcgtcgtcgtcgtcgcccgacacgagctgcctgacgggcccgcccaaggtcatgttcgtggactggctcgacatggactgcatgggtggtggtggtggtggcccgccgggcgcggcggcagcggcagcggcacctggtctgggcgctgctgcgggcgtggccagggccagcacgggcgatgatcagatgacgatggatgatgggtcggcgtccggtcgtgccgacgtgtccctgcacggtacgttcggtgacagcggcggcgccggctgctgggagttccacgagagcttcgatcagatgcaggcggccggcttctgcgacctgctctcctccattggcgagtactacttcggactcgactaggctctcggccctggttggtgatcggtcgttgctcaaaggatttgcgcgtttttttttttttaactttgttagaagtttcgatggatggctttgtctgtgcttgtaaattgttgtcgtgtacggtatagatagagcaattttaaaggcagataaaagtcaaggacggtgacgagtcacgagtgtcgtgtttcttgcgggttcactttggggaggagtggagagcaccgacggatgggtaggaagatttattagttatatatgaggatataaagtacttaagagttgcnacgcttgcagctagcgattgggctgcacaaactgtgctttcttaatttgaaaatggggcgtcctcttttagtgtt

SEQ ID NO: 25856 - protein, 284 aa, Zea mays subsp. mays
  misc_feature (1)..(284): Ceres Seq. ID no. 15222931
MGCKACDKPKPSYRKGLWSPEEDQKLRDYILLHGHGCWSALPAKAGLQRNGKSCRLRWINYLRPGLKHGTFSPEEEETVMSLHATLGNKWSRIAKHLPGRTDNEVKNHWNSYLKKRVEGKDGPSTPPSDSDDSHCAKPGGGSTARETGDDRPADYSGSSEPREPSSSSSPDTSCLTGPPKVMFVDWLDMDCMGGGGGGPPGAAAAAAAPGLGAAAGVARASTGDDQMTMDDGSASGRADVSLHGTFGDSGGAGCWEFHESFDQMQAAGFCDLLSSIGEYYFGLD

SEQ ID NO: 25857 - protein, 205 aa, Zea mays subsp. mays
  misc_feature (1)..(205): Ceres Seq. ID no. 15222932
MSLHATLGNKWSRIAKHLPGRTDNEVKNHWNSYLKKRVEGKDGPSTPPSDSDDSHCAKPGGGSTARETGDDRPADYSGSSEPREPSSSSSPDTSCLTGPPKVMFVDWLDMDCMGGGGGGPPGAAAAAAAPGLGAAAGVARASTGDDQMTMDDGSASGRADVSLHGTFGDSGGAGCWEFHESFDQMQAAGFCDLLSSIGEYYFGLD

SEQ ID NO: 25858 - DNA, 1231 bp, Zea mays subsp. mays
  misc_feature (1)..(1231): Ceres Seq. ID no. 13494457
ctcacatcctctttcagttccctctctggatctcttcctgaagagaggcactactgccacaccaccacgccacccatgctcaacatgatgaccgatctgagctgcgggccgtcgtccaaggcggcgaaaggagggcagccggcagcgacgacgggctccggcggcgacaggcaggggaggggcaagatcgagatcaagcgcatcgagaacacgacgaaccggcaggtcaccttctgcaagcgccgcaacggcctgctcaagaaggcgtacgagctctcggtgctctgcgacgccgaggtcgcgctcgtcgtcttctccagccgcggccgcctctacgagtacgccaacaacagtgtgaagtccaccattgagaggtacaagaaggccaacagtgacacctccaactctggcacagttgcagaagtcaatgctcagcactaccagcaggagtcctccaagctgcgccaggcgatcgatagcttgcaaaacgcaaacaggaccatagtgggagattcaatccacaccatgggcctcagggagcttaagcagatggagggcaagctggagaaggccataaacaagattagagctagaaagaatgagctcttgtatgctgaagttgaatatatgcaaaaaagggagatggatctgcagactgacaacatgtacctgaggagcaagatcgccgagaataatgaaacggggcagccaccgatgaacatgattggattgccgtcgacgagcgagtacgatcacatggccccgtttgttgactcgagaaactttcttcaggtgaacatgcagcagcagcctcagcactactcccatctatcagctgcaaccaacgaccctccaactcggatgatgaaattaagaatcttcggccaacaatccatgcacgcaagcacgcagtaaatcatgtgtccaattcagataaaaaaatctactctagcgtttgtataattattaataatcgtgactagtaaactgttatatatatagccatgtgtgtgtggcgcctacatatatgtcatgtggctgtacggcgagtttttctttttcacaagcgtttgcagcagcatttggtgttgctcatcgatcaattaatcgcaagaaattaaacttgtcaccactgtgtgtgcattatttgtacgtgttaatgcagttgttgtatctgttaattgtaccctccatcagataaacgcgggtgcgcgtatgcatatttatgtgt

SEQ ID NO: 25859 - protein, 304 aa, Zea mays subsp. mays
  misc_feature (1)..(304): Ceres Seq. ID no. 13494458
LTSSFSSLSGSLPEERHYCHTTTPPMLNMMTDLSCGPSSKAAKGGQPAATTGSGGDRQGRGKIEIKRIENTTNRQVTFCKRRNGLLKKAYELSVLCDAEVALVVFSSRGRLYEYANNSVKSTIERYKKANSDTSNSGTVAEVNAQHYQQESSKLRQAIDSLQNANRTIVGDSIHTMGLRELKQMEGKLEKAINKIRARKNELLYAEVEYMQKREMDLQTDNMYLRSKIAENNETGQPPMNMIGLPSTSEYDHMAPFVDSRNFLQVNMQQQPQHYSHLSAATNDPPTRMMKLRIFGQQSMHASTQ

SEQ ID NO: 25860 - protein, 279 aa, Zea mays subsp. mays
  misc_feature (1)..(279): Ceres Seq. ID no. 13494459
MLNMMTDLSCGPSSKAAKGGQPAATTGSGGDRQGRGKIEIKRIENTTNRQVTFCKRRNGLLKKAYELSVLCDAEVALVVFSSRGRLYEYANNSVKSTIERYKKANSDTSNSGTVAEVNAQHYQQESSKLRQAIDSLQNANRTIVGDSIHTMGLRELKQMEGKLEKAINKIRARKNELLYAEVEYMQKREMDLQTDNMYLRSKIAENNETGQPPMNMIGLPSTSEYDHMAPFVDSRNFLQVNMQQQPQHYSHLSAATNDPPTRMMKLRIFGQQSMHASTQ

SEQ ID NO: 25861 - protein, 276 aa, Zea mays subsp. mays
  misc_feature (1)..(276): Ceres Seq. ID no. 13494460
MMTDLSCGPSSKAAKGGQPAATTGSGGDRQGRGKIEIKRIENTTNRQVTFCKRRNGLLKKAYELSVLCDAEVALVVFSSRGRLYEYANNSVKSTIERYKKANSDTSNSGTVAEVNAQHYQQESSKLRQAIDSLQNANRTIVGDSIHTMGLRELKQMEGKLEKAINKIRARKNELLYAEVEYMQKREMDLQTDNMYLRSKIAENNETGQPPMNMIGLPSTSEYDHMAPFVDSRNFLQVNMQQQPQHYSHLSAATNDPPTRMMKLRIFGQQSMHASTQ

SEQ ID NO: 25862 - DNA, 1431 bp, Zea mays subsp. mays
  misc_feature (1)..(1431): Ceres Seq. ID no. 13494461
aaccttctttccgctcacgacctgagtcccctctcccaggcccaggcagccgccgcccgtctctctctctcctccgagtcccttctcccaccgccgcaagcgctcgcccgagccacctccctctctccctgtggcctgaccgtgatttgggcgtggcatcctaaggcggtcaagattcgagaggctggaggaaccaagcgtagggcctccgccaccacgtcgtcgtccgcgcgcgccgcccgccggcgcaaggaggcgccacagcctccgacgcctagggagatgggggccgattactacaaggtcctcggcgtcgaccgcggcgccggcgacgacgacctcaagaaggcctaccggaagctcgccatgcgatggcaccccgacaagaacaccaccaacaagaaggaggcagaaaccaagttcaaggatatctctgttgcatatgaggtccttagtgatcccaagaaacgtgcaatctatgatcagctaggagaagaaggcttcaaggggcagccgcccccaggagcaggaggttctggcgcatttcccttcttccctggcggggctcattccaccgctccccattttaatcacaggagtgcggatgatatatttaaggagttctttggatcccctggcatgggtggcatgagagcggaaccaggattccagaggtcaatgtttggcaacgatatcttctcttcacgctttggcgctgagggttccaccagtatgcagcagccaccacgcaaggcagctgcaattgagaacccacttccagtcagccttgcagatctgtacaagggcgtcacgaaaaagatgaaaatctcaagagaggctatagatgccagcgggagaatctcaaacgcagaggatattctgacaatagaagtaaggcctggttggaagaagggaacaaagattacatttcccgacaaggggaatgaagctccaaacatgaaagctgctgatattgttttcatcctcgatgagaagccccatgatgttttcactcgggatgggaatgatcttgtggtgactgagaaaatctcgctggtggaagcgctgactggatatactgcacgtgtcactacgctcgatgggcggagcctatcattgcccatcaactcgataatccatccgagctatgaagaggtagttcctagagagggcatgccaatacccaaggacccctctaagaagggaaatctgcggattaagttcaacataatgttcccttctaggctgacgtctgatcagaaggctggtctcaaaaggatattgggttcttaggccgcctcaaatgacattttatagtgaaaggtattgtgaatatcgccagtaattggctaggtagattatttatttatttatgtaacatatctgtaacggatggttataatgtgtcagatttttatctcattattattt

SEQ ID NO: 25863 - protein, 430 aa, Zea mays subsp. mays
  misc_feature (1)..(430): Ceres Seq. ID no. 13494462
NLLSAHDLSPLSQAQAAAARLSLSSESLLPPPQALARATSLSPCGLTVIWAWHPKAVKIREAGGTKRRASATTSSSARAARRRKEAPQPPTPREMGADYYKVLGVDRGAGDDDLKKAYRKLAMRWHPDKNTTNKKEAETKFKDISVAYEVLSDPKKRAIYDQLGEEGFKGQPPPGAGGSGAFPFFPGGAHSTAPHFNHRSADDIFKEFFGSPGMGGMRAEPGFQRSMFGNDIFSSRFGAEGSTSMQQPPRKAAAIENPLPVSLADLYKGVTKKMKISREAIDASGRISNAEDILTIEVRPGWKKGTKITFPDKGNEAPNMKAADIVFILDEKPHDVFTRDGNDLVVTEKISLVEALTGYTARVTTLDGRSLSLPINSIIHPSYEEVVPREGMPIPKDPSKKGNLRIKFNIMFPSRLTSDQKAGLKRILGS

SEQ ID NO: 25864 - protein, 336 aa, Zea mays subsp. mays
  misc_feature (1)..(336): Ceres Seq. ID no. 13494463
MGADYYKVLGVDRGAGDDDLKKAYRKLAMRWHPDKNTTNKKEAETKFKDISVAYEVLSDPKKRAIYDQLGEEGFKGQPPPGAGGSGAFPFFPGGAHSTAPHFNHRSADDIFKEFFGSPGMGGMRAEPGFQRSMFGNDIFSSRFGAEGSTSMQQPPRKAAAIENPLPVSLADLYKGVTKKMKISREAIDASGRISNAEDILTIEVRPGWKKGTKITFPDKGNEAPNMKAADIVFILDEKPHDVFTRDGNDLVVTEKISLVEALTGYTARVTTLDGRSLSLPINSIIHPSYEEVVPREGMPIPKDPSKKGNLRIKFNIMFPSRLTSDQKAGLKRILGS

SEQ ID NO: 25865 - protein, 308 aa, Zea mays subsp. mays
  misc_feature (1)..(308): Ceres Seq. ID no. 13494464
MRWHPDKNTTNKKEAETKFKDISVAYEVLSDPKKRAIYDQLGEEGFKGQPPPGAGGSGAFPFFPGGAHSTAPHFNHRSADDIFKEFFGSPGMGGMRAEPGFQRSMFGNDIFSSRFGAEGSTSMQQPPRKAAAIENPLPVSLADLYKGVTKKMKISREAIDASGRISNAEDILTIEVRPGWKKGTKITFPDKGNEAPNMKAADIVFILDEKPHDVFTRDGNDLVVTEKISLVEALTGYTARVTTLDGRSLSLPINSIIHPSYEEVVPREGMPIPKDPSKKGNLRIKFNIMFPSRLTSDQKAGLKRILGS

SEQ ID NO: 25866 - DNA, 1224 bp, Zea mays subsp. mays
  misc_feature (1)..(1224): Ceres Seq. ID no. 13494493
ccctttcctgcccctccccctccgcctttcctctctctcgctctcctcctctcctctcctctcctctccttccgcatcacacaccacgactcccaaccgccggttggctttgctgctccgagctcttcctcttccacacccgccctctctcttgggtcggcggccgagtgtctgcgtcgtccacggagatcagggatcggcggcggggtatggcgagggagcgacgggagataaagaggatagagagcgcggcggcgcggcaggtcacgttctccaagcgccgccgcggcctcttcaagaaggctgaggagctctccgtgctgtgcgatgccgacgtcgcgctcatcgtcttctcctccacgggaaagctctcccagttcgccagctccagtatgaatgagatcattgacaagtacagcacacattctaaaaacctggggaaagcagaacagccttcacttgacttgaacttagaacatagcaaatatgcaaatttgaatgagcaacttgtggaagcaagccttcgactcaggcagatgagaggtgaagaacttgagggattgagtgttgaagaactccagcaattggagaagaatctggaatctggtctgcatagggtgcttcaaacaaaggatcaacaattcttggaacagatcagcgacctcgaacaaaagagtacacaactggcagaggagaacaggcaactgaggaatcaagtatcccacatacccccagttggcaagcaatcagttgctgatactgaaaatgttatcgctgaagatgggcaatcctctgaatcagtcatgactgcgttgcattctgggagttcacaggataatgatgatggttcggatgtctctctaaaattagggctgccttgtgttgcatggaagtgaaaaaacaagatggtctgtgttgatctgggtggagctgcggcttcagcagataggcacttgtgttattgtcttatggacgacccccgactactgcaataatcttgcatcggaagcgagatcagttaacctgatttgtcatccttgtggcttcatgatgcgatgttgcgcttgtaccgtttgctaggatgttaactggactagaatcgtgtctacttttgtactgctcgtgaatcctatctactttgtgctatccaaagttatgacctaccacttgcatcggcatggcgcgccggccgtaagctgtgctcaagcatgcatgcttcgtgtt

SEQ ID NO: 25867 - protein, 297 aa, Zea mays subsp. mays
  misc_feature (1)..(297): Ceres Seq. ID no. 13494494
LSCPSPSAFPLSRSPPLLSSPLLPHHTPRLPTAGWLCCSELFLFHTRPLSWVGGRVSASSTEIRDRRRGMARERREIKRIESAAARQVTFSKRRRGLFKKAEELSVLCDADVALIVFSSTGKLSQFASSSMNEIIDKYSTHSKNLGKAEQPSLDLNLEHSKYANLNEQLVEASLRLRQMRGEELEGLSVEELQQLEKNLESGLHRVLQTKDQQFLEQISDLEQKSTQLAEENRQLRNQVSHIPPVGKQSVADTENVIAEDGQSSESVMTALHSGSSQDNDDGSDVSLKLGLPCVAWK

SEQ ID NO: 25868 - protein, 228 aa, Zea mays subsp. mays
  misc_feature (1)..(228): Ceres Seq. ID no. 13494495
MARERREIKRIESAAARQVTFSKRRRGLFKKAEELSVLCDADVALIVFSSTGKLSQFASSSMNEIIDKYSTHSKNLGKAEQPSLDLNLEHSKYANLNEQLVEASLRLRQMRGEELEGLSVEELQQLEKNLESGLHRVLQTKDQQFLEQISDLEQKSTQLAEENRQLRNQVSHIPPVGKQSVADTENVIAEDGQSSESVMTALHSGSSQDNDDGSDVSLKLGLPCVAWK

SEQ ID NO: 25869 - protein, 167 aa, Zea mays subsp. mays
  misc_feature (1)..(167): Ceres Seq. ID no. 13494496
MNEIIDKYSTHSKNLGKAEQPSLDLNLEHSKYANLNEQLVEASLRLRQMRGEELEGLSVEELQQLEKNLESGLHRVLQTKDQQFLEQISDLEQKSTQLAEENRQLRNQVSHIPPVGKQSVADTENVIAEDGQSSESVMTALHSGSSQDNDDGSDVSLKLGLPCVAWK

SEQ ID NO: 25870 - DNA, 1739 bp, Zea mays subsp. mays
  misc_feature (1)..(1739): Ceres Seq. ID no. 13494501
tagaacatcctaatcgaaaaaccctaccccccacacggccacacacacaccgccgcgtccgacccccacgccgtcgactgctcgaccggtcggctccgatggggtacgtgctgtcggcggtgggcagggtgctggagcagcccacggcgtggggggcggcctgggagatggcactcctcgcggggcccctgtgggcggcggccctcctcggcctgctgctcggctgggcctggcgcccgcgctgggcatccggcctcgtcgtcgccaccgcggacgacggcggtagccccgccgccgccgcgcagccgcccttcgccacgctcgacttctggaaggcccagctccccgcccgcctccgcgccccgctcggcaccgccgtgcagcagagggagggtgacacggacgccgtgcaacggaaccgcggaacggtggcgcttggcaggtcctcagagacggagacggcgacggtggcggtggggatggccgacctggtgaacctctggaggctggtggagggcgcggacggcggcccggcctggaccaagatgatggagaagtcgctgcccaccatgacctaccgggcgtggaggagggacgcccagaccgggcctccgcagtaccagagcagcagcatcttcgagaacgccagtccagaggaggtgagggacttcttcggggacgacgagttccggatgtccaacaggtgggacgacatgctcatctaccacaagaccctggaggagtgccggaccactgggacgatgaaagtgcattgggtccggaagttccccttcttctgcagcgacagggagtacataatcgcccggcggatatggaagctggggggcgcctattattgcgtcacaaagggcataccatgctcatccattccacggcgtagcagacctcggagagtcgatctgtattactcaagctggtgcatccgcgcagtggagtccaggagagggaacggaggaggaaggggggcgacggcctgtgaggttctgctgttccaccacgaggacatgggcatcccgtacgagatcgccaagctgggcatcaggcaggggatgtgggggtgcgtgaagaggatcgagccggggctccgggcctaccagcaggcgcgggccgcgggggcgccgccgtcgcggagcgccctgatggcccggatcaacaccaaggtcagcgccgacggtttcactcgccagtcgtcgtccagttccagcggcggcgacgggccggagaccgcggacgacgcgcaggagaccgagaacaagaagcccgcgacgaggagccacgcagcggcgaggctcctcgtgctcggcggcgcggtcgctctggcctgctgcacccttgaccaggggctcctgaccaaggctctcatcttcggcgtcgcgcggaggttcgtcgggcagaggaaggacgttgtagcgtcccacacaccttgtcgctcgtacggtcgtgccgtgtgctgatcgccgacgtcgagaagcgggggaaggaggtggtttgtgtgggctttgtggatgtgtaattggtgctgatgccattgtggctgaaagagagcggacgaagagcgttttggtgtctacgtgtgtatacgctgccggctgtcggatcacgagggagaggggtttcctactatatacatgtgtaaaaatttgtttcatgtaatcttgtatctgagtgaccagatcaggtgattatgcagatgagaagaacagagttttttttcggcc

SEQ ID NO: 25871 - protein, 490 aa, Zea mays subsp. mays
  misc_feature (1)..(490): Ceres Seq. ID no. 13494502
EHPNRKTLPPTRPHTHRRVRPPRRRLLDRSAPMGYVLSAVGRVLEQPTAWGAAWEMALLAGPLWAAALLGLLLGWAWRPRWASGLVVATADDGGSPAAAAQPPFATLDFWKAQLPARLRAPLGTAVQQREGDTDAVQRNRGTVALGRSSETETATVAVGMADLVNLWRLVEGADGGPAWTKMMEKSLPTMTYRAWRRDAQTGPPQYQSSSIFENASPEEVRDFFGDDEFRMSNRWDDMLIYHKTLEECRTTGTMKVHWVRKFPFFCSDREYIIARRIWKLGGAYYCVTKGIPCSSIPRRSRPRRVDLYYSSWCIRAVESRRGNGGGRGATACEVLLFHHEDMGIPYEIAKLGIRQGMWGCVKRIEPGLRAYQQARAAGAPPSRSALMARINTKVSADGFTRQSSSSSSGGDGPETADDAQETENKKPATRSHAAARLLVLGGAVALACCTLDQGLLTKALIFGVARRFVGQRKDVVASHTPCRSYGRAVC

SEQ ID NO: 25872 - protein, 458 aa, Zea mays subsp. mays
  misc_feature (1)..(458): Ceres Seq. ID no. 13494503
MGYVLSAVGRVLEQPTAWGAAWEMALLAGPLWAAALLGLLLGWAWRPRWASGLVVATADDGGSPAAAAQPPFATLDFWKAQLPARLRAPLGTAVQQREGDTDAVQRNRGTVALGRSSETETATVAVGMADLVNLWRLVEGADGGPAWTKMMEKSLPTMTYRAWRRDAQTGPPQYQSSSIFENASPEEVRDFFGDDEFRMSNRWDDMLIYHKTLEECRTTGTMKVHWVRKFPFFCSDREYIIARRIWKLGGAYYCVTKGIPCSSIPRRSRPRRVDLYYSSWCIRAVESRRGNGGGRGATACEVLLFHHEDMGIPYEIAKLGIRQGMWGCVKRIEPGLRAYQQARAAGAPPSRSALMARINTKVSADGFTRQSSSSSSGGDGPETADDAQETENKKPATRSHAAARLLVLGGAVALACCTLDQGLLTKALIFGVARRFVGQRKDVVASHTPCRSYGRAVC

SEQ ID NO: 25873 - protein, 435 aa, Zea mays subsp. mays
  misc_feature (1)..(435): Ceres Seq. ID no. 13494504
MALLAGPLWAAALLGLLLGWAWRPRWASGLVVATADDGGSPAAAAQPPFATLDFWKAQLPARLRAPLGTAVQQREGDTDAVQRNRGTVALGRSSETETATVAVGMADLVNLWRLVEGADGGPAWTKMMEKSLPTMTYRAWRRDAQTGPPQYQSSSIFENASPEEVRDFFGDDEFRMSNRWDDMLIYHKTLEECRTTGTMKVHWVRKFPFFCSDREYIIARRIWKLGGAYYCVTKGIPCSSIPRRSRPRRVDLYYSSWCIRAVESRRGNGGGRGATACEVLLFHHEDMGIPYEIAKLGIRQGMWGCVKRIEPGLRAYQQARAAGAPPSRSALMARINTKVSADGFTRQSSSSSSGGDGPETADDAQETENKKPATRSHAAARLLVLGGAVALACCTLDQGLLTKALIFGVARRFVGQRKDVVASHTPCRSYGRAVC

SEQ ID NO: 25874 - DNA, 2016 bp, Zea mays subsp. mays
  misc_feature (1)..(2016): Ceres Seq. ID no. 13494527
ggcaccagtatatacctctgtatgtgagtgaggccaatgagagccctcgtagtcgtaagtttcgcttcggcgtgcttgctgctgctgttgcagctcgcaggagcgtcgcatgtcgtctacaactacaaggacctcgaagccgaggctgctgcggcgacggaccaggtgccgccgtccatcgtcaaccccctgctcaggacggggtaccacttccagccccccaagaactggatcaatgatcccaacgcgcccatgtactacaaggggtggtaccatttcttctaccaatacaatcccaaggscgccgtatggggcaacatcgygtgggcgcactcggtgtcgcgagacctcatcaactgggtggcgctagagccggcgctcagaccaagcatcccgggcgacaggtacggctgctggtccgggtcggcgacggtgctgcccgacggcggcggcccggtgatcatgwacacgggcgtggaccacccggacatcaactaccaggtccrgaacgtggcgtacccgaagaacgtgtcggacccgctgctccgggagtgggtgaagccctcgcacaaccccgtcatcgtccccgagggcggcatcaacgygacgcagttccgcgacccgaccacggcctggcgcggccccggccccgagcagtggcggctgctcgtcggcagcgcggcggggtcgtcgccgccccgcggcgtggcgtacgtgtaccgyagccgcgacttccggcggtggaggcgggtgcggcggccgctgcactcggcgcccacggggatgtgggagtgcccygacttctacccggtgagcaagggcggcgcgccgcgcgcggggctmgagacgtccgtgccgcccggcccaagggtsaagcacgtgctcaagaacagcctcgacctccggcggtacgactactacaccgtgggcacgtaccacccgagggccgagcggtacgtgccggacgaccccgccggcgacgagcaccgcctgcgctacgactacggcaacttctacgcgtccaagacgttctacgacccggccaagcggcgccgcatcctgtggggctgggctaacgagtccgacaccgccgccgacgatgtggcyaaaggctgggctggaatccaggcsattccaaggacggtgtggctggaccccagygggaagcagctgytgcagtggcctatcgaggaggtggaggcgctgagagcaaagtcggtcactctcargaacagggtaatcaaggcaggacatcacgtcgaggtgaccgggatacaracggcacaggctgacgtggaggtgagcttcgargtgtcgccgkcggccctggccggtgccgagacgctggacccggcgctggcctacgacgcggagaggctgtgcggcgtgaagcgcgcggacgtgmggggcggcgtggggcygttcgggactgtgggtgctggcctccgccaaccgcaaggagagaaccgcggtgttcttcagggtgttcangnnngccgccggcancgacaagcccgtggtgctcatgtgcaccgaccctaccaagtcgtcccwgaacccgaacctgtaccgsccgacatttgcaggatttgtygacacggacatctcgaacggcaagatatccctgagaagcctgatcgaccgrtcggtcgtkgagagcttcggagccgggggcaagacctgcatcctctccagggtctacccgtcgctggccatcggcaaggacgctcgcctctacgtgttcaacaacgggagggcgcacgtcaaggtgtcccgtctcaccgcgtgggagatgaagaagccggtcatgaacggggcctgaagatcttgaataaawaatatatcacccatgcatgacatatagtggcgcctgaggaatctttccttttttwttaaacatattttagatgtcgtttattaagagttgattstccatactaaagggcgccccgttatatgttacaatggtaccagctgcacttctagtaacaaagacaaattgactatttgttgttc

SEQ ID NO: 25875 - protein, 606 aa, Zea mays subsp. mays
  misc_feature (1)..(606): Ceres Seq. ID no. 15222933
  misc_feature (89)..(89): Xaa is any aa, unknown or other
  misc_feature (96)..(96): Xaa is any aa, unknown or other
  misc_feature (144)..(144): Xaa is any aa, unknown or other
  misc_feature (157)..(157): Xaa is any aa, unknown or other
  misc_feature (190)..(190): Xaa is any aa, unknown or other
  misc_feature (229)..(229): Xaa is any aa, unknown or other
  misc_feature (254)..(254): Xaa is any aa, unknown or other
  misc_feature (269)..(269): Xaa is any aa, unknown or other
  misc_feature (279)..(279): Xaa is any aa, unknown or other
  misc_feature (357)..(357): Xaa is any aa, unknown or other
  misc_feature (365)..(365): Xaa is any aa, unknown or other
  misc_feature (375)..(375): Xaa is any aa, unknown or other
  misc_feature (380)..(380): Xaa is any aa, unknown or other
  misc_feature (398)..(398): Xaa is any aa, unknown or other
  misc_feature (414)..(414): Xaa is any aa, unknown or other
  misc_feature (425)..(425): Xaa is any aa, unknown or other
  misc_feature (429)..(429): Xaa is any aa, unknown or other
  misc_feature (457)..(457): Xaa is any aa, unknown or other
  misc_feature (462)..(462): Xaa is any aa, unknown or other
  misc_feature (485)..(485): Xaa is any aa, unknown or other
  misc_feature (486)..(486): Xaa is any aa, unknown or other
  misc_feature (487)..(487): Xaa is any aa, unknown or other
  misc_feature (490)..(490): Xaa is any aa, unknown or other
  misc_feature (506)..(506): Xaa is any aa, unknown or other
  misc_feature (513)..(513): Xaa is any aa, unknown or other
  misc_feature (520)..(520): Xaa is any aa, unknown or other
  misc_feature (537)..(537): Xaa is any aa, unknown or other
  misc_feature (540)..(540): Xaa is any aa, unknown or other
  misc_feature (601)..(601): Xaa is any aa, unknown or other
MRALVVVSFASACLLLLLQLAGASHVVYNYKDLEAEAAAATDQVPPSIVNPLLRTGYHFQPPKNWINDPNAPMYYKGWYHFFYQYNPKXAVWGNIXWAHSVSRDLINWVALEPALRPSIPGDRYGCWSGSATVLPDGGGPVIMXTGVDHPDINYQVXNVAYPKNVSDPLLREWVKPSHNPVIVPEGGINXTQFRDPTTAWRGPGPEQWRLLVGSAAGSSPPRGVAYVYXSRDFRRWRRVRRPLHSAPTGMWECXDFYPVSKGGAPRAGXETSVPPGPRXKHVLKNSLDLRRYDYYTVGTYHPRAERYVPDDPAGDEHRLRYDYGNFYASKTFYDPAKRRRILWGWANESDTAADDVXKGWAGIQXIPRTVWLDPXGKQLXQWPIEEVEALRAKSVTLXNRVIKAGHHVEVTGIXTAQADVEVSFXVSPXALAGAETLDPALAYDAERLCGVKRADVXGGVGXFGTVGAGLRQPQGENRGVLQGVXXXRRXRQARGAHVHRPYQVVXEPEPVPXDICRICXHGHLERQDIPEKPDRPXGRXELRSRGQDLHPLQGLPVAGHRQGRSPLRVQQREGARQGVPSHRVGDEEAGHERGLKILNKXYITHA

SEQ ID NO: 25876 - protein, 534 aa, Zea mays subsp. mays
  misc_feature (1)..(534): Ceres Seq. ID no. 15222934
  misc_feature (17)..(17): Xaa is any aa, unknown or other
  misc_feature (24)..(24): Xaa is any aa, unknown or other
  misc_feature (72)..(72): Xaa is any aa, unknown or other
  misc_feature (85)..(85): Xaa is any aa, unknown or other
  misc_feature (118)..(118): Xaa is any aa, unknown or other
  misc_feature (157)..(157): Xaa is any aa, unknown or other
  misc_feature (182)..(182): Xaa is any aa, unknown or other
  misc_feature (197)..(197): Xaa is any aa, unknown or other
  misc_feature (207)..(207): Xaa is any aa, unknown or other
  misc_feature (285)..(285): Xaa is any aa, unknown or other
  misc_feature (293)..(293): Xaa is any aa, unknown or other
  misc_feature (303)..(303): Xaa is any aa, unknown or other
  misc_feature (308)..(308): Xaa is any aa, unknown or other
  misc_feature (326)..(326): Xaa is any aa, unknown or other
  misc_feature (342)..(342): Xaa is any aa, unknown or other
  misc_feature (353)..(353): Xaa is any aa, unknown or other
  misc_feature (357)..(357): Xaa is any aa, unknown or other
  misc_feature (385)..(385): Xaa is any aa, unknown or other
  misc_feature (390)..(390): Xaa is any aa, unknown or other
  misc_feature (413)..(413): Xaa is any aa, unknown or other
  misc_feature (414)..(414): Xaa is any aa, unknown or other
  misc_feature (415)..(415): Xaa is any aa, unknown or other
  misc_feature (418)..(418): Xaa is any aa, unknown or other
  misc_feature (434)..(434): Xaa is any aa, unknown or other
  misc_feature (441)..(441): Xaa is any aa, unknown or other
  misc_feature (448)..(448): Xaa is any aa, unknown or other
  misc_feature (465)..(465): Xaa is any aa, unknown or other
  misc_feature (468)..(468): Xaa is any aa, unknown or other
  misc_feature (529)..(529): Xaa is any aa, unknown or other
MYYKGWYHFFYQYNPKXAVWGNIXWAHSVSRDLINWVALEPALRPSIPGDRYGCWSGSATVLPDGGGPVIMXTGVDHPDINYQVXNVAYPKNVSDPLLREWVKPSHNPVIVPEGGINXTQFRDPTTAWRGPGPEQWRLLVGSAAGSSPPRGVAYVYXSRDFRRWRRVRRPLHSAPTGMWECXDFYPVSKGGAPRAGXETSVPPGPRXKHVLKNSLDLRRYDYYTVGTYHPRAERYVPDDPAGDEHRLRYDYGNFYASKTFYDPAKRRRILWGWANESDTAADDVXKGWAGIQXIPRTVWLDPXGKQLXQWPIEEVEALRAKSVTLXNRVIKAGHHVEVTGIXTAQADVEVSFXVSPXALAGAETLDPALAYDAERLCGVKRADVXGGVGXFGTVGAGLRQPQGENRGVLQGVXXXRRXRQARGAHVHRPYQVVXEPEPVPXDICRICXHGHLERQDIPEKPDRPXGRXELRSRGQDLHPLQGLPVAGHRQGRSPLRVQQREGARQGVPSHRVGDEEAGHERGLKILNKXYITHA

SEQ ID NO: 25877 - protein, 464 aa, Zea mays subsp. mays
  misc_feature (1)..(464): Ceres Seq. ID no. 15222935
  misc_feature (2)..(2): Xaa is any aa, unknown or other
  misc_feature (15)..(15): Xaa is any aa, unknown or other
  misc_feature (48)..(48): Xaa is any aa, unknown or other
  misc_feature (87)..(87): Xaa is any aa, unknown or other
  misc_feature (112)..(112): Xaa is any aa, unknown or other
  misc_feature (127)..(127): Xaa is any aa, unknown or other
  misc_feature (137)..(137): Xaa is any aa, unknown or other
  misc_feature (215)..(215): Xaa is any aa, unknown or other
  misc_feature (223)..(223): Xaa is any aa, unknown or other
  misc_feature (233)..(233): Xaa is any aa, unknown or other
  misc_feature (238)..(238): Xaa is any aa, unknown or other
  misc_feature (256)..(256): Xaa is any aa, unknown or other
  misc_feature (272)..(272): Xaa is any aa, unknown or other
  misc_feature (283)..(283): Xaa is any aa, unknown or other
  misc_feature (287)..(287): Xaa is any aa, unknown or other
  misc_feature (315)..(315): Xaa is any aa, unknown or other
  misc_feature (320)..(320): Xaa is any aa, unknown or other
  misc_feature (343)..(343): Xaa is any aa, unknown or other
  misc_feature (344)..(344): Xaa is any aa, unknown or other
  misc_feature (345)..(345): Xaa is any aa, unknown or other
  misc_feature (348)..(348): Xaa is any aa, unknown or other
  misc_feature (364)..(364): Xaa is any aa, unknown or other
  misc_feature (371)..(371): Xaa is any aa, unknown or other
  misc_feature (378)..(378): Xaa is any aa, unknown or other
  misc_feature (395)..(395): Xaa is any aa, unknown or other
  misc_feature (398)..(398): Xaa is any aa, unknown or other
  misc_feature (459)..(459): Xaa is any aa, unknown or other
MXTGVDHPDINYQVXNVAYPKNVSDPLLREWVKPSHNPVIVPEGGINXTQFRDPTTAWRGPGPEQWRLLVGSAAGSSPPRGVAYVYXSRDFRRWRRVRRPLHSAPTGMWECXDFYPVSKGGAPRAGXETSVPPGPRXKHVLKNSLDLRRYDYYTVGTYHPRAERYVPDDPAGDEHRLRYDYGNFYASKTFYDPAKRRRILWGWANESDTAADDVXKGWAGIQXIPRTVWLDPXGKQLXQWPIEEVEALRAKSVTLXNRVIKAGHHVEVTGIXTAQADVEVSFXVSPXALAGAETLDPALAYDAERLCGVKRADVXGGVGXFGTVGAGLRQPQGENRGVLQGVXXXRRXRQARGAHVHRPYQVVXEPEPVPXDICRICXHGHLERQDIPEKPDRPXGRXELRSRGQDLHPLQGLPVAGHRQGRSPLRVQQREGARQGVPSHRVGDEEAGHERGLKILNKXYITHA

SEQ ID NO: 25878 - DNA, 1883 bp, Zea mays subsp. mays
  misc_feature (1)..(1883): Ceres Seq. ID no. 13494565
ctaatcactagtataaagcaggcggagacagccggcccctctggcctcgctgctcccccttcctccccgtccccacccacatgccctgcctccgccccgccccgccctgcccaaggtgattgattgattggttgcttggttgcttgcttcgtttcacgctttccccttcctttgctgagatccaaaagctgagactcagcttgtcgatccatctgttctgtgcgcctactcgtatcttaggatccatctgtatgttgtttacttgttttcctgattgaatcgcgcattggatgcctggtggttggccttgctcctagtcttttcatttacacgagctttcgacgaagccgcgtctggtctgtctgctccatcacaagagcacgcaaatggttcgatctgccgtgccagatgattgctgcattcagtgggacgtcatgcacatccacgatggattgtagcgtcagcactctgatctttccttgtcgatttgtttgtcgcagctgagttcccccaccccccaacaaacaattactagagtagctgcattggcggggaaattaaagcgctagaagctcagcagcaatggcggagcaggcgggcgccggaaggtactggtgccacatgtgcgccgcggccgttagccccgcggagggcgaggtggagatgaagtgcccgttctgccacagcggcttcctcgaggagatggagaccgcccgcggggccgcgaccgacgacggtgacggcgacggcgcggtggctcaggtgcaccccggcgccgaccgcccgagctccatctgggcgcacgctatcctcagcacggtcgacagctccgcccgtcgccgccgcaaccggcggcagcaggaggccgccagcgacgtctacgactggaacgaccccgagttctcgctgcgccggcggcgcgtcaccgcgttcctgcggctcctgcacgagctccgggaccgccagctgcagcggctggagtccgctgccggcgtcgccctcgaaggcgaccagctgaccccgttcggccggagcctcttcatcggcgcagctggcggcgagcatggcgtggcgctgggcgactacttcctcggccccagcctcgacgccttggtacagcagctcgccgagaacgatgcggcgcggcacggaacgccgccggccaagaaggaggccgtggaggcaatgccgaccgtggaaatcgccggcggcaacgatggcgacgacgcggccagctgcccggtctgcctggaggactacgcggccggcgagcgcgcccgcgagatgccctgcaggcacaggttccacgccaattgcatcgtgccgtggctcgagatgcacagctcctgccctgtctgccggttccagctgccggccaccgacgacaagagctcatgcaacggcggcgacggtggtttcgtcagtgtcgatgcggatcgtgaaggcagtgacaacggcgggggtgatggtagggcaagctctcggggcaatgccgagctagctgaagctgaagagagtggcaggcggttgccgccatccttgcagtggctcaacagcctgttctcgccgtcggcgcagtcctccggtagcggcggcagcagttcgcatcattgggagaactaagcaatattgccatggttgctgccgcttgaaagcttggcccgttggttggtcccaatgtacataggaaggagcaggagcgcatgccgggttggtgccatggaaaaatctggacccttttttctctgatatgtatcatggctgtaaaaaagaacagaaatgggcaaatgtatgaacttgccgcgctcttgcgtgaactgggtgctaatcatcgtcttactactcaattttggtttttattaacaaaactatagtatttatgc

SEQ ID NO: 25879 - protein, 346 aa, Zea mays subsp. mays
  misc_feature (1)..(346): Ceres Seq. ID no. 13494566
MAEQAGAGRYWCHMCAAAVSPAEGEVEMKCPFCHSGFLEEMETARGAATDDGDGDGAVAQVHPGADRPSSIWAHAILSTVDSSARRRRNRRQQEAASDVYDWNDPEFSLRRRRVTAFLRLLHELRDRQLQRLESAAGVALEGDQLTPFGRSLFIGAAGGEHGVALGDYFLGPSLDALVQQLAENDAARHGTPPAKKEAVEAMPTVEIAGGNDGDDAASCPVCLEDYAAGERAREMPCRHRFHANCIVPWLEMHSSCPVCRFQLPATDDKSSCNGGDGGFVSVDADREGSDNGGGDGRASSRGNAELAEAEESGRRLPPSLQWLNSLFSPSAQSSGSGGSSSHHWEN

SEQ ID NO: 25880 - protein, 333 aa, Zea mays subsp. mays
  misc_feature (1)..(333): Ceres Seq. ID no. 13494567
MCAAAVSPAEGEVEMKCPFCHSGFLEEMETARGAATDDGDGDGAVAQVHPGADRPSSIWAHAILSTVDSSARRRRNRRQQEAASDVYDWNDPEFSLRRRRVTAFLRLLHELRDRQLQRLESAAGVALEGDQLTPFGRSLFIGAAGGEHGVALGDYFLGPSLDALVQQLAENDAARHGTPPAKKEAVEAMPTVEIAGGNDGDDAASCPVCLEDYAAGERAREMPCRHRFHANCIVPWLEMHSSCPVCRFQLPATDDKSSCNGGDGGFVSVDADREGSDNGGGDGRASSRGNAELAEAEESGRRLPPSLQWLNSLFSPSAQSSGSGGSSSHHWEN

SEQ ID NO: 25881 - protein, 319 aa, Zea mays subsp. mays
  misc_feature (1)..(319): Ceres Seq. ID no. 13494568
MKCPFCHSGFLEEMETARGAATDDGDGDGAVAQVHPGADRPSSIWAHAILSTVDSSARRRRNRRQQEAASDVYDWNDPEFSLRRRRVTAFLRLLHELRDRQLQRLESAAGVALEGDQLTPFGRSLFIGAAGGEHGVALGDYFLGPSLDALVQQLAENDAARHGTPPAKKEAVEAMPTVEIAGGNDGDDAASCPVCLEDYAAGERAREMPCRHRFHANCIVPWLEMHSSCPVCRFQLPATDDKSSCNGGDGGFVSVDADREGSDNGGGDGRASSRGNAELAEAEESGRRLPPSLQWLNSLFSPSAQSSGSGGSSSHHWEN

SEQ ID NO: 25882 - DNA, 1533 bp, Zea mays subsp. mays
  misc_feature (1)..(1533): Ceres Seq. ID no. 13494573
aatctcagttgtccttgtcccctcgaacgcgcactgttcaaacaaaccctccactgccctccccactctccccttcaccgcgccgcactcccaagtcccaactcccaacaggcctaaatggcggcggccggaacaattcccggcgccgccgcagccattggcgcttctgtgtcccaacgccaacgtcgcgtcggcgctccttctttcgtagctgcctacgtctccgagggcacccgcctcgtctgccggaggcagctccgtccggctccggtcctcgcttcttccttcatctccctttctcatccagcgaggcggcggttcctctgcgatgctgcggccggagcctcctcaggtcccgctggagaagccaagccccagggatttgcagagagatacccagctcttgtcacaggtttcttcttcttcttgtggtattttctgaatgtaatatttaacatcctcaacaagaagatcttcgactacttcccctatccatattttgtgtcagtgagccatctttttattggagtactatactgccttattggctggagcttcggcatcccaaagcgcgcgccaatcaactcaacacttctgaagcagcttgttccagttgcggtttgccatgccattggccatgtaacaagcactgtgtcatttgctgctgtagctgtgtcatttgcccacactattaaagctctcgagccattcttcaatgcggctgcttcccagtttatccttggacaaccagttccattgacactctggctgtctcttgttccagtggtgattggtgtctcggtagcatccctcactgaactctcatttaattggactggcttcattaatgccatgatctcaaatatttctttcacctaccgaagcatctattctaagaaggctatgactgacatggatagtaccaacttgtatgcatacatatcaataattgctctctttgtctgcatcccccctgcaattattattgaaggacctcaattagtgcagcatggttttaaagatgcaattgccaaagttggattaacaaagttgatttctaatttttttgtggtgggcttattctatcacctttataaccaggttgctacaaacacattggagcgggtagcccctttaacacatgccatcggcaatgtgttgaaacgtgttttcgtcattggcttttccatcatcgcattcggcaacaagatcaccacacagactggaattggcacttccattgctgtttctggtgttgccctctactcatttataaaggctaagattgaggagaaaaagcaaataaagagtgcataaggtgttggctgatgtggatgcggttggtttgtcgctttgatggacctctattctctcggtgaacgaacaaacttgcaagatggataaaatcttgctatctcctagtacatttgattgttattcccagtctggtactgaggtgtgcggttgttgttggctaacttgtttatttgaagcaaatttgagcaatgctcagtggcatggaatttccattcc

SEQ ID NO: 25883 - protein, 399 aa, Zea mays subsp. mays
  misc_feature (1)..(399): Ceres Seq. ID no. 13494574
MAAAGTIPGAAAAIGASVSQRQRRVGAPSFVAAYVSEGTRLVCRRQLRPAPVLASSFISLSHPARRRFLCDAAAGASSGPAGEAKPQGFAERYPALVTGFFFFLWYFLNVIFNILNKKIFDYFPYPYFVSVSHLFIGVLYCLIGWSFGIPKRAPINSTLLKQLVPVAVCHAIGHVTSTVSFAAVAVSFAHTIKALEPFFNAAASQFILGQPVPLTLWLSLVPVVIGVSVASLTELSFNWTGFINAMISNISFTYRSIYSKKAMTDMDSTNLYAYISIIALFVCIPPAIIIEGPQLVQHGFKDAIAKVGLTKLISNFFVVGLFYHLYNQVATNTLERVAPLTHAIGNVLKRVFVIGFSIIAFGNKITTQTGIGTSIAVSGVALYSFIKAKIEEKKQIKSA

SEQ ID NO: 25884 - DNA, 1394 bp, Zea mays subsp. mays
  misc_feature (1)..(1394): Ceres Seq. ID no. 13494608
aatcgaaaagatttgttttgatttctgagccttctcttgtgtcgttctgtgttgggttgcggacgcgtcctcaactaggtttttcttccatcatttgtgtgttcgttcaactgagccgccatgcgccagccacggtccgggccggggaagaggcggggccgcggtccgcgcatccctgcggcgacgcttcagaagcagaaaacggcgttggcgaacgtcgaccagatcaccggcgccaagattccgaagagcttcgtattctcccgcggtaaactcccctccacgcttcgccatcttcagcaggacctccgcaaggtcatgctcccctacactgctctcaatctcaaggagaagaaacgaaataacctcaaggattttgtcaatgttgccggcccgatgggtgtgacacatttcttaatcctctcaaaccctcaaagcctgccacatttgcgctttgccaaatcaccgcagggcccaacattcacatttcagatagaggagtactcacttgcggcggacattgcaaactctcagaagcgcccaaggtgcccaccagggatattcaaaaactcaccactggttgtacttggtgggttgacaggtctcggcaaccctttcaggagtttggtcgaatacttccaacatatgttcccttccgttgacccaaccactgtcaagctggcaacatgccaaaggattctgttgttaaaacatgataaagagaaggatgttattgaattccggcattactccatcaagctccagcctgttggggtcagtcgcaggattagaaagctcatgcaaaacaatcaagtgcctgatctaggagaatttgaagatgttagtgagtttgtgaaaaaagctgggtatggatcagaaagtgaagcagacgatgaagcagcaatggtaagcttgccaagtgacattgacaaattaaaccgggcatccagaaaaagcgctgtcagactccaggagattggaccaaggatgactatgcgcctagttaaagttgaagctgggctatgttcaggagatgtcttatacccatggcctgtggaaaaggaagtggtgggaaagaaaggaacagaaactggggaagtagaagggcaagaagacgattctgaggccacagatgagtccgaggatgagatggtgtaggatttcagatgttttggacaggcagacgcaggtgttttgacagtcctggatgtttcatgctgaaaccaacgggccctgtgcccaataacgtggtgcattcatgccaattttgtcactgaaggtgcattgcattcgttgtaacgaagtgtaacattgttttgccgatggttacctcttttgtgttatgacaagtttggaggatagtttttggttcgcagtctaagatttctcattct

SEQ ID NO: 25885 - protein, 345 aa, Zea mays subsp. mays
  misc_feature (1)..(345): Ceres Seq. ID no. 13494609
MRQPRSGPGKRRGRGPRIPAATLQKQKTALANVDQITGAKIPKSFVFSRGKLPSTLRHLQQDLRKVMLPYTALNLKEKKRNNLKDFVNVAGPMGVTHFLILSNPQSLPHLRFAKSPQGPTFTFQIEEYSLAADIANSQKRPRCPPGIFKNSPLVVLGGLTGLGNPFRSLVEYFQHMFPSVDPTTVKLATCQRILLLKHDKEKDVIEFRHYSIKLQPVGVSRRIRKLMQNNQVPDLGEFEDVSEFVKKAGYGSESEADDEAAMVSLPSDIDKLNRASRKSAVRLQEIGPRMTMRLVKVEAGLCSGDVLYPWPVEKEVVGKKGTETGEVEGQEDDSEATDESEDEMV

SEQ ID NO: 25886 - protein, 279 aa, Zea mays subsp. mays
  misc_feature (1)..(279): Ceres Seq. ID no. 13494610
MLPYTALNLKEKKRNNLKDFVNVAGPMGVTHFLILSNPQSLPHLRFAKSPQGPTFTFQIEEYSLAADIANSQKRPRCPPGIFKNSPLVVLGGLTGLGNPFRSLVEYFQHMFPSVDPTTVKLATCQRILLLKHDKEKDVIEFRHYSIKLQPVGVSRRIRKLMQNNQVPDLGEFEDVSEFVKKAGYGSESEADDEAAMVSLPSDIDKLNRASRKSAVRLQEIGPRMTMRLVKVEAGLCSGDVLYPWPVEKEVVGKKGTETGEVEGQEDDSEATDESEDEMV

SEQ ID NO: 25887 - protein, 253 aa, Zea mays subsp. mays
  misc_feature (1)..(253): Ceres Seq. ID no. 13494611
MGVTHFLILSNPQSLPHLRFAKSPQGPTFTFQIEEYSLAADIANSQKRPRCPPGIFKNSPLVVLGGLTGLGNPFRSLVEYFQHMFPSVDPTTVKLATCQRILLLKHDKEKDVIEFRHYSIKLQPVGVSRRIRKLMQNNQVPDLGEFEDVSEFVKKAGYGSESEADDEAAMVSLPSDIDKLNRASRKSAVRLQEIGPRMTMRLVKVEAGLCSGDVLYPWPVEKEVVGKKGTETGEVEGQEDDSEATDESEDEMV

SEQ ID NO: 25888 - DNA, 1957 bp, Zea mays subsp. mays
  misc_feature (1)..(1957): Ceres Seq. ID no. 13494733
aggcctccactcattcctgcccccgacactcccactgccaccagtcctctcaccgccaggcgcggcacaatgcagccgcctacccttctcccgctaggcgccgtcgtggtcgccatcctcctgctcgccaccgccccgagccccgccgtctcccgccaccgccactcgtccgccgcggacacggagacgctcgatgtagccgcctcgctctcccgcgcccgcgccgcgctctccaccgacgccgtctcggntgcaccagtccgcggccgccgccgccgccggggcgaagcgctccccgcgagcgcgggagggcggcctcacgctgcggctccactcccgggacttcctgcccgaggagcaggggcggcacgagacgtaccgctcgctcgtgctctcccgcctccgccgcgactcggcgcgcgccgctgcggtgtcggcccgcgcgacgctggcggcggacggcgtgacccggctggacctgcgccccgcgaacgggtcggcggtgttcgcggcgtcggcggcggcggcggcgatccagggtcccgtggtgtccggcgtcgggcagggcagcggcgagtacttctcccgcgtgggcatcggcagccccgcgcggcagctgtacatggtgctggacaccggcagcgacgtcacctgggtgcagtgccagccctgcgccgactgctaccagcagtccgacccggtgttcgacccgtccctctccgcctcctacgccgccgtctcctgcgactcccagcgctgccgggacctggacaccgcggcgtgccgcaacgccacgggcgcctgcctctacgaggtggcctacggcgacggctcctacaccgtgggcgacttcgccaccgagacgctcacgctgggggactccaccccggtcggcaacgtcgccatcgggtgcggccacgacaacgagggcctcttcgtcggcgccgcggggctgctggcgctgggcggcgggccgctctccttcccgtcccagatctccgcgtccaccttctcctactgcctcgtggaccgcgactccccggccgcgtccacgctccagttcggcgacggcgccgccgaggcgggcaccgtgacggcgcctctcgtgcgcagcccgcgcacgagcaccttctactacgtggcgctttcgggcatctcggtgggcgggcagccgctgtccatcccggcatccgccttcgccatggacgccacgtcgggctcgggcggcgtcatcgtggactccggcaccgccgtgacgcggctccagtccgccgcgtacgcggcgctccgcgacgccttcgtccagggcgcgccgtcgctgccccggacctccggggtgtcgctgttcgacacgtgctacgacctgtcggaccggacgagcgtggaggtgcccgcggtgtcgctgcggttcgagggcggcggcgcgctgcggctgccggcgaagaactacctgatccccgtggacggagccggcacctactgcctggcgttcgcgccgacgaacgcggccgtgtccatcatcgggaacgtgcagcagcagggcacccgcgtcagcttcgacaccgccaggggcgccgtcggcttcacccccaacaagtgctagcctagcctagcctaagcctgccttctggctaaccgtgccctgttagccacggttgtcagtagtaatgacaagccggtgtttaattagcgggagaatgattagatggggggtaattaagcggtgggccctgccgggtctggggaggagcgaaaggcaaaggcgaggacagatgatgccattgccatgccagcctgtgtccggcgcgatgggtccagctccagcagtgtttctctctttctctcgagtatgcgtgcgtggagccttgtcatgacgaattagatcgtgggggctcccaagttaagagtatttatttttattttatttgctatgtcaagaaaatggaagtttccatcc

SEQ ID NO: 25889 - protein, 535 aa, Zea mays subsp. mays
  misc_feature (1)..(535): Ceres Seq. ID no. 13494734
  misc_feature (84)..(84): Xaa is any aa, unknown or other
RPPLIPAPDTPTATSPLTARRGTMQPPTLLPLGAVVVAILLLATAPSPAVSRHRHSSAADTETLDVAASLSRARAALSTDAVSXAPVRGRRRRRGEALPASAGGRPHAAAPLPGLPARGAGAARDVPLARALPPPPRLGARRCGVGPRDAGGGRRDPAGPAPRERVGGVRGVGGGGGDPGSRGVRRRAGQRRVLLPRGHRQPRAAAVHGAGHRQRRHLGAVPALRRLLPAVRPGVRPVPLRLLRRRLLRLPALPGPGHRGVPQRHGRLPLRGGLRRRLLHRGRLRHRDAHAGGLHPGRQRRHRVRPRQRGPLRRRRGAAGAGRRAALLPVPDLRVHLLLLPRGPRLPGRVHAPVRRRRRRGGHRDGASRAQPAHEHLLLRGAFGHLGGRAAAVHPGIRLRHGRHVGLGRRHRGLRHRRDAAPVRRVRGAPRRLRPGRAVAAPDLRGVAVRHVLRPVGPDERGGARGVAAVRGRRRAAAAGEELPDPRGRSRHLLPGVRADERGRVHHRERAAAGHPRQLRHRQGRRRLHPQQVLA

SEQ ID NO: 25890 - protein, 512 aa, Zea mays subsp. mays
  misc_feature (1)..(512): Ceres Seq. ID no. 13494735
  misc_feature (61)..(61): Xaa is any aa, unknown or other
MQPPTLLPLGAVVVAILLLATAPSPAVSRHRHSSAADTETLDVAASLSRARAALSTDAVSXAPVRGRRRRRGEALPASAGGRPHAAAPLPGLPARGAGAARDVPLARALPPPPRLGARRCGVGPRDAGGGRRDPAGPAPRERVGGVRGVGGGGGDPGSRGVRRRAGQRRVLLPRGHRQPRAAAVHGAGHRQRRHLGAVPALRRLLPAVRPGVRPVPLRLLRRRLLRLPALPGPGHRGVPQRHGRLPLRGGLRRRLLHRGRLRHRDAHAGGLHPGRQRRHRVRPRQRGPLRRRRGAAGAGRRAALLPVPDLRVHLLLLPRGPRLPGRVHAPVRRRRRRGGHRDGASRAQPAHEHLLLRGAFGHLGGRAAAVHPGIRLRHGRHVGLGRRHRGLRHRRDAAPVRRVRGAPRRLRPGRAVAAPDLRGVAVRHVLRPVGPDERGGARGVAAVRGRRRAAAAGEELPDPRGRSRHLLPGVRADERGRVHHRERAAAGHPRQLRHRQGRRRLHPQQVLA

SEQ ID NO: 25891 - protein, 326 aa, Zea mays subsp. mays
  misc_feature (1)..(326): Ceres Seq. ID no. 13494736
MVLDTGSDVTWVQCQPCADCYQQSDPVFDPSLSASYAAVSCDSQRCRDLDTAACRNATGACLYEVAYGDGSYTVGDFATETLTLGDSTPVGNVAIGCGHDNEGLFVGAAGLLALGGGPLSFPSQISASTFSYCLVDRDSPAASTLQFGDGAAEAGTVTAPLVRSPRTSTFYYVALSGISVGGQPLSIPASAFAMDATSGSGGVIVDSGTAVTRLQSAAYAALRDAFVQGAPSLPRTSGVSLFDTCYDLSDRTSVEVPAVSLRFEGGGALRLPAKNYLIPVDGAGTYCLAFAPTNAAVSIIGNVQQQGTRVSFDTARGAVGFTPNKC

SEQ ID NO: 25892 - DNA, 1625 bp, Zea mays subsp. mays
  misc_feature (1)..(1625): Ceres Seq. ID no. 13494770
atccccagctccgtttccgtctccggcaccaggaccagtgccacgccaaccaccgctacctgctccacgccaaacgccagttgctttgcagctactcgtgcagccgtgctcgccgcacacgattggcgccagtctttagttcaccggcaaagcttccgcgagcgcgcgggtgtaccacgtgacggactacggcgcggacccgaccggcgccgccgacgccacggcggcgatcagcaaggccatagctgacgcgttccgcccgcccaccaacgccaccatgaccggcggcatccccgacctcggcggcgccgaggtgcacctcgacggcggcacgtacctcatcaaggggcccctcacgctgccggcatccggcggcggcaacttcaagatccacagcgggtcgctgcgcgcgtccgacgacttcccgacggaccggtacctgatcgagctgtcggcggccaagagcagccggagctacgactacgagtacgccacgctgcgggacctgatgctggactgcagctaccgcggcggcggcgtggcggtggtggactcgctccgcgtcgccgtcgacaactgctacgtggcgcacttcgcgtccgacggcgtcgcggtgcgcggcggccacgagacgctcatccgcaacacctacctcggccagcacatgacggccgggggcgacccgggggagcgcggcttcacgggcacggccatccgcctcgacggcaacgacaactccgtgtccggacgtcgtcatcttctccgcggccacggggatcatggtcaccgcgccggccaactccatctccggcgtgcactgctacaacaaggccacgggcttcggcggcaccggcatccacctcaagatcccgggcctcacgcaggcgtggatcagcaactgctacatggactacaccagcatcgtcgccgaggaccccgtgctgctccacgtctccggatccttcttcctcggcgacgccaacgtcgtcctcaaggccgtcagcggcgtcgccaggggcgtccaggtcgtcggcaacatcttcagcggcagggacaagggcgtcgacatcgtgcagctggacggcgccttcgccaccgtggaccaggtgtacgtgcagcagaactccgccacggggatgaccgtcaggtccacctccgcgcgcgcatcgctccagggcaacgggacctcctggacgctcgacttctcgccggtgctgctgttcccggaccgcatcggccacgtgcagtactcgctcgtcgccggcgacgagttcccgggccacacgctccggaacgtgtccgggaaccaggtcgtggtcgccaccgacaaggccgtctcggccacggtccacgtcttggtggaccagaacagcgactgagataagataagagacactcgagagtgcctgcgtgcacgcagtatgcgtgctgctgcctgctcgcgcggctgctgcggagcaaggcgttattccttcgtttctttcttcttctcggaaatttcagccattcatgtcgtcgggaagatgacaattgtttgatgcgacaaaatgctccagaatgtatcattcttttgctgtatgaaatgaaatgattcagaagctccatcaatntgcgtaccaaggcat

SEQ ID NO: 25893 - protein, 368 aa, Zea mays subsp. mays
  misc_feature (1)..(368): Ceres Seq. ID no. 13494771
MTGGIPDLGGAEVHLDGGTYLIKGPLTLPASGGGNFKIHSGSLRASDDFPTDRYLIELSAAKSSRSYDYEYATLRDLMLDCSYRGGGVAVVDSLRVAVDNCYVAHFASDGVAVRGGHETLIRNTYLGQHMTAGGDPGERGFTGTAIRLDGNDNSVSGRRHLLRGHGDHGHRAGQLHLRRALLQQGHGLRRHRHPPQDPGPHAGVDQQLLHGLHQHRRRGPRAAPRLRILLPRRRQRRPQGRQRRRQGRPGRRQHLQRQGQGRRHRAAGRRLRHRGPGVRAAELRHGDDRQVHLRARIAPGQRDLLDARLLAGAAVPGPHRPRAVLARRRRRVPGPHAPERVREPGRGRHRQGRLGHGPRLGGPEQRLR

SEQ ID NO: 25894 - protein, 291 aa, Zea mays subsp. mays
  misc_feature (1)..(291): Ceres Seq. ID no. 13494772
MLDCSYRGGGVAVVDSLRVAVDNCYVAHFASDGVAVRGGHETLIRNTYLGQHMTAGGDPGERGFTGTAIRLDGNDNSVSGRRHLLRGHGDHGHRAGQLHLRRALLQQGHGLRRHRHPPQDPGPHAGVDQQLLHGLHQHRRRGPRAAPRLRILLPRRRQRRPQGRQRRRQGRPGRRQHLQRQGQGRRHRAAGRRLRHRGPGVRAAELRHGDDRQVHLRARIAPGQRDLLDARLLAGAAVPGPHRPRAVLARRRRRVPGPHAPERVREPGRGRHRQGRLGHGPRLGGPEQRLR

SEQ ID NO: 25895 - protein, 239 aa, Zea mays subsp. mays
  misc_feature (1)..(239): Ceres Seq. ID no. 13494773
MTAGGDPGERGFTGTAIRLDGNDNSVSGRRHLLRGHGDHGHRAGQLHLRRALLQQGHGLRRHRHPPQDPGPHAGVDQQLLHGLHQHRRRGPRAAPRLRILLPRRRQRRPQGRQRRRQGRPGRRQHLQRQGQGRRHRAAGRRLRHRGPGVRAAELRHGDDRQVHLRARIAPGQRDLLDARLLAGAAVPGPHRPRAVLARRRRRVPGPHAPERVREPGRGRHRQGRLGHGPRLGGPEQRLR

SEQ ID NO: 25896 - DNA, 1561 bp, Zea mays subsp. mays
  misc_feature (1)..(1561): Ceres Seq. ID no. 13494774
aagaaccccgacccgaccgccgatagctacctagctcccaccccgcacccctgactccaccttctccattcttgatcccttcgccgcgcggagatccaagaacaggggcagcctgacaggggaacgggcggctatgggaggaagcagcgcgatgctcgccgtgttggcggtggtggttcttgcggcggtcggcggcgctgacgccgcggcggaatcgagtgaggcgtcggccaaggggaggtaccacgcgctcttcaatttcggggactcgctagccgacgctggcaacctcatccagaacggcaccccggacatcctggccaccgcgcgcctgccctacggccagacctacttcggcagggccaccggccgctgctccgacggacgcctcgtcatcgaccacctcgcacaagagtttggcctgccgctgctgccgccgtccaaggccacgaacgccagcttcgcgtacggcgccaatttcgccatcaccggcgccaccgcgctcgacacgccctacttcgaggccaaggggctcggtgccgtcatctggaactccggagcgctcatgacccaaatccagtggttccgtgatctcaagcctttcttctgcaacacaacgcaggcatgcaagaaattctttgccaaggcgctgtttgtggtcggtgagtttggcggcaatgactacaatgcacccctctttgcgggcatgggcatcccagaggtttacaaattcatgccggatgtcatccagggcatctctgacggtattgaggcactgattgctgagggggctgtggagatgattgtgcctggtgttatgcccactggctgcttcccagtgtacttgaacatgcttgatgagcccaaagagggatatggctcccgcagtgggtgtgtccgccggtacaacacattctcctgggtgcacaatgcacatctcaaggccatgcttaagaagctccgggctaagcatcccaatgtgaggatcatatatggcgattactacactccagttgtccagttcatgcttcagcctgagaagtttggttttgccaaacaactgcctagggcatgttgtggggctccatcgactcctgagaaagcagcttacaacttcaatgtcacggccaaatgcggtgagcctggtgcgactgcctgtgctgatccgacaacccattggagctgggatggcattcacctgacggaggctgcgtaccgccatatcgctaaaggctggttatacgggccttttgcggaccaaccaatcatccaatcctcatgatcacgccactcctgctgtagagtttcatcaaagtagcgcactggaaaaaaaatggagcgggggaaagtagttcttccatacagtttcaatgtttgcatacatgtacatctccattttgattgtattcatttaacttgggtggtacaaaggtgggatagggaggctgcacaaaggcctgatttcttgatttgtcagggggtataaatatgaaaaatataacgtacatataatcatgtatattgtgtcctggaaatgtgatacagactgtctgcttgagct

SEQ ID NO: 25897 - protein, 382 aa, Zea mays subsp. mays
  misc_feature (1)..(382): Ceres Seq. ID no. 13494775
MGGSSAMLAVLAVVVLAAVGGADAAAESSEASAKGRYHALFNFGDSLADAGNLIQNGTPDILATARLPYGQTYFGRATGRCSDGRLVIDHLAQEFGLPLLPPSKATNASFAYGANFAITGATALDTPYFEAKGLGAVIWNSGALMTQIQWFRDLKPFFCNTTQACKKFFAKALFVVGEFGGNDYNAPLFAGMGIPEVYKFMPDVIQGISDGIEALIAEGAVEMIVPGVMPTGCFPVYLNMLDEPKEGYGSRSGCVRRYNTFSWVHNAHLKAMLKKLRAKHPNVRIIYGDYYTPVVQFMLQPEKFGFAKQLPRACCGAPSTPEKAAYNFNVTAKCGEPGATACADPTTHWSWDGIHLTEAAYRHIAKGWLYGPFADQPIIQSS

SEQ ID NO: 25898 - protein, 376 aa, Zea mays subsp. mays
  misc_feature (1)..(376): Ceres Seq. ID no. 13494776
MLAVLAVVVLAAVGGADAAAESSEASAKGRYHALFNFGDSLADAGNLIQNGTPDILATARLPYGQTYFGRATGRCSDGRLVIDHLAQEFGLPLLPPSKATNASFAYGANFAITGATALDTPYFEAKGLGAVIWNSGALMTQIQWFRDLKPFFCNTTQACKKFFAKALFVVGEFGGNDYNAPLFAGMGIPEVYKFMPDVIQGISDGIEALIAEGAVEMIVPGVMPTGCFPVYLNMLDEPKEGYGSRSGCVRRYNTFSWVHNAHLKAMLKKLRAKHPNVRIIYGDYYTPVVQFMLQPEKFGFAKQLPRACCGAPSTPEKAAYNFNVTAKCGEPGATACADPTTHWSWDGIHLTEAAYRHIAKGWLYGPFADQPIIQSS

SEQ ID NO: 25899 - protein, 238 aa, Zea mays subsp. mays
  misc_feature (1)..(238): Ceres Seq. ID no. 13494777
MTQIQWFRDLKPFFCNTTQACKKFFAKALFVVGEFGGNDYNAPLFAGMGIPEVYKFMPDVIQGISDGIEALIAEGAVEMIVPGVMPTGCFPVYLNMLDEPKEGYGSRSGCVRRYNTFSWVHNAHLKAMLKKLRAKHPNVRIIYGDYYTPVVQFMLQPEKFGFAKQLPRACCGAPSTPEKAAYNFNVTAKCGEPGATACADPTTHWSWDGIHLTEAAYRHIAKGWLYGPFADQPIIQSS

SEQ ID NO: 25900 - DNA, 1234 bp, Zea mays subsp. mays
  misc_feature (1)..(1234): Ceres Seq. ID no. 13494778
gtctcccggcgcctgttccccgcggcaccgcggctacacataccctctccccatcccatttcccagatcccaccaacgcagcgcagggatcgagtagcccaccaccccaccccgcgacgctaaccgacgcaatggcgacgctcaccgttccttcctccgtcccggccgtcgccgaggactgcgagcagctccacaaggccttcgaaggttggggcaccaacgagaaactgatcatctccatcctggcccaccgcaacgccgcgcaggcccgcgcgatccgccgcggctatgccgaggcctacgggaaggagctgctccgcgctctcggcgacgagatccacggcaagttcgagagggcggtgatcctgtggacgctggaccccgcggagagggacgcggtgctggcgaacgaggaggcgaagaagagccaccccggcggccgcgcgctggtggagatcgcgtgcgcgcgcacgcccgcgcagctctttgcggtcaagcaggcgtaccatgaccggtttaagcgatcgctcgaggaggacgttgccgcgcatgtcaccggcgacttccgaaagcttttagtgcctcttgttagtgcgtaccgctatgatggcccagaggtgaacacatctttggctcattctgaagccaaaatacttcatgagaagatccataagaaggcttacagtgatgaggagatcattagaattctcaccacacggagcaaagctcagctacttgcaacattcaatagctacaaggatcagttcactcatgcaatcaacaaggatctgaaagctgaccccaaggatgagtttctttcaacactgcgggcgatcatccggtgcttcacctgccctgacagatacttcgagaaagtcattcgactggctcttggaggcatgggcactgatgaggatgacctcaccagggtcgtaactactcgcgccgaggtcgacctgaagctgataaaggaggcttatcagaagagaaacagtgtgccgctggagcgtgctgtggccaaagatacaactagagattatgaggatattatgcttgccctccttggggcggagtgaggaggcgtgcctcaactcgatctcatctgctcctacttgtttgatggggccaaaaaactgcatcgacgtggtatccacatggccgtggttttgaataataataaatttgtaacacgtagcctgcattagcagcgcgttttaaataaaggaacttcctg

SEQ ID NO: 25901 - protein, 357 aa, Zea mays subsp. mays
  misc_feature (1)..(357): Ceres Seq. ID no. 13494779
LPAPVPRGTAATHTLSPSHFPDPTNAAQGSSSPPPHPATLTDAMATLTVPSSVPAVAEDCEQLHKAFEGWGTNEKLIISILAHRNAAQARAIRRGYAEAYGKELLRALGDEIHGKFERAVILWTLDPAERDAVLANEEAKKSHPGGRALVEIACARTPAQLFAVKQAYHDRFKRSLEEDVAAHVTGDFRKLLVPLVSAYRYDGPEVNTSLAHSEAKILHEKIHKKAYSDEEIIRILTTRSKAQLLATFNSYKDQFTHAINKDLKADPKDEFLSTLRAIIRCFTCPDRYFEKVIRLALGGMGTDEDDLTRVVTTRAEVDLKLIKEAYQKRNSVPLERAVAKDTTRDYEDIMLALLGAE

SEQ ID NO: 25902 - protein, 314 aa, Zea mays subsp. mays
  misc_feature (1)..(314): Ceres Seq. ID no. 13494780
MATLTVPSSVPAVAEDCEQLHKAFEGWGTNEKLIISILAHRNAAQARAIRRGYAEAYGKELLRALGDEIHGKFERAVILWTLDPAERDAVLANEEAKKSHPGGRALVEIACARTPAQLFAVKQAYHDRFKRSLEEDVAAHVTGDFRKLLVPLVSAYRYDGPEVNTSLAHSEAKILHEKIHKKAYSDEEIIRILTTRSKAQLLATFNSYKDQFTHAINKDLKADPKDEFLSTLRAIIRCFTCPDRYFEKVIRLALGGMGTDEDDLTRVVTTRAEVDLKLIKEAYQKRNSVPLERAVAKDTTRDYEDIMLALLGAE

SEQ ID NO: 25903 - DNA, 1448 bp, Zea mays subsp. mays
  misc_feature (1)..(1448): Ceres Seq. ID no. 13494789
gactcagtggcacggggcgcggacgctgccgctcgcgatatttgcgagagagagagagagagagagggcccgagagccgaggacgagtgcagtctggctggcgtgatgctgcttcggagcgcgtcctcgccgctgctcaactgcgggcgcgcgccggctgcggcggcgtcggtcgagncacctcgcggtggtttcgccgttgttatcaccggcagtggcggcgctaggcaggggccggtgctgtgccgcgccatntccgagggggacctcgccgcgccgctcgtgcccaagaaggatnatggacacggganggcgccgaggctatcggcgtccttgtcctcgtccgcctccatcttcgtcgaggaggacggcgagggcgaggaggaggaggaggacctggtcgcggtcgcggtcgcgggggccggcgtggacgtgccgctgccgctgcgtcggctgctgacgaacacggggctggacgtgtccgccgccgcggcgctggcgttcgtggagcagggcgtcggcggcagcggcgggggcgggaaggcgtgcggcagcagcggcggcaagggtggggtcggggacggcgacggtggcagcaaccgcgccgccacggacgcccactaccggcagatgatcgaggcggacccgggcaactcgctgctcctggtcaactacgccaggttcctcaaggaggtggcgggggacgcagcaagggcgcaggagtactgcgagcgcgccatcctcgccagtcccggcgacgccgaggcgctgtcgctctacgcgggcctcgtttgggagaccagccgcgacgctggccgcgccgaggactactacagccgcgccgtccaggccgcacccgacgactgctacgtcctgggntcttacgccgggttcctgtgggacgccgaggaggacgaggaagagaactccgagcccttgccacctccttcgctgttccagggggcagctcagcgtccttccatcacagcggcctcttagatgatcgtgaactcgatctagatctcaccaccgcctgtgaacgaagctgaatctggaaccctggagagtggagagtgactgggagtgggagataaccgtgcagaaacccccgacgagtgactcgcantcgccggccggctcctcgccgcttgtgaactgaatcacggcacatgtaaaactgaatctggcagagcacacacgcgccgcgcctaagcctattagcgtctatagactttgcagggctatgtatagtagatatgtagattgagaccctgctgagcttgtacgtgcagtatgttcctagtcacttgtgtatcattactagtaatgcagtatctctcgcaaaataaacgtcaaaaacccttcctgctgcttcatccgagcagagcatcttccaagaagagcagatatcgaactgcaagaactgatgcactgaatcacaaagcttt

SEQ ID NO: 25904 - protein, 332 aa, Zea mays subsp. mays
  misc_feature (1)..(332): Ceres Seq. ID no. 13494790
  misc_feature (60)..(60): Xaa is any aa, unknown or other
  misc_feature (85)..(85): Xaa is any aa, unknown or other
  misc_feature (100)..(100): Xaa is any aa, unknown or other
  misc_feature (104)..(104): Xaa is any aa, unknown or other
  misc_feature (293)..(293): Xaa is any aa, unknown or other
DSVARGADAAARDICEREREREGPRAEDECSLAGVMLLRSASSPLLNCGRAPAAAASVEXPRGGFAVVITGSGGARQGPVLCRAXSEGDLAAPLVPKKDXGHGXAPRLSASLSSSASIFVEEDGEGEEEEEDLVAVAVAGAGVDVPLPLRRLLTNTGLDVSAAAALAFVEQGVGGSGGGGKACGSSGGKGGVGDGDGGSNRAATDAHYRQMIEADPGNSLLLVNYARFLKEVAGDAARAQEYCERAILASPGDAEALSLYAGLVWETSRDAGRAEDYYSRAVQAAPDDCYVLXSYAGFLWDAEEDEEENSEPLPPPSLFQGAAQRPSITAAS

SEQ ID NO: 25905 - protein, 297 aa, Zea mays subsp. mays
  misc_feature (1)..(297): Ceres Seq. ID no. 13494791
  misc_feature (25)..(25): Xaa is any aa, unknown or other
  misc_feature (50)..(50): Xaa is any aa, unknown or other
  misc_feature (65)..(65): Xaa is any aa, unknown or other
  misc_feature (69)..(69): Xaa is any aa, unknown or other
  misc_feature (258)..(258): Xaa is any aa, unknown or other
MLLRSASSPLLNCGRAPAAAASVEXPRGGFAVVITGSGGARQGPVLCRAXSEGDLAAPLVPKKDXGHGXAPRLSASLSSSASIFVEEDGEGEEEEEDLVAVAVAGAGVDVPLPLRRLLTNTGLDVSAAAALAFVEQGVGGSGGGGKACGSSGGKGGVGDGDGGSNRAATDAHYRQMIEADPGNSLLLVNYARFLKEVAGDAARAQEYCERAILASPGDAEALSLYAGLVWETSRDAGRAEDYYSRAVQAAPDDCYVLXSYAGFLWDAEEDEEENSEPLPPPSLFQGAAQRPSITAAS

SEQ ID NO: 25906 - DNA, 1283 bp, Zea mays subsp. mays
  misc_feature (1)..(1283): Ceres Seq. ID no. 13494816
aaaacaccgattcgtttccccttggcacctggcgccctgtcgccttcgaaaaacagccgccgccgtcgcccgtcccggatccgacggcccccgctccttcgtctagtatttatactagtgccttgccggcgctgctcctgttgcctctcgcatttgcccacgcccgcagcgcctcgcctcggctgctctacctctatcccgcgacccgcgagatcggaatcgcggcgccccgccgccctcctccaaaatggcaccgtctctgctcggggggttcaccaagtcgttggccatgacggtgctctccgagatcggggacaagaccttcttcgccgccgcgattctggctatgcgccatcccaggaaactcgtattggcaggctgtttaactgcactaatagtcatgacagctctatcggcttctctaggttgggttgcaccaaatctgatttcacgtaaatggactcatcatttgaccactctattgttctttctatttggcatttggtcattgtgggaaggcttcaaggaagatgggtaccgagattcggaagaattggctgaagttgaagcagagctggatgctgcctttaagagtaataaaggtgaatctaaaaataaatttaaggcgaatgatgatatgaagaaacagcaaagaccatttctcatgcagttcttctcaccaatttttctgaaggcattttctattacattctttggtgagtggggtgacaagagccagattgctacaattggcttggctgctgatgaaaacccgttcggtgttgtcctgggtggaatcatagcgcaagcactctgcactactgctgccgttcttggtggaaagagcctagcgtcccagatatctgagaagatggttgaactgtcaagcggagtgctcttcctgctcttcggtatcatgtccttactctctggaccagaaggagaattgtaatccctgcttgagcctttttcagctagctgattaacatggctttctcttcttagacctatcttatttcagtacatgaatgatggcaacgaaagccatccatccatggcgaacaggatggtgatttaacagtttagccgacacgctgtaaacatttcagtcgcccttcaaaaattactacatgttacagaagtctgtagcgattgtatatttgtattctgtcgtgcccagcacgtgaaattttgttatcgcaattacatgcgttaacaaagctttgttcgtgaaccaagtattcaggcaattaatatggggcttatagcaggcctttgtcttt

SEQ ID NO: 25907 - protein, 234 aa, Zea mays subsp. mays
  misc_feature (1)..(234): Ceres Seq. ID no. 13494817
MAPSLLGGFTKSLAMTVLSEIGDKTFFAAAILAMRHPRKLVLAGCLTALIVMTALSASLGWVAPNLISRKWTHHLTTLLFFLFGIWSLWEGFKEDGYRDSEELAEVEAELDAAFKSNKGESKNKFKANDDMKKQQRPFLMQFFSPIFLKAFSITFFGEWGDKSQIATIGLAADENPFGVVLGGIIAQALCTTAAVLGGKSLASQISEKMVELSSGVLFLLFGIMSLLSGPEGEL

SEQ ID NO: 25908 - protein, 220 aa, Zea mays subsp. mays
  misc_feature (1)..(220): Ceres Seq. ID no. 13494818
MTVLSEIGDKTFFAAAILAMRHPRKLVLAGCLTALIVMTALSASLGWVAPNLISRKWTHHLTTLLFFLFGIWSLWEGFKEDGYRDSEELAEVEAELDAAFKSNKGESKNKFKANDDMKKQQRPFLMQFFSPIFLKAFSITFFGEWGDKSQIATIGLAADENPFGVVLGGIIAQALCTTAAVLGGKSLASQISEKMVELSSGVLFLLFGIMSLLSGPEGEL

SEQ ID NO: 25909 - protein, 201 aa, Zea mays subsp. mays
  misc_feature (1)..(201): Ceres Seq. ID no. 13494819
MRHPRKLVLAGCLTALIVMTALSASLGWVAPNLISRKWTHHLTTLLFFLFGIWSLWEGFKEDGYRDSEELAEVEAELDAAFKSNKGESKNKFKANDDMKKQQRPFLMQFFSPIFLKAFSITFFGEWGDKSQIATIGLAADENPFGVVLGGIIAQALCTTAAVLGGKSLASQISEKMVELSSGVLFLLFGIMSLLSGPEGEL

SEQ ID NO: 25910 - DNA, 1617 bp, Zea mays subsp. mays
  misc_feature (1)..(1617): Ceres Seq. ID no. 13494824
agccaaatcgaaggagattgaacgaagcagcccagccaaattcccctcgccgccccgtcccttctcgacatttcttgtcccgtcgtcgcctcaatctcgaagcctctccggcggagccgcctcatcatgttccgaaggcctccaaccaaacatcctctagggtttccgcatcgtccgtcgcgatgggcttcacgaagcggtcgccccagcatcccgcctccccagccggcggcgaggtcggcgcccagacggcagggaaggtcacaccagtgccggcggcgccggagtcggcgcccgcggcggtggtgccgaggcctccggacgtggcgcccttcctgaccaaggtctacgacatggtctccgacccggccaccgacgcggtcatctcctggagcgccgccggcggcagtttcgtgatctgggactcgcacgctttcgagcgcgacctgctgccgcggcacttcaagcacaatcacttcaccagcttcatacgccagctcaacacctacggatttcataaagttgatccagatagatgggaatgggccaatgaaggctttgttaagggccaaaaacatcttttgaagaccatcaagagaaagaagaaatcctctcaggatgtacctagtgatctgcagtcggtgcctgtcaaaactgcacctggcactgagaatatcgagataggaaaatatggaggccttgaaaaggaggttgagacacttaagagggacaaggcccttctaatgcagcagcttgtagatctacggcagtaccagcaatcatctagcgctgaagtgcagaatttaattcaacgcctccgtgtgatggagcagaaccagcagcagatgatggcacttttggcaattgttgtccagaatccagacttcctgaaccagctcgtgcagcagcagcgcaggagtaactggtggaatgatgatggtaacaggaaaagaaggttccaagctctggaacatggtcctgtagatgaccaagagacttctggtggaggcgcacaaattattcaatatcgtcctcctgttcctgaaacttccaatcagccaataccagcaaatgaagctttctattcaacccctgcacaaccagcttcaagccctgcacttgagatgcccatggatgtagagatgacttcaaacaatgttaatacctttgattcaactggcaatgattttactgacacctctgctctatgtgaatggtatgacatggatatatttggtgatgaacttgagcacattcttcaacagccagagcaggactttcaagtggaccctcctttaacagttgaggattatggttatgatcatccacggttagagcaggactatcagatggaagcacaacagaattgcaaaaatcctcaatatgttgcctgtgtcttgaagcaaagggaaagccatgcatctgatgtccattagtactgatcagtttgagctgatgtcataactgaagcatgagcggtggtcccccagaatgttgtccagtaacattagtggatagagatttgtgatgaacagaatcttgagactggcaggttagccaccattgggaacctgaagaccgtcgggattgctcagaattcagtatactaatactaat

SEQ ID NO: 25911 - protein, 477 aa, Zea mays subsp. mays
  misc_feature (1)..(477): Ceres Seq. ID no. 13494825
PNRRRLNEAAQPNSPRRPVPSRHFLSRRRLNLEASPAEPPHHVPKASNQTSSRVSASSVAMGFTKRSPQHPASPAGGEVGAQTAGKVTPVPAAPESAPAAVVPRPPDVAPFLTKVYDMVSDPATDAVISWSAAGGSFVIWDSHAFERDLLPRHFKHNHFTSFIRQLNTYGFHKVDPDRWEWANEGFVKGQKHLLKTIKRKKKSSQDVPSDLQSVPVKTAPGTENIEIGKYGGLEKEVETLKRDKALLMQQLVDLRQYQQSSSAEVQNLIQRLRVMEQNQQQMMALLAIVVQNPDFLNQLVQQQRRSNWWNDDGNRKRRFQALEHGPVDDQETSGGGAQIIQYRPPVPETSNQPIPANEAFYSTPAQPASSPALEMPMDVEMTSNNVNTFDSTGNDFTDTSALCEWYDMDIFGDELEHILQQPEQDFQVDPPLTVEDYGYDHPRLEQDYQMEAQQNCKNPQYVACVLKQRESHASDVH

SEQ ID NO: 25912 - protein, 417 aa, Zea mays subsp. mays
  misc_feature (1)..(417): Ceres Seq. ID no. 13494826
MGFTKRSPQHPASPAGGEVGAQTAGKVTPVPAAPESAPAAVVPRPPDVAPFLTKVYDMVSDPATDAVISWSAAGGSFVIWDSHAFERDLLPRHFKHNHFTSFIRQLNTYGFHKVDPDRWEWANEGFVKGQKHLLKTIKRKKKSSQDVPSDLQSVPVKTAPGTENIEIGKYGGLEKEVETLKRDKALLMQQLVDLRQYQQSSSAEVQNLIQRLRVMEQNQQQMMALLAIVVQNPDFLNQLVQQQRRSNWWNDDGNRKRRFQALEHGPVDDQETSGGGAQIIQYRPPVPETSNQPIPANEAFYSTPAQPASSPALEMPMDVEMTSNNVNTFDSTGNDFTDTSALCEWYDMDIFGDELEHILQQPEQDFQVDPPLTVEDYGYDHPRLEQDYQMEAQQNCKNPQYVACVLKQRESHASDVH

SEQ ID NO: 25913 - protein, 360 aa, Zea mays subsp. mays
  misc_feature (1)..(360): Ceres Seq. ID no. 13494827
MVSDPATDAVISWSAAGGSFVIWDSHAFERDLLPRHFKHNHFTSFIRQLNTYGFHKVDPDRWEWANEGFVKGQKHLLKTIKRKKKSSQDVPSDLQSVPVKTAPGTENIEIGKYGGLEKEVETLKRDKALLMQQLVDLRQYQQSSSAEVQNLIQRLRVMEQNQQQMMALLAIVVQNPDFLNQLVQQQRRSNWWNDDGNRKRRFQALEHGPVDDQETSGGGAQIIQYRPPVPETSNQPIPANEAFYSTPAQPASSPALEMPMDVEMTSNNVNTFDSTGNDFTDTSALCEWYDMDIFGDELEHILQQPEQDFQVDPPLTVEDYGYDHPRLEQDYQMEAQQNCKNPQYVACVLKQRESHASDVH

SEQ ID NO: 25914 - DNA, 1291 bp, Zea mays subsp. mays
  misc_feature (1)..(1291): Ceres Seq. ID no. 13494949
gtttgtgatgaagcactgtcgtcgcccatgacgggaaaacggctccatatacgtactactaacgtacacaccacagcgactctccggccatgcagttgccggctgcacaacttgtgcaagtgcatgcatgcatggatttggatccatgcatggccacagcccacagcccacaggggaggggaaggtgaggccgcgccgcgaggaaccgcgtcgaccttgtcgtcgatgttggcttgcaaggcgagcccgagccggccgtgcgtcgtcccccttgtttgcctgctggtggtggcggccgcagtcgtcgtcgtcgctgcctcggcgccgccggcggaggcggcgttcgacgacaactacgtggcgcagtggggtagagatggttatcaccttgtcgtccggggcacgggaggcgaatgtcaccatggaccagagctctggtgcccgggttccggtccaagtccacgtacggctcagggttcttccacatgaggatgaagctgccctccgggtacacggccggcgtcgtcacgaccttctacctcatctcgcagccggaggatgggagccgcgacgaggtggacttggagttcctgggcgacaaggccggcgtgcccatcaccctccagaccaacgtcttcgtcgacggccgcggcgacagggagcagcggacgcgcctctggttcgaccccgccgccgacttccacgactacaagatcctctggaacccataccagctcgtgatgttcgtggacgacacgccggtccgggtgctgaggaacctgacgggcgccgtgccggggtacccgttcccggggaagcagacgatgctgatccgcgcgagcgtgtgggacggctccgactgggccacggacggcggccggaccaaggtggactggtccaggggccccttcaccgccggctaccggggcttcgacgtcgacggctgcgccaacaacgggagcgacgcgtgccaatcgcccgacctatggtggaacgccgccgagtaccggaacatcaccgcggagcagcgggcggcgtacgaggacgtgaagaggagttacatgaactacgactactgcgccgataaggccaggtttaacagcaccaccgtacccattgaatgcaactacgcttgagaagccagttaggagtggcggcgttgtatatcaacggtttatatatatatattatatatatatacacacacacgaaaaagatatgtcttcttatttgttgcaagggtttaaatatgcaaatgcttataaggactaaaaaaatatatttccatgtc

SEQ ID NO: 25915 - protein, 319 aa, Zea mays subsp. mays
  misc_feature (1)..(319): Ceres Seq. ID no. 13494950
MHGFGSMHGHSPQPTGEGKVRPRREEPRRPCRRCWLARRARAGRASSPLFACWWWRPQSSSSLPRRRRRRRRSTTTTWRSGVEMVITLSSGAREANVTMDQSSGARVPVQVHVRLRVLPHEDEAALRVHGRRRHDLLPHLAAGGWEPRRGGLGVPGRQGRRAHHPPDQRLRRRPRRQGAADAPLVRPRRRLPRLQDPLEPIPARDVRGRHAGPGAEEPDGRRAGVPVPGEADDADPRERVGRLRLGHGRRPDQGGLVQGPLHRRLPGLRRRRLRQQRERRVPIARPMVERRRVPEHHRGAAGGVRGREEELHELRLLRR

SEQ ID NO: 25916 - protein, 313 aa, Zea mays subsp. mays
  misc_feature (1)..(313): Ceres Seq. ID no. 13494951
MHGHSPQPTGEGKVRPRREEPRRPCRRCWLARRARAGRASSPLFACWWWRPQSSSSLPRRRRRRRRSTTTTWRSGVEMVITLSSGAREANVTMDQSSGARVPVQVHVRLRVLPHEDEAALRVHGRRRHDLLPHLAAGGWEPRRGGLGVPGRQGRRAHHPPDQRLRRRPRRQGAADAPLVRPRRRLPRLQDPLEPIPARDVRGRHAGPGAEEPDGRRAGVPVPGEADDADPRERVGRLRLGHGRRPDQGGLVQGPLHRRLPGLRRRRLRQQRERRVPIARPMVERRRVPEHHRGAAGGVRGREEELHELRLLRR

SEQ ID NO: 25917 - protein, 240 aa, Zea mays subsp. mays
  misc_feature (1)..(240): Ceres Seq. ID no. 13494952
MSPWTRALVPGFRSKSTYGSGFFHMRMKLPSGYTAGVVTTFYLISQPEDGSRDEVDLEFLGDKAGVPITLQTNVFVDGRGDREQRTRLWFDPAADFHDYKILWNPYQLVMFVDDTPVRVLRNLTGAVPGYPFPGKQTMLIRASVWDGSDWATDGGRTKVDWSRGPFTAGYRGFDVDGCANNGSDACQSPDLWWNAAEYRNITAEQRAAYEDVKRSYMNYDYCADKARFNSTTVPIECNYA

SEQ ID NO: 25918 - DNA, 2214 bp, Zea mays subsp. mays
  misc_feature (1)..(2214): Ceres Seq. ID no. 13494953
agaccattacctagaagatcctaatcgaaaaaaacgatccatcctcaccaccattcgactccacagctggaggctgaagctccgcagtcacagcattcaaatcaatctctctctttctctctctctctctcacaggagataagccatggcagagttgcctttggcagcggggctgatggaccttcgcaactgcaagctctctccgaagccagcgccgcccttgccactccccgcgctccgccgcatgcacacaagcgccacggctacgacggccccgtccccgcgccatgcggtccccgaactccactccactaccgagctggcggacgggagcatcgtcttccgtttcggccatcctaagtccaaggcgctggagccggagccggcgagcgtaaagaccagcccttactccagagttgcccctgcctcgggcgctgtgcccggcagccagatggagccggagattgactctgaacatggattagacggcgtgcgaataggcaccacggctggggttgagaagccgagcccgaatgccgcagccgaggcctggccgacacctccacctcctgacgccggcgcggtaaccggtgccacttccgctgcgctagaggaggcgccggagcaggaggcgggttccaatgctgccgttgaggaggtggacaccaggccatcatccgcagagtctcttgtcccgtcgagatcagaggatgggccaaagggcgacggcgtcgctgttgaggctggcatgccgaccagtggtgctgccatggatacgattgagactgctttggaggggcgcggggcaagcgaggatgactcagcagttgatgtgagtggtggcttggatgaggcggcgacttccggtttggaggactccgaagccgcatcggaaggctccactgcacaggatttctacaccgacgttgaaacggagtccagcggctccagcagcgacgagcagagagctgagttcggcttttccttaccaccaccggaacaagttagcaacaaggcggattggaaaaatgacacttcagaggtgaagagttctgataggatgattccaatagctcaacggacacgtgtgttatcgtcaggtgctgcaatattgcctcatccgtcaaaggtagcaacaggtggagaagatgcatatttcattgcagccaatggctggtttggtgtagcagatggagttggccagtggtcatttgaaggaatcaacgcagggctttatgcaagagaactaatggatggctgcaaaaagttcgttaccgagaatcaaggggatccagatcttagaccagagcagatcctttccaaagcagtagatgaagcatgttcacctggttcttgcactgtattagttgctcattttgatggccaggcccttcaagcatcaaatattggggactctgggtttatagtgataagaaatggagaagtgttcaaaaagtctaaacctacgctttatggtttcaatttcccactacaaattcagaagggagatgacccctcaaagtttgtacagaattatgctattgatctagaggacggcgatgcaattgtgacagcaaccgatggcctttttgataatgtatacgagcatgaaatagctggaattgtctccaaatcgttacaggcagatctagaaccagcggagattgcggaacacttggctgtgaaggcccaggaagtagggaggtctggggctgggagaagcccattttcagatgctgctctctcggctgggtaccttggctacagtgggggcaaactggatgacatagccgtcgttgtatcaattgtccggactgaaattcaagaggataggctaagatgactatgcagaaaagaagctcatgttttgtggaagctcaacaccaagcgaccacgcgggttgccctatcagtattctgtactgctagaactgcagctatgtggcgatttctggaaagttaagggcgtatgcatcagcatcatacaccgtgctcgatcatcaataggcgggccaataaccattggacatcagcattgtagcgaagccccttcctgttgcccttgccagtgcaccggcgccacattttgatttttggtttcgctataaaaatataaggcatttagatgttgcccttgccattaaaccaatgtcatgtactccttctgtcataaattaaaattcgttttggtttctaatggattcatataatactt

SEQ ID NO: 25919 - protein, 565 aa, Zea mays subsp. mays
  misc_feature (1)..(565): Ceres Seq. ID no. 13494954
MAELPLAAGLMDLRNCKLSPKPAPPLPLPALRRMHTSATATTAPSPRHAVPELHSTTELADGSIVFRFGHPKSKALEPEPASVKTSPYSRVAPASGAVPGSQMEPEIDSEHGLDGVRIGTTAGVEKPSPNAAAEAWPTPPPPDAGAVTGATSAALEEAPEQEAGSNAAVEEVDTRPSSAESLVPSRSEDGPKGDGVAVEAGMPTSGAAMDTIETALEGRGASEDDSAVDVSGGLDEAATSGLEDSEAASEGSTAQDFYTDVETESSGSSSDEQRAEFGFSLPPPEQVSNKADWKNDTSEVKSSDRMIPIAQRTRVLSSGAAILPHPSKVATGGEDAYFIAANGWFGVADGVGQWSFEGINAGLYARELMDGCKKFVTENQGDPDLRPEQILSKAVDEACSPGSCTVLVAHFDGQALQASNIGDSGFIVIRNGEVFKKSKPTLYGFNFPLQIQKGDDPSKFVQNYAIDLEDGDAIVTATDGLFDNVYEHEIAGIVSKSLQADLEPAEIAEHLAVKAQEVGRSGAGRSPFSDAALSAGYLGYSGGKLDDIAVVVSIVRTEIQEDRLR

SEQ ID NO: 25920 - protein, 555 aa, Zea mays subsp. mays
  misc_feature (1)..(555): Ceres Seq. ID no. 13494955
MDLRNCKLSPKPAPPLPLPALRRMHTSATATTAPSPRHAVPELHSTTELADGSIVFRFGHPKSKALEPEPASVKTSPYSRVAPASGAVPGSQMEPEIDSEHGLDGVRIGTTAGVEKPSPNAAAEAWPTPPPPDAGAVTGATSAALEEAPEQEAGSNAAVEEVDTRPSSAESLVPSRSEDGPKGDGVAVEAGMPTSGAAMDTIETALEGRGASEDDSAVDVSGGLDEAATSGLEDSEAASEGSTAQDFYTDVETESSGSSSDEQRAEFGFSLPPPEQVSNKADWKNDTSEVKSSDRMIPIAQRTRVLSSGAAILPHPSKVATGGEDAYFIAANGWFGVADGVGQWSFEGINAGLYARELMDGCKKFVTENQGDPDLRPEQILSKAVDEACSPGSCTVLVAHFDGQALQASNIGDSGFIVIRNGEVFKKSKPTLYGFNFPLQIQKGDDPSKFVQNYAIDLEDGDAIVTATDGLFDNVYEHEIAGIVSKSLQADLEPAEIAEHLAVKAQEVGRSGAGRSPFSDAALSAGYLGYSGGKLDDIAVVVSIVRTEIQEDRLR

SEQ ID NO: 25921 - protein, 532 aa, Zea mays subsp. mays
  misc_feature (1)..(532): Ceres Seq. ID no. 13494956
MHTSATATTAPSPRHAVPELHSTTELADGSIVFRFGHPKSKALEPEPASVKTSPYSRVAPASGAVPGSQMEPEIDSEHGLDGVRIGTTAGVEKPSPNAAAEAWPTPPPPDAGAVTGATSAALEEAPEQEAGSNAAVEEVDTRPSSAESLVPSRSEDGPKGDGVAVEAGMPTSGAAMDTIETALEGRGASEDDSAVDVSGGLDEAATSGLEDSEAASEGSTAQDFYTDVETESSGSSSDEQRAEFGFSLPPPEQVSNKADWKNDTSEVKSSDRMIPIAQRTRVLSSGAAILPHPSKVATGGEDAYFIAANGWFGVADGVGQWSFEGINAGLYARELMDGCKKFVTENQGDPDLRPEQILSKAVDEACSPGSCTVLVAHFDGQALQASNIGDSGFIVIRNGEVFKKSKPTLYGFNFPLQIQKGDDPSKFVQNYAIDLEDGDAIVTATDGLFDNVYEHEIAGIVSKSLQADLEPAEIAEHLAVKAQEVGRSGAGRSPFSDAALSAGYLGYSGGKLDDIAVVVSIVRTEIQEDRLR

SEQ ID NO: 25922 - DNA, 1230 bp, Zea mays subsp. mays
  misc_feature (1)..(1230): Ceres Seq. ID no. 13495150
tagaacatcctaatcgaaaacaaataggcagtttcaagaaaatcacaaaaaagctgacattgtggatttgcttcatgaagatgatggagatgaaggcacatacatagactgtaatgaaattcgaaaacaaaaaacagatgacgtgagagtaaaatctagaggcaaaatgcaaagtggcaagaaaaaagtcagcagatgtcaggcaagtgatggttcgcacaatggaggcaaggaaatgaaattatcaagtgacatagaagtgtgcaacagaagaggagatggaacaacggcagccaattttgaagaaattccaaaagaaaaggccgatgctgtgaaagtgaaacccaagatgcaaggtgacaagaaaaaaaccagtaaacatcaggcaggcgatggagataaaggagcaaaattttcttgcgatatagaagggtgtgacatgagtttcagcacccagcatgacctgtcgctgcacaagagagacatctgtcctgtcaaaggatgcaagaagaagttcttctgccataaatacttgctccagcaccgcaaagtgcacctggatgaaaggccgctcatgtgccattcccaggctgcgcgaagacattcaagtggccatgggcgaggacagagcacatgagggtgcatacaggggtgcgcccgtacgcatgcacggaacctggctgcacccagacgttccggtttgtgtcggacttcagccgccacaagaggaagactggccactcgtgtgacaagaaaaagaaacgcggcctttgactgctcgtgcacaagtacaggtttcttctctgacggcgagcgatcagaaggggatggatgctaatcgaataattgcgccaggttccattgtttgcagaattaatctgcattaggagtctaattcatttcattgtttattaccgctgcaacataacagctcattcactgtcgctttaggtccaactgacctgctggtgactgagattgtaccatgtcaattgtatcgttctttcgttcatacttagaaatcgggaagtttctgttgacaggaacgttggatttagtgtacggcgcctgttattaacatgcgtgtaattctgtactgaagtgctcctttcttatttttacattttttaaaatctggaaggaattagtgtacggcgcctgctagttttgatgtaggattcatttggcagttcttgaaacgattatcgcaaaaatagaatcacttgttcg

SEQ ID NO: 25923 - protein, 156 aa, Zea mays subsp. mays
  misc_feature (1)..(156): Ceres Seq. ID no. 13495151
MQSGKKKVSRCQASDGSHNGGKEMKLSSDIEVCNRRGDGTTAANFEEIPKEKADAVKVKPKMQGDKKKTSKHQAGDGDKGAKFSCDIEGCDMSFSTQHDLSLHKRDICPVKGCKKKFFCHKYLLQHRKVHLDERPLMCHSQAARRHSSGHGRGQST

SEQ ID NO: 25924 - protein, 133 aa, Zea mays subsp. mays
  misc_feature (1)..(133): Ceres Seq. ID no. 13495152
MKLSSDIEVCNRRGDGTTAANFEEIPKEKADAVKVKPKMQGDKKKTSKHQAGDGDKGAKFSCDIEGCDMSFSTQHDLSLHKRDICPVKGCKKKFFCHKYLLQHRKVHLDERPLMCHSQAARRHSSGHGRGQST

SEQ ID NO: 25925 - protein, 96 aa, Zea mays subsp. mays
  misc_feature (1)..(96): Ceres Seq. ID no. 13495153
MTCRCTRETSVLSKDARRSSSAINTCSSTAKCTWMKGRSCAIPRLREDIQVAMGEDRAHEGAYRGAPVRMHGTWLHPDVPVCVGLQPPQEEDWPLV

SEQ ID NO: 25926 - DNA, 1409 bp, Zea mays subsp. mays
  misc_feature (1)..(1409): Ceres Seq. ID no. 13495162
agccgattacgagtgccgtgtgtgccccgctccagtaagccaacagctcattcctcctcaccacgctgctcgttactaaccaagcaatcaatttcctcctctttccattctcccagccacaaatcgatcggaaacgcacgcccctttctcttcgccttttcgcgtcgtccagatctcagtcgttcttcgctccatgagctaggaatccgaggtgtcctctaggctaagcgaagttggccggcggcggctaggatggggttgatatccgggatgatgatgggggtcattgttggcgtcgccatcatggccggctggagccgcgtcatgcgccgacgcagcacgaagcgcatcgccaaggctgcggatatcaaggtgcttgggtctctcagcagggacgacctcaggaagctgtgcggtgataacttcccggagtggatatccttcccgcagtttgagcaggttaaatggttgaacaagcatctgagcaaactttggccttttgttgtagaagctgcaacagtagtggttaaggaatccgttgaaccactgctagatgattaccggcctccaggaataaaatctttgaagttcagcaaattttctcttggaaatgtgtcaccaaagatagaaggtattcgtattcaaaatcttcaaccaggtcaaatcatcatggatatagatttccgttggggtggtaatccaagcataatcctagctgttgatgctgtagttgcatcactgccaattcagctcaaggatcttcaggtctatactgtcatacgtgttatatttcaactgtctgaagacatcccttgcatttctgctgttgttgtggctctccttgctgatccagagccaaaaattcagtacaccctgaaggccattggaggaagcctaactgcagttcctggactttctgacatgattgatgatactgtcgattcaattgtttctgatatgctcttgtggccacacaggcatgttgttaaacttggtgtcaatgttgatacgagtgacttggagcttaaacctcagggaagactttctgttactgtggtaaaagcaacttctttgagaaataaggagatgatcggtaaatcagacccttatgtgaaactgtatgtgcggccaatgtttaaggtcaaaacaaaagtcatagatgatgacctgaatccggaatggaatgaaacatttgacttgattgtcgaagacaaagaaacccaatctgttatttttgaggtttacgacgaagacaaacttcagcaagacaagagactaggtgtggcaaaactagcagtaaacactcttgaatctgagattacccaagacgccactctgaagctgctacattcactggatccaattaaaaataaggacaccaaggataggggcacattacatcttaaggt

SEQ ID NO: 25927 - protein, 385 aa, Zea mays subsp. mays
  misc_feature (1)..(385): Ceres Seq. ID no. 13495163
MGLISGMMMGVIVGVAIMAGWSRVMRRRSTKRIAKAADIKVLGSLSRDDLRKLCGDNFPEWISFPQFEQVKWLNKHLSKLWPFVVEAATVVVKESVEPLLDDYRPPGIKSLKFSKFSLGNVSPKIEGIRIQNLQPGQIIMDIDFRWGGNPSIILAVDAVVASLPIQLKDLQVYTVIRVIFQLSEDIPCISAVVVALLADPEPKIQYTLKAIGGSLTAVPGLSDMIDDTVDSIVSDMLLWPHRHVVKLGVNVDTSDLELKPQGRLSVTVVKATSLRNKEMIGKSDPYVKLYVRPMFKVKTKVIDDDLNPEWNETFDLIVEDKETQSVIFEVYDEDKLQQDKRLGVAKLAVNTLESEITQDATLKLLHSLDPIKNKDTKDRGTLHLK

SEQ ID NO: 25928 - protein, 379 aa, Zea mays subsp. mays
  misc_feature (1)..(379): Ceres Seq. ID no. 13495164
MMMGVIVGVAIMAGWSRVMRRRSTKRIAKAADIKVLGSLSRDDLRKLCGDNFPEWISFPQFEQVKWLNKHLSKLWPFVVEAATVVVKESVEPLLDDYRPPGIKSLKFSKFSLGNVSPKIEGIRIQNLQPGQIIMDIDFRWGGNPSIILAVDAVVASLPIQLKDLQVYTVIRVIFQLSEDIPCISAVVVALLADPEPKIQYTLKAIGGSLTAVPGLSDMIDDTVDSIVSDMLLWPHRHVVKLGVNVDTSDLELKPQGRLSVTVVKATSLRNKEMIGKSDPYVKLYVRPMFKVKTKVIDDDLNPEWNETFDLIVEDKETQSVIFEVYDEDKLQQDKRLGVAKLAVNTLESEITQDATLKLLHSLDPIKNKDTKDRGTLHLK

SEQ ID NO: 25929 - protein, 378 aa, Zea mays subsp. mays
  misc_feature (1)..(378): Ceres Seq. ID no. 13495165
MMGVIVGVAIMAGWSRVMRRRSTKRIAKAADIKVLGSLSRDDLRKLCGDNFPEWISFPQFEQVKWLNKHLSKLWPFVVEAATVVVKESVEPLLDDYRPPGIKSLKFSKFSLGNVSPKIEGIRIQNLQPGQIIMDIDFRWGGNPSIILAVDAVVASLPIQLKDLQVYTVIRVIFQLSEDIPCISAVVVALLADPEPKIQYTLKAIGGSLTAVPGLSDMIDDTVDSIVSDMLLWPHRHVVKLGVNVDTSDLELKPQGRLSVTVVKATSLRNKEMIGKSDPYVKLYVRPMFKVKTKVIDDDLNPEWNETFDLIVEDKETQSVIFEVYDEDKLQQDKRLGVAKLAVNTLESEITQDATLKLLHSLDPIKNKDTKDRGTLHLK

SEQ ID NO: 25930 - DNA, 1075 bp, Zea mays subsp. mays
  misc_feature (1)..(1075): Ceres Seq. ID no. 13495182
ctatttgcggaaaggaacttctgttagtgctggccaaacatcaagttcatcaaatggaacaactgcaggagaaaggcctctcctacgtgagaaattgtcaaagggaaaggatggctttgttgctgctgatttcacagctacagaagctcattgtgctgtaccctcgactccaatactttggttccagcaggcagatgagtgcatgcacctatgcatttatcagcacaaaagtctcactatcttactgctggttcctgcttcctcagtgataaatggagaagagggcattactcatgtgaagaaggcgatccttgaaaatgcatcacagaagattgtcactgttgagcagaaattgacacgaggatggggaggagaaaatgcgtatcatgttagtggatatcgttatttgcttgttgatccggagagaagagtatcaagagcctccccacctgggaaagtcaccaccctagcaaaggattctctacttgccctcaacatgctaagacaagaagtagatctagagaagtcaagatacaagagaggcgacccttgtcatgataaggatttcgaagtatgtatcagaacaaaaaacaatgcgtgggttattgctaaaatcagtcaaggaagggagctttacatggctctagagaagggtggtgaaacgcttctatatgcatccacagctgtagagaaattcagcaacaggtactgtgagggagcattctctacagattagaagcaccagagggagatcttagcttttccatacattacctattatgtacatcctgttttttttcccagctgtatcgttgccccctattgttgagagactcggaccactctttgcgaagggaataaggagttcgtatcagttgtacagctgctctgctgtcgtgtgctatctgcaaaagaatagcctagtctgggaataacgcagagcgggatagagtttgtttgttcacttatgcccttccttaacgcagagcattgtgcgtgttttcattttgctgtaacagccggcgatttacctgcagactgggaaagtaacttagcgtttaatttggtattctgc

SEQ ID NO: 25931 - protein, 244 aa, Zea mays subsp. mays
  misc_feature (1)..(244): Ceres Seq. ID no. 13495183
YLRKGTSVSAGQTSSSSNGTTAGERPLLREKLSKGKDGFVAADFTATEAHCAVPSTPILWFQQADECMHLCIYQHKSLTILLLVPASSVINGEEGITHVKKAILENASQKIVTVEQKLTRGWGGENAYHVSGYRYLLVDPERRVSRASPPGKVTTLAKDSLLALNMLRQEVDLEKSRYKRGDPCHDKDFEVCIRTKNNAWVIAKISQGRELYMALEKGGETLLYASTAVEKFSNRYCEGAFSTD

SEQ ID NO: 25932 - protein, 177 aa, Zea mays subsp. mays
  misc_feature (1)..(177): Ceres Seq. ID no. 13495184
MHLCIYQHKSLTILLLVPASSVINGEEGITHVKKAILENASQKIVTVEQKLTRGWGGENAYHVSGYRYLLVDPERRVSRASPPGKVTTLAKDSLLALNMLRQEVDLEKSRYKRGDPCHDKDFEVCIRTKNNAWVIAKISQGRELYMALEKGGETLLYASTAVEKFSNRYCEGAFSTD

SEQ ID NO: 25933 - DNA, 1077 bp, Zea mays subsp. mays
  misc_feature (1)..(1077): Ceres Seq. ID no. 13495185
cccccactgtcgccgctcctcgtcttccactctctccactttgctgcttcttctcccttattaatgctcgtgggctcctatgatccgccctccgccgcgggtttcttgatccatccccggcccaaggaagcggaccccggcgaacactcctgacagattcgcccgtccgccgctccctcgattcggtcctccccgtcagcggcaggtgtttaggacctctgcagcatagcatctggtccgtccctggagatgtccggcgtacaggagcagttcgagatcaagttccggctgccggacggcaccgacatcggacccaggcggttcccgccggcgtccaccgtcgccacgctcaaggagaccatcatcgcccagtggcccaaagataaggaaaaaggtcctaggactgtgaatgatcttaagcttattaatgctgggaagatactggagaacaacaaaaccctatcagaatgcaaaagcccgatttgcgacttctctgcgatgacaacaatgcatgtcgtcatccgcgcaccgacttcaagcaaacagtctgataaaagagcagaaaagaaagcgaaaaatttcaggtgcggttgtgccattatgtgacagcattgtgaatagtagcagagagaacgtggccatttcagttttctccctttttttttcctgctctcgctggagtgttgtattatgttcgaggcgctttctcctttcattttgttttgaagtaccgcgtgcaagcttcaacagctgtcaagtgccctttaatcgtgagtgtgcatcaagcacagaattagaaggcggttggctgctaattacccttaatcttgagtttgtcaagcacacaatttgaaggcagtcattagcgtcgaaactacgatgtccaccctatccaatcttccatggtttcacgcttctcttctatatttatgctaccctgggtgacaaatgtttaatgtatgccttccatgctagatgaactttttggaacgccattctaactcatcaatttctattctgtaaaactaaaaccagttgtaatctgccatagatcagtatgcttgctatatgggagtc

SEQ ID NO: 25934 - protein, 118 aa, Zea mays subsp. mays
  misc_feature (1)..(118): Ceres Seq. ID no. 13495186
MSGVQEQFEIKFRLPDGTDIGPRRFPPASTVATLKETIIAQWPKDKEKGPRTVNDLKLINAGKILENNKTLSECKSPICDFSAMTTMHVVIRAPTSSKQSDKRAEKKAKNFRCGCAIM

SEQ ID NO: 25935 - protein, 113 aa, Zea mays subsp. mays
  misc_feature (1)..(113): Ceres Seq. ID no. 13495187
MSSSAHRLQANSLIKEQKRKRKISGAVVPLCDSIVNSSRENVAISVFSLFFSCSRWSVVLCSRRFLLSFCFEVPRASFNSCQVPFNRECASSTELEGGWLLITLNLEFVKHTI

SEQ ID NO: 25936 - DNA, 1633 bp, Zea mays subsp. mays
  misc_feature (1)..(1633): Ceres Seq. ID no. 13495210
gcacgagaccattacctagaacatcctaatcgaaaaagctgccagcctagctgccaacgattgtcgtaagtcttggagaaactgcgcatcagtttgacctagctgccagcctgatactactcacgaactggcatggcatggtaggtgggttcgggctttcaagcatggcttccacacttttcctctagctactagctcctcccgcgcgcgacggccatggccagcgagctgctgtcgccgctcatcccgcaccagcagcgtcgacgcgctctcgccgtcgacgtggccgcgcccctgctcgcgctcctcctggccgctgtcgccttctcccgctcaccggtggcggcactggtcagctcttcgaggctcgttgacctgacactcctcgccggcgctcaggggaagggagcggtgtgcttggatgggaccccgcctggttaccaccttcggagaggattcggttccggagctcacaactggctcgtcttccttgagggaggaggttggtgcaacaccacgcagagctgctccgagcgcaaaatgaccaacttcggttcatctaagtatatgggagcagtaaacttcactgggatactcagcaatgatcacacagaaaatcctgatttctacaactggaatacagttgtcataaggtactgcgacggagcatcatttgctggggatgcagagggagaagatctggatggaaccaaacttttcttcagaggattgcgtatctgggaagcagttgtagatgaactcatgggaaaaggaatggacgctgctaaacaagccttgcttacaggctgttctgctggttctctagctgcgctactgcactgtgataatttccatggacggtttcctcatgaagtttcagttaaatgcctttctgatgctggattttttattgacgagaaggatttatctggagaaagatccatgcggtcgctcatcagtggagtagttcaccttcagaatgttaaagaagttttacccaatgactgcctccaaaagaaggatccaacagaggcagtgtttctttcctgctgaactgattaagggcatcaccacccccacgtttattctgaactccgattacgattcttggcagatacgaaacattctcgcaccaaatggatcctatcctggccaggaatggtctagttgcaaagcagatatccggaactgcagttgcgcacaaattgatgtactgcatggattcaagaagaaattagtcagtgaattgaaggttgccgaagataacaaggactggggcctgttcattgattcatgctttacccactgtcaaacaccattcgatatcacatggaattcaccgatctcaccaaggctcggcaacaagtctatctcagaggccgttggggattggtatttcgatagaaggcaaaacgcgaaacagattgactgcgagtacccatgcaaccccacatgcagcagtcttctgcctactgcttgattcgcaaagggctgcactgagatcaccaggcttttctcattttcaaattagttttgctgaggattcaaaaagggagctttgccttattggtaaaacctgcaattgactaaacacgacttgcagtagttgtgcttccatcaaaagcaatatgtc

SEQ ID NO: 25937 - protein, 278 aa, Zea mays subsp. mays
  misc_feature (1)..(278): Ceres Seq. ID no. 13495211
MASELLSPLIPHQQRRRALAVDVAAPLLALLLAAVAFSRSPVAALVSSSRLVDLTLLAGAQGKGAVCLDGTPPGYHLRRGFGSGAHNWLVFLEGGGWCNTTQSCSERKMTNFGSSKYMGAVNFTGILSNDHTENPDFYNWNTVVIRYCDGASFAGDAEGEDLDGTKLFFRGLRIWEAVVDELMGKGMDAAKQALLTGCSAGSLAALLHCDNFHGRFPHEVSVKCLSDAGFFIDEKDLSGERSMRSLISGVVHLQNVKEVLPNDCLQKKDPTEAVFLSC

SEQ ID NO: 25938 - protein, 170 aa, Zea mays subsp. mays
  misc_feature (1)..(170): Ceres Seq. ID no. 13495212
MTNFGSSKYMGAVNFTGILSNDHTENPDFYNWNTVVIRYCDGASFAGDAEGEDLDGTKLFFRGLRIWEAVVDELMGKGMDAAKQALLTGCSAGSLAALLHCDNFHGRFPHEVSVKCLSDAGFFIDEKDLSGERSMRSLISGVVHLQNVKEVLPNDCLQKKDPTEAVFLSC

SEQ ID NO: 25939 - protein, 166 aa, Zea mays subsp. mays
  misc_feature (1)..(166): Ceres Seq. ID no. 13495213
MLKKFYPMTASKRRIQQRQCFFPAELIKGITTPTFILNSDYDSWQIRNILAPNGSYPGQEWSSCKADIRNCSCAQIDVLHGFKKKLVSELKVAEDNKDWGLFIDSCFTHCQTPFDITWNSPISPRLGNKSISEAVGDWYFDRRQNAKQIDCEYPCNPTCSSLLPTA

SEQ ID NO: 25940 - DNA, 1828 bp, Zea mays subsp. mays
  misc_feature (1)..(1828): Ceres Seq. ID no. 13495214
gcacgagaccattacctagaacatcctaatcgaaaaaaaccggagcggcggcaccatttcgttaccatggagaacctggcagggcagcagttcgtttatgaggtgacgagtctacgagcattgtttctgctgctcctcctccctcccttcatcttcctcatcatgcgcaacgcgcgagcaacaacactaatgttcgataccaagaggacaaggggccaccggcagcctgcagatcggcagcagagcctcccgccgtcgcctccggcagtgcctgtcctcggccacctgcacctcgtcggctctctcccgcacgtctccctccgcagcctcgccaggacgcttggcgcggacctcatgctgctccgcctgggctccacgccggtgctggtcgtgtcgtcgtccagcgccgccgaggccgtgctgcgcacgcacgaccacgtgttcgcgtcgcggccgcacgccctggtctccgaggtcgtcctgtacggtccgtccgacgtcgggttcgcgccgcacggcgactgctggcggcccggggcggaagctcatcaccacgcaccttctcagcgtcaacagggtgcagtcgttccgccacgcccgggaagaagaggtgagcgtggtgatgggccggatcgccgaggcggcggccgctggtgcggcggtggacgtgggcgagctgctcggctcgttcacgaacgacctagcgtgccgcgccgtgatgggcaagtccttccggagcgagggtcgcaacaagctgttccgggagcttgtcctcgacaccaccaagctgctggtcggcttcaacgtcgaggacttcttccccttcctggctcgcttcggcgtgctcagcaagctggtccgcgccaagtccgagagactgaggaggaggtgggacgagctactcgataggctgatcgaggatcgtgagagcaagtatgaggcggcggcggcgagtgatctcaaggtcaaggacgatgatgacgataacttcatacatgtcttgctctccgttcaacaggagtacggccatattaccagggagcaaatgaaagctctcctgcaggacgtgtttatcggggggatagactccacatcttcgctgctcgagttcaccatggctgagctcatgcggaaaccacgagtgatgaacaagctccaagccgaggtaaggagcagcacgcccgaggggcatgatggagtcgtcggcgaagatagcctggagcacatggcctacctgagggccgtgacaaaagagtccctccggatccataacgtgacgccgctcctggccccgcacctgtccatggatagctgcaccatcgatggctacacggtccccgccggggtgcaggtcctgatcaactcttgggccatcggcagggacacgcgctactggggcgacgacgctgaggagttcgtccctgagaggttcatggacggcggcagcgccgttcatgtcagcttcaaggggagtgacttcgagttcctgccattcgggtctggacgaaggatgtgcgccggggtgaacttcgcgatggccacggtagagctaatgttggcgaacctcgtgcatcgttttgactgggatttaccaccggggcaggagggtcgcgacattgatgtgtcgcaggtgttcggactagtagtccgccggaaaaagaaacttctcttggttccaaaattacgtgtatactagcatccccctccccgcacccaagatatactgggctgttgcatatatgtatgtactgcaataaaggttgcctatatgtaagcttacgacattacttgtactgggtatatgatgcaataatgttattagaaattt

SEQ ID NO: 25941 - protein, 357 aa, Zea mays subsp. mays
  misc_feature (1)..(357): Ceres Seq. ID no. 13495215
MGRIAEAAAAGAAVDVGELLGSFTNDLACRAVMGKSFRSEGRNKLFRELVLDTTKLLVGFNVEDFFPFLARFGVLSKLVRAKSERLRRRWDELLDRLIEDRESKYEAAAASDLKVKDDDDDNFIHVLLSVQQEYGHITREQMKALLQDVFIGGIDSTSSLLEFTMAELMRKPRVMNKLQAEVRSSTPEGHDGVVGEDSLEHMAYLRAVTKESLRIHNVTPLLAPHLSMDSCTIDGYTVPAGVQVLINSWAIGRDTRYWGDDAEEFVPERFMDGGSAVHVSFKGSDFEFLPFGSGRRMCAGVNFAMATVELMLANLVHRFDWDLPPGQEGRDIDVSQVFGLVVRRKKKLLLVPKLRVY

SEQ ID NO: 25942 - protein, 325 aa, Zea mays subsp. mays
  misc_feature (1)..(325): Ceres Seq. ID no. 13495216
MGKSFRSEGRNKLFRELVLDTTKLLVGFNVEDFFPFLARFGVLSKLVRAKSERLRRRWDELLDRLIEDRESKYEAAAASDLKVKDDDDDNFIHVLLSVQQEYGHITREQMKALLQDVFIGGIDSTSSLLEFTMAELMRKPRVMNKLQAEVRSSTPEGHDGVVGEDSLEHMAYLRAVTKESLRIHNVTPLLAPHLSMDSCTIDGYTVPAGVQVLINSWAIGRDTRYWGDDAEEFVPERFMDGGSAVHVSFKGSDFEFLPFGSGRRMCAGVNFAMATVELMLANLVHRFDWDLPPGQEGRDIDVSQVFGLVVRRKKKLLLVPKLRVY

SEQ ID NO: 25943 - protein, 302 aa, Zea mays subsp. mays
  misc_feature (1)..(302): Ceres Seq. ID no. 13495217
ARDHYLEHPNRKKPERRHHFVTMENLAGQQFVYEVTSLRALFLLLLLPPFIFLIMRNARATTLMFDTKRTRGHRQPADRQQSLPPSPPAVPVLGHLHLVGSLPHVSLRSLARTLGADLMLLRLGSTPVLVVSSSSAAEAVLRTHDHVFASRPHALVSEVVLYGPSDVGFAPHGDCWRPGAEAHHHAPSQRQQGAVVPPRPGRRGERGDGPDRRGGGRWCGGGRGRAARLVHERPSVPRRDGQVLPERGSQQAVPGACPRHHQAAGRLQRRGLLPLPGSLRRAQQAGPRQVRETEEEVGRATR

SEQ ID NO: 25944 - DNA, 906 bp, Zea mays subsp. mays
  misc_feature (1)..(906): Ceres Seq. ID no. 13495259
aaaaaagaagcagaggagaggcccaagcagagtaatggccaaggtctacccaaacagcgcagccgtcgcggcagagcccgccacccgagccgctgccggcgaccaacaacctgaaccgccgacggtgctgacggtatggcgcaagtcgctgctcttcaactgcgacggcttcaccgtgtacgacgcccggggagacctcgccttccgcgtcgactgctacgccacctcccgccggcgcgccgaggtcgcgctcatggacgccgcgggggcgccgctgctcacgctccaccgcaagaggctcagcctggcggagcgctggctcatctacgaagacggcgccggcaccacgcagccgcagccgcgtcgccctctcctctccgtccaccgccacgtcggtctccgcgcctccggcgggaagacgctggcgcatgtcttcgcgccctcctcggccgcccaggaggcgttcgtggtcgaggggtcgtacggccgtcgtgactgcgccgtgcgcgacgcgcgcggcgacgtcatggccgaggtccggcgcaaggaggccgtcggcgacgacgtgttcaggctggtggtcagtccccgcttcggcgcgccgctcgccatggggcttgtcatcgtcctcgacgagatgttcggcggccgcagctcgtggtcgtggctgcacagagcgtgctaggattggataggcagtagaggccctcccccagttgtcagcgtcagcagagtttataatgcaggctgcggctgggccaaccccctaaaaactagaacgccctatcaccaattacgaaatagtgagaacaatgcaaaagcaaaaaggcacatccaattattttggatatggatgtcagttgattattttgtaatgtcatcagtcatctactgattgttttccgc

SEQ ID NO: 25945 - protein, 227 aa, Zea mays subsp. mays
  misc_feature (1)..(227): Ceres Seq. ID no. 13495260
KKKQRRGPSRVMAKVYPNSAAVAAEPATRAAAGDQQPEPPTVLTVWRKSLLFNCDGFTVYDARGDLAFRVDCYATSRRRAEVALMDAAGAPLLTLHRKRLSLAERWLIYEDGAGTTQPQPRRPLLSVHRHVGLRASGGKTLAHVFAPSSAAQEAFVVEGSYGRRDCAVRDARGDVMAEVRRKEAVGDDVFRLVVSPRFGAPLAMGLVIVLDEMFGGRSSWSWLHRAC

SEQ ID NO: 25946 - protein, 216 aa, Zea mays subsp. mays
  misc_feature (1)..(216): Ceres Seq. ID no. 13495261
MAKVYPNSAAVAAEPATRAAAGDQQPEPPTVLTVWRKSLLFNCDGFTVYDARGDLAFRVDCYATSRRRAEVALMDAAGAPLLTLHRKRLSLAERWLIYEDGAGTTQPQPRRPLLSVHRHVGLRASGGKTLAHVFAPSSAAQEAFVVEGSYGRRDCAVRDARGDVMAEVRRKEAVGDDVFRLVVSPRFGAPLAMGLVIVLDEMFGGRSSWSWLHRAC

SEQ ID NO: 25947 - protein, 143 aa, Zea mays subsp. mays
  misc_feature (1)..(143): Ceres Seq. ID no. 13495262
MDAAGAPLLTLHRKRLSLAERWLIYEDGAGTTQPQPRRPLLSVHRHVGLRASGGKTLAHVFAPSSAAQEAFVVEGSYGRRDCAVRDARGDVMAEVRRKEAVGDDVFRLVVSPRFGAPLAMGLVIVLDEMFGGRSSWSWLHRAC

SEQ ID NO: 25948 - DNA, 985 bp, Zea mays subsp. mays
  misc_feature (1)..(985): Ceres Seq. ID no. 13495278
acagaagggcggagcagtgccagtgtactggccgccaccactcgccactcgtccccctccccccgaaagccggcacgagccctcccttcccttcctccaacctgttccgatccgccccgagccggctggccatggcgatcagggctggccgctcggccctccacctccacgctctcgctttcctcatcctcgccgcctccccctgcctccaagtccaagctctagtggaccatcgcaaacagatatctgactggggtaggcaacccaactttgaactgcagaatatgtcctcgagtcaaagggatggctctcatctcttgggcagatcaaaggaaataacacacaggaaactaagggtgagaattggtgtaaggaacaaaatggaagtagtgcagcaggatgatgaagcattagttaaacttgagaacacaggtattgaacgctcaaaagctgttgattctgcagtgctgggaaaatatagcatctggagacgtgaaaatgaaaatgagaaggcagattcaagggttcgtctgatgcgagatcaaatgatcatggccagaatatattctgttcttgccaaatctagggacaaacttgatctctatcaggagctgctagcaagactcaaggaaagccagcgctcccttggggaagctactgctgatgccgaacttccgaagagtgcttcagatagaatcaaagcaatgggccaagttttatcaaaagcaagggatctgttgtatgattgcaaggaaattacccagcgtttgagagcaatgcttcagtcagcagatgagcaggtccggagcttgaagaagcagagcaccttccttagccagcttgcagctaagacaatcccaaatggcatccattgtctttctatgcgcttaacaattgattattaccttctctctccagagaaaagaaagttccccaatagcgagaacttggaaaatcctgatctttaccattatgctcttttctc

SEQ ID NO: 25949 - protein, 327 aa, Zea mays subsp. mays
  misc_feature (1)..(327): Ceres Seq. ID no. 13495279
RRAEQCQCTGRHHSPLVPLPPKAGTSPPFPSSNLFRSAPSRLAMAIRAGRSALHLHALAFLILAASPCLQVQALVDHRKQISDWGRQPNFELQNMSSSQRDGSHLLGRSKEITHRKLRVRIGVRNKMEVVQQDDEALVKLENTGIERSKAVDSAVLGKYSIWRRENENEKADSRVRLMRDQMIMARIYSVLAKSRDKLDLYQELLARLKESQRSLGEATADAELPKSASDRIKAMGQVLSKARDLLYDCKEITQRLRAMLQSADEQVRSLKKQSTFLSQLAAKTIPNGIHCLSMRLTIDYYLLSPEKRKFPNSENLENPDLYHYALF

SEQ ID NO: 25950 - protein, 284 aa, Zea mays subsp. mays
  misc_feature (1)..(284): Ceres Seq. ID no. 13495280
MAIRAGRSALHLHALAFLILAASPCLQVQALVDHRKQISDWGRQPNFELQNMSSSQRDGSHLLGRSKEITHRKLRVRIGVRNKMEVVQQDDEALVKLENTGIERSKAVDSAVLGKYSIWRRENENEKADSRVRLMRDQMIMARIYSVLAKSRDKLDLYQELLARLKESQRSLGEATADAELPKSASDRIKAMGQVLSKARDLLYDCKEITQRLRAMLQSADEQVRSLKKQSTFLSQLAAKTIPNGIHCLSMRLTIDYYLLSPEKRKFPNSENLENPDLYHYALF

SEQ ID NO: 25951 - protein, 233 aa, Zea mays subsp. mays
  misc_feature (1)..(233): Ceres Seq. ID no. 13495281
MSSSQRDGSHLLGRSKEITHRKLRVRIGVRNKMEVVQQDDEALVKLENTGIERSKAVDSAVLGKYSIWRRENENEKADSRVRLMRDQMIMARIYSVLAKSRDKLDLYQELLARLKESQRSLGEATADAELPKSASDRIKAMGQVLSKARDLLYDCKEITQRLRAMLQSADEQVRSLKKQSTFLSQLAAKTIPNGIHCLSMRLTIDYYLLSPEKRKFPNSENLENPDLYHYALF

SEQ ID NO: 25952 - DNA, 1006 bp, Zea mays subsp. mays
  misc_feature (1)..(1006): Ceres Seq. ID no. 13495435
aaacatggaatggtagtgggggggtggtttcggatcgggactccacagcttttggcggcgtattctagtatacaccaaaaaagagaaagaaaagcaccgaaaaactagcaaaccctacctcctctcctcccctcccctcctcggcggcggaatgtccgaccgccgccgcgacaaggagaagccccgcgaccgcgacatcgaccgtcatcgcgaccgagaccgcgacatcgaccgtcatcgcgaccgagaccgcgaccgggaccgggacagggacagggacagggatcgcgagcgagaccaccgccgcgagcgcgagcgcgagcggaagcgctcccgctcccggtccccgtcggcggatcgggaccgctcccaccgccgccactctcattcgcaccgaggccgtccttccccctctcccgacgccggccgccacaagcgccgccgcgaggcgtcccctgcctccgcggaccatcaccataaggaggataagaaggctgccgactctcacgcgacacccggcggaggggacatcgcggccgcggccgctgcggtgggtgacggcgacgtgaatgcggaggaactggagatgatgaagatgatgggcattcccgtcggtttcgactccaccaaggggaagcacgtgcccgacgccgacgtcagcggggtgcgtgccgtcaccaagcgccagccgcgccagtacatgaaccgccgcggcggattcaaccgccctctgccgcctgagcgcaaccgctaaggatgggaaaaggatcatgcgccaacacaaggatgtgctgatttctgggtagcagttactctgttactggacagtgtagtgagcatgtataaaccttgatggctatttaatttgcaaaacactgtagaatgatttcccgttcccttttgtcatcgtttattctgtgggcattccaggaaaacagaatttggtggatcattttgaaactgtggctttacagctttaacatgatgtttctggctttctgcgtgc

SEQ ID NO: 25953 - protein, 200 aa, Zea mays subsp. mays
  misc_feature (1)..(200): Ceres Seq. ID no. 13495436
MSDRRRDKEKPRDRDIDRHRDRDRDIDRHRDRDRDRDRDRDRDRDRERDHRRERERERKRSRSRSPSADRDRSHRRHSHSHRGRPSPSPDAGRHKRRREASPASADHHHKEDKKAADSHATPGGGDIAAAAAAVGDGDVNAEELEMMKMMGIPVGFDSTKGKHVPDADVSGVRAVTKRQPRQYMNRRGGFNRPLPPERNR

SEQ ID NO: 25954 - DNA, 2275 bp, Zea mays subsp. mays
  misc_feature (1)..(2275): Ceres Seq. ID no. 13495441
aatgtcccttggtcctctctctgacatctcttgtctcctcttcattgcaaatgtttctcttcctctctcccacctctcctctcctctccattgcaaaccttcgggatgaaggttgagagcctgctctgaaacgacgtacgtaaagggaacaaggaaccggagagcgtgcggcgggcttctggattttagagtaggcacctgtcgcttggacgtgcttcggaggagtaggtgtccaaaagttgcctacagtgggtccagaggtcatgatatagactgtcatggaggcagctgcagatgaggagaggccactgattcagtacctggctccagaggatgatgaagcttcctcacgatacactagcgacggaacgctcgatatcaacaatcagcgtgctctgaagaagagcaccgggaactggagagcatgcttcatgattctgggtaccgagttcgccgaatgcctggcattttacgcgaccgcaaagaacctggtcacctacctcacggctgagcttggtgagagcaacatcgatgccgcgacgaacgtgtccacctcgattggcagctgctacctcacgccgctcatcggcgccttcttggccgacacgtactggggaagatacaagacgatgatagtcttcctcttgctctacatcgttgggatgcttactctgacagcgtcggcgtggctccccttggccatggaggacgactcgcctaacaacagcggacttcggcgtgccacagcgtacctggggctctacctcgtttccctaggcacaggaggcatcaagccctgcacggcggccctcggggccgaccagttcgacggcggcgacgcggcggagcgggtcaccaaggcctccttcttcaactggtactacttctgcaccaacatcggctccctgctgtcggggaccgtgctcgtctgggtgcaggaaaatattggatggggagtcgggtttacggtgcagacggtgttcatgctgttcggcctcgccgtgttcgtcgccggtcgcaaggtgtataggtacaagaagctgggcgggagccctctcacaagggtagcccaggtggttgtcgcggcggtgaggaactgccatctcgtgctgcctgatgatacgtcagccctgtaccacgataagcttctaccaactgaaccaaatttcaggattgagtctgccagacaattcagattctttgacaaggctgccataatcaccggcgagaagggtgcagcagcgccgacgagcccttggagactgtgcacggtgtcccaggtggaggagctgaagatgctgctccggttgctgccggtctgggcatccatggtgctcttcttcgccgtcagtgcgcagacggtaaccacgttcattgagcaggctagggtaatggacaaccgcatcggcccgttcatcattcctccggcgtcgatagcgaccttcgacgtgatcagcgtcatggtctgtgtccccgtctacgacgccgtgctggtgcctctggcccggcgtgccactggcaacgaccgcggcctgtcgcagctgcaccggctctccatcgggatcgcgctgtccgtggtcgtcatggtgtacgcggcgctgctcgagggcaggcgcctggccctcgcgcgggccaacatgcccgccatgaacatcgcgtggcaggcgcccatgttcgccgtgcacggcgcggcggcggtcttcgccaccgtcggcgtgctcgagttcttctacgaccagtcgccggacgggatgaagagcctcggcaacgcgctcgcgctgctctccatggcggccgggagctatttcaactcgcttgcgctcagcactgtcggggtgatcacggcgagcggcggggaacgcgggtggctcccggacgacctgaacaagggtcatatggactatttcttctggatgatggccgctctaggaacgctcaacctgctgcacttcttgcactactgcaacagacgatacacaggcaacaacaacaccacttcttgacgtgtgctgtcatgctgtgtgcaccatgtttctcaaaataatagtttgacaatactacactttgtaattattgttgagtttgtgatctaaattctgaagaaggcggccaagttaatgagcgaagcggaggcccgtcgccgggaggctttccctactcattttagggtttcacctctataaatatctttgtaagccgtaggagataattatctcaattgtaaatctcctgcgatctgtaaccacccgaaaatagtgagaagttgttggccggc

SEQ ID NO: 25955 - protein, 574 aa, Zea mays subsp. mays
  misc_feature (1)..(574): Ceres Seq. ID no. 13495442
MEAAADEERPLIQYLAPEDDEASSRYTSDGTLDINNQRALKKSTGNWRACFMILGTEFAECLAFYATAKNLVTYLTAELGESNIDAATNVSTSIGSCYLTPLIGAFLADTYWGRYKTMIVFLLLYIVGMLTLTASAWLPLAMEDDSPNNSGLRRATAYLGLYLVSLGTGGIKPCTAALGADQFDGGDAAERVTKASFFNWYYFCTNIGSLLSGTVLVWVQENIGWGVGFTVQTVFMLFGLAVFVAGRKVYRYKKLGGSPLTRVAQVVVAAVRNCHLVLPDDTSALYHDKLLPTEPNFRIESARQFRFFDKAAIITGEKGAAAPTSPWRLCTVSQVEELKMLLRLLPVWASMVLFFAVSAQTVTTFIEQARVMDNRIGPFIIPPASIATFDVISVMVCVPVYDAVLVPLARRATGNDRGLSQLHRLSIGIALSVVVMVYAALLEGRRLALARANMPAMNIAWQAPMFAVHGAAAVFATVGVLEFFYDQSPDGMKSLGNALALLSMAAGSYFNSLALSTVGVITASGGERGWLPDDLNKGHMDYFFWMMAALGTLNLLHFLHYCNRRYTGNNNTTS

SEQ ID NO: 25956 - protein, 523 aa, Zea mays subsp. mays
  misc_feature (1)..(523): Ceres Seq. ID no. 13495443
MILGTEFAECLAFYATAKNLVTYLTAELGESNIDAATNVSTSIGSCYLTPLIGAFLADTYWGRYKTMIVFLLLYIVGMLTLTASAWLPLAMEDDSPNNSGLRRATAYLGLYLVSLGTGGIKPCTAALGADQFDGGDAAERVTKASFFNWYYFCTNIGSLLSGTVLVWVQENIGWGVGFTVQTVFMLFGLAVFVAGRKVYRYKKLGGSPLTRVAQVVVAAVRNCHLVLPDDTSALYHDKLLPTEPNFRIESARQFRFFDKAAIITGEKGAAAPTSPWRLCTVSQVEELKMLLRLLPVWASMVLFFAVSAQTVTTFIEQARVMDNRIGPFIIPPASIATFDVISVMVCVPVYDAVLVPLARRATGNDRGLSQLHRLSIGIALSVVVMVYAALLEGRRLALARANMPAMNIAWQAPMFAVHGAAAVFATVGVLEFFYDQSPDGMKSLGNALALLSMAAGSYFNSLALSTVGVITASGGERGWLPDDLNKGHMDYFFWMMAALGTLNLLHFLHYCNRRYTGNNNTTS

SEQ ID NO: 25957 - protein, 457 aa, Zea mays subsp. mays
  misc_feature (1)..(457): Ceres Seq. ID no. 13495444
MIVFLLLYIVGMLTLTASAWLPLAMEDDSPNNSGLRRATAYLGLYLVSLGTGGIKPCTAALGADQFDGGDAAERVTKASFFNWYYFCTNIGSLLSGTVLVWVQENIGWGVGFTVQTVFMLFGLAVFVAGRKVYRYKKLGGSPLTRVAQVVVAAVRNCHLVLPDDTSALYHDKLLPTEPNFRIESARQFRFFDKAAIITGEKGAAAPTSPWRLCTVSQVEELKMLLRLLPVWASMVLFFAVSAQTVTTFIEQARVMDNRIGPFIIPPASIATFDVISVMVCVPVYDAVLVPLARRATGNDRGLSQLHRLSIGIALSVVVMVYAALLEGRRLALARANMPAMNIAWQAPMFAVHGAAAVFATVGVLEFFYDQSPDGMKSLGNALALLSMAAGSYFNSLALSTVGVITASGGERGWLPDDLNKGHMDYFFWMMAALGTLNLLHFLHYCNRRYTGNNNTTS

SEQ ID NO: 25958 - DNA, 1756 bp, Zea mays subsp. mays
  misc_feature (1)..(1756): Ceres Seq. ID no. 13495584
tctcgatccggaaacctctcaaaccctagccgcctcctgcaagtttcagagctcaggaatctgcgccatggcgagtgagacggagaccttcgcatttcaggctgagatcaaccagctgctctcactcatcatcaacaccttctactccaacaaggagatcttcctccgcgagcttatctccaactcttccgatgcgctggacaagatcaggttcgagagtctcactgacaagagcaagctcgatgcgcagcctgagcttttcatccaccttgtcccagacaaggccacgaacacgctctccatcatcgacagcggcatcggcatgaccaagtccgaccttgtcaacaacctcggtaccatcgccaggtccgggaccaaggagttcatggaagcccttgctgccggcgctgatgtgtccatgattggccagttcggcgtcggtttctactctgcctacctcgtcgccgatagagttgtcgtgaccaccaagcacaacgatgacgagcagtacgtgtgggagtcccaagcgggcgggtcgttcactgttactcgtgacacgtcaggggagcagcttggcaggggcactaagatcacactgttcctcaaggacgatcagctggagtaccttgaggagcgtcgcctcaaggatctggtcaagaagcactctgagttcatcagctaccccatctccctgtggactgaaaagacaacagagaaggaaatttctgacgacgaagacgaggaagagaagaaagatgctgaggaaggaaaggttgaggatgttgatgagaaggaagagaaagaaaagaagaaaaagaagatcaaggaggtttctcatgagtggtcattggtcaacaagcagaagcccatatggatgaggaagccagaagaaatcacaaaagaagaatatgctgccttctataagagcttgacaaatgactgggaggagcatctggctgtgaagcacttctctgtggagggtcaactggagttcaaggctgttctctttgttcctaagagggccccctttgatctctttgacaccaagaagaagcaaaacaacatcaagctctatgtgcgcagggtgttcatcatggacaactgcgaagagctgatccctgagtggctgagcttcgttaagggtattgttgactctgaggaccttcccctcaatatctctcgtgagactcttcagcagaacaagatcctgaaggtgatcaggaagaaccttgtgaagaagtgtgttgagctcttctttgagattgctgagaacaaggaggactacaacaagttttacgaggctttctccaagaacctcaagcttggcatccatgaggactcgcagaacaggaccaagatcgccgagcttctgagataccactccaccaagagtggtgatgagctgaccagcctcaaggactacgtgaccaggatgaaggagggacagaatgacatctactatatcactggtgagagcaagaaggcagtggagaactcccccttccttgagaagctgaagaagaggggctatgaggttctgcacatggttgatgccattgacgagtatgctgttggtcagctgctgctcttgatcgtctgtctagatcacagtagtgtgattgtgcagcaagcgaaacttaaattggttgctccgtgtacattaagcctattactgtcccaaagaactcgatgttatctatcggatactggaagtctgtctatcgactgcaacgcttaagcagatatggcctgtttt

SEQ ID NO: 25959 - protein, 578 aa, Zea mays subsp. mays
  misc_feature (1)..(578): Ceres Seq. ID no. 13495585
LDPETSQTLAASCKFQSSGICAMASETETFAFQAEINQLLSLIINTFYSNKEIFLRELISNSSDALDKIRFESLTDKSKLDAQPELFIHLVPDKATNTLSIIDSGIGMTKSDLVNNLGTIARSGTKEFMEALAAGADVSMIGQFGVGFYSAYLVADRVVVTTKHNDDEQYVWESQAGGSFTVTRDTSGEQLGRGTKITLFLKDDQLEYLEERRLKDLVKKHSEFISYPISLWTEKTTEKEISDDEDEEEKKDAEEGKVEDVDEKEEKEKKKKKIKEVSHEWSLVNKQKPIWMRKPEEITKEEYAAFYKSLTNDWEEHLAVKHFSVEGQLEFKAVLFVPKRAPFDLFDTKKKQNNIKLYVRRVFIMDNCEELIPEWLSFVKGIVDSEDLPLNISRETLQQNKILKVIRKNLVKKCVELFFEIAENKEDYNKFYEAFSKNLKLGIHEDSQNRTKIAELLRYHSTKSGDELTSLKDYVTRMKEGQNDIYYITGESKKAVENSPFLEKLKKRGYEVLHMVDAIDEYAVGQLLLLIVCLDHSSVIVQQAKLKLVAPCTLSLLLSQRTRCYLSDTGSLSIDCNA

SEQ ID NO: 25960 - protein, 556 aa, Zea mays subsp. mays
  misc_feature (1)..(556): Ceres Seq. ID no. 13495586
MASETETFAFQAEINQLLSLIINTFYSNKEIFLRELISNSSDALDKIRFESLTDKSKLDAQPELFIHLVPDKATNTLSIIDSGIGMTKSDLVNNLGTIARSGTKEFMEALAAGADVSMIGQFGVGFYSAYLVADRVVVTTKHNDDEQYVWESQAGGSFTVTRDTSGEQLGRGTKITLFLKDDQLEYLEERRLKDLVKKHSEFISYPISLWTEKTTEKEISDDEDEEEKKDAEEGKVEDVDEKEEKEKKKKKIKEVSHEWSLVNKQKPIWMRKPEEITKEEYAAFYKSLTNDWEEHLAVKHFSVEGQLEFKAVLFVPKRAPFDLFDTKKKQNNIKLYVRRVFIMDNCEELIPEWLSFVKGIVDSEDLPLNISRETLQQNKILKVIRKNLVKKCVELFFEIAENKEDYNKFYEAFSKNLKLGIHEDSQNRTKIAELLRYHSTKSGDELTSLKDYVTRMKEGQNDIYYITGESKKAVENSPFLEKLKKRGYEVLHMVDAIDEYAVGQLLLLIVCLDHSSVIVQQAKLKLVAPCTLSLLLSQRTRCYLSDTGSLSIDCNA

SEQ ID NO: 25961 - protein, 471 aa, Zea mays subsp. mays
  misc_feature (1)..(471): Ceres Seq. ID no. 13495587
MTKSDLVNNLGTIARSGTKEFMEALAAGADVSMIGQFGVGFYSAYLVADRVVVTTKHNDDEQYVWESQAGGSFTVTRDTSGEQLGRGTKITLFLKDDQLEYLEERRLKDLVKKHSEFISYPISLWTEKTTEKEISDDEDEEEKKDAEEGKVEDVDEKEEKEKKKKKIKEVSHEWSLVNKQKPIWMRKPEEITKEEYAAFYKSLTNDWEEHLAVKHFSVEGQLEFKAVLFVPKRAPFDLFDTKKKQNNIKLYVRRVFIMDNCEELIPEWLSFVKGIVDSEDLPLNISRETLQQNKILKVIRKNLVKKCVELFFEIAENKEDYNKFYEAFSKNLKLGIHEDSQNRTKIAELLRYHSTKSGDELTSLKDYVTRMKEGQNDIYYITGESKKAVENSPFLEKLKKRGYEVLHMVDAIDEYAVGQLLLLIVCLDHSSVIVQQAKLKLVAPCTLSLLLSQRTRCYLSDTGSLSIDCNA

SEQ ID NO: 25962 - DNA, 1448 bp, Zea mays subsp. mays
  misc_feature (1)..(1448): Ceres Seq. ID no. 13496092
gcacgagaccattacctagaacatcctaatcgaaaagtgggtgtcgggcgggccagcagctggacaagcaagcaagcaagcaagccaataatggcgtctcactctcatcggtcccggtctcccacggcgccctgtcccagctgggggcacgcccacgcgccgcggtgccggcggcggctcgtccgggcactgctgctcgtagcggcgctggcgctggcggcggcaggtggtggtggtcgtggctccgcggccgccgccgccgccgccacccagcagaggatcccggccatcttcatgttcggcgactccatcgtggacccgggcaacaacaacaaccggctgacggagggccaaggccaacttcccgccgtacgggcaggacttccccggcggcgtcgccacgggggaggttctccaacggcttggtccccggggacctcctagcttccaagctgggcatcaaggagctgctgccgccgttcatcggcaccgacctgcagctcgaggacctgctcaccggcgtggccttcgcctgcggcggcagtggctacgatccgctcacgtccaagctcgcgacgaccctgtcgagcgccgaccagctccagctgttccaggactacaaggataagctggcggccctggccggggaggaggagatggagcgggtcgtctcgcaggccgtctacttcacggtgatgggggcaaacgacatcgtaaacaactacttcatcctccccatcagacgccaccagtacgacctctcgtcctacgtcgacttcctcgtctcctcggcgatcaacttcacaaggactctgaacgacatgggagctcagaggatagcgttcctcggcgtgccgccactaggatgctgcccgtcacagatcacgctcgcggggagcccgtcgcgccagtgcgatccggcaaggaaccaggcgtcggagctgtacaactccagggtctccaaggagatagagcgcctcaacgcggagcggagcggttctggctccaagttcgtctacgtcgacatatactacaacttgctcgacctcatccagaatccagcttcgtacggtttcaaggacgtgagcgaaggttgctgcggcagcacggtgctgaacgccgccatcttcatcgcgtaccacagcgcgtgccccaacgcgcccgactacatattctgggacggcttccaccccacgcagaaggcctacgacatcgtggtggacaagctcatccagcagaactccaagtacctgatgatgtgaagacgcttgctgctgctgcggctgctgcatggcacgagggctctacctttccccgtacaaacacacagccagctgacgtcgaccattcatggacgactccccagtccccacatggcagtggcatttgccaaatgtacgatacatattaacatataaatatactatacatgcctgtgcgccaatatc

SEQ ID NO: 25963 - protein, 201 aa, Zea mays subsp. mays
  misc_feature (1)..(201): Ceres Seq. ID no. 13496093
MERVVSQAVYFTVMGANDIVNNYFILPIRRHQYDLSSYVDFLVSSAINFTRTLNDMGAQRIAFLGVPPLGCCPSQITLAGSPSRQCDPARNQASELYNSRVSKEIERLNAERSGSGSKFVYVDIYYNLLDLIQNPASYGFKDVSEGCCGSTVLNAAIFIAYHSACPNAPDYIFWDGFHPTQKAYDIVVDKLIQQNSKYLMM

SEQ ID NO: 25964 - protein, 188 aa, Zea mays subsp. mays
  misc_feature (1)..(188): Ceres Seq. ID no. 13496094
MGANDIVNNYFILPIRRHQYDLSSYVDFLVSSAINFTRTLNDMGAQRIAFLGVPPLGCCPSQITLAGSPSRQCDPARNQASELYNSRVSKEIERLNAERSGSGSKFVYVDIYYNLLDLIQNPASYGFKDVSEGCCGSTVLNAAIFIAYHSACPNAPDYIFWDGFHPTQKAYDIVVDKLIQQNSKYLMM

SEQ ID NO: 25965 - protein, 181 aa, Zea mays subsp. mays
  misc_feature (1)..(181): Ceres Seq. ID no. 13496095
MLPVTDHARGEPVAPVRSGKEPGVGAVQLQGLQGDRAPQRGAERFWLQVRLRRHILQLARPHPESSFVRFQGRERRLLRQHGAERRHLHRVPQRVPQRARLHILGRLPPHAEGLRHRGGQAHPAELQVPDDVKTLAAAAAAAWHEGSTFPRTNTQPADVDHSWTTPQSPHGSGICQMYDTY

SEQ ID NO: 25966 - DNA, 1614 bp, Zea mays subsp. mays
  misc_feature (1)..(1614): Ceres Seq. ID no. 13496111
taatcaaaagcacagcacatcccattcccctcgtctcatctcaagagcgactagagagagagaggaagagaacaagcgataagctcatctcgcacgcaagatgcgggctccaaggggcgcaggcggctgccgcggcggccaggagcatgtggaactgatccctggcatccccgacgacgtggccgtggactgcctggcgcgcgtcccccacgcctcccaccgcgcgatgcgccgggtctgccgcggctggcggagcgccgccgcggcgccggccttcgcgtcggcgcgcgccgcggcgggcgccaacgaggacctcgtgtacctcatgcagttcgggaacccgtccggcgacgacgggcccaaggacggcgacgacgggcccggcagcaccccggcgtacggcgtggcggtgtacaacgtgacgacgggcgagtggcggcgggagcgcggcgcgccccccgtggtgccggtgttcgcgcagtgcgcggcggtggggacccgcgtggccgtgctgggcggctgggacccgcgcagcttcgagcccgtggcggacgtgcacgtgctggacgccgccacggggcggtggcgccgcgccgcgcccatgcggtcggcgcgctccttcttcgcctgcgccgaggccggcggcaagatctacgtggcgggcggccacgacaagcacaagaacgcgctcaagaccgccgaggcgtacgacgccggggccgacgcctgggacccgctgcccgacatgtcggaggagcgcgacgagtgcgacggcatggccaccgtcgccggcgaccgcttcctggccgtcagcggctaccgcacggcgcgccagggtgggttcgagcgcgacgccgagtggttcgacccggcggcgcgcgcgtggcgcaggctcgaccgcgtgcgcgcgccgccctccgccgcgcacgtcgtcgtccgcggccgcgtctggtgcatcgagggcaacgccgtcatggagtggatgggcacccgccgcggctggcgcgaggtcggcccgtacccgccgggcctcaaggccggcaccgcgcgcgccgtctgcgtcggcggcggggagaaggtcgtggtcaccggcgcgctcgacggcgagggcggccgccacgcgctctgggtgttcgacgtcaagaccaagagctggaccgtggtccgcccgccgccggagttcgccggattcgtcttctccgtcgcgtccgtccggatctgaggatctccattttcttcgacccgcccgcggctgcttgtagtagtagtacgtacgtgcactgttttcgtcgttgctggatccgatgaagactcaccccctccaagatctacgtttgcaatggatggatctgcgcatccgctgacttactagtccgccttgccaacaatgagagatacatggaggagcgggagccatgggcggttgtaaaatctgaaaaaaaagtggtgagagtgtgaatttggatctggtggtgagagtgaatttggacgagtgtggtgtttttgtcccgaggtgaaggacacagactgttgtttgttgctcttgtcctacagccatgcttttgccatcgctagccaactgcttactagtaataaaaaccactgtacatacat

SEQ ID NO: 25967 - protein, 373 aa, Zea mays subsp. mays
  misc_feature (1)..(373): Ceres Seq. ID no. 13496112
MRAPRGAGGCRGGQEHVELIPGIPDDVAVDCLARVPHASHRAMRRVCRGWRSAAAAPAFASARAAAGANEDLVYLMQFGNPSGDDGPKDGDDGPGSTPAYGVAVYNVTTGEWRRERGAPPVVPVFAQCAAVGTRVAVLGGWDPRSFEPVADVHVLDAATGRWRRAAPMRSARSFFACAEAGGKIYVAGGHDKHKNALKTAEAYDAGADAWDPLPDMSEERDECDGMATVAGDRFLAVSGYRTARQGGFERDAEWFDPAARAWRRLDRVRAPPSAAHVVVRGRVWCIEGNAVMEWMGTRRGWREVGPYPPGLKAGTARAVCVGGGEKVVVTGALDGEGGRHALWVFDVKTKSWTVVRPPPEFAGFVFSVASVRI

SEQ ID NO: 25968 - protein, 331 aa, Zea mays subsp. mays
  misc_feature (1)..(331): Ceres Seq. ID no. 13496113
MRRVCRGWRSAAAAPAFASARAAAGANEDLVYLMQFGNPSGDDGPKDGDDGPGSTPAYGVAVYNVTTGEWRRERGAPPVVPVFAQCAAVGTRVAVLGGWDPRSFEPVADVHVLDAATGRWRRAAPMRSARSFFACAEAGGKIYVAGGHDKHKNALKTAEAYDAGADAWDPLPDMSEERDECDGMATVAGDRFLAVSGYRTARQGGFERDAEWFDPAARAWRRLDRVRAPPSAAHVVVRGRVWCIEGNAVMEWMGTRRGWREVGPYPPGLKAGTARAVCVGGGEKVVVTGALDGEGGRHALWVFDVKTKSWTVVRPPPEFAGFVFSVASVRI

SEQ ID NO: 25969 - protein, 298 aa, Zea mays subsp. mays
  misc_feature (1)..(298): Ceres Seq. ID no. 13496114
MQFGNPSGDDGPKDGDDGPGSTPAYGVAVYNVTTGEWRRERGAPPVVPVFAQCAAVGTRVAVLGGWDPRSFEPVADVHVLDAATGRWRRAAPMRSARSFFACAEAGGKIYVAGGHDKHKNALKTAEAYDAGADAWDPLPDMSEERDECDGMATVAGDRFLAVSGYRTARQGGFERDAEWFDPAARAWRRLDRVRAPPSAAHVVVRGRVWCIEGNAVMEWMGTRRGWREVGPYPPGLKAGTARAVCVGGGEKVVVTGALDGEGGRHALWVFDVKTKSWTVVRPPPEFAGFVFSVASVRI

SEQ ID NO: 25970 - DNA, 1157 bp, Zea mays subsp. mays
  misc_feature (1)..(1157): Ceres Seq. ID no. 13496128
aaagcccagcacgaccaaaacccagaacctgagaatggcgcagttccttcgcggcaaggccgccgccgccgccaccggggcggcggcgctgcgcgcgtcntctccggcgccatggcggcggacggcctccgcgtcgtaccaccacacgatccaggctgtaccgcgggagacagccggcccgcgcgccgcggcgcgcgagcgccgccacggccgcgtcccggcggtcctgctcacgctcgcgggcgccgcgccagggaacggaattgcccaccggcacctccttaccgccgacaggaggcagctcgcggagatgctcaagcagtcgccctacttcctctccacccccgtccgcctccaggtccgcgcgggcgagcgatccaacgccatcctccacgccggcaccgtcctccccatcaaggtgcatagagatgaaaattctgggaatatactgaatttggtaatggtgaaggcagatgaaggaacaatgctgaaggtggatttgcctgtagagttcaagggagaggatgcttgccctgggttgaagaaaggaggctttttgcagaaaataaggaccagcctggtgtatctctgcccagctgagcacatccctccaaaaattgaggtggacctgacaaatcttgatgtcggagatagggtattgatgcatgacattcccgtccatccatcgctcaagttgctgagtaaaaacgagaccatgcccgtctgcaagatcttggcctcaaagccagacgagtaggaggcgctgcaaatacttcagagctgataacattgtacctttaggtggtacagccctccagcagctccgtccctagttcttggcttgctttttggtcatctgtcccctaggtttcaatgtgatagtggattcagacaagctatgggcttcaagtaaagatacgaaggaacaaaatgaagaaatatcactggagagacattgtctgtaccaaccgctatagaataacatcctttctcattcagtttgggttcagggacacatgacatgtaagacgactatcctttgctgtggcctgggtgaattcattctctaagctactcttgcagcggctcacaattcatcgtcctgactgcatgcattgtactgtcatgattctacgtattgaatgttgtattcatgc

SEQ ID NO: 25971 - protein, 251 aa, Zea mays subsp. mays
  misc_feature (1)..(251): Ceres Seq. ID no. 13496129
  misc_feature (33)..(33): Xaa is any aa, unknown or other
KPSTTKTQNLRMAQFLRGKAAAAATGAAALRAXSPAPWRRTASASYHHTIQAVPRETAGPRAAARERRHGRVPAVLLTLAGAAPGNGIAHRHLLTADRRQLAEMLKQSPYFLSTPVRLQVRAGERSNAILHAGTVLPIKVHRDENSGNILNLVMVKADEGTMLKVDLPVEFKGEDACPGLKKGGFLQKIRTSLVYLCPAEHIPPKIEVDLTNLDVGDRVLMHDIPVHPSLKLLSKNETMPVCKILASKPDE

SEQ ID NO: 25972 - protein, 240 aa, Zea mays subsp. mays
  misc_feature (1)..(240): Ceres Seq. ID no. 13496130
  misc_feature (22)..(22): Xaa is any aa, unknown or other
MAQFLRGKAAAAATGAAALRAXSPAPWRRTASASYHHTIQAVPRETAGPRAAARERRHGRVPAVLLTLAGAAPGNGIAHRHLLTADRRQLAEMLKQSPYFLSTPVRLQVRAGERSNAILHAGTVLPIKVHRDENSGNILNLVMVKADEGTMLKVDLPVEFKGEDACPGLKKGGFLQKIRTSLVYLCPAEHIPPKIEVDLTNLDVGDRVLMHDIPVHPSLKLLSKNETMPVCKILASKPDE

SEQ ID NO: 25973 - protein, 148 aa, Zea mays subsp. mays
  misc_feature (1)..(148): Ceres Seq. ID no. 13496131
MLKQSPYFLSTPVRLQVRAGERSNAILHAGTVLPIKVHRDENSGNILNLVMVKADEGTMLKVDLPVEFKGEDACPGLKKGGFLQKIRTSLVYLCPAEHIPPKIEVDLTNLDVGDRVLMHDIPVHPSLKLLSKNETMPVCKILASKPDE

SEQ ID NO: 25974 - DNA, 1270 bp, Zea mays subsp. mays
  misc_feature (1)..(1270): Ceres Seq. ID no. 13496142
tagaacatcctaatcgaaaatccacctttcccgcaccttgttgcacataaaaattcccacgccccgcacccaacgacctccgcgtccgcccccaaaacccccgcaaaccctagccgccgccagctaggcaaggaatggccgccctcctgcggctcgccgcagcccgatccgccctccccaggcgcgccctcgccccacaccggaggctcgcggcggcggcggcggccgcgatggaggagtggtggtccgactgggagcaggacggcgaggaggaggcgcgcgcctcggcgccggccgccggccttgaccccgccggcgggggccccgggggcgtgcagtgggtcgtcatgggccgccctggcccgcagaagcacgcccacgccgcgcgcctctccgaggtgctcgccgtgccctacatctccatgggcgcgctcctcaggcaggagctcaacccctcctcgcaactctacaggaagattgcaaactctgtgaatgaagggaggcttgtgccggaggacatcatatttgggttgctgacgaagcggcttgaggacggatacaacaagggtgaaaatgggttcattcttgatgggattccacgcacccgtatgcaagctgagattcttgacgagattgtggatgttgatttggttcttaatttcaagtgtgctgatggctgtttcatgaagaagcaatcgagaggcaacatctgcgcccactgtggacagctctttgacgtcagcaattcagcatctacgaactgtagccccagcctcgggagctatacatggcattctcaggcagaacctgctggtgttttaggcctcgaagcctcaaggatggagaggatgcgcacatatgctgagcagaccaagcagctggaagattactacaagaagcagaggaaaattgtggaactgaagacatctgctcgcccggtggagacatggcaggggctcgtagccgccctgcacctccagcatctggactcgcccccgacaccgcacaaactcaccgcgtaaatatcattattaattttgctacctccgagtagagagtctaaaggatcagaattccgatcctgcctgcagcatatctaatatccctatgtttgtgggttctggctcgagagagtcagtcggctgtcttttgttttgttttgttattgttatagataaaggtaagcgattttgcagacacgcttattgtatggttgtaaccgagagttgtggacttgccttggcttgcgagtgtactcgcttatatgctc

SEQ ID NO: 25975 - protein, 295 aa, Zea mays subsp. mays
  misc_feature (1)..(295): Ceres Seq. ID no. 13496143
MAALLRLAAARSALPRRALAPHRRLAAAAAAAMEEWWSDWEQDGEEEARASAPAAGLDPAGGGPGGVQWVVMGRPGPQKHAHAARLSEVLAVPYISMGALLRQELNPSSQLYRKIANSVNEGRLVPEDIIFGLLTKRLEDGYNKGENGFILDGIPRTRMQAEILDEIVDVDLVLNFKCADGCFMKKQSRGNICAHCGQLFDVSNSASTNCSPSLGSYTWHSQAEPAGVLGLEASRMERMRTYAEQTKQLEDYYKKQRKIVELKTSARPVETWQGLVAALHLQHLDSPPTPHKLTA

SEQ ID NO: 25976 - protein, 263 aa, Zea mays subsp. mays
  misc_feature (1)..(263): Ceres Seq. ID no. 13496144
MEEWWSDWEQDGEEEARASAPAAGLDPAGGGPGGVQWVVMGRPGPQKHAHAARLSEVLAVPYISMGALLRQELNPSSQLYRKIANSVNEGRLVPEDIIFGLLTKRLEDGYNKGENGFILDGIPRTRMQAEILDEIVDVDLVLNFKCADGCFMKKQSRGNICAHCGQLFDVSNSASTNCSPSLGSYTWHSQAEPAGVLGLEASRMERMRTYAEQTKQLEDYYKKQRKIVELKTSARPVETWQGLVAALHLQHLDSPPTPHKLTA

SEQ ID NO: 25977 - protein, 224 aa, Zea mays subsp. mays
  misc_feature (1)..(224): Ceres Seq. ID no. 13496145
MGRPGPQKHAHAARLSEVLAVPYISMGALLRQELNPSSQLYRKIANSVNEGRLVPEDIIFGLLTKRLEDGYNKGENGFILDGIPRTRMQAEILDEIVDVDLVLNFKCADGCFMKKQSRGNICAHCGQLFDVSNSASTNCSPSLGSYTWHSQAEPAGVLGLEASRMERMRTYAEQTKQLEDYYKKQRKIVELKTSARPVETWQGLVAALHLQHLDSPPTPHKLTA

SEQ ID NO: 25978 - DNA, 1029 bp, Zea mays subsp. mays
  misc_feature (1)..(1029): Ceres Seq. ID no. 13496156
atgaattgctgctgggtgctggccgttgcgggcgaacccgaaaatcacgagcgcgagagatcggagcacggcatgtcggaggagcagttcctcgccgtggcggtggaagccgccaagagcgccggcgagattattcgcaagggattctaccagaccaagaacgtcgagcacaagggccaggtggatttggtgacggagacggacaaggcctgcgaggacctcatcttcaaccacctccggaagcacttcccggaccacaagttcatcggggaggaggagtccgcggcgctcggggccaccgctgacctcaccgacgaccccacctggatcgtcgatcccctcgacgggaccactaatttcgtccatggtttcccatttgtatgtgtctccgttggcctcaccattgggaaaattcccactgtcggagtcgtcttcaaccccatcatgaacgagcttttcacggcggttcgtggaaaaggggctttcctgaatggctctccaattaaagcatcatctcaagatgagttagtgaaggctcttctggtaacagaggctggaaccaatagagacaagaccactgtggatgatacaaccaacagaatcaacaggctactatacaagattcgatccatacggatgtgtggatcattggctttaaacatgtgtggagttgcctgtggtagactagatttgtgttatgagataggatttggtggtccatgggatgttgctgctggtgctgtaattcttcaggaagccggtggccttgtttttgacccaagcggcggagagtttgatttgatgtcgcgaagaatggcaggatcaaacagcttgctgaaggataagttcgtcaaggaactgggggatactaattgaaacaaatgttagtattattcgtggaacagattaagacaataaggttgccccgccgcatggtgattaacttattgtttgggcaacaaaattccatgtaattctgcacctgtacaactatgttggacgcagaacattttattgagttttgtgatt

SEQ ID NO: 25979 - protein, 291 aa, Zea mays subsp. mays
  misc_feature (1)..(291): Ceres Seq. ID no. 13496157
MNCCWVLAVAGEPENHERERSEHGMSEEQFLAVAVEAAKSAGEIIRKGFYQTKNVEHKGQVDLVTETDKACEDLIFNHLRKHFPDHKFIGEEESAALGATADLTDDPTWIVDPLDGTTNFVHGFPFVCVSVGLTIGKIPTVGVVFNPIMNELFTAVRGKGAFLNGSPIKASSQDELVKALLVTEAGTNRDKTTVDDTTNRINRLLYKIRSIRMCGSLALNMCGVACGRLDLCYEIGFGGPWDVAAGAVILQEAGGLVFDPSGGEFDLMSRRMAGSNSLLKDKFVKELGDTN

SEQ ID NO: 25980 - protein, 267 aa, Zea mays subsp. mays
  misc_feature (1)..(267): Ceres Seq. ID no. 13496158
MSEEQFLAVAVEAAKSAGEIIRKGFYQTKNVEHKGQVDLVTETDKACEDLIFNHLRKHFPDHKFIGEEESAALGATADLTDDPTWIVDPLDGTTNFVHGFPFVCVSVGLTIGKIPTVGVVFNPIMNELFTAVRGKGAFLNGSPIKASSQDELVKALLVTEAGTNRDKTTVDDTTNRINRLLYKIRSIRMCGSLALNMCGVACGRLDLCYEIGFGGPWDVAAGAVILQEAGGLVFDPSGGEFDLMSRRMAGSNSLLKDKFVKELGDTN

SEQ ID NO: 25981 - DNA, 1097 bp, Zea mays subsp. mays
  misc_feature (1)..(1097): Ceres Seq. ID no. 13496171
gacctcacttgatccgctcccttcgccgcgacgacgttcctacgcagctgcggtcgacgcgcgcacggcagctcgctcgctagctgatcacgacagctcgctcggctcgaccgaatggcgccgcggctgctggcgtgcttcgggcgcggcgtcgcggcggcgccggacgacgcgactggcgagggccagctggaggcgccccccgctggcccggtgctggtggagctgttcgggtcgcaggggtgcggggcgtcgcccgaggcggacgccgtggcggcgcggctggcgcaggactccgggtccggggacggcgccgtcgtggtgctggcgttccacgtcgactactgggactaccgcgggtggaaggaccccttcgcgtccagcgcctggaccgtgcgccagaaggcctacgtggaggcgctccgcctcgacacgctcttcacgccgcaggtcgtcctgcagggccgcgcgcactgcgtcggcaccgaccaggacgcgctcgcgctggccgtccgcgacgccccgcgctaccccgcgcccgccatcaaggtcacgttccagcggccgagccccgcaacactgcaggcgtcgttcacgggcaccctgcgcagccgcgtggagggcccaggcggcgcgagcgtgctggtggcgctgtacgagagcgggctggtgaccgactgcgggcgcggcgagaacaagggcaagtcgctgctcaacgaccacgtggtgcgccgtctcgagaaggtggccgccgtgcgggagggcgcctcgccgaagaagaccgtgtcgggcaccgtccagttcccgctctgggacggctttcgcgccaccaagtgcggcctcgtgctcttcgtccagaacgccgcgctgcaggtgctcgacgtccagcacttcgacctgcctgacaacgtctgagctcgtgacgcggtggggcgcgcgcgcgttccgcgttggctgcctccctgcggcgggcgtcacattctttgtatcactgtatgtagtacatcactggatggtatttagatggaaaacctgagtattctttatctccacgtatgttcttgttctgcattatggcaatggatcttctgttttgc

SEQ ID NO: 25982 - protein, 266 aa, Zea mays subsp. mays
  misc_feature (1)..(266): Ceres Seq. ID no. 13496172
MAPRLLACFGRGVAAAPDDATGEGQLEAPPAGPVLVELFGSQGCGASPEADAVAARLAQDSGSGDGAVVVLAFHVDYWDYRGWKDPFASSAWTVRQKAYVEALRLDTLFTPQVVLQGRAHCVGTDQDALALAVRDAPRYPAPAIKVTFQRPSPATLQASFTGTLRSRVEGPGGASVLVALYESGLVTDCGRGENKGKSLLNDHVVRRLEKVAAVREGASPKKTVSGTVQFPLWDGFRATKCGLVLFVQNAALQVLDVQHFDLPDNV

SEQ ID NO: 25983 - protein, 223 aa, Zea mays subsp. mays
  misc_feature (1)..(223): Ceres Seq. ID no. 13496173
TSLDPLPSPRRRSYAAAVDARTAARSLADHDSSLGSTEWRRGCWRASGAASRRRRTTRLARASWRRPPLARCWWSCSGRRGAGRRPRRTPWRRGWRRTPGPGTAPSWCWRSTSTTGTTAGGRTPSRPAPGPCARRPTWRRSASTRSSRRRSSCRAARTASAPTRTRSRWPSATPRATPRPPSRSRSSGRAPQHCRRRSRAPCAAAWRAQAARACWWRCTRAGW

SEQ ID NO: 25984 - DNA, 1135 bp, Zea mays subsp. mays
  misc_feature (1)..(1135): Ceres Seq. ID no. 13496182
gtacgacaggctgtaccgaggttcagttcggtagtgtagttgtaggttgcgatcgcgaggcggctgctggcggcggtcgccatagtagtcgtggccgccgcgctcgcgtgcggcgcgggcgcgcagctctcggcggggttctactcgtcgagctgccccgccgtgcacagcatcgtgcgccaggccatgtcgcaggccgtcacgaacaacacgcgcagcgccgccgccgtgctccgcgtcttcttccacgactgcttcgtcaatggctgcgacgcctcgctgctgctggacgacacgcccacgacgcccggcgagaagggcgccggccccaacgccggcggctccaccgtcggcttcgacctcatcgacaccatcaaggcgcaggtcgaggccgcctgccccgccaccgtctcctgcgccgacatcctggcgctcaccgcgcgcgacggcgtcaacctgctcggcggcccgagctgggccgtgccgctgggccggcgcgacgcgacgttccccaacagcacgggcgcggcgacggacctcccgggcccggactccgacctggccggcctggtggccgggttcgccgccaagggcctgagcccgcgcgacctcgcggcgctgtcgggcgcgcacacggtggggatggcgcgctgcgccagcttccgcacccgcgtctactgcgacgacaacgtgagcccggcgttcgccgcgcagcagcgccaggcctgcccgtcggccgacgccgacgacgcgctcgcgccgctcgactcgctcacccccgaccagttcgacaacggctactaccggagcctcatggccggcgccggcctgctgcactcggaccaggagctcttcagcaacggcgcactcgactcgctcgtgcgcctctacggcaccaacgccgacgccttctcgtcggacttcgccgcgtccatggtcaagctcggcaacatcggcccgctcacgggttccgcgggggaggtcaggctcaactgcaggacggtgaattcgaattcgtgacttcaggacggtgaatgccaccatttttaattctttttccctacaaggagttgtagaatttgcattccttcaacgatttcgaatttcgaatttgctgtgagtcagctgaagtggc

SEQ ID NO: 25985 - protein, 343 aa, Zea mays subsp. mays
  misc_feature (1)..(343): Ceres Seq. ID no. 13496183
TTGCTEVQFGSVVVGCDREAAAGGGRHSSRGRRARVRRGRAALGGVLLVELPRRAQHRAPGHVAGRHEQHAQRRRRAPRLLPRLLRQWLRRLAAAGRHAHDARREGRRPQRRRLHRRLRPHRHHQGAGRGRLPRHRLLRRHPGAHRARRRQPARRPELGRAAGPARRDVPQQHGRGDGPPGPGLRPGRPGGRVRRQGPEPARPRGAVGRAHGGDGALRQLPHPRLLRRQREPGVRRAAAPGLPVGRRRRRARAARLAHPRPVRQRLLPEPHGRRRPAALGPGALQQRRTRLARAPLRHQRRRLLVGLRRVHGQARQHRPAHGFRGGGQAQLQDGEFEFVTSGR

SEQ ID NO: 25986 - protein, 277 aa, Zea mays subsp. mays
  misc_feature (1)..(277): Ceres Seq. ID no. 13496184
MSQAVTNNTRSAAAVLRVFFHDCFVNGCDASLLLDDTPTTPGEKGAGPNAGGSTVGFDLIDTIKAQVEAACPATVSCADILALTARDGVNLLGGPSWAVPLGRRDATFPNSTGAATDLPGPDSDLAGLVAGFAAKGLSPRDLAALSGAHTVGMARCASFRTRVYCDDNVSPAFAAQQRQACPSADADDALAPLDSLTPDQFDNGYYRSLMAGAGLLHSDQELFSNGALDSLVRLYGTNADAFSSDFAASMVKLGNIGPLTGSAGEVRLNCRTVNSNS

SEQ ID NO: 25987 - DNA, 1485 bp, Zea mays subsp. mays
  misc_feature (1)..(1485): Ceres Seq. ID no. 13496204
tagaacatcctaatcaaaaaaaaagctatcgcttatcatgctaggctaggcagctttgttgagaaggagcacgggggaagcccggcaagatcactacacgtggcatgtatgtccaaaactccaaatgccgagtagacagtggcggcggtagagagcgctgttaccttgcggggtgacgggggcaccttcttcggcgcggctgcagctgcagcatccgccgccgcgccggacgcggaggccgtgctggcgtaccgctcgggcgccgcgccgcgccgcggaaagccgcgaaggagggcgttgcggagggtgcgtcgccacgcgagtgcggtggaagatgacatcgggaacgcgaggggagaccaggcgcgggaagggcgggaggactgtgaagagcgcgaggagggcagcggcggcggcggcggcgctgatgctgatgctggtgcaggggctgatgagccggattcccgttcggcgtggccgcgtggggagcaagcagaagtgcagaactgcacaaggagagggcccacataaccatttctatgatattgcgcgtgtctcagtgtctcggcccagtttttcatgggctgacccggttatgtggccttgttagttttcgcctaatttcaaataacagcaatttcttagtggcccgtacactctgcagcagtgcggtgcgggcgtgcggcctccctttttttctccagttcctccggcggcggcgtgcttggcggtgcgccaggtgcccagatctccaccatcttagtcgccggcgacgagcatcaccaggttcccgatgaccatggcgcagcgcacgatgtgcctgcttcggcggtccattgggtttacagcgccgcaggcacagagagccctgagtaccactgccgcaccagcggcggagggtgcggccgtggctgaagctacggcgaaggaggcgaagaggaggaggaagaatctgtttgacgtagtgcagttcctgccagagtggggcattggatacaaggttgccaagaccacctggcgtgacgtctcctatcagatcaccaagatcaacctgtacaaggatggtcggcatggaaaggcgtgggagcttcggtacaaggcaggtgtgcaagctgcagacaccccaactaggatcagcggtgttaacaaacgtgggtggaagtacataaaagaatcacagaagaaactacaagaagcccccaaagtagacgtagctgttgctgctgcctagttcgtagttacatgcatgtttgttgtaagatgattcggtaaatctttagatggctgttgccagggtgagaacagggaaccacttttttttggatcgactctatacttttttgtcgatgacgactgaacctctctgcaacatgtccagtttcttttcttttccttatggaacgaacctttaccgtaatgtactgatgcagaagaactgcgttgattgtggcgatctagttttcattcaaacgcaagccttgtttc

SEQ ID NO: 25988 - protein, 145 aa, Zea mays subsp. mays
  misc_feature (1)..(145): Ceres Seq. ID no. 13496205
MTMAQRTMCLLRRSIGFTAPQAQRALSTTAAPAAEGAAVAEATAKEAKRRRKNLFDVVQFLPEWGIGYKVAKTTWRDVSYQITKINLYKDGRHGKAWELRYKAGVQAADTPTRISGVNKRGWKYIKESQKKLQEAPKVDVAVAAA

SEQ ID NO: 25989 - protein, 143 aa, Zea mays subsp. mays
  misc_feature (1)..(143): Ceres Seq. ID no. 13496206
MAQRTMCLLRRSIGFTAPQAQRALSTTAAPAAEGAAVAEATAKEAKRRRKNLFDVVQFLPEWGIGYKVAKTTWRDVSYQITKINLYKDGRHGKAWELRYKAGVQAADTPTRISGVNKRGWKYIKESQKKLQEAPKVDVAVAAA

SEQ ID NO: 25990 - protein, 138 aa, Zea mays subsp. mays
  misc_feature (1)..(138): Ceres Seq. ID no. 13496207
MCLLRRSIGFTAPQAQRALSTTAAPAAEGAAVAEATAKEAKRRRKNLFDVVQFLPEWGIGYKVAKTTWRDVSYQITKINLYKDGRHGKAWELRYKAGVQAADTPTRISGVNKRGWKYIKESQKKLQEAPKVDVAVAAA

SEQ ID NO: 25991 - DNA, 1772 bp, Zea mays subsp. mays
  misc_feature (1)..(1772): Ceres Seq. ID no. 13496422
ccattacctagaacatcctaatcgaaaaactactcgatggaaccagcaacatgggccgcgttcctcggcattgccctttgcgcagcggcagcgctcttccttttgcgtggccggcgcccggtctacaaccccccgccgggccccaagccatggccgatcatcggcaaccttaacctcatgggcgagctgccccaccgctccatgaacgagctctccaagcggtacggtccgctcatgcagctctggttcgggtcgttgcctgttgtcgtcggcgcgtccgccgagatggcaaagctcttcctcaagaccaacgacgcggcgttctccgaccggccgaggttcgcagtcggcaagtacaccgcgtacgactgctccggccttctgtgggctccttttgagccgtacctgcgccaggcacgcaggatctgcgccaccgagctcttcagcgccacgcggctcgagtccttcgagcacatccgcgacgaggaggtgcgcgtgatgctccgacagctgcgccaagcggctgggcgcaccgtgcggcttagggactacctgcagatgttggcgctcggcgtgatctcgcgcatagttctgggcaagaagtacgtcatggaggaggcggcggacggtgagggggactcagcgccggcgataacgcctgccgagttcagggagatggtggacgagttcttcgcgcttcacggtgcgtttaacattggtgattatatcccttggctagattggctggacctgcagggctacgttgctaggatgaagagaatgaaggcgaggtttggtcgattcctggaacgagtcttggacgtgcacaacgagcggcgactacgcgagggagggaactttgtggcaaaggatatgttggacgtgctgctgcagctggccgatgacactagtcttgaagtccagctcagcagggacaatgttaaggctatcacacaggacctaatcatcgcaggcacggatagtaatgcaaacacgctggagtgggctgtctcggagctcctcaagaaccctaagatcttagccaaggccatggaggagctgaaccatgtcatagggccggaccgactggtgacggaaagcgacctccctcgcctcccctacatcgaggctgtgctcaaggagaccatgcgcgtgcaccctgccgcgccgatgctggcaccccacgtggcccgcgaggacacatccgtggacggatacgacgtgctcgctggcacggtcttgttcatcaacgtgtgggcaatcggccgcgaccctggactgtgggacgcgccggaggagttccggccggagcggttcgtcgagagcaagatcgacgtgaggggccatgacttccagctgctgccgttcggctctggccggcgaatgtgccccgggatcaacctcgcgctaaaggtgatggctttgagtcttgccaatctgctacacggcttcgagtggaggcttccggacggcgtgacggcagaggagctgagcatggatgaggccttcaagctcgcggtaccgcgtaaattcccgctcatggtcgtggccgagcccaggttgccagctcgcctgtatactggcgcttgatgccagtacgtgtcttcggttgttggcatgcgtggagtatagcacatgattttcagctcttggaactttgttttaataaaacacaaatatatgtgttatgttggttagatgaatgtgaatataaagttgacaacctaggtaattcgaacccctattggtatataattttactttatttttgc

SEQ ID NO: 25992 - protein, 517 aa, Zea mays subsp. mays
  misc_feature (1)..(517): Ceres Seq. ID no. 13496423
MEPATWAAFLGIALCAAAALFLLRGRRPVYNPPPGPKPWPIIGNLNLMGELPHRSMNELSKRYGPLMQLWFGSLPVVVGASAEMAKLFLKTNDAAFSDRPRFAVGKYTAYDCSGLLWAPFEPYLRQARRICATELFSATRLESFEHIRDEEVRVMLRQLRQAAGRTVRLRDYLQMLALGVISRIVLGKKYVMEEAADGEGDSAPAITPAEFREMVDEFFALHGAFNIGDYIPWLDWLDLQGYVARMKRMKARFGRFLERVLDVHNERRLREGGNFVAKDMLDVLLQLADDTSLEVQLSRDNVKAITQDLIIAGTDSNANTLEWAVSELLKNPKILAKAMEELNHVIGPDRLVTESDLPRLPYIEAVLKETMRVHPAAPMLAPHVAREDTSVDGYDVLAGTVLFINVWAIGRDPGLWDAPEEFRPERFVESKIDVRGHDFQLLPFGSGRRMCPGINLALKVMALSLANLLHGFEWRLPDGVTAEELSMDEAFKLAVPRKFPLMVVAEPRLPARLYTGA

SEQ ID NO: 25993 - protein, 470 aa, Zea mays subsp. mays
  misc_feature (1)..(470): Ceres Seq. ID no. 13496424
MGELPHRSMNELSKRYGPLMQLWFGSLPVVVGASAEMAKLFLKTNDAAFSDRPRFAVGKYTAYDCSGLLWAPFEPYLRQARRICATELFSATRLESFEHIRDEEVRVMLRQLRQAAGRTVRLRDYLQMLALGVISRIVLGKKYVMEEAADGEGDSAPAITPAEFREMVDEFFALHGAFNIGDYIPWLDWLDLQGYVARMKRMKARFGRFLERVLDVHNERRLREGGNFVAKDMLDVLLQLADDTSLEVQLSRDNVKAITQDLIIAGTDSNANTLEWAVSELLKNPKILAKAMEELNHVIGPDRLVTESDLPRLPYIEAVLKETMRVHPAAPMLAPHVAREDTSVDGYDVLAGTVLFINVWAIGRDPGLWDAPEEFRPERFVESKIDVRGHDFQLLPFGSGRRMCPGINLALKVMALSLANLLHGFEWRLPDGVTAEELSMDEAFKLAVPRKFPLMVVAEPRLPARLYTGA

SEQ ID NO: 25994 - protein, 462 aa, Zea mays subsp. mays
  misc_feature (1)..(462): Ceres Seq. ID no. 13496425
MNELSKRYGPLMQLWFGSLPVVVGASAEMAKLFLKTNDAAFSDRPRFAVGKYTAYDCSGLLWAPFEPYLRQARRICATELFSATRLESFEHIRDEEVRVMLRQLRQAAGRTVRLRDYLQMLALGVISRIVLGKKYVMEEAADGEGDSAPAITPAEFREMVDEFFALHGAFNIGDYIPWLDWLDLQGYVARMKRMKARFGRFLERVLDVHNERRLREGGNFVAKDMLDVLLQLADDTSLEVQLSRDNVKAITQDLIIAGTDSNANTLEWAVSELLKNPKILAKAMEELNHVIGPDRLVTESDLPRLPYIEAVLKETMRVHPAAPMLAPHVAREDTSVDGYDVLAGTVLFINVWAIGRDPGLWDAPEEFRPERFVESKIDVRGHDFQLLPFGSGRRMCPGINLALKVMALSLANLLHGFEWRLPDGVTAEELSMDEAFKLAVPRKFPLMVVAEPRLPARLYTGA

SEQ ID NO: 25995 - DNA, 1530 bp, Zea mays subsp. mays
  misc_feature (1)..(1530): Ceres Seq. ID no. 13496483
gtcgaggccgccgcccagaccgcctccccttccccgcctccggtgcccaaggccaggccaacagttttgaggtggtaatggcggaccaggctaaccaacccactgtccttcataagctaggtggccagttccacctgagctccagcttctctgaaggtgtacgggcccgtaacatctgcccttctttctcaccttatgaaaggagatttgccacgaggaactacatgacccagagcctttggggcccttcaatgtctgttagcggtggcatcaatgttccagtgatgccgactccgctttttgccaatgctccagccgagaaaggtggcaaaaacttcatgattgatttcatgatgggcggtgtttcagctgctgtttcgaagactgcagctgctcccattgaacgagtgaagctgcttattcagaatcaggatgagatgatcaagtctggtaggctatcagagccgtacaagggtattgctgattgcttcaaacgtaccatcaaggatgagggtttctcttccttgtggaggggtaacactgctaatgttattcgttacttccctactcaggctttgaactttgcgtttaaggactacttcaagaggctgttcaacttcaagaaggacagggatggttactggaagtggtttgctggcaacctggcctctggtggtgctgctggtgcttcctctttgttttttgtgtactccctggattatgcgaggacaaggttggccaatgatgccaaggctgccaagggaggaggcgatagacaattcaatggtcttgtggatgtctaccgcaagacactcaaatctgatggtattgctgggctttaccgtggatttaacatatcttgtgttggaattattgtttatcgtggcctgtatttcggactttacgattctatcaagccagttgtcctcactggcagcctccaggacaacttctttgccagttttgctctgggttggctgatcaccaacggtgctggtcttgcatcttaccccattgatactgtccgcagaaggatgatgatgacttctggtgaggctgtcaagtacaagagctcattggacgcattccagcagatccttaagaaggaaggccccaagtccctgttcaagggtgctggtgctaacattcttcgtgccattgctggcgctggtgtgctttctggctacgaccagctccagatcctcttcttcggaaagaagtacggctccggcggtgcttaaatggagaaaaatgatgacgaacaagagcagttcgctcccggtccagcccagtcaggatctggtcaagtttttgcctttcatatcgaagaaattaataatttatgtaggagaatttttccaacattcgttttgggcggagacattgatctcaaaacactcgtaactgtcctactaggtggtggcatgggtccccaaaacatggtcatagggtgtgtctagtctgcccttcgttgcagccgggcaattttccttacatatattgcctttaatcaagtatcagatgagtgtc

SEQ ID NO: 25996 - protein, 412 aa, Zea mays subsp. mays
  misc_feature (1)..(412): Ceres Seq. ID no. 13496484
RGRRPDRLPFPASGAQGQANSFEVVMADQANQPTVLHKLGGQFHLSSSFSEGVRARNICPSFSPYERRFATRNYMTQSLWGPSMSVSGGINVPVMPTPLFANAPAEKGGKNFMIDFMMGGVSAAVSKTAAAPIERVKLLIQNQDEMIKSGRLSEPYKGIADCFKRTIKDEGFSSLWRGNTANVIRYFPTQALNFAFKDYFKRLFNFKKDRDGYWKWFAGNLASGGAAGASSLFFVYSLDYARTRLANDAKAAKGGGDRQFNGLVDVYRKTLKSDGIAGLYRGFNISCVGIIVYRGLYFGLYDSIKPVVLTGSLQDNFFASFALGWLITNGAGLASYPIDTVRRRMMMTSGEAVKYKSSLDAFQQILKKEGPKSLFKGAGANILRAIAGAGVLSGYDQLQILFFGKKYGSGGA

SEQ ID NO: 25997 - protein, 387 aa, Zea mays subsp. mays
  misc_feature (1)..(387): Ceres Seq. ID no. 13496485
MADQANQPTVLHKLGGQFHLSSSFSEGVRARNICPSFSPYERRFATRNYMTQSLWGPSMSVSGGINVPVMPTPLFANAPAEKGGKNFMIDFMMGGVSAAVSKTAAAPIERVKLLIQNQDEMIKSGRLSEPYKGIADCFKRTIKDEGFSSLWRGNTANVIRYFPTQALNFAFKDYFKRLFNFKKDRDGYWKWFAGNLASGGAAGASSLFFVYSLDYARTRLANDAKAAKGGGDRQFNGLVDVYRKTLKSDGIAGLYRGFNISCVGIIVYRGLYFGLYDSIKPVVLTGSLQDNFFASFALGWLITNGAGLASYPIDTVRRRMMMTSGEAVKYKSSLDAFQQILKKEGPKSLFKGAGANILRAIAGAGVLSGYDQLQILFFGKKYGSGGA

SEQ ID NO: 25998 - protein, 338 aa, Zea mays subsp. mays
  misc_feature (1)..(338): Ceres Seq. ID no. 13496486
MTQSLWGPSMSVSGGINVPVMPTPLFANAPAEKGGKNFMIDFMMGGVSAAVSKTAAAPIERVKLLIQNQDEMIKSGRLSEPYKGIADCFKRTIKDEGFSSLWRGNTANVIRYFPTQALNFAFKDYFKRLFNFKKDRDGYWKWFAGNLASGGAAGASSLFFVYSLDYARTRLANDAKAAKGGGDRQFNGLVDVYRKTLKSDGIAGLYRGFNISCVGIIVYRGLYFGLYDSIKPVVLTGSLQDNFFASFALGWLITNGAGLASYPIDTVRRRMMMTSGEAVKYKSSLDAFQQILKKEGPKSLFKGAGANILRAIAGAGVLSGYDQLQILFFGKKYGSGGA

SEQ ID NO: 25999 - DNA, 1642 bp, Zea mays subsp. mays
  misc_feature (1)..(1642): Ceres Seq. ID no. 13496541
cgcaattaaccctcactaaagggaacaaaagctggagctccaccgcggtggcggccgctctagaactagtggatcccccgggctgcaggaattcgcacgagaccattacctanaacatcctaatcgaaaaacgacacgcccttgtatccgacagcgaatctccactggcactactgctccgagcccgagacgaataatggcgggggcggcagcggcggcagtagctgtgctggtgctcgccgcggcgcacggcgcgctctgcgggtgctgggaccaccgccgcgcagcgccagcgccgtcgccgtcctgggaccaccgcgggacgaacagcacggcggcgctggagggttgcgggtgcgagccgtcgccgccgccgccgtggaggttcaggaacgacaagctgagggcgctgtacccggtgatccaggcgttcaagcagacgatcacgtgcgacccgctgggcgtgacggcgacgtggacgggcacggagctctgcgacagcttcttcaacaacggcagcaccaccacgtactacaggggattctactgcgactacccgccggacgcgccgggcgtgctgacggtggcgtccatcgacttcaacgggttcgggctgtgcgcgccgtcgctggccgggttcatcgacgcgttcccggacctggcgctgttccacgccaactccaacaacttctccggcgacgtgccggacctgacccagctgcgctacttctacgagctggacctgtccaacaacaacttctcgggcgcgttcccggaggccgtggtgccgctgggcgggctgctgttcctggacctccgcttcaaccggtacgcgggggaggtgccagcgccggtgttcgcgctcacggtggaggcgctcttcctcaacaacaacggctttggcgggcggatcccggacacgctcggcagcacgggcgcgcagtacctggtggtggccaacaaccagttcacgggccccatcccgcgctccatctacaacgcgtcggccacgctgtcggaggtgctgttcctcaacaaccgcctgtccgggtgcctcccctacgagatcgggctggtggaggggctggccgtgttcgacgccggcgggaacgagatcacggggcccgtgccgctgtcgttcggctgcctccgcgacgtggaggagctcaacctggcggggaaccagctgtacgggcaggtgcccgacgtggtgtgcctgctggcgcggacggggaagctgcagaacctgtcgctgtcggacaacttcttccactcggtggggcaccactgcatggagctggtgcgcagccgtgtcctggacgtgcggcgcaactgcattctggggttccccgaccagcggcccccgctcgagtgcgccgccttctacgtcgaccccagcaagcactgccccttcatcccgcacatcccctgcgagctgcctgggtacacggcgcacggccatcctcaccaaggccatgggggtgggaactgatccatggccacccatggtgatttggtagcctttttggggggaggaataagttccactgctgcattcatgacactgggtggggctcgaaaaactccatccgtgacaaataatattatccttttaataagaggtactagttatttacagcgt

SEQ ID NO: 26000 - protein, 431 aa, Zea mays subsp. mays
  misc_feature (1)..(431): Ceres Seq. ID no. 13496542
MAGAAAAAVAVLVLAAAHGALCGCWDHRRAAPAPSPSWDHRGTNSTAALEGCGCEPSPPPPWRFRNDKLRALYPVIQAFKQTITCDPLGVTATWTGTELCDSFFNNGSTTTYYRGFYCDYPPDAPGVLTVASIDFNGFGLCAPSLAGFIDAFPDLALFHANSNNFSGDVPDLTQLRYFYELDLSNNNFSGAFPEAVVPLGGLLFLDLRFNRYAGEVPAPVFALTVEALFLNNNGFGGRIPDTLGSTGAQYLVVANNQFTGPIPRSIYNASATLSEVLFLNNRLSGCLPYEIGLVEGLAVFDAGGNEITGPVPLSFGCLRDVEELNLAGNQLYGQVPDVVCLLARTGKLQNLSLSDNFFHSVGHHCMELVRSRVLDVRRNCILGFPDQRPPLECAAFYVDPSKHCPFIPHIPCELPGYTAHGHPHQGHGGGN

SEQ ID NO: 26001 - DNA, 1630 bp, Zea mays subsp. mays
  misc_feature (1)..(1630): Ceres Seq. ID no. 13498060
aataatggccggcgcccaagaagctggcgacgccctggtcatcagccgtgcgcgcggcgnntgctggtgttcccgctgcccttccagggccacatcgacccgatgctgcacctggcgggcgtgctccacgcgcggggcctcgcggtgaccgtgctccacacgcgcttcaacgcgttggaccccgcgcggcacccggagttccagttcgtggccgtccccgacggcacgcccgccgacgtcgccgccatggggaggatcatcgacatcatcctggccatgaacgccgccatggaggcgtcgccggccgtcggggaggcgctgcgggcgtccgcggtcgcggggcaggacgggcggccccgcgcctcgtgcctcttcgtcgacgccaacctcctcgccgtgcacagggcggccagggcgctcggactgcccacgctggtgctgcgcaccgggagcgccgcctgcctcggctgcttcctggcctaccccatgctccacgaaaagggctatctgcctccgcaagagtcgcagctgtgcacgccggtgccggagctgccaccactccgagtgaaggacctgatctactcgaagcacagcgaccacgagctgatgcgcaaagtcctcgcccggggcagcgaaacagtgagagattgctccggcgtcgtcatcaacacagccgaggcactggaggcagccgagctagggaggctccgcgacgagctggtccacctcccggtggtgctcgccgccggcccactccacaagctctcctcctccaggggcgccgggagcagcttgctcgccccggaccacagctgcatcgagtggctggacgcgcagcggcccgggtcggtgctgtacgtgagcttcgggagcctggcggccatggactcgagcgagctccgggaggtggcatggggtctggcggagtgcggccaccccttcctatgggtcgtccggcccaacatggtacgaggctgcgacgtcgacagcgcgcggcagctgccggatggtttcgaggacgccgtcaagggcagaggcgtggtggtccgctgggccccgcagcaggaggtgctggcccaccgcgcagtgggtgggttctggagccactgcgggtggaactcgactctggaggcggtcagcgagggggtcccgatgatctgcaggccggacgccgtggaccagatgatgaacacgaggtacttgcaggacgtctggggcgtcggcttcgagctccaaggggagctggagagggggaagatcaaggacgcggttaggaagttgatgggtgagcgggagggagctgagatgagaagagcagcgcaagagctttgcgcgaaactagcaggctgcttggagagcactgggtcttctcaggttgccattgacaagttggttagctacattctgtctctgtgaatcttctgttctatggcgtatgtgtgttccgctgggttagcattggcagcagcttaacagctggtactcttatatggacaattattcctgtcaattatatgtagtgttctctttctctagctattttttaatttctctacacaccagcttctgatttcgttttaccgccttccatatcggagatattataaacctgactccctttcaagctctc

SEQ ID NO: 26002 - protein, 471 aa, Zea mays subsp. mays
  misc_feature (1)..(471): Ceres Seq. ID no. 13498061
  misc_feature (20)..(20): Xaa is any aa, unknown or other
  misc_feature (21)..(21): Xaa is any aa, unknown or other
NNGRRPRSWRRPGHQPCARXXLVFPLPFQGHIDPMLHLAGVLHARGLAVTVLHTRFNALDPARHPEFQFVAVPDGTPADVAAMGRIIDIILAMNAAMEASPAVGEALRASAVAGQDGRPRASCLFVDANLLAVHRAARALGLPTLVLRTGSAACLGCFLAYPMLHEKGYLPPQESQLCTPVPELPPLRVKDLIYSKHSDHELMRKVLARGSETVRDCSGVVINTAEALEAAELGRLRDELVHLPVVLAAGPLHKLSSSRGAGSSLLAPDHSCIEWLDAQRPGSVLYVSFGSLAAMDSSELREVAWGLAECGHPFLWVVRPNMVRGCDVDSARQLPDGFEDAVKGRGVVVRWAPQQEVLAHRAVGGFWSHCGWNSTLEAVSEGVPMICRPDAVDQMMNTRYLQDVWGVGFELQGELERGKIKDAVRKLMGEREGAEMRRAAQELCAKLAGCLESTGSSQVAIDKLVSYILSL

SEQ ID NO: 26003 - protein, 437 aa, Zea mays subsp. mays
  misc_feature (1)..(437): Ceres Seq. ID no. 13498062
MLHLAGVLHARGLAVTVLHTRFNALDPARHPEFQFVAVPDGTPADVAAMGRIIDIILAMNAAMEASPAVGEALRASAVAGQDGRPRASCLFVDANLLAVHRAARALGLPTLVLRTGSAACLGCFLAYPMLHEKGYLPPQESQLCTPVPELPPLRVKDLIYSKHSDHELMRKVLARGSETVRDCSGVVINTAEALEAAELGRLRDELVHLPVVLAAGPLHKLSSSRGAGSSLLAPDHSCIEWLDAQRPGSVLYVSFGSLAAMDSSELREVAWGLAECGHPFLWVVRPNMVRGCDVDSARQLPDGFEDAVKGRGVVVRWAPQQEVLAHRAVGGFWSHCGWNSTLEAVSEGVPMICRPDAVDQMMNTRYLQDVWGVGFELQGELERGKIKDAVRKLMGEREGAEMRRAAQELCAKLAGCLESTGSSQVAIDKLVSYILSL

SEQ ID NO: 26004 - protein, 389 aa, Zea mays subsp. mays
  misc_feature (1)..(389): Ceres Seq. ID no. 13498063
MGRIIDIILAMNAAMEASPAVGEALRASAVAGQDGRPRASCLFVDANLLAVHRAARALGLPTLVLRTGSAACLGCFLAYPMLHEKGYLPPQESQLCTPVPELPPLRVKDLIYSKHSDHELMRKVLARGSETVRDCSGVVINTAEALEAAELGRLRDELVHLPVVLAAGPLHKLSSSRGAGSSLLAPDHSCIEWLDAQRPGSVLYVSFGSLAAMDSSELREVAWGLAECGHPFLWVVRPNMVRGCDVDSARQLPDGFEDAVKGRGVVVRWAPQQEVLAHRAVGGFWSHCGWNSTLEAVSEGVPMICRPDAVDQMMNTRYLQDVWGVGFELQGELERGKIKDAVRKLMGEREGAEMRRAAQELCAKLAGCLESTGSSQVAIDKLVSYILSL

SEQ ID NO: 26005 - DNA, 1116 bp, Zea mays subsp. mays
  misc_feature (1)..(1116): Ceres Seq. ID no. 13498100
gaatgagaccagttgccctctgccccaggcaaagctgcagctgcagctgccacagcggtgaccacgcacgctgcaccgcaccgcaccgacgggtgagacctgctgtgtccaccaaccgtgagcccagcaggcgaccgacgacgctagcttagactaggaaccaacaatggccacgcgccacctgctcctcctcctgctcgccgcgctgctcccggcggcggccacggcggacccggacgcggtgcaggactactgcgtgccggacacgggcggcgggcgcgggcgcgggcgggccgtggatctagcgctgctcccgtcctacccgtgcaggagccccgccaacctgacggcggcggacttcgccttcgcgggcgtgcgcgccgcgggcaacttctccgcggacacggggttcgcgggggtgtcggtgacccccgcgcagttcccggcgctgcacaccctcggcgtgtccttcgcgcgcgccgacctgtccgcggcgggcggggtcaacccgccgcactaccacccgcgcgccaccgagacggcgctggtcctggccggccgcgtctacgcgggattcgtcgactcgggcggccgcgtcttcgccaaggtgctcgagaaaggggaggtcatggtgttcccgcgcgccatggtgcacttccagatgaacgtcggcgacgagccggccacggtgtacggcaccttcaacagcgagaaccccggcatcgtgcgcatcccggcgaccgtgttcgggtccgggatcaaggacgccgtcctcgagagggcgttcggcctcgagccggaggagctccgccggctccagaagaggttcgggcctcctcccaagaccaagacggcggagatggacgattgatcggaagatcaggcactcgcgatcaagggggacatgattaattgattagttatattaagagcagcagactttgtgatctctggaatatatctccttccatttgttaatgtctgtatgaattatttggcggtggacggtggttatcatggaccgataatgccggtacgtacagatgggatgggcatgtggggttaggtgtcacattcaattgtctacgagatgtttatgggtttatatatattgtt

SEQ ID NO: 26006 - protein, 234 aa, Zea mays subsp. mays
  misc_feature (1)..(234): Ceres Seq. ID no. 13498101
MATRHLLLLLLAALLPAAATADPDAVQDYCVPDTGGGRGRGRAVDLALLPSYPCRSPANLTAADFAFAGVRAAGNFSADTGFAGVSVTPAQFPALHTLGVSFARADLSAAGGVNPPHYHPRATETALVLAGRVYAGFVDSGGRVFAKVLEKGEVMVFPRAMVHFQMNVGDEPATVYGTFNSENPGIVRIPATVFGSGIKDAVLERAFGLEPEELRRLQKRFGPPPKTKTAEMDD

SEQ ID NO: 26007 - DNA, 849 bp, Zea mays subsp. mays
  misc_feature (1)..(849): Ceres Seq. ID no. 13498110
acgatctctatttcccatttccgggcggctcccgttctccacctcaattattgcccacccatccccgctccctcctctcctctcctcccgtcccacccatctcctcgcaccagcgccgggggaatggcggccgcgctgtggacgctggtggtggcggtggccctgtcggcggcgctggcctcgaaccgccccgtggngcgggcggcgacggcggcggcggaggcggcgaacgaggtgctccgcgcgcaccagctgccggggggcctgctgccggcggggatcacggcgttccggcacgacgccgccacgggagcgttcgaggcccggctggacgcgccctgcacggcgcgcttcgaggtcggcctccgctacaacgccaccgtctccggggtcatcagccccggccagatcgcccgacatctccggcgtcgccgcgcaggacctcttcatgtggttccccgtccacgacatcaaggtcgacatcccctcctccggcgtcatctacttcaacgtcggcgtcgtcaagaagcacctcccgctcgccgtcttcgacgcgccgccggcttgcacgcccgacccgctcctgcagcggctggaggacgtgggcgagggcggattggccgtggtgggcgccgcggcgtcccggcgatgatgggtggaggagacggaggagggttcgacggcgccggcgagccaggatcacgagcgcagttttgagaggagaacgggcgatcgccggccttcttcgatgcacatagatagcgtgggcatttccatctgttttctttttctgcttcctactagtggctacactagtaaccaacctcgtctatcattgttcgtttcgcc

SEQ ID NO: 26008 - protein, 251 aa, Zea mays subsp. mays
  misc_feature (1)..(251): Ceres Seq. ID no. 13498111
  misc_feature (65)..(65): Xaa is any aa, unknown or other
DLYFPFPGGSRSPPQLLPTHPRSLLSSPPVPPISSHQRRGNGGRAVDAGGGGGPVGGAGLEPPRXAGGDGGGGGGERGAPRAPAAGGPAAGGDHGVPARRRHGSVRGPAGRALHGALRGRPPLQRHRLRGHQPRPDRPTSPASPRRTSSCGSPSTTSRSTSPPPASSTSTSASSRSTSRSPSSTRRRLARPTRSCSGWRTWARADWPWWAPRRPGDDGWRRRRRVRRRRRARITSAVLRGERAIAGLLRCT

SEQ ID NO: 26009 - protein, 238 aa, Zea mays subsp. mays
  misc_feature (1)..(238): Ceres Seq. ID no. 13498112
  misc_feature (66)..(66): Xaa is any aa, unknown or other
TISISHFRAAPVLHLNYCPPIPAPSSPLLPSHPSPRTSAGGMAAALWTLVVAVALSAALASNRPVXRAATAAAEAANEVLRAHQLPGGLLPAGITAFRHDAATGAFEARLDAPCTARFEVGLRYNATVSGVISPGQIARHLRRRRAGPLHVVPRPRHQGRHPLLRRHLLQRRRRQEAPPARRLRRAAGLHARPAPAAAGGRGRGRIGRGGRRGVPAMMGGGDGGGFDGAGEPGSRAQF

SEQ ID NO: 26010 - protein, 216 aa, Zea mays subsp. mays
  misc_feature (1)..(216): Ceres Seq. ID no. 13498113
  misc_feature (66)..(66): Xaa is any aa, unknown or other
RSLFPISGRLPFSTSIIAHPSPLPPLLSSRPTHLLAPAPGEWRPRCGRWWWRWPCRRRWPRTAPWXGRRRRRRRRRTRCSARTSCRGACCRRGSRRSGTTPPRERSRPGWTRPARRASRSASATTPPSPGSSAPARSPDISGVAAQDLFMWFPVHDIKVDIPSSGVIYFNVGVVKKHLPLAVFDAPPACTPDPLLQRLEDVGEGGLAVVGAAASRR

SEQ ID NO: 26011 - protein, 197 aa, Zea mays subsp. mays
  misc_feature (1)..(197): Ceres Seq. ID no. 13498114
  misc_feature (25)..(25): Xaa is any aa, unknown or other
MAAALWTLVVAVALSAALASNRPVXRAATAAAEAANEVLRAHQLPGGLLPAGITAFRHDAATGAFEARLDAPCTARFEVGLRYNATVSGVISPGQIARHLRRRRAGPLHVVPRPRHQGRHPLLRRHLLQRRRRQEAPPARRLRRAAGLHARPAPAAAGGRGRGRIGRGGRRGVPAMMGGGDGGGFDGAGEPGSRAQF

SEQ ID NO: 26012 - DNA, 754 bp, Zea mays subsp. mays
  misc_feature (1)..(754): Ceres Seq. ID no. 13498134
agcgccaacggccaacctcacgcagtcccgccgcatcgaatggcatccctccggcttgtggcaacgctagcgccctccggtcctccgccgccacctcgacgtaagcagcggagaccgtcctccgcagtccgtctgacaggtgggatgggcctggcggcagctgctgccgtggcggcggccgcggccgcctcaccaccggcgctcgccgcgctgtccgagccggcgaacgcgctctcgctgcccacctgggccgtccacgtctccagcgtcgccgagtgggtgacggcgatgtggctggtttgggactacggcgagaagacggggctcaagggttggaaaggcctctcgtgggggatggttccacttctaggtggagcaatgtgtgcttgcacgtggcatttcttctacaattcagagtctcttgaagttcttgtagcccttcaaggtgctctgacagtgattggtaacataacaatgtgcatagctgcataccgcatcttcaaagcatcccaggaaggctcaaaaacttcgtaggctgcaagattggatcttacagccggtttggcaaggtgatgagatatggagcttgcgtttctctgacatggatgagaatggagaactatttgattgttgtttttttttttggcccattagataaaagtttattggaaaggacaacctttcacagcaatatgcatcctctgctgtagtattatttctcaggggccaagataaaagacaatgtctggaactc

SEQ ID NO: 26013 - protein, 177 aa, Zea mays subsp. mays; identical to SEQ ID NO: 14804
  misc_feature (1)..(177): Ceres Seq. ID no. 13498135

SEQ ID NO: 26014 - protein, 164 aa, Zea mays subsp. mays; identical to SEQ ID NO: 14805
  misc_feature (1)..(164): Ceres Seq. ID no. 13498136

SEQ ID NO: 26015 - protein, 129 aa, Zea mays subsp. mays; identical to SEQ ID NO: 14806
  misc_feature (1)..(129): Ceres Seq. ID no. 13498137

SEQ ID NO: 26016 - DNA, 1170 bp, Zea mays subsp. mays
  misc_feature (1)..(1170): Ceres Seq. ID no. 13498164
acacctgaggctgcggcctttgtgccatccaggggtcgtcgtcgtcactctctccctctcgccctcgccatcgccctcgcggtctcgccgcggcataaacaaaacaagcaaagcaaggcaaaggcaaaggcaaaaccccacctcctcgctccgcacctcgtcgtctgcttttcctcggtgcggaacacaagcccctgccgcctccattaccgggctgtgcctgtgcgaggctgcgagcgtggtggctgtgtctggctttgcggcggcggcggtgatggtggtggagatggacggaggcgtgggagtagcagcaggaggaggaggaggagcgcagacgccggcgccggcgccgccgcggcggtggcgcttggcggacgagcggtgcgacctgcgcgccatggagacggactacgtgcggcggttccaccggcacgagccccgcgaccaccagtgctcctccgccgtcgccaagcacatcaaggcgcctgtccaccttgtctggtccctggtgaggcggttcgaccagccacagctcttcaagcccttcgtgagccggtgtgagatgaaggggaacatcgagatcggtagcgtcagggaggtcaacgtcaagtccgggctgccggccacaagaagcacggagaggctcgagctgttagacgacgacgagcgcattctcagcgtcaggttcgttggaggcgatcacaggctgcagaactactcctccatcctcaccgtccacccggaggtcatcgacggccggccagggacgctcgtcatcgagtccttcgtcgtcgacgtccccgacggcaacaccaaggacgagacctgctacttcgtggaggcgctgctcaagtgcaacctccggtcactcgcggaggtgtccgagggccaggtcatcatggaccagacggagccccttgaccggtgaataatgagtcggaccattatattgcattgcattctgtgtacgcgtagacctgttctccaatgcatggagcccctaggttcttgggaaactgctatgccgcgttcaaagtcaagttctttttcccccctccttgcgattgtgttttgctgttcttctctggcgttgtatgtcgcagagggagaagtgcagagtatgatgtgcttgatgaaaattgaaagaaaaaaaaagaatttagaactgcg

SEQ ID NO: 26017 - protein, 308 aa, Zea mays subsp. mays
  misc_feature (1)..(308): Ceres Seq. ID no. 13498165
HLRLRPLCHPGVVVVTLSLSPSPSPSRSRRGINKTSKARQRQRQNPTSSLRTSSSAFPRCGTQAPAASITGLCLCEAASVVAVSGFAAAAVMVVEMDGGVGVAAGGGGGAQTPAPAPPRRWRLADERCDLRAMETDYVRRFHRHEPRDHQCSSAVAKHIKAPVHLVWSLVRRFDQPQLFKPFVSRCEMKGNIEIGSVREVNVKSGLPATRSTERLELLDDDERILSVRFVGGDHRLQNYSSILTVHPEVIDGRPGTLVIESFVVDVPDGNTKDETCYFVEALLKCNLRSLAEVSEGQVIMDQTEPLDR

SEQ ID NO: 26018 - protein, 217 aa, Zea mays subsp. mays
  misc_feature (1)..(217): Ceres Seq. ID no. 13498166
MVVEMDGGVGVAAGGGGGAQTPAPAPPRRWRLADERCDLRAMETDYVRRFHRHEPRDHQCSSAVAKHIKAPVHLVWSLVRRFDQPQLFKPFVSRCEMKGNIEIGSVREVNVKSGLPATRSTERLELLDDDERILSVRFVGGDHRLQNYSSILTVHPEVIDGRPGTLVIESFVVDVPDGNTKDETCYFVEALLKCNLRSLAEVSEGQVIMDQTEPLDR

SEQ ID NO: 26019 - protein, 213 aa, Zea mays subsp. mays
  misc_feature (1)..(213): Ceres Seq. ID no. 13498167
MDGGVGVAAGGGGGAQTPAPAPPRRWRLADERCDLRAMETDYVRRFHRHEPRDHQCSSAVAKHIKAPVHLVWSLVRRFDQPQLFKPFVSRCEMKGNIEIGSVREVNVKSGLPATRSTERLELLDDDERILSVRFVGGDHRLQNYSSILTVHPEVIDGRPGTLVIESFVVDVPDGNTKDETCYFVEALLKCNLRSLAEVSEGQVIMDQTEPLDR

SEQ ID NO: 26020 - DNA, 1233 bp, Zea mays subsp. mays
  misc_feature (1)..(1233): Ceres Seq. ID no. 13498172
gattcgattcaaaatccacgtatccaaatcgcaaggccacacccacacctccctcctcccctccacccagagcgagcccgcccgcccgcatcggatcacatcgcgccggagcctgacgccgtgccgtcaacgaatccatgggacccacgccgccgcacacggacgacactagggttgcgcagctcccgctccccggcggcgccgaagattacgtgcgcgactccatccacgcctccctgggcctccccgtctccgatcgctccctccgcctcaagctcctcgcctccgaggagcagcgccaccgcctccaggaccacgtcttctcgctcgaggaagacctccgcgcagcccagcgccgcatcgacctcctcaaggccgaggccgccatgaacgccgccggcctccgccgctgcgtcgaggaaaaggaggccgtggccgccgcatacgccgacctctccgacaagagcagcaaggagtgtcggctctacgagcgggacctcgagcgcgccatggagtcctgtgacgacctcgccagggagaacgacgacctccgcgcacgcctaaaccagaacacagatttggcagcattgatggtgcaagtgcaagaactacataaggaaaaggagattctgaagatgaatcttgatacggcggaggcagaggtcgtgacactgagtgaggacaacagggctcttgatgaagagatcaaaaggctgctgagtttgttggagaaggagcgacagcgccggtctgaaagaaagaaatctgccagtacatccaccaagaacaagcgcaagtcgtctagcttgagggatggcaacacagctggcagggctcttgatttcggctgtgcagattcttcaaggcatccattgtccccattgccccacaactccccagactacagggcgcacaagaagtgaaggcaagaaccaacaaaccaaccattcagagcatttccagattaccttgtgcgcaacgcgagtgttgcatcatgccgctaatgatctgattcaaatatggtccctgctaattttctttctttcctgtttcggttgctgcgatgtttttagaccaggagcaaatttatcagcaaatgtatgcttgcttcgcttgcattctattacattggtagaggttgctgttgtttttgtgatggttcttaaagaaatgagaaggcacatggtttgtttatggcttgatgtatcatgtatgatatgaaagcagcttctc

SEQ ID NO: 26021 - protein, 261 aa, Zea mays subsp. mays
  misc_feature (1)..(261): Ceres Seq. ID no. 13498173
MGPTPPHTDDTRVAQLPLPGGAEDYVRDSIHASLGLPVSDRSLRLKLLASEEQRHRLQDHVFSLEEDLRAAQRRIDLLKAEAAMNAAGLRRCVEEKEAVAAAYADLSDKSSKECRLYERDLERAMESCDDLARENDDLRARLNQNTDLAALMVQVQELHKEKEILKMNLDTAEAEVVTLSEDNRALDEEIKRLLSLLEKERQRRSERKKSASTSTKNKRKSSSLRDGNTAGRALDFGCADSSRHPLSPLPHNSPDYRAHKK

SEQ ID NO: 26022 - protein, 178 aa, Zea mays subsp. mays
  misc_feature (1)..(178): Ceres Seq. ID no. 13498174
MNAAGLRRCVEEKEAVAAAYADLSDKSSKECRLYERDLERAMESCDDLARENDDLRARLNQNTDLAALMVQVQELHKEKEILKMNLDTAEAEVVTLSEDNRALDEEIKRLLSLLEKERQRRSERKKSASTSTKNKRKSSSLRDGNTAGRALDFGCADSSRHPLSPLPHNSPDYRAHKK

SEQ ID NO: 26023 - protein, 137 aa, Zea mays subsp. mays
  misc_feature (1)..(137): Ceres Seq. ID no. 13498175
MESCDDLARENDDLRARLNQNTDLAALMVQVQELHKEKEILKMNLDTAEAEVVTLSEDNRALDEEIKRLLSLLEKERQRRSERKKSASTSTKNKRKSSSLRDGNTAGRALDFGCADSSRHPLSPLPHNSPDYRAHKK

SEQ ID NO: 26024 - DNA, 1787 bp, Zea mays subsp. mays
  misc_feature (1)..(1787): Ceres Seq. ID no. 13498188
cctcccctcccctccctgctcctctaccccttcctctcccggcgaccagctggcctctcctttgttgaggcgagagacccccacccgatccggcgatggacgccgcgtccaggccgcctccgccccacggagcaggggtccgcgtccgcgccccgctggtggagtctgtctcctgctactgcagattagatacaggccttaaaactgttgttgaggccaggaagtttgttcctggcgcgaaaatgtgcatgcaacctgaagtcaaacaaaacaagcgcaagtcaaggggctcaaaaaaggaaaggtgcaggactcaagcaccacttttacctggccttcctgatgatcttgctattgcctgccttatacgagttcctcgacttgaacagcccaaactcaggatggtttgcaaaagatggaaccgtcttttgtctgggaattacttttactccttgcgtaagaaaattggagtggcagaagaatgggtgtatgtctttaaaagggaccgtgaagggaagatatcctggtatgcctttgatccactccaccagctatggaagtcactcccaccagttccacaagagtattcagaagcattgggctttgggtgtgccgttctgagtggttgctatctgtacttgtttggcgggaaagatcctttgaggggttctatgaggcgtgttgtattctacaatgctcgtacaaacaaatggcaccgggctccggatatgatgaggaaacgtcacttttttggttcttgtgtaataaacaattgtctctatgttgctggaggagagtgtgaaggaatacagagaacactgcagtctgcggaagtttatgatccaaataggaacagatgggcctgtgttactgaaatgaacaatgggatggtgcctttcattggagttgtatatgatggcaagtggttcttaaaggggctagattcccatcgccaagtaactagtgaggtctacttaccatcatccaatacatggtcagcaattgatgatgagatggtcacaggctggcggaacccaagtatttctttcaatggccgtctctattcagctgactgccgggatggctgcaagcttagagtctatgatgagaacacaggaacatggacaaggttcatggacagcaagcaccacttgggcagctcacgtgcctttgaagctgcagctttggtgtcactaaatgggaaactctgtgtcatcaggaacaacatgagcataactcttgttgatgtctccaacccaacaatgagtgttgagacagatagtgcgcgcatgtgggaaactgttgttcggaagggccagcacaggtcgtttgtggcgaacttatggtcgagcattgcaggacggaacttaaagagtcacattatccattgccatgtgctgcaagtttgagggcaggttttgttagtgggaacatgatcaagttttttaagaagcaaaaggttcagatcagtgacagaaccctccatttcgaaggtagtaaggtttcattgcagaatcgcggggaaaaaggtcattggcgtgccactgctgcccccaaagtcccaaatagttatttgctctcttccagaactgaaaattccaattactttctggcaacatttgaagactcttatcattaatggataaggtttttcagattttgagtgcaaaccagaaagtgagtaggaacttccctagtgtaatgacattttccccttgctggcaggctgggaaatgtgtttggtggatatattggtctcttatcatatttatctatctttgcattgt

SEQ ID NO: 26025 - protein, 437 aa, Zea mays subsp. mays
  misc_feature (1)..(437): Ceres Seq. ID no. 13498189
MDAASRPPPPHGAGVRVRAPLVESVSCYCRLDTGLKTVVEARKFVPGAKMCMQPEVKQNKRKSRGSKKERCRTQAPLLPGLPDDLAIACLIRVPRLEQPKLRMVCKRWNRLLSGNYFYSLRKKIGVAEEWVYVFKRDREGKISWYAFDPLHQLWKSLPPVPQEYSEALGFGCAVLSGCYLYLFGGKDPLRGSMRRVVFYNARTNKWHRAPDMMRKRHFFGSCVINNCLYVAGGECEGIQRTLQSAEVYDPNRNRWACVTEMNNGMVPFIGVVYDGKWFLKGLDSHRQVTSEVYLPSSNTWSAIDDEMVTGWRNPSISFNGRLYSADCRDGCKLRVYDENTGTWTRFMDSKHHLGSSRAFEAAALVSLNGKLCVIRNNMSITLVDVSNPTMSVETDSARMWETVVRKGQHRSFVANLWSSIAGRNLKSHIIHCHVLQV

SEQ ID NO: 26026 - protein, 388 aa, Zea mays subsp. mays
  misc_feature (1)..(388): Ceres Seq. ID no. 13498190
MCMQPEVKQNKRKSRGSKKERCRTQAPLLPGLPDDLAIACLIRVPRLEQPKLRMVCKRWNRLLSGNYFYSLRKKIGVAEEWVYVFKRDREGKISWYAFDPLHQLWKSLPPVPQEYSEALGFGCAVLSGCYLYLFGGKDPLRGSMRRVVFYNARTNKWHRAPDMMRKRHFFGSCVINNCLYVAGGECEGIQRTLQSAEVYDPNRNRWACVTEMNNGMVPFIGVVYDGKWFLKGLDSHRQVTSEVYLPSSNTWSAIDDEMVTGWRNPSISFNGRLYSADCRDGCKLRVYDENTGTWTRFMDSKHHLGSSRAFEAAALVSLNGKLCVIRNNMSITLVDVSNPTMSVETDSARMWETVVRKGQHRSFVANLWSSIAGRNLKSHIIHCHVLQV

SEQ ID NO: 26027 - protein, 386 aa, Zea mays subsp. mays
  misc_feature (1)..(386): Ceres Seq. ID no. 13498191
MQPEVKQNKRKSRGSKKERCRTQAPLLPGLPDDLAIACLIRVPRLEQPKLRMVCKRWNRLLSGNYFYSLRKKIGVAEEWVYVFKRDREGKISWYAFDPLHQLWKSLPPVPQEYSEALGFGCAVLSGCYLYLFGGKDPLRGSMRRVVFYNARTNKWHRAPDMMRKRHFFGSCVINNCLYVAGGECEGIQRTLQSAEVYDPNRNRWACVTEMNNGMVPFIGVVYDGKWFLKGLDSHRQVTSEVYLPSSNTWSAIDDEMVTGWRNPSISFNGRLYSADCRDGCKLRVYDENTGTWTRFMDSKHHLGSSRAFEAAALVSLNGKLCVIRNNMSITLVDVSNPTMSVETDSARMWETVVRKGQHRSFVANLWSSIAGRNLKSHIIHCHVLQV

SEQ ID NO: 26028 - DNA, 1024 bp, Zea mays subsp. mays
  misc_feature (1)..(1024): Ceres Seq. ID no. 13498207
atcagtagctagctgttcgaagctttcagccgagcaccatcgtcacagtcagtagtagctaagcatatttctttctccgagtgatttgcgctgagcgatcagttcatccagagcgagcggantgaagctgagctgagcgagcttgcgtcgttgcttgagagaccctgccatggcttcccaccaggacaaggctagctaccaggccggcgaaaccaaggcccgcaccgaggagaagaccgggcaggcggtgggggcgaccaaggacacggcgcaacgccaaggaccgggcggcggacgcggcggggcacgcggcgggcaagggccaggacgccaaggaggccaccaagcagaaggcgtccgacaccggcagctacctgggcaagaagaccgacgaggccaagcacaaggccggcgagacnacggaggcgaccaancagaaggccggcgagacgacggaggcgaccaagcagaaggccggcgagacgacggaggccgccaggcagaaggcagccgacgccatggaggcagccaagcagaaggccgccgaggccgggcagtacgccaaggacaccgccgtctccggcaaggacaagtccggtggcgtcatccagcaggccactgagcaggtgaagagcgcggcggcgggcgccaaggacgcggtgatgagcacgctggggatgggcggggacgacaagcagggcgacgccaacaccaacaccaacactaacaccaacaccaacaccaacaaggacacctntaccatcaccagggatcactagacgcatgtatgcacacgcacttggtccgatcctgtcgtccgtgaccctgtttgcttgtttcgcgagtccagtatgggttttgtgcatgttcccagtgtcatggtttccttttctacgaatttggtgttgtaattttgatttgcaggtacgttgctgtgttttttctgcgtcatcaagtgtctgtaaacgagtcgggcgggtttgagtgtcctttgttgtgataataaagttggtaaatcgtaatt

SEQ ID NO: 26029 - protein, 150 aa, Zea mays subsp. mays
  misc_feature (1)..(150): Ceres Seq. ID no. 13498208
  misc_feature (84)..(84): Xaa is any aa, unknown or other
  misc_feature (89)..(89): Xaa is any aa, unknown or other
MASHQDKASYQAGETKARTEEKTGQAVGATKDTAQRQGPGGGRGGARGGQGPGRQGGHQAEGVRHRQLPGQEDRRGQAQGRRDXGGDQXEGRRDDGGDQAEGRRDDGGRQAEGSRRHGGSQAEGRRGRAVRQGHRRLRQGQVRWRHPAGH

SEQ ID NO: 26030 - protein, 86 aa, Zea mays subsp. mays
  misc_feature (1)..(86): Ceres Seq. ID no. 13498209
  misc_feature (80)..(80): Xaa is any aa, unknown or other
MEAAKQKAAEAGQYAKDTAVSGKDKSGGVIQQATEQVKSAAAGAKDAVMSTLGMGGDDKQGDANTNTNTNTNTNTNKDTXTITRDH

SEQ ID NO: 26031 - DNA, 832 bp, Zea mays subsp. mays
  misc_feature (1)..(832): Ceres Seq. ID no. 13498248
aatcaatccggcgagtggccgagtggggtaggttgtgtgcggcatgacgaccacgcgcgaccgtggcgccggcggcggatcggcgtcgagggtcggtgacggggacgtcgacctgggcgagggctgggactggggcgccatcccgcggctcctctcctccgcctgcctcttcctctgctccggaggctgttttggttgctgcgataagactgtaaagcaactgggtgaactgtccagaaacttgatcacccaggaccaaattaccattggagagccattttggagcacaaccaccatcgaggttgaaccagcagatctcagtggtgttacttcagtcaatacatctaacttggcctctggaactggtagcagtcataaccttcctggacttggtaataatggacttgttctgtgggaacatacaaggcaggagtggactgaaactagaagtctgcggctgaaggtgaagcaggttcgtgaaccagtattgagttggaatgcagcatatgagagtctgcttggatcaaataagccatttcctcaacccattcctcttcatgagatggtcgatttccttgtggacatctgggagcaggaggggctgtatgactagcgcaaatgatttcatgggataacatctgggataacacatagttgttcctcaagagaggggaaaaagaatgacatagagggtgtaggcttgggatgtggtgatgagttggcctgtcatacttgtttttgtcaatggaggcctgctgtacttgcagaatacagagctgtggttgtaagcttgtaagaagtcctgatactaatagtggctttgtttaatttg

SEQ ID NO: 26032 - protein, 189 aa, Zea mays subsp. mays
  misc_feature (1)..(189): Ceres Seq. ID no. 13498249
MTTTRDRGAGGGSASRVGDGDVDLGEGWDWGAIPRLLSSACLFLCSGGCFGCCDKTVKQLGELSRNLITQDQITIGEPFWSTTTIEVEPADLSGVTSVNTSNLASGTGSSHNLPGLGNNGLVLWEHTRQEWTETRSLRLKVKQVREPVLSWNAAYESLLGSNKPFPQPIPLHEMVDFLVDIWEQEGLYD

SEQ ID NO: 26033 - DNA, 943 bp, Zea mays subsp. mays
  misc_feature (1)..(943): Ceres Seq. ID no. 13498278
gtgactgtgatctatactataaggtgaacaagatctctttgtctactgtagttgcagcaccagcagcagcagcagaagagcagcgcctgagctccagcaataatggccgagaagggcgtgaaggtgttggggatgtgggcgagccccatggtgatcagggtggagtgggcgctgcggctgaagggcgtcgagtacgagtacgtcgacgaggacctcgccaacaagagcgccgacctgctccgccacaacccggtgaccaagaaggtgcccgtgctcgtccacgacggcaagccggtcgcggagtccaccatcatcgtggagtacatcgacgaggtctggaagggcggctaccccatcatgccgggcgacccctacgagcgcgcccaggcgaggttctgggccaggttcgcggaagacaagtgcaacgctgctctgtacccgatcttcaccgcgaccggcgaggcgcagcgcaaggcggtgcacgaggcccagcagtgcctcaagaccctggagacggccttggaggggaagaagttcttcggcggcgacgccgtgggctacctcgacatcgtcgtcgggtggttcgcgcactggctccccgtcatcgaggaggtgaccggcgccagcgtcgtcacccacgaggagctgccgctgatgaaggcctggttcggtcggttcctcgcccttgacgtggtgaaggcggccctgcccgacagggacaggctcctcgccgccaacaaggcccgccgtgagcagctcctctccgcgtagatatggctagtaattctggagcagctagtttcaccgccgacgctcatatattgctgaataaggactggttgcacttttgcacgttgtgcagtgcagcccgaggtttggatgacctctgcccctctgttccatttcagaatggtagtcccataataatgcatatacatcatgc

SEQ ID NO: 26034 - protein, 228 aa, Zea mays subsp. mays
  misc_feature (1)..(228): Ceres Seq. ID no. 13498279
DCDLYYKVNKISLSTVVAAPAAAAEEQRLSSSNNGREGREGVGDVGEPHGDQGGVGAAAEGRRVRVRRRGPRQQERRPAPPQPGDQEGARARPRRQAGRGVHHHRGVHRRGLEGRLPHHAGRPLRARPGEVLGQVRGRQVQRCSVPDLHRDRRGAAQGGARGPAVPQDPGDGLGGEEVLRRRRRGLPRHRRRVVRALAPRHRGGDRRQRRHPRGAAADEGLVRSVPRP

SEQ ID NO: 26035 - protein, 222 aa, Zea mays subsp. mays
  misc_feature (1)..(222): Ceres Seq. ID no. 13498280
MAEKGVKVLGMWASPMVIRVEWALRLKGVEYEYVDEDLANKSADLLRHNPVTKKVPVLVHDGKPVAESTIIVEYIDEVWKGGYPIMPGDPYERAQARFWARFAEDKCNAALYPIFTATGEAQRKAVHEAQQCLKTLETALEGKKFFGGDAVGYLDIVVGWFAHWLPVIEEVTGASVVTHEELPLMKAWFGRFLALDVVKAALPDRDRLLAANKARREQLLSA

SEQ ID NO: 26036 - protein, 212 aa, Zea mays subsp. mays
  misc_feature (1)..(212): Ceres Seq. ID no. 13498281
MWASPMVIRVEWALRLKGVEYEYVDEDLANKSADLLRHNPVTKKVPVLVHDGKPVAESTIIVEYIDEVWKGGYPIMPGDPYERAQARFWARFAEDKCNAALYPIFTATGEAQRKAVHEAQQCLKTLETALEGKKFFGGDAVGYLDIVVGWFAHWLPVIEEVTGASVVTHEELPLMKAWFGRFLALDVVKAALPDRDRLLAANKARREQLLSA

SEQ ID NO: 26037 - DNA, 576 bp, Zea mays subsp. mays
  misc_feature (1)..(576): Ceres Seq. ID no. 13498290
ttgtagaactgtgggcgaagcaaggcaggctcattaggatgcacgagcaagcatcagcgatcgtcaggtatgagctaagtcgaatatcagctggtgtgttcattgcacttggtaaaggaaaagtgcagtgtcgtggtgacgtacgaagcctcctctttcatggatggttcagcacaatgttgttggattttggctggcttcagcgctgccccaaaggtctcgacctaagatcgttggaggagaatttagggcgaggccttttaaccctccctctcaggcagcagcaatgtttgttcgaggaatggttccagttctatgcgaccaaaggacccgagtgtccgaaccttattagagctttccaggtatggtggagaaggtctttcattagatcattggtagaacctcaaaactaagtttttccttgatgtactagtatgttgcgtgtatgatttgtaaaattgcaactgttctgatgacccttaaaaatgttttttcgtttgtagtttagttcttcccattgtatgtgaatagctggatgaatttgcttgaggataacatctgcggcgtggagtatgt

SEQ ID NO: 26038 - protein, 136 aa, Zea mays subsp. mays
  misc_feature (1)..(136): Ceres Seq. ID no. 13498291
VELWAKQGRLIRMHEQASAIVRYELSRISAGVFIALGKGKVQCRGDVRSLLFHGWFSTMLLDFGWLQRCPKGLDLRSLEENLGRGLLTLPLRQQQCLFEEWFQFYATKGPECPNLIRAFQVWWRRSFIRSLVEPQN

SEQ ID NO: 26039 - protein, 124 aa, Zea mays subsp. mays
  misc_feature (1)..(124): Ceres Seq. ID no. 13498292
MHEQASAIVRYELSRISAGVFIALGKGKVQCRGDVRSLLFHGWFSTMLLDFGWLQRCPKGLDLRSLEENLGRGLLTLPLRQQQCLFEEWFQFYATKGPECPNLIRAFQVWWRRSFIRSLVEPQN

SEQ ID NO: 26040 - protein, 78 aa, Zea mays subsp. mays
  misc_feature (1)..(78): Ceres Seq. ID no. 13498293
MLLDFGWLQRCPKGLDLRSLEENLGRGLLTLPLRQQQCLFEEWFQFYATKGPECPNLIRAFQVWWRRSFIRSLVEPQN

SEQ ID NO: 26041 - DNA, 799 bp, Zea mays subsp. mays
  misc_feature (1)..(799): Ceres Seq. ID no. 13498294
acgcagggcgtagcaaatcaggtaggcgaaatcggagcagaggccagggacgcgccagcgcgagcgataaggcacactgacatggccgccacggcgtactccaccgcgctccccggcggggcgcgcctccccgctgccggagccgccgcaccgccctctgccctcctcctcccgcggcgtaataaactgtctccgctccctctccggctccaagatgcgccgaggctgtcgttgctccgggtgaaggcctcctccgacgactcctcggccgcgagcggggacgagctcatcgccgacttgaaagccaagtgggacgccgtcgagaacaagagcactgtcctcacctacgccggcggcgctgtcgtcgctctctggctgacgtccgtcatcgtcggcgccatcaactccgtgcctctgctccccaagatcatggagcttgtcggcctcggctacaccggatggttcgtctaccgctaccttctcttcaaggaaagcaggaaagagctcgccgacgacatcgagtcgctcaagaaaaaaattgctgggacagagtaaaacatgttgttctcgtgaaactttttttggacgattctttcgggaacacgttgcctcttgtctagactccagatcagtgctacatgtctttgcactttttttttttgttgcataccttatgtcctcgtctctctggagagctttgtacgacgatggagaacaacagtgtacgatcgaactggacgccatcctcggggattgttttcttaaaatgaaatagggtatgtatccgggttttcttttc

SEQ ID NO: 26042 - protein, 184 aa, Zea mays subsp. mays
  misc_feature (1)..(184): Ceres Seq. ID no. 13498295
TQGVANQVGEIGAEARDAPARAIRHTDMAATAYSTALPGGARLPAAGAAAPPSALLLPRRNKLSPLPLRLQDAPRLSLLRVKASSDDSSAASGDELIADLKAKWDAVENKSTVLTYAGGAVVALWLTSVIVGAINSVPLLPKIMELVGLGYTGWFVYRYLLFKESRKELADDIESLKKKIAGTE

SEQ ID NO: 26043 - protein, 157 aa, Zea mays subsp. mays
  misc_feature (1)..(157): Ceres Seq. ID no. 13498296
MAATAYSTALPGGARLPAAGAAAPPSALLLPRRNKLSPLPLRLQDAPRLSLLRVKASSDDSSAASGDELIADLKAKWDAVENKSTVLTYAGGAVVALWLTSVIVGAINSVPLLPKIMELVGLGYTGWFVYRYLLFKESRKELADDIESLKKKIAGTE

SEQ ID NO: 26044 - DNA, 1689 bp, Zea mays subsp. mays
  misc_feature (1)..(1689): Ceres Seq. ID no. 13498301
acagttgttgaaccttgagactactagctagagagacaaatatccaggccgaangagaagaggtctgagcgaggagacgacgcccgcgccatggcaggcgccagcnccaccaacggcggaggcaacggcggaggcgggaaggtggtcagcatgccgctgcagtacttctgcgtgctggcggcggtggtggtggccgtgatggtgctgtcgctgtcgttcatgtcgccggcggccatggtggccgtccgccagaacctcagctccgtggcggccgcccccggtggcagcagcaacagcaccggcggcggcgccggagcgggaggcgccgccggcctggccgaggcgtcaccgccggcgggctggaaggagaaggagcaggcgcggcggccgcccgtggtgctgttcaacttcggcgactccaactccgacaccggaggcgtggcggcggccggcgggatacggatcatgccgccggagggccgcacctacttccaccaccccacgggccggctctccgacggccgcgtcatcatcgactttatctgtgagagtctgggcacgcgtgaactgaacccatacctcaggggaattggttcggactacagcaacggcgtcaacttcgccatggcaggctcgacggtgacccacggcgtctctccctactccttgaacgtccaggtcgaccagttcggtctacttcaggcacaggtccccttgagatgttcgaacgaggactggaaggcccggtgagcaaggaggggtttgagagcgctctgtacatgatggacatcggccacaacgacatggttggtgtggcgcacacaccgtccgatcagtgggacaagaagatcacagagatcgtcggcgaggtcagacaagccatctcgatcctgtacgacaacggagcgaggaagttctggatccacggcacgggcgccctggggtgcctgccggcgctggtggtgcaggagacgaagggcgagcaggacaagcacggctgcctcgccggcgtcaacagggccgccaaggcgttcaacaggaagctcagccagctctgcgacgacctccgcttccacctcaagggcgccaccgtcgtctacaccgacatgttcgccatcaagtacgacttcgtcgccaaccacaccaaatacgggatcgagtggccgttcatggtgtgctgtggcaacggcgggccgccgtacaacatgaagcagggaagacccggctgtggcgacctgtgcccaccggaggcgaaggtggtcagctgggatggcgtgcacttcacggatttcggcagcggccttgctgccaagcttgcgatgagcggggagtactccaagcccagggtgaagctggcaagcttgatccatggcggatccaagaaaacgtcagactcttgatgcggaccattgaccgagtcgtgacctttggatccacatctatggaatggaagatgggtagcggtgaagaattggagggatatcttgcaccaggctgtttcttgacgaagattgactccttgtacacactacacagaactactacagaaggcaaagtagcactgggaatgctcagttacaagcttaagttaatttgctgtctttttattttgggattttgtgctgcagagtacagagattttgtaccttgatgtacgtgtaactatttatgatagttcttacaagctcc

SEQ ID NO: 26045 - protein, 226 aa, Zea mays subsp. mays
  misc_feature (1)..(226): Ceres Seq. ID no. 13498302
MFERGLEGPVSKEGFESALYMMDIGHNDMVGVAHTPSDQWDKKITEIVGEVRQAISILYDNGARKFWIHGTGALGCLPALVVQETKGEQDKHGCLAGVNRAAKAFNRKLSQLCDDLRFHLKGATVVYTDMFAIKYDFVANHTKYGIEWPFMVCCGNGGPPYNMKQGRPGCGDLCPPEAKVVSWDGVHFTDFGSGLAAKLAMSGEYSKPRVKLASLIHGGSKKTSDS

SEQ ID NO: 26046 - protein, 219 aa, Zea mays subsp. mays
  misc_feature (1)..(219): Ceres Seq. ID no. 13498303
  misc_feature (6)..(6): Xaa is any aa, unknown or other
MAGASXTNGGGNGGGGKVVSMPLQYFCVLAAVVVAVMVLSLSFMSPAAMVAVRQNLSSVAAAPGGSSNSTGGGAGAGGAAGLAEASPPAGWKEKEQARRPPVVLFNFGDSNSDTGGVAAAGGIRIMPPEGRTYFHHPTGRLSDGRVIIDFICESLGTRELNPYLRGIGSDYSNGVNFAMAGSTVTHGVSPYSLNVQVDQFGLLQAQVPLRCSNEDWKAR

SEQ ID NO: 26047 - protein, 206 aa, Zea mays subsp. mays
  misc_feature (1)..(206): Ceres Seq. ID no. 13498304
MMDIGHNDMVGVAHTPSDQWDKKITEIVGEVRQAISILYDNGARKFWIHGTGALGCLPALVVQETKGEQDKHGCLAGVNRAAKAFNRKLSQLCDDLRFHLKGATVVYTDMFAIKYDFVANHTKYGIEWPFMVCCGNGGPPYNMKQGRPGCGDLCPPEAKVVSWDGVHFTDFGSGLAAKLAMSGEYSKPRVKLASLIHGGSKKTSDS

SEQ ID NO: 26048 - DNA, 1531 bp, Zea mays subsp. mays
  misc_feature (1)..(1531): Ceres Seq. ID no. 13498310
ctctcaactctcgtttcgccggagtatttagcttgcttcagggagcacgtggcggtggaagcttccctaggggtggcggaggcggtggtggtgcttggttgatgtcgatnnnncgcaggtctgctgtgactcggccgtagcggcgacggcggcaccggtggttggtgcggaggcggaggccagggccagggcgcgcgccgagaggcggagccgggccggagagtctggggcgtggaagcacgcggtggccgctggcacggccgatgctacgaggaagcggagtctcggggcaggggagctgctggtggcgcggaagcacggggcggcgtcggtggccggccgcaggagggagatggaggatgccgtgtccgtgcgcgacgcgttctgcgcggagggcacggccgacggcgggaggcgcgacttctacggagtgttcgacggccacggctgctcgcacgtggccgaggcgtgccgggaccggatgcacgagctggtcgccgaggagctcgccgccaccgccgccgacagctcagtctccgcggcggcggcctggaccgtggcgatggaacgcagcttcgcgcggatggacgccgaggtgacgtcngccggcgggcgcgccgnnnncnncagaagcagcacctgccgctgcgacgcgcacaggtgcgaccacgtgggctccacggccgtggtggccgtcnnggangagcacagcgtcattgtggccaactgcggcgacagccgcgccgtgctctgccgtggggacggcgcgccgccgctgccgctgtcgtcggaccacaagcccgaccgccccgacgagctggagcgcatcgagtccgccggcgggcgcgtcatcttctgggagggcgcgcgcgttctgggcgtcctcgccatgtcccgcgccgtcggggacggatacctgaagccgtacgtgtcgtccgttcccgaggtgacggtgaccgaccggtccgacggcgacgagtgcctcatcctgggcagcgacgggctctgggacgtggtgagcaacgaggccgcgtgcgaggtggcgcgcgcctgcctccgcaggggccgggccaagtggtgtgccgaggccgccgcgttgctcaccaagctggccctcgcgaggagaagctccgacaacgtctcggtggtcgtcatcgatctccggaggaggaatcactagttctgtgcagttgtcagctagtactagtactccctccgaaggatggctggtcgcacaagggatttcgcgggggtgcctaattgggttttttttcttccattttcattcaaaaagtttttttttttttttgctgtactctccctgaatcaaaaagttcagaggagcccttagattaattattgtggtagagccggaatttggtccggataccattcggagaggtggtcgcgtagaaaaaactcagaggagagacggtctcacaagaaaatcagtctgtgtattgtatcatctagacatctaatgaaatagcaaccgaaacaaacaccacctccggtgtctggatgttctcgc

SEQ ID NO: 26049 - protein, 275 aa, Zea mays subsp. mays
  misc_feature (1)..(275): Ceres Seq. ID no. 13498311
  misc_feature (84)..(84): Xaa is any aa, unknown or other
  misc_feature (90)..(90): Xaa is any aa, unknown or other
  misc_feature (91)..(91): Xaa is any aa, unknown or other
  misc_feature (92)..(92): Xaa is any aa, unknown or other
  misc_feature (116)..(116): Xaa is any aa, unknown or other
  misc_feature (117)..(117): Xaa is any aa, unknown or other
MEDAVSVRDAFCAEGTADGGRRDFYGVFDGHGCSHVAEACRDRMHELVAEELAATAADSSVSAAAAWTVAMERSFARMDAEVTXAGGRAXXXRSSTCRCDAHRCDHVGSTAVVAVXXEHSVIVANCGDSRAVLCRGDGAPPLPLSSDHKPDRPDELERIESAGGRVIFWEGARVLGVLAMSRAVGDGYLKPYVSSVPEVTVTDRSDGDECLILGSDGLWDVVSNEAACEVARACLRRGRAKWCAEAAALLTKLALARRSSDNVSVVVIDLRRRNH

SEQ ID NO: 26050 - protein, 232 aa, Zea mays subsp. mays
  misc_feature (1)..(232): Ceres Seq. ID no. 13498312
  misc_feature (41)..(41): Xaa is any aa, unknown or other
  misc_feature (47)..(47): Xaa is any aa, unknown or other
  misc_feature (48)..(48): Xaa is any aa, unknown or other
  misc_feature (49)..(49): Xaa is any aa, unknown or other
  misc_feature (73)..(73): Xaa is any aa, unknown or other
  misc_feature (74)..(74): Xaa is any aa, unknown or other
MHELVAEELAATAADSSVSAAAAWTVAMERSFARMDAEVTXAGGRAXXXRSSTCRCDAHRCDHVGSTAVVAVXXEHSVIVANCGDSRAVLCRGDGAPPLPLSSDHKPDRPDELERIESAGGRVIFWEGARVLGVLAMSRAVGDGYLKPYVSSVPEVTVTDRSDGDECLILGSDGLWDVVSNEAACEVARACLRRGRAKWCAEAAALLTKLALARRSSDNVSVVVIDLRRRNH

SEQ ID NO: 26051 - protein, 205 aa, Zea mays subsp. mays
  misc_feature (1)..(205): Ceres Seq. ID no. 13498313
  misc_feature (14)..(14): Xaa is any aa, unknown or other
  misc_feature (20)..(20): Xaa is any aa, unknown or other
  misc_feature (21)..(21): Xaa is any aa, unknown or other
  misc_feature (22)..(22): Xaa is any aa, unknown or other
  misc_feature (46)..(46): Xaa is any aa, unknown or other
  misc_feature (47)..(47): Xaa is any aa, unknown or other
MERSFARMDAEVTXAGGRAXXXRSSTCRCDAHRCDHVGSTAVVAVXXEHSVIVANCGDSRAVLCRGDGAPPLPLSSDHKPDRPDELERIESAGGRVIFWEGARVLGVLAMSRAVGDGYLKPYVSSVPEVTVTDRSDGDECLILGSDGLWDVVSNEAACEVARACLRRGRAKWCAEAAALLTKLALARRSSDNVSVVVIDLRRRNH

SEQ ID NO: 26052 - DNA, 1615 bp, Zea mays subsp. mays
  misc_feature (1)..(1615): Ceres Seq. ID no. 13498314
gtcccttagttgtaccatcgtgtccttttcctcctacctcctccttggctggccctcttccccgtcttcctccctcttccttcgtctctccgtttcaagccctaccgacaggcatttgcttctgctccagtgatcagccccctcccctcctggcctcctctccacccggccaaaaactgatctttttttttcggttctggtaccatagctattagtagtcgtagcggctaacttgcaagccgattgtctctagcacgcaagtgtttttccctcccctgagattggtgggtgatcgagagttcgagacagtgtacacatacatactctgctcgtctgctgaggatcgatcgcttggtctcgttgttgcgtagataggtactagaggactatagctactagtaggactaggagaggatccgagggagagagagcaaggccaagatgatgcgcgcgaaccgggagcagagagtggccttctcgtcgacgaaggaggccgccgcggtgcccaaggaggaggtgtgggaggtccggcccggcgggatgctggtgcagaagcggagccccgacgcggacccgccccccggcggcgcgcccgtgcccaccatccgcgtcaaggtcaagttcaacggcgtctaccacgagatctacatcaactcccaggcatccttcggcgagctcaagaagctgctgtcggagaagacgggcctgcacccggacgaccagaaggtggtgtacaaggacaaggagagggactccaaggcgttcctggacatggccggcgtcaaggaccgctccaagatggtcatgctcgaggaccccgccgccaaggccaagcgcctcctcgaggagcgccggaccggcaaggccgagcgcgccgccaaggccatcgcccgcgccgccctcgacgtcgacaagctcgcaaccaaggtgtcggcgctggagacgatcgtgagcaagggcggcaaggtcgtggacncggacgtggtgacgctgaccgaggcgctgatgaacgagctggtgaagctggactccgtcnncgnngaaggggaggtgaaggcggcgcggcgggcgcaggagaagcgggtgcagaagtacgtggagacgctggacgccatccgcgccaagaacaaggcggcggcggcggcggngccggccaaggcccgctagcggcannaacaaggcgcggccgccgcgcccgcccccggcttcggcgcacgcgcatcagagccagcagcagcgccggcagttccagccgccggcgccggtgtcgcagacccagacggcgagctgggagacgttcgacctcctgtcgtcagtgccgtcgacgtcggcggcccccgtgacgaccatggcccccgcgaccagcaccacgccgtccccgcgcttcgactgggagctcttctagatggctcctcaaggcgccagcctgccacacccccctggcctggcccccatctctcgccacttgtgtgcctgtccattggctcggccagtaccttctcctgttcgccttggccatggtgcatgtcaatcgccattgtttctttctttctttccttcccgctctctttattctgtcattcttgctgtcctttgagcgattgaaagtctgtgt

SEQ ID NO: 26053 - protein, 241 aa, Zea mays subsp. mays
  misc_feature (1)..(241): Ceres Seq. ID no. 13498315
  misc_feature (179)..(179): Xaa is any aa, unknown or other
  misc_feature (199)..(199): Xaa is any aa, unknown or other
  misc_feature (200)..(200): Xaa is any aa, unknown or other
  misc_feature (236)..(236): Xaa is any aa, unknown or other
MMRANREQRVAFSSTKEAAAVPKEEVWEVRPGGMLVQKRSPDADPPPGGAPVPTIRVKVKFNGVYHEIYINSQASFGELKKLLSEKTGLHPDDQKVVYKDKERDSKAFLDMAGVKDRSKMVMLEDPAAKAKRLLEERRTGKAERAAKAIARAALDVDKLATKVSALETIVSKGGKVVDXDVVTLTEALMNELVKLDSVXXEGEVKAARRAQEKRVQKYVETLDAIRAKNKAAAAAXPAKAR

SEQ ID NO: 26054 - protein, 240 aa, Zea mays subsp. mays
  misc_feature (1)..(240): Ceres Seq. ID no. 13498316
  misc_feature (178)..(178): Xaa is any aa, unknown or other
  misc_feature (198)..(198): Xaa is any aa, unknown or other
  misc_feature (199)..(199): Xaa is any aa, unknown or other
  misc_feature (235)..(235): Xaa is any aa, unknown or other
MRANREQRVAFSSTKEAAAVPKEEVWEVRPGGMLVQKRSPDADPPPGGAPVPTIRVKVKFNGVYHEIYINSQASFGELKKLLSEKTGLHPDDQKVVYKDKERDSKAFLDMAGVKDRSKMVMLEDPAAKAKRLLEERRTGKAERAAKAIARAALDVDKLATKVSALETIVSKGGKVVDXDVVTLTEALMNELVKLDSVXXEGEVKAARRAQEKRVQKYVETLDAIRAKNKAAAAAXPAKAR

SEQ ID NO: 26055 - protein, 208 aa, Zea mays subsp. mays
  misc_feature (1)..(208): Ceres Seq. ID no. 13498317
  misc_feature (146)..(146): Xaa is any aa, unknown or other
  misc_feature (166)..(166): Xaa is any aa, unknown or other
  misc_feature (167)..(167): Xaa is any aa, unknown or other
  misc_feature (203)..(203): Xaa is any aa, unknown or other
MLVQKRSPDADPPPGGAPVPTIRVKVKFNGVYHEIYINSQASFGELKKLLSEKTGLHPDDQKVVYKDKERDSKAFLDMAGVKDRSKMVMLEDPAAKAKRLLEERRTGKAERAAKAIARAALDVDKLATKVSALETIVSKGGKVVDXDVVTLTEALMNELVKLDSVXXEGEVKAARRAQEKRVQKYVETLDAIRAKNKAAAAAXPAKAR

SEQ ID NO: 26056 - DNA, 1238 bp, Zea mays subsp. mays
  misc_feature (1)..(1238): Ceres Seq. ID no. 13498318
acgacacccaacggcagctgcagcacagcagaggaaggcaggaaggaagaagatatcagaccagtgtgaagccaagccagcgcgtctctctctctctctctctggtcgcttggtcggtccatcggaggatcagctcggcggtggccatggcaatggcgcagcaagcgagcctcccctgctcgactgccaccacatggagagagctcacgaacacgagctggagggacgacgactacaggcggatggtgatggcgtacctgatcgaggcggtgtacctgctggagctggagcggcaggagcgccgggacgcggcggcggtggcgcagcagtggtggaagccgttccacttccgcctggcgcacgagctggtggacgaccgcgacggctccgtgttcggcgccgtcttcgagcgcgaccaccacggcgccaggccggggccggggccgagcccgagcggcgcgcccagcgccgtcatcgcgttccggggcacgctgctgcgcgcgcccaccatccgccgcgacgtcgaggacgagctccgcctgctggcacgcaacagcctgcggggctccgccaggctggcgcgcgccgcgcaggcgctgcgcgccaccatcgaccgcttcggctccgagaacgtctgcgtctgcggccactccctgggcgccggcttcgcgcgccaggtcgtccggacgctcgtggcctcctcctcctcctcctcctcctcgccgcggcaaccgcgccagcaggccgccgccttcgccgccgcgacgctcgagtcccacctcttcaacgcgccctacctgtcgctgcccatgggcgtcaggagcgtggtcaggacggcggactgcctggtcaaggcgctccgctccggcgtcgccaccgtcggcaagtggcacggcaaggcgctccggaacgtggcctacgccagctgcgtcctcggatacaccaggctcgagagcaccaggaagttgtgaggatcgatcggatcgaatgcctccgccacctcgcgtcctcctcgatgctgcctctggcttcaacggttgaaccgtcctgccagtgccagccaaactgtatctatgctcgatcaccttgtagtaggaagtactcggaaattaattcaattctagcaggagacgaataaagcatctgaccggaggatgcaaggccttgcgtgcatatgctttgctttgcttttgtacaatctttttaaatgtgaattacagtagcnctaagttgatctc

SEQ ID NO: 26057 - protein, 378 aa, Zea mays subsp. mays
  misc_feature (1)..(378): Ceres Seq. ID no. 13498319
RHPTAAAAQQRKAGRKKISDQCEAKPARLSLSLSGRLVGPSEDQLGGGHGNGAASEPPLLDCHHMERAHEHELEGRRLQADGDGVPDRGGVPAGAGAAGAPGRGGGGAAVVEAVPLPPGARAGGRPRRLRVRRRLRARPPRRQAGAGAEPERRAQRRHRVPGHAAARAHHPPRRRGRAPPAGTQQPAGLRQAGARRAGAARHHRPLRLRERLRLRPLPGRRLRAPGRPDARGLLLLLLLLAAATAPAGRRLRRRDARVPPLQRALPVAAHGRQERGQDGGLPGQGAPLRRRHRRQVARQGAPERGLRQLRPRIHQAREHQEVVRIDRIECLRHLASSSMLPLASTVEPSCQCQPNCIYARSPCSRKYSEINSILAGDE

SEQ ID NO: 26058 - protein, 322 aa, Zea mays subsp. mays
  misc_feature (1)..(322): Ceres Seq. ID no. 13498320
DTQRQLQHSRGRQEGRRYQTSVKPSQRVSLSLSLVAWSVHRRISSAVAMAMAQQASLPCSTATTWRELTNTSWRDDDYRRMVMAYLIEAVYLLELERQERRDAAAVAQQWWKPFHFRLAHELVDDRDGSVFGAVFERDHHGARPGPGPSPSGAPSAVIAFRGTLLRAPTIRRDVEDELRLLARNSLRGSARLARAAQALRATIDRFGSENVCVCGHSLGAGFARQVVRTLVASSSSSSSSPRQPRQQAAAFAAATLESHLFNAPYLSLPMGVRSVVRTADCLVKALRSGVATVGKWHGKALRNVAYASCVLGYTRLESTRKL

SEQ ID NO: 26059 - protein, 314 aa, Zea mays subsp. mays
  misc_feature (1)..(314): Ceres Seq. ID no. 13498321
MERAHEHELEGRRLQADGDGVPDRGGVPAGAGAAGAPGRGGGGAAVVEAVPLPPGARAGGRPRRLRVRRRLRARPPRRQAGAGAEPERRAQRRHRVPGHAAARAHHPPRRRGRAPPAGTQQPAGLRQAGARRAGAARHHRPLRLRERLRLRPLPGRRLRAPGRPDARGLLLLLLLLAAATAPAGRRLRRRDARVPPLQRALPVAAHGRQERGQDGGLPGQGAPLRRRHRRQVARQGAPERGLRQLRPRIHQAREHQEVVRIDRIECLRHLASSSMLPLASTVEPSCQCQPNCIYARSPCSRKYSEINSILAGDE

SEQ ID NO: 26060 - protein, 274 aa, Zea mays subsp. mays
  misc_feature (1)..(274): Ceres Seq. ID no. 13498322
MAMAQQASLPCSTATTWRELTNTSWRDDDYRRMVMAYLIEAVYLLELERQERRDAAAVAQQWWKPFHFRLAHELVDDRDGSVFGAVFERDHHGARPGPGPSPSGAPSAVIAFRGTLLRAPTIRRDVEDELRLLARNSLRGSARLARAAQALRATIDRFGSENVCVCGHSLGAGFARQVVRTLVASSSSSSSSPRQPRQQAAAFAAATLESHLFNAPYLSLPMGVRSVVRTADCLVKALRSGVATVGKWHGKALRNVAYASCVLGYTRLESTRKL

SEQ ID NO: 26061 - DNA, 1693 bp, Zea mays subsp. mays
  misc_feature (1)..(1693): Ceres Seq. ID no. 13498349
actcactcatagaggccgtcaggccagtcgccctcgcccagtagtaggctagtagcgacgggcgacggtggagatcgtgcgaggctgtgtactacctgtacgcctccatcgtcgcctcgcaccatcaatcctgtgcggtgccagatcctccccgggtcttgtcttgtcgcaggtggaagccatgtccgccgcggacgcagccggcggcaaggaggcggcgccggcgtgcgactcctgcacgggcatgccggcggtggtgtactgccgggccgactccgcgaggctgtgcctgcagtgcgaccgccacgtgcacggcgccaacaccgtgtccacccgccacgcccgggcgccgctctgcgccgggtgccacgcagccgctgccgctgccgccacgccggccgcttcctctgcgccagctgccgcttgggggaggagaaggatgagcgggacggcggtggcgccgccgacagtagtagcgacgacggtggcgcggtggaagggtacgccgggtgcccctcggtcgccgatctcgcgaccatcctgggcgccggctccgcgtgggaggagccccagacgctccgcttggagagccggagctccggcggcgagctggctgacgaggtcatccgccagctggtggagctcgccaggtcggaggcggcggctcgcgctgagatggagcagcttactccatggccgtcgccggagcttgctgccattactggacagtacgccgacttcggggctctcgacgctgacaccgcctggcatgatgatgcagcagccatcgcggcagcagtagtgccttccactgaggaggagcagcaagcgtggatcgcggccggctgcgacgtcggcgcgtgccggacggaggagaaggcgcgcgagaacgacgctgctctggccgagccgtgtctgtcctcgttcgtggagatgtcagagatctgccccgccagcgtcgtcggtcaccctcagccacggcggggacgagggcgtcgacagcagcggcaagacagccccgcggccgcagctggccgcgccgacgccggcgaagggcggctacgacgtggcctaccccgaccgcggcacggtgatctcgcgctacaaggagaagcggaagaacaggaggttcgacaagcagatccggtacgagtcgcgcaaggcccgcgccgacggccggatgcggatcaaggggcggttcgccaagtccggcgaggtctgagacgcgtgcgggcgctcacgccatgccaacggcaacgagctggtagggggaccgtgcgtgtgtttcacgtgggtggttaggtttggtattttggttggtgttgcagctcgctgctcgcacgtgtcgatgcgtactagtctacgttgattagagacggttgtctactctttcctcattcgtttaataaaacacggctccaccaccaatgcaagtttcaccccgatcgattggaagcgtgtgtttacgtggagaactcgctaagttagatgtcgtttggtaatgtaatagataaccgatattgttaaattatatttgtttaggtttaattataattaataatatactagaaatagataccggcttattcgaacttgttactgccggtattcgagagtgaatcattaccattattatttaagttgtatttcgtgaatcaaacgacacattagtttctagtcaaatttgttattc

SEQ ID NO: 26062 - protein, 208 aa, Zea mays subsp. mays
  misc_feature (1)..(208): Ceres Seq. ID no. 13498350
MEQLTPWPSPELAAITGQYADFGALDADTAWHDDAAAIAAAVVPSTEEEQQAWIAAGCDVGACRTEEKARENDAALAEPCLSSFVEMSEICPASVVGHPQPRRGRGRRQQRQDSPAAAAGRADAGEGRLRRGLPRPRHGDLALQGEAEEQEVRQADPVRVAQGPRRRPDADQGAVRQVRRGLRRVRALTPCQRQRAGRGTVRVFHVGG

SEQ ID NO: 26063 - protein, 206 aa, Zea mays subsp. mays
  misc_feature (1)..(206): Ceres Seq. ID no. 13498351
MSAADAAGGKEAAPACDSCTGMPAVVYCRADSARLCLQCDRHVHGANTVSTRHARAPLCAGCHAAAAAAATPAASSAPAAAWGRRRMSGTAVAPPTVVATTVARWKGTPGAPRSPISRPSWAPAPRGRSPRRSAWRAGAPAASWLTRSSASWWSSPGRRRRLALRWSSLLHGRRRSLLPLLDSTPTSGLSTLTPPGMMMQQPSRQQ

SEQ ID NO: 26064 - protein, 185 aa, Zea mays subsp. mays
  misc_feature (1)..(185): Ceres Seq. ID no. 13498352
MPAVVYCRADSARLCLQCDRHVHGANTVSTRHARAPLCAGCHAAAAAAATPAASSAPAAAWGRRRMSGTAVAPPTVVATTVARWKGTPGAPRSPISRPSWAPAPRGRSPRRSAWRAGAPAASWLTRSSASWWSSPGRRRRLALRWSSLLHGRRRSLLPLLDSTPTSGLSTLTPPGMMMQQPSRQQ

SEQ ID NO: 26065 - DNA, 1606 bp, Zea mays subsp. mays
  misc_feature (1)..(1606): Ceres Seq. ID no. 13498353
gaaaatttccggtgctgagcgtgcatcggcagagctgactgtgactggtgaactgaaggaaaggggaggagaaggggagggaagctttgggcgggagaggaagcctagcagcaacagtaggcagtagcagggttgaccggaggggcagtggagtctggagagtaacccaacaaccccctcctcccctccccttctgtcttattgccacctctccacgtctccaccaaacaaggcaacaagggagaagtagatctgcatctgcgagaggaggcagcgggggtggtgatgatggagagccagccgctgcaggccccgacggccacggctccggcccccggatctgcggagccagccggagctccgccggccgtcacccccggcaaggagttcacgcgcacctgcaagggcctcgtcgtcgtgctcatcggaggatacgtgctgctccagctcctcccttcgtcactcaactacctcgccatcatcccctccaagacaatcccctatgtatggaccgtctttaccgctggttacatcgagcaagtcctcccaggggccattggcagttctcttggtcttctcttttgtggaaaggacattgaaccagcatggggccgcaaggaattcttgaagttcattattttgatcaactccatctgtggcattcttgcattttgctttgctattggactctactacgtcactggaaaggagagcttccttgtcacaccactttctggtttccacggttgccttgctggctttcttgtggccctgaagcaactcttaccaaaccttgagcttcctatgtgctttttctggaaaataaaggcaaagtggatgccattctttgttgtatgtttctcaagtatcatggccttcatcgtgcctgattccattaacttcctgccaactttggtgtccgggatgtacgttagctggctttacctgagatacttccaaaggaacccactgactggacttaagggtgatcccagtgatgacttttccttccccagtttattcccagctgccatgagaccagttacggaccctgtggccaacctgtttgataggctgttgtgtgcaaggtccaggcctttggaagtcgccctcccgatatcagatcctaccaaggcttcaagaagaagggagcgtggcgagagggttcttgaggaaaggttggcggctgacaatgctggtgacacagaggcctcgcctcgtggccatggcaccgcggaagactgagaactttcttgtgaccatcagctcctcttataggagccatggctttgctccctccagcgtttatagctctgcacttttgtcttctggagatggagctattcagttcacagcgaacgaataatacgatgttcttagtttctctttttttccgcttctttgtctgcgaggatttattggttaaattgtgtactagtcaattgttatggtacagcgaaaaagagagaagagggtgatggcatttgcagcgaggtgttgagattccgttgtagccatgcatttgcagccgattgtttggtactggtcaaagttctgtagtagtcatatactctgcttaaaatatagaaagaagaatggcttcgtc

SEQ ID NO: 26066 - protein, 319 aa, Zea mays subsp. mays
  misc_feature (1)..(319): Ceres Seq. ID no. 13498354
MMESQPLQAPTATAPAPGSAEPAGAPPAVTPGKEFTRTCKGLVVVLIGGYVLLQLLPSSLNYLAIIPSKTIPYVWTVFTAGYIEQVLPGAIGSSLGLLFCGKDIEPAWGRKEFLKFIILINSICGILAFCFAIGLYYVTGKESFLVTPLSGFHGCLAGFLVALKQLLPNLELPMCFFWKIKAKWMPFFVVCFSSIMAFIVPDSINFLPTLVSGMYVSWLYLRYFQRNPLTGLKGDPSDDFSFPSLFPAAMRPVTDPVANLFDRLLCARSRPLEVALPISDPTKASRRRERGERVLEERLAADNAGDTEASPRGHGTAED

SEQ ID NO: 26067 - protein, 318 aa, Zea mays subsp. mays
  misc_feature (1)..(318): Ceres Seq. ID no. 13498355
MESQPLQAPTATAPAPGSAEPAGAPPAVTPGKEFTRTCKGLVVVLIGGYVLLQLLPSSLNYLAIIPSKTIPYVWTVFTAGYIEQVLPGAIGSSLGLLFCGKDIEPAWGRKEFLKFIILINSICGILAFCFAIGLYYVTGKESFLVTPLSGFHGCLAGFLVALKQLLPNLELPMCFFWKIKAKWMPFFVVCFSSIMAFIVPDSINFLPTLVSGMYVSWLYLRYFQRNPLTGLKGDPSDDFSFPSLFPAAMRPVTDPVANLFDRLLCARSRPLEVALPISDPTKASRRRERGERVLEERLAADNAGDTEASPRGHGTAED

SEQ ID NO: 26068 - DNA, 1696 bp, Zea mays subsp. mays
  misc_feature (1)..(1696): Ceres Seq. ID no. 13498363
taatcaaaaaattattatttcttcttccagcgggcaattcctggccaccaccgggcgcgctgcaccgcgctatattactccgggctcgtggacaagcatgcagaggggcgtgtccttccctggcggaatggcggaggagtgcccgcccgccggcggcgccgagctctggctcccggacgagttcctggacgacgacttcttctccgaggaggagaaggcggcggtcgcggccaagagcgagagcgacgaggaggaagggatggacggcctctcgcgccgcgcggccgggctcgtcgtcgggggtggaggggacggttcccctgcaaaggcgcaagtgttagccggctcgccgcagtcgattctgtgcggcctgcatgcttccggggaggacagccccaacggcgcggcgtcgcaggtcagctcgccgccgtcgtcgccgnngnntaagacgccggccgacccctgggacctgctcaaagaggcggccggccaggtggcccgcatgcgcacaactagcggcatcctggtggcaacgaacgcgggcgcacatcaaagacaccccgtcccgccgctggcgcagaagctctctgcgccggccgacgctcccaaggccgcgggtgccaacctccctcaggctcagccgaagaactcgatggaacatcgccggattcagattgctcgttttaatgcgctgaagcagcagcagctcctgaagcacatgcgggagcgggagctcgccgtcgctacggcggcggcgtggggcacgagcgtcgcggggtctcatcgtgccgccgggtaccgtgcgccggcgccccatgtcctgagctcgtccgcgtggcccaccctccagaagcagcagcagcagcaaagggcggtgtccccggcgggcatgcgcgccgtcttcgtggcccctcctggcgccaagcgcgagtgcgccggcaccggcgtgttcatcccccgccaggccggcgcccccgcggagcccaagaaaaggccagcagcgtgcgcccctgtccttctcccggcgcgcgtcgtgcaggcgctcaacctcaacgtcgaggacctcggggcccgtcccatctacccgggcggcttcgtcctcgaccacgatgcactggtgagccggagcaacgctctgctggcgagccgcgcgtcccagcagctccatggcgcttcgtcgcgcgaggtgaatctcccccaggaatggacgtactgagggcgccgattcgccaccgcaccgctgcaagatgactcgacgatcactccagattaacggggggtgtcaaaaaaaaattactattgctattggtagcaataggtattataggtgttgttaggctagaagtaggaggcagcggtggtgtggcattacgcgccagcgttaggtgttcttttgtgcgggggtgatatattggttattttgggactgncggacgggttggtgatgagcaagagcgaaatcaatcatccgtggctctcgcaggtccgttgggggcggaggggagaaacagcaataataataataagtgggtgcttttgggggaggggagagaggggggtttggaactaatcctatgtttagctggttctggtactacgatggtttcccaagggaaaatcatcaagcattcagcagtctgtgaaagagatgtctcgtcactgtaagcaaataataataataataaacaggagctcc

SEQ ID NO: 26069 - protein, 404 aa, Zea mays subsp. mays
  misc_feature (1)..(404): Ceres Seq. ID no. 13498364
  misc_feature (147)..(147): Xaa is any aa, unknown or other
  misc_feature (148)..(148): Xaa is any aa, unknown or other
NQKIIISSSSGQFLATTGRAAPRYITPGSWTSMQRGVSFPGGMAEECPPAGGAELWLPDEFLDDDFFSEEEKAAVAAKSESDEEEGMDGLSRRAAGLVVGGGGDGSPAKAQVLAGSPQSILCGLHASGEDSPNGAASQVSSPPSSPXXKTPADPWDLLKEAAGQVARMRTTSGILVATNAGAHQRHPVPPLAQKLSAPADAPKAAGANLPQAQPKNSMEHRRIQIARFNALKQQQLLKHMRERELAVATAAAWGTSVAGSHRAAGYRAPAPHVLSSSAWPTLQKQQQQQRAVSPAGMRAVFVAPPGAKRECAGTGVFIPRQAGAPAEPKKRPAACAPVLLPARVVQALNLNVEDLGARPIYPGGFVLDHDALVSRSNALLASRASQQLHGASSREVNLPQEWTY

SEQ ID NO: 26070 - protein, 372 aa, Zea mays subsp. mays
  misc_feature (1)..(372): Ceres Seq. ID no. 13498365
  misc_feature (115)..(115): Xaa is any aa, unknown or other
  misc_feature (116)..(116): Xaa is any aa, unknown or other
MQRGVSFPGGMAEECPPAGGAELWLPDEFLDDDFFSEEEKAAVAAKSESDEEEGMDGLSRRAAGLVVGGGGDGSPAKAQVLAGSPQSILCGLHASGEDSPNGAASQVSSPPSSPXXKTPADPWDLLKEAAGQVARMRTTSGILVATNAGAHQRHPVPPLAQKLSAPADAPKAAGANLPQAQPKNSMEHRRIQIARFNALKQQQLLKHMRERELAVATAAAWGTSVAGSHRAAGYRAPAPHVLSSSAWPTLQKQQQQQRAVSPAGMRAVFVAPPGAKRECAGTGVFIPRQAGAPAEPKKRPAACAPVLLPARVVQALNLNVEDLGARPIYPGGFVLDHDALVSRSNALLASRASQQLHGASSREVNLPQEWTY

SEQ ID NO: 26071 - protein, 362 aa, Zea mays subsp. mays
  misc_feature (1)..(362): Ceres Seq. ID no. 13498366
  misc_feature (105)..(105): Xaa is any aa, unknown or other
  misc_feature (106)..(106): Xaa is any aa, unknown or other
MAEECPPAGGAELWLPDEFLDDDFFSEEEKAAVAAKSESDEEEGMDGLSRRAAGLVVGGGGDGSPAKAQVLAGSPQSILCGLHASGEDSPNGAASQVSSPPSSPXXKTPADPWDLLKEAAGQVARMRTTSGILVATNAGAHQRHPVPPLAQKLSAPADAPKAAGANLPQAQPKNSMEHRRIQIARFNALKQQQLLKHMRERELAVATAAAWGTSVAGSHRAAGYRAPAPHVLSSSAWPTLQKQQQQQRAVSPAGMRAVFVAPPGAKRECAGTGVFIPRQAGAPAEPKKRPAACAPVLLPARVVQALNLNVEDLGARPIYPGGFVLDHDALVSRSNALLASRASQQLHGASSREVNLPQEWTY

SEQ ID NO: 26072 - DNA, 1742 bp, Zea mays subsp. mays
  misc_feature (1)..(1742): Ceres Seq. ID no. 13498411
aaaaaagcgtcgcggagccacgaccgacgacccctattttggcacgcccgtcccccgcttatacgccgcgccggcgaggtcgctgctccgaatcaccttcccttcctattccctctctctctctctctctnnntctctctctctactctntctctctctctcccgcccgctccnnggcctcctcctctacccgccccacaaaccaaggccctccgctgtctgcacggcgacggcggtgcatgggcggcgggcgcgccgggacgacgacgacgacgaccgcgccgccatgaccaccaccaccacggccgcggccgcggtcgcgcagctctgcgccgggccacggcggcgcaagcaggcagcaggggctcggctcgacctgcgctgggcgcgcctgctccgcctcgccgtcgtcaccagggtgctccgcctcgcgcgcgaccagctgctcgcctgctcctcctgcgggggcggcaccgccgcccgccgccggtaccgccgcctcggcccgcccaccagcgccagcgccggtcccgtgctgtcacccgtcgacagggacgacgactgcgccgcggacgccgaggccgcggcccctcgcgacgcggccgacgacgaagacaacgttgtcagcctcaaggtcagcctgctcggcgactgccagattggcaagaccagcttcatggttaagtatgtgggagatgacggggaggagcagaacggcttgcagatgacgggcctgaatctcatggacaagacgatgcccgtcaggggagcaaggattgcctacagcatctgggatgtggcaggagaccaccagtccgtcgaccacgtcccaatcgcgtgcaaggacgccgtggcgatcctgtacatgttcgatctcacgagccgctgcacgcttaataacattgtagattggtacgggagggcgaggaaatggaataagacggctattccaatcctaatcgggacaaagtttgatgactttgctcagcttcctcttgagatgcaatgggccatcgttaaccaggccagagcatacgcaagagcgatgaaggcgaccctcttcttctcgagcgcgacgcacaacatcaacgtgaacaagatcttcaagttcatcacggccaagctcttcaacctcccgtggacggtggagcgcaacctcaccatcggcgagcccatcatagacttctgacgaccccttcctctaactagtaactcggcagcacacgcacgacgacccttggtatatatcatgggttgacagggtcgtgtctttcgatcctcttgccctgtgcgagccgccggagccatgaagtgaccgagcatgcccgtcgtcctcttcctcctggtggccggctgcagcaggcaagatgccctttgtaaatatagccataggtgacggtcccgcgtgcgtgcggccgtgcgggagcgtcgtcaaatgggaagaaaaccgcgaggtgtgactgtgatgtaacaccccgtctgtaacattcgccagagtatataggaaatccatgttaatataccctccattccaactgacaaaggcatgcgctggcgcctgncggcttnctnccggtgcagaacctcttctttctgctcacccnacgnagctgcgtgcttgcatgcgtcttgaggcgtgcaagcagttcaggttcctccgttcctgtagttggttatttgtacatctgtgagttatttgcacgacgagtcaatttatgctaccccgtcacaactcncaagct

SEQ ID NO: 26073 - protein, 395 aa, Zea mays subsp. mays
  misc_feature (1)..(395): Ceres Seq. ID no. 13498412
  misc_feature (44)..(44): Xaa is any aa, unknown or other
  misc_feature (50)..(50): Xaa is any aa, unknown or other
  misc_feature (58)..(58): Xaa is any aa, unknown or other
KKRRGATTDDPYFGTPVPRLYAAPARSLLRITFPSYSLSLSLSXSLSLLXLSLSRPLXGLLLYPPHKPRPSAVCTATAVHGRRARRDDDDDDRAAMTTTTTAAAAVAQLCAGPRRRKQAAGARLDLRWARLLRLAVVTRVLRLARDQLLACSSCGGGTAARRRYRRLGPPTSASAGPVLSPVDRDDDCAADAEAAAPRDAADDEDNVVSLKVSLLGDCQIGKTSFMVKYVGDDGEEQNGLQMTGLNLMDKTMPVRGARIAYSIWDVAGDHQSVDHVPIACKDAVAILYMFDLTSRCTLNNIVDWYGRARKWNKTAIPILIGTKFDDFAQLPLEMQWAIVNQARAYARAMKATLFFSSATHNINVNKIFKFITAKLFNLPWTVERNLTIGEPIIDF

SEQ ID NO: 26074 - protein, 300 aa, Zea mays subsp. mays
  misc_feature (1)..(300): Ceres Seq. ID no. 13498413
MTTTTTAAAAVAQLCAGPRRRKQAAGARLDLRWARLLRLAVVTRVLRLARDQLLACSSCGGGTAARRRYRRLGPPTSASAGPVLSPVDRDDDCAADAEAAAPRDAADDEDNVVSLKVSLLGDCQIGKTSFMVKYVGDDGEEQNGLQMTGLNLMDKTMPVRGARIAYSIWDVAGDHQSVDHVPIACKDAVAILYMFDLTSRCTLNNIVDWYGRARKWNKTAIPILIGTKFDDFAQLPLEMQWAIVNQARAYARAMKATLFFSSATHNINVNKIFKFITAKLFNLPWTVERNLTIGEPIIDF

SEQ ID NO: 26075 - protein, 227 aa, Zea mays subsp. mays
  misc_feature (1)..(227): Ceres Seq. ID no. 13498414
  misc_feature (44)..(44): Xaa is any aa, unknown or other
  misc_feature (45)..(45): Xaa is any aa, unknown or other
  misc_feature (50)..(50): Xaa is any aa, unknown or other
  misc_feature (58)..(58): Xaa is any aa, unknown or other
  misc_feature (59)..(59): Xaa is any aa, unknown or other
KKASRSHDRRPLFWHARPPLIRRAGEVAAPNHLPFLFPLSLSLXXSLSTXSLSLPPAXXPPPLPAPQTKALRCLHGDGGAWAAGAPGRRRRRPRRHDHHHHGRGRGRAALRRATAAQAGSRGSARPALGAPAPPRRRHQGAPPRARPAARLLLLRGRHRRPPPVPPPRPAHQRQRRSRAVTRRQGRRLRRGRRGRGPSRRGRRRRQRCQPQGQPARRLPDWQDQLHG

SEQ ID NO: 26076 - DNA, 1713 bp, Zea mays subsp. mays
  misc_feature (1)..(1713): Ceres Seq. ID no. 13498435
gcacgagaccattacctagaacatcctaatcgaaaagtccgtcgtctcgcgctctcgtttcgtcgctacgctagcttccagtcccgggcttagcaactgtgctgctgttgcactgcacccggcgcacgcagagatgcgccgtgtcgggacgggtgtgaggatgctttgcggcgcggcgctgtcggtgcttctgcttctcgcgggcggcgcggcggcgtcgcactcgcgctcgtcgtgccccgccacgccgccggacgcggggaacacgctgcaggtgtcgcacgcgttcgggccgtgctcgccgctgggccccgggacggcggcgccgtcgtgggcggggttcctggcggaccaggcgtcgcgtgacgcgtcgcggctgctgtacctggactcgctggcggtgcgtggccgcgcccgcgcgtacgcgcccatcgcgtcggggcggcagctgctgcagacgctgacgtacgtggtgcgggccagcctcggcacgccgccgcagcagctgctcctggccgtcgacaccagcaacgacgcctcgtggatcccttgcgccggctgcgcgggctgccccacgtcgtccgcggcgcccttcgacccggccgcgtccgcctcgtaccgcacggtgccctgcgggtcgccgctgtgcgcgcaggcacccaacgcggcgtgcccgcccggcggcaaggcctgcggcttcagcctcacctacgccgactcctcgctgcaggccgcgctgtcgcaggactccctcgccgtcgcaggcaacgccgtgaaggcctacaccttcgggtgcctgcagagggccactggcacggctgcgccgccgcaggggctgctgggtctcggccgcggcccgctgtcgttcctttcgcagaccaaggacatgtacgaggccaccttctcgtactgtctccccagcttcaagtcgctcaacttctctggaacgctccggctcgggcgcaacggccagccgcagcgcatcaagacgacgccgctgctggccaacccgcaccggtcgtcgctctactacgtgaacatgaccggcgtccgcgtgggcaggaaggtggtgcccatcccggcgttcgacccggcgacgggcgcgggcaccgtgctggactctggcaccatgttcacccggctggtggcgccggcgtacgtggccgtgcgggacgaggtccggcgccgcgtcggcgcgcccgtatcctcgctgggagggttcgacacgtgcttcaacaccaccgccgtcgcgtggccgcccatgacgctgctgttcgacggcatgcaggtgacgttgccggaggagaacgtggtcatccacagcacgtacgggaccatcagctgcctggccatggccgcggcgcccgacggcgtcaacaccgtgctcaacgtcatcgccagcatgcagcagcagaaccaccgtgtgctcttcgacgtgcccaacggacgcgtcggcttcgcgcgcgagcgctgcactgccgcttgatcagcttgctcgcgcgcctgcgcgcgggctcggattcgggttatatttagttaaacctacgttctacggttgtggacgtcatgcactgctgtcggagtgggtgattaataatttaactttccttttctttttaatctcgttgctcttcagatttaccatatgtgtttcacattcaccgcgttatgtggtttaggggctgaatgattggggtctaaataatgtactgt

SEQ ID NO: 26077 - protein, 450 aa, Zea mays subsp. mays
  misc_feature (1)..(450): Ceres Seq. ID no. 13498436
MRRVGTGVRMLCGAALSVLLLLAGGAAASHSRSSCPATPPDAGNTLQVSHAFGPCSPLGPGTAAPSWAGFLADQASRDASRLLYLDSLAVRGRARAYAPIASGRQLLQTLTYVVRASLGTPPQQLLLAVDTSNDASWIPCAGCAGCPTSSAAPFDPAASASYRTVPCGSPLCAQAPNAACPPGGKACGFSLTYADSSLQAALSQDSLAVAGNAVKAYTFGCLQRATGTAAPPQGLLGLGRGPLSFLSQTKDMYEATFSYCLPSFKSLNFSGTLRLGRNGQPQRIKTTPLLANPHRSSLYYVNMTGVRVGRKVVPIPAFDPATGAGTVLDSGTMFTRLVAPAYVAVRDEVRRRVGAPVSSLGGFDTCFNTTAVAWPPMTLLFDGMQVTLPEENVVIHSTYGTISCLAMAAAPDGVNTVLNVIASMQQQNHRVLFDVPNGRVGFARERCTAA

SEQ ID NO: 26078 - protein, 441 aa, Zea mays subsp. mays
  misc_feature (1)..(441): Ceres Seq. ID no. 13498437
MLCGAALSVLLLLAGGAAASHSRSSCPATPPDAGNTLQVSHAFGPCSPLGPGTAAPSWAGFLADQASRDASRLLYLDSLAVRGRARAYAPIASGRQLLQTLTYVVRASLGTPPQQLLLAVDTSNDASWIPCAGCAGCPTSSAAPFDPAASASYRTVPCGSPLCAQAPNAACPPGGKACGFSLTYADSSLQAALSQDSLAVAGNAVKAYTFGCLQRATGTAAPPQGLLGLGRGPLSFLSQTKDMYEATFSYCLPSFKSLNFSGTLRLGRNGQPQRIKTTPLLANPHRSSLYYVNMTGVRVGRKVVPIPAFDPATGAGTVLDSGTMFTRLVAPAYVAVRDEVRRRVGAPVSSLGGFDTCFNTTAVAWPPMTLLFDGMQVTLPEENVVIHSTYGTISCLAMAAAPDGVNTVLNVIASMQQQNHRVLFDVPNGRVGFARERCTAA

SEQ ID NO: 26079 - DNA, 1103 bp, Zea mays subsp. mays
  misc_feature (1)..(1103): Ceres Seq. ID no. 13498465
aaggactcagtccacactccacagggaaggagggagcaggagaggtaggtagccaagaagatcggttccagcggcaggcgcgagcgaggcgtgaccgatggcggccgcgtcgctctgagccgggcgcggtggctcctggtggagcacccggccgtgccctcgttccgctggcagccaggccgcacggtcggcgcgacgccgtccttcgcggccgccgtcatctgcggctacctcgccgcggtgctcgtcctccgccgcctcgtcctgccccgcctcccggcgctgcctccgccggcgctccgcgcgctctccgccgcccacaacgcggtcctgctggcgctctccgccgccatggccggcgggtgcgcgctgtcgacggccgcgacggcgccggcgccgcggtgggcgtgggccttctgcttcccgccgcggggcgccacggaggcgtcggggcccgtcttcttctgggcgcacgtgttctacctctccaaggtgtacgagctcggcgacacgctgctcatcctgctcgcccgccgcccgctcacgctgctccacgtgtaccaccacgcgctcgtcgtggccatgtgctacctctggctcgccacccggcagtcgctgatgcccgtcgcgctcgtcaccaacgccggcgtgcacgtcgtgatgtactcctactacctctcctgcagcgtcggcctgcgctggcccgggcggtggaagcgcgccgtcacggagctgcagatcgcgcagttcctcttcagcttcgcggcctccgtggtgatgctgtggctccacttcgccgctggcggctgcgaggggatggccggctgggtgttcaacgccgtcttcaacgcgtcgctgctcgcgctcttcctcaacttccacggcgccgcctacaaaggcgccgccaaggccaacaagggtaaagcggaatgacgcggccgacaagctttaatttgccggcaaccaaaatcctcgtgagatttaattgggaccaattgtttaatgttgcttcttcgccaaattattactgatacgaagtctgtctgaaataattgttcgaaaaagaatggcatcgatcgcccttgaattatgggtgaattttc

SEQ ID NO: 26080 - protein, 306 aa, Zea mays subsp. mays
  misc_feature (1)..(306): Ceres Seq. ID no. 13498466
GLSPHSTGKEGAGEVGSQEDRFQRQARARRDRWRPRRSEPGAVAPGGAPGRALVPLAARPHGRRDAVLRGRRHLRLPRRGARPPPPRPAPPPGAASAGAPRALRRPQRGPAGALRRHGRRVRAVDGRDGAGAAVGVGLLLPAAGRHGGVGARLLLGARVLPLQGVRARRHAAHPARPPPAHAAPRVPPRARRGHVLPLARHPAVADARRARHQRRRARRDVLLLPLLQRRPALARAVEARRHGAADRAVPLQLRGLRGDAVAPLRRWRLRGDGRLGVQRRLQRVAARALPQLPRRRLQRRRQGQQG

SEQ ID NO: 26081 - protein, 193 aa, Zea mays subsp. mays
  misc_feature (1)..(193): Ceres Seq. ID no. 13498467
MAGGCALSTAATAPAPRWAWAFCFPPRGATEASGPVFFWAHVFYLSKVYELGDTLLILLARRPLTLLHVYHHALVVAMCYLWLATRQSLMPVALVTNAGVHVVMYSYYLSCSVGLRWPGRWKRAVTELQIAQFLFSFAASVVMLWLHFAAGGCEGMAGWVFNAVFNASLLALFLNFHGAAYKGAAKANKGKAE

SEQ ID NO: 26082 - DNA, 1746 bp, Zea mays subsp. mays
  misc_feature (1)..(1746): Ceres Seq. ID no. 13498516
cttcaatttttactatttaattatacagatacatatccagccggcgcagccaggaggcgactgaccgaattgtattgtttgttcgatcgaagcaggcagatggcaggcggcggattcgtggaggacatgaacatgatgagggagcagagcctcctcgaggcgacgtgcggcgacctcttcgaccacatcgacgacctcctcgacttccccaacgaggactccgccgccgccgtgctcctcctggacgcgccggcgccggggagcccgctgtcggcgcgcatcatcgacgtcggccgcgccggcaatgcgctcgccccgcctgctgcccccgcgcagcacgacgcttccgctagcgccttcttcgccgccgcggggaacgatgtgttcgacaccaaggacgtcgtcggcgcacacatcggctcgtgcgacgacattgacatggacatggcgcagctggagtggctatcggggctcttcgacgacgcctccatcccgcacgagccggtgttccctggcgcgacggcgggcggcgcggcgcccatcatgaagagctccgcgctggcggccggcagcgctgctgccgccggacaaaatggaggacgcgctgctgttccgcagctccagccccatctcggtgctggagcacggcagcggtggcagcggcagcgccagcgccaccggctccgcgtcctcgtcctcctcctcggcgtcctcctcctcggagtccttctccgggagtgggagtggaggagggcatgtttggtcggcgccagtgtcgccgcgcccggcgccgccgccggtgctcgtcataccggcgcgcgcgcggagcaagcgctcccgttcgtccgcgttcaccggcgccgccgcgcgcgccggggcggagacgccaaccatcctcgtgccgacgcccatgtactcgtccgggtctgcccactcggaccccgagagcatcgccgagtccagcccgcacccggcgccgcccatgaagaagaagaagaaggccaagaagcctgcgccccccgcgccagctgcctcttctgacgacaacgatggcgacgccgactacgaggaaggcggcgagcaagcggagccgcagggcggcgccgtcaggaggtgcacgcattgccagatcgagaagacgccgcagtggcgcgcggggccgctggggcccaagacgctctgcaacgcctgcggcgtgcgctacaagtccggtcgcctgttcccggagtaccgccccgcggcgagccccaccttcgtgccgtccatccactccaactcgcacaagagggtggtggagatgcgccagaaggctgtccggagcggcgaccccgtcgtgcgaccttctccatttcatccgccgccgggattgacgtcccggcatggcgtcgccggactgtcggtcggtctcgtcccccatatagctatatatgtatgcatgcatggttgcttcatcagtcgtcgtcgcccattatggtcatcatcaccgcttcaccggtcaccgccatggatcgtctcccgcccatcatcacatgcattggtttgtgtcagcatccatccaatcccaatccatcgccgggcgtcccggcgttgttagttcattaggtcttttttttcctcatcggggggctagtgttattttacctttgatccttttgtctattggttaattggtttcccctggatgttttttgtttgtatagagtgaaaaagagagaggagaaatagatgaatcagagtggttgctgc

SEQ ID NO: 26083 - protein, 346 aa, Zea mays subsp. mays
  misc_feature (1)..(346): Ceres Seq. ID no. 13498517
LQFLLFNYTDTYPAGAARRRLTELYCLFDRSRQMAGGGFVEDMNMMREQSLLEATCGDLFDHIDDLLDFPNEDSAAAVLLLDAPAPGSPLSARIIDVGRAGNALAPPAAPAQHDASASAFFAAAGNDVFDTKDVVGAHIGSCDDIDMDMAQLEWLSGLFDDASIPHEPVFPGATAGGAAPIMKSSALAAGSAAAAGQNGGRAAVPQLQPHLGAGARQRWQRQRQRHRLRVLVLLLGVLLLGVLLREWEWRRACLVGASVAAPGAAAGARHTGARAEQALPFVRVHRRRRARRGGDANHPRADAHVLVRVCPLGPREHRRVQPAPGAAHEEEEEGQEACAPRASCLF

SEQ ID NO: 26084 - protein, 333 aa, Zea mays subsp. mays
  misc_feature (1)..(333): Ceres Seq. ID no. 13498518
MEDALLFRSSSPISVLEHGSGGSGSASATGSASSSSSSASSSSESFSGSGSGGGHVWSAPVSPRPAPPPVLVIPARARSKRSRSSAFTGAAARAGAETPTILVPTPMYSSGSAHSDPESIAESSPHPAPPMKKKKKAKKPAPPAPAASSDDNDGDADYEEGGEQAEPQGGAVRRCTHCQIEKTPQWRAGPLGPKTLCNACGVRYKSGRLFPEYRPAASPTFVPSIHSNSHKRVVEMRQKAVRSGDPVVRPSPFHPPPGLTSRHGVAGLSVGLVPHIAIYVCMHGCFISRRRPLWSSSPLHRSPPWIVSRPSSHALVCVSIHPIPIHRRASRRC

SEQ ID NO: 26085 - protein, 313 aa, Zea mays subsp. mays
  misc_feature (1)..(313): Ceres Seq. ID no. 13498519
MAGGGFVEDMNMMREQSLLEATCGDLFDHIDDLLDFPNEDSAAAVLLLDAPAPGSPLSARIIDVGRAGNALAPPAAPAQHDASASAFFAAAGNDVFDTKDVVGAHIGSCDDIDMDMAQLEWLSGLFDDASIPHEPVFPGATAGGAAPIMKSSALAAGSAAAAGQNGGRAAVPQLQPHLGAGARQRWQRQRQRHRLRVLVLLLGVLLLGVLLREWEWRRACLVGASVAAPGAAAGARHTGARAEQALPFVRVHRRRRARRGGDANHPRADAHVLVRVCPLGPREHRRVQPAPGAAHEEEEEGQEACAPRASCLF

SEQ ID NO: 26086 - DNA, 1509 bp, Zea mays subsp. mays
  misc_feature (1)..(1509): Ceres Seq. ID no. 13498540
gagccctcgacgagcacccgagagacacgagagtgaaggaaagaggaaaaagaagaagactacagccaaaaccctatctcactccggcgcgccaccggccgatggtttcgatgaacaccacgccgaatccgcttgactccgccgccggcagcgccgccgtcgccggcggaagcgtggacgagggaggaggaggaggcggcaggaagaagcggatgcgcggggcggtagcggcggcgatggtgccgccgccgatggcggtcccgctgccggccgcggcgcccgcggcgggggaggaggttcggaaggtcaggaagccgtacaccatcaccaaatcccgggagagctggacggagccggagcacgataagttcctcgaggccctgcagctttttgatcgtgattggaagaagattgaagcatatgtcggctcgaagactgttatacagataaggagccatgcacagaagtacttcttgaaggttcagaagaatggcacaggcgagcatctgcccccacccaggccaaaacggaaggcagctcatccatatccccagaaatcatctaaaaatgtttctcaaactattttattacaagaacaacctactcagcgggagcaaggttctgtcatgcctatggatactgctactgtgataaacacaaatgcgaatgtggcagtggcagtggcagtgccttcctgggacaatactcttgctcaatctctcagtgctggtcttgttccaggtgcaacaaataactgttcaagtagcatagagagtccatctggtacttggccaacttctgaagcagttgagcaagaaattgtggttccatcactccatgctatgccagattttgcccgagtatacagcttcctaggaagcatatttgatcctgatacaagtgggcatttgcagaggttaaaagtgatggatccaattgatattcaaacggtactactacttatgagaaatctttccacgaaccttaggagtcctgactttgagcaacatctatggtggtggggaccatgttaaacctgaaggcatggaaaatcatggatctcctcagagtggccatcttccattcctggtaacaagtgaatgagagcacactggcaatttgtggtcgaagctttggttgtttccacgagacacattcttgtgtgttctcagcaatcgagttgtggacggctggtctggcaatttatgaatgccatgtctgccaatctgtatagcttccaataatgggtctgaccctagactagttttgttttccacgttcatgtagatagctagttttgtgtgctcatgcaattttttactgggtggagcctagatcgatatgtttttgttgtatcacttgtgcacgcgtgtatgtaagtatgtggaaccttgtaatgcttgaggtacttgagagtcttcggttaagacaaagcatatatgcgcaataatcaggagatcaccatcgtcgactatataatgagaagtttttttagttgtggacctacct

SEQ ID NO: 26087 - protein, 343 aa, Zea mays subsp. mays
  misc_feature (1)..(343): Ceres Seq. ID no. 13498541
ALDEHPRDTRVKERGKRRRLQPKPYLTPARHRPMVSMNTTPNPLDSAAGSAAVAGGSVDEGGGGGGRKKRMRGAVAAAMVPPPMAVPLPAAAPAAGEEVRKVRKPYTITKSRESWTEPEHDKFLEALQLFDRDWKKIEAYVGSKTVIQIRSHAQKYFLKVQKNGTGEHLPPPRPKRKAAHPYPQKSSKNVSQTILLQEQPTQREQGSVMPMDTATVINTNANVAVAVAVPSWDNTLAQSLSAGLVPGATNNCSSSIESPSGTWPTSEAVEQEIVVPSLHAMPDFARVYSFLGSIFDPDTSGHLQRLKVMDPIDIQTVLLLMRNLSTNLRSPDFEQHLWWWGPC

SEQ ID NO: 26088 - protein, 310 aa, Zea mays subsp. mays
  misc_feature (1)..(310): Ceres Seq. ID no. 13498542
MVSMNTTPNPLDSAAGSAAVAGGSVDEGGGGGGRKKRMRGAVAAAMVPPPMAVPLPAAAPAAGEEVRKVRKPYTITKSRESWTEPEHDKFLEALQLFDRDWKKIEAYVGSKTVIQIRSHAQKYFLKVQKNGTGEHLPPPRPKRKAAHPYPQKSSKNVSQTILLQEQPTQREQGSVMPMDTATVINTNANVAVAVAVPSWDNTLAQSLSAGLVPGATNNCSSSIESPSGTWPTSEAVEQEIVVPSLHAMPDFARVYSFLGSIFDPDTSGHLQRLKVMDPIDIQTVLLLMRNLSTNLRSPDFEQHLWWWGPC

SEQ ID NO: 26089 - protein, 307 aa, Zea mays subsp. mays
  misc_feature (1)..(307): Ceres Seq. ID no. 13498543
MNTTPNPLDSAAGSAAVAGGSVDEGGGGGGRKKRMRGAVAAAMVPPPMAVPLPAAAPAAGEEVRKVRKPYTITKSRESWTEPEHDKFLEALQLFDRDWKKIEAYVGSKTVIQIRSHAQKYFLKVQKNGTGEHLPPPRPKRKAAHPYPQKSSKNVSQTILLQEQPTQREQGSVMPMDTATVINTNANVAVAVAVPSWDNTLAQSLSAGLVPGATNNCSSSIESPSGTWPTSEAVEQEIVVPSLHAMPDFARVYSFLGSIFDPDTSGHLQRLKVMDPIDIQTVLLLMRNLSTNLRSPDFEQHLWWWGPC

SEQ ID NO: 26090 - DNA, 1318 bp, Zea mays subsp. mays
  misc_feature (1)..(1318): Ceres Seq. ID no. 13498544
gcacttggttggagctcctctaccttttccatcgctctgctctgctccgcgtctccgtccgccccggcaaaagcaaaacacagccatggaggggtacgaccgcgagttctggcagttcagcgaccagctgcgcctgcagacgaccgccttctccggcctctccctcggcgactccatctggtctccggccaccggcgccggcgggcggcgcaacaacaacaccgacctactcgcggcctccgcgtcggcagccgacgccggcaagcacaacggcgtgggcctcagcctgaatgatggagggcccggactcattggctccgggaagctcgccttcggcggcagcaaggccggccgctacaacaacctcccatccgagaaggccgcgcccgtctacaaccacagcggcgccacgatcaacggcggctacgccaggagcgacaacgccggcctggcggcgttcaacaagatggggagctacttccacaacagtaacggcaacggcggcggcggcggggaggtgaagagctacttcaacaagtccgccggacgggcggcgagcaacaacagccacgggcacgccggcggcggcaagaagggcggcggcggcgggaagcacggcaagaacgagggcaacggcggcgcggtggcggccacggacaagcggttcaagacgctgccggcgtcggaggcgctgccgcggggcgaggccatcggcggctacatcttcgtctgcaacaacgacaccatggacgagaacctcaggagggagctgttcgggctgccgtcgaggtacagggactcggtgcgggccatccgcccggggctgcccctcttcctctacaactactccacccaccagctgccggcatcttcaaggccgccagcttcggcgggaccaacatcgacccgacggcgtgggaggacaagaagtgccccggcgagtcgcgcttccctgcacaggtgcgagtggcaacgcggaagatctacgatccactggaggaggacgccttccgccccatccttcaccactacgacgggcccaagtttcggctcgagctctccgtcgccgagaccctcgccctcctcgacatcttcgctgacaaggatgacgcctgagccttccttgccgccccctcgcccgccagtgccaatccattaatgcacagacaataaaatggctggagggacagaccaaactatccacctttgtttgatatgataaagggctatgtatgaggcacgcgtcccattatttttgtttttattataagactagacctcgttccgtaagatacatgtatcaatattatataaaaac

SEQ ID NO: 26091 - protein, 385 aa, Zea mays subsp. mays
  misc_feature (1)..(385): Ceres Seq. ID no. 13498545
HLVGAPLPFPSLCSAPRLRPPRQKQNTAMEGYDREFWQFSDQLRLQTTAFSGLSLGDSIWSPATGAGGRRNNNTDLLAASASAADAGKHNGVGLSLNDGGPGLIGSGKLAFGGSKAGRYNNLPSEKAAPVYNHSGATINGGYARSDNAGLAAFNKMGSYFHNSNGNGGGGGEVKSYFNKSAGRAASNNSHGHAGGGKKGGGGGKHGKNEGNGGAVAATDKRFKTLPASEALPRGEAIGGYIFVCNNDTMDENLRRELFGLPSRYRDSVRAIRPGLPLFLYNYSTHQLPASSRPPASAGPTSTRRRGRTRSAPASRASLHRCEWQRGRSTIHWRRTPSAPSFTTTTGPSFGSSSPSPRPSPSSTSSLTRMTPEPSLPPPRPPVPIH

SEQ ID NO: 26092 - protein, 357 aa, Zea mays subsp. mays
  misc_feature (1)..(357): Ceres Seq. ID no. 13498546
MEGYDREFWQFSDQLRLQTTAFSGLSLGDSIWSPATGAGGRRNNNTDLLAASASAADAGKHNGVGLSLNDGGPGLIGSGKLAFGGSKAGRYNNLPSEKAAPVYNHSGATINGGYARSDNAGLAAFNKMGSYFHNSNGNGGGGGEVKSYFNKSAGRAASNNSHGHAGGGKKGGGGGKHGKNEGNGGAVAATDKRFKTLPASEALPRGEAIGGYIFVCNNDTMDENLRRELFGLPSRYRDSVRAIRPGLPLFLYNYSTHQLPASSRPPASAGPTSTRRRGRTRSAPASRASLHRCEWQRGRSTIHWRRTPSAPSFTTTTGPSFGSSSPSPRPSPSSTSSLTRMTPEPSLPPPRPPVPIH

SEQ ID NO: 26093 - protein, 230 aa, Zea mays subsp. mays
  misc_feature (1)..(230): Ceres Seq. ID no. 13498547
MGSYFHNSNGNGGGGGEVKSYFNKSAGRAASNNSHGHAGGGKKGGGGGKHGKNEGNGGAVAATDKRFKTLPASEALPRGEAIGGYIFVCNNDTMDENLRRELFGLPSRYRDSVRAIRPGLPLFLYNYSTHQLPASSRPPASAGPTSTRRRGRTRSAPASRASLHRCEWQRGRSTIHWRRTPSAPSFTTTTGPSFGSSSPSPRPSPSSTSSLTRMTPEPSLPPPRPPVPIH

SEQ ID NO: 26094 - DNA, 1504 bp, Zea mays subsp. mays
  misc_feature (1)..(1504): Ceres Seq. ID no. 13498552
gcccacggagatgaagcgccggcgcctgccgcccgtcctcttcctcctcgcgctcgcgctcttgtccctcgccttccgccgccacctctccctccccctcggcgttccccagttcgccgccggtggcgtcagcggcgacgcgctcctccgcctcctcgcggccaccgacgtcggcggggaccagatcctggcggaggcggccgcgctgctggccaacgcgtcggtgtccaccttccccagcatcggcaaccaccaccgcctcctctacctccgcgtcccctaccgcatcaacgccacctccgcgccgcggcagcggacagtgtcccgtctccgcattcccttccacgacgtccccaacgacgacgccctcctcgccgccttccgcgcatccctccgcggcttcctcctcgcgcgccaccgccaccgccaccgccgaggcggcgacgacgtcgcgggcgccatggccgacctccccgccctcctcctcggccagcgccggcgccggcgcgccccgacntgcgccgtcgtcgggaacagcggcacccttctcggctccggccggggcgcgcagatcgacgcgcacgacctcgtgatccggctcaacaacgcccgcgtcgcggggttcgcggccgacgtcggcgccacgaccggcgtctcgttcgtgaactccaacatcctccaccactgcgccgtccgctccgccatcaccgccccgggctgcgcctgccacccctacgggcgcgcggtcccgctggccatgtacgtctgccagccggcgcacctcctggacgcgctcatctgcaacgccacggcgacgccggagtccccgttcccgctcctcgtcaccgacgcgcgcatcgacgcgctgtgcgcgcgcatcgccaagtactactcgatgcggcggttcgtggcggccacggggcagccggccagcaactggacccggaggcacgacgagaggtacttccactactcgtcgggcctgcaggcggtggtcatggcgctaggggcgtgcgatgaggtgagcgtgttcggtttcgggaaggcgccgggggccaagcaccattaccacaccaaccagaagaaggagctcgacctgcacgactacgaggccgagtaccagttctaccgcgacctccaggaacggccagaggcggtgccattcctcgacgaggcgccgggcttcaaggtgccaccggtgaagctctactggtgaccactgacgtcagtaacgtctggttggtagtaacttgtactgtaatatgtttgttgtacaattttttttatttttacattttcacctaaagaggtgtttaggcagagagagataagcgtgtagagaatgtagcgattgacagggagggaatgtgtttaaggatagggaaaatggagatcaaatttgtgattgatcaaatggatcaaattggttgtagttgttcatgtattctgtctgtgtagggcaactgtacacttcatcgattcttgttcatatatagacactttc

SEQ ID NO: 26095 - protein, 404 aa, Zea mays subsp. mays
  misc_feature (1)..(404): Ceres Seq. ID no. 13498553
  misc_feature (172)..(172): Xaa is any aa, unknown or other
PTEMKRRRLPPVLFLLALALLSLAFRRHLSLPLGVPQFAAGGVSGDALLRLLAATDVGGDQILAEAAALLANASVSTFPSIGNHHRLLYLRVPYRINATSAPRQRTVSRLRIPFHDVPNDDALLAAFRASLRGFLLARHRHRHRRGGDDVAGAMADLPALLLGQRRRRRAPXCAVVGNSGTLLGSGRGAQIDAHDLVIRLNNARVAGFAADVGATTGVSFVNSNILHHCAVRSAITAPGCACHPYGRAVPLAMYVCQPAHLLDALICNATATPESPFPLLVTDARIDALCARIAKYYSMRRFVAATGQPASNWTRRHDERYFHYSSGLQAVVMALGACDEVSVFGFGKAPGAKHHYHTNQKKELDLHDYEAEYQFYRDLQERPEAVPFLDEAPGFKVPPVKLYW

SEQ ID NO: 26096 - protein, 401 aa, Zea mays subsp. mays
  misc_feature (1)..(401): Ceres Seq. ID no. 13498554
  misc_feature (169)..(169): Xaa is any aa, unknown or other
MKRRRLPPVLFLLALALLSLAFRRHLSLPLGVPQFAAGGVSGDALLRLLAATDVGGDQILAEAAALLANASVSTFPSIGNHHRLLYLRVPYRINATSAPRQRTVSRLRIPFHDVPNDDALLAAFRASLRGFLLARHRHRHRRGGDDVAGAMADLPALLLGQRRRRRAPXCAVVGNSGTLLGSGRGAQIDAHDLVIRLNNARVAGFAADVGATTGVSFVNSNILHHCAVRSAITAPGCACHPYGRAVPLAMYVCQPAHLLDALICNATATPESPFPLLVTDARIDALCARIAKYYSMRRFVAATGQPASNWTRRHDERYFHYSSGLQAVVMALGACDEVSVFGFGKAPGAKHHYHTNQKKELDLHDYEAEYQFYRDLQERPEAVPFLDEAPGFKVPPVKLYW

SEQ ID NO: 26097 - protein, 339 aa, Zea mays subsp. mays
  misc_feature (1)..(339): Ceres Seq. ID no. 13498555
  misc_feature (173)..(173): Xaa is any aa, unknown or other
AHGDEAPAPAARPLPPRARALVPRLPPPPLPPPRRSPVRRRWRQRRRAPPPPRGHRRRRGPDPGGGGRAAGQRVGVHLPQHRQPPPPPLPPRPLPHQRHLRAAAADSVPSPHSLPRRPQRRRPPRRLPRIPPRLPPRAPPPPPPPRRRRRRGRHGRPPRPPPRPAPAPARPDXRRRREQRHPSRLRPGRADRRARPRDPAQQRPRRGVRGRRRRHDRRLVRELQHPPPLRRPLRHHRPGLRLPPLRARGPAGHVRLPAGAPPGRAHLQRHGDAGVPVPAPRHRRAHRRAVRAHRQVLLDAAVRGGHGAAGQQLDPEARREVLPLLVGPAGGGHGARGVR

SEQ ID NO: 26098 - DNA, 1515 bp, Zea mays subsp. mays
  misc_feature (1)..(1515): Ceres Seq. ID no. 13498565
ccattacctagaacatcctaatcgaaaaaagaagccaagggggaagcgaaaccgaaagcgagcagagtttggcaatggagctcccgtggggaatgctgctgccgctgctgctggtcctctccgtctcgtcctcgtcatcgtcgtcggctgctgccacgctcgccgtcagcgctccgcccccactgcttgttcctcctcctcgtcatgctcaagacgccgaaggcatgctcatcaacggcaacttcgagacggcgccgcggaggctgaacaagaccctcatcgtggggcgccactcgctgccggggtggacggtgcaggggcacgtggagtacgtctcgggcggtccccagcccgggggcatgttcttcgcggtgccgcacggcgtgcacgcgctgcgcctcggcagccgcgcgtcggcgtcgcagaacgtgacggtgcggccgggggcgctgtacgcgctcacgttcgcggcgacgcggacgtgcgcgcaggacgaggccctgcgcgtggcggtggcgccgtcgctctcggcgcccgccgacgtcgccgtgcgcacgctctacagcggcgcgtccgccgacacctgggcctggggcttccgcgcctcctcccccgtcgcgcaggtcacgttcgccaaccccggcgtgcaggaggaccccgcgtgcggcccgctgctggacgctgtcgccatcaaggagctgcccgcgccgtacccgaccaaagacaacctgatcaagaacgacggcttcgagatcggtccccaggtgctcaggaactcgacggtcggcgttctgctgccccccaagcagaaggacgcgacgtcgccgctgcccggctggatcatcgagtcgctcaaggcggtgcggttcatcgacgcggcccacttctctgtccccgcggggcagtacgcggtggagctggtggccgggcgggagagcgccatcgcgcaggtcatccgcaccgtgcccaaccgcgcctacaacctgtcgttcgccgtcggcgacgcccggaacggctgccacggctctatgctggtggaggcgttcgcgggcaacgtcacgcagaaggtgccgttcgattccacggggaaaggcgggtttaagacggcggcgttcaggttcgtggccagcggcgtccgcacccgcctcaccttctacagctcctactaccacaccaaggtcaccgacggcgtctcgctctgcggccccgtgctggaccaggtcaaggttgtgcctgtcaaggcgtagtgaaatgtagtgaaatgaatcgtgagagcgccgagtgacggtcgagtgacggtctgctctgctctgctctgctcgtcgtctgtagctgtgctcgtcgtgatttggcgtggtgggttgtgaaagtgtggacgaattatggacccttcggaatctgatcgtggtgtgctgtgcggtgcgatgtgctgtagcgaaatttggttactcatctcttgttctctccgcgtttggaatttgcgttttccaatccggtattgaatgtataataatt

SEQ ID NO: 26099 - protein, 390 aa, Zea mays subsp. mays
  misc_feature (1)..(390): Ceres Seq. ID no. 13498566
MELPWGMLLPLLLVLSVSSSSSSSAAATLAVSAPPPLLVPPPRHAQDAEGMLINGNFETAPRRLNKTLIVGRHSLPGWTVQGHVEYVSGGPQPGGMFFAVPHGVHALRLGSRASASQNVTVRPGALYALTFAATRTCAQDEALRVAVAPSLSAPADVAVRTLYSGASADTWAWGFRASSPVAQVTFANPGVQEDPACGPLLDAVAIKELPAPYPTKDNLIKNDGFEIGPQVLRNSTVGVLLPPKQKDATSPLPGWIIESLKAVRFIDAAHFSVPAGQYAVELVAGRESAIAQVIRTVPNRAYNLSFAVGDARNGCHGSMLVEAFAGNVTQKVPFDSTGKGGFKTAAFRFVASGVRTRLTFYSSYYHTKVTDGVSLCGPVLDQVKVVPVKA

SEQ ID NO: 26100 - protein, 384 aa, Zea mays subsp. mays
  misc_feature (1)..(384): Ceres Seq. ID no. 13498567
MLLPLLLVLSVSSSSSSSAAATLAVSAPPPLLVPPPRHAQDAEGMLINGNFETAPRRLNKTLIVGRHSLPGWTVQGHVEYVSGGPQPGGMFFAVPHGVHALRLGSRASASQNVTVRPGALYALTFAATRTCAQDEALRVAVAPSLSAPADVAVRTLYSGASADTWAWGFRASSPVAQVTFANPGVQEDPACGPLLDAVAIKELPAPYPTKDNLIKNDGFEIGPQVLRNSTVGVLLPPKQKDATSPLPGWIIESLKAVRFIDAAHFSVPAGQYAVELVAGRESAIAQVIRTVPNRAYNLSFAVGDARNGCHGSMLVEAFAGNVTQKVPFDSTGKGGFKTAAFRFVASGVRTRLTFYSSYYHTKVTDGVSLCGPVLDQVKVVPVKA

SEQ ID NO: 26101 - protein, 366 aa, Zea mays subsp. mays
  misc_feature (1)..(366): Ceres Seq. ID no. 13498568
HYLEHPNRKKKPRGKRNRKRAEFGNGAPVGNAAAAAAGPLRLVLVIVVGCCHARRQRSAPTACSSSSSCSRRRRHAHQRQLRDGAAEAEQDPHRGAPLAAGVDGAGARGVRLGRSPARGHVLRGAARRARAAPRQPRVGVAERDGAAGGAVRAHVRGDADVRAGRGPARGGGAVALGARRRRRAHALQRRVRRHLGLGLPRLLPRRAGHVRQPRRAGGPRVRPAAGRCRHQGAARAVPDQRQPDQERRLRDRSPGAQELDGRRSAAPQAEGRDVAAARLDHRVAQGGAVHRRGPLLCPRGAVRGGAGGRAGERHRAGHPHRAQPRLQPVVRRRRRPERLPRLYAGGGVRGQRHAEGAVRFHGERRV

SEQ ID NO: 26102 - DNA, 1349 bp, Zea mays subsp. mays
  misc_feature (1)..(1349): Ceres Seq. ID no. 13498573
attgaactgctctgggaccgccctgtaacatccaccaactcgaggaggaggaggaggaggaggaggaggaggagagatccccccaccgagcctcggtttccaagcgccagcagaagaagaagagacaggacacatggcggcaggtttcggcccgaggttcgccgccggcgatgctccggcgagacggtgtaacctggagcggttcctcgaggccaccacgcccgtcgttgcgtcctccagctgctcgtccaaggagaccgcgaacggttgggggcagcggcggtcagacgacgcagacggctcgtcgccgttcttcgctctgggcgacctctgggactcgttcaaggagtgcagcgcgtacggcaccgctgtgccccttgctctgaacggctgcagcgacggcgtcgttcagtactacgtcccctacctgtctgcaatccagctttacggagccctcagcaggcacatcggcccttcgaggacgggtgcagaggagagcgacagcgacgcggagcgcgagacgagctccagcacgaacacgttatcggcgcgggaggaggcgagcgagagcagcaccagcggcagcgaagcctccggcgacgagggcgagccgggaccggggagctggtgccaggagcggctcctcttcgagttcctcgagtccgagcctccctaccagcgcgagcctctggctgacaagatttgtagccttgcccagcggtttccggagctcaagactctcaggagctgcgacctgtctccggcaagctggatctccgtggcgtggtacggtggacgaactagatagatgtacccgatctaccggatcccgacggggccaacgctgcgcgacctggacgcctgcttcctcacctaccactccctgtccacgcagttcgcagcaggcgccagcagcaacggccccagaccggcgacggcagccaccgcgacggcgatgatgtggctcccgacgttcgcgatggcgtcgtacaaggtgaaggcggcggcgtggacgccgggctggcgcgaccggcaggtggccgcgtccctcgcgcaggccgccgacgcctggctcaggctcctgcgcgccgaccacccggaccaccgcttcttcgccgcccggcggcctcccaggagatggtgatcatttgagtgtatagagtactctctctctctggcaagtctgaaggtagttgtcctgaaaaaagaaacggctgaggtagttagggttcactagcggaaccggagtgataaagtatgttcatcctgtagtttcaatgttttttccttttttttgtatccgccatgttctcaggaaaaaaatgtatcagaaaacgtataataggtgt

SEQ ID NO: 26103 - protein, 224 aa, Zea mays subsp. mays
  misc_feature (1)..(224): Ceres Seq. ID no. 13498574
MAAGFGPRFAAGDAPARRCNLERFLEATTPVVASSSCSSKETANGWGQRRSDDADGSSPFFALGDLWDSFKECSAYGTAVPLALNGCSDGVVQYYVPYLSAIQLYGALSRHIGPSRTGAEESDSDAERETSSSTNTLSAREEASESSTSGSEASGDEGEPGPGSWCQERLLFEFLESEPPYQREPLADKICSLAQRFPELKTLRSCDLSPASWISVAWYGGRTR

SEQ ID NO: 26104 - DNA, 1193 bp, Zea mays subsp. mays
  misc_feature (1)..(1193): Ceres Seq. ID no. 13498586
gctttacaactccccaccccatcccatccacacacacttcacccagcgcggcggccgccggccgccggcaatggaggccgtggcgcgcagcggcactacctttggcggttcgtgcggagacagagtggtacaacgaggttgtcctcagcgccgtggcgccaggcgactggtggcgcggcctgccgcacccggtgcagtcatggatgcgcaactgcgtcggcggttacctcctctatttcatctctggtttcctctggtgcttcgtcatctactactggaagcgccacgcctacatccccaaagatgccatccccacaaatgaagctatgaagaagcaaatagttgtagcatcgaaggctatgcctttttactgcgctcttccaactttatctgaatatatgattgagagcggatggactcggtgctacttcaatatcagcgaaattggtttttctatgtacctctgttatatggctatgtatctcatctttgtggagtttggaatttactggatgcacagggagttgcatgacataaaaccattatacaaatatctgcatgcaacccaccatatttacaacaaggagaataccttgtctccatttgctggacttgcatttcatccactggatggtattctgcaagcaataccgcatgtgttcgcgctcttcctctttccaacacacttcaggacacatattgcactcttgttcctagaggctgtgtggacaacaaacatccacgactgcattcatggcaagatatggccagtcatgggcgctggatatcacaccattcaccatacgacttaccgccacaactatggccactacaccatctggatggactggatgtttggtacgctcaatgagccagaagatatcctcaagaaggcttgagtttctcggagctgtggtatccctatggtgctggtgctggaactgctcgatctgttcccagtgtttctaatccgttgagcctgttcagcactgtctgtttatgtaggcatcagtgtgttaattagtttgctaggttcatatggctttgtgcttattctgtaatttagtgatgtttgtctcatgacgcaacggagttcaggacgaataaaactttgctagacacattctggattccagttgcttgtacaatgttgcaactcaactgtcaatataggatgtaaaacggattccttc

SEQ ID NO: 26105 - protein, 298 aa, Zea mays subsp. mays
  misc_feature (1)..(298): Ceres Seq. ID no. 13498587
FTTPHPIPSTHTSPSAAAAGRRQWRPWRAAALPLAVRAETEWYNEVVLSAVAPGDWWRGLPHPVQSWMRNCVGGYLLYFISGFLWCFVIYYWKRHAYIPKDAIPTNEAMKKQIVVASKAMPFYCALPTLSEYMIESGWTRCYFNISEIGFSMYLCYMAMYLIFVEFGIYWMHRELHDIKPLYKYLHATHHIYNKENTLSPFAGLAFHPLDGILQAIPHVFALFLFPTHFRTHIALLFLEAVWTTNIHDCIHGKIWPVMGAGYHTIHHTTYRHNYGHYTIWMDWMFGTLNEPEDILKKA

SEQ ID NO: 26106 - protein, 231 aa, Zea mays subsp. mays
  misc_feature (1)..(231): Ceres Seq. ID no. 13498588
MRNCVGGYLLYFISGFLWCFVIYYWKRHAYIPKDAIPTNEAMKKQIVVASKAMPFYCALPTLSEYMIESGWTRCYFNISEIGFSMYLCYMAMYLIFVEFGIYWMHRELHDIKPLYKYLHATHHIYNKENTLSPFAGLAFHPLDGILQAIPHVFALFLFPTHFRTHIALLFLEAVWTTNIHDCIHGKIWPVMGAGYHTIHHTTYRHNYGHYTIWMDWMFGTLNEPEDILKKA

SEQ ID NO: 26107 - protein, 190 aa, Zea mays subsp. mays
  misc_feature (1)..(190): Ceres Seq. ID no. 13498589
MKKQIVVASKAMPFYCALPTLSEYMIESGWTRCYFNISEIGFSMYLCYMAMYLIFVEFGIYWMHRELHDIKPLYKYLHATHHIYNKENTLSPFAGLAFHPLDGILQAIPHVFALFLFPTHFRTHIALLFLEAVWTTNIHDCIHGKIWPVMGAGYHTIHHTTYRHNYGHYTIWMDWMFGTLNEPEDILKKA

SEQ ID NO: 26108 - DNA, 1767 bp, Zea mays subsp. mays
  misc_feature (1)..(1767): Ceres Seq. ID no. 13498593
acaagcacagcagcagcagcagcagcagcaggcaagaagaatccaaagcggaagggtctctccccccatctctgttccaccaggtgcggcgggcggcgatgggggcgcggaggcggctgcaggcagacgcgccgccggggcatcgccacaggcagggcgcgccggcgccggactcggagcgccgggtacctcaacgggtggctgtcgcagccgacgcccgtcttcggcctccgcctctgggtgctcatcggcatcgccgtcggcgccgccatcgtgctcgtgctcctcctcatcttcgtctgcctctcccgccgccgccgccgccgccgcctcgccgccaacccctactaccccgccgacaccaagctgctcaagaagcacctgcagcagcaggccacgcccacgcccacgcccaccaaggacatccaggagatcgtccgccgccagcaggagcccgcggtgcagctcgccaaggccgtgccgcagccgcagccgcagccgcagactcctccgccgccgccgcctccgcagcacaggccaccggcgcggaagacgcccggcagcggcgtgtcggccacgactagcggcgggagcgagcgggacggcgccacgcctaggagcaccggcagcggcgcggggctgccggaggtctcgcacctcgggtggggccactggttcacgctccgcgagctggaggaggccaccggcgggctcgccgaggagaatgtgatcggcgagggcgggtacgggatcgtgtacaagggcaccttgcacgactccactttggtcgccgtcaagaacctgctcaataatagggggcaggccgagaaggagttcaaggtggaggtggaagcaatcggtcgtgttcggcacaaaaatctcgtcaggttgctcggctactgcgtagagggtgcttacaggatgctcgtgtatgagtatgtggacaatggtaatcttgaccagtggcttcatggtgatgttggcgaagtgagccccactgacatgggacatcaggatgaacattatgcttgccacagctaaagggctggcctacctccacgaggggctggaaccgaaggtggtccaccgcgacatcaaggctagcaacatccttcttgaccagcagtggaacgccaaagtatcggatttcgggctcgcaaagctgttgtgctcggagagaagctacgttacgacccgtgtcatgggaaccttcggttacgtggcgcctgagtacgccagcaccggcatgctgaacgagaggagcgatgtgtatagcttcggcgtgctgataatggagatcatcaccggcagatgtcctgtggattacacaagggcggctggagaggtgcagctggtggagtggctcaagaacatggtggccgagaggaaagcggaggaggtagtggacagtaagatggccgagaggcctcctcccaagacgctgaagcgggcgctcctggtggcgctccgctgcgtggaccctgacgcgaacaagcggcctaagatggggcatgtgatccacatgctcgaaatggacgatctccagttccgagacgataagaggcccggggccgggagagatggtcgtcgtccccagggtccggataggtacagctccaagctaggtggaggaagggagcctcagcaagcgcgagcaccagcgtcggtacagatgagatgattgtcattagagagtagcgatattaaccatgttatttttttcccgtcagtaaatacattctttcccaactcgttccatcgattctc

SEQ ID NO: 26109 - protein, 346 aa, Zea mays subsp. mays
  misc_feature (1)..(346): Ceres Seq. ID no. 13498594
TSTAAAAAAAGKKNPKRKGLSPHLCSTRCGGRRWGRGGGCRQTRRRGIATGRARRRRTRSAGYLNGWLSQPTPVFGLRLWVLIGIAVGAAIVLVLLLIFVCLSRRRRRRRLAANPYYPADTKLLKKHLQQQATPTPTPTKDIQEIVRRQQEPAVQLAKAVPQPQPQPQTPPPPPPPQHRPPARKTPGSGVSATTSGGSERDGATPRSTGSGAGLPEVSHLGWGHWFTLRELEEATGGLAEENVIGEGGYGIVYKGTLHDSTLVAVKNLLNNRGQAEKEFKVEVEAIGRVRHKNLVRLLGYCVEGAYRMLVYEYVDNGNLDQWLHGDVGEVSPTDMGHQDEHYACHS

SEQ ID NO: 26110 - protein, 242 aa, Zea mays subsp. mays
  misc_feature (1)..(242): Ceres Seq. ID no. 13498595
QAQQQQQQQQARRIQSGRVSPPISVPPGAAGGDGGAEAAAGRRAAGASPQAGRAGAGLGAPGTSTGGCRSRRPSSASASGCSSASPSAPPSCSCSSSSSSASPAAAAAAASPPTPTTPPTPSCSRSTCSSRPRPRPRPPRTSRRSSAASRSPRCSSPRPCRSRSRSRRLLRRRRLRSTGHRRGRRPAAACRPRLAAGASGTAPRLGAPAAARGCRRSRTSGGATGSRSASWRRPPAGSPRRM

SEQ ID NO: 26111 - protein, 221 aa, Zea mays subsp. mays
  misc_feature (1)..(221): Ceres Seq. ID no. 13498596
MNIMLATAKGLAYLHEGLEPKVVHRDIKASNILLDQQWNAKVSDFGLAKLLCSERSYVTTRVMGTFGYVAPEYASTGMLNERSDVYSFGVLIMEIITGRCPVDYTRAAGEVQLVEWLKNMVAERKAEEVVDSKMAERPPPKTLKRALLVALRCVDPDANKRPKMGHVIHMLEMDDLQFRDDKRPGAGRDGRRPQGPDRYSSKLGGGREPQQARAPASVQMR

SEQ ID NO: 26112 - DNA, 1706 bp, Zea mays subsp. mays
  misc_feature (1)..(1706): Ceres Seq. ID no. 13498597
agccagacgcagaccccctgcctgttgccctgtcgcagtctagcatcaggcatccatcggcgagagcgagagcgagagcgtttcgcagcaagcctacctcacctcaccttgcctgcctgtctgtctgtctccagagctgctcttgtccggagacggagccgactgaacatggccggagacccgggggacgcgccggaggtgggaggcggcggcatacgctccgtgctcaccacggcctcgctcgtcgctccctccggggacgaggttcagtttcgggagatcgacggcaagatcatcggcctctacttcgcggcaaactggtatccgaaatgcgaggctttcaccccggtgctggccgcggcgtacgagcagctcaaggagcgcggcgccggcttcgaggtcgtgctggtgtcgtgcgacgaggaccggccgtcgttcgagcggttccacggaaccatgccgtggccagcggtgcctttcggcgacctcagctgcaagaagcgcctcagcgagaggttccaggtggagggcatcccgcgcctggtggtgctcgctccggacggcggcgcggtggtacacccggacgccgccgacctcgtgcaccgctacggcgagagggcgttcccgttcacggccgcgagggtggcggagctggaggcggatgaccagcgcaagtacgcgtcccagacgctggagaagctcttctccgtcagcgggaaagagtacgtgatgaacagtggtaataatgaaaaggttccggtctcgagcctggtggggaagacggtggggctctacttctcggctaaccattgcgcgccgtgtatcaagttcacgacgaagctggcggccatctacagcagcctcaggggcaaggcggaggacttcgagatcgtgtacgtccccatggacagggaggaggacgggtacctgcgctcctgcggcgacatgccgtggctggcgctcccctacgacggcgcgccgtcgcgcgcgctggcgaggtacttcgacgtgcgggagatcccgacgctggtggtggtcgggcccgacggcaggacggtgacgcgggacggccggaacctggtgaacctctacttcgacatggccttcccgttcacggacgcgcagatcaggctgctgcaggaggcggaggacgaggcggccaaggagtacccgcggtcgctgcgccaccggggccaccgccacgagctcagcatcgtgtcggagaagtccgggggagggccctacatctgctgcgagtgcgaggagcagggactcggctgggcgtaccagtgcatcgcctgcggctacgagatacacctcaggtgcggccagaatgcggagggcggcagcgcaggaactgcttagctagctaggcgacggcagcataacagcatcactggagtactggtgtctacctactagactgctgcatgcgtattggacttgtgcatggtctgtgtttgatcccaacaaacgtcagcttgctaagtctgatgctaaagtagtcaaatagatagatgagaaatgcatggccttccttgtaaggcttagtaggtggttagatgagtgaacaacaaaatgaagctgcagcaatcaatctactgtggcaggtgttatgcaaatcttgctgcactgcccaaccaaactactgcattttccagtgcgccttcttcgagcctaatttgacaccactgaaattaggcttt

SEQ ID NO: 26113 - protein, 454 aa, Zea mays subsp. mays
  misc_feature (1)..(454): Ceres Seq. ID no. 13498598
SQTQTPCLLPCRSLASGIHRRERERERFAASLPHLTLPACLSVSRAALVRRRSRLNMAGDPGDAPEVGGGGIRSVLTTASLVAPSGDEVQFREIDGKIIGLYFAANWYPKCEAFTPVLAAAYEQLKERGAGFEVVLVSCDEDRPSFERFHGTMPWPAVPFGDLSCKKRLSERFQVEGIPRLVVLAPDGGAVVHPDAADLVHRYGERAFPFTAARVAELEADDQRKYASQTLEKLFSVSGKEYVMNSGNNEKVPVSSLVGKTVGLYFSANHCAPCIKFTTKLAAIYSSLRGKAEDFEIVYVPMDREEDGYLRSCGDMPWLALPYDGAPSRALARYFDVREIPTLVVVGPDGRTVTRDGRNLVNLYFDMAFPFTDAQIRLLQEAEDEAAKEYPRSLRHRGHRHELSIVSEKSGGGPYICCECEEQGLGWAYQCIACGYEIHLRCGQNAEGGSAGTA

SEQ ID NO: 26114 - protein, 398 aa, Zea mays subsp. mays
  misc_feature (1)..(398): Ceres Seq. ID no. 13498599
MAGDPGDAPEVGGGGIRSVLTTASLVAPSGDEVQFREIDGKIIGLYFAANWYPKCEAFTPVLAAAYEQLKERGAGFEVVLVSCDEDRPSFERFHGTMPWPAVPFGDLSCKKRLSERFQVEGIPRLVVLAPDGGAVVHPDAADLVHRYGERAFPFTAARVAELEADDQRKYASQTLEKLFSVSGKEYVMNSGNNEKVPVSSLVGKTVGLYFSANHCAPCIKFTTKLAAIYSSLRGKAEDFEIVYVPMDREEDGYLRSCGDMPWLALPYDGAPSRALARYFDVREIPTLVVVGPDGRTVTRDGRNLVNLYFDMAFPFTDAQIRLLQEAEDEAAKEYPRSLRHRGHRHELSIVSEKSGGGPYICCECEEQGLGWAYQCIACGYEIHLRCGQNAEGGSAGTA

SEQ ID NO: 26115 - protein, 302 aa, Zea mays subsp. mays
  misc_feature (1)..(302): Ceres Seq. ID no. 13498600
MPWPAVPFGDLSCKKRLSERFQVEGIPRLVVLAPDGGAVVHPDAADLVHRYGERAFPFTAARVAELEADDQRKYASQTLEKLFSVSGKEYVMNSGNNEKVPVSSLVGKTVGLYFSANHCAPCIKFTTKLAAIYSSLRGKAEDFEIVYVPMDREEDGYLRSCGDMPWLALPYDGAPSRALARYFDVREIPTLVVVGPDGRTVTRDGRNLVNLYFDMAFPFTDAQIRLLQEAEDEAAKEYPRSLRHRGHRHELSIVSEKSGGGPYICCECEEQGLGWAYQCIACGYEIHLRCGQNAEGGSAGTA

SEQ ID NO: 26116 - DNA, 1189 bp, Zea mays subsp. mays
  misc_feature (1)..(1189): Ceres Seq. ID no. 13498621
attatcgaccagcaccctcatctatatccatcaacatcgatccatccatccatcatggcggcggagcagcagcatcagctggatctgccggggttccggttccacccgacggaggaggagctgctggagttctacctgaagcaggcggcgcgcgggaggaagctcaagttcgacatcatccccacggtgcacctgtaccggcacgacccctgggagctgccgagcctggcgcgcgtcgttggcgagcgcgagtggtacttcttcgtgccccgcgacggcggcgggcgggcggccaagcagcagcccggctccggcggccggcctagccgcaccacggagcgcgggttctggaaggccacggggtcggaccgcgccgtgcggtgcgccgccgaccccaagcgcctcatcgggctcaagaagacgctcgtctactacgagggccgcgcgccgcggggcaccaagacggactgggtcatgaacgagtaccgcctccccgacgctgccgacgctagcagcgacgcgcgcgtgccgcaggtggacgtggtgctgtgcaaggtctaccgcaaggccgtgtcgctcaaggagctggagcagcgggtggccatggaggagctcgcgcgcgccaccgccacgccgtccgcgtcccacagcaccggctcccccgccgactccatgtcgtcgtcggagatcgtgatggtgcccgtgggcggcgtctcgctctcaccgtcagctgcgatgagcatgaagagagaggaggcggcgaagaatcagcagcagcaggaccccttcctgacgcagctgcggagcccacggatggagagctggtggtctgcctactacgccagcgtcctcaacttctaaccaaaatccacacaatccaacagctttatatgtaaagcgaaggcccacgctcacagtcgtcggcccaactgatgcccgtgcgccgcgcgctgggccgcacggcccaagagctaccaagcgcgggcacgcaccgcggcagcccaaggatctctccaccttatctccctgctcgggactcgggacctttacctatcttcttcgttcttccatgggagcgagctagagagagggcgccatggatcagcagcttctcgtggatgactccaatcatattaacgatatactaacttataatgtgccgatcgttgaacaccgtttattttgattc

SEQ ID NO: 26117 - protein, 286 aa, Zea mays subsp. mays
  misc_feature (1)..(286): Ceres Seq. ID no. 13498622
IIDQHPHLYPSTSIHPSIMAAEQQHQLDLPGFRFHPTEEELLEFYLKQAARGRKLKFDIIPTVHLYRHDPWELPSLARVVGEREWYFFVPRDGGGRAAKQQPGSGGRPSRTTERGFWKATGSDRAVRCAADPKRLIGLKKTLVYYEGRAPRGTKTDWVMNEYRLPDAADASSDARVPQVDVVLCKVYRKAVSLKELEQRVAMEELARATATPSASHSTGSPADSMSSSEIVMVPVGGVSLSPSAAMSMKREEAAKNQQQQDPFLTQLRSPRMESWWSAYYASVLNF

SEQ ID NO: 26118 - protein, 268 aa, Zea mays subsp. mays
  misc_feature (1)..(268): Ceres Seq. ID no. 13498623
MAAEQQHQLDLPGFRFHPTEEELLEFYLKQAARGRKLKFDIIPTVHLYRHDPWELPSLARVVGEREWYFFVPRDGGGRAAKQQPGSGGRPSRTTERGFWKATGSDRAVRCAADPKRLIGLKKTLVYYEGRAPRGTKTDWVMNEYRLPDAADASSDARVPQVDVVLCKVYRKAVSLKELEQRVAMEELARATATPSASHSTGSPADSMSSSEIVMVPVGGVSLSPSAAMSMKREEAAKNQQQQDPFLTQLRSPRMESWWSAYYASVLNF

SEQ ID NO: 26119 - DNA, 1487 bp, Zea mays subsp. mays
  misc_feature (1)..(1487): Ceres Seq. ID no. 13498628
atcgtaaaacaactcgagtatccatctccaccttccctttctcctcctctctcccggattcccggcgacctcccttttccttccctcccgagtngcggccgcccgcccgcctccgtgatcgcaattcgcacctgcacgcgcggccccgacccctagtcctccccacccatggcgcggcgatccgcccctctcctgcgccgcctcgtctccgcctcctccccgcccgcgctgcagtccctcccggaccacgtcggcgtcctcgcgcggcgcacggtgacctacatgccccggcccggggacggcgcaccgcgcgccgtcacgctcatcccaggcgacggcatcggccccctcgtcacgggcgccgtgcggcaggtcatggaggcgatgcacgcgcccgtctacttcgagacctacgacgtccacggagacatgcccacgggtcccgccagccgtcatcgaatccatccgccgcaacaaggtctgcatcaagggcgggctcgccacgcccgtcggcggcggggtctcctccctcaacatgcagctgcgcaaggagctcgatctctacgcctcgctcgtccagtgctccaacctccccggtctgcccaccaggcacgagggtgtcgacatcgtcgtaatcagggagaacaccgagggcgagtactcggggctcgagcacgaggtcgtacccggggtcgttgagagcctcaaggtgatcacaaagttttgctctgagaggattgccaaatatgcattcgagtatgcttaccttaacaaccgaaagaaagtcactgcagtgcataaagcaaacattatgaagcttgccgatggtttgttcttggagtcttgccgtgaagttgcttcaaaatatcctggtattcagtacaatgaaatgattgttgacaactgctctatgcaacttgtttcaaagcctgaacaatttgatgtcatggttacgcctaatctttatggcaatttggtggctaacacagctgcaggtattgttggagggacgggcatcatgcctggaggcaatgtgggtcaggactacgccatctttgagcaaggcgcttctgcaggaaatgttgggaatgagaaccttgtggagcagaagaaagcaaaccctgtcgcgctgcttctgtcatctgctatgatgttgaggcacttgcagttcccgtcatttgcggaccggctcgagacggcagtgaagcgcgtcgttgctgaaggcacgtacagaacaaaggatctgggcggtagcagcaccacccaggaagttaccgatgctgtggttgccaatctggattagattccaggtgtacacggctaaaaaaaggctaattctttggggtgactagttgtctagtcttgactcctgagtgttatttatcttcttacatagattttagattgcttcacatcttcaagagggattacaagccacaaggtatcccttgtttcagattttctttagaaataatattgaggaaccc

SEQ ID NO: 26120 - protein, 255 aa, Zea mays subsp. mays
  misc_feature (1)..(255): Ceres Seq. ID no. 13498629
MQLRKELDLYASLVQCSNLPGLPTRHEGVDIVVIRENTEGEYSGLEHEVVPGVVESLKVITKFCSERIAKYAFEYAYLNNRKKVTAVHKANIMKLADGLFLESCREVASKYPGIQYNEMIVDNCSMQLVSKPEQFDVMVTPNLYGNLVANTAAGIVGGTGIMPGGNVGQDYAIFEQGASAGNVGNENLVEQKKANPVALLLSSAMMLRHLQFPSFADRLETAVKRVVAEGTYRTKDLGGSSTTQEVTDAVVANLD

SEQ ID NO: 26121 - protein, 210 aa, Zea mays subsp. mays
  misc_feature (1)..(210): Ceres Seq. ID no. 13498630
  misc_feature (31)..(31): Xaa is any aa, unknown or other
RKTTRVSISTFPFSSSLPDSRRPPFSFPPEXRPPARLRDRNSHLHARPRPLVLPTHGAAIRPSPAPPRLRLLPARAAVPPGPRRRPRAAHGDLHAPARGRRTARRHAHPRRRHRPPRHGRRAAGHGGDARARLLRDLRRPRRHAHGSRQPSSNPSAATRSASRAGSPRPSAAGSPPSTCSCARSSISTPRSSSAPTSPVCPPGTRVSTSS

SEQ ID NO: 26122 - protein, 176 aa, Zea mays subsp. mays
  misc_feature (1)..(176): Ceres Seq. ID no. 13498631
MARRSAPLLRRLVSASSPPALQSLPDHVGVLARRTVTYMPRPGDGAPRAVTLIPGDGIGPLVTGAVRQVMEAMHAPVYFETYDVHGDMPTGPASRHRIHPPQQGLHQGRARHARRRRGLLPQHAAAQGARSLRLARPVLQPPRSAHQARGCRHRRNQGEHRGRVLGARARGRTRGR

SEQ ID NO: 26123 - DNA, 1332 bp, Zea mays subsp. mays
  misc_feature (1)..(1332): Ceres Seq. ID no. 13498636
actacgtagctgcctgtgcctctttctggctccctgctgtctgcctggccggtgctcacagacacgcgcaagatggccggacgcacggaggaggctcgcaggagcggggagagggagacggtgtgcgtgacgggcgccggcgggtacatcgcctcatggctcgtcaagctcctcctctcccgcggctacgccgtgcacgccaccgtccgtgacccgcgtgatcccaagaacgcccacctggggcagctggaatgggccgcggagaatctccggctgttcaaggccgacgtgctcgacagcgacgcgctggctgccgcagtctccgggtgccggggggtcttccatgttgcctgtccggtgcccacggatagggttcttgatccggagtcagaagtactggctcctgctgtgcaaggtaccttaaacattcttcaggcttgctcagctaataatattcagaaggttgttgtggtttcgtctaccgccgctgttcatttcgacccaaattggcctccacatagacctaaagacgaggattgctggtcggacataaacttttgcaaaaagaacgaggactggtatatggttgccaaggttattgctgaaaagacagccctagaatacggagagagaaatggattaaatgttgttacagtttgccctactatggctttaggaccgctcttgcggcctatgctcaatgtcagccatgaattcctcatgtacattattaaaggaggtcctactatgatgaagaacattccatggcacatagttgatgtccgagatgtggttgatgctttgcttatggtatacaagaaagaggaatcgacagggagatacatctgtgcaccaaattgcatcagtgcaaaagatctggtgaacatgctgaagagggattatcctaattacaattatgtaaactgcgacaatgatatggtgcttaactctatagttacaccacttatgtcggagaaactgaagaatttgggctggaaaccaatgaagacactagaggaaacattattggatagtgttgaatgctataagaagatggggcttctaaaagatgctgagggatgcccttgtcgtcttcctcacctttttcatatggctatagaaaaatgaagaatactcaccattgcttcttgtgttacctaattactctttgaacattgttgggtatgtgttctaatcacacaccaataatgttgacattcaatgggttgtggttgatttgaaataaatgtttggtttcttatgtaatctatatggaacaaagtgcacctttcactttttttgtatggaagttgtcatgcatcttttttctcg

SEQ ID NO: 26124 - protein, 351 aa, Zea mays subsp. mays
  misc_feature (1)..(351): Ceres Seq. ID no. 13498637
MAGRTEEARRSGERETVCVTGAGGYIASWLVKLLLSRGYAVHATVRDPRDPKNAHLGQLEWAAENLRLFKADVLDSDALAAAVSGCRGVFHVACPVPTDRVLDPESEVLAPAVQGTLNILQACSANNIQKVVVVSSTAAVHFDPNWPPHRPKDEDCWSDINFCKKNEDWYMVAKVIAEKTALEYGERNGLNVVTVCPTMALGPLLRPMLNVSHEFLMYIIKGGPTMMKNIPWHIVDVRDVVDALLMVYKKEESTGRYICAPNCISAKDLVNMLKRDYPNYNYVNCDNDMVLNSIVTPLMSEKLKNLGWKPMKTLEETLLDSVECYKKMGLLKDAEGCPCRLPHLFHMAIEK

SEQ ID NO: 26125 - protein, 181 aa, Zea mays subsp. mays
  misc_feature (1)..(181): Ceres Seq. ID no. 13498638
MVAKVIAEKTALEYGERNGLNVVTVCPTMALGPLLRPMLNVSHEFLMYIIKGGPTMMKNIPWHIVDVRDVVDALLMVYKKEESTGRYICAPNCISAKDLVNMLKRDYPNYNYVNCDNDMVLNSIVTPLMSEKLKNLGWKPMKTLEETLLDSVECYKKMGLLKDAEGCPCRLPHLFHMAIEK

SEQ ID NO: 26126 - DNA, 1406 bp, Zea mays subsp. mays
  misc_feature (1)..(1406): Ceres Seq. ID no. 13498652
aaatcggacacacggcaacagcacacactggacacgaatcgctagtagacacagcgcacagcggcagccggcaagcaagaacccaaacattccagtgcccttaccgttgcatgcagccatgacgaggatgagcttggcggtgtcggcgacgttctttgtgctcgcggtcgcctcggcggcgcagccggcgccgagcatgcccccgccggcggtggccgtgaacagctcccggctggagaaggcgtacgtggcgctgcaggcgctgaggcgcgccatcacggacgaccccaagaagctgacggagaactggtgcgggcccgacgtgtgcaactacttcggcgtgtactgcgcgccggcgcccgacgacccctgccagcgcaccgtggcctccgtggacctcaaccacggcgacctcgccgggacgctccccgaggagctgggcctgctgtccgacctcgccgtcttccacctcaactccaaccgcttctgcggctccctccccgagtcgctccggtccctgcacctcctccacgagatcgatgtcagcaacaacaggctgtccgggcccttcccgtcgcagctcctctgcctccccagtgtccagtacgtcgacatcaggtttaacaacttctgcggcgaggtgccggcggccatcttcgacaagaagatcgacgcgcttttcatcaacaacaaccacttcgagttcacgctgccggccagcttcaccaactcgacggcgtcggtgatcgtgctggcgaaccttccgcgggtgagcggctgcctgccgagcagcatcggcgacatggccggcacgctcaacgagctcatcctcctcaacagcggcatctcctcctgcatcccgccggagatcggcaagctggacaagctcaccgtgctcgacctcagcttcaacagcatcgccggcgcgctgccggacacgatcggcggcatgcgggcgctggagcagctggacgtcgcgcacaaccggctcaccggcgagatccccgagagcatctgcgagctgccgcacctcaagaacttcacctactcgtacaacttcttctgcggcgagccacgccggtgcctcgaggtgccgcgcgtcgacgaccggcagaactgcatcgctggccgccccgaccagcggccaggcgaggagtgcgtctcattcctacaccaaccgcaagtccactgcgacgcccacgggtgcatcgcgccaccacctccagcggtgcatgctcctccgccgcctgtatactgaattactgatcagtggtaacttgtaaatgtttcctgctcctgcctcgtggtgtgaaaacttggagggtaaacgcatacacatggtatatactgtaatttttattcatcagcagaagagagtaataatggattcatagatttacattacg

SEQ ID NO: 26127 - protein, 418 aa, Zea mays subsp. mays
  misc_feature (1)..(418): Ceres Seq. ID no. 13498653
NRTHGNSTHWTRIASRHSAQRQPASKNPNIPVPLPLHAAMTRMSLAVSATFFVLAVASAAQPAPSMPPPAVAVNSSRLEKAYVALQALRRAITDDPKKLTENWCGPDVCNYFGVYCAPAPDDPCQRTVASVDLNHGDLAGTLPEELGLLSDLAVFHLNSNRFCGSLPESLRSLHLLHEIDVSNNRLSGPFPSQLLCLPSVQYVDIRFNNFCGEVPAAIFDKKIDALFINNNHFEFTLPASFTNSTASVIVLANLPRVSGCLPSSIGDMAGTLNELILLNSGISSCIPPEIGKLDKLTVLDLSFNSIAGALPDTIGGMRALEQLDVAHNRLTGEIPESICELPHLKNFTYSYNFFCGEPRRCLEVPRVDDRQNCIAGRPDQRPGEECVSFLHQPQVHCDAHGCIAPPPPAVHAPPPPVY

SEQ ID NO: 26128 - protein, 379 aa, Zea mays subsp. mays
  misc_feature (1)..(379): Ceres Seq. ID no. 13498654
MTRMSLAVSATFFVLAVASAAQPAPSMPPPAVAVNSSRLEKAYVALQALRRAITDDPKKLTENWCGPDVCNYFGVYCAPAPDDPCQRTVASVDLNHGDLAGTLPEELGLLSDLAVFHLNSNRFCGSLPESLRSLHLLHEIDVSNNRLSGPFPSQLLCLPSVQYVDIRFNNFCGEVPAAIFDKKIDALFINNNHFEFTLPASFTNSTASVIVLANLPRVSGCLPSSIGDMAGTLNELILLNSGISSCIPPEIGKLDKLTVLDLSFNSIAGALPDTIGGMRALEQLDVAHNRLTGEIPESICELPHLKNFTYSYNFFCGEPRRCLEVPRVDDRQNCIAGRPDQRPGEECVSFLHQPQVHCDAHGCIAPPPPAVHAPPPPVY

SEQ ID NO: 26129 - protein, 376 aa, Zea mays subsp. mays
  misc_feature (1)..(376): Ceres Seq. ID no. 13498655
MSLAVSATFFVLAVASAAQPAPSMPPPAVAVNSSRLEKAYVALQALRRAITDDPKKLTENWCGPDVCNYFGVYCAPAPDDPCQRTVASVDLNHGDLAGTLPEELGLLSDLAVFHLNSNRFCGSLPESLRSLHLLHEIDVSNNRLSGPFPSQLLCLPSVQYVDIRFNNFCGEVPAAIFDKKIDALFINNNHFEFTLPASFTNSTASVIVLANLPRVSGCLPSSIGDMAGTLNELILLNSGISSCIPPEIGKLDKLTVLDLSFNSIAGALPDTIGGMRALEQLDVAHNRLTGEIPESICELPHLKNFTYSYNFFCGEPRRCLEVPRVDDRQNCIAGRPDQRPGEECVSFLHQPQVHCDAHGCIAPPPPAVHAPPPPVY

SEQ ID NO: 26130 - DNA, 1398 bp, Zea mays subsp. mays
  misc_feature (1)..(1398): Ceres Seq. ID no. 13498659
actttcgcccatttcatttcaaaccaaaaccctctctccccttgccttccacggttccaccacaccccggatcaaatcgccacagaaaattcccagaaaaataacaagcacttgttcatcatcaaagtaaacgcggcagaaccctagcgagccgttcctccaacgactcacctcccacccactcacccaccccatggcgaccaacccctccaacggcgccggcgccgacgtccctgcaagccccggcggcggtgcggctctcggttgcggcgcaggcggccgcgatccagccctcgtccccgcgcttcttcttctcctcgcttgccgggaccaacccggcctccccgcaccgtcgcatcgccatcgccgttgatctctccgacgagtccgccttcgcagtcaagtgggccgtgcagaactacgtccgccccggggacgccgtcgtgctgctccacgtgcgccccacctccgtcctctacggcgccgactgggggttccatcccggtctccgtcgctgacgaggacgacgctgccgaggacgccgccgccgccgccgagggcgatccctcggaggaggagctgcagaagaaacgggaggaggactacgacgccttcacctccaccaaggcgcaggacctcgcgcaaccgctggtcgacgcccagatccccttcaagatccacgtcgtcaaggaccacgacatgaaggagcgcctctgcctcgaggctgagcgccttggcctctccgccatgatcatggggagccgcggtttcggggcctcccggaaaggcagcaaggggcggcttgggagtgttagtgattactgcgtacaccactgtgtatgccctgttgtggttgttcgctaccctgatgatgctgcagatgcccggtggagatgcatcaggggtgacagatgagttgcacactgtaccagaggacgaacctgtttatcacgatgcacctgaggtgcagaaagaaaactgaggcaacggccacatgcagctgaagaacgaaggaaaacacgaggcttatagtgaggcaatcctgtgtatctggaagatgggaccggatgtttatctttgcttctatatatcaactgcgtatcatgatcagctgtctgcttcccgttgagtttcatatcggcgtcgtagatcatctgagttttttgttggtttgcttgtgagatgtagagtactcttcccgtgggtcgaaggtgtcttgcagatgcttgagctttatgttgtcgaacggtagttatctacacggtatcatctgctctgttaagcctgtttagtgtttactgtattggatactcgttaatagagaaccgctacttttcagtatttattatcacctgtatattggataaaattattgcttagcttatgcttgcatgctcc

SEQ ID NO: 26131 - protein, 71 aa, Zea mays subsp. mays
  misc_feature (1)..(71): Ceres Seq. ID no. 13498660
MKERLCLEAERLGLSAMIMGSRGFGASRKGSKGRLGSVSDYCVHHCVCPVVVVRYPDDAADARWRCIRGDR

SEQ ID NO: 26132 - protein, 59 aa, Zea mays subsp. mays
  misc_feature (1)..(59): Ceres Seq. ID no. 13498661
MATNPSNGAGADVPASPGGGAALGCGAGGRDPALVPALLLLLACRDQPGLPAPSHRHRR

SEQ ID NO: 26133 - protein, 55 aa, Zea mays subsp. mays
  misc_feature (1)..(55): Ceres Seq. ID no. 13498662
MIMGSRGFGASRKGSKGRLGSVSDYCVHHCVCPVVVVRYPDDAADARWRCIRGDR

SEQ ID NO: 26134 - DNA, 1859 bp, Zea mays subsp. mays
  misc_feature (1)..(1859): Ceres Seq. ID no. 13498667
gaaaaagaacagaggttattcgttttggctacccgttttgaagacgatgatgagtccggcgtcggagcgcagcctcatcatccagagcgacgacgacgacgacgcccgatccggccacgacgtggaggagccggagccagagcaggagcaggactccgactcctcgtcgtcgtcctcatcctgcgccaccccacgccgcggcccaagctcacccccctacatccagcaatggccgcagagttacaggcaatcgatcgacattctcagcagcgtgcagtcacccaacctgacctttctggggactccaactctgagcaggctgtcgaactcattcctcgccatcaccgattctttccggagcaaggcccccgaaacgatctctagctttatcaagccactccttggccccacgccaagtgacgatcagcagcggcagcatgaaggcacccgaaagagttccgagtaccttgtgccctcgagaagatcatctctgcagcagatcccagaggatcaaaagccacctgtaggtggccatggggcgtctcatgaccagaactgctcttacacccagggagtgatgaatggaataaatgttctatgtggtgtggggatcctatcaacaccttatgccatcaaacaggggggctggattgggctggcgatactctgtatatatgctcttctcgcatggtacacaggtgtgctcctgcgccattgcctggacagcaaggagggcctcaagacatacccagatattggccatgcagcctttggcagcacaggccgcatagttatctcgataatactgtacgtggagttgtatgcatgttgcatcgagtatttgatattggagggtgacaatttgtcaaaattattccccaatgctcacctgaccattgggagcatgacactgaactcacatgtattttttgcaatcttgactaccatcatagtcatgccaaccacctggctccgtgacctgagctggctgagctacatttcagctgggggtgtcattgcatcaatccttgtagtcatctgcctgttcttggttggggttgtcaatgatgtcggctttgagaatgaagggactgcactgaacgccccaggaattcctattgcaattggattatatggttactgctactcagggcatgggttttttccaaatatctattcttccctgaagaatcgcaaccagtttccttcaattctttttacttgtattgggctgtctacctttttgtatgctggtgctgcagtgatgggatacaaaatgtttggtgaagccacagagtcccaattcacactcaacttaccagataattctgtcatttctaagattgctgtttggacaacggtggcaaatccaataaccaaatatgcattaactattattccattggctatgagtttggaagagctgctgccaccaaaccaacaaaagtattttacaataatcatgcttagatcatctctggtgatatcaaccctcctgattgctctatttgtgcctttctttggacttgtgatggccttggttggttctttgtttgccatgcttgtgacctacattttgccttgcgcgtgttttttggcgatcctcaagacaaaagtggggtggcatcagatagcagcttgctcgttcatcatagttgtcggggtttgctgtgcctacgtgggaacatactcgtccctgtcgaagataatccagaactacgcgtagcacagctgttcctgtgatcctgtatatgcatctgcctgacaaaatcatgtgtgtgctatatgggccgaacatatgtacaagatgaaagtttaccattcaattcactcgatgtataataaattattggtgcctc

SEQ ID NO: 26135 - protein, 574 aa, Zea mays subsp. mays
  misc_feature (1)..(574): Ceres Seq. ID no. 13498668
KKNRGYSFWLPVLKTMMSPASERSLIIQSDDDDDARSGHDVEEPEPEQEQDSDSSSSSSSCATPRRGPSSPPYIQQWPQSYRQSIDILSSVQSPNLTFLGTPTLSRLSNSFLAITDSFRSKAPETISSFIKPLLGPTPSDDQQRQHEGTRKSSEYLVPSRRSSLQQIPEDQKPPVGGHGASHDQNCSYTQGVMNGINVLCGVGILSTPYAIKQGGWIGLAILCIYALLAWYTGVLLRHCLDSKEGLKTYPDIGHAAFGSTGRIVISIILYVELYACCIEYLILEGDNLSKLFPNAHLTIGSMTLNSHVFFAILTTIIVMPTTWLRDLSWLSYISAGGVIASILVVICLFLVGVVNDVGFENEGTALNAPGIPIAIGLYGYCYSGHGFFPNIYSSLKNRNQFPSILFTCIGLSTFLYAGAAVMGYKMFGEATESQFTLNLPDNSVISKIAVWTTVANPITKYALTIIPLAMSLEELLPPNQQKYFTIIMLRSSLVISTLLIALFVPFFGLVMALVGSLFAMLVTYILPCACFLAILKTKVGWHQIAACSFIIVVGVCCAYVGTYSSLSKIIQNYA

SEQ ID NO: 26136 - protein, 559 aa, Zea mays subsp. mays
  misc_feature (1)..(559): Ceres Seq. ID no. 13498669
MMSPASERSLIIQSDDDDDARSGHDVEEPEPEQEQDSDSSSSSSSCATPRRGPSSPPYIQQWPQSYRQSIDILSSVQSPNLTFLGTPTLSRLSNSFLAITDSFRSKAPETISSFIKPLLGPTPSDDQQRQHEGTRKSSEYLVPSRRSSLQQIPEDQKPPVGGHGASHDQNCSYTQGVMNGINVLCGVGILSTPYAIKQGGWIGLAILCIYALLAWYTGVLLRHCLDSKEGLKTYPDIGHAAFGSTGRIVISIILYVELYACCIEYLILEGDNLSKLFPNAHLTIGSMTLNSHVFFAILTTIIVMPTTWLRDLSWLSYISAGGVIASILVVICLFLVGVVNDVGFENEGTALNAPGIPIAIGLYGYCYSGHGFFPNIYSSLKNRNQFPSILFTCIGLSTFLYAGAAVMGYKMFGEATESQFTLNLPDNSVISKIAVWTTVANPITKYALTIIPLAMSLEELLPPNQQKYFTIIMLRSSLVISTLLIALFVPFFGLVMALVGSLFAMLVTYILPCACFLAILKTKVGWHQIAACSFIIVVGVCCAYVGTYSSLSKIIQNYA

SEQ ID NO: 26137 - protein, 558 aa, Zea mays subsp. mays
  misc_feature (1)..(558): Ceres Seq. ID no. 13498670
MSPASERSLIIQSDDDDDARSGHDVEEPEPEQEQDSDSSSSSSSCATPRRGPSSPPYIQQWPQSYRQSIDILSSVQSPNLTFLGTPTLSRLSNSFLAITDSFRSKAPETISSFIKPLLGPTPSDDQQRQHEGTRKSSEYLVPSRRSSLQQIPEDQKPPVGGHGASHDQNCSYTQGVMNGINVLCGVGILSTPYAIKQGGWIGLAILCIYALLAWYTGVLLRHCLDSKEGLKTYPDIGHAAFGSTGRIVISIILYVELYACCIEYLILEGDNLSKLFPNAHLTIGSMTLNSHVFFAILTTIIVMPTTWLRDLSWLSYISAGGVIASILVVICLFLVGVVNDVGFENEGTALNAPGIPIAIGLYGYCYSGHGFFPNIYSSLKNRNQFPSILFTCIGLSTFLYAGAAVMGYKMFGEATESQFTLNLPDNSVISKIAVWTTVANPITKYALTIIPLAMSLEELLPPNQQKYFTIIMLRSSLVISTLLIALFVPFFGLVMALVGSLFAMLVTYILPCACFLAILKTKVGWHQIAACSFIIVVGVCCAYVGTYSSLSKIIQNYA

SEQ ID NO: 26138 - DNA, 1237 bp, Zea mays subsp. mays
  misc_feature (1)..(1237): Ceres Seq. ID no. 13498675
gcacgagaccattacctagaacatcctaatcgaaaagatttgattccctatccctgcgctgcccacctcccctttcccgcctgtgncctcccattcacttgcccccttttttccctctcccgacctcccaattcccgaaatcacccccgacactccccacccaagaacccctcgtccccacctcgccatgggcagcgccgccgcctcgccgccgccgtccgggaagctgacgcaggaagagctgaagcgcgtggcggcgcaccgcgcggtggagttcgtggagcccggcatgacgctgggcctgggcacgggctccacggcggcgcacgcgctggaccgcctgggcgacctcctccgcgcgggcgcgctgccgggggtggccggcgtgcccacctccctcaagacggaggcccacgcggcgcgcgccgggatcccgctgctcccgctcccgggcgccaggatcgcgctctccatcgacggcgccgacgaggtcgacccggacctcaacctcgtcaagggccgcggcggctcgctgctccgcgagaagatgatcgagggcgccggcgcccgcttcgtcgtcatcgtcgacgagtccaagctcgtgccgcgcctcggctgcacgggcgccatccccgtcgaggtcatccccttcggcgcgctccacacgctgggcctcatccgcggcctcttcgacggattgcctggattccacgccaggctgaggactgtccccgccgctcccgccaaggggggagaagactcggactcggagtcggagcagcccttcgtcaccgacaacggcaactacatcgtcgagatgttcttcgaggacggcatccgcggcgacctgcgcgacatcagtgaccgcctgctccggatcaccggcgtcgtagagcacggcatgttcctgggcatggccaccaccgtcatcgtcgccaacaaggacggcacggtgtcagtcatggacaggaagaagtagcagtagtaatctacaagcagtagcctgttcttcgaaacagcgatcgcctgatcaccggcatgttccttgacgtggccaccaccaccatcgtcgctgccaacagcgacgacaagaagtactaataattttgcaagtagcctgtgtctgtgcaacacccagctactcttatctaagttggagttgtatcgtgtccgtgcgttatcctcatatgctgagtgtctgcaggagtatgttaatcatcatcctggtgttattatc

SEQ ID NO: 26139 - protein, 287 aa, Zea mays subsp. mays
  misc_feature (1)..(287): Ceres Seq. ID no. 13498676
  misc_feature (29)..(29): Xaa is any aa, unknown or other
ARDHYLEHPNRKDLIPYPCAAHLPFPACXLPFTCPLFSLSRPPNSRNHPRHSPPKNPSSPPRHGQRRRLAAAVREADAGRAEARGGAPRGGVRGARHDAGPGHGLHGGARAGPPGRPPPRGRAAGGGRRAHLPQDGGPRGARRDPAAPAPGRQDRALHRRRRRGRPGPQPRQGPRRLAAPREDDRGRRRPLRRHRRRVQARAAPRLHGRHPRRGHPLRRAPHAGPHPRPLRRIAWIPRQAEDCPRRSRQGGRRLGLGVGAALRHRQRQLHRRDVLRGRHPRRPARHQ

SEQ ID NO: 26140 - protein, 263 aa, Zea mays subsp. mays
  misc_feature (1)..(263): Ceres Seq. ID no. 13498677
MGSAAASPPPSGKLTQEELKRVAAHRAVEFVEPGMTLGLGTGSTAAHALDRLGDLLRAGALPGVAGVPTSLKTEAHAARAGIPLLPLPGARIALSIDGADEVDPDLNLVKGRGGSLLREKMIEGAGARFVVIVDESKLVPRLGCTGAIPVEVIPFGALHTLGLIRGLFDGLPGFHARLRTVPAAPAKGGEDSDSESEQPFVTDNGNYIVEMFFEDGIRGDLRDISDRLLRITGVVEHGMFLGMATTVIVANKDGTVSVMDRKK

SEQ ID NO: 26141 - protein, 229 aa, Zea mays subsp. mays
  misc_feature (1)..(229): Ceres Seq. ID no. 13498678
MTLGLGTGSTAAHALDRLGDLLRAGALPGVAGVPTSLKTEAHAARAGIPLLPLPGARIALSIDGADEVDPDLNLVKGRGGSLLREKMIEGAGARFVVIVDESKLVPRLGCTGAIPVEVIPFGALHTLGLIRGLFDGLPGFHARLRTVPAAPAKGGEDSDSESEQPFVTDNGNYIVEMFFEDGIRGDLRDISDRLLRITGVVEHGMFLGMATTVIVANKDGTVSVMDRKK

SEQ ID NO: 26142 - DNA, 1619 bp, Zea mays subsp. mays
  misc_feature (1)..(1619): Ceres Seq. ID no. 13498683
taatcgaaaaaacaaaactgcaattatctcagtctccttcaaacaactgttttttccattgttagactcaaagcctatccccttcacggagctcgccaagcgctatgggggacgccaacggcggcagtatgcacgttgtgatgctgccatggctggcgttcggccacatcctccccttcacggagctcgccaagcgcatagctaggcagggccaccgggtcaccctcttctccacgccaagaaacacccggcggttaatccgcatccctccagaactcgcggggcatatccgcgtcgtggacatcgcgctgccgcgcgtggagcgcctgccggaggactgcgaggcgagcatagacctgccatccgacgacctccgcccgtacctccgcgtagcctacgacgccgccttcgccgacaaactctcggccatcctgcaggagccgcggccggagaggccggactgggttctcatcgactacgccgcgtactgggcgcccgcggccgcggcgaggcacggcgtgccgtgcgccttcctgagcctgttcggcgccgcgaccctcagtttctatgggcccccggaggggctcatgggacgcggcaagtacgccaggacgaagccggaggacctcaccgtagtacccgactacgtgccgttcccaacaaccgtcgcgcaccgcggcttcgaggcgcgcgagctattcaagccaggccttgtcccggacgactccggcgtgtcggagggccacaggttcggcgtgtccatcggagagagccagatcgtaggcatcaggagcagaacagagctcgagtcggagtggctgcaggtgcttggcaagctctacaagaagccggtgatcccgatcggcctgttccctccgccgcccacgcaagacatcgccggccacgaggcgactttgcggtggctggacagacaggctcagggctccgtcgtgtacgcggccttcggcagcgaggcgaagctgacgagcgcgcagctccaaacaattgcgctaggtttggaggcttccggcctgccgttcctctgggcattcaggccgccaaccgacgccgcaccaggacaaggcacgggcgggttgcccgaaggcttcaaggagcgtgtcaatggccggggattggtctgccgcggctgggtgcctcaacccaggctgttggctcatgaatcggttggtgggtttctgacccacgccggctggaactccatcgccgaaggcctctcgcggggcgtcacgatggtgctgttgccgctgatgttcgatcagggcctcaacgccaggcttcttgtggataagaagatcgggattgaggtggagagggacgaagacgacggcacgttcgcgcccaaagacatcgcggatgctctgaggacggccatggcggagaaccaagacgggactagggtcaaggaactggccgaggtgtttggaaatgacgaggccaatgatcagtgcctgcgagatttcctccggtatctgttagaatacatcaggcagcatcaaggttagttccagtccatttcgaggctaatgttaatgcagaaaagggcaaagaaatggtagtgagtcacgtcacgctatcaaaaaaaaaaaatccttccaggt

SEQ ID NO: 26143 - protein, 472 aa, Zea mays subsp. mays
  misc_feature (1)..(472): Ceres Seq. ID no. 13498684
MGDANGGSMHVVMLPWLAFGHILPFTELAKRIARQGHRVTLFSTPRNTRRLIRIPPELAGHIRVVDIALPRVERLPEDCEASIDLPSDDLRPYLRVAYDAAFADKLSAILQEPRPERPDWVLIDYAAYWAPAAAARHGVPCAFLSLFGAATLSFYGPPEGLMGRGKYARTKPEDLTVVPDYVPFPTTVAHRGFEARELFKPGLVPDDSGVSEGHRFGVSIGESQIVGIRSRTELESEWLQVLGKLYKKPVIPIGLFPPPPTQDIAGHEATLRWLDRQAQGSVVYAAFGSEAKLTSAQLQTIALGLEASGLPFLWAFRPPTDAAPGQGTGGLPEGFKERVNGRGLVCRGWVPQPRLLAHESVGGFLTHAGWNSIAEGLSRGVTMVLLPLMFDQGLNARLLVDKKIGIEVERDEDDGTFAPKDIADALRTAMAENQDGTRVKELAEVFGNDEANDQCLRDFLRYLLEYIRQHQG

SEQ ID NO: 26144 - protein, 464 aa, Zea mays subsp. mays
  misc_feature (1)..(464): Ceres Seq. ID no. 13498685
MHVVMLPWLAFGHILPFTELAKRIARQGHRVTLFSTPRNTRRLIRIPPELAGHIRVVDIALPRVERLPEDCEASIDLPSDDLRPYLRVAYDAAFADKLSAILQEPRPERPDWVLIDYAAYWAPAAAARHGVPCAFLSLFGAATLSFYGPPEGLMGRGKYARTKPEDLTVVPDYVPFPTTVAHRGFEARELFKPGLVPDDSGVSEGHRFGVSIGESQIVGIRSRTELESEWLQVLGKLYKKPVIPIGLFPPPPTQDIAGHEATLRWLDRQAQGSVVYAAFGSEAKLTSAQLQTIALGLEASGLPFLWAFRPPTDAAPGQGTGGLPEGFKERVNGRGLVCRGWVPQPRLLAHESVGGFLTHAGWNSIAEGLSRGVTMVLLPLMFDQGLNARLLVDKKIGIEVERDEDDGTFAPKDIADALRTAMAENQDGTRVKELAEVFGNDEANDQCLRDFLRYLLEYIRQHQG

SEQ ID NO: 26145 - protein, 460 aa, Zea mays subsp. mays
  misc_feature (1)..(460): Ceres Seq. ID no. 13498686
MLPWLAFGHILPFTELAKRIARQGHRVTLFSTPRNTRRLIRIPPELAGHIRVVDIALPRVERLPEDCEASIDLPSDDLRPYLRVAYDAAFADKLSAILQEPRPERPDWVLIDYAAYWAPAAAARHGVPCAFLSLFGAATLSFYGPPEGLMGRGKYARTKPEDLTVVPDYVPFPTTVAHRGFEARELFKPGLVPDDSGVSEGHRFGVSIGESQIVGIRSRTELESEWLQVLGKLYKKPVIPIGLFPPPPTQDIAGHEATLRWLDRQAQGSVVYAAFGSEAKLTSAQLQTIALGLEASGLPFLWAFRPPTDAAPGQGTGGLPEGFKERVNGRGLVCRGWVPQPRLLAHESVGGFLTHAGWNSIAEGLSRGVTMVLLPLMFDQGLNARLLVDKKIGIEVERDEDDGTFAPKDIADALRTAMAENQDGTRVKELAEVFGNDEANDQCLRDFLRYLLEYIRQHQG

SEQ ID NO: 26146 - DNA, 1825 bp, Zea mays subsp. mays
  misc_feature (1)..(1825): Ceres Seq. ID no. 13498687
tagaacatcctaatcgaaaaacagcacgcataggacgaactaccgatgcaagctgcgatcgatcagtcaccgcatctccggttccgcgcaggcatggacgacaagtcctgctacgtggccaccggcctctccctggcggccatcctcctcgtcctccaccgcctcgtggtccgtgctggcggcaaggggaacgccgccgcgcggcggtgtgcctcctagccctcccgccgtcccgttcctcgggcacctccacctgctagcatcggagtgccctctccactcgtcgctggcccgcctcgcggcgcgccacggccccgtgctctcgctgcgcctgggctcccgcgccgccgtggtggtgtcgtcgccggagtgcgccgaggcgtgcttcacggagcacgacgtggcgttcgccaaccgccccagactgacctcgcaggcgctggcctccttcggcggcgccgcgctggccgtgtctagctacgggccctactggcgcaacctccggcgcgtggccgccgtgcgcctcctctccacgcaccgcgtggcgtgcatgtgccccgtcatctcggccgaggtgcgcgccatgctgcgccgggtggggcgtgcggccgaggcggcggggcgcgtccagctcaaggccagcctgttcgagctctccctcagcgtgctcatggagaccatcgcgcagaccaagacgtcgcgcgccgacgacgcggacgatgccgtgtcgcccgaggcgcacgagttccggcggatcgtcgacgagatcctgccctacctcggcgccaccaacctgtgggactacctgccgctcctgcggcggttcgacgtgctcggggtgaggaacaagatcagggacgttgtcggcaggagggacgccttcctgcagcggctcatcgacgcggagcggcggaggctggacggcgacggtgacggcgacgacggcgagaagaagagcatgatcgccgtgatgctctcgctgcagaagtcggagccggacgtgtacacggacaccatgatcatggcactgtgcgggaacttgtttacagccggaacggagacgacgtcgtccacgatagaatgggccatgtcgctgttgctgaaccacccggacgcgctgaagaaggccgaggcagagatcgaggcggccgtgggcgcgtcccgcctcatcaccatggacgacgtgcccgggctgggctacctgcagtgcgtcatcaacgagacgctgcgcctgtacccggtggccccgctgctgctgccgcacgagtcggcggcggactgcacggtcggcggctacgacgtgccccgcggcacgctgctgttcgtcaacgcgtacgccatccacagggacccggcggcgtgggaggagccggacgagttcaggccggagcggttccgcgacggcaaggccgagggccggctgatgctgccgttcgggatgggacggcgcaggtgccccggggagacactcgcgctgcggaccgccggcctcgtgctcgccacgctcatccagtgcttccactgggacaggatcgatggcgctgagatcgacatgaccgagagcggcgggctcaccatgccccgggccgtcccgttggaggccacctgcaagcctcgcgaagccatgcgtcatgttcttcagcagctctgattggtctatgtgctaaacattctcatccctattctctcttgtgtgtgtggcagtacgaacagcacgtgctagctaaataagctgcgagcaatagctatccgcgtaacagtatggttcgtcaaagttgttatctttcaaaagttatctagtactataaacaaattgttcgtgtcg

SEQ ID NO: 26147 - protein, 366 aa, Zea mays subsp. mays
  misc_feature (1)..(366): Ceres Seq. ID no. 13498688
MCPVISAEVRAMLRRVGRAAEAAGRVQLKASLFELSLSVLMETIAQTKTSRADDADDAVSPEAHEFRRIVDEILPYLGATNLWDYLPLLRRFDVLGVRNKIRDVVGRRDAFLQRLIDAERRRLDGDGDGDDGEKKSMIAVMLSLQKSEPDVYTDTMIMALCGNLFTAGTETTSSTIEWAMSLLLNHPDALKKAEAEIEAAVGASRLITMDDVPGLGYLQCVINETLRLYPVAPLLLPHESAADCTVGGYDVPRGTLLFVNAYAIHRDPAAWEEPDEFRPERFRDGKAEGRLMLPFGMGRRRCPGETLALRTAGLVLATLIQCFHWDRIDGAEIDMTESGGLTMPRAVPLEATCKPREAMRHVLQQL

SEQ ID NO: 26148 - protein, 355 aa, Zea mays subsp. mays
  misc_feature (1)..(355): Ceres Seq. ID no. 13498689
MLRRVGRAAEAAGRVQLKASLFELSLSVLMETIAQTKTSRADDADDAVSPEAHEFRRIVDEILPYLGATNLWDYLPLLRRFDVLGVRNKIRDVVGRRDAFLQRLIDAERRRLDGDGDGDDGEKKSMIAVMLSLQKSEPDVYTDTMIMALCGNLFTAGTETTSSTIEWAMSLLLNHPDALKKAEAEIEAAVGASRLITMDDVPGLGYLQCVINETLRLYPVAPLLLPHESAADCTVGGYDVPRGTLLFVNAYAIHRDPAAWEEPDEFRPERFRDGKAEGRLMLPFGMGRRRCPGETLALRTAGLVLATLIQCFHWDRIDGAEIDMTESGGLTMPRAVPLEATCKPREAMRHVLQQL

SEQ ID NO: 26149 - protein, 326 aa, Zea mays subsp. mays
  misc_feature (1)..(326): Ceres Seq. ID no. 13498690
METIAQTKTSRADDADDAVSPEAHEFRRIVDEILPYLGATNLWDYLPLLRRFDVLGVRNKIRDVVGRRDAFLQRLIDAERRRLDGDGDGDDGEKKSMIAVMLSLQKSEPDVYTDTMIMALCGNLFTAGTETTSSTIEWAMSLLLNHPDALKKAEAEIEAAVGASRLITMDDVPGLGYLQCVINETLRLYPVAPLLLPHESAADCTVGGYDVPRGTLLFVNAYAIHRDPAAWEEPDEFRPERFRDGKAEGRLMLPFGMGRRRCPGETLALRTAGLVLATLIQCFHWDRIDGAEIDMTESGGLTMPRAVPLEATCKPREAMRHVLQQL

SEQ ID NO: 26150 - DNA, 1442 bp, Zea mays subsp. mays
  misc_feature (1)..(1442): Ceres Seq. ID no. 13498707
ctgaaagaaacaaaaaaataaataaaacaaagataaatcattggggttgggggattgcaattgcaagttgccgctgtgcggtngcggtcgctcccctcccgactccggccagcagcagcgacggtgccggcagtcgattactccacgcggcggcggcggcggcggtagcccatcctttcccgttttctgatccagtcctactgataccgggcacagcacgcctgctcttgtgatatactctattaaggtacggcgtgaagatgagggttttcttggtctcgtgaaggcgacgctcttgtctgctaactacatattatagaatgttttgcttgaggggctactggtcgccttcactagctccagtgagggaagggcctgttcgacatcatataaagttcaattctatagtggtttgtggtgccaggggtccgagaccgagatatccccgtgtgtggaaaactcgtaagaaaattgggactatttccaagtcgcagaagcttgtcgaatgtattaaaggtctgtctaatgtaaaggaggaagtttatggggcacttgactcatttgttgcatgggaactggagtttcccttgatagtggtaaagaaggcactgaagaaacttgaggacgaaaaggaatggaaacgaataattcaggtcattaaatggatgttcaacaaaggtcaagggaagacaatgggaagctattacaccttgttgaatgctttgatcgaggatggacggattgaggaagcagaagagttatttggaatggtgttctcacgatatatggagggtttgcctcgtacatttttcatgagaatgatttctttctattacaacgtggaagcgtatgataatatgtttgagatttttgctgatatggaggaactaggcgtaagacctgatggttctattatcaggatgctaggtgatgtatttcagaagttagagatgatggacaaatatgaaaagttaaaaaagaaataccgaccaccgaaatgggaatatcgacacatcaaaggcaagcgcataagaatcagagtttatcctgacagtaatcctgaagtggcggcaaaaggagatcccgacactgatgagctcgaagagttagaaagcacacaccttaataacgaattggatgaagcagcaagctcaggcctcgacaggagtgtattggacgatgcagcttctggagaccttgaatatatgtagatcagagcttccatttggtacttttttgtgcctgcttaaccaaagcggtctagagcaaattgaactggtaacatactctctgttttgatttgacatcctagaacccgtgtcgtcatactgccaagacatgggcatcgctatcttctgaagtatttttactacctagaatgagtagaaactacatgccaggctttgccatcagcagtcttttcaagacatcatggtggtttc

SEQ ID NO: 26151 - protein, 296 aa, Zea mays subsp. mays
  misc_feature (1)..(296): Ceres Seq. ID no. 13498708
MFCLRGYWSPSLAPVREGPVRHHIKFNSIVVCGARGPRPRYPRVWKTRKKIGTISKSQKLVECIKGLSNVKEEVYGALDSFVAWELEFPLIVVKKALKKLEDEKEWKRIIQVIKWMFNKGQGKTMGSYYTLLNALIEDGRIEEAEELFGMVFSRYMEGLPRTFFMRMISFYYNVEAYDNMFEIFADMEELGVRPDGSIIRMLGDVFQKLEMMDKYEKLKKKYRPPKWEYRHIKGKRIRIRVYPDSNPEVAAKGDPDTDELEELESTHLNNELDEAASSGLDRSVLDDAASGDLEYM

SEQ ID NO: 26152 - protein, 181 aa, Zea mays subsp. mays
  misc_feature (1)..(181): Ceres Seq. ID no. 13498709
MFNKGQGKTMGSYYTLLNALIEDGRIEEAEELFGMVFSRYMEGLPRTFFMRMISFYYNVEAYDNMFEIFADMEELGVRPDGSIIRMLGDVFQKLEMMDKYEKLKKKYRPPKWEYRHIKGKRIRIRVYPDSNPEVAAKGDPDTDELEELESTHLNNELDEAASSGLDRSVLDDAASGDLEYM

SEQ ID NO: 26153 - protein, 172 aa, Zea mays subsp. mays
  misc_feature (1)..(172): Ceres Seq. ID no. 13498710
MGSYYTLLNALIEDGRIEEAEELFGMVFSRYMEGLPRTFFMRMISFYYNVEAYDNMFEIFADMEELGVRPDGSIIRMLGDVFQKLEMMDKYEKLKKKYRPPKWEYRHIKGKRIRIRVYPDSNPEVAAKGDPDTDELEELESTHLNNELDEAASSGLDRSVLDDAASGDLEYM

SEQ ID NO: 26154 - DNA, 1434 bp, Zea mays subsp. mays
  misc_feature (1)..(1434): Ceres Seq. ID no. 13498711
agcaaagtggtcggcgtacgtacgtgaacacacatcgatctccatatatctgtctagttagctagctagctagtagacatatggtgggctcgcagtacgacgacgacgatgacaatgttgttggtcgccggaagacgaggtggtacgctgtgaccggcggccgggggttcatggcgaggcacctggtggcggccttgctccgctccggtgagtggcgtgtccgggtcactgacctcgcccctactctagccctcggccctggagagacggatgggattctgagcgacgctctccgtgatggccgtgctgtctatgcctcggttgatgtctgcaaccttgaccagcttgccaaagcctttgaaggggtagacgttgttttccacacagctgctgcggatcctagcaagaacaacctgcaacttcactacaaggttaacgtggagggaacgaagaatgtaattgacgcttgcaagatatgcaaggtgaagaggctgatccacaccagtactagtgctgttgtgtttgacggcgttcatggactttttgacgcggatgagtcattgccatacccagataagtttcctgatgcatatgcacaaacaaaggcagaagcagagaagttagtcatcaaggccaatggcattaatggccttctaacttgttgcatacgtcctggtagtatgtttgacccaggtgacattatgatgccaactttggatcgttatggatggtcaaatgttactattggtgaagggaagaactatgatgattttgtgtatgttgaaaatgttgtccatggtcatctttgtgctgataagactctttctactattgagggtgcaagaaccagtggaggaaaagcatactttataactaatatggagccaatgaatatgtgggacttcttatatcttgttcaagaagaacttggatacaaaagaatattcaagataagggtacctataattgttatcaagccagcaagctatttgatagagtgggcatatagggctgttttctctcattttggaacttgccagcctcaaatactaacaccggcgaggattagatatgtaacgctcaatagaacatttagttgcaataaagctgttgaagaacttggctacaaacctattgtgacactacaggatggtttgaagaaagcggtgaaattgtatattcaactgagggataaagatttacctaaaatatagtgaagttgtgatgtaaaacaactctaccaaaatatcataagccaaagccagaggtgatcgatgatgtcccatcaataaaaatcgggtttgtgttttttattataataaaaaaagctatgtaaaggactacgaaatattgttgtaatgctctaatggtcaggcatgtatttatgttatctgggacgtagacgatattatatttgcttttatgttcctctct

SEQ ID NO: 26155 - protein, 377 aa, Zea mays subsp. mays
  misc_feature (1)..(377): Ceres Seq. ID no. 13498712
MVGSQYDDDDDNVVGRRKTRWYAVTGGRGFMARHLVAALLRSGEWRVRVTDLAPTLALGPGETDGILSDALRDGRAVYASVDVCNLDQLAKAFEGVDVVFHTAAADPSKNNLQLHYKVNVEGTKNVIDACKICKVKRLIHTSTSAVVFDGVHGLFDADESLPYPDKFPDAYAQTKAEAEKLVIKANGINGLLTCCIRPGSMFDPGDIMMPTLDRYGWSNVTIGEGKNYDDFVYVENVVHGHLCADKTLSTIEGARTSGGKAYFITNMEPMNMWDFLYLVQEELGYKRIFKIRVPIIVIKPASYLIEWAYRAVFSHFGTCQPQILTPARIRYVTLNRTFSCNKAVEELGYKPIVTLQDGLKKAVKLYIQLRDKDLPKI

SEQ ID NO: 26156 - protein, 347 aa, Zea mays subsp. mays
  misc_feature (1)..(347): Ceres Seq. ID no. 13498713
MARHLVAALLRSGEWRVRVTDLAPTLALGPGETDGILSDALRDGRAVYASVDVCNLDQLAKAFEGVDVVFHTAAADPSKNNLQLHYKVNVEGTKNVIDACKICKVKRLIHTSTSAVVFDGVHGLFDADESLPYPDKFPDAYAQTKAEAEKLVIKANGINGLLTCCIRPGSMFDPGDIMMPTLDRYGWSNVTIGEGKNYDDFVYVENVVHGHLCADKTLSTIEGARTSGGKAYFITNMEPMNMWDFLYLVQEELGYKRIFKIRVPIIVIKPASYLIEWAYRAVFSHFGTCQPQILTPARIRYVTLNRTFSCNKAVEELGYKPIVTLQDGLKKAVKLYIQLRDKDLPKI

SEQ ID NO: 26157 - DNA, 1403 bp, Zea mays subsp. mays
  misc_feature (1)..(1403): Ceres Seq. ID no. 13498720
gtcttccctgatcccttcgctccccgaagcaaaagcgcagagcgcatcagcgcagagtaggacagccatggcgacggcggcggcgcagtcccatccggcatcgatggacgcgcgccggtgggacgagtcatcgtaccgccgcggcatcctccgtgcccgcgacctctcgtcccgcaccctcttccgtgccgtcttctttgaccacagcgacgacccggataccgacatcctactcgccgccgcctccagcgacggctccctcgcttccttctccctttcatcctgcatctccgcatgttccgctacctcccaggtggagaccgccgccactctggtagatcctgtctgcatcgtgcaagcgcacagcggacctgcctacgacgtcaggttttaccccgatcaacagcagccgctgctcttcagctgcggggacgatggccgcatcaagggttggaggtggcacgagatgcagagctgccttgtcccgctctccctgcaaggggatcatctggaaccagcacttgacttggtcaaccctcagcacgagggtccttggggtgctcgatctccagtacctgaaaacaatgccattgcaattaataaacaggatggatccattttggcagcagcgggtgatgcatgtgcttactgctgggatgtggagaccagtaaatgtaaaatcacattcaaggggcatgctgattatttgcacagcattgcagttcgtgagtcaaaccgccaggttgtaacaggatcagaggatgggacagctcgtatctgggattgcagaagtgggaagtgcactcgggttatacagccaggaaagagcaaggcatttgaaagctcatgggtcagctgtgttgctattgatccaagtgaaagttggctggcttgtggcacgtctagcggtatatcagtttggagtcttctctcaaatgagtgcatctttaatttggactgtcatgctcctgttcaagatttattgtttgacaagaatcatattttagcagttggcgctgaacctctgctctcccgtctcacaataaacgggacagtcctttcacaagtaaaatgtgcccctcagtcggcgttttctgtctccatccactcaactgggatagcagctgttgctggatacggaggtctggtggatgtgatctcagaagttgggagccatctgtgcacattcggtagccggggcctagacaagtaaatgacccatgagcattccttgcgaacagcgcgcggagaatgcgagggctgtatctctttgcactgcagttgcacaagtttcatggaacgttgtcgctgacaatgctctactgaacaaagatagctagacggtaaaaaaaaacatttgatactagttcgagctaaacaaagttctgctctgacatctcttc

SEQ ID NO: 26158 - protein, 403 aa, Zea mays subsp. mays
  misc_feature (1)..(403): Ceres Seq. ID no. 13498721
SSLIPSLPEAKAQSASAQSRTAMATAAAQSHPASMDARRWDESSYRRGILRARDLSSRTLFRAVFFDHSDDPDTDILLAAASSDGSLASFSLSSCISACSATSQVETAATLVDPVCIVQAHSGPAYDVRFYPDQQQPLLFSCGDDGRIKGWRWHEMQSCLVPLSLQGDHLEPALDLVNPQHEGPWGARSPVPENNAIAINKQDGSILAAAGDACAYCWDVETSKCKITFKGHADYLHSIAVRESNRQVVTGSEDGTARIWDCRSGKCTRVIQPGKSKAFESSWVSCVAIDPSESWLACGTSSGISVWSLLSNECIFNLDCHAPVQDLLFDKNHILAVGAEPLLSRLTINGTVLSQVKCAPQSAFSVSIHSTGIAAVAGYGGLVDVISEVGSHLCTFGSRGLDK

SEQ ID NO: 26159 - protein, 381 aa, Zea mays subsp. mays
  misc_feature (1)..(381): Ceres Seq. ID no. 13498722
MATAAAQSHPASMDARRWDESSYRRGILRARDLSSRTLFRAVFFDHSDDPDTDILLAAASSDGSLASFSLSSCISACSATSQVETAATLVDPVCIVQAHSGPAYDVRFYPDQQQPLLFSCGDDGRIKGWRWHEMQSCLVPLSLQGDHLEPALDLVNPQHEGPWGARSPVPENNAIAINKQDGSILAAAGDACAYCWDVETSKCKITFKGHADYLHSIAVRESNRQVVTGSEDGTARIWDCRSGKCTRVIQPGKSKAFESSWVSCVAIDPSESWLACGTSSGISVWSLLSNECIFNLDCHAPVQDLLFDKNHILAVGAEPLLSRLTINGTVLSQVKCAPQSAFSVSIHSTGIAAVAGYGGLVDVISEVGSHLCTFGSRGLDK

SEQ ID NO: 26160 - protein, 369 aa, Zea mays subsp. mays
  misc_feature (1)..(369): Ceres Seq. ID no. 13498723
MDARRWDESSYRRGILRARDLSSRTLFRAVFFDHSDDPDTDILLAAASSDGSLASFSLSSCISACSATSQVETAATLVDPVCIVQAHSGPAYDVRFYPDQQQPLLFSCGDDGRIKGWRWHEMQSCLVPLSLQGDHLEPALDLVNPQHEGPWGARSPVPENNAIAINKQDGSILAAAGDACAYCWDVETSKCKITFKGHADYLHSIAVRESNRQVVTGSEDGTARIWDCRSGKCTRVIQPGKSKAFESSWVSCVAIDPSESWLACGTSSGISVWSLLSNECIFNLDCHAPVQDLLFDKNHILAVGAEPLLSRLTINGTVLSQVKCAPQSAFSVSIHSTGIAAVAGYGGLVDVISEVGSHLCTFGSRGLDK

SEQ ID NO: 26161 - DNA, 1516 bp, Zea mays subsp. mays
  misc_feature (1)..(1516): Ceres Seq. ID no. 13498727
aaacgccgcctactccgcgctcctccaaaccaaactgaaccctatcctagcacgagtgcacgacggtggcagcaggagatggtggggacggcggaaggcggcgcggagagggcggtgcggcggtgggtggacgccgccggcngggcgcctgcgtcctggacggcgggctggccacggagctcgaggccaacggcgccgacctcaacgacccgctctggagcgccaagtgcctcctctcctccccgcacctcatccgcaaggtccatatggactacctagaagccggggcgaacattataatcacagcatcgtatcaggctactatccaagggtttgaatcaaagggcttttcaaaagaacaaagtgaaaacttgttaacaaagagtgttcagattgcactggaagcccgtgagatgttcttgaaggaacatttggagaaatccactcctatacagcatcctattctggttgcagcagctctagggagttatggggcttatcttgctgatggctctgagtacagtggggattatggtgaagctggtacgaaagagttcctgaaggactttcatcggcggaggcttcaggttcttgctgaagcaggcccggatttgattgcttttgaaacgatccccaacaaattggaagctcaggcatatgttgaactccttgaggaatgtaacattaatatcccttcatggctttccttcaactcaaaagatggagtgcatgttgtgagtggtgattcgttaattgaatgcgctactattgctgacaagtgtgcaaaggttggtgcagtcgggataaattgcacacctccaagatttattcatggactgatactctccattcgaaaggtcacagacaagcctattctgatatatcccaacagtggtgaaagatatgatggtgaaaaaaaggagtgggtggaatccactggtgtgtcagatggtgattttgtttcgtacgtaaatgaatggtgcaaagatggggctgcgcttatcgggggctgctgcaggacaactccaaacactatcagggccatacacagaactcttaaccaaggctgccacaagcatcagttacctgtaggctgtagcatagatctgtgctccactcctaatgctctcctcccagcagtaccttgagctgtatccccgagattccttaaccagcgcgaaccaatatactgttgcgtgttctcctgcaaatgagatgttctgcacctatgtttgtaatgttgtatttctgggtttttaagctatccaacttggagatacaaccggtgaggaagcagcaacaataggtagttctacttctgagtgaggaaaaacaacttgcggctgagttaatgaagcttagtagctaccaccgttgtatgacagttgctcagagatgttatcttcattaagtgcttatattaccgctagttccctgtgaaatttgttaaaccattatatgtaagttttgtttgacaagactgcatctcctgaaactaagatcttagtttcctgct

SEQ ID NO: 26162 - protein, 293 aa, Zea mays subsp. mays
  misc_feature (1)..(293): Ceres Seq. ID no. 13498728
MDYLEAGANIIITASYQATIQGFESKGFSKEQSENLLTKSVQIALEAREMFLKEHLEKSTPIQHPILVAAALGSYGAYLADGSEYSGDYGEAGTKEFLKDFHRRRLQVLAEAGPDLIAFETIPNKLEAQAYVELLEECNINIPSWLSFNSKDGVHVVSGDSLIECATIADKCAKVGAVGINCTPPRFIHGLILSIRKVTDKPILIYPNSGERYDGEKKEWVESTGVSDGDFVSYVNEWCKDGAALIGGCCRTTPNTIRAIHRTLNQGCHKHQLPVGCSIDLCSTPNALLPAVP

SEQ ID NO: 26163 - protein, 244 aa, Zea mays subsp. mays
  misc_feature (1)..(244): Ceres Seq. ID no. 13498729
MFLKEHLEKSTPIQHPILVAAALGSYGAYLADGSEYSGDYGEAGTKEFLKDFHRRRLQVLAEAGPDLIAFETIPNKLEAQAYVELLEECNINIPSWLSFNSKDGVHVVSGDSLIECATIADKCAKVGAVGINCTPPRFIHGLILSIRKVTDKPILIYPNSGERYDGEKKEWVESTGVSDGDFVSYVNEWCKDGAALIGGCCRTTPNTIRAIHRTLNQGCHKHQLPVGCSIDLCSTPNALLPAVP

SEQ ID NO: 26164 - DNA, 1041 bp, Zea mays subsp. mays
  misc_feature (1)..(1041): Ceres Seq. ID no. 13498730
taatcgaaaaaggtctctagtctccactccgctgtcgctccggcccagcagctcgaccaccaccgctccgcaggcaggaagccgccaaggacatggacgacgctcaggagcctccctcccctccctccccctcgcagtcatcctcctcctcttcctcgtcgtcctccgtggccccgaacccgaagaagcgggcgcgcaaggacggcagccggcacccgacgtaccgcggcgtgcgcatgcggagctggggcaagtgggtgtcggagatcagggagccccgcaagaagtctcgcatctggctgggcaccttcgccaccgcggagatggcggcgcgcgcgcacgacgtggccgcgctcgccatcaagggcgcgcgcgacgcgcacctcaacttcccgggcctcgcgcacctgctcccgcgcccggccaccgcggcgcccaaggacgtgcaggccgcggccgcgctcgccgcggccgccgacttccctctgccgccgtcccccggcggcgccaatgccaagagccccgagagcagcagctccggctccgcctccgcctccgcctccgacgacgccagcgccgcctcgccggcggcgccgcaggacgccgagcccaacccggacgacgcgctgttcgacctcccggacctgcttctggacctgagatgctgcgggccgtcgtcgtgggccgtcgacgacgacgtggccggcggcggcgcgttccggatcatcgaggagccgctgctgtgggagtactgaactgatcaatgccaccgcgccagtcctgtccttgagcggttggcagtgatcagcgagttcatgcatcggtagctgttgagtgttagatcgaccggacggacacatgtaaatgcagctcctttccgctcctctgtttcgtgctctggattactctgctgtttcttctctttatgccagatttaggtgccgcgcttgtataaagttagttcctttttttccctccttctcttgcttgatttggaagacaagaatatgtataaccataagaagcatcttatcttgtgcc

SEQ ID NO: 26165 - protein, 252 aa, Zea mays subsp. mays
  misc_feature (1)..(252): Ceres Seq. ID no. 13498731
NRKRSLVSTPLSLRPSSSTTTAPQAGSRQGHGRRSGASLPSLPLAVILLLFLVVLRGPEPEEAGAQGRQPAPDVPRRAHAELGQVGVGDQGAPQEVSHLAGHLRHRGDGGARARRGRARHQGRARRAPQLPGPRAPAPAPGHRGAQGRAGRGRARRGRRLPSAAVPRRRQCQEPREQQLRLRLRLRLRRRQRRLAGGAAGRRAQPGRRAVRPPGPASGPEMLRAVVVGRRRRRGRRRRVPDHRGAAAVGVLN

SEQ ID NO: 26166 - protein, 220 aa, Zea mays subsp. mays
  misc_feature (1)..(220): Ceres Seq. ID no. 13498732
MDDAQEPPSPPSPSQSSSSSSSSSSVAPNPKKRARKDGSRHPTYRGVRMRSWGKWVSEIREPRKKSRIWLGTFATAEMAARAHDVAALAIKGARDAHLNFPGLAHLLPRPATAAPKDVQAAAALAAAADFPLPPSPGGANAKSPESSSSGSASASASDDASAASPAAPQDAEPNPDDALFDLPDLLLDLRCCGPSSWAVDDDVAGGGAFRIIEEPLLWEY

SEQ ID NO: 26167 - protein, 172 aa, Zea mays subsp. mays
  misc_feature (1)..(172): Ceres Seq. ID no. 13498733
MRSWGKWVSEIREPRKKSRIWLGTFATAEMAARAHDVAALAIKGARDAHLNFPGLAHLLPRPATAAPKDVQAAAALAAAADFPLPPSPGGANAKSPESSSSGSASASASDDASAASPAAPQDAEPNPDDALFDLPDLLLDLRCCGPSSWAVDDDVAGGGAFRIIEEPLLWEY

SEQ ID NO: 26168 - DNA, 1449 bp, Zea mays subsp. mays
  misc_feature (1)..(1449): Ceres Seq. ID no. 13498734
agagcgaagagagcgaaatccagagcacacggcgtcgcatttggaacgctcctgctcgtcgcacgtacgaagcccacgcgtccgcgcacgtgccagagccgagcccccgcgccggcgccccgccggagaggatgacgcggcggtgctcgcactgcagcaacaacggccacaactcgcgtacctgccccgtccgctccgccggcggcggcagcggcggcggcggggtgaggctgttcggcgtgcggctcacgacggcgccggcgccggcggtgatgaagaagagcgccagcatgagctgcattgtgtcctcgctcggcggcggtttcggcggctcgtcgccgccggtggaaggagtgggtgctggcagaggaggggaagacagtgggaccggctacgtgtccgatgatcccgcgcacgcatcctgctcgacgaatggccgcgccgagcgcaagaaaggtacaccttggactgaagaagagcatagaatgtttctgatgggtctgcagaagcttggtaagggagactggcgcgggatatccagaaactttgttgtttccaggaccccgactcaagttgcaagccatgctcaaaagtactttgttagacagacaaactcatcgagacggaagaggcggtcaagcttatttgacatggtcccagaaatgccaatggatgagtccccagctgctgtggaacaatttactctccaaaatactcaagatgaagatacaagttcaaatcacgtgccaaccttacatcttggacaacggaaggaaacagagtttgctaagcagctacaaacttttcagccagggcaccatgagaaatctgaatacgcagaaccttcattgctgctaccagatttggagatgaaccccagtgtaccattcaagaccataactgatccaacaggaccagcattctacccatcattggtccctgttccactaactctttggcctccaagtgtttcccacgtggaggaagcagccagaacccatgaaatcctaaaaccaactcctttgaatggtaagggggtggttaaggcagatgatgttgttggtatgtctaagctcagcatcgacgaagctagctctggctccatggaacccactgctctttcccttgagcttattggatccacagatacaaggcaatcagcttttcatgtgagtccaccgatgaatagacctgaactaagcaagagaaacagcagtccaattcatgcagtttgaggaagcatgaaacatgcccgctgggtcaagtcttacaaattatactgatggtctcaatacctcagaacgtgaccatgtactttgtaacgactttttagttatcctgtttccagcttatgttccttgccatcgacaaatgtagagagatacatgtgtcaatggaagtagcatgccattagtttcaaaaaaaaaaaaaaaaaaaaaaaaataaaaa

SEQ ID NO: 26169 - protein, 410 aa, Zea mays subsp. mays
  misc_feature (1)..(410): Ceres Seq. ID no. 13498735
SEESEIQSTRRRIWNAPARRTYEAHASAHVPEPSPRAGAPPERMTRRCSHCSNNGHNSRTCPVRSAGGGSGGGGVRLFGVRLTTAPAPAVMKKSASMSCIVSSLGGGFGGSSPPVEGVGAGRGGEDSGTGYVSDDPAHASCSTNGRAERKKGTPWTEEEHRMFLMGLQKLGKGDWRGISRNFVVSRTPTQVASHAQKYFVRQTNSSRRKRRSSLFDMVPEMPMDESPAAVEQFTLQNTQDEDTSSNHVPTLHLGQRKETEFAKQLQTFQPGHHEKSEYAEPSLLLPDLEMNPSVPFKTITDPTGPAFYPSLVPVPLTLWPPSVSHVEEAARTHEILKPTPLNGKGVVKADDVVGMSKLSIDEASSGSMEPTALSLELIGSTDTRQSAFHVSPPMNRPELSKRNSSPIHAV

SEQ ID NO: 26170 - protein, 367 aa, Zea mays subsp. mays
  misc_feature (1)..(367): Ceres Seq. ID no. 13498736
MTRRCSHCSNNGHNSRTCPVRSAGGGSGGGGVRLFGVRLTTAPAPAVMKKSASMSCIVSSLGGGFGGSSPPVEGVGAGRGGEDSGTGYVSDDPAHASCSTNGRAERKKGTPWTEEEHRMFLMGLQKLGKGDWRGISRNFVVSRTPTQVASHAQKYFVRQTNSSRRKRRSSLFDMVPEMPMDESPAAVEQFTLQNTQDEDTSSNHVPTLHLGQRKETEFAKQLQTFQPGHHEKSEYAEPSLLLPDLEMNPSVPFKTITDPTGPAFYPSLVPVPLTLWPPSVSHVEEAARTHEILKPTPLNGKGVVKADDVVGMSKLSIDEASSGSMEPTALSLELIGSTDTRQSAFHVSPPMNRPELSKRNSSPIHAV

SEQ ID NO: 26171 - protein, 320 aa, Zea mays subsp. mays
  misc_feature (1)..(320): Ceres Seq. ID no. 13498737
MKKSASMSCIVSSLGGGFGGSSPPVEGVGAGRGGEDSGTGYVSDDPAHASCSTNGRAERKKGTPWTEEEHRMFLMGLQKLGKGDWRGISRNFVVSRTPTQVASHAQKYFVRQTNSSRRKRRSSLFDMVPEMPMDESPAAVEQFTLQNTQDEDTSSNHVPTLHLGQRKETEFAKQLQTFQPGHHEKSEYAEPSLLLPDLEMNPSVPFKTITDPTGPAFYPSLVPVPLTLWPPSVSHVEEAARTHEILKPTPLNGKGVVKADDVVGMSKLSIDEASSGSMEPTALSLELIGSTDTRQSAFHVSPPMNRPELSKRNSSPIHAV

SEQ ID NO: 26172 - DNA, 1681 bp, Zea mays subsp. mays
  misc_feature (1)..(1681): Ceres Seq. ID no. 13498741
atctattgaactccactcacagacagcagccacagcggagcttaattagcaatcattgactatgggtgcgctcttgccatggctggcatggttgctcgtctccctcgtcggcgtctacctcctcggccatctcgtgcaggcccgtcgtcgtcgtggtctaccgccgggaccccacccgctgcccatcatcggcagcctccacctgctcggtaaccaaccgcaccgctccctcgccaggctcgccaagacccacggcccgctcgtgtcgctccgcctgggctcggtgaccacggtggtcgcctcctccccggccgccgcccgggagatcctgcagcggcacgacgccgccttcagcaacaggtccgtgccggacgccccgggcgcccacgccaggaactccacggtgtggctgcccaacgcgccgcgctggcgcgcgctgcggaagatcatgggcacgcagctgttcgcgccgcacaggctggacgcgctccagcacctccggcgcgacaaggcgcgggagctcgtggaccacgtgcggcggctggcgcgcaggggcgagcccgtgaacgtcggccgcgtcgccttcaccaccagcctcaacctcgtctcgcgcaccatcttctcccgcgacctggccagcctcgaggacgacggcgcgtccaggaagttccaggaggtggtgacggacatcatggaggccgtgggcagccccaacgtctccgacttcttcccggcgctcgccgttgccgacctgcagggctgccggcgtcggctggcgcggctgttcgcgcggctgcaccggatcttcgacgaagagatcgacgcgaggctgcgtggccgcgacgctggcgagcccaagaagaacgacttcctcgacctgctgctggacgccgcagaggacgatgacaacacggccggcctggatcgcgacacgctccgttcactcttcacggacttgttttctgctgggagtgacacaagctccagctcagtggaatgggcaatggtggagctgcttcgaagccccggcttcaatggctaaagcatgcgacgagcttgcaacagtcatcggcccaagaaaagacatcgaggaatctgatattgggcggctgccctacctccaagccgtggtgaaagagaccttcaggctgcatcctgctgccccgctgttgctaccgcggcgtgcccaggccgacgtgaagatgatgggctacgtgattcccgaaggttctcgagtgttcgtaaacgtatgggcgatgggtcgagacgaggagacgtggcctgagcctgagaagtttttgcccgagaggttcctggggaagaagacgcagcaggcggttgatctcaggggcggggacttcgatctcatcccgttcggtggaggacgccggatctgccctgggatgccgctggcgatcaggatggtgcatctgctgcttgcgtcgctcttgaatcagtttgcatggaggcttccggctgagctagagaggaatggagttgacatggctgagaatttcggcatcacgttgaccaaggccgtgcctctttgtgctatagccacagagatctgagtcggcaagctattctattctagttaactattctatggtcgatatatgtacatgtatccttatcaaatttcgaaataaacttagcaaataggttagaggatgtttggttc

SEQ ID NO: 26173 - protein, 326 aa, Zea mays subsp. mays
  misc_feature (1)..(326): Ceres Seq. ID no. 13498742
MGALLPWLAWLLVSLVGVYLLGHLVQARRRRGLPPGPHPLPIIGSLHLLGNQPHRSLARLAKTHGPLVSLRLGSVTTVVASSPAAAREILQRHDAAFSNRSVPDAPGAHARNSTVWLPNAPRWRALRKIMGTQLFAPHRLDALQHLRRDKARELVDHVRRLARRGEPVNVGRVAFTTSLNLVSRTIFSRDLASLEDDGASRKFQEVVTDIMEAVGSPNVSDFFPALAVADLQGCRRRLARLFARLHRIFDEEIDARLRGRDAGEPKKNDFLDLLLDAAEDDDNTAGLDRDTLRSLFTDLFSAGSDTSSSSVEWAMVELLRSPGFNG

SEQ ID NO: 26174 - protein, 222 aa, Zea mays subsp. mays
  misc_feature (1)..(222): Ceres Seq. ID no. 13498743
MTTRPAWIATRSVHSSRTCFLLGVTQAPAQWNGQWWSCFEAPASMAKACDELATVIGPRKDIEESDIGRLPYLQAVVKETFRLHPAAPLLLPRRAQADVKMMGYVIPEGSRVFVNVWAMGRDEETWPEPEKFLPERFLGKKTQQAVDLRGGDFDLIPFGGGRRICPGMPLAIRMVHLLLASLLNQFAWRLPAELERNGVDMAENFGITLTKAVPLCAIATEI

SEQ ID NO: 26175 - protein, 197 aa, Zea mays subsp. mays
  misc_feature (1)..(197): Ceres Seq. ID no. 13498744
MGTQLFAPHRLDALQHLRRDKARELVDHVRRLARRGEPVNVGRVAFTTSLNLVSRTIFSRDLASLEDDGASRKFQEVVTDIMEAVGSPNVSDFFPALAVADLQGCRRRLARLFARLHRIFDEEIDARLRGRDAGEPKKNDFLDLLLDAAEDDDNTAGLDRDTLRSLFTDLFSAGSDTSSSSVEWAMVELLRSPGFNG

SEQ ID NO: 26176 - DNA, 848 bp, Zea mays subsp. mays
  misc_feature (1)..(848): Ceres Seq. ID no. 13498757
acacaccccagtttcttccttccttcctcggtctaaagaagcaagcagccatggacggcgacgtcgcgaccggcggcgtgcgggggcaccagcatccacatcacggcgctggacggcatcgtgaacgtgaattcgctcttcaccctggccgccttcctgggcctggcgtggcggccctcctccgacgggccggggctcgccgacggcgccgaccgcacgggcaacccctgcgccgcgggggaccgcgccgagtcggacctcgtctccttccacgtgctcgccttcgcctgcttcctcttctccagcctcgtcgcgctctgcctcaagcagctcgtccgcacctaccccgcgccccaccgccgccgcgccgcctccgcctccgcctccgccgccggcggcccgcaccgcgcggatcaaccgcgcggcgctccgcgtcgggatcctcgcgtccgccgtggggtccgtcgccggatgcggcttcctgatgatggccctcgtcaacgtggtgcaggtgaagctcgggcgactcgggtgcggcgccggcggggccgccgcctgggccgccgtcgtgccgctcgtcaccctcgtcccttccgccatgctcatctacatcggcaccgtcttctacgccttcacacgctagtcggtggcggatcaaggaacactctgaccaaagcacccgtttttcgatcagatctttatctgtgtgatccctcctcagtctttcttgtgtgtgattggtggtgatggcgtgagagaacttccaggggggaacaatgcagctgacttttgtagatttaagatatgtaaaatccatgcgatattatgattgtgttttggagttttgg

SEQ ID NO: 26177 - protein, 160 aa, Zea mays subsp. mays
  misc_feature (1)..(160): Ceres Seq. ID no. 13498758
TPQFLPSFLGLKKQAAMDGDVATGGVRGHQHPHHGAGRHREREFALHPGRLPGPGVAALLRRAGARRRRRPHGQPLRRGGPRRVGPRLLPRARLRLLPLLQPRRALPQAARPHLPRAPPPPRRLRLRLRRRRPAPRGSTARRSASGSSRPPWGPSPDAAS

SEQ ID NO: 26178 - protein, 144 aa, Zea mays subsp. mays
  misc_feature (1)..(144): Ceres Seq. ID no. 13498759
MDGDVATGGVRGHQHPHHGAGRHREREFALHPGRLPGPGVAALLRRAGARRRRRPHGQPLRRGGPRRVGPRLLPRARLRLLPLLQPRRALPQAARPHLPRAPPPPRRLRLRLRRRRPAPRGSTARRSASGSSRPPWGPSPDAAS

SEQ ID NO: 26179 - protein, 91 aa, Zea mays subsp. mays
  misc_feature (1)..(91): Ceres Seq. ID no. 13498760
MRLPDDGPRQRGAGEARATRVRRRRGRRLGRRRAARHPRPFRHAHLHRHRLLRLHTLVGGGSRNTLTKAPVFRSDLYLCDPSSVFLVCDWW

SEQ ID NO: 26180 - DNA, 1636 bp, Zea mays subsp. mays
  misc_feature (1)..(1636): Ceres Seq. ID no. 13498765
acacatttttacccctcgcggcggccccaccgaccgccggggcgcagcggcgtcgccgcgggcaacgccgtcacgtcacgtgcatcacgacaatctcctcctccgcctcgtcttcctgccaggccgcgggagcaccagcccagcggcagatcagtcgacgcgggcgattccagggtttagagaggagcggagatggtgaaggtcatccaggggcgcccggccgagatggggttccggatgccggcggagtgggagccgcacgagcagtgctggatgggatggcctgagcgtccagataactggagggagaatgctggtccagctcaagaggtatttgctagaactgcaattgccatttcaaagtttgaacccgtcacgttatgtgcaagtgccaagcagtaccccaaagtccacgagctgatggaacatgaaaccaacatcagggtcgttgagatgagcatgaacgattcctggttccgcgacatgggccccacttttgtcactcataaaggggattcaggaattgcagaacaaacaatagcaggaattgattggcaattcaatgcctggggaggaatctatgacgactggagtcttgacagcgatgttgccaagaaaatagtcgagatcgagaggatccctaggtttccccaaaaaattatccttgagggtggaagcattcatgtagatggagaaggtacatgcattacaacggaagaatgcttgctgaatcctaataggaaccccaacatgaccaaactagagatagagaatgagctgaaggattttcttggagtctcgaaggtcatctggatacctcgtggactttatggtgacgaggatacaaacggccacgttgacaacctgtgctgcttcatcaaacccggtgtgatcctgctgtcgtggaccgacgacgagaaggaccatcagtacgaacggtcggtcgaggcgctgtctgttctctcccagtccgtcgacgcgaaagggcggcagctccaagtggtgaagatccacgtccccgggcctctgtacatgacagaggaagaggcacagggcgttgtttcatcggggcattctgtaccgaggccagcgggcacgaggttggccgcctcgtacgtcaacttctacatcgccaatggggggatcatagcgccttccttcggtgacaggtgggacgaggaggcgtatgcggttctccagaaggcgtttcctgatcacgaggtggtgatggtcgaaggcggacgggagatcgcgctgggaggtgggaacattcactgcatcacgcagcagcagcccgtgcgcccgtcctaggtgaaaccggcgtcgacgcgaagcgatgaagagtatgctgctcctgtgtttaagcaggtgggttggtcccctgtcgttattacgctcaccaatacgcgcgcgaaataagccgtaggtacaagttccttgacaaatactgtatgagtactattaggccttgttggtgggtcggaacgattcctaaccgaattgtttatctaatttatataaattttgattagctggaacgattccgggtgtaatccgatagaaacgaacaaggccttatactatacggcacaaatgccacagtcgtggatcaaaatggtactagttcctgtctacg

SEQ ID NO: 26181 - protein, 372 aa, Zea mays subsp. mays
  misc_feature (1)..(372): Ceres Seq. ID no. 13498766
MVKVIQGRPAEMGFRMPAEWEPHEQCWMGWPERPDNWRENAGPAQEVFARTAIAISKFEPVTLCASAKQYPKVHELMEHETNIRVVEMSMNDSWFRDMGPTFVTHKGDSGIAEQTIAGIDWQFNAWGGIYDDWSLDSDVAKKIVEIERIPRFPQKIILEGGSIHVDGEGTCITTEECLLNPNRNPNMTKLEIENELKDFLGVSKVIWIPRGLYGDEDTNGHVDNLCCFIKPGVILLSWTDDEKDHQYERSVEALSVLSQSVDAKGRQLQVVKIHVPGPLYMTEEEAQGVVSSGHSVPRPAGTRLAASYVNFYIANGGIIAPSFGDRWDEEAYAVLQKAFPDHEVVMVEGGREIALGGGNIHCITQQQPVRPS

SEQ ID NO: 26182 - protein, 361 aa, Zea mays subsp. mays
  misc_feature (1)..(361): Ceres Seq. ID no. 13498767
MGFRMPAEWEPHEQCWMGWPERPDNWRENAGPAQEVFARTAIAISKFEPVTLCASAKQYPKVHELMEHETNIRVVEMSMNDSWFRDMGPTFVTHKGDSGIAEQTIAGIDWQFNAWGGIYDDWSLDSDVAKKIVEIERIPRFPQKIILEGGSIHVDGEGTCITTEECLLNPNRNPNMTKLEIENELKDFLGVSKVIWIPRGLYGDEDTNGHVDNLCCFIKPGVILLSWTDDEKDHQYERSVEALSVLSQSVDAKGRQLQVVKIHVPGPLYMTEEEAQGVVSSGHSVPRPAGTRLAASYVNFYIANGGIIAPSFGDRWDEEAYAVLQKAFPDHEVVMVEGGREIALGGGNIHCITQQQPVRPS

SEQ ID NO: 26183 - protein, 357 aa, Zea mays subsp. mays
  misc_feature (1)..(357): Ceres Seq. ID no. 13498768
MPAEWEPHEQCWMGWPERPDNWRENAGPAQEVFARTAIAISKFEPVTLCASAKQYPKVHELMEHETNIRVVEMSMNDSWFRDMGPTFVTHKGDSGIAEQTIAGIDWQFNAWGGIYDDWSLDSDVAKKIVEIERIPRFPQKIILEGGSIHVDGEGTCITTEECLLNPNRNPNMTKLEIENELKDFLGVSKVIWIPRGLYGDEDTNGHVDNLCCFIKPGVILLSWTDDEKDHQYERSVEALSVLSQSVDAKGRQLQVVKIHVPGPLYMTEEEAQGVVSSGHSVPRPAGTRLAASYVNFYIANGGIIAPSFGDRWDEEAYAVLQKAFPDHEVVMVEGGREIALGGGNIHCITQQQPVRPS

SEQ ID NO: 26184 - DNA, 1492 bp, Zea mays subsp. mays
  misc_feature (1)..(1492): Ceres Seq. ID no. 13498770
aaaacctaggaggagcctagtggccacctagggtgaggaaaactgaggacgcgaggcgagagcgagatccaatctgcacccccccaccaaagaaagattcttccccgccggcctcgctctctcaacatccgtctcgctccttccaccctcgctgcgcctcaggcagcgagcgagcatatagcagcccaccacccacatgccgcagggccctcacccgtcgagccaattgagtggcagccagaaaaacccagagcgcgagcagcgagcgcgagcgactcggcagcgagcgcgggctcctgtgtgcagtgtgtctgcgctagagggcgaagggcacggaccgccttcgtcaataattgcggtacgaacggggcaaatccgtcgtttaaagaggtcgctgatagcgcctgctggtggcgagagagaaagcagcagaatcgctgagggatcgtcgatccggagaggcaaaaaagccgagagatcaggcagggcaccatggggcgcgggaaggtggtgctgcagcggatcgagaacaagatcagccggcaggtgaccttcgccaagcgccggaacggcctgctcaagaaggcgtacgagctctccgtcctctgcgacgccgaggtcgcgctcgtcctcttctcccacgccggccgcctctaccagttctcatcctcctccaatctgcttaagactctagagcggtaccagaggtacatctatgcttcagccgatgctgcagtgccatctagcgatcagatgcagaataactatcaagaatatgtgaagctgaaggcacgagttgaggttttacagcactcacaaaggaatcttcttggtgaagatctggccctacttagcccaagtgaacttgaccagcttgagaatcaagtagacaagaccttgaagcaaataagatcaagaaagactcaagtgttacttgatgaactttgtgacttaaagagaaaggaacaaatgctgcaagatgcaaacagggttctgaaaaggaagctgggcgagtttgaggcagaggcggcttctcccccgcagttagcgtggcaaggcgaaggcggcatgttgtcccatgaccctccacagccagaacacttcttccaggctctggagagcaacccatgtctgcaacctacataccatacgatggacatgaaccagcagccagtgccagcgccgggcggctgctatcctgcatggatgtcttagccagtgcttcattccattgccttgagaagtgtcctgaccttcacagatccctacgagctttattactgcttttgcctgcccctttgctgcttgcggtgcttactgaactgtccaaatgaccacatggtcatatataggttattgctgtctttatcttatgttgatcacggcctgctcagctgctttagcgccatgcaaaatggcttgggcgatgcacgcttgaatgggtcgaactgcttatgttttgggagtataaatcacttagcaataagcattg

SEQ ID NO: 26185 - protein, 240 aa, Zea mays subsp. mays
  misc_feature (1)..(240): Ceres Seq. ID no. 13498771
MGRGKVVLQRIENKISRQVTFAKRRNGLLKKAYELSVLCDAEVALVLFSHAGRLYQFSSSSNLLKTLERYQRYIYASADAAVPSSDQMQNNYQEYVKLKARVEVLQHSQRNLLGEDLALLSPSELDQLENQVDKTLKQIRSRKTQVLLDELCDLKRKEQMLQDANRVLKRKLGEFEAEAASPPQLAWQGEGGMLSHDPPQPEHFFQALESNPCLQPTYHTMDMNQQPVPAPGGCYPAWMS

SEQ ID NO: 26186 - protein, 153 aa, Zea mays subsp. mays; identical to SEQ ID NO: 23116
  misc_feature (1)..(153): Ceres Seq. ID no. 13498772

SEQ ID NO: 26187 - DNA, 1599 bp, Zea mays subsp. mays
  misc_feature (1)..(1599): Ceres Seq. ID no. 13498780
ttgctgtcgcacggagaagaaaaaaaaaacaggcactgagctgagatggcgaagcacttggctgccatgtgcaggtgcagcctcctagtgcttgtactgctctgcttgggctcccagctggcccaatcccaggtcctcttccagggtttcaactgggagtcgtggaagaagcaaggtgggtggtacaactacctcctggggcgggtggacgacatcgccgcgacgggggccacgcacgtctggctcccgccgccgtcgcactcggtggcgccgcaggggtacatgcccggccggctctacgacctggacgcgtccaagtacggcacccacgcggagctcaagtcgctcaccgcggcgttccacgccaagggcgtcaagtgcgtcgccgacgtcgtgatcaaccaccgctgcgccgactacaaggacggccgcggcatctactgcgtcttcgagggcggcacgcccgacagccgcctcgactggggccccgacatgatctgcagcgacgacacgcagtactccaacgggcgcgggcaccgcgacacgggggccgacttcgccgccgcgcccgacatcgaccacctcaacccgcgcgtgcagcaggagctctcggactggctcaactggctcaagtccgacctcggcttcgacggctggcgcctcgacttcgccaagggctactccgccgccgtcgccaaggtgtacgtcgacagcaccgcccccaccttcgtcgtcgccgagatatggagctccctccactacgacggcaacggcgagccgtccagcaaccaggacgccgacaggcaggagctggtcaactgggcgcaggcggtgggcggccccgccgcggcgttcgacttcaccaccaagggcgtgctgcaggcggccgtccagggcgagctgtggcgcatgaaggacggcaacggcaaggcgcccgggatgatcggctggctgccggagaaggccgtcacgttcgtcgacaaccacgacaccggctccacgcagaactcgtggccattcccctccgacaaggtcatgcagggctacgcctatatcctcacgcacccaggaactccatgcatcttctacgaccacgttttcgactggaacctgaagcaggagatcagcgcgctgtctgcggtgaggtcaagaaacgggatccacccggggagcgagctgaacatcctcgccgccgacggggatctctacgtcgccaagattgacgacaaggtcatcgtgaagatcgggtcacggtacgacgtcgggaacctgatcccctcagacttccacgccgttgcccatggcaacaactactgcgtttgggagaagcacggtctgagagttccagcggggcggcaccactagactagacccattccgcccagcaacccctacagataattctcttttcaggtccattttgaacctggaaaagaaatttaagagaggctaaataaccggaatacgattgtgtactgagcttctttcacgtaattattgaaagaagattataatgtttggatgcactattaattatgttggcatggggatttttgtaacctcttaaaacgaggaaataaagactgttcttattaagcc

SEQ ID NO: 26188 - protein, 439 aa, Zea mays subsp. mays
  misc_feature (1)..(439): Ceres Seq. ID no. 13498781
MAKHLAAMCRCSLLVLVLLCLGSQLAQSQVLFQGFNWESWKKQGGWYNYLLGRVDDIAATGATHVWLPPPSHSVAPQGYMPGRLYDLDASKYGTHAELKSLTAAFHAKGVKCVADVVINHRCADYKDGRGIYCVFEGGTPDSRLDWGPDMICSDDTQYSNGRGHRDTGADFAAAPDIDHLNPRVQQELSDWLNWLKSDLGFDGWRLDFAKGYSAAVAKVYVDSTAPTFVVAEIWSSLHYDGNGEPSSNQDADRQELVNWAQAVGGPAAAFDFTTKGVLQAAVQGELWRMKDGNGKAPGMIGWLPEKAVTFVDNHDTGSTQNSWPFPSDKVMQGYAYILTHPGTPCIFYDHVFDWNLKQEISALSAVRSRNGIHPGSELNILAADGDLYVAKIDDKVIVKIGSRYDVGNLIPSDFHAVAHGNNYCVWEKHGLRVPAGRHH

SEQ ID NO: 26189 - protein, 432 aa, Zea mays subsp. mays
  misc_feature (1)..(432): Ceres Seq. ID no. 13498782
MCRCSLLVLVLLCLGSQLAQSQVLFQGFNWESWKKQGGWYNYLLGRVDDIAATGATHVWLPPPSHSVAPQGYMPGRLYDLDASKYGTHAELKSLTAAFHAKGVKCVADVVINHRCADYKDGRGIYCVFEGGTPDSRLDWGPDMICSDDTQYSNGRGHRDTGADFAAAPDIDHLNPRVQQELSDWLNWLKSDLGFDGWRLDFAKGYSAAVAKVYVDSTAPTFVVAEIWSSLHYDGNGEPSSNQDADRQELVNWAQAVGGPAAAFDFTTKGVLQAAVQGELWRMKDGNGKAPGMIGWLPEKAVTFVDNHDTGSTQNSWPFPSDKVMQGYAYILTHPGTPCIFYDHVFDWNLKQEISALSAVRSRNGIHPGSELNILAADGDLYVAKIDDKVIVKIGSRYDVGNLIPSDFHAVAHGNNYCVWEKHGLRVPAGRHH

SEQ ID NO: 26190 - protein, 360 aa, Zea mays subsp. mays
  misc_feature (1)..(360): Ceres Seq. ID no. 13498783
MPGRLYDLDASKYGTHAELKSLTAAFHAKGVKCVADVVINHRCADYKDGRGIYCVFEGGTPDSRLDWGPDMICSDDTQYSNGRGHRDTGADFAAAPDIDHLNPRVQQELSDWLNWLKSDLGFDGWRLDFAKGYSAAVAKVYVDSTAPTFVVAEIWSSLHYDGNGEPSSNQDADRQELVNWAQAVGGPAAAFDFTTKGVLQAAVQGELWRMKDGNGKAPGMIGWLPEKAVTFVDNHDTGSTQNSWPFPSDKVMQGYAYILTHPGTPCIFYDHVFDWNLKQEISALSAVRSRNGIHPGSELNILAADGDLYVAKIDDKVIVKIGSRYDVGNLIPSDFHAVAHGNNYCVWEKHGLRVPAGRHH

SEQ ID NO: 26191 - DNA, 1740 bp, Zea mays subsp. mays
  misc_feature (1)..(1740): Ceres Seq. ID no. 13498786
gggctgcctgctcacacttcgccactactgctgctgcgcgttggcgagcgcgcgtggttcacgagcgagctccaccacaagcccagtcgcgcacggcagccgttttgcttgttttgtttgctttccgcctcttccgtgcttcctcttttgggcggcctggctgggctagctagctgttctgttcattccgagttcccggcatagaacacgaggttggagttagaggcttaccgagggagcagacagcagaggtcactagcgatttcacagtcacgcacctgcatttcttcttttttttcttcttcttttctttagcaagctctctttcttttcttgctcttgttttgtttgtcctccctgtaataactcttgcctgccttcccctaccctggtctctttccttcttcctgcactgcaggacactataagagtagctagccctacccaatatcttcagccgtgcttgccaacttggagagagagagagagagagagagagagagagagagagagagagagagagagagagagagagagagagagagagagagagagagagagagagagagaagagaagagaagagragagaagggagtgagtgatcgcaggaaggaggatcggagtgatgggagacgcagcagagaccaacaagactcttcacaactggatgggcgagccgaggccgaggtcgagcgaccagcgcgacgaggaggagacgcttcagctcagcctcggcctccccggaggaggagcaagtgcgggtggtggggtagcacccgccgcctggagaatgctgccggccagagacgaggagatgcgctctgctgctgctgtcgtcgacacctccctgctctctctcggctactccgccccagctttctcgccccgctcaccaggcaaggcaaaggggtccccagcagcagctacagagaatgcccttgcatccaccaacaacgcctcccagagaagatctccaaataccccggttattgggtggcctccagttcgtgccttcagaagaaatctggccacctctagcagagcatcccttgaacatcagaatgggaagaaggaagacaaacctgaacagaccacaaaaagagctccatttgtaaagatcaacatggacggcatccctattggtagaaaaatcgatctgagtgccctcggtagttacgatgagctgtctctgtctgtcgacaagctattccgggggcttsttgcagcacaacaagaccctctggctgccggcgcaaaggagtgttcacaggaagaggtggcgatatcgggtttactagatggaactggggagtacactctggtttatgaggattatgaaggcgatagggtgctggttggcgatgtcccctgggggatgtttgtttcttcggtgaagagstgcgcgttctgaagacatctgacctctcttcatctctaacagcacctcctggccagaagaggacggtaactgagtgtccagtgtttacctcttagacacttccttgcagtgatgttggtgtgctgtgaagaagaaaacgtcttctgagcttgtatcatctttcttcgtggtttcttcctcttcttttccctactttctcttggaagggatcatcaaagaaccgaaccgaccttttgggttttcctgctcttgtttattttgtttctctttccgggaagcgatgtgaccttttgggttgtatgtaaatgttcagacgaaccagctctatgtttatgcagcc

SEQ ID NO: 26192 - protein, 261 aa, Zea mays subsp. mays
  misc_feature (1)..(261): Ceres Seq. ID no. 15223050
  misc_feature (199)..(199): Xaa is any aa, unknown or other
  misc_feature (258)..(258): Xaa is any aa, unknown or other
MGDAAETNKTLHNWMGEPRPRSSDQRDEEETLQLSLGLPGGGASAGGGVAPAAWRMLPARDEEMRSAAAVVDTSLLSLGYSAPAFSPRSPGKAKGSPAAATENALASTNNASQRRSPNTPVIGWPPVRAFRRNLATSSRASLEHQNGKKEDKPEQTTKRAPFVKINMDGIPIGRKIDLSALGSYDELSLSVDKLFRGLXAAQQDPLAAGAKECSQEEVAISGLLDGTGEYTLVYEDYEGDRVLVGDVPWGMFVSSVKXCAF

SEQ ID NO: 26193 - protein, 247 aa, Zea mays subsp. mays
  misc_feature (1)..(247): Ceres Seq. ID no. 15223051
  misc_feature (185)..(185): Xaa is any aa, unknown or other
  misc_feature (244)..(244): Xaa is any aa, unknown or other
MGEPRPRSSDQRDEEETLQLSLGLPGGGASAGGGVAPAAWRMLPARDEEMRSAAAVVDTSLLSLGYSAPAFSPRSPGKAKGSPAAATENALASTNNASQRRSPNTPVIGWPPVRAFRRNLATSSRASLEHQNGKKEDKPEQTTKRAPFVKINMDGIPIGRKIDLSALGSYDELSLSVDKLFRGLXAAQQDPLAAGAKECSQEEVAISGLLDGTGEYTLVYEDYEGDRVLVGDVPWGMFVSSVKXCAF

SEQ ID NO: 26194 - protein, 206 aa, Zea mays subsp. mays
  misc_feature (1)..(206): Ceres Seq. ID no. 15223052
  misc_feature (144)..(144): Xaa is any aa, unknown or other
  misc_feature (203)..(203): Xaa is any aa, unknown or other
MLPARDEEMRSAAAVVDTSLLSLGYSAPAFSPRSPGKAKGSPAAATENALASTNNASQRRSPNTPVIGWPPVRAFRRNLATSSRASLEHQNGKKEDKPEQTTKRAPFVKINMDGIPIGRKIDLSALGSYDELSLSVDKLFRGLXAAQQDPLAAGAKECSQEEVAISGLLDGTGEYTLVYEDYEGDRVLVGDVPWGMFVSSVKXCAF

SEQ ID NO: 26195 - DNA, 1812 bp, Zea mays subsp. mays
  misc_feature (1)..(1812): Ceres Seq. ID no. 13498787
attaaaaaagggttccccacagcaccaagcgcgacgtgagcgaggaggcaggcgcgcacggcgtgtcggcgtcgcaccgaacccgacacggctcggcctacggcccccacacatccggctgggccgttccgttccgtttcgttcccttcccattcttctcgtacgcggccgattgctgaccctcgctcgccctcgcttccccaccacagcaccgaaactgccccgcctccgcagccgccgcccgcgcccgctcgtcctccccgcgccgcctcggggacgccccggtcggcgatgtggcgggagcatgctaggcccgctcctcaggctcctctcggcgtgcggcggggtctggcccacctcgccggcccccggcgccgcggcctcctcttccgcctcctccggggacgactctgagggccgcgacggccttctctggtggcgcgacctcgcgcgctgccacgccggcgacgtctccgtcgccgtcgcccaggccaaccaggtgctcgaggaccagtgccgcctcgactccgccccgtccatcggcaccgtcgtcggcgtcttcgacggccacggcggccccgacgccgcccgcttcgcctgcgaccaccttgtccccaacctccgagaggcgtcctccggcccgcggggcgtcaccgcagacgccatcagggaggccttcctggccacggaggaaggattcctcgcgctcgtgtcaagcctctgggaggcccagccggacatcgccacggccgggacatgctgccttgtcggcgtcgtgcacaacaggacccttttcgtcgccaacctcggcgactcccgggccgtcctcgggaagaaggcgggccgcgctggccagatcgccgcggagcagttgtccagcgagcacaatgccaaccaggaggctgtcaggcaggagctcatggcgcaacacccagatgatgctcagattgttgcgctcaagcatggggtctggagagtgaggggcctcatacaggtgtctagatcaatcggtgatgtatacctgaaacatgcaaagtataacacagaccagatcaaacccaagttcaggcttcccgaatcattcagcaagccactattgagtgccgatccatctatcatctcccgcgatcttgaaccaaatgactgtttcatcatattcgcatcagatggattgtgggagcacctcagcaatcaagaagccgttgagattgttcacagccatcaacgtgctggaagcgcaagaagactcattaaagccgctctacaagaagcagcgcggaagcgtgagatgcgttactcggatcttacaaagatcgataagaaagttcgcaggcatttccatgatgacattactgtcatcgtcttatttataaactatgacctattattgaaaggtgctccgcagggacaacccctctccatcagatgtgccctagattattgacagtgagctagttcacccactggtattcaagctcctgcgggcagccatatccagagtcagctgacatggtcaaccggttgtgaaaagcgcacaacctccggcaccagtttccttttcgtttccccttttttgcacataaaattgacaagtcgctgaaattgccagttttcccctcttggattatgtcggataaaatgcgtatactcttcggttttggagatatatgtctagactctagagcgtgagggaaggttataaagtcttgtatgtctttgttctcttgcagtcttgcttacagttacagctagctctttttgtatgtaacaattgtcagcaatcagcatgtttaaccacctccgtgacgtttt

SEQ ID NO: 26196 - protein, 480 aa, Zea mays subsp. mays
  misc_feature (1)..(480): Ceres Seq. ID no. 13498788
LKKGSPQHQARRERGGRRARRVGVAPNPTRLGLRPPHIRLGRSVPFRSLPILLVRGRLLTLARPRFPTTAPKLPRLRSRRPRPLVLPAPPRGRPGRRCGGSMLGPLLRLLSACGGVWPTSPAPGAAASSSASSGDDSEGRDGLLWWRDLARCHAGDVSVAVAQANQVLEDQCRLDSAPSIGTVVGVFDGHGGPDAARFACDHLVPNLREASSGPRGVTADAIREAFLATEEGFLALVSSLWEAQPDIATAGTCCLVGVVHNRTLFVANLGDSRAVLGKKAGRAGQIAAEQLSSEHNANQEAVRQELMAQHPDDAQIVALKHGVWRVRGLIQVSRSIGDVYLKHAKYNTDQIKPKFRLPESFSKPLLSADPSIISRDLEPNDCFIIFASDGLWEHLSNQEAVEIVHSHQRAGSARRLIKAALQEAARKREMRYSDLTKIDKKVRRHFHDDITVIVLFINYDLLLKGAPQGQPLSIRCALDY

SEQ ID NO: 26197 - protein, 379 aa, Zea mays subsp. mays
  misc_feature (1)..(379): Ceres Seq. ID no. 13498789
MLGPLLRLLSACGGVWPTSPAPGAAASSSASSGDDSEGRDGLLWWRDLARCHAGDVSVAVAQANQVLEDQCRLDSAPSIGTVVGVFDGHGGPDAARFACDHLVPNLREASSGPRGVTADAIREAFLATEEGFLALVSSLWEAQPDIATAGTCCLVGVVHNRTLFVANLGDSRAVLGKKAGRAGQIAAEQLSSEHNANQEAVRQELMAQHPDDAQIVALKHGVWRVRGLIQVSRSIGDVYLKHAKYNTDQIKPKFRLPESFSKPLLSADPSIISRDLEPNDCFIIFASDGLWEHLSNQEAVEIVHSHQRAGSARRLIKAALQEAARKREMRYSDLTKIDKKVRRHFHDDITVIVLFINYDLLLKGAPQGQPLSIRCALDY

SEQ ID NO: 26198 - DNA, 1389 bp, Zea mays subsp. mays
  misc_feature (1)..(1389): Ceres Seq. ID no. 13498794
gcattgagcgcgattcattcccctcgtgggctcccagttcagtaaaccctacgccctgcggcacacacccatctcgccgcgccgccgcgtaaaccccacccgagcccatctcgccctcgcgcctccccgccctcgcgcaggcgcaacaatggcggccgcctcgaggggcctgctcgcgcgcctccgtgtcctctcactctccggcggcgggagcccgtggctccgcttccccgccttcccggctcttctccgcggaggccttcgtctcccattccgatgacgacgacgctgggggcgagggaggaggcgggggccggatcatcgaggcacggtccggggtgatgggccccacctcgcggcgcaccggcgtcatcggcgtcaagtgcgggatgtcggcgatgtgggacaagtggggcgccaaggtgcccatcaccgtcctctgggtcgacgacaacgttgttacccaggtcaagaccgccgagaaggagggtttcttcgccctacagcttggagcaggtcaaaagaaggaaaaacacctaacaaagcctgaagttggccactttagagcacagggagtgcctctgaaaagaaagctaagggaatttcctgtcactgaggatgcgcttcttcctgttggcacaagcatcacagttcgtcactttgttcctggacaatttgttgatgtcactggaatcacgaaggggaaaggttttgcaggtgtaatgaaaagatatggttttggtgggatgcctgcatcacatggaacatctttggcgcatcgcagtggtggctctactggtcaaagagatgctcctggaagggttttcaaaaacagaaaaatgcctggacgcatgggtggtgtgcaacgcacagtgaagaatgtatgggtctatcaaatagacccagccaggaacttactgtatctgaagggccaggttcctggtcctcaaggtagctttattttcgttaaggattctatatataagaaacctgacacggctttgctcccatttcctacatacttcacgcgtgaaggtgagcctgaagacttggagcccctgattgctgatcttggtgatgttgacccattcatggcagccgattaagacaatgcacaaagttggttaattcctttttgtgttctaagcactccttgagctcgtccattccacgagattgtcaaactctcgatggatgtgagcagttcctgaatcacaagctttatccggttactggccagcctgatcaatgttgttccatgtacattacctggcaagtataccagtgctctaatggtttttagatgattgttttgattgaccgaatataacctttttctcaataagttgtacgcggagccacaagtagtatataaaatcagaatatttc

SEQ ID NO: 26199 - protein, 254 aa, Zea mays subsp. mays
  misc_feature (1)..(254): Ceres Seq. ID no. 13498795
MGPTSRRTGVIGVKCGMSAMWDKWGAKVPITVLWVDDNVVTQVKTAEKEGFFALQLGAGQKKEKHLTKPEVGHFRAQGVPLKRKLREFPVTEDALLPVGTSITVRHFVPGQFVDVTGITKGKGFAGVMKRYGFGGMPASHGTSLAHRSGGSTGQRDAPGRVFKNRKMPGRMGGVQRTVKNVWVYQIDPARNLLYLKGQVPGPQGSFIFVKDSIYKKPDTALLPFPTYFTREGEPEDLEPLIADLGDVDPFMAAD

SEQ ID NO: 26200 - protein, 238 aa, Zea mays subsp. mays
  misc_feature (1)..(238): Ceres Seq. ID no. 13498796
MSAMWDKWGAKVPITVLWVDDNVVTQVKTAEKEGFFALQLGAGQKKEKHLTKPEVGHFRAQGVPLKRKLREFPVTEDALLPVGTSITVRHFVPGQFVDVTGITKGKGFAGVMKRYGFGGMPASHGTSLAHRSGGSTGQRDAPGRVFKNRKMPGRMGGVQRTVKNVWVYQIDPARNLLYLKGQVPGPQGSFIFVKDSIYKKPDTALLPFPTYFTREGEPEDLEPLIADLGDVDPFMAAD

SEQ ID NO: 26201 - protein, 235 aa, Zea mays subsp. mays
  misc_feature (1)..(235): Ceres Seq. ID no. 13498797
MWDKWGAKVPITVLWVDDNVVTQVKTAEKEGFFALQLGAGQKKEKHLTKPEVGHFRAQGVPLKRKLREFPVTEDALLPVGTSITVRHFVPGQFVDVTGITKGKGFAGVMKRYGFGGMPASHGTSLAHRSGGSTGQRDAPGRVFKNRKMPGRMGGVQRTVKNVWVYQIDPARNLLYLKGQVPGPQGSFIFVKDSIYKKPDTALLPFPTYFTREGEPEDLEPLIADLGDVDPFMAAD

SEQ ID NO: 26202 - DNA, 1170 bp, Zea mays subsp. mays
  misc_feature (1)..(1170): Ceres Seq. ID no. 13498830
gccatttttggtgagtgcgccctttcccttcctccccagatccccgtccccgttttccacttttgcctccgccccaattcggataacaaacccctccgcctcgtcgcgtctcctcccagccgagccgatccggtagagagagggagagggagggactgagggaggaggagctgggttccggtcccggccgcccggccggctgcgcgattcgattgcagctctcgtccccgggcggcgtccaggatggtgcggggcaagacgcagatgaagcggatagagaacccgaccagccgccaggtcaccttctccaagcgccgcaacggcctgctcaagaaggcgttcgagctctccgtcctctgcgacgccgaggtcgccctcgtcgtcttctccccgcgcggcaagctctacgaattcgccagcggaagtgcgcagaaaacgattgaacgttatagaacatacacaaaggataatgtcagcaacaagacagtgcagcaggatattgagcgagtaaaagctgatgcggatggcctgtcaaagagactcgaagcacttgaagcttacaaaaggaaacttttgggtgagaggttggaagactgctccattgaagagctgcacagtttggaagtcaagcttgagaagagcctgcattgcatcaggggaagaaagactgagctgctggaggagcaagtccgtaagctgaagcagaaggagatgagtctgcgcaagagcaacgaagatttgcgtgaaaagtgcaagaagcagccgcctgtgccgatggcttcggcgccgcctcgtgcgccggcagtcgacaacgtggaggacggtcaccgggagccgaaggacgacgggatggacgtggagacggagctgtacataggattgcccggcagagactaccgctcaagcaaagacaaggctgcagtggcggtcaggtcaggctagcagctacctcagccacgcacaggcccaatcaacgcaagctagctagctgagaataatcttttagatctctggtagtgtggagatcgagatgcaagccaagcaatgtgatatcgcgttgtgtgttaccaacctgtcagtctgtgtatcatcccgtcccgtccgtcagagtctcagagaacgaacacttcttctccttctccctgtagctagctgctcctgcttgtgtcc

SEQ ID NO: 26203 - protein, 232 aa, Zea mays subsp. mays
  misc_feature (1)..(232): Ceres Seq. ID no. 13498831
MVRGKTQMKRIENPTSRQVTFSKRRNGLLKKAFELSVLCDAEVALVVFSPRGKLYEFASGSAQKTIERYRTYTKDNVSNKTVQQDIERVKADADGLSKRLEALEAYKRKLLGERLEDCSIEELHSLEVKLEKSLHCIRGRKTELLEEQVRKLKQKEMSLRKSNEDLREKCKKQPPVPMASAPPRAPAVDNVEDGHREPKDDGMDVETELYIGLPGRDYRSSKDKAAVAVRSG

SEQ ID NO: 26204 - protein, 225 aa, Zea mays subsp. mays
  misc_feature (1)..(225): Ceres Seq. ID no. 13498832
MKRIENPTSRQVTFSKRRNGLLKKAFELSVLCDAEVALVVFSPRGKLYEFASGSAQKTIERYRTYTKDNVSNKTVQQDIERVKADADGLSKRLEALEAYKRKLLGERLEDCSIEELHSLEVKLEKSLHCIRGRKTELLEEQVRKLKQKEMSLRKSNEDLREKCKKQPPVPMASAPPRAPAVDNVEDGHREPKDDGMDVETELYIGLPGRDYRSSKDKAAVAVRSG

SEQ ID NO: 26205 - DNA, 1305 bp, Zea mays subsp. mays
  misc_feature (1)..(1305): Ceres Seq. ID no. 13498849
aaaaaaccgccccctcccttcctcttctcctagctctcttgcctgcgcaccactcgagtcgagactcgagaggcacctgatctttccttcccgtcttcctcccacacgtccccatcaccattgctgcgacgagagtgagcgggagagggtaggtggcgaggcggcggagatggggcgggggccggtgcagctgcgccggatcgagaacaagatcaaccgccaggtgaccttctccaagcgccggaacgggctgctgaagaaggcccacgagatctccgtgctctgcgacgcagaggtcgcgctcatcgtcttctccactaaggggaagctctacgagtactctagccattccagcatggaaggcattcttgagcgttaccagcgttactcatttgaagaaagggcagtacttaacccaagtattgaagaccaggcaaattggggagatgaatatgtccggttaaaatccaaacttgatgcacttcagaagagtcaaaggcagctgttaggagaacaattgagttcactgaccataaaagaactccagcaactggagcaacaactggacagttctttgaagcatattaggtcaagaaagaatcagctcatgttcgattcaatttccgcgcttcagaaaaaggagaaagcacttacagatcaaaacggtgtcctgcaaaagttcatggaggcagagaaggagaaaaacaaggctttgatgaacgcgcagctccgggagcagcaaaatggagcatcaacaagctccccatcactttcaccaccaatagttccagattccatgccaactctaaatatagggccatgtcaacatagaggggcagcagaatctgagtctgaaccgtctcctgctcctgcacaagcaaacaggggcaacctgccaccatggatgctccgcactgtcaagtaacaggtgaggtcttcccagtgtagttttgcagctgatctcgacagcaacacacctgtcaccgaaatgcttcggtgaccctagatatcaaccgatgcacgatccatctcgatcctgtgatcgaataccggcgtaggtactaccaataaagtcaggccccgtcaaatgctttacatggtgattgaagtctggagcttctcagcaccaccatatattgtgttcagttcctgtgtttattgccatagctaccctttttttctctgatctacgagctagacgtagctttgtgcttggagattccactactatgtttcctctgtcctgtgtatgctttaacggagatgcacgttgtacccgtggtaatatatataaatttgcgttgt

SEQ ID NO: 26206 - protein, 307 aa, Zea mays subsp. mays
  misc_feature (1)..(307): Ceres Seq. ID no. 13498850
KNRPLPSSSPSSLACAPLESRLERHLIFPSRLPPTRPHHHCCDESERERVGGEAAEMGRGPVQLRRIENKINRQVTFSKRRNGLLKKAHEISVLCDAEVALIVFSTKGKLYEYSSHSSMEGILERYQRYSFEERAVLNPSIEDQANWGDEYVRLKSKLDALQKSQRQLLGEQLSSLTIKELQQLEQQLDSSLKHIRSRKNQLMFDSISALQKKEKALTDQNGVLQKFMEAEKEKNKALMNAQLREQQNGASTSSPSLSPPIVPDSMPTLNIGPCQHRGAAESESEPSPAPAQANRGNLPPWMLRTVK

SEQ ID NO: 26207 - protein, 251 aa, Zea mays subsp. mays
  misc_feature (1)..(251): Ceres Seq. ID no. 13498851
MGRGPVQLRRIENKINRQVTFSKRRNGLLKKAHEISVLCDAEVALIVFSTKGKLYEYSSHSSMEGILERYQRYSFEERAVLNPSIEDQANWGDEYVRLKSKLDALQKSQRQLLGEQLSSLTIKELQQLEQQLDSSLKHIRSRKNQLMFDSISALQKKEKALTDQNGVLQKFMEAEKEKNKALMNAQLREQQNGASTSSPSLSPPIVPDSMPTLNIGPCQHRGAAESESEPSPAPAQANRGNLPPWMLRTVK

SEQ ID NO: 26208 - protein, 189 aa, Zea mays subsp. mays
  misc_feature (1)..(189): Ceres Seq. ID no. 13498852
MEGILERYQRYSFEERAVLNPSIEDQANWGDEYVRLKSKLDALQKSQRQLLGEQLSSLTIKELQQLEQQLDSSLKHIRSRKNQLMFDSISALQKKEKALTDQNGVLQKFMEAEKEKNKALMNAQLREQQNGASTSSPSLSPPIVPDSMPTLNIGPCQHRGAAESESEPSPAPAQANRGNLPPWMLRTVK

SEQ ID NO: 26209 - DNA, 1196 bp, Zea mays subsp. mays
  misc_feature (1)..(1196): Ceres Seq. ID no. 13498872
ctcccctcctccgcacaaacgcgtcgcatccgctccacaggatcctctgcgccaccgcaaccgtgtgaccgcccgtgccgccggcgatcccgatccgccgacccgtcccagccccgctcgcagccatgtcgccgtcggagccgacgcgggaggagagcgtgtacatggccaagcttgcggagcaggcggagcggtacgaggagatggtcgagttcatggagcgcgtcgcgcgstacgccgggggcgccggcggcggggacgagctctcggtggaggagcgcaacctgctgtccgtcgcctacaagaacgtcatcggcgcccgcagggcctcgtggcggatcatctcctccatcgagcagaaggaggaaggccgcgggaacgaggcgcacgccgcatccatccgcgcctaccgctccaagatcgaggccgagcttgcccgcatctgcgacggcatcctcgcgctcctcgactcccacctcgtcccatccgccggcggcccgagtccaaggtcttctacctcaagatgaagggtgactaccacaggtaccttgctgagttcaagtcaggtgcagagaggaaggatgctgcggagagcaccatgaatgcctacaaagctgctcaggatattgctcttgctgatctggccccaacccaccccatcaggctcgggcttgctctcaacttctcagtgttctactacgagatcctcaactcccctgaccgtgcttgcaaccttgcaaagcaggcctttgatgaggcaatctccgaactagacagcctgggagaggagtcctacaaggacagcactctgatcatgcagctcctgcgtgacaacttgaccctatggacttccgacaccaacgaggacgccggagatgagatcaaggaagcagctgctgcccccaaagaatccgcccccgagggccagtaagacggatccgatctcccgacctgatgcgtgtctgctgatgtcggggagtttaccaggactgtgccgttcttgatttctgatagcttatcttctagtacacctcgtgttgttctcttcgtcacggcgccggtgcgtgtgcgctgaagctgcctgccattgccattgccgctgtttttaattaagcacacactctagatgttatgcccgcatgctatgtttcgattctcaaagttgataaatgatggctggatgctggttttcgtgc

SEQ ID NO: 26210 - protein, 309 aa, Zea mays subsp. mays
  misc_feature (1)..(309): Ceres Seq. ID no. 15223053
  misc_feature (78)..(78): Xaa is any aa, unknown or other
SPPPHKRVASAPQDPLRHRNRVTARAAGDPDPPTRPSPARSHVAVGADAGGERVHGQACGAGGAVRGDGRVHGARRAXRRGRRRRGRALGGGAQPAVRRLQERHRRPQGLVADHLLHRAEGGRPRERGARRIHPRLPLQDRGRACPHLRRHPRAPRLPPRPIRRRPESKVFYLKMKGDYHRYLAEFKSGAERKDAAESTMNAYKAAQDIALADLAPTHPIRLGLALNFSVFYYEILNSPDRACNLAKQAFDEAISELDSLGEESYKDSTLIMQLLRDNLTLWTSDTNEDAGDEIKEAAAAPKESAPEGQ

SEQ ID NO: 26211 - protein, 177 aa, Zea mays subsp. mays
  misc_feature (1)..(177): Ceres Seq. ID no. 15223054
  misc_feature (78)..(78): Xaa is any aa, unknown or other
LPSSAQTRRIRSTGSSAPPQPCDRPCRRRSRSADPSQPRSQPCRRRSRRGRRACTWPSLRSRRSGTRRWSSSWSASRXTPGAPAAGTSSRWRSATCCPSPTRTSSAPAGPRGGSSPPSSRRRKAAGTRRTPHPSAPTAPRSRPSLPASATASSRSSTPTSSHPPAARVQGLLPQDEG

SEQ ID NO: 26212 - DNA, 1596 bp, Zea mays subsp. mays
  misc_feature (1)..(1596): Ceres Seq. ID no. 13498873
aatttttcgcgaagtttgtgttgtgattgcgccgttacgttacgtgaagaagacggatcttctacaagctgacggaagggcggatcgtgaaattgcgagttgcgacgccgtcattacaaatacgttatctgttcatccgtcaagccgtcagatctcccggcctgaggattcgattattctttcgctctcgcccaagtcatcgtctggtcgtcgcccgcagaggcgcagacgcccaaaaccggaaggggcgccatggccgcgtcggatctggagagcaaggccaaggaggccttcgtcgacgacgacttcgagctggccaccgagctctacagccaggccatcgacgccgggcccgccaccgccgacctctatgccgaccgcgcccaggcgcacatcaagctcggcaactacactgaggctgtggcggatgctaacaaagcaattgagcttgatcctatgatgcataaagcttactaccggaaaggtgctgcatgcattaagcttgaagaataccaaactgcaaaggctgctcttgagttgggttcttcttatgcatcaggcgattcaaggtttgctcgtctattgaaggaatgtgatgagcgcatcgctgaggaatctagccaggcaccagtaaagaatgttgaggctactgtggctgctactattgaggacaaggaggatttcacaaatatggagaatacaccaccagtgatagaacccccaagcaaaccaaaatacaggcatgactactacaacagtgccacagaagtggtactgacaatatttgctaacggtgttcctgctgatagtgtagtcattgattttggtgaacagatgttgagtgtatccattgaagttcctggtgaagaaccataccattttcagccccgtctgttttctaagattatccctgagaaatgcaaatatcaagtcttatccaccaaggtcgaaatacgccttgcaaaagctgagcaggtgacatggacaaccctggattatagtggaagaccaaagactgttccccagaagataagcacgccagctgaaacagccccaagaccttcatacccatcttcaaaggcgaaaaaagactgggataaactggaagctgaagtcaaaaaggaggagaaggaagaaaaacttgatggtgatgctgcattgaacaaattcttccgtgacatctacaaggatgctgatgaagatatgcggagggccatgatgaagtcattcgtggaatcaaatggcactgttctctcaaccaattggaaagatgttggagcaaagaaggtagaagggagcccccctgatggtatggagctcaagaagtgggaatactaaagtttggactgcccatcttttgtaaatccaggtcttggaaactatgacctaattccgtccacccatagtgccatgagcttgcttggttaagtctctgcttttgtaagctttctgtatgacagtctagcgtgtgtctgagtgctacttgccgtagcttttgatggacataggtatgctattatgtggtatcgaccgggaaccatctgtggtatcaaagacagcaaactataatgtatggaatgcctattctttttggcc

SEQ ID NO: 26213 - protein, 361 aa, Zea mays subsp. mays
  misc_feature (1)..(361): Ceres Seq. ID no. 13498874
MAASDLESKAKEAFVDDDFELATELYSQAIDAGPATADLYADRAQAHIKLGNYTEAVADANKAIELDPMMHKAYYRKGAACIKLEEYQTAKAALELGSSYASGDSRFARLLKECDERIAEESSQAPVKNVEATVAATIEDKEDFTNMENTPPVIEPPSKPKYRHDYYNSATEVVLTIFANGVPADSVVIDFGEQMLSVSIEVPGEEPYHFQPRLFSKIIPEKCKYQVLSTKVEIRLAKAEQVTWTTLDYSGRPKTVPQKISTPAETAPRPSYPSSKAKKDWDKLEAEVKKEEKEEKLDGDAALNKFFRDIYKDADEDMRRAMMKSFVESNGTVLSTNWKDVGAKKVEGSPPDGMELKKWEY

SEQ ID NO: 26214 - protein, 293 aa, Zea mays subsp. mays
  misc_feature (1)..(293): Ceres Seq. ID no. 13498875
MMHKAYYRKGAACIKLEEYQTAKAALELGSSYASGDSRFARLLKECDERIAEESSQAPVKNVEATVAATIEDKEDFTNMENTPPVIEPPSKPKYRHDYYNSATEVVLTIFANGVPADSVVIDFGEQMLSVSIEVPGEEPYHFQPRLFSKIIPEKCKYQVLSTKVEIRLAKAEQVTWTTLDYSGRPKTVPQKISTPAETAPRPSYPSSKAKKDWDKLEAEVKKEEKEEKLDGDAALNKFFRDIYKDADEDMRRAMMKSFVESNGTVLSTNWKDVGAKKVEGSPPDGMELKKWEY

SEQ ID NO: 26215 - protein, 292 aa, Zea mays subsp. mays
  misc_feature (1)..(292): Ceres Seq. ID no. 13498876
MHKAYYRKGAACIKLEEYQTAKAALELGSSYASGDSRFARLLKECDERIAEESSQAPVKNVEATVAATIEDKEDFTNMENTPPVIEPPSKPKYRHDYYNSATEVVLTIFANGVPADSVVIDFGEQMLSVSIEVPGEEPYHFQPRLFSKIIPEKCKYQVLSTKVEIRLAKAEQVTWTTLDYSGRPKTVPQKISTPAETAPRPSYPSSKAKKDWDKLEAEVKKEEKEEKLDGDAALNKFFRDIYKDADEDMRRAMMKSFVESNGTVLSTNWKDVGAKKVEGSPPDGMELKKWEY

SEQ ID NO: 26216 - DNA, 1677 bp, Zea mays subsp. mays
  misc_feature (1)..(1677): Ceres Seq. ID no. 13498877
aacaacgcctcctccagtccttcttcgtaagccttcaaaccgacgaatttgagcaactgcacccagagcgcgatccattgccggggaagaagcaacttgttgcgagcctcctctatggcgagctccgaccatggttccaccaccgcccccaaggacgtgccgggcagctacggcctgccgctggtgggcgccgtgcgcgaccgcctcgacttctactacttccaggggcaggacaagtacttcgagtcccgcgtggagcgctacggctccaccgtggtgcgcatgaacgtgccgccgggccccttcatggcgcgcgacccgcgggtggtggcggtcctggacgccaagagcttccccgtgctcttcgacatggacaaggtggagaagaaggacctgttcacgggcacctacatgccgtccacctccctcaccggcggctaccgcgtctgctcgtacctggacccctccgagcccacccacaccaaggtgaagcagctgctcttctccctcctgctctcccgcaaggacgacgtgatccccaccttccgctccaacttctcctcgctcctcgccaccgtggaggcggagctggccaagggcggcaaggccgagttcaacaagctcaacgacgtcacctccttcgacttcatcggcgaggcctacttcggcgtgcgcccctcggcgaccgagctcggcaagggcgggccgagcaaggcggccaagtggctcatctggcagctccacccgctggtcacgctcggcctccccatggtcctggaggagccgctgctccacacgttccacctcccgcctttcctcgtcaagggcgactacagggcgctgtacaagtacttctccacggtggcgaagcaggcgctggacaccgccgagggcctgggcctgtcgcgcgaggaggcctgccacaacctcctcttcgccaccaccttcaacagctacggcggcctcaaggtgctgttcccgggcctgctggccaacgtggccagcggcggcgagaagctccacgagcggctggtggccgagatccgcggcgccgtggccgacgccggcggcaaggtcaccctcgcggcggtggagaggatggagctggccaagtcggtggtgtgggagtcgctgcgcctggacccgcccgtcaagttccagtacgggcacgccaagaaggacctgctggtggagagccacgacgcggtgttccaggtgaggaagggcgagatgctgttcggctaccagccgtgcgccaccaaggacccccgcgtgttcggcgacaccgcccggggacttcgtgcccgaccgcttcctcggcgaggagggcagcaagctgctgcagtacgtgtactggtccaacggccgtgagaccgagaaccccagcgtcgacaacaagcagtgccccgggaagaacttcgtggtgctggtcggcaggctcctcctcgtcgagctcttcctccgctacgacacattcaccgccgaggtcggcaaggagctgctcggcaccagcgtcatcttcaccggtgtcacgaaagctacctccggtccgggcagcgagtaaaccgccccggccggcgcgcgtcgttggatatatgatgagtggacgtgacagagtgtcccattatttcttaatttcgtcattttcctccttccttctaataagacttctctctc

SEQ ID NO: 26217 - protein, 558 aa, Zea mays subsp. mays
  misc_feature (1)..(558): Ceres Seq. ID no. 13498878
QRLLQSFFVSLQTDEFEQLHPERDPLPGKKQLVASLLYGELRPWFHHRPQGRAGQLRPAAGGRRARPPRLLLLPGAGQVLRVPRGALRLHRGAHERAAGPLHGARPAGGGGPGRQELPRALRHGQGGEEGPVHGHLHAVHLPHRRLPRLLVPGPLRAHPHQGEAAALLPPALPQGRRDPHLPLQLLLAPRHRGGGAGQGRQGRVQQAQRRHLLRLHRRGLLRRAPLGDRARQGRAEQGGQVAHLAAPPAGHARPPHGPGGAAAPHVPPPAFPRQGRLQGAVQVLLHGGEAGAGHRRGPGPVARGGLPQPPLRHHLQQLRRPQGAVPGPAGQRGQRRREAPRAAGGRDPRRRGRRRRQGHPRGGGEDGAGQVGGVGVAAPGPARQVPVRARQEGPAGGEPRRGVPGEEGRDAVRLPAVRHQGPPRVRRHRPGTSCPTASSARRAASCCSTCTGPTAVRPRTPASTTSSAPGRTSWCWSAGSSSSSSSSATTHSPPRSARSCSAPASSSPVSRKLPPVRAASKPPRPARVVGYMMSGRDRVSHYFLISSFSSFLLIRLLS

SEQ ID NO: 26218 - protein, 418 aa, Zea mays subsp. mays
  misc_feature (1)..(418): Ceres Seq. ID no. 13498879
MASSDHGSTTAPKDVPGSYGLPLVGAVRDRLDFYYFQGQDKYFESRVERYGSTVVRMNVPPGPFMARDPRVVAVLDAKSFPVLFDMDKVEKKDLFTGTYMPSTSLTGGYRVCSYLDPSEPTHTKVKQLLFSLLLSRKDDVIPTFRSNFSSLLATVEAELAKGGKAEFNKLNDVTSFDFIGEAYFGVRPSATELGKGGPSKAAKWLIWQLHPLVTLGLPMVLEEPLLHTFHLPPFLVKGDYRALYKYFSTVAKQALDTAEGLGLSREEACHNLLFATTFNSYGGLKVLFPGLLANVASGGEKLHERLVAEIRGAVADAGGKVTLAAVERMELAKSVVWESLRLDPPVKFQYGHAKKDLLVESHDAVFQVRKGEMLFGYQPCATKDPRVFGDTARGLRARPLPRRGGQQAAAVRVLVQRP

SEQ ID NO: 26219 - protein, 362 aa, Zea mays subsp. mays
  misc_feature (1)..(362): Ceres Seq. ID no. 13498880
MNVPPGPFMARDPRVVAVLDAKSFPVLFDMDKVEKKDLFTGTYMPSTSLTGGYRVCSYLDPSEPTHTKVKQLLFSLLLSRKDDVIPTFRSNFSSLLATVEAELAKGGKAEFNKLNDVTSFDFIGEAYFGVRPSATELGKGGPSKAAKWLIWQLHPLVTLGLPMVLEEPLLHTFHLPPFLVKGDYRALYKYFSTVAKQALDTAEGLGLSREEACHNLLFATTFNSYGGLKVLFPGLLANVASGGEKLHERLVAEIRGAVADAGGKVTLAAVERMELAKSVVWESLRLDPPVKFQYGHAKKDLLVESHDAVFQVRKGEMLFGYQPCATKDPRVFGDTARGLRARPLPRRGGQQAAAVRVLVQRP

SEQ ID NO: 26220 - DNA, 1344 bp, Zea mays subsp. mays
  misc_feature (1)..(1344): Ceres Seq. ID no. 13498889
agaactagcagttgttccccttttccctccccacgccgaacgcacccgatcgcaaacaaagcgagcagcagaaacatgcgagacatgccggttgtccgccgccaggaacccaccgtcgtcaggacggaggacgacgtggtttccggcggtgaggactcggacggcgagttcgagttcccctccgtgagccgggagtccgcggcgggcgttggnnggnnccgcgtctagccgacganntnntnngcgggcggnnacgcccgggcgttctacccggtgtttgnncgagtgctggacgaggccgcagcgccggcaccgagggcgccactagggcggctgttccagctggagcaggngcggacctcgtccgtngcgtccacgtcctcctcctcctcatcatcatcggcgtcgacggcggcgggcacgggcgcggacctcgacggcgtcggcgcgtcgccggacagntactgcgtctggacgcccgggtcgtcgccggcgtcctcgccctcgcggccgccgcggaagagcgggtccacgggctccatcgcgcggtggcgccgcatcggtgagctcgtcgtcggccgcagccgcagcgacggcaaggacaagttcctcttcctctcggcgccgccgtccccggccagggacagggagcacgcccccgcctccaaggccaaggccaagctgccgcccaaaggaagcaaagccgccgcaaccgagctagacacggtctccgcgggccgccggttgtcatatggcggcggcggcgccaaggcctccaccnncggccggcgcacgttcctgccgtaccggcaggacctcgtggggctgttcgccagcgtgcacgggctcagcaggagcccacacccgttntganccggtgagccacgaccacgacgcgccgtggaggacccgttccaaacagtgagacttcaggtttgaaatcgggatttgaaatttcagacatttgacttggagatctcctgcgagccgagtcaaaaagacaaggtgtgaagtcagagaaagcaggggaaatgtgagccttctttcaggattcggctcggaatcgtgctctgcagtcggtggctaaccacctgccatgcgatttgtgtaggcgggtacacatatactacgacaaattggacaagaagtttacatgtgattgttcgtatatgttggtatatatgtagctgtgtacatactgtacattgtatagtattgcaatttaggtatacaggagtaggtgtttgcgaggaattcagaattcctcgtttgcattctacagtttcgtttatctgcgtgttgtcgcatctctaatgtctaatctaactaattgcttttctgcct

SEQ ID NO: 26221 - protein, 75 aa, Zea mays subsp. mays
  misc_feature (1)..(75): Ceres Seq. ID no. 13498890
  misc_feature (71)..(71): Xaa is any aa, unknown or other
  misc_feature (72)..(72): Xaa is any aa, unknown or other
  misc_feature (73)..(73): Xaa is any aa, unknown or other
RTSSCSPFPSPRRTHPIANKASSRNMRDMPVVRRQEPTVVRTEDDVVSGGEDSDGEFEFPSVSRESAAGVXXXRV

SEQ ID NO: 26222 - protein, 61 aa, Zea mays subsp. mays
  misc_feature (1)..(61): Ceres Seq. ID no. 13498891
ELAVVPLFPPHAERTRSQTKRAAETCETCRLSAARNPPSSGRRTTWFPAVRTRTASSSSPP

SEQ ID NO: 26223 - protein, 57 aa, Zea mays subsp. mays
  misc_feature (1)..(57): Ceres Seq. ID no. 13498892
  misc_feature (10)..(10): Xaa is any aa, unknown or other
  misc_feature (11)..(11): Xaa is any aa, unknown or other
  misc_feature (40)..(40): Xaa is any aa, unknown or other
  misc_feature (41)..(41): Xaa is any aa, unknown or other
MAAAAPRPPXXAGARSCRTGRTSWGCSPACTGSAGAHTRXXPVSHDHDAPWRTRSKQ

SEQ ID NO: 26224 - protein, 50 aa, Zea mays subsp. mays
  misc_feature (1)..(50): Ceres Seq. ID no. 13498893
  misc_feature (46)..(46): Xaa is any aa, unknown or other
  misc_feature (47)..(47): Xaa is any aa, unknown or other
  misc_feature (48)..(48): Xaa is any aa, unknown or other
MRDMPVVRRQEPTVVRTEDDVVSGGEDSDGEFEFPSVSRESAAGVXXXRV

SEQ ID NO: 26225 - DNA, 1642 bp, Zea mays subsp. mays
  misc_feature (1)..(1642): Ceres Seq. ID no. 13498894
agacaccagacgcagtcggctgccgcagggctggtagtagccggcgcgccgtcaccgtatcctcagatcagcggcgagcagaaaccacaccactctactgacgcccgacgagccatgggtaaggagaagactcacatcaacattgtggtcattggccatgtcgactctggcaagtcgaccaccactggccacctgatctacaagcttggaggtattgacaagcgagtgattgagaggttcgagaaagaggctgccgagatgaacaagcggtcattcaagtatgcgtgggtgcttgacaagctcaaggctgagcgtgagagaggtattacaattgatattgccctgtggaagttcgagaccaccaagtactactgcactgttattgatgccccgggacaccgtgacttcatcaagaatatgatcactggcacttcccaagctgactgtgctgttcttatcattgactcaaccactggtggttttgaggctggtatctccaaggatggccagacccgtgagcatgctctccttgctttcacacttggtgtgaagcagatgatttgctgctgcaacaagatggatgctactacacccaagtattcaaaggcccgttatgatgagattgtgaaggaagtctcttcctacctgaagaaggttggatacaaccctgataagatccacttcgttccaatctctggttttgaaggtgacaacatgattgagaggtccaccaaccttgactggtacaagggcccaaccctacttgaggctctggacttgatcaatgagccaaagaggccttcagacaagcccctgcgtctcccccttcaggatgtgtacaagattggtggtattggaactgtccctgttggacgtgttgagactggtgtcattaagcctggtatggttgttacttttgggcctactggtcttactactgaggttaagtccgttgagatgcaccatgaggctctccaggaggcccttcccggtgacaatgttggcttcaacgtgaagaatgttgctgtgaaggatctgaagcgtgggtatgtggcctccaactccaaggatgaccctgccaaggaggctgctagcttcacctcccaggtcatcatcatgaaccaccctggccagattggcaatggctatgccccagttctggactgccacacctcacacattgctgtcaagtttgctgagctcgttaccaagattgataggcgatccggcaaggagctggagaaggagcccaaatttctcaagaacggtgatgctggtatggtgaagatggttcccactaagcccatggtggtggagaccttttctcagtatcctcctcttggtcgatttgctgtccgtgacatgaggcaaacggtggctgtcggagtcatcaagagtgtggagaagaaggacccaactggagccaaggtgacgaaggctgctgccaagaagaaatgatctatctggctggtgctgtgcttgcttgttggttacctcgtggaagcttaaaatatctcgtcttgttgacatccttgcagttgtcgcgtgaacaagtaatctatgatggcaatgtttgcctggtcatgaagtattattactttcgttgaaaccgtgatgctattaagacttaatttttttatgg

SEQ ID NO: 26226 - protein, 485 aa, Zea mays subsp. mays
  misc_feature (1)..(485): Ceres Seq. ID no. 13498895
RHQTQSAAAGLVVAGAPSPYPQISGEQKPHHSTDARRAMGKEKTHINIVVIGHVDSGKSTTTGHLIYKLGGIDKRVIERFEKEAAEMNKRSFKYAWVLDKLKAERERGITIDIALWKFETTKYYCTVIDAPGHRDFIKNMITGTSQADCAVLIIDSTTGGFEAGISKDGQTREHALLAFTLGVKQMICCCNKMDATTPKYSKARYDEIVKEVSSYLKKVGYNPDKIHFVPISGFEGDNMIERSTNLDWYKGPTLLEALDLINEPKRPSDKPLRLPLQDVYKIGGIGTVPVGRVETGVIKPGMVVTFGPTGLTTEVKSVEMHHEALQEALPGDNVGFNVKNVAVKDLKRGYVASNSKDDPAKEAASFTSQVIIMNHPGQIGNGYAPVLDCHTSHIAVKFAELVTKIDRRSGKELEKEPKFLKNGDAGMVKMVPTKPMVVETFSQYPPLGRFAVRDMRQTVAVGVIKSVEKKDPTGAKVTKAAAKKK

SEQ ID NO: 26227 - protein, 447 aa, Zea mays subsp. mays; identical to SEQ ID NO: 14719
  misc_feature (1)..(447): Ceres Seq. ID no. 13498896

SEQ ID NO: 26228 - protein, 399 aa, Zea mays subsp. mays; identical to SEQ ID NO: 14720
  misc_feature (1)..(399): Ceres Seq. ID no. 13498897

SEQ ID NO: 26229 - DNA, 1351 bp, Zea mays subsp. mays
  misc_feature (1)..(1351): Ceres Seq. ID no. 13498901
attcgaaaaagcaaaaatgatatgcacgtcacaatagttgttccccagatttgttttgtcacgcgccccgcccgacgcccgccacggcgccaccatgtcgcaggctacggaggtcgtcggaaacccgtacgccgccgagctcgctgcagccaagaaggccgtcgccctagcggcccgcctctgccagagagtgcagcggagcattttgcactctgacattcaatcgaaggcagacaagactcctgttacagttgcggattatggatcacaggtactggtatgtctggtcctgaagaaggaattgccttctcactctttctcaatcatagctgaagaggattcaaaagacttgagagaagatggtgcccaagaaattatagaacacattaccaccctcattaatgaaaccatcgtaaatgatggttcatacaacatgtcgttatctaaggaagatgtgctttctgcaattgatggtggtaaatctgagggaggtccatctgggcgacattggatattagacccaatagatggcactaaaggtttcataaggggagatcagtatgcagttgcacttggactacttgatgagggcaaagttgttctgggtgtgttgggatgtccaaatcttccattaaaatcaacaaacaagaacaatagcagctcttttggggatcgaataggttccctcttttttgctacaattggttgtggagcgcaagttgaggccttagaaggatctgagccacaaaagattagtgtttgctccaccaataatccagttgacgcctcattctttgaatcctttgaagcatcacactccaagcgtgatttaactagctccattgcagagaaacttggtgtccgagctcctcctgttagaatggatagccaagcaaaatatggtgccctagcacgtggtgatggtgccatttttctgcgcatcccgcacaaaagttacatagaaacagtttgggatcatgcagctggatcaattattgtcacagaagctggtggcatggtaaaagatgccgcaggaaacgatttggatttttgcaaaggtagatatcttgatcgtgacagaggaattattgcaacaaacaagcatttaatgccactagttctaaaggcggttcaagaggctatgaaggaggaacagtaggctgctgtgttcatggagcagttgcaatatttgttatgacatttcctgtttgaatcttaatattagttttgcacaatctcgatgtgcggaaaagttgttgtacttgtaccatatgctagtgtatcgtgtgagtcatatgccactcacatactcacatttccttatctcaacaaatggatatgaatttacctg

SEQ ID NO: 26230 - protein, 354 aa, Zea mays subsp. mays
  misc_feature (1)..(354): Ceres Seq. ID no. 13498902
MSQATEVVGNPYAAELAAAKKAVALAARLCQRVQRSILHSDIQSKADKTPVTVADYGSQVLVCLVLKKELPSHSFSIIAEEDSKDLREDGAQEIIEHITTLINETIVNDGSYNMSLSKEDVLSAIDGGKSEGGPSGRHWILDPIDGTKGFIRGDQYAVALGLLDEGKVVLGVLGCPNLPLKSTNKNNSSSFGDRIGSLFFATIGCGAQVEALEGSEPQKISVCSTNNPVDASFFESFEASHSKRDLTSSIAEKLGVRAPPVRMDSQAKYGALARGDGAIFLRIPHKSYIETVWDHAAGSIIVTEAGGMVKDAAGNDLDFCKGRYLDRDRGIIATNKHLMPLVLKAVQEAMKEEQ

SEQ ID NO: 26231 - protein, 241 aa, Zea mays subsp. mays
  misc_feature (1)..(241): Ceres Seq. ID no. 13498903
MSLSKEDVLSAIDGGKSEGGPSGRHWILDPIDGTKGFIRGDQYAVALGLLDEGKVVLGVLGCPNLPLKSTNKNNSSSFGDRIGSLFFATIGCGAQVEALEGSEPQKISVCSTNNPVDASFFESFEASHSKRDLTSSIAEKLGVRAPPVRMDSQAKYGALARGDGAIFLRIPHKSYIETVWDHAAGSIIVTEAGGMVKDAAGNDLDFCKGRYLDRDRGIIATNKHLMPLVLKAVQEAMKEEQ

SEQ ID NO: 26232 - DNA, 1522 bp, Zea mays subsp. mays
  misc_feature (1)..(1522): Ceres Seq. ID no. 13498918
acataggtgccggactcgtcccagcgaagaaccggacgagcgagcaagaggcctcctcctcaagcttcgaatcctccccttccgcgctttccctccccctcctcctcctcccctttccagtccccaccccagcgaagcttccaaagccgccccaaccccaacggccgcccggcctgatcgagcatacagctgccgcggccctccccgccccgcacgcgacctcggagccatggagaagtacgagctgctgaaggacatcggcgccggcaacttcggcgtggcgcggctcatgcggaacaaggagaccaaggaggctggtcgccatgaagtacatcccccggggccaaaagatcgacgagaatgtggcgagggagatcatcaaccaccgctcgctgcgccaccccaacatcatccggttcaaggaggtggtgctgacgccgacgcacctggcgatcgtgatggagtacgccgccggcggcgagctgttcgaccggatctgcaacgccgggaggttcagcgaggacgaggcgaggtacttcttccagcagctgatttgtggcgtcagctactgccactccatgcaaatctgccaccgagacttgaagctggagaacacgctgctggacggcagcccggcgcctcgcctcaagatctgcgacttcggttactccaagtcgtcgctgctgcactcgaagcccaagtcgacggtcggcacgccggcgtacatcgcccccgaggtgctctcccgccgggaatacgacggcaagacagccgatgtgtggtcctgtggagtcactctttatgtgatgctggtcggtggttacccttttgaggacccagacgacccaaagaatttcagaaagacgatcgggaggatcatgtcaatccaatacaaaataccagagtatgtgcacgtgtcgcaagactgcaaggagctgctttcaaggatctttgttgcaaactctgcaaagagaataacgatcagggagatcaggaaccacccctggttcctgaagaacctgcccagagagctcacggaggctgcgcaggccatgtactacaagaaagacaacagcgccccgacctactccgtccagtccgtggaggagatcatgaagatcgtggagaaggcgcggacgccgcctccttcctccacccctgtggctggcttcggttgggcggaggaggacgagcaggaggacagcaaggaaccagacgaggaacacgaggacggcgaggacgagtacgagaagcaggtgaagcaagtccacgccagcggggagtttcatctcagctgctgatggttttcgccggcctgctagtctgtggtaccagccgatgatggacctgctagtctgtggtcttgtttccaagttttctttcattttttctttcttttgctgtggtgccgcaagactgcaacagttgtaaattattgaagggggttccagcgttgcccttgtattgactgattcaaactagcatggggaacatgattatggaataaaacaggtcgttgagc

SEQ ID NO: 26233 - protein, 325 aa, Zea mays subsp. mays
  misc_feature (1)..(325): Ceres Seq. ID no. 13498919
MKYIPRGQKIDENVAREIINHRSLRHPNIIRFKEVVLTPTHLAIVMEYAAGGELFDRICNAGRFSEDEARYFFQQLICGVSYCHSMQICHRDLKLENTLLDGSPAPRLKICDFGYSKSSLLHSKPKSTVGTPAYIAPEVLSRREYDGKTADVWSCGVTLYVMLVGGYPFEDPDDPKNFRKTIGRIMSIQYKIPEYVHVSQDCKELLSRIFVANSAKRITIREIRNHPWFLKNLPRELTEAAQAMYYKKDNSAPTYSVQSVEEIMKIVEKARTPPPSSTPVAGFGWAEEDEQEDSKEPDEEHEDGEDEYEKQVKQVHASGEFHLSC

SEQ ID NO: 26234 - protein, 280 aa, Zea mays subsp. mays
  misc_feature (1)..(280): Ceres Seq. ID no. 13498920
MEYAAGGELFDRICNAGRFSEDEARYFFQQLICGVSYCHSMQICHRDLKLENTLLDGSPAPRLKICDFGYSKSSLLHSKPKSTVGTPAYIAPEVLSRREYDGKTADVWSCGVTLYVMLVGGYPFEDPDDPKNFRKTIGRIMSIQYKIPEYVHVSQDCKELLSRIFVANSAKRITIREIRNHPWFLKNLPRELTEAAQAMYYKKDNSAPTYSVQSVEEIMKIVEKARTPPPSSTPVAGFGWAEEDEQEDSKEPDEEHEDGEDEYEKQVKQVHASGEFHLSC

SEQ ID NO: 26235 - protein, 276 aa, Zea mays subsp. mays
  misc_feature (1)..(276): Ceres Seq. ID no. 13498921
HRCRTRPSEEPDERARGLLLKLRILPFRAFPPPPPPPLSSPHPSEASKAAPTPTAARPDRAYSCRGPPRPARDLGAMEKYELLKDIGAGNFGVARLMRNKETKEAGRHEVHPPGPKDRRECGEGDHQPPLAAPPQHHPVQGGGADADAPGDRDGVRRRRRAVRPDLQRREVQRGRGEVLLPAADLWRQLLPLHANLPPRLEAGEHAAGRQPGASPQDLRLRLLQVVAAALEAQVDGRHAGVHRPRGALPPGIRRQDSRCVVLWSHSLCDAGRWLPF

SEQ ID NO: 26236 - DNA, 1056 bp, Zea mays subsp. mays
  misc_feature (1)..(1056): Ceres Seq. ID no. 13498940
gcacgagaccattacctagaacatcctaatcaaaacaagaacagagcagtactgcaggagagcgagtgagctgtccaaagcgtccggccaaacccgcgtgtgtccaccactcctcctgcacaagcaccgccacaatgcggccgcacaccctggcgctgctcctgctcctgctggccacgccggcggcgacgcgtctggcatcggccgcctgcgcgggcgagaagttccccgcggggcgggcgtacgcggcgtgcgaggacctcccgaagctgggcgcgtcgctgcactggacgtacgacgcggcaaagagctccctgtccgtggcgttcgtggcggcgccggcggcggccggcgggtgggtggcgtgggggctgaacccgacgggcgagggcatggccggcnngcaggcgactgntgnngctnncggggtccgggtncggnnccgnggcgcccaccgtgcggacgtacaacatcacggggtacgtcccgctggggaacgtctcgacgccgctggacttcccggccaccgacctcgccgcggacgccgcagccgggggcaggatccgggtgtacggcacgctgcagctgcgcgaggggatgagggccgtgaaccaggtgtggcaggtcggcgcgtcatccaccgccggcgcccccgacaagcacgcgttccagccggacaacctcggcgccaagagcaagctcgtcctcgccggcaagtcccccgcggcggcgtccccgtcgcccgcccccgcgcctcatgcgtccggcggcggcgcggcgtcgtccaagtcccccaacgccgccgcggccgcggccggcgtggccgcgccggtagccctcgtgctcgcgctggtgggattcttggcgacggtatgatgacgcgtccacggtggctggatgggtgggcggtgagcaggggaggaagtattattgcactgttttctttatttttggttcgtttttcaggtttgttttaggctgtgaaataataataaaaacggttggctggctgcacttgttgttgagctgctgtttggtaggaatatacagtgattt

SEQ ID NO: 26237 - protein, 280 aa, Zea mays subsp. mays
  misc_feature (1)..(280): Ceres Seq. ID no. 13498941
  misc_feature (90)..(90): Xaa is any aa, unknown or other
  misc_feature (94)..(94): Xaa is any aa, unknown or other
  misc_feature (95)..(95): Xaa is any aa, unknown or other
  misc_feature (97)..(97): Xaa is any aa, unknown or other
  misc_feature (101)..(101): Xaa is any aa, unknown or other
  misc_feature (103)..(103): Xaa is any aa, unknown or other
  misc_feature (104)..(104): Xaa is any aa, unknown or other
MRPHTLALLLLLLATPAATRLASAACAGEKFPAGRAYAACEDLPKLGASLHWTYDAAKSSLSVAFVAAPAAAGGWVAWGLNPTGEGMAGXQATXXAXGVRXRXXGAHRADVQHHGVRPAGERLDAAGLPGHRPRRGRRSRGQDPGVRHAAAARGDEGREPGVAGRRVIHRRRPRQARVPAGQPRRQEQARPRRQVPRGGVPVARPRASCVRRRRGVVQVPQRRRGRGRRGRAGSPRARAGGILGDGMMTRPRWLDGWAVSRGGSIIALFSLFLVRFSGLF

SEQ ID NO: 26238 - protein, 194 aa, Zea mays subsp. mays
  misc_feature (1)..(194): Ceres Seq. ID no. 13498942
  misc_feature (4)..(4): Xaa is any aa, unknown or other
  misc_feature (8)..(8): Xaa is any aa, unknown or other
  misc_feature (9)..(9): Xaa is any aa, unknown or other
  misc_feature (11)..(11): Xaa is any aa, unknown or other
  misc_feature (15)..(15): Xaa is any aa, unknown or other
  misc_feature (17)..(17): Xaa is any aa, unknown or other
  misc_feature (18)..(18): Xaa is any aa, unknown or other
MAGXQATXXAXGVRXRXXGAHRADVQHHGVRPAGERLDAAGLPGHRPRRGRRSRGQDPGVRHAAAARGDEGREPGVAGRRVIHRRRPRQARVPAGQPRRQEQARPRRQVPRGGVPVARPRASCVRRRRGVVQVPQRRRGRGRRGRAGSPRARAGGILGDGMMTRPRWLDGWAVSRGGSIIALFSLFLVRFSGLF

SEQ ID NO: 26239 - DNA, 1431 bp, Zea mays subsp. mays
  misc_feature (1)..(1431): Ceres Seq. ID no. 13498943
cccaaatcgacctgggctggacccagccgcgccccgtctgcctcctgcttctctctccgcttccgcttcctgcgcctccaggctccacttctccgctcggcagtctgcactggaaggacagcatgtcggcctcggcgtcgtcaccggcggcggcggcgggcgatgagaagcaggaggcggcgcccgtcaggcgctgcaagggcgtcaacgacctcgacaaggtcgttctccgcgaggtccggggcagctccgcagaggtgtacttgtatggtgggcatgtgacatcatggaaagatgagcatggagatgaattactttttgttagcaataaggctattttcaagcctccaaaagctatacgtggaggaataccaatatgctttccgcagttctccaactttgggaatctggaaccacatggatttgcaaggaataggacatggagtgttgatgatgatcctccgccatttccagtgccaacctccaatagcgcttatattgacttgatcctcaaacctactgaagatgatttgaagatctggcctcatagttttgaataccgcctgagggttgcacttagtcctggtggtgatttgatgctaacttcacgtataagaaacactaatgcagacgggaagccattctctttcacttttgcataccacacatacttcaagatttctgatatcagtgaggtgcgagtagaaggattggaaactctggattacctagacaacttacaagatagagctcgttccactgaacaaggcgatgcaattgtttttgaatccgaactggacagaatatatctgggcacaccatcgaaaattgccattattgatcatgagaagaaaagaacatttgttgtgaggaaaggaggccttcctgatgctgttgtttggaatccctgggataaaaaagcaaaggctatgtcagattttggggatgatgaatataaacgaatggtatgtgtggaggcggctgctattgaaaagactgtcactctgaagcctggtgaagagtggactggaaagttggaactttctgctgtgccatctagctattacagtggtcagctagaccctgaccgtgtgattcaggattccactgtcccggaggactccatcagctagtccttattctatttttgcaggtagagcattgtatcattatgcataagagatgctggcaacaagggctgtccacatgtttcttccattctgttcaaatcttcggtgtttttttattccgaatgcatatccgaaccaaggaatgtgaaattggtttccgctttttgaggatctatgtagcataatggataagtcggtgtttcgtaccctatttagggatgcttgaagcaagaaacatcttcatgggttgtaaaataaaagaaaaattctctttattatatttgatcaattcttttgcctc

SEQ ID NO: 26240 - protein, 376 aa, Zea mays subsp. mays
  misc_feature (1)..(376): Ceres Seq. ID no. 13498944
QIDLGWTQPRPVCLLLLSPLPLPAPPGSTSPLGSLHWKDSMSASASSPAAAAGDEKQEAAPVRRCKGVNDLDKVVLREVRGSSAEVYLYGGHVTSWKDEHGDELLFVSNKAIFKPPKAIRGGIPICFPQFSNFGNLEPHGFARNRTWSVDDDPPPFPVPTSNSAYIDLILKPTEDDLKIWPHSFEYRLRVALSPGGDLMLTSRIRNTNADGKPFSFTFAYHTYFKISDISEVRVEGLETLDYLDNLQDRARSTEQGDAIVFESELDRIYLGTPSKIAIIDHEKKRTFVVRKGGLPDAVVWNPWDKKAKAMSDFGDDEYKRMVCVEAAAIEKTVTLKPGEEWTGKLELSAVPSSYYSGQLDPDRVIQDSTVPEDSIS

SEQ ID NO: 26241 - protein, 336 aa, Zea mays subsp. mays
  misc_feature (1)..(336): Ceres Seq. ID no. 13498945
MSASASSPAAAAGDEKQEAAPVRRCKGVNDLDKVVLREVRGSSAEVYLYGGHVTSWKDEHGDELLFVSNKAIFKPPKAIRGGIPICFPQFSNFGNLEPHGFARNRTWSVDDDPPPFPVPTSNSAYIDLILKPTEDDLKIWPHSFEYRLRVALSPGGDLMLTSRIRNTNADGKPFSFTFAYHTYFKISDISEVRVEGLETLDYLDNLQDRARSTEQGDAIVFESELDRIYLGTPSKIAIIDHEKKRTFVVRKGGLPDAVVWNPWDKKAKAMSDFGDDEYKRMVCVEAAAIEKTVTLKPGEEWTGKLELSAVPSSYYSGQLDPDRVIQDSTVPEDSIS

SEQ ID NO: 26242 - DNA, 1299 bp, Zea mays subsp. mays
  misc_feature (1)..(1299): Ceres Seq. ID no. 13498950
aaaggatgctgagggctcatctcgctgcttctgaactgcaagtggatggaaatcggcccctgcacaagaaaactaccttccaactgaaagaggttagaggtcctaatcactcgcaaactctcaacaactacgcacgccttcctctgcctccgccggccggcacgatggcgtcaggcggcgagcccggggctccgaaggtcgtcctcctcctcgtcccccacgtggacgagtccttccacgccgctctgcgggcgcgcttccgcgtcctcgacttcttcgcctccccctcctcaggtgagccgctgccagccttcctcgvhgcggcggcggccgctccggagccccctcgcgccgccgtcgtggtgggcgcgggcccggcccgcgtgracrccgcgttcctcgacgccgtgccgtcgctccgctgcgtcttgtccctggcggcgggcgtggacttcatcgacctcggcgagtgcgcgcgccgcggcgtggccgtcgccaactccggcagcgtgttctcggccagacgtcgccgaccacgccgtcggcctgctcatcgacgtgctccgccgcgtgtcggccgccgagcggttcagtccgccgcggcctctggccggtgcagggtgaccacccgctcggctccaaggtcggtggcaggcgtgtgggcgtcgttggcttggggaacatcggctcgcagatcgcaaagaggctccaggctctcggctgcaccgtctgctaccactctagaacgcccagggactcggtcccttacagatacttcgccaacgtccgcgacctcgcggcggattccgacgtgctcgtcgtggcgtgcgcgctgaacgaggcgacgcggcacatcgtckgcagggacgtcctggaggcgctagggacggacggggtcgtcgtgaacatcagcaggggcgccaacgtcgacgaggccgagctggtcagggcgctcaaggagggcaggatcgccggcgccggcctcgatgtcttcgagagcgagcccggagcgcgccgcgagttcttctccatggacaacgtggtcatgacgcctcatgtggcggttttcacggcggagtccatgtcggacctgcgagaccacgccatcgccaacctcgaagcattcttctccggtcagccgttsttacgccggtgcctccctactcaccggtcaagtaggctgccaacgtgattgaagccagcggattattggctctgtttgtaacttcgcatcgtttaaaatgtctcgtataatacttgatttgttttttactgtcaatagatcgaaggtgaaaatcc

SEQ ID NO: 26243 - protein, 277 aa, Zea mays subsp. mays
  misc_feature (1)..(277): Ceres Seq. ID no. 15223055
  misc_feature (106)..(106): Xaa is any aa, unknown or other
  misc_feature (129)..(129): Xaa is any aa, unknown or other
  misc_feature (130)..(130): Xaa is any aa, unknown or other
RMLRAHLAASELQVDGNRPLHKKTTFQLKEVRGPNHSQTLNNYARLPLPPPAGTMASGGEPGAPKVVLLLVPHVDESFHAALRARFRVLDFFASPSSGEPLPAFLXAAAAAPEPPRAAVVVGAGPARVXXAFLDAVPSLRCVLSLAAGVDFIDLGECARRGVAVANSGSVFSARRRRPRRRPAHRRAPPRVGRRAVQSAAASGRCRVTTRSAPRSVAGVWASLAWGTSARRSQRGSRLSAAPSATTLERPGTRSLTDTSPTSATSRRIPTCSSWRAR

SEQ ID NO: 26244 - protein, 276 aa, Zea mays subsp. mays
  misc_feature (1)..(276): Ceres Seq. ID no. 15223056
  misc_feature (105)..(105): Xaa is any aa, unknown or other
  misc_feature (128)..(128): Xaa is any aa, unknown or other
  misc_feature (129)..(129): Xaa is any aa, unknown or other
MLRAHLAASELQVDGNRPLHKKTTFQLKEVRGPNHSQTLNNYARLPLPPPAGTMASGGEPGAPKVVLLLVPHVDESFHAALRARFRVLDFFASPSSGEPLPAFLXAAAAAPEPPRAAVVVGAGPARVXXAFLDAVPSLRCVLSLAAGVDFIDLGECARRGVAVANSGSVFSARRRRPRRRPAHRRAPPRVGRRAVQSAAASGRCRVTTRSAPRSVAGVWASLAWGTSARRSQRGSRLSAAPSATTLERPGTRSLTDTSPTSATSRRIPTCSSWRAR

SEQ ID NO: 26245 - protein, 223 aa, Zea mays subsp. mays
  misc_feature (1)..(223): Ceres Seq. ID no. 15223057
  misc_feature (52)..(52): Xaa is any aa, unknown or other
  misc_feature (75)..(75): Xaa is any aa, unknown or other
  misc_feature (76)..(76): Xaa is any aa, unknown or other
MASGGEPGAPKVVLLLVPHVDESFHAALRARFRVLDFFASPSSGEPLPAFLXAAAAAPEPPRAAVVVGAGPARVXXAFLDAVPSLRCVLSLAAGVDFIDLGECARRGVAVANSGSVFSARRRRPRRRPAHRRAPPRVGRRAVQSAAASGRCRVTTRSAPRSVAGVWASLAWGTSARRSQRGSRLSAAPSATTLERPGTRSLTDTSPTSATSRRIPTCSSWRAR

SEQ ID NO: 26246 - DNA, 1201 bp, Zea mays subsp. mays
  misc_feature (1)..(1201): Ceres Seq. ID no. 13498951
aaatcaacccaacacggcgtccccgtcccgagtcaccaccgacccaagcaaaaccgcacgcaccctgccagcggccccccaactcccaacccaacccctactccggctagctcgcggcggcggcccagcggccatggccttccggctgagcaacaacctgatcggggtcctaaacttcgtcaccttcctgctctccgtcccgatcctgggcgcgggcatctggctgggccaccgcgccgacggcaccgagtgcgagcgctacctctcggcgcccgtcatcgcgctgggggccttcctcctcgccgtctccctggcgggcctcgtcggcgcctgctgccgcgtcacctggctgctctgggcctacctcctcgccatgttcgtcctcatcctcgtcctcttctgcttcaccgtcttcgccttcgtcgtcaccaacaggggcgccggcgaggccgtctccggccgcggatacaaggagtaccgcctcggggactactccaactggctgcagaagcgcgtcgagaacaccaggaactgggaccggatcaggagctgcctccaggactccaaggtctgcaagagcctgcaggacaagaacgagaccgtcgcccagttcatgagttccagcctctcccccatcgagtctggctgctgcaagccccccaccagctgcggctacacctacgtcggcggcacggactggacgccggtgaccaccaactcgacggacccggactgcaagacctggagcaacgacgcctcggcgctctgctacaactgccagtcgtgcaaggccggcgtggtggccacgttccagcggaactggaagcgcgtcgccgtcgtctgcatcgtcttcctcgtcttcatcatcatcgtctactccgtcggctgctgcgccttcaggaacaaccgcagagacaacgcctaccgcggcgggtggaagggcgggtacgcttgatccaccatcgcgtcgtttaggagcggagccatgcacgcgcgctcggtgctctgctctgctccctgcccgccgctgtcgtcgtacgtacatgtttagtaggctcgttgtagctctgtacaggtgatggagatcgttgttgcggattcttatcgtcttcctggttacatacttacattattgttatgatctgatcagcggtaggttttgtatacgctgctcattgattcgtctgcctgctattttcgt

SEQ ID NO: 26247 - protein, 324 aa, Zea mays subsp. mays
  misc_feature (1)..(324): Ceres Seq. ID no. 13498952
KSTQHGVPVPSHHRPKQNRTHPASGPPTPNPTPTPASSRRRPSGHGLPAEQQPDRGPKLRHLPALRPDPGRGHLAGPPRRRHRVRALPLGARHRAGGLPPRRLPGGPRRRLLPRHLAALGLPPRHVRPHPRPLLLHRLRLRRHQQGRRRGRLRPRIQGVPPRGLLQLAAEARREHQELGPDQELPPGLQGLQEPAGQERDRRPVHEFQPLPHRVWLLQAPHQLRLHLRRRHGLDAGDHQLDGPGLQDLEQRRLGALLQLPVVQGRRGGHVPAELEARRRRLHRLPRLHHHRLLRRLLRLQEQPQRQRLPRRVEGRVRLIHHRVV

SEQ ID NO: 26248 - protein, 317 aa, Zea mays subsp. mays
  misc_feature (1)..(317): Ceres Seq. ID no. 13498953
NQPNTASPSRVTTDPSKTARTLPAAPQLPTQPLLRLARGGGPAAMAFRLSNNLIGVLNFVTFLLSVPILGAGIWLGHRADGTECERYLSAPVIALGAFLLAVSLAGLVGACCRVTWLLWAYLLAMFVLILVLFCFTVFAFVVTNRGAGEAVSGRGYKEYRLGDYSNWLQKRVENTRNWDRIRSCLQDSKVCKSLQDKNETVAQFMSSSLSPIESGCCKPPTSCGYTYVGGTDWTPVTTNSTDPDCKTWSNDASALCYNCQSCKAGVVATFQRNWKRVAVVCIVFLVFIIIVYSVGCCAFRNNRRDNAYRGGWKGGYA

SEQ ID NO: 26249 - protein, 273 aa, Zea mays subsp. mays; identical to SEQ ID NO: 22023
  misc_feature (1)..(273): Ceres Seq. ID no. 13498954

SEQ ID NO: 26250 - DNA, 1553 bp, Zea mays subsp. mays
  misc_feature (1)..(1553): Ceres Seq. ID no. 13498955
actatactctcgcgcggcgagctcctcgagctcgctccccgttccaagatagaaaaatggccgcggcggaagcagcctcctccgcgccggcgcccgagcatctcctggaggtggaggacgacgaggtgctgatcgacttcaagcccaacgccaagtgccgcgccgacctccgcctccgctccctgcacccgtccctccccgtcgccttcaaggtgcagacctcctccccgctcaagttcctcgtcagcccgccgcgcggcgccgtgccgccgctctcctcggcgtccctgcgcgtcgtgctccgcccgcagccgcacgcgccgccgtccttcccgcgctcccgcgccgaccgcttmctcgtcctgtcctcgctctccgcggcgcgcctcgactccgtgggaagcagcaacgacggcggcggcgggggcggagtcagggccgtccgcctccgcgtgttcttcggcgggccgtaccttctccgcctcgccgcggacgccggagacgccgykgccgtgcgcctcatcctgcgccggcagccgcacctgctgccgttcctggagcaccagcaggccgccgcggcgcccgacgccggcgagcakyaktgggcgccgctgcacgcggcggccgccaggggggactgcggtkkagctgaggcggctggggcccgaggcgctggccgcgcgtgaccgygaggggaggacggtcctgcacgcdgtcgccgcggccggcgaggccgagacggtggcggtgctggtggacatgggcgccgacacgtmdkyggtcgacgcgcgcggkaggactccgctggacgtckcgcgcgacaagggataccaagaagtggtggacgtyctgkaacggtggsagctgstgatgacggcggcgaggcgaggcgacctcgggagcctcgagtccctgctcagcaagcgcgccggcgtccgcgggcgcgaccagtacggcctcacggcgctgcacctggccgcgatcaagggccacggcgacgcgatcgcgctgctcgccgggccgggatgcatggacgtcgagtgcgaggacgtggaagggcacaggccgctccacctcgccgtcgagggaggccacgcggaggccgtggagctgctgctcgacatgggcgccgacgccaacgcccggaccaggcgcggcgccacgccgctccagatggcggaggccatggggtacgaggccatcgctcagctcctgtgcgcgagaggtgcggaggtggccgccgcgtcggcgttgtgcgccgcgtcgtcgtcttcatcgtccatatcgtgcgcctgattgctgccggtatcgtttccgctgctgctcctgctgtgcgtgagctgtgtggtacagtactgtagccgagagatgcctacaaccgccgtggctggctttaaagtaagaagcgaacccgtccgaaattgcactgtactgtatagtggtttgttctgctttgttgggagagtagctcattgttgagacggtcgattgctatacccagcgtgctggtggaaaaaaaaacatcgccatgcaattgcagtgctttacatgtc

SEQ ID NO: 26251 - protein, 227 aa, Zea mays subsp. mays
  misc_feature (1)..(227): Ceres Seq. ID no. 15223058
  misc_feature (118)..(118): Xaa is any aa, unknown or other
  misc_feature (169)..(169): Xaa is any aa, unknown or other
  misc_feature (199)..(199): Xaa is any aa, unknown or other
  misc_feature (200)..(200): Xaa is any aa, unknown or other
  misc_feature (215)..(215): Xaa is any aa, unknown or other
YTLARRAPRARSPFQDRKMAAAEAASSAPAPEHLLEVEDDEVLIDFKPNAKCRADLRLRSLHPSLPVAFKVQTSSPLKFLVSPPRGAVPPLSSASLRVVLRPQPHAPPSFPRSRADRXLVLSSLSAARLDSVGSSNDGGGGGGVRAVRLRVFFGGPYLLRLAADAGDAXAVRLILRRQPHLLPFLEHQQAAAAPDAGEXXWAPLHAAAARGDCGXAEAAGARGAGRA

SEQ ID NO: 26252 - protein, 209 aa, Zea mays subsp. mays
  misc_feature (1)..(209): Ceres Seq. ID no. 15223059
  misc_feature (100)..(100): Xaa is any aa, unknown or other
  misc_feature (151)..(151): Xaa is any aa, unknown or other
  misc_feature (181)..(181): Xaa is any aa, unknown or other
  misc_feature (182)..(182): Xaa is any aa, unknown or other
  misc_feature (197)..(197): Xaa is any aa, unknown or other
MAAAEAASSAPAPEHLLEVEDDEVLIDFKPNAKCRADLRLRSLHPSLPVAFKVQTSSPLKFLVSPPRGAVPPLSSASLRVVLRPQPHAPPSFPRSRADRXLVLSSLSAARLDSVGSSNDGGGGGGVRAVRLRVFFGGPYLLRLAADAGDAXAVRLILRRQPHLLPFLEHQQAAAAPDAGEXXWAPLHAAAARGDCGXAEAAGARGAGRA

SEQ ID NO: 26253 - protein, 178 aa, Zea mays subsp. mays
  misc_feature (1)..(178): Ceres Seq. ID no. 15223060
  misc_feature (6)..(6): Xaa is any aa, unknown or other
  misc_feature (7)..(7): Xaa is any aa, unknown or other
  misc_feature (12)..(12): Xaa is any aa, unknown or other
  misc_feature (19)..(19): Xaa is any aa, unknown or other
  misc_feature (30)..(30): Xaa is any aa, unknown or other
  misc_feature (32)..(32): Xaa is any aa, unknown or other
  misc_feature (35)..(35): Xaa is any aa, unknown or other
  misc_feature (37)..(37): Xaa is any aa, unknown or other
MGADTXXVDARXRTPLDVXRDKGYQEVVDXLXRWXLXMTAARRGDLGSLESLLSKRAGVRGRDQYGLTALHLAAIKGHGDAIALLAGPGCMDVECEDVEGHRPLHLAVEGGHAEAVELLLDMGADANARTRRGATPLQMAEAMGYEAIAQLLCARGAEVAAASALCAASSSSSSISCA

SEQ ID NO: 26254 - DNA, 909 bp, Zea mays subsp. mays
  misc_feature (1)..(909): Ceres Seq. ID no. 13499033
atccatccaactcttcataacaggcgacctgagagcagagcagacagagagcgttctggcagccgttgcggagcttgaacctctgcaaccaccaacagctaaactaaaagcagcggcggacggcgcgcggtactggacgaccggccgacgatggctacgccggcgcagcagcagggtgaccagcaccagccgaggctgcagaaggtgatggtggctgtagacgagagcgagtgcagccggcacgcgctggagtgggcgctgcggaacctggcgcccacgctggccccaccgctactggtgctcaccgtgcagccgcacttcccgctcggatacgtctccgccgcgtccttcggcgcacccctgggcaccgtccctccggtggctccggagctcatcaggtcgatgcaggagcagcagagggagctcacgcaggagctcctcgacaaggccagggccatctgcgccgagcacggggttgctgtagaggcaattgtcgaggtcggagatgcaaaggaggtgatatgtgaagtggctgagaagaaaaatgtcgatctgctggttcttggaagccacagtcgtgggccaatacagaggttgttccttgggagcgtcagtaactactgtgtacatcattctaagtgtccagttcttgtggtgaagaaccaaggctgatgaaggattcaactcccagctgctagtcctaatcatgttcgggtatttgtcaacgtatttgtaatgtgtagtacttgctttagccaaacgcattggccaataaagtagcttgctttgcttcttggaagggccgaggctggactggaggagagttctttttctttttcttttttctggtcagtgtgcctttgctccggaatggcagagttgtaaataagaactacgaactttgtgcgc

SEQ ID NO: 26255 - protein, 173 aa, Zea mays subsp. mays
  misc_feature (1)..(173): Ceres Seq. ID no. 13499034
MATPAQQQGDQHQPRLQKVMVAVDESECSRHALEWALRNLAPTLAPPLLVLTVQPHFPLGYVSAASFGAPLGTVPPVAPELIRSMQEQQRELTQELLDKARAICAEHGVAVEAIVEVGDAKEVICEVAEKKNVDLLVLGSHSRGPIQRLFLGSVSNYCVHHSKCPVLVVKNQG

SEQ ID NO: 26256 - protein, 154 aa, Zea mays subsp. mays
  misc_feature (1)..(154): Ceres Seq. ID no. 13499035
MVAVDESECSRHALEWALRNLAPTLAPPLLVLTVQPHFPLGYVSAASFGAPLGTVPPVAPELIRSMQEQQRELTQELLDKARAICAEHGVAVEAIVEVGDAKEVICEVAEKKNVDLLVLGSHSRGPIQRLFLGSVSNYCVHHSKCPVLVVKNQG

SEQ ID NO: 26257 - protein, 89 aa, Zea mays subsp. mays
  misc_feature (1)..(89): Ceres Seq. ID no. 13499036
MQEQQRELTQELLDKARAICAEHGVAVEAIVEVGDAKEVICEVAEKKNVDLLVLGSHSRGPIQRLFLGSVSNYCVHHSKCPVLVVKNQG

SEQ ID NO: 26258 - DNA, 1183 bp, Zea mays subsp. mays
  misc_feature (1)..(1183): Ceres Seq. ID no. 13499096
atcctccaacgactcacctcccacccactcacccaccccatggcgaccaacccctccaacggcgccggcgccgacgtccctgcagccccggcggcggtgcggctctcggttgcggcgcaggcggccgcgatccagccctcgtccccgcgcttcttcttctcctcgcttgccgggaccaacccggcctccccgcaccgtcgcatcgccatcgccgttgatctctccgacgagtccgccttcgcagtcaagtgggccgtgcagaactacgtccgccccggggacgccgtcgtgctgctccacgtgcgccccacctccgtcctctacggcgccgactggggttccatcccggtctccgtcgctgacgaggacgacgctgccgaggacgccgccgccgccgccgagggcgatccctcggaggaggagctgcagaagaaacgggaggaggactacgacgccttcacctccaccaaggcgcaggacctcgcgcaaccgctggtcgacgcccagatccccttcaagatccacgtcgtcaaggaccacgacatgaaggagcgcctctgcctcgaggctgagcgccttggcctctccgccatgatcatggggagccgcggtttcggggcctcccggaaaggcagcaaggggcggcttgggagtgttagtgattactgcgtacaccactgtgtatgccctgttgtggttgttcgctaccctgatgatgctgcagatgccggtggagatgcatcaggggtgacagatgagttgcacactgtaccagaggacgaacctgtttatcacgatgcacctgaggtgcagaaagaaaactgaggcaacggccacatgcagctgaagaacgaaggaaaacacgaggcttatagtgaggcaatcctgtgtatctggaagatgggaccggatgtttatctttgcttctatatatcaactgcgtatcatgatcagctgtctgcttcccgttgagtttcatatcggcgtcgtagatcatctgagttttttgttggtttgcttgtgagatgtagagtactcttcccgtgggtcgaaggtgtcttgcagatgcttgagctttatgttgtcgaacggtagttatctacacggtatcatctgctctgttaagcctgtttagtgtttactgtattggatactcgttaatagagaaccgctacttttcagt

SEQ ID NO: 26259 - protein, 274 aa, Zea mays subsp. mays
  misc_feature (1)..(274): Ceres Seq. ID no. 13499097
ILQRLTSHPLTHPMATNPSNGAGADVPAAPAAVRLSVAAQAAAIQPSSPRFFFSSLAGTNPASPHRRIAIAVDLSDESAFAVKWAVQNYVRPGDAVVLLHVRPTSVLYGADWGSIPVSVADEDDAAEDAAAAAEGDPSEEELQKKREEDYDAFTSTKAQDLAQPLVDAQIPFKIHVVKDHDMKERLCLEAERLGLSAMIMGSRGFGASRKGSKGRLGSVSDYCVHHCVCPVVVVRYPDDAADAGGDASGVTDELHTVPEDEPVYHDAPEVQKEN

SEQ ID NO: 26260 - protein, 261 aa, Zea mays subsp. mays
  misc_feature (1)..(261): Ceres Seq. ID no. 13499098
MATNPSNGAGADVPAAPAAVRLSVAAQAAAIQPSSPRFFFSSLAGTNPASPHRRIAIAVDLSDESAFAVKWAVQNYVRPGDAVVLLHVRPTSVLYGADWGSIPVSVADEDDAAEDAAAAAEGDPSEEELQKKREEDYDAFTSTKAQDLAQPLVDAQIPFKIHVVKDHDMKERLCLEAERLGLSAMIMGSRGFGASRKGSKGRLGSVSDYCVHHCVCPVVVVRYPDDAADAGGDASGVTDELHTVPEDEPVYHDAPEVQKEN

SEQ ID NO: 26261 - protein, 181 aa, Zea mays subsp. mays
  misc_feature (1)..(181): Ceres Seq. ID no. 13499099
SSNDSPPTHSPTPWRPTPPTAPAPTSLQPRRRCGSRLRRRRPRSSPRPRASSSPRLPGPTRPPRTVASPSPLISPTSPPSQSSGPCRTTSAPGTPSCCSTCAPPPSSTAPTGVPSRSPSLTRTTLPRTPPPPPRAIPRRRSCRRNGRRTTTPSPPPRRRTSRNRWSTPRSPSRSTSSRTTT

SEQ ID NO: 26262 - DNA, 1052 bp, Zea mays subsp. mays
  misc_feature (1)..(1052): Ceres Seq. ID no. 13499104
aaccagcaccagcgccagcaacagcaacagctgtggttttagcacaagaaggacgaggaagaagcgcagctgcgtttcttggacggtgagcgcggctactccggcggacatggcgaccaacagtgccctggcgaagctggcgccgctggaagccatcctgttcgacatcgacggcacgctctgcgactccgaccccatccacttctgcgccttccgagagctcctgcagcaggccggcttcaacggcggtgtccccatcacggaggagttctacagcgccaacatcagcgggggccacaacgacgacctcgccaggtcgctgttcccgggcatggatcaccagaaggcgatgcggttcatggatgataaagaagctatgttcagaaagttggcgcctgggcagctgaagcccgtggatgggctgcaggagctgtgcggatggatggaaggccgcgacatgaagcgcgcggcggtgacgaacgccccgagggcgaacgccgagctgatgctgtcgctgctggggctcaccgacttcttcccggtgctcgtcatcgggagcgagtgcgaccgggccaagccgttccctgacccgtacctcaaggcgctccagctcatcgacgcatcgcctcaacacaccttcatatttgaagactctgcatcgggggtccgggccggtgtggctgccggagtgcccgtggttggcctgacgacgaggaaccccgggaaggtgctgaaagacgcaggggccagcttgctggtcaaggattttcaggacccggagctgctgtccgtgcttcaacaggtggaggtcgaacccgcagcggagaatgcacaaggctgatgggtcgggcattgcggaaaatgtcatgctggacagactagccatcagcgattctttcacggagtggaatagctgtgtaactgcatcgtggaataaactaactccggtcggttcctcggcaggaacctggagccggtgcgcatggatgtgtgctgtgtgcaaaacctggcgcctactacactggttcttaacatgcaacaggcattttggc

SEQ ID NO: 26263 - protein, 279 aa, Zea mays subsp. mays
  misc_feature (1)..(279): Ceres Seq. ID no. 13499105
TSTSASNSNSCGFSTRRTRKKRSCVSWTVSAATPADMATNSALAKLAPLEAILFDIDGTLCDSDPIHFCAFRELLQQAGFNGGVPITEEFYSANISGGHNDDLARSLFPGMDHQKAMRFMDDKEAMFRKLAPGQLKPVDGLQELCGWMEGRDMKRAAVTNAPRANAELMLSLLGLTDFFPVLVIGSECDRAKPFPDPYLKALQLIDASPQHTFIFEDSASGVRAGVAAGVPVVGLTTRNPGKVLKDAGASLLVKDFQDPELLSVLQQVEVEPAAENAQG

SEQ ID NO: 26264 - protein, 243 aa, Zea mays subsp. mays
  misc_feature (1)..(243): Ceres Seq. ID no. 13499106
MATNSALAKLAPLEAILFDIDGTLCDSDPIHFCAFRELLQQAGFNGGVPITEEFYSANISGGHNDDLARSLFPGMDHQKAMRFMDDKEAMFRKLAPGQLKPVDGLQELCGWMEGRDMKRAAVTNAPRANAELMLSLLGLTDFFPVLVIGSECDRAKPFPDPYLKALQLIDASPQHTFIFEDSASGVRAGVAAGVPVVGLTTRNPGKVLKDAGASLLVKDFQDPELLSVLQQVEVEPAAENAQG

SEQ ID NO: 26265 - protein, 169 aa, Zea mays subsp. mays
  misc_feature (1)..(169): Ceres Seq. ID no. 13499107
MDHQKAMRFMDDKEAMFRKLAPGQLKPVDGLQELCGWMEGRDMKRAAVTNAPRANAELMLSLLGLTDFFPVLVIGSECDRAKPFPDPYLKALQLIDASPQHTFIFEDSASGVRAGVAAGVPVVGLTTRNPGKVLKDAGASLLVKDFQDPELLSVLQQVEVEPAAENAQG

SEQ ID NO: 26266 - DNA, 1175 bp, Zea mays subsp. mays
  misc_feature (1)..(1175): Ceres Seq. ID no. 13499108
acacccatctcctgagtcctgcctgcgctcgcctcagctcctttcttccccgccccttggcttttgcttggttgcatcgggccggtcgagccggagaggaaaagctagctactagctaccagctctcggccggcggtggtagtctgcctgcagctggggttagctgcaagggttgggagctagccatggggaggggtcgggtggagctcaagcggatcgagaacaagatcaaccgccaggtcaccttcgccaagcgccgcaacggcctgctcaagaaggcgtacgagctctccgtgctctgcgacgccgaagtcgcgctcatcatcttctccaaccgcggcaagctctacgagttctgcagcggacagagcatcaccaaaacacttgagaggtatgaaaaaaacagttatggaggaccagatactgctgtacagaacaaggagaacgagttagtccagagcagtcgtaatgagtacctcaagctgaaagcgagggtggataatttacagaggactcagaggaatttgcttggtgaagatctggggtcacttggtgtcaaagagcttgagcagcttgagaagcaacttgattcatccttaaggcacataagatccacaaggacacaacatatgcttgatcagctcactgatcttcagaggagggagcaaatgctgtgtgaagcaaataagtgccttagaagaaagctggaggagaccagcaaccaggtgcatggccaagtgtgggagcacggtgccaacttactcggctacgagaggcactctcctcaacagcaggccccatcacatgttggcaatggtttgttctttcatcccctggaagctgcagcagagccaaccctgcagatcgggttcgctcctgagcatatgaataacttcatgccaacatggctaccctgaagatggatcttgaggcaaaggaaataaataaagatgcggtggcagcatcatactctatgcaagctaagagtgacagctgtgtttcagtcacatatatgatctagtctgtgtgtcaatgtgtcgaaaaacatgtctgtgattttgttatatgaatgtaacgcgcaatgaaacatacatgactagctgcttgcttgacgatgcgtttgcgtgtatccgtataaattaaaggctataagccacatcgtatatgcgtactgc

SEQ ID NO: 26267 - protein, 304 aa, Zea mays subsp. mays
  misc_feature (1)..(304): Ceres Seq. ID no. 13499109
THLLSPACARLSSFLPRPLAFAWLHRAGRAGEEKLATSYQLSAGGGSLPAAGVSCKGWELAMGRGRVELKRIENKINRQVTFAKRRNGLLKKAYELSVLCDAEVALIIFSNRGKLYEFCSGQSITKTLERYEKNSYGGPDTAVQNKENELVQSSRNEYLKLKARVDNLQRTQRNLLGEDLGSLGVKELEQLEKQLDSSLRHIRSTRTQHMLDQLTDLQRREQMLCEANKCLRRKLEETSNQVHGQVWEHGANLLGYERHSPQQQAPSHVGNGLFFHPLEAAAEPTLQIGFAPEHMNNFMPTWLP

SEQ ID NO: 26268 - protein, 243 aa, Zea mays subsp. mays
  misc_feature (1)..(243): Ceres Seq. ID no. 13499110
MGRGRVELKRIENKINRQVTFAKRRNGLLKKAYELSVLCDAEVALIIFSNRGKLYEFCSGQSITKTLERYEKNSYGGPDTAVQNKENELVQSSRNEYLKLKARVDNLQRTQRNLLGEDLGSLGVKELEQLEKQLDSSLRHIRSTRTQHMLDQLTDLQRREQMLCEANKCLRRKLEETSNQVHGQVWEHGANLLGYERHSPQQQAPSHVGNGLFFHPLEAAAEPTLQIGFAPEHMNNFMPTWLP

SEQ ID NO: 26269 - DNA, 812 bp, Zea mays subsp. mays
  misc_feature (1)..(812): Ceres Seq. ID no. 13499119
ccagcctcgccgccccaccaccccagcattgccttaccttgccttgccttgccctgccctccattccacctccacctcgccgcccaaatccccccacccaacaatcccccatggggtcgcaggccatcgaggcgcaccgcgcgggcgcggaggtgtaccgcggcgcggcgctgtgcgcggagaagtcgacggagctgctggcagaggcgcacctcccgctgggcctgctgccgctggccgacatggaggaggtcggctacaaccgcgccacgggcttcgtgtggctgcgccagaggaagtcgctcacgcacacgttccgcccgatcgcgcgccaggtctcgtacgccgccgaggtcaccgccttcgtggaggaccggcggatgaggcgcatgaccggggtcaagaccaaggagctcctcatctgggtcaccctctccgacatgttcgtcgacagggacgacccctccaagatcaccttcaagacgcccaccgggctcggcaggacctaccccgtctccgccttcgctaaggaaggcgccggtgacgacggcgcggcggccaagcacaaggatgatgcccccgccccgaccgccgccggtaaggctgctgccagcaagtgaggtgcgcggcgtccggagctttttaccttgccgtagtcgccatacttgcctccccaataatggcgtttgtaccccctctacctgcttcaaattagtgtgttttatgaatggaaacgaccatccaactttccatccgtccttgcaatgtgtcacggcgggatgtttttactacacatcagctttaccagttcc

SEQ ID NO: 26270 - protein, 205 aa, Zea mays subsp. mays
  misc_feature (1)..(205): Ceres Seq. ID no. 13499120
SLAAPPPQHCLTLPCLALPSIPPPPRRPNPPTQQSPMGSQAIEAHRAGAEVYRGAALCAEKSTELLAEAHLPLGLLPLADMEEVGYNRATGFVWLRQRKSLTHTFRPIARQVSYAAEVTAFVEDRRMRRMTGVKTKELLIWVTLSDMFVDRDDPSKITFKTPTGLGRTYPVSAFAKEGAGDDGAAAKHKDDAPAPTAAGKAAASK

SEQ ID NO: 26271 - protein, 175 aa, Zea mays subsp. mays
  misc_feature (1)..(175): Ceres Seq. ID no. 13499121
QPRRPTTPALPYLALPCPALHSTSTSPPKSPHPTIPHGVAGHRGAPRGRGGVPRRGAVRGEVDGAAGRGAPPAGPAAAGRHGGGRLQPRHGLRVAAPEEVAHAHVPPDRAPGLVRRRGHRLRGGPADEAHDRGQDQGAPHLGHPLRHVRRQGRPLQDHLQDAHRARQDLPRLRLR

SEQ ID NO: 26272 - protein, 169 aa, Zea mays subsp. mays
  misc_feature (1)..(169): Ceres Seq. ID no. 13499122
MGSQAIEAHRAGAEVYRGAALCAEKSTELLAEAHLPLGLLPLADMEEVGYNRATGFVWLRQRKSLTHTFRPIARQVSYAAEVTAFVEDRRMRRMTGVKTKELLIWVTLSDMFVDRDDPSKITFKTPTGLGRTYPVSAFAKEGAGDDGAAAKHKDDAPAPTAAGKAAASK

SEQ ID NO: 26273 - DNA, 1016 bp, Zea mays subsp. mays
  misc_feature (1)..(1016): Ceres Seq. ID no. 13499183
acacagacacagcagccgtttccactgacagtttctcagaaccacagcctcgatccatcgggggagaggatgggagagcctacgcggcaggagctggcggaggcggcgctcgccggggagtcggcggagcagcgcaaccgcttcctggtgctgcggctgtacgaggcgctcggctcccgcgacgcgcgccgggcgcggaagctgctggcgcccgacctcgagtggtggttccacgggccccccacgcgccagcacatgatgcgcctcctcaccggcgcggaccaccagcgccacatgagcggcggcgggttcgccttctccccgcgctccgtcgacgccttcgggtccaccgtcgtcgcggagggcggcgctgacgacgcgcgccagctctactgggtgcacgcctggaccgtggggcccgacggggtcatcacacagctcagggagtacttcaacaccgacctcactgtcaccctcctcgccggcgctgcctccgccaagaaagctgctccgcctaagcagcagcaggacgctgcctcttcttctacctcctcctcctcacccccctcggctgcgtcgtcgtctgcagctgcagggtccaggtgcctgtggcagagccgccgcgccgacagcgcgcacaagtcgctgccgggcctcgtcctcgccatctgagactagagacagcaagatccatctaccctccattataagtttataaccttattacaaaagatcctaaaattcgaaactgttattgcataaataatctggaactgcactagttgtatgtactcggagtcggagtcagtcagtgaagacgtaatgacgatgcgcgtatggactgaactgctcgatcctccgtgttgtgacttgtgaggttcaggtaccagttccttgcttagctcgtgtcgtgtgtgctgctactaggctgtaaggatcgactgttattgtccgagtctgctggatcatggatgtgatgtgatggtatatcgtggtggttaaataaaagttgcatg

SEQ ID NO: 26274 - protein, 223 aa, Zea mays subsp. mays
  misc_feature (1)..(223): Ceres Seq. ID no. 13499184
TQTQQPFPLTVSQNHSLDPSGERMGEPTRQELAEAALAGESAEQRNRFLVLRLYEALGSRDARRARKLLAPDLEWWFHGPPTRQHMMRLLTGADHQRHMSGGGFAFSPRSVDAFGSTVVAEGGADDARQLYWVHAWTVGPDGVITQLREYFNTDLTVTLLAGAASAKKAAPPKQQQDAASSSTSSSSPPSAASSSAAAGSRCLWQSRRADSAHKSLPGLVLAI

SEQ ID NO: 26275 - protein, 200 aa, Zea mays subsp. mays
  misc_feature (1)..(200): Ceres Seq. ID no. 13499185
MGEPTRQELAEAALAGESAEQRNRFLVLRLYEALGSRDARRARKLLAPDLEWWFHGPPTRQHMMRLLTGADHQRHMSGGGFAFSPRSVDAFGSTVVAEGGADDARQLYWVHAWTVGPDGVITQLREYFNTDLTVTLLAGAASAKKAAPPKQQQDAASSSTSSSSPPSAASSSAAAGSRCLWQSRRADSAHKSLPGLVLAI

SEQ ID NO: 26276 - protein, 138 aa, Zea mays subsp. mays
  misc_feature (1)..(138): Ceres Seq. ID no. 13499186
MMRLLTGADHQRHMSGGGFAFSPRSVDAFGSTVVAEGGADDARQLYWVHAWTVGPDGVITQLREYFNTDLTVTLLAGAASAKKAAPPKQQQDAASSSTSSSSPPSAASSSAAAGSRCLWQSRRADSAHKSLPGLVLAI

SEQ ID NO: 26277 - DNA, 811 bp, Zea mays subsp. mays
  misc_feature (1)..(811): Ceres Seq. ID no. 13499210
atatgcctaataaaaggcataaacctggcctcaccccaccgcgagccgaaccggagcgtcaagcaaacatccgtcgatcccgattccgaccactgcgctcgcgccatcgcgccatccacccggcattgtgcgcccgagccgggctcgttggatggcgtccggaggcgccgcccgcggtcgccttgctgaggagcgcaaggcgtggcgcaagagccatcccctcggctttgtggccaagccggcgatgctgccggatggttctgtcaatctcatgctctggaactgcgtcgtccccggcaaggaaggcactgattgggaaggtggatatttcccggtcactctccatttcactgaaaattacccaagtaaccccccaacctgcaagttcccacgaaggtttttccatgtcaatgtctatgattctggggatgtatgcctgtcaatacttggtgatgcatgggcgccttctatcacagtgcggcaaattctaataggcatccaggagctgctggagaacccaaacccagcctctcccgcacaggattttgcttacgatgtttttgcagagaatatgccagaatacaagagacgcgtccgtgagcaagccaagaggtatccgtcgctcgtgtagccgtggacctctgcaacacaattgctgctaaccaagtagtcactcactttggtgtagtggaacttgttcatgacgtgcttaactatggtgtctagttagccgtacgcttgttggaactgctaaagtgcagcttattggaactgctaaaatgcccttgactacgtcttattattatggttt

SEQ ID NO: 26278 - protein, 162 aa, Zea mays subsp. mays
  misc_feature (1)..(162): Ceres Seq. ID no. 13499211
MPNKRHKPGLTPPRAEPERQANIRRSRFRPLRSRHRAIHPALCARAGLVGWRPEAPPAVALLRSARRGARAIPSALWPSRRCCRMVLSISCSGTASSPARKALIGKVDISRSLSISLKITQVTPQPASSHEGFSMSMSMILGMYACQYLVMHGRLLSQCGKF

SEQ ID NO: 26279 - protein, 159 aa, Zea mays subsp. mays
  misc_feature (1)..(159): Ceres Seq. ID no. 13499212
MASGGAARGRLAEERKAWRKSHPLGFVAKPAMLPDGSVNLMLWNCVVPGKEGTDWEGGYFPVTLHFTENYPSNPPTCKFPRRFFHVNVYDSGDVCLSILGDAWAPSITVRQILIGIQELLENPNPASPAQDFAYDVFAENMPEYKRRVREQAKRYPSLV

SEQ ID NO: 26280 - protein, 128 aa, Zea mays subsp. mays
  misc_feature (1)..(128): Ceres Seq. ID no. 13499213
MLPDGSVNLMLWNCVVPGKEGTDWEGGYFPVTLHFTENYPSNPPTCKFPRRFFHVNVYDSGDVCLSILGDAWAPSITVRQILIGIQELLENPNPASPAQDFAYDVFAENMPEYKRRVREQAKRYPSLV

SEQ ID NO: 26281 - DNA, 1142 bp, Zea mays subsp. mays
  misc_feature (1)..(1142): Ceres Seq. ID no. 13499219
tagaacatcctaatcgaaaaatgacaatacccggcggcgagcaacggatcctccctgtcccggccgtgctcttcatccgccgcccgggcgcgcctttcggcaacgcgatgcacgagcgcttccgcgtgctggagctgccctcgccggcctcgggcgagcaggcagcggctttcctcgccgccgccgcggcagagccggacccgcctcgcgccgcggtcgtcatgggaggcggcgccgtccgcgcggacgcggcgttcctcgacgccgtcccctcggtccgctgcctcgtcagcacggccgcgggcgttgaccacatcgacctcgccgagtgcgcgcgccgcggcgtcgccgtcgccaactctgggacagtctacgccgccgacgtcgcagaccacgccgtccgcatgctcatcgacgtgcttcgccgcgtgtcggcggcggggcggttcgtacggcgcgggctatggccgctgcaggagggcgagtaccctctcggctccaagctagggggcaagcgtgtgggcatcatcggattggggaacattggttcgctggttgcaaagaggctggaagctttcggctgtgtcatctgctacaattccagaagacgcatggactcagtctcctacagatacttctccaacgttcagcgtcttgcttccgaatcagacgtgctcgttgtcgcatgcgcactgaacaaagagacacgccacattgtgaatgaggatgtcctggaggccctggggaaggatggggtcgtcataaacattggccgaggcgcaagcatcgacgaggcggccttagtcagcgcgctgaaagagggaaggatcgctggagctgggctcgaagtctttgagaacgaacccaaggtgcctccggagctcatgtccatggacagtgtggtgctgacgcctcattcagcggttttcacgacggagtcgagggcggacctgtgtcagcacctgatttgcaacctggaagcgttctttgccggtaagccactcatcacgcccgtgctgcgtttgacagagtaggtcgtgttgcaggctagttaagctattgggaggtaactaaattgttatttgtatatatagctgcaaactatagggctgtgttccttataaaatggatccattgattcg

SEQ ID NO: 26282 - protein, 343 aa, Zea mays subsp. mays
  misc_feature (1)..(343): Ceres Seq. ID no. 13499220
EHPNRKMTIPGGEQRILPVPAVLFIRRPGAPFGNAMHERFRVLELPSPASGEQAAAFLAAAAAEPDPPRAAVVMGGGAVRADAAFLDAVPSVRCLVSTAAGVDHIDLAECARRGVAVANSGTVYAADVADHAVRMLIDVLRRVSAAGRFVRRGLWPLQEGEYPLGSKLGGKRVGIIGLGNIGSLVAKRLEAFGCVICYNSRRRMDSVSYRYFSNVQRLASESDVLVVACALNKETRHIVNEDVLEALGKDGVVINIGRGASIDEAALVSALKEGRIAGAGLEVFENEPKVPPELMSMDSVVLTPHSAVFTTESRADLCQHLICNLEAFFAGKPLITPVLRLTE

SEQ ID NO: 26283 - protein, 337 aa, Zea mays subsp. mays
  misc_feature (1)..(337): Ceres Seq. ID no. 13499221
MTIPGGEQRILPVPAVLFIRRPGAPFGNAMHERFRVLELPSPASGEQAAAFLAAAAAEPDPPRAAVVMGGGAVRADAAFLDAVPSVRCLVSTAAGVDHIDLAECARRGVAVANSGTVYAADVADHAVRMLIDVLRRVSAAGRFVRRGLWPLQEGEYPLGSKLGGKRVGIIGLGNIGSLVAKRLEAFGCVICYNSRRRMDSVSYRYFSNVQRLASESDVLVVACALNKETRHIVNEDVLEALGKDGVVINIGRGASIDEAALVSALKEGRIAGAGLEVFENEPKVPPELMSMDSVVLTPHSAVFTTESRADLCQHLICNLEAFFAGKPLITPVLRLTE

SEQ ID NO: 26284 - protein, 308 aa, Zea mays subsp. mays
  misc_feature (1)..(308): Ceres Seq. ID no. 13499222
MHERFRVLELPSPASGEQAAAFLAAAAAEPDPPRAAVVMGGGAVRADAAFLDAVPSVRCLVSTAAGVDHIDLAECARRGVAVANSGTVYAADVADHAVRMLIDVLRRVSAAGRFVRRGLWPLQEGEYPLGSKLGGKRVGIIGLGNIGSLVAKRLEAFGCVICYNSRRRMDSVSYRYFSNVQRLASESDVLVVACALNKETRHIVNEDVLEALGKDGVVINIGRGASIDEAALVSALKEGRIAGAGLEVFENEPKVPPELMSMDSVVLTPHSAVFTTESRADLCQHLICNLEAFFAGKPLITPVLRLTE

SEQ ID NO: 26285 - DNA, 1217 bp, Zea mays subsp. mays
  misc_feature (1)..(1217): Ceres Seq. ID no. 13499227
gacaaacggattgacaccgacacataaaaaacacctttttagacatttctcgagaccaccactactcgtgcccgtgcggtggttcgaccagatccatctcacacccttatcctctttacgcctcaccactacagagaaaaagagaaacctgcgagcgacggggactatggccgccacccgcaccgccctggccctgctagggcacgagggcatggaatctgggcccaggccggcggcgccgcgccgcagcaggctacgcgtcgtcgccgtcgcgctgcggaccaggcccaccagcctcgcggccccgggtctcccgcccgcggcgccggagcccgtgctgccgtcgccgcccgtggccgcgggcgccncggcggtgctgctngaggcgggcgtgccgcccgccgacctccggcgcgcggcggggatgtgcccggagctgctgtccgtgtccgcggaggccgtcgaggccgcgctccggttcctcacggaggaggcgggcgtcgccgaggccgacctcccgcgcgtgctccggcggcgcccgcgcctgctcgtctctcccgtgncggcgcggctgcggcccacgctctacttcctgcgcgcgctcggcgtgcccgacctgcaccgccgcgccgacctgctatccttctccgtggagggcaagctgctgccgcggctcgagttcctcgagtcgctgggcctgccggcgcgcgccgcccgctccatggcgcgccgcttccccgcgctnttcggctacggcgtggaggggaacatgcggcccaaggcggactacctcctgggcgccatggcccgccgcgccgacgagctgtacgacttccccgagtacttctcctacgcgctggcnacgcgcatcgtgccgcgttacgaggcctgcgccgcgcgcggggtcagcaggctgccactgcccgccatgtccgccccggggacgccaagttccgcgccactctcgccagctgtgtcgggtccatgctgccccggaggcggtcggcgctgtggcacgccaagtgggtggatgacgacgcggcggcggcggcgaaggagaccacggtgtgacgtgcgcattggtagcgagcgagaggctcttgcctcttggtggtgtaacatatgtccataaggatcggcattggctgcttgtaaagtatgatagccatgatgaattatctagttggtcctcccagtgaacaatggcactgttggct

SEQ ID NO: 26286 - protein, 376 aa, Zea mays subsp. mays
  misc_feature (1)..(376): Ceres Seq. ID no. 13499228
  misc_feature (123)..(123): Xaa is any aa, unknown or other
  misc_feature (127)..(127): Xaa is any aa, unknown or other
  misc_feature (188)..(188): Xaa is any aa, unknown or other
  misc_feature (248)..(248): Xaa is any aa, unknown or other
  misc_feature (287)..(287): Xaa is any aa, unknown or other
TNGLTPTHKKHLFRHFSRPPLLVPVRWFDQIHLTPLSSLRLTTTEKKRNLRATGTMAATRTALALLGHEGMESGPRPAAPRRSRLRVVAVALRTRPTSLAAPGLPPAAPEPVLPSPPVAAGAXAVLXEAGVPPADLRRAAGMCPELLSVSAEAVEAALRFLTEEAGVAEADLPRVLRRRPRLLVSPVXARLRPTLYFLRALGVPDLHRRADLLSFSVEGKLLPRLEFLESLGLPARAARSMARRFPAXFGYGVEGNMRPKADYLLGAMARRADELYDFPEYFSYALXTRIVPRYEACAARGVSRLPLPAMSAPGTPSSAPLSPAVSGPCCPGGGRRCGTPSGWMTTRRRRRRRPRCDVRIGSEREALASWWCNICP

SEQ ID NO: 26287 - protein, 321 aa, Zea mays subsp. mays
  misc_feature (1)..(321): Ceres Seq. ID no. 13499229
  misc_feature (68)..(68): Xaa is any aa, unknown or other
  misc_feature (72)..(72): Xaa is any aa, unknown or other
  misc_feature (133)..(133): Xaa is any aa, unknown or other
  misc_feature (193)..(193): Xaa is any aa, unknown or other
  misc_feature (232)..(232): Xaa is any aa, unknown or other
MAATRTALALLGHEGMESGPRPAAPRRSRLRVVAVALRTRPTSLAAPGLPPAAPEPVLPSPPVAAGAXAVLXEAGVPPADLRRAAGMCPELLSVSAEAVEAALRFLTEEAGVAEADLPRVLRRRPRLLVSPVXARLRPTLYFLRALGVPDLHRRADLLSFSVEGKLLPRLEFLESLGLPARAARSMARRFPAXFGYGVEGNMRPKADYLLGAMARRADELYDFPEYFSYALXTRIVPRYEACAARGVSRLPLPAMSAPGTPSSAPLSPAVSGPCCPGGGRRCGTPSGWMTTRRRRRRRPRCDVRIGSEREALASWWCNICP

SEQ ID NO: 26288 - protein, 306 aa, Zea mays subsp. mays
  misc_feature (1)..(306): Ceres Seq. ID no. 13499230
  misc_feature (53)..(53): Xaa is any aa, unknown or other
  misc_feature (57)..(57): Xaa is any aa, unknown or other
  misc_feature (118)..(118): Xaa is any aa, unknown or other
  misc_feature (178)..(178): Xaa is any aa, unknown or other
  misc_feature (217)..(217): Xaa is any aa, unknown or other
MESGPRPAAPRRSRLRVVAVALRTRPTSLAAPGLPPAAPEPVLPSPPVAAGAXAVLXEAGVPPADLRRAAGMCPELLSVSAEAVEAALRFLTEEAGVAEADLPRVLRRRPRLLVSPVXARLRPTLYFLRALGVPDLHRRADLLSFSVEGKLLPRLEFLESLGLPARAARSMARRFPAXFGYGVEGNMRPKADYLLGAMARRADELYDFPEYFSYALXTRIVPRYEACAARGVSRLPLPAMSAPGTPSSAPLSPAVSGPCCPGGGRRCGTPSGWMTTRRRRRRRPRCDVRIGSEREALASWWCNICP

SEQ ID NO: 26289 - DNA, 1582 bp, Zea mays subsp. mays
  misc_feature (1)..(1582): Ceres Seq. ID no. 13499244
actattatagccaacgtctctgcgcgtgcggtgccggagcggcggagcctcccctccctcccccatcctacctcaccatgatggcaatgccggacgcggatcgcaacgccatgtcggcgccgctgctcccgcggcccgcgtgcctgacggcgtccttctcctcctcctcctcctccttcgcgtccttctcctcctccaactcctccagctccgacccctcacccccgtccgccttcccgccggcggggccgtgcaaggcgctggcggtgctgcgggaccacgcgggctccgtctccagcctctccctctgcggggagttcctgctcagcgcgtccacggccggcgacgtcgtggcgtggcagcagcccgacctccggcgcttcgcgcgcttcggccacggcgagagcggcggctccgtcaaggcgctggcggccgcgggcggccgcgtcttctccgcgcaccaggacnnccgcgtccgcgtctggcgcgtctcccgcggccgccgctccgagaacgccttcaagctcgtcgccgcgctgcccaccgccagggactacctgggccgggtgttccgccaggacagctacgtgcagaccaccgccaccacggcggcgcgccgcgcccaccaccgccgcctctggatcgagcacgccaacagcatctcctgcctcgccgtcgccgtgcacgacgccgcgctcctctactcgggctcctgggaccgcacgctcaaggtctggcgcgtcgccgacctcaggtgcctcgagtccatccgcgcccacgacgacgccgtcaacgccgtcgccgcagacgccggcatcgtctactccgcctccgccgacggccgcgtcaaggcctgggagaaggggaaggcgtcgcatttcctccagggcgtcctcgtcgcccgcgacggcgtctcgtggaacgcgctcaccgtcgccgccgacgaccgccggctctacgccgcgggctccgacggccacgtcgccgcctgggaccgcctcggcggcaggaccgccgcgcgctggaccctcgcgtgcgacgtcagggcgcacgacgccgccgtgctgtgcctctgcgtcgccagggacctgctctgcaccggctccgccgacaagaccatcggcctgtggcgccgtcagagcgccggcgagctggccaaggtgggcgtcgtcagaggccacgagggccccgtcaaatgcatccaggcgtcctggtgcaggctcaccaatggctgcatggtctacagcgggagccttgacaagaccatcagagtttggtgggtgcccggtgccttgcagcatgccaatgacaaagatcagcagcagcagcagcaaaaagatggcttcaaggatcacaagcacaaggcttctttgttcttgagatgaaacttgtgtctgctccaaatttcgaaatggattgattgagattgctcaggtctagtctgtattttggattggttgatttatattacaaggataaatgggtaacacacaaaagtagccatagagtggatgtgcttctgtaaatggctgtatactatgttctgattcttctttgatataggttttgactacatggagag

SEQ ID NO: 26290 - protein, 460 aa, Zea mays subsp. mays
  misc_feature (1)..(460): Ceres Seq. ID no. 13499245
  misc_feature (156)..(156): Xaa is any aa, unknown or other
YYSQRLCACGAGAAEPPLPPPSYLTMMAMPDADRNAMSAPLLPRPACLTASFSSSSSSFASFSSSNSSSSDPSPPSAFPPAGPCKALAVLRDHAGSVSSLSLCGEFLLSASTAGDVVAWQQPDLRRFARFGHGESGGSVKALAAAGGRVFSAHQDXRVRVWRVSRGRRSENAFKLVAALPTARDYLGRVFRQDSYVQTTATTAARRAHHRRLWIEHANSISCLAVAVHDAALLYSGSWDRTLKVWRVADLRCLESIRAHDDAVNAVAADAGIVYSASADGRVKAWEKGKASHFLQGVLVARDGVSWNALTVAADDRRLYAAGSDGHVAAWDRLGGRTAARWTLACDVRAHDAAVLCLCVARDLLCTGSADKTIGLWRRQSAGELAKVGVVRGHEGPVKCIQASWCRLTNGCMVYSGSLDKTIRVWWVPGALQHANDKDQQQQQQKDGFKDHKHKASLFLR

SEQ ID NO: 26291 - protein, 435 aa, Zea mays subsp. mays
  misc_feature (1)..(435): Ceres Seq. ID no. 13499246
  misc_feature (131)..(131): Xaa is any aa, unknown or other
MMAMPDADRNAMSAPLLPRPACLTASFSSSSSSFASFSSSNSSSSDPSPPSAFPPAGPCKALAVLRDHAGSVSSLSLCGEFLLSASTAGDVVAWQQPDLRRFARFGHGESGGSVKALAAAGGRVFSAHQDXRVRVWRVSRGRRSENAFKLVAALPTARDYLGRVFRQDSYVQTTATTAARRAHHRRLWIEHANSISCLAVAVHDAALLYSGSWDRTLKVWRVADLRCLESIRAHDDAVNAVAADAGIVYSASADGRVKAWEKGKASHFLQGVLVARDGVSWNALTVAADDRRLYAAGSDGHVAAWDRLGGRTAARWTLACDVRAHDAAVLCLCVARDLLCTGSADKTIGLWRRQSAGELAKVGVVRGHEGPVKCIQASWCRLTNGCMVYSGSLDKTIRVWWVPGALQHANDKDQQQQQQKDGFKDHKHKASLFLR

SEQ ID NO: 26292 - protein, 434 aa, Zea mays subsp. mays
  misc_feature (1)..(434): Ceres Seq. ID no. 13499247
  misc_feature (130)..(130): Xaa is any aa, unknown or other
MAMPDADRNAMSAPLLPRPACLTASFSSSSSSFASFSSSNSSSSDPSPPSAFPPAGPCKALAVLRDHAGSVSSLSLCGEFLLSASTAGDVVAWQQPDLRRFARFGHGESGGSVKALAAAGGRVFSAHQDXRVRVWRVSRGRRSENAFKLVAALPTARDYLGRVFRQDSYVQTTATTAARRAHHRRLWIEHANSISCLAVAVHDAALLYSGSWDRTLKVWRVADLRCLESIRAHDDAVNAVAADAGIVYSASADGRVKAWEKGKASHFLQGVLVARDGVSWNALTVAADDRRLYAAGSDGHVAAWDRLGGRTAARWTLACDVRAHDAAVLCLCVARDLLCTGSADKTIGLWRRQSAGELAKVGVVRGHEGPVKCIQASWCRLTNGCMVYSGSLDKTIRVWWVPGALQHANDKDQQQQQQKDGFKDHKHKASLFLR

SEQ ID NO: 26293 - DNA, 1182 bp, Zea mays subsp. mays
  misc_feature (1)..(1182): Ceres Seq. ID no. 13499256
gcacgagaccattacctagaacatcctaatcaaaaaatctctagccagcgtcgtcggctgacctcctaccgtcgtcatggcttctcttcacccgttgatcgctgctgcgctcgtagtcgcggcggcctccacggcagcggcggcggcgagctgggcggcaccgtcgtcgccagcacgccctctgttccgcgagtacatcggcgcggagggcaagaacgtgacgttcgcggacgtgccggtgcacccgggcgtggacttccacttcatcctctccttcgccatcgactacgccgcgaacgccaccaacgcctccgcgccgccggtgcccacggacggccgcttcgccgtgttctgggacgaggcgaacctcaccccggccgccgtggccgccctcaagtgcccctcctcccacgcccgcgtcgcgctcagcctcggcggcgacaccgtgttcggcgccaacgccacgttccgcgcgtcctccgtcgacgcctgggtcggcaacgccgtggcgtcgctcgcggccatcctcacccgctacggcctcgacggggtggacgtggactacgagcacttcggggagcgcgagacgcccgaggtgttcgccgagtgcgtcggccgcctcgtgcgcgcgctccgggcccgcggcgtcatctccttcgcctccatcgcgcccttcgccaacccggacgtgcaggcgcactacgccgagctctggcgacgctacggccgcgacttcgactacgtcaacttccagttctacgcgtacccgtccaacaccacggtgccggagttcctggcccactatgacgagcagagcgcccggtacgccggcgccagcggaggggggaaggtgcttgtcagcttcgggacggaccccgccagcggcggcctgcgccccgggaagggcttcttcagggcgtgccgggagctgcgccgccaagggaggttgcatggaattttttgtctgggccgcggataactccgccgccgacgggtttcgcgacgagcgcctcgcgcagacgttcctcgccggcaacgccccgggtttcccctgacgcatgcatgcgttaagctccccgtgtctccgttccatatttccgttccttgtgtacgtcttgttatgttttgtcgcgtccatatgatttgtaattggtccagttcattgattatttgcgtgcatcc

SEQ ID NO: 26294 - protein, 300 aa, Zea mays subsp. mays
  misc_feature (1)..(300): Ceres Seq. ID no. 13499257
MASLHPLIAAALVVAAASTAAAAASWAAPSSPARPLFREYIGAEGKNVTFADVPVHPGVDFHFILSFAIDYAANATNASAPPVPTDGRFAVFWDEANLTPAAVAALKCPSSHARVALSLGGDTVFGANATFRASSVDAWVGNAVASLAAILTRYGLDGVDVDYEHFGERETPEVFAECVGRLVRALRARGVISFASIAPFANPDVQAHYAELWRRYGRDFDYVNFQFYAYPSNTTVPEFLAHYDEQSARYAGASGGGKVLVSFGTDPASGGLRPGKGFFRACRELRRQGRLHGIFCLGRG

SEQ ID NO: 26295 - protein, 268 aa, Zea mays subsp. mays
  misc_feature (1)..(268): Ceres Seq. ID no. 13499258
ARDHYLEHPNQKISSQRRRLTSYRRHGFSSPVDRCCARSRGGLHGSGGGELGGTVVASTPSVPRVHRRGGQERDVRGRAGAPGRGLPLHPLLRHRLRRERHQRLRAAGAHGRPLRRVLGRGEPHPGRRGRPQVPLLPRPRRAQPRRRHRVRRQRHVPRVLRRRLGRQRRGVARGHPHPLRPRRGGRGLRALRGARDARGVRRVRRPPRARAPGPRRHLLRLHRALRQPGRAGALRRALATLRPRLRLRQLPVLRVPVQHHGAGVPGPL

SEQ ID NO: 26296 - DNA, 1349 bp, Zea mays subsp. mays
  misc_feature (1)..(1349): Ceres Seq. ID no. 13499297
taatcgaaaaaccgcgagctcttgcagcctaacggccttagctaatttaagagagattagtaaacaaacagcagacttaagagcgagcctagctagcggcagtaccatgaggcgcctccagttcctggccgccgccgccgccgccatcttcctcctcgcgcttccgctgatggcgacggcccagccgaagctgaggccggactactacgccggcgtctgcccgaacctcgagagcattgtccgcggcgccgtgcggcagtccgtggcgctctcgccgctcgccgccccggccacgctccggctcttcttccacgactgcgcggtcaggggctgcgacgcgtcggtgatgctcatcgacccggccggcggcgacgagtggcggagccccgacggcgtgatgctgaagccggaagggttcagcacggtgatgagcgccaaggcggcggtggacagcgacccgcagtgccggaacattgtgtcctgcgccgacatcttggccctcgccgccagggactccgtgttcctgagcggagggccagactacgaagtggagctgggcaggttcgacggcagggtgtcgagtggtggcagcgtcgtggttcctcatggcacgttcgacctcgaccagctcaacgccttcttctccagcctcggtctctcccagaccgacatgatcgcactgtcagggggtcacacgatcggcgcggcgtcgtgcggctccttcgcgtaccgggtgggcgcggatccggccatggacccggcgctcgcgcagcaggtcctggcgcgctgcccggggggcgggccagccgggttcgcgttcctggacgccacgacgccgctgcggttcgacaacgagtactaccggaacctgctcggcgggatggggatcctggcctccgaccaggtgctgtacgccgacccgaggtcccgcggcgccgtcgagcgctacgccgcggaccaggccgccttcttcggggactttgccgcggcaatgacgaggctcggcagggtcggggtccgcacggcggccgacggcgagatacgccgcgactgcaggttccccaacccccaactgatgggttcgccggctggctgtggcttggcttgtggttgcgcacttgcgcttgcgcgacggttttgtgttgcttctatcttctgtgacgtcacccgtggacgtggcgcgagtgggtgtctgtgttgcgttgttgacttgagtggacgtgcagaaggccgcgtgtcttttggaccaggaaggctctgggcctggtgggctgtgtcctgtgtggctccaagatgggtgtcatatctgttgtgaagggaaatgaaatgtaaagattggtggttggcct

SEQ ID NO: 26297 - protein, 437 aa, Zea mays subsp. mays
  misc_feature (1)..(437): Ceres Seq. ID no. 13499298
NRKTASSCSLTALANLREISKQTADLRASLASGSTMRRLQFLAAAAAAIFLLALPLMATAQPKLRPDYYAGVCPNLESIVRGAVRQSVALSPLAAPATLRLFFHDCAVRGCDASVMLIDPAGGDEWRSPDGVMLKPEGFSTVMSAKAAVDSDPQCRNIVSCADILALAARDSVFLSGGPDYEVELGRFDGRVSSGGSVVVPHGTFDLDQLNAFFSSLGLSQTDMIALSGGHTIGAASCGSFAYRVGADPAMDPALAQQVLARCPGGGPAGFAFLDATTPLRFDNEYYRNLLGGMGILASDQVLYADPRSRGAVERYAADQAAFFGDFAAAMTRLGRVGVRTAADGEIRRDCRFPNPQLMGSPAGCGLACGCALALARRFCVASIFCDVTRGRGASGCLCCVVDLSGRAEGRVSFGPGRLWAWWAVSCVAPRWVSYLL

SEQ ID NO: 26298 - protein, 402 aa, Zea mays subsp. mays
  misc_feature (1)..(402): Ceres Seq. ID no. 13499299
MRRLQFLAAAAAAIFLLALPLMATAQPKLRPDYYAGVCPNLESIVRGAVRQSVALSPLAAPATLRLFFHDCAVRGCDASVMLIDPAGGDEWRSPDGVMLKPEGFSTVMSAKAAVDSDPQCRNIVSCADILALAARDSVFLSGGPDYEVELGRFDGRVSSGGSVVVPHGTFDLDQLNAFFSSLGLSQTDMIALSGGHTIGAASCGSFAYRVGADPAMDPALAQQVLARCPGGGPAGFAFLDATTPLRFDNEYYRNLLGGMGILASDQVLYADPRSRGAVERYAADQAAFFGDFAAAMTRLGRVGVRTAADGEIRRDCRFPNPQLMGSPAGCGLACGCALALARRFCVASIFCDVTRGRGASGCLCCVVDLSGRAEGRVSFGPGRLWAWWAVSCVAPRWVSYLL

SEQ ID NO: 26299 - protein, 381 aa, Zea mays subsp. mays
  misc_feature (1)..(381): Ceres Seq. ID no. 13499300
MATAQPKLRPDYYAGVCPNLESIVRGAVRQSVALSPLAAPATLRLFFHDCAVRGCDASVMLIDPAGGDEWRSPDGVMLKPEGFSTVMSAKAAVDSDPQCRNIVSCADILALAARDSVFLSGGPDYEVELGRFDGRVSSGGSVVVPHGTFDLDQLNAFFSSLGLSQTDMIALSGGHTIGAASCGSFAYRVGADPAMDPALAQQVLARCPGGGPAGFAFLDATTPLRFDNEYYRNLLGGMGILASDQVLYADPRSRGAVERYAADQAAFFGDFAAAMTRLGRVGVRTAADGEIRRDCRFPNPQLMGSPAGCGLACGCALALARRFCVASIFCDVTRGRGASGCLCCVVDLSGRAEGRVSFGPGRLWAWWAVSCVAPRWVSYLL

SEQ ID NO: 26300 - DNA, 2137 bp, Zea mays subsp. mays
  misc_feature (1)..(2137): Ceres Seq. ID no. 13499365
caagttgtcctcctccgcttccctccaaatccaccctggatccaaccccgattttccccagcagaagcaaacccgagcaaattgagcgcttgcagcttcacccggcgaagcagaatcgaatcggagccgctcgccactccgcgatggggatcctcctccggtccctcctcgtcgcctcgctcgtcctcagttcgctcgtcttgcacgtcgcagcggctaaaactatagatccttacaaggttctaggagttgacaagaatgctagccaacgggatattcagaaagcctttcacaaactttctctaaaataccaccctgacaagaataaagggaagggcgcacaggaaaaatttgaagaaataaacaatgcatatgagattctatctgatgaagagaagaggaaaaactatgacctctacggggatgagaagggtaaccctgaatttggtggtggaaattttggaaatcatgggggttctacatacttcactggtggtggccctaagtccagtcaattcacatctggtaatggatggcagacgatgggtggtcaaggaaatacaaaaacgttttcattttcatttggtggtaaacctggggccagtggtggaaacccgtttggtggtggttttgatcttggtgatgttttctcgaacctttttggtggtggaccaatgggtgatagccatattggtggatcaagtggctcagctagagccaacactggaacttctggtcagcattctggcactaccaagattgaggatatcaccacacaagttttcaataaagaagtagctgatcaaggaactacttggcttctgttattttatactccccaatctaaaagtcagtttgtgctagagagtgtcatgcaagacgtggtccattcactagatggtgttcttagggctggtaagatcaactgtgacaatgaaaaatctctttgcaaaaggtctggtgtttcaatagggaaatcggcccgtctcttcatctattcatatgctactgcagagaaagggtctttgcacgagtattctggggaacatgatgctaagagcttgaagacattttgtcaagaacacctgccaagattctccaaacgggtagatattagccaattcagcttccctttaaatgttctaccaaaccttcctcaagtgctcttactatcgagtaagaaggacacaccagcaatgtggcgtgctatcagtgggatgttccgcaatcggataatcttttatgatgctgaggttcacgatgtttctcatcctctgctgaaaagtcttggcgtgaagaatctcccagctgtaattggccgaaccgtgaatggtgaggagctccttctgaaggatggcatttcggtgaaagatctcagatctggtgtcaaggaattgaagacactgctagatagttttgagaagaagaataagaagttattatcgaatctagctaataagaaaccttccggtcaatgggaagaaatcaagaagattcctctcctcacagcttccaactttgaggaaacatgtggagagaagacttcagtatgcatcattggtgttttcgggtcaaacaaagccaaggggcagcttgaagcagtcctgtctgagatatctatgaagactttgataagggggcagaactataattccagaaatgctgtctcctatgctttgctggataaggacaaacaatctggattcctgtcatcgtttgacaagtctggatacaggtcatctgacaagctgctcatcgcctacaagccccgccgggggaagttcgcggtgtacgacggcgaggtgacactggaagaagctgaaaggttcgtgggatccgttttgaacggagacgttcaactgtcgccgacgaaacaaaaacctgtccttcggtagacgattattgcaagttgcaagggttttagatctaacacttattatcttaattaaggccttaattaaggcttgtacatagatggacgaagagagtaaaatcatagagcgtttgctggacagtttagtcgttcggtaaaccagagttgctacatctctccctcaaccgtgccaatgtaaattgtgcaaatgctgcagtcctgtcgagatattgaatatatacaggcatacagcggaccatttct

SEQ ID NO: 26301 - protein, 630 aa, Zea mays subsp. mays
  misc_feature (1)..(630): Ceres Seq. ID no. 13499366
SCPPPLPSKSTLDPTPIFPSRSKPEQIERLQLHPAKQNRIGAARHSAMGILLRSLLVASLVLSSLVLHVAAAKTIDPYKVLGVDKNASQRDIQKAFHKLSLKYHPDKNKGKGAQEKFEEINNAYEILSDEEKRKNYDLYGDEKGNPEFGGGNFGNHGGSTYFTGGGPKSSQFTSGNGWQTMGGQGNTKTFSFSFGGKPGASGGNPFGGGFDLGDVFSNLFGGGPMGDSHIGGSSGSARANTGTSGQHSGTTKIEDITTQVFNKEVADQGTTWLLLFYTPQSKSQFVLESVMQDVVHSLDGVLRAGKINCDNEKSLCKRSGVSIGKSARLFIYSYATAEKGSLHEYSGEHDAKSLKTFCQEHLPRFSKRVDISQFSFPLNVLPNLPQVLLLSSKKDTPAMWRAISGMFRNRIIFYDAEVHDVSHPLLKSLGVKNLPAVIGRTVNGEELLLKDGISVKDLRSGVKELKTLLDSFEKKNKKLLSNLANKKPSGQWEEIKKIPLLTASNFEETCGEKTSVCIIGVFGSNKAKGQLEAVLSEISMKTLIRGQNYNSRNAVSYALLDKDKQSGFLSSFDKSGYRSSDKLLIAYKPRRGKFAVYDGEVTLEEAERFVGSVLNGDVQLSPTKQKPVLR

SEQ ID NO: 26302 - protein, 583 aa, Zea mays subsp. mays
  misc_feature (1)..(583): Ceres Seq. ID no. 13499367
MGILLRSLLVASLVLSSLVLHVAAAKTIDPYKVLGVDKNASQRDIQKAFHKLSLKYHPDKNKGKGAQEKFEEINNAYEILSDEEKRKNYDLYGDEKGNPEFGGGNFGNHGGSTYFTGGGPKSSQFTSGNGWQTMGGQGNTKTFSFSFGGKPGASGGNPFGGGFDLGDVFSNLFGGGPMGDSHIGGSSGSARANTGTSGQHSGTTKIEDITTQVFNKEVADQGTTWLLLFYTPQSKSQFVLESVMQDVVHSLDGVLRAGKINCDNEKSLCKRSGVSIGKSARLFIYSYATAEKGSLHEYSGEHDAKSLKTFCQEHLPRFSKRVDISQFSFPLNVLPNLPQVLLLSSKKDTPAMWRAISGMFRNRIIFYDAEVHDVSHPLLKSLGVKNLPAVIGRTVNGEELLLKDGISVKDLRSGVKELKTLLDSFEKKNKKLLSNLANKKPSGQWEEIKKIPLLTASNFEETCGEKTSVCIIGVFGSNKAKGQLEAVLSEISMKTLIRGQNYNSRNAVSYALLDKDKQSGFLSSFDKSGYRSSDKLLIAYKPRRGKFAVYDGEVTLEEAERFVGSVLNGDVQLSPTKQKPVLR

SEQ ID NO: 26303 - protein, 450 aa, Zea mays subsp. mays
  misc_feature (1)..(450): Ceres Seq. ID no. 13499368
MGGQGNTKTFSFSFGGKPGASGGNPFGGGFDLGDVFSNLFGGGPMGDSHIGGSSGSARANTGTSGQHSGTTKIEDITTQVFNKEVADQGTTWLLLFYTPQSKSQFVLESVMQDVVHSLDGVLRAGKINCDNEKSLCKRSGVSIGKSARLFIYSYATAEKGSLHEYSGEHDAKSLKTFCQEHLPRFSKRVDISQFSFPLNVLPNLPQVLLLSSKKDTPAMWRAISGMFRNRIIFYDAEVHDVSHPLLKSLGVKNLPAVIGRTVNGEELLLKDGISVKDLRSGVKELKTLLDSFEKKNKKLLSNLANKKPSGQWEEIKKIPLLTASNFEETCGEKTSVCIIGVFGSNKAKGQLEAVLSEISMKTLIRGQNYNSRNAVSYALLDKDKQSGFLSSFDKSGYRSSDKLLIAYKPRRGKFAVYDGEVTLEEAERFVGSVLNGDVQLSPTKQKPVLR

SEQ ID NO: 26304 - DNA, 890 bp, Zea mays subsp. mays
  misc_feature (1)..(890): Ceres Seq. ID no. 13499377
tagaacatcctaatcaaaagaccaaccagccaaaacacgcccgcgcgcctgtttgttcggccggaggacgccatggccatggaggagggatcaggagcggtggagaaagggccggccgtgggcacggtggctgacgcctccgccagcgtcatcggcgaaggcgccgtgaaggaggaggccgggggcagacggcagccgtcggccggctacgcggccgtcgtgattggcggcaccttcgaccgcctacaccagggccaccatctcttcctgaaggcggcagcggagctggcgagggagaggatcgtggtcggcgtctgcgacggcccgatgctcgccaagaaacagtacgccgacctgatacaaccgatcgagaagcggatgcagaacgccaaggattatattaagtccataaagcccgaccttgatgttcatgtggagcccatcgtcgaccctttcggcccatccatcgttgacccaggccttgaggccatcattgtcagcaaggagacgttgccgggagggcacgctgtcaacaggaagagagcagagagagggctcactcagctgcagatcgaggtgatagagctggtgccagaggagtcgacgggggacaagataagttccacggcattcagaaagatggaagccgagagggcgctgcagcaacagaataaacaagaagatacagcagtaggcactccggttggggtgcaaaacatagcggttcagtcacatggagcatagtacatgaaccgaagttctgttgcctgtacctttttttaaaaaagtacatgaaactttgaggtctctacttccatcacatacaaagggacaatgcttctttgcccaaacatggactgatcatcaatacagaaaagttccagtttctt

SEQ ID NO: 26305 - protein, 223 aa, Zea mays subsp. mays
  misc_feature (1)..(223): Ceres Seq. ID no. 13499378
MAMEEGSGAVEKGPAVGTVADASASVIGEGAVKEEAGGRRQPSAGYAAVVIGGTFDRLHQGHHLFLKAAAELARERIVVGVCDGPMLAKKQYADLIQPIEKRMQNAKDYIKSIKPDLDVHVEPIVDPFGPSIVDPGLEAIIVSKETLPGGHAVNRKRAERGLTQLQIEVIELVPEESTGDKISSTAFRKMEAERALQQQNKQEDTAVGTPVGVQNIAVQSHGA

SEQ ID NO: 26306 - protein, 221 aa, Zea mays subsp. mays
  misc_feature (1)..(221): Ceres Seq. ID no. 13499379
MEEGSGAVEKGPAVGTVADASASVIGEGAVKEEAGGRRQPSAGYAAVVIGGTFDRLHQGHHLFLKAAAELARERIVVGVCDGPMLAKKQYADLIQPIEKRMQNAKDYIKSIKPDLDVHVEPIVDPFGPSIVDPGLEAIIVSKETLPGGHAVNRKRAERGLTQLQIEVIELVPEESTGDKISSTAFRKMEAERALQQQNKQEDTAVGTPVGVQNIAVQSHGA

SEQ ID NO: 26307 - protein, 138 aa, Zea mays subsp. mays
  misc_feature (1)..(138): Ceres Seq. ID no. 13499380
MLAKKQYADLIQPIEKRMQNAKDYIKSIKPDLDVHVEPIVDPFGPSIVDPGLEAIIVSKETLPGGHAVNRKRAERGLTQLQIEVIELVPEESTGDKISSTAFRKMEAERALQQQNKQEDTAVGTPVGVQNIAVQSHGA

SEQ ID NO: 26308 - DNA, 1619 bp, Zea mays subsp. mays
  misc_feature (1)..(1619): Ceres Seq. ID no. 13499381
gcacgagaccattacctagaacatcctaatcgaaaaagtcctcacccattcattcgtccatcccacctaccatggccaccgcctccggcactgacgccggtgcccagccgcgcgacgaccccagcctcctccccttcgcgtccttctcgctcggcctctccatccgcgcgccggccacccccacactcgcctccgtcccctccaccctccacctccccactcaaatctctacactcgccgtctgcctccacccctccgccgcgcagccctcctcccgccgcaccacccgcctcaattccgccacctcctccgtcatcgccccgctgccctcctcaacgcccggcctctcccgctccttcccttcgggcgcgcccgccgcagcagggcgccgccgcacgctcgtctggttccgcgccgacctccgcctccacgaccatgagccgtttcacgccgcagcgggggcgtcgtcctccctcctccccgttttcgtcttcgatccgcgggacttcggcaagtccccctcggggttcgaccggacgggcccgtaccgcgccaacttcctgctcgattcggtcgccgacctgcgccggagcctccgcgcccgcggtggggacctggtggtgcgcgtgggtatgcccgaagtggtcattcccgagctcgcgcgggcggcgggcgcggaggccgtgtacgctcacggggaggtatcgcgggacgaggtccgcgccgaggagagggtgcaaaaggctgtggagaaggagggtatcaacgtgaagtacttctggggtagcacgctataccacgtggaagaccttcccttccgcctcgaggacatgccgtccaactatggcggcttcagggaggccgtgaaggggttggaggtcagaaaggtgctggaggctcccgaggaggtcaagtgcgtgcccatgaagaatgtgctcgagcccggtgacatccccacgcttgctgagctcgggctcactgcgccaccagccatgtcacaggactcaaaacctgctgttggctctactctcattggtggtgagacagaagctctggagaggttgaagaagtttgctgcagaatgctctatgcagccaaacaaagtagacaaaagcaatacccaagatagcatatatggtgctaatttctcttgcaaaatttctccatggcttgctacaggttgcctctctccacggttcatgtatgaggagttgaagaagcatgctactaaagcaattccttttgggtcaacacccaagaataatgatggcacatctgatgctggaacaaattggttaatgtttgagttgctgtggagagatttcttcaggttcatcacaaagaagtacagctctgtacagaagacatctgaagttgccactggctgcactcccgccccagcgcttgcatgaacttacttagacaagctgattgccagctgcttttttggggtgataaacttatgtgcattttcaatggagtcttttttgccgccaataatgttggtagtcaaagtgaacgccgaatgcgcattcctgcgttttggtttggtcgatgtatttaatgctgtcgacatccctccaaatgactgttgaatgcaaatgatactgtgagcaacc

SEQ ID NO: 26309 - protein, 446 aa, Zea mays subsp. mays
  misc_feature (1)..(446): Ceres Seq. ID no. 13499382
MATASGTDAGAQPRDDPSLLPFASFSLGLSIRAPATPTLASVPSTLHLPTQISTLAVCLHPSAAQPSSRRTTRLNSATSSVIAPLPSSTPGLSRSFPSGAPAAAGRRRTLVWFRADLRLHDHEPFHAAAGASSSLLPVFVFDPRDFGKSPSGFDRTGPYRANFLLDSVADLRRSLRARGGDLVVRVGMPEVVIPELARAAGAEAVYAHGEVSRDEVRAEERVQKAVEKEGINVKYFWGSTLYHVEDLPFRLEDMPSNYGGFREAVKGLEVRKVLEAPEEVKCVPMKNVLEPGDIPTLAELGLTAPPAMSQDSKPAVGSTLIGGETEALERLKKFAAECSMQPNKVDKSNTQDSIYGANFSCKISPWLATGCLSPRFMYEELKKHATKAIPFGSTPKNNDGTSDAGTNWLMFELLWRDFFRFITKKYSSVQKTSEVATGCTPAPALA

SEQ ID NO: 26310 - protein, 259 aa, Zea mays subsp. mays
  misc_feature (1)..(259): Ceres Seq. ID no. 13499383
MPEVVIPELARAAGAEAVYAHGEVSRDEVRAEERVQKAVEKEGINVKYFWGSTLYHVEDLPFRLEDMPSNYGGFREAVKGLEVRKVLEAPEEVKCVPMKNVLEPGDIPTLAELGLTAPPAMSQDSKPAVGSTLIGGETEALERLKKFAAECSMQPNKVDKSNTQDSIYGANFSCKISPWLATGCLSPRFMYEELKKHATKAIPFGSTPKNNDGTSDAGTNWLMFELLWRDFFRFITKKYSSVQKTSEVATGCTPAPALA

SEQ ID NO: 26311 - protein, 256 aa, Zea mays subsp. mays
  misc_feature (1)..(256): Ceres Seq. ID no. 13499384
ARDHYLEHPNRKSPHPFIRPSHLPWPPPPALTPVPSRATTPASSPSRPSRSASPSARRPPPHSPPSPPPSTSPLKSLHSPSASTPPPRSPPPAAPPASIPPPPPSSPRCPPQRPASPAPSLRARPPQQGAAARSSGSAPTSASTTMSRFTPQRGRRPPSSPFSSSIRGTSASPPRGSTGRARTAPTSCSIRSPTCAGASAPAVGTWWCAWVCPKWSFPSSRGRRARRPCTLTGRYRGTRSAPRRGCKRLWRRRVST

SEQ ID NO: 26312 - DNA, 1355 bp, Zea mays subsp. mays
  misc_feature (1)..(1355): Ceres Seq. ID no. 13500460
aaaatcaggcagatcgcagtcgcagcaccgaagatggtgagcaggcgcactctcctcgtcatgatggcgacggtagtggttctgcatcggagtcggactctctgcgctgctgcctcggcggctgcagcgccgccggcgacgacgaagcaggcgcggaccccggccctgttcgtgttcggggactccatcgtggacccgggcaacaacaacgccctcaccaccacggtgcgctgcaacttcccgccctacggccaggacttccccggccacaacgccaccggcaggttcagcaacggcagggtgcccagcgacatcgtcgccagccggctgggcatcaaggagcacctgccggcgtacctcggcacggagctcagcgacttcgacctcctcaccggcgtcagcttcgcgtccggcggctgcggcttcgaccccctcaccgccgagctcgtgtccgtgctcaccatggacaaccagctggacctgttcaaggagtacaaggagaagctggagcgcgtcgccagcggcgcccaccgggccgccgacatcgtgtccaggagcctgtacatggtggtcacgggcaccgacgacctcgccaacacctacttcaccacgccgttccgccgcgactacgacctcgagtcctacatcgagttcgtcgtgcagtgcgcctccgacttcatcaagaagctgtacggtctgggcgcgcggcgcatcaacatcgccggcgcgccgcccatcgggtgcgtgccgtcgcagcggaccaacgccggcgggctggagcgggagtgcgtgccgctgtacaaccaggcggccgtcgtgttcaacgcggcgctggagaaggagatcaagcggctcaacggcagcgacgcgctcccggcctccgtgctccagtacatcgacctctacacgccgctgctcgacatgattcagcgccctgacgcctacggattcaacgtcacgaaccgggggtgctgcggcacgggggtgttcgaggtgacgctgacgtgcaaccggtacacggcggaaccctgcagggaccccagcaagttcctcttntgggacacctaccacctcacggagaggggctacgacctcctcatggcgcagatcataaaccgatacggggtctgagatggatgccatgacagcgcagcgctggagatctcggcgctatgacagcgcggtccatgctttcagaggcttttgctgaacttgatcttgtagctgaactacagctccagaaatcaccggtccaatatcatatcccagtttgtgatgggtacatgtcagcggggcacaattgcttgcttgtattgcataaatgaaaactgaatcaggacaggcagtgacagttg

SEQ ID NO: 26313 - protein, 376 aa, Zea mays subsp. mays
  misc_feature (1)..(376): Ceres Seq. ID no. 13500461
  misc_feature (352)..(352): Xaa is any aa, unknown or other
KIRQIAVAAPKMVSRRTLLVMMATVVVLHRSRTLCAAASAAAAPPATTKQARTPALFVFGDSIVDPGNNNALTTTVRCNFPPYGQDFPGHNATGRFSNGRVPSDIVASRLGIKEHLPAYLGTELSDFDLLTGVSFASGGCGFDPLTAELVSVLTMDNQLDLFKEYKEKLERVASGAHRAADIVSRSLYMVVTGTDDLANTYFTTPFRRDYDLESYIEFVVQCASDFIKKLYGLGARRINIAGAPPIGCVPSQRTNAGGLERECVPLYNQAAVVFNAALEKEIKRLNGSDALPASVLQYIDLYTPLLDMIQRPDAYGFNVTNRGCCGTGVFEVTLTCNRYTAEPCRDPSKFLXWDTYHLTERGYDLLMAQIINRYGV

SEQ ID NO: 26314 - protein, 365 aa, Zea mays subsp. mays
  misc_feature (1)..(365): Ceres Seq. ID no. 13500462
  misc_feature (341)..(341): Xaa is any aa, unknown or other
MVSRRTLLVMMATVVVLHRSRTLCAAASAAAAPPATTKQARTPALFVFGDSIVDPGNNNALTTTVRCNFPPYGQDFPGHNATGRFSNGRVPSDIVASRLGIKEHLPAYLGTELSDFDLLTGVSFASGGCGFDPLTAELVSVLTMDNQLDLFKEYKEKLERVASGAHRAADIVSRSLYMVVTGTDDLANTYFTTPFRRDYDLESYIEFVVQCASDFIKKLYGLGARRINIAGAPPIGCVPSQRTNAGGLERECVPLYNQAAVVFNAALEKEIKRLNGSDALPASVLQYIDLYTPLLDMIQRPDAYGFNVTNRGCCGTGVFEVTLTCNRYTAEPCRDPSKFLXWDTYHLTERGYDLLMAQIINRYGV

SEQ ID NO: 26315 - protein, 356 aa, Zea mays subsp. mays
  misc_feature (1)..(356): Ceres Seq. ID no. 13500463
  misc_feature (332)..(332): Xaa is any aa, unknown or other
MMATVVVLHRSRTLCAAASAAAAPPATTKQARTPALFVFGDSIVDPGNNNALTTTVRCNFPPYGQDFPGHNATGRFSNGRVPSDIVASRLGIKEHLPAYLGTELSDFDLLTGVSFASGGCGFDPLTAELVSVLTMDNQLDLFKEYKEKLERVASGAHRAADIVSRSLYMVVTGTDDLANTYFTTPFRRDYDLESYIEFVVQCASDFIKKLYGLGARRINIAGAPPIGCVPSQRTNAGGLERECVPLYNQAAVVFNAALEKEIKRLNGSDALPASVLQYIDLYTPLLDMIQRPDAYGFNVTNRGCCGTGVFEVTLTCNRYTAEPCRDPSKFLXWDTYHLTERGYDLLMAQIINRYGV

SEQ ID NO: 26316 - DNA, 742 bp, Zea mays subsp. mays
  misc_feature (1)..(742): Ceres Seq. ID no. 13500480
taatcgaaaaactatatacgtatatagacgtggtcaggatgacgtcgtcctccgtcttcttcctcctgctcgcttgcttcgccacatgcgccggcgccgccacgttcacggtacgaaacaactgcgggttcacggtgtggccagcaggcatcccggtcggcggcggcacgcagctgaacccgggctcgacgtggactgtcaacgtgcaggccgggaccagcggaggcaggatctggggccgcaccggctgctccttcagcggcggccggggccgctgcgcgacgggcgactgcggaggcgcctactcctgcagcctgtccgggcagcccccggcgacgctggcggagttcaccatcggcggcggcggcaaccacgactactacgatatctcggtgatcgacggctacaacctgcccatggacttctcgtgcagcactggcgccgccctgcggtgcagggactccggctgccccgacgcgtaccaccagcccaatgaccctaagacccgttcgtgcaacggcaatagcaactaccaggtcgtcttctgcccctgatgaacatgcatgcagcttgccatgagcccatgcatgcatgagagcgtattaattgttcgtcaactcacatgcacgtacctactagtgaagttgataaataagacgatcgatatctgactcgtccaatgcagcatgtgtgtatggtgtgatccttatactttcctacatatatggaactttttaaaggg

SEQ ID NO: 26317 - protein, 183 aa, Zea mays subsp. mays
  misc_feature (1)..(183): Ceres Seq. ID no. 13500481
IEKLYTYIDVVRMTSSSVFFLLLACFATCAGAATFTVRNNCGFTVWPAGIPVGGGTQLNPGSTWTVNVQAGTSGGRIWGRTGCSFSGGRGRCATGDCGGAYSCSLSGQPPATLAEFTIGGGGNHDYYDISVIDGYNLPMDFSCSTGAALRCRDSGCPDAYHQPNDPKTRSCNGNSNYQVVFCP

SEQ ID NO: 26318 - protein, 171 aa, Zea mays subsp. mays
  misc_feature (1)..(171): Ceres Seq. ID no. 13500482
MTSSSVFFLLLACFATCAGAATFTVRNNCGFTVWPAGIPVGGGTQLNPGSTWTVNVQAGTSGGRIWGRTGCSFSGGRGRCATGDCGGAYSCSLSGQPPATLAEFTIGGGGNHDYYDISVIDGYNLPMDFSCSTGAALRCRDSGCPDAYHQPNDPKTRSCNGNSNYQVVFCP

SEQ ID NO: 26319 - protein, 164 aa, Zea mays subsp. mays
  misc_feature (1)..(164): Ceres Seq. ID no. 13500483
NRKTIYVYRRGQDDVVLRLLPPARLLRHMRRRRHVHGTKQLRVHGVASRHPGRRRHAAEPGLDVDCQRAGRDQRRQDLGPHRLLLQRRPGPLRDGRLRRRLLLQPVRAAPGDAGGVHHRRRRQPRLLRYLGDRRLQPAHGLLVQHWRRPAVQGLRLPRRVPPAQ

SEQ ID NO: 26320 - DNA, 1272 bp, Zea mays subsp. mays
  misc_feature (1)..(1272): Ceres Seq. ID no. 13500491
atccatcagtgtggactgtcgaaccgggggatgggttgggacgttgggtcctggtccacgtgaccacgtctagcagtagcaggctctcgaaactcacgttcccgtgtcgctcaactggcacaggactggaccccgtcccgtacggcatcgcaccccgcagccgcaggccgcatcttcctcgcgtgctctgccctctgtgcctgcccattcgttgatcccatcggcttccccttcctcttccccgatccccttcctcccccgatcccatccaattccacttccacaccccgggcctcgccgccgacgccgacgccgacgccgccggccatgtccaagtacggcaccattcccacctcctcctccgcgggcggagggcccgtgcccctcggcggcgcctccccgctcgatttcatctcccgcgccaaggctcggggcgcctcggcgctggcgacgcgccggccctggcgcgagctcgtggacgtccacgccgtcggcctgcccccgagcctcggcgacgcgtacctccgcgtgcgcgccaacctcgcccacttcgccatgaactacgccatcgtcgtcctcgtcgtcgtcttcctctccctcctctggcaccccgtctccctcatcgtcttcctcgtctgcatgctcgcctggctcgtcctctacttcctccgcgacgagcccctcgtcctcttcggccgcgtcgtcgccgacggctacgtccttgccgtgctcgccgtcgtcacgctcgtcctgctgctcctcaccgacgccactgccaacatcctctcctcgctgctcatcggcctcgtcctcgtcctcgtccacgccgcgctgcacaaggcggaggacaacgccgccgacgaggccgaccgctggtacgcgccggtgtcacagcagccgtcgcactgaggatctgaatgtggccattcggcgccttggctgtgatcctattctgtactgtttccgagttcctccagctgcgcaagctgggccatccccatctcatctgcgatgaaaaccctgtccttgttgattgtgattcacttgctgccggttccatgggaagttttggatccagcgatgacgcagggctgttaaacttgttctccacgcccagcccatttctgtgatacgtttaaagcgtctcgttcacgtgtatcaaatccggactgaagtctagtgtacattttgagttggagaaatgtgatgccagggacctgcattcagattttatcgacgccatgcatgtaggcaagcgatgctgatatttct

SEQ ID NO: 26321 - protein, 193 aa, Zea mays subsp. mays; identical to SEQ ID NO: 19168
  misc_feature (1)..(193): Ceres Seq. ID no. 13500492

SEQ ID NO: 26322 - protein, 117 aa, Zea mays subsp. mays
  misc_feature (1)..(117): Ceres Seq. ID no. 13500493
MNYAIVVLVVVFLSLLWHPVSLIVFLVCMLAWLVLYFLRDEPLVLFGRVVADGYVLAVLAVVTLVLLLLTDATANILSSLLIGLVLVLVHAALHKAEDNAADEADRWYAPVSQQPSH

SEQ ID NO: 26323 - DNA, 824 bp, Zea mays subsp. mays
  misc_feature (1)..(824): Ceres Seq. ID no. 13500581
actgttgttctgttccgtgattgcggaatttgcttcaccacaccttcatcagagagccgagacgacacgctcgggacccagcaaggcaagaagaacacgagagagatagcaggcaccaggcagggatcaatcatccgtccatggagaacctaaaggagcggggacacgacgcggcgggcgccaacgcctggatgacggtgccggcgttcggggactgggacacgaagaacggcgcgctgccggactactccatggacttctccaagatccgcgagatgcgcaagcagaacaagaaggagctctcccgcgccagcctcggcggcgacgacgacctcctcgcccacgcccaggcccaggccctgaagccgcaggccagtaacgccccgcccaagctcggccgcccccgccccggccccgccgacgaccactccccaacgggagggaagaagttcctgagctacttccggtgttgtatcaaggcctgaagaggtgctgctctagtgcctgcagtccctgtgtttttttttcgcagcagaacacttgtgagcaatcaggcatcggttttgttaagtactccctccgtttctttttatttgtcgctagatagtgtaaaattgcactattcagcgacaaataaaaagaaacggagggagtactccgtgtccaaaaacgtgtaatatatttgtccttatggatcagtcgttgggcctgtatgaagaacagaccagcttatggggtaagcaacgttctttttgtacacacaaatcaccatcgatttgtccttgatacgatcaaggggcatggttcgaatgaattggttttgt

SEQ ID NO: 26324 - protein, 114 aa, Zea mays subsp. mays
  misc_feature (1)..(114): Ceres Seq. ID no. 13500582
MENLKERGHDAAGANAWMTVPAFGDWDTKNGALPDYSMDFSKIREMRKQNKKELSRASLGGDDDLLAHAQAQALKPQASNAPPKLGRPRPGPADDHSPTGGKKFLSYFRCCIKA

SEQ ID NO: 26325 - protein, 97 aa, Zea mays subsp. mays; identical to SEQ ID NO: 2063
  misc_feature (1)..(97): Ceres Seq. ID no. 13500583

SEQ ID NO: 26326 - protein, 77 aa, Zea mays subsp. mays; identical to SEQ ID NO: 2064
  misc_feature (1)..(77): Ceres Seq. ID no. 13500584

SEQ ID NO: 26327 - DNA, 1227 bp, Zea mays subsp. mays
  misc_feature (1)..(1227): Ceres Seq. ID no. 13501189
aacatcaaagaagaaccggaagaaggagaaagaagtggcagagagtgttcctgtaaagcctaaaaaggaaaataggcttttggttctgccttttgaattatctgttatgggtattttattgctcatcgtattaggtggtttctatgtggtccattgtgtatgggcggcagctgaagcgtactccgcgccttcaattgtgttgacatctcgttcacgagatgggttgcatgtttttgatgatttccgtgaagcttacgcatggctgagccataacacagatgttgatgacaaggttgcttcctggtgggactatggttaccaaacaactgcaatggccaacagaactgtgattgtagacaataacacctggaacaacactcatatagcaacagttggtacagcaatgtcgtccccagaaaaagcagcttgggaaatcttcaattctttagatgtcaaatatgtgcttgttgtctttggaggacttgttggataccctagcgatgatatcaataagttcctttggatggtacgaataggaggtggtgtgttccctcacattaaggagccagattatcttgcaatgttatctgcagagggatggtcaatatcgcgttgatgctcaagccactccaactatgctgaattgcctcatgtacaagctttgttactacaggtttgtggagactgatggaaaaggctttgacagagtaagaggatatgaaataggaaagaagcatttcaagctaacacattttgaggaggtatttacaacccaccattggatggtccgcatatataaactgaaaccccagaagaacagggttcgaggcaagctgaagaagttgaaggccagtgccaaaaactagtcccacacttgcggcagggcgaaagaacccgtggcaataggtgaagttaccaatagtgccatttacctgatactttgttggtagatcaagtgcgctaggttggtgaaccagaaaactacagaactagattagagatctggactattgtattggaccctcgttatatgttctcccaaccggccgggtgctgatgaaatttttgatagaccagaggagtttatcaatcccatgggtttgagattggatggcggcgataattttctagtgacaggggttgtttaagactacctgttacttgctgttttgtgtaacctacaatttttcttacaaggtacttctctactggggtgatagtgagtgc

SEQ ID NO: 26328 - protein, 204 aa, Zea mays subsp. mays
  misc_feature (1)..(204): Ceres Seq. ID no. 13501190
TSKKNRKKEKEVAESVPVKPKKENRLLVLPFELSVMGILLLIVLGGFYVVHCVWAAAEAYSAPSIVLTSRSRDGLHVFDDFREAYAWLSHNTDVDDKVASWWDYGYQTTAMANRTVIVDNNTWNNTHIATVGTAMSSPEKAAWEIFNSLDVKYVLVVFGGLVGYPSDDINKFLWMVRIGGGVFPHIKEPDYLAMLSAEGWSISR

SEQ ID NO: 26329 - protein, 169 aa, Zea mays subsp. mays
  misc_feature (1)..(169): Ceres Seq. ID no. 13501191
MGILLLIVLGGFYVVHCVWAAAEAYSAPSIVLTSRSRDGLHVFDDFREAYAWLSHNTDVDDKVASWWDYGYQTTAMANRTVIVDNNTWNNTHIATVGTAMSSPEKAAWEIFNSLDVKYVLVVFGGLVGYPSDDINKFLWMVRIGGGVFPHIKEPDYLAMLSAEGWSISR

SEQ ID NO: 26330 - DNA, 1016 bp, Zea mays subsp. mays
  misc_feature (1)..(1016): Ceres Seq. ID no. 13501199
cataggttgctaggctcggccgtgtagagcagcaagagcacgccgcgccaagcaacaaagagggaccccgcttccatggaggtggtgggcggcgtgtcgctgaggccgtcgccagcgccggcgcgtatccggactaccctgccacccgtcgacgtaggcggacgcttccttctccgccgggtcgcggggcgccagccggcgaggcgcgcgctggtcgtggaggcccggggcggcaggggctggtcggagcggcagatgcagcagcagcgccgcgcgccgctgctgccgaaaatcgaggacgacggcaacccgcgattcgtcatcttcatccgcaccgccaatgtctacttctggtacccgctcaacatcatcacgggcggtacgacggcgaagatcatgctcgccgccaaggacaacttcctcggcaagtacatctacaaggacacgctcgccaggaacctcgccgccgtcatttacaaagacgaggacgtgatcatagacacagcgaaagagcagtaccgtgtgctcaagaccgaaaatcagtttcggtatggctacaaagttgtggagaaagggaacataaggtctgctctgacgacaagcaatgtgatcgaacttccaaagaaggacgagctcaaaaccgtggttgacaaggtgaaggacttctttggcgacgtgactgccggcgccaaagaatcctttgcgcagataacagggtctgctgtcagcaaggaggaagaggaagcagagagcaaagagaagttccgctccaagagacgaaagaagcagcggaagtcgaaggagggcctcaagacggagaaatgattcagtcagtcacacaagtaaagcaccggctgtagtttcgctatcgatgtccgagaactgttctgtaatttctccagcttccttttttttgtttgttttgtaaaaagacgtcgtgtaacttcattgcgactaacgtgtgctatgccttctcagtaaatctcacaaaatgtgaaggtactccctacgttctc

SEQ ID NO: 26331 - protein, 249 aa, Zea mays subsp. mays
  misc_feature (1)..(249): Ceres Seq. ID no. 13501200
MEVVGGVSLRPSPAPARIRTTLPPVDVGGRFLLRRVAGRQPARRALVVEARGGRGWSERQMQQQRRAPLLPKIEDDGNPRFVIFIRTANVYFWYPLNIITGGTTAKIMLAAKDNFLGKYIYKDTLARNLAAVIYKDEDVIIDTAKEQYRVLKTENQFRYGYKVVEKGNIRSALTTSNVIELPKKDELKTVVDKVKDFFGDVTAGAKESFAQITGSAVSKEEEEAESKEKFRSKRRKKQRKSKEGLKTEK

SEQ ID NO: 26332 - protein, 189 aa, Zea mays subsp. mays
  misc_feature (1)..(189): Ceres Seq. ID no. 13501201
MQQQRRAPLLPKIEDDGNPRFVIFIRTANVYFWYPLNIITGGTTAKIMLAAKDNFLGKYIYKDTLARNLAAVIYKDEDVIIDTAKEQYRVLKTENQFRYGYKVVEKGNIRSALTTSNVIELPKKDELKTVVDKVKDFFGDVTAGAKESFAQITGSAVSKEEEEAESKEKFRSKRRKKQRKSKEGLKTEK

SEQ ID NO: 26333 - protein, 142 aa, Zea mays subsp. mays
  misc_feature (1)..(142): Ceres Seq. ID no. 13501202
MLAAKDNFLGKYIYKDTLARNLAAVIYKDEDVIIDTAKEQYRVLKTENQFRYGYKVVEKGNIRSALTTSNVIELPKKDELKTVVDKVKDFFGDVTAGAKESFAQITGSAVSKEEEEAESKEKFRSKRRKKQRKSKEGLKTEK

SEQ ID NO: 26334 - DNA, 1400 bp, Zea mays subsp. mays
  misc_feature (1)..(1400): Ceres Seq. ID no. 13501217
gcacgagaccattacctagaacatcctaatcgaaaagaaagactattcccctcaaccctccaaaagaagagaggactgttgaaacttggatgccatggcatacgtccacacgccaccgtaccagtcgagatcaagacggcaataatagacaagaacaaggtgcgtggcagtgcactcgacgatattaatggagctgctttgcacgggcggcagacagccgtagacagagcagtgacggtcgtcgtacacagatcacgatgctgctcccacactcttcgtcagcctctgcaactgctaccactcgtgggctagcactagcagcagcagcagcagcaccgccgcgtccgaccgctcgcccccggcgcgcgcgcctcctgcctccacgcgcgcgggccgagacgcatgcgacgggcgttggcgccgaccgcgcggccgaggcgcttctccaaagcgggctgcgccgtgagtcgctgccgcggcacgtcgcggtggtgatggacgggaactcgcggtgggcgcgcgagcgggggctgacgcccgcggacggccacaaggccggcggccgcaacctggagcgggtcgttgcgctgtcgcgcgcctggggcatccgcgcgctcaccgccttcgtctgctcccgcgagaacttgnnccgccccaaggccgaggtcgactacatgatgggcttgtccgagtggntgataggcgacaacatcgacaagctctcgaggcaggggatccggctgcaggtgatcggcgacgccgcgaagatgccagcctctctgcggagcgcagcggcgcaggccgacgaggccacgaggcacaactcgcagctgcacgtgatgctggccatctgctacagcgggcgatgggacatggtccaggcgtgccgggagctggcccgggaggcgcaggcgaaccggctcagtccggacgacatcgacgagtcggtcatcgccggcaagctcgcgacgagcgccgccggcgagttctcctgtcccgacctggtcatcagaaccagcggcgagatgaggctcagcaacttcttgctgtggcagtcggcgtactcggagttgttcttcaccggcaagatgtggcctgactttggggaggctgagtacctggaagcgttgcgctccttccagggcagagaccgccgcttcggccaatcaaaattactctaacagtctaactcgatggagccacgaagtggagcgccagtatatgtgaagagttatggattgttcggttagctttcattccatttagattaaataagattgaatgaatttaaatcttaagtaagttaaactttttttaaaatttttttaatcccatcaaataaatgagtaacaggattaatggaacaaagtcttaattggaatttgtcctgttttttaaac

SEQ ID NO: 26335 - protein, 307 aa, Zea mays subsp. mays
  misc_feature (1)..(307): Ceres Seq. ID no. 13501218
  misc_feature (131)..(131): Xaa is any aa, unknown or other
  misc_feature (147)..(147): Xaa is any aa, unknown or other
MLLPHSSSASATATTRGLALAAAAAAPPRPTARPRRARLLPPRARAETHATGVGADRAAEALLQSGLRRESLPRHVAVVMDGNSRWARERGLTPADGHKAGGRNLERVVALSRAWGIRALTAFVCSRENLXRPKAEVDYMMGLSEWXIGDNIDKLSRQGIRLQVIGDAAKMPASLRSAAAQADEATRHNSQLHVMLAICYSGRWDMVQACRELAREAQANRLSPDDIDESVIAGKLATSAAGEFSCPDLVIRTSGEMRLSNFLLWQSAYSELFFTGKMWPDFGEAEYLEALRSFQGRDRRFGQSKLL

SEQ ID NO: 26336 - protein, 228 aa, Zea mays subsp. mays
  misc_feature (1)..(228): Ceres Seq. ID no. 13501219
  misc_feature (52)..(52): Xaa is any aa, unknown or other
  misc_feature (68)..(68): Xaa is any aa, unknown or other
MDGNSRWARERGLTPADGHKAGGRNLERVVALSRAWGIRALTAFVCSRENLXRPKAEVDYMMGLSEWXIGDNIDKLSRQGIRLQVIGDAAKMPASLRSAAAQADEATRHNSQLHVMLAICYSGRWDMVQACRELAREAQANRLSPDDIDESVIAGKLATSAAGEFSCPDLVIRTSGEMRLSNFLLWQSAYSELFFTGKMWPDFGEAEYLEALRSFQGRDRRFGQSKLL

SEQ ID NO: 26337 - protein, 168 aa, Zea mays subsp. mays
  misc_feature (1)..(168): Ceres Seq. ID no. 13501220
  misc_feature (8)..(8): Xaa is any aa, unknown or other
MMGLSEWXIGDNIDKLSRQGIRLQVIGDAAKMPASLRSAAAQADEATRHNSQLHVMLAICYSGRWDMVQACRELAREAQANRLSPDDIDESVIAGKLATSAAGEFSCPDLVIRTSGEMRLSNFLLWQSAYSELFFTGKMWPDFGEAEYLEALRSFQGRDRRFGQSKLL

SEQ ID NO: 26338 - DNA, 787 bp, Zea mays subsp. mays
  misc_feature (1)..(787): Ceres Seq. ID no. 13501243
ccattacctagaacatcctaatcgaaaaaaccagatagcaccagcagtctgcgcgcactccgcagtcggtcgtggagctctcgagcaaaagcgcgcgacatcgtcggagctagctacgcgtgcgcgctccggccggcggatcggatcgggtcggatggcgtcgtcgaaggcgctcctcctgttggctgccgccgccgtcgctgcggcgtgcctggtcggcgccgcggacgccaagttcggccggntgggccggctcgtcatcaccggcgtcgtgccctgcaacaccggcagcctcatcgacatcgccagctcccccgccttcccgaacgcggacgtggagctgccgtgcgcgggcagggtggtggcgggcgcgacgaccaacaccaacggcaccttctccatggagctggacatgaccaacgcgctggccgcgttcatcggcggctgcacgctggtggtggacacgccgctcgtcaagtgcaacgccgacctcaccgacgtcggcagcctcgtctcctacctgcagggcccgctcacgcgcctgctcggcggcatcttccacctcttccccgccggcttctccttccacgcccgacgagcctgacgtcgtatctagctagagctttgtacgtacgtactactggacaacacaatcaaactttaaacatgctgctgagagctatatatatatatatagctacaactacaaatgtaaaatgtttctagacatgtgtaatgctacgtacaaactgaaacgaagttgaaccaaaataaacagttgggaggc

SEQ ID NO: 26339 - protein, 200 aa, Zea mays subsp. mays
  misc_feature (1)..(200): Ceres Seq. ID no. 13501244
  misc_feature (82)..(82): Xaa is any aa, unknown or other
HYLEHPNRKNQIAPAVCAHSAVGRGALEQKRATSSELATRARSGRRIGSGRMASSKALLLLAAAAVAAACLVGAADAKFGRXGRLVITGVVPCNTGSLIDIASSPAFPNADVELPCAGRVVAGATTNTNGTFSMELDMTNALAAFIGGCTLVVDTPLVKCNADLTDVGSLVSYLQGPLTRLLGGIFHLFPAGFSFHARRA

SEQ ID NO: 26340 - protein, 149 aa, Zea mays subsp. mays
  misc_feature (1)..(149): Ceres Seq. ID no. 13501245
  misc_feature (31)..(31): Xaa is any aa, unknown or other
MASSKALLLLAAAAVAAACLVGAADAKFGRXGRLVITGVVPCNTGSLIDIASSPAFPNADVELPCAGRVVAGATTNTNGTFSMELDMTNALAAFIGGCTLVVDTPLVKCNADLTDVGSLVSYLQGPLTRLLGGIFHLFPAGFSFHARRA

SEQ ID NO: 26341 - DNA, 651 bp, Zea mays subsp. mays
  misc_feature (1)..(651): Ceres Seq. ID no. 13501289
tgccaagtcccaacatcttgagctcgatcgcaaaccctcagacacttcttcccccagccgacgtacatgaagcacccgagagacgccggcgccatgccgctctccctcgcgctgtccctcggcgccggcgtggcccccgggcacggcagcagcaagcggccccggcgcgcggcgggcggcggggacggcgagttggtctgcaagacgtgcagccgcgccttcgtctcgttccaggcgctgggcgggcaccggacaagccacctgagggccggccggcacggccttgcgctcgggatgcccgcgccggcgccggcgaangaggcgccgccgcccgcgacgacccacctgtgccacgtctgcgggctcggcttccagatgggccangcgctaggcggccacatgcggcgccaccgcgaggaggctgccgccaccaccgcgcaggcgccgcccgtcctcctccagctcttcgtgtagagttttgcccgtccacggagtctagctagtagaggaattcttcgcgttcctgtcgtcactcgtgagtctgctgcgcatcgtagattcacagtacagttgttggcgtcaattcattcattcattcatttagttgtatacatgtaaataactgattagttattttattgttcctaatct

SEQ ID NO: 26342 - protein, 166 aa, Zea mays subsp. mays
  misc_feature (1)..(166): Ceres Seq. ID no. 13501290
  misc_feature (106)..(106): Xaa is any aa, unknown or other
  misc_feature (128)..(128): Xaa is any aa, unknown or other
PSPNILSSIANPQTLLPPADVHEAPERRRRHAALPRAVPRRRRGPRARQQQAAPARGGRRGRRVGLQDVQPRLRLVPGAGRAPDKPPEGRPARPCARDARAGAGEXGAAARDDPPVPRLRARLPDGPXARRPHAAPPRGGCRHHRAGAARPPPALRVEFCPSTESS

SEQ ID NO: 26343 - protein, 135 aa, Zea mays subsp. mays
  misc_feature (1)..(135): Ceres Seq. ID no. 13501291
  misc_feature (84)..(84): Xaa is any aa, unknown or other
  misc_feature (106)..(106): Xaa is any aa, unknown or other
MKHPRDAGAMPLSLALSLGAGVAPGHGSSKRPRRAAGGGDGELVCKTCSRAFVSFQALGGHRTSHLRAGRHGLALGMPAPAPAXEAPPPATTHLCHVCGLGFQMGXALGGHMRRHREEAAATTAQAPPVLLQLFV

SEQ ID NO: 26344 - protein, 126 aa, Zea mays subsp. mays
  misc_feature (1)..(126): Ceres Seq. ID no. 13501292
  misc_feature (75)..(75): Xaa is any aa, unknown or other
  misc_feature (97)..(97): Xaa is any aa, unknown or other
MPLSLALSLGAGVAPGHGSSKRPRRAAGGGDGELVCKTCSRAFVSFQALGGHRTSHLRAGRHGLALGMPAPAPAXEAPPPATTHLCHVCGLGFQMGXALGGHMRRHREEAAATTAQAPPVLLQLFV

SEQ ID NO: 26345 - DNA, 713 bp, Zea mays subsp. mays
  misc_feature (1)..(713): Ceres Seq. ID no. 13502425
aaaaaaagaagagagctactacagcaatggccggaggagatgacctgaagctgctgggcctgtgggcgagcccgtacgtgctgcgggtgaagctcgcgctcagcctcaagggcctgagctacgagaacgtggaggaggatctgagggacaagagcgagctcctgctcaagtccaaccccgtgcaccagaaggtccccgtgctgatccacggcggcaagcccatctgcgagtcgcaggtcatcctgcagtacatcgacgaggccttcgccggcaccggcccgtccctcctccccgccgacccctacgagcgcgccgtcgctcgcttctgggccgcctacatcgacgacaagatgctgcccgcctggaaccagtcgacgatgggcaagacggaggaggagagggccgaggggaagaagcagtcggtcgtgacggtggagacgctggagggcgcgctgagggactgcggcggccaagggaagcccttcttcggtggggacagcgtcgggtacgtcgacgtcgtgctcggcggcctgctcgggtgggtgcgcgcgtcggaggagctgcacggcgtcaggcccttcgaccccgagcggactccgctgctggcggcgtggtcggagcgcttcggcgcgctggatgccgtccagacggtgatgcccgacgtcggcaggctgctcgagttcggcaaggcgttgatggcacgtctggcggct

SEQ ID NO: 26346 - protein, 237 aa, Zea mays subsp. mays
  misc_feature (1)..(237): Ceres Seq. ID no. 13502426
KKKRATTAMAGGDDLKLLGLWASPYVLRVKLALSLKGLSYENVEEDLRDKSELLLKSNPVHQKVPVLIHGGKPICESQVILQYIDEAFAGTGPSLLPADPYERAVARFWAAYIDDKMLPAWNQSTMGKTEEERAEGKKQSVVTVETLEGALRDCGGQGKPFFGGDSVGYVDVVLGGLLGWVRASEELHGVRPFDPERTPLLAAWSERFGALDAVQTVMPDVGRLLEFGKALMARLAA

SEQ ID NO: 26347 - protein, 229 aa, Zea mays subsp. mays
  misc_feature (1)..(229): Ceres Seq. ID no. 13502427
MAGGDDLKLLGLWASPYVLRVKLALSLKGLSYENVEEDLRDKSELLLKSNPVHQKVPVLIHGGKPICESQVILQYIDEAFAGTGPSLLPADPYERAVARFWAAYIDDKMLPAWNQSTMGKTEEERAEGKKQSVVTVETLEGALRDCGGQGKPFFGGDSVGYVDVVLGGLLGWVRASEELHGVRPFDPERTPLLAAWSERFGALDAVQTVMPDVGRLLEFGKALMARLAA

SEQ ID NO: 26348 - protein, 121 aa, Zea mays subsp. mays
  misc_feature (1)..(121): Ceres Seq. ID no. 13502428
MLPAWNQSTMGKTEEERAEGKKQSVVTVETLEGALRDCGGQGKPFFGGDSVGYVDVVLGGLLGWVRASEELHGVRPFDPERTPLLAAWSERFGALDAVQTVMPDVGRLLEFGKALMARLAA

SEQ ID NO: 26349 - DNA, 1444 bp, Zea mays subsp. mays
  misc_feature (1)..(1444): Ceres Seq. ID no. 13502459
gcacgagaccattacctagaacatcctaatcgaaaagtcatcaatcaaatactcagacaaccatggggcaccagcaggcgcagcacggcaaggacgacaccgaggagctgcttgcagcccaccggcagctgtggtgccatgccctgggctacgtcaagtccatggcgctcaagtgcgccctggacctgcgcatccccgacaccatcgaccgctgcggcgggagcgccaccctgggcgagctgctcgccgccagcgagatcccggcgtccaaccacgactacctccggcgggtcatgcgcacgctgacagccatgcgcatcttcgcggccagccacgaccccgccaaggccgacgacgcggccgccatctcctaccagctgaccccggcgtcccggctgctcgtcagcagcagcagcagcgtcgacgacgccgccggcgcctcgaaggagaacactactaccccgagcatcctccccaacatcgcccacctggtccgccccaacaccatctccctgctgttcagcatgggcgagtggatgaaggacgagagcgcggcgtccgtgtcgctgtacgagacggtgcaccggcaggggatgtgggcgtgcgtggaggacgacgcggccaacagggccagcttctacgagagcatggacgccgacacccggctcgtgatgcaggccgtggtccgccggtgcccgcacgtgttcgacggcgtcaagtcgctcgtcgacgtcggcggcggccgcggcaccgccgccgccgccgtcgtcgccgccttcccgcacatccagaggtgcaccgtcatggacctcccccacgtcgtcgccgaggctcccgccggcaccgccggcctgtccttccacggcggcgacatgttcgagcacatcccgtcggctgacgcactcatgctcaagtggatcctgcacgactgggatgaggacaagtgcatcaagataatggagcgctgcaaggaagcgatcggtggcaaggaagcaggggggaaggtgattataatagacacggtgctcggatctcgggcagacgacgacgacgacgacaagacgtgcagggagacgtatgtgttggatctccacatactgagcttcgtgaacggggcggagcgggaggagcaggagtggaggaggatcttcctggcggctgggttccgtgactacaagatcacgcacacccgaggcatcccgtccatcatcgaggtcttcccgtgatgatgatggatcgagagtcgatcatatatgcatgtttgtacgtgtttgtgtcataataaatcgatcgatcatgttgtttaccctttttatttcggtatgtagttgcatctgcgggcgggctaaaataaatcacggcaggctgggcttcatcaagcccatgtatccatctgtgtgtaataatgcaatggaaaacgaaccaaaaagaatgcttccattcc

SEQ ID NO: 26350 - protein, 387 aa, Zea mays subsp. mays
  misc_feature (1)..(387): Ceres Seq. ID no. 13502460
MGHQQAQHGKDDTEELLAAHRQLWCHALGYVKSMALKCALDLRIPDTIDRCGGSATLGELLAASEIPASNHDYLRRVMRTLTAMRIFAASHDPAKADDAAAISYQLTPASRLLVSSSSSVDDAAGASKENTTTPSILPNIAHLVRPNTISLLFSMGEWMKDESAASVSLYETVHRQGMWACVEDDAANRASFYESMDADTRLVMQAVVRRCPHVFDGVKSLVDVGGGRGTAAAAVVAAFPHIQRCTVMDLPHVVAEAPAGTAGLSFHGGDMFEHIPSADALMLKWILHDWDEDKCIKIMERCKEAIGGKEAGGKVIIIDTVLGSRADDDDDDKTCRETYVLDLHILSFVNGAEREEQEWRRIFLAAGFRDYKITHTRGIPSIIEVFP

SEQ ID NO: 26351 - protein, 354 aa, Zea mays subsp. mays
  misc_feature (1)..(354): Ceres Seq. ID no. 13502461
MALKCALDLRIPDTIDRCGGSATLGELLAASEIPASNHDYLRRVMRTLTAMRIFAASHDPAKADDAAAISYQLTPASRLLVSSSSSVDDAAGASKENTTTPSILPNIAHLVRPNTISLLFSMGEWMKDESAASVSLYETVHRQGMWACVEDDAANRASFYESMDADTRLVMQAVVRRCPHVFDGVKSLVDVGGGRGTAAAAVVAAFPHIQRCTVMDLPHVVAEAPAGTAGLSFHGGDMFEHIPSADALMLKWILHDWDEDKCIKIMERCKEAIGGKEAGGKVIIIDTVLGSRADDDDDDKTCRETYVLDLHILSFVNGAEREEQEWRRIFLAAGFRDYKITHTRGIPSIIEVFP

SEQ ID NO: 26352 - protein, 310 aa, Zea mays subsp. mays
  misc_feature (1)..(310): Ceres Seq. ID no. 13502462
MRTLTAMRIFAASHDPAKADDAAAISYQLTPASRLLVSSSSSVDDAAGASKENTTTPSILPNIAHLVRPNTISLLFSMGEWMKDESAASVSLYETVHRQGMWACVEDDAANRASFYESMDADTRLVMQAVVRRCPHVFDGVKSLVDVGGGRGTAAAAVVAAFPHIQRCTVMDLPHVVAEAPAGTAGLSFHGGDMFEHIPSADALMLKWILHDWDEDKCIKIMERCKEAIGGKEAGGKVIIIDTVLGSRADDDDDDKTCRETYVLDLHILSFVNGAEREEQEWRRIFLAAGFRDYKITHTRGIPSIIEVFP

SEQ ID NO: 26353 - DNA, 924 bp, Zea mays subsp. mays
  misc_feature (1)..(924): Ceres Seq. ID no. 13502490
tcccagctccgcctccctttcctaccttcttccctccgtctcccagctcgcgcaggcaggcgacacagcgacgctaaaaaccctagagcgaggaggcgtgccaggccagcggtttgcgatgacggcaccggcggacaaggggaagaaggccaagaccgatgccgacggcggcgaggagaacgagcaaatcgacggcgcccttgtcttctccatcgagaagctccaggagattcaggacgagctcgagaaggttaatgaggaagcaagtgacaaggttatggaggtggagcagaaatacagtgagattcgcagacctgtctatctcaagaggggtgacattatcaagaccatcccggacttttggctcacagcgtttttgagccatcctctactaagtgagcttctgactgaagaggatcagaagatattcaagtacttggactccattgatgtcgatgattctgatgttaaggcaggatattccatttaccttaacttctctgagaacccgtactttgaagacacaaagcttacaaagacctattcctttgttgatgatggaacaaccacaataaaagcttctcaaattaagtggaaggatggaatgggacctgcaaatggaaatggtattaacaagaagggaaacaagcggccattagtagtggaaagttttttctcctggtttagtgatacagagctcaagagtcttgctgatggtgtgcaagatgaggtggcggagatcatcaaggaagacttgtggcctaatcctttgaagtacttcaacaatgaggttgaagatgaatttgaaggagatgaagaagatgatgacgacgacgacgacgatgataatttggatggtgatgacaatgacgatgatggggaccaggagaactgagccctcgcgtttaggcggggaattatgtg

SEQ ID NO: 26354 - protein, 297 aa, Zea mays subsp. mays
  misc_feature (1)..(297): Ceres Seq. ID no. 13502491
PSSASLSYLLPSVSQLAQAGDTATLKTLERGGVPGQRFAMTAPADKGKKAKTDADGGEENEQIDGALVFSIEKLQEIQDELEKVNEEASDKVMEVEQKYSEIRRPVYLKRGDIIKTIPDFWLTAFLSHPLLSELLTEEDQKIFKYLDSIDVDDSDVKAGYSIYLNFSENPYFEDTKLTKTYSFVDDGTTTIKASQIKWKDGMGPANGNGINKKGNKRPLVVESFFSWFSDTELKSLADGVQDEVAEIIKEDLWPNPLKYFNNEVEDEFEGDEEDDDDDDDDDNLDGDDNDDDGDQEN

SEQ ID NO: 26355 - protein, 258 aa, Zea mays subsp. mays
  misc_feature (1)..(258): Ceres Seq. ID no. 13502492
MTAPADKGKKAKTDADGGEENEQIDGALVFSIEKLQEIQDELEKVNEEASDKVMEVEQKYSEIRRPVYLKRGDIIKTIPDFWLTAFLSHPLLSELLTEEDQKIFKYLDSIDVDDSDVKAGYSIYLNFSENPYFEDTKLTKTYSFVDDGTTTIKASQIKWKDGMGPANGNGINKKGNKRPLVVESFFSWFSDTELKSLADGVQDEVAEIIKEDLWPNPLKYFNNEVEDEFEGDEEDDDDDDDDDNLDGDDNDDDGDQEN

SEQ ID NO: 26356 - protein, 205 aa, Zea mays subsp. mays
  misc_feature (1)..(205): Ceres Seq. ID no. 13502493
MEVEQKYSEIRRPVYLKRGDIIKTIPDFWLTAFLSHPLLSELLTEEDQKIFKYLDSIDVDDSDVKAGYSIYLNFSENPYFEDTKLTKTYSFVDDGTTTIKASQIKWKDGMGPANGNGINKKGNKRPLVVESFFSWFSDTELKSLADGVQDEVAEIIKEDLWPNPLKYFNNEVEDEFEGDEEDDDDDDDDDNLDGDDNDDDGDQEN

SEQ ID NO: 26357 - DNA, 1345 bp, Zea mays subsp. mays
  misc_feature (1)..(1345): Ceres Seq. ID no. 13502498
ataccgcaaccagctattgagctactgcctctgaccaagtcccaagctgcgctgcgcctgctatgtcgtcgtcctcgcccgtatcggcggtctcatcagccactgcgccgcacgtcgtggacgactgcctcggcatcgtgcagcttcttagcgatggcaccgtgacgcgctccgcggactactccgacatccctctcctgggcgaggtgccgtccaacctgcccgtccagtggaaggacgtcgtctacgaccccgcgcacgcgctccgcctccgcatgtacaggcccaccgacaccgacggcggcaggacgaccaacaacaagctgccggtgctagtctacttccacggcggcggcttctgcatctgcagcttcgagatgccccacttccacgccggcgggctccgcctcgccgccgagctcccggcgctcgtgctctccgccgactaccgcctggggcccgagcaccgcctccccgcggcgcaccgcgacgccgaggccgtcctgtcctggctccgcgcccaggccgaggccgacccgtggcttgtcgagtcggctgacatgggcagggtgttcgtctgcggcgactcggccggcggcaacatcgcgcaccacatcgccgtccagtacggcacgggccacctcgccctcggccccgtcgtccggcttggcggctacatcatgctgtggccctacttcgccgccgaggagaggacggcgtccgagacggccggtcttgacgtcgaccaccagttcgttagcacggcgctgttggatcagatgtggcgcctggcgctgccggtcggcgcgaccagggaccacccagcagcgaacccgttcggaccggacagcgtcccgctggaggacgtcgccttccagccgctgctcgtcgtggacccagaccaggacgtgctgcacgaccgcacacaggactatgccgctaggttgacggccatggggaaactggtcgagctcgtcgtgttcagaggccagggccacgggttcttcgtcttcgacccgtgtggtgaagctttccgaccagctgatccacgtcattcggcgcttcgtactgttgcataagcatccatgtaatcttgttgatcttagtactaccatgtagttgcattagtgagtcatgtactcatgtgttcgtcagtcggacaagtttgtttcgtagaatcgcggacgagctggagagtgcacagcccgtgcagtgaccgcgtctagggatgtgtttccgccacggtgtgcatgtcatgcacgtcgcacgttcgtccttagaagtcggatcgtgcagctgtattccgtggcggggaaacgtggaactaccccagtgtatttggttc

SEQ ID NO: 26358 - protein, 338 aa, Zea mays subsp. mays
  misc_feature (1)..(338): Ceres Seq. ID no. 13502499
MSSSSPVSAVSSATAPHVVDDCLGIVQLLSDGTVTRSADYSDIPLLGEVPSNLPVQWKDVVYDPAHALRLRMYRPTDTDGGRTTNNKLPVLVYFHGGGFCICSFEMPHFHAGGLRLAAELPALVLSADYRLGPEHRLPAAHRDAEAVLSWLRAQAEADPWLVESADMGRVFVCGDSAGGNIAHHIAVQYGTGHLALGPVVRLGGYIMLWPYFAAEERTASETAGLDVDHQFVSTALLDQMWRLALPVGATRDHPAANPFGPDSVPLEDVAFQPLLVVDPDQDVLHDRTQDYAARLTAMGKLVELVVFRGQGHGFFVFDPCGEAFRPADPRHSALRTVA

SEQ ID NO: 26359 - protein, 267 aa, Zea mays subsp. mays
  misc_feature (1)..(267): Ceres Seq. ID no. 13502500
MYRPTDTDGGRTTNNKLPVLVYFHGGGFCICSFEMPHFHAGGLRLAAELPALVLSADYRLGPEHRLPAAHRDAEAVLSWLRAQAEADPWLVESADMGRVFVCGDSAGGNIAHHIAVQYGTGHLALGPVVRLGGYIMLWPYFAAEERTASETAGLDVDHQFVSTALLDQMWRLALPVGATRDHPAANPFGPDSVPLEDVAFQPLLVVDPDQDVLHDRTQDYAARLTAMGKLVELVVFRGQGHGFFVFDPCGEAFRPADPRHSALRTVA

SEQ ID NO: 26360 - protein, 233 aa, Zea mays subsp. mays
  misc_feature (1)..(233): Ceres Seq. ID no. 13502501
MPHFHAGGLRLAAELPALVLSADYRLGPEHRLPAAHRDAEAVLSWLRAQAEADPWLVESADMGRVFVCGDSAGGNIAHHIAVQYGTGHLALGPVVRLGGYIMLWPYFAAEERTASETAGLDVDHQFVSTALLDQMWRLALPVGATRDHPAANPFGPDSVPLEDVAFQPLLVVDPDQDVLHDRTQDYAARLTAMGKLVELVVFRGQGHGFFVFDPCGEAFRPADPRHSALRTVA

SEQ ID NO: 26361 - DNA, 562 bp, Zea mays subsp. mays
  misc_feature (1)..(562): Ceres Seq. ID no. 13503118
atcgtctgctggcatcgttccattctcctctaaaccctagccgcctagcgcctcgatctgagcagcctgtctcgcggaggtagttctggttgatttggtcctagatggcggaggaaaaagtggggcggatcttcgtcggcgggctgtcgtggaacaccacggagcgcacgctcgagcgcaccttcggtcagtacggcaaggtcatcgaggctcaggttgtagtggaaagggagacaggccgctctaggggatttggatttgtcacattttcagaacctcgggctgtggatgctgccattcggggaatgcataacggagaactggatggccgcaatatttctgtgaacaaagctgaacctaggaactctgatggctatggatatggtggtggtggtggtggtggttactcgtccggtggtagaggtggatatcgtagtggagctgatgtagttccagcagccagtgatgattgtttcaaatgtggccgtcctggacattgggctcgtgaatgcccttattcagatggaagtggtagaactggaaggtattctcccggttcaag

SEQ ID NO: 26362 - protein, 152 aa, Zea mays subsp. mays
  misc_feature (1)..(152): Ceres Seq. ID no. 13503119
MAEEKVGRIFVGGLSWNTTERTLERTFGQYGKVIEAQVVVERETGRSRGFGFVTFSEPRAVDAAIRGMHNGELDGRNISVNKAEPRNSDGYGYGGGGGGGYSSGGRGGYRSGADVVPAASDDCFKCGRPGHWARECPYSDGSGRTGRYSPGS

SEQ ID NO: 26363 - protein, 85 aa, Zea mays subsp. mays
  misc_feature (1)..(85): Ceres Seq. ID no. 13503120
MHNGELDGRNISVNKAEPRNSDGYGYGGGGGGGYSSGGRGGYRSGADVVPAASDDCFKCGRPGHWARECPYSDGSGRTGRYSPGS

SEQ ID NO: 26364 - DNA, 2039 bp, Zea mays subsp. mays
  misc_feature (1)..(2039): Ceres Seq. ID no. 13503133
gcccacgcagcaatctggtcttctggaaatctccatcaatccgattccgaacggcagaaaattttcccttcccccggccaccaaccaaccaaacccgagcaaccagcctgagccacctcccatgcgccgcgccgcagcctgaggaggaggaggaggacgcggtggtctggagagggatggagggcgcgtcctcgctgccgcccttcctgagcaagacgtacgagatggtggacgacccggccacggacgccgtggtggcgtggacgccgctggggaccagcttcgtcgtcgcgaaccaggccgagttctggagggatctgctccccaagtacttcaagcacaacaacttctccagcttcgtgcggcaactgaacacctacgtaagcccccaccgcacagcacgatcattcattttcttcgccccatctccctctctgtccacctgtggttttgatcaatcggggtgcgtggcggcgtgctactgtcagctatgctgttgcccctttgcaaaaaaactccacaagttggcatttggggggcgaatcttgttagccttgtagtagaacaattgtttagggtatcgtcttcggtcgaatgaactgtttccttgttatagcatagcgtgttgacaacttggtggcgataactttaaattacatgtgtccactatatatctagtatatatgctcaattatcttgttgagatgtttttccttttctaaatccaactagagttagtgtaccttttgacaaatgaagtgctgctaacggtaaacactgttgaattggcatctttgttgacacccaaattaaatccaatagaaaccataatgatttcggatggttacttttgatttatgagccttgatgggtcaaatttctgtgatgttgtgttaatcgttttcctgcttcttcttatgtagggctttaagaaaattgatcctgaacaatgggagtttgcaaatgatgatttcattaggggacaacagcaccgactgaaaaatatacacaggcgtaagcctatattcagccattcatcgcatactcagggttctggaccattaccagataccgaaaggagggattatgaggaggaaatcgaaaggcttaagtgtgacaatgcagctctgacctcagagcttgaaaagaatgcacagaagaaacttgttacagagaaacgaatgcaggatctagaagataagttgatctttttggaggatcggcagaagaatctgatggcgtatgtcagggatattgtacaggcaccaggatctttctctagctttgtgcagcaacctgatcatcacggaaagaaaaggagactaccagtacctatctctctctaccaagattctaatgctaaggggaaccaggttgtgcatgggagcttcatcaccaacccaccagcttgcagggaatcatttgacaagacggaatcttcattgaactcgttggagaatttccttcgggaagcgagtgaagcgttcaatatttcatatgatgatggcctccctggcccttcatctgctgtcgttatcacagagctccattcgtccggagaaagtgatccccatgtgccatcacctgtctcaagaatgcatacatcttcggctggtgcgggagattcgctctcttcccgcgatttaacagagtcaactagctgcgctgagagccctcgcctccctcagatccaaccctgtacagattcacgaactaaggtgtctgagatcgatgtcaatcgggagcctgctgtcacagaaactggtccgacaagggaccaacctgccgaggagcctccccacgtagcagctggggtgaacgatggcttctggcagcagttcctcaccgagcagcccggtcctgatgtacaccaggaggcccaatcagaaaggagagatggcgatgatgataagggcgatcagacgaggataggggaccgagaaaatttttggtgggggaagaagaatgttgagcagatgagagagaagctggggcgtctcacctcggtggagaaaacctgactgtatttcttgtagctg

SEQ ID NO: 26365 - protein, 279 aa, Zea mays subsp. mays
  misc_feature (1)..(279): Ceres Seq. ID no. 13503134
MQDLEDKLIFLEDRQKNLMAYVRDIVQAPGSFSSFVQQPDHHGKKRRLPVPISLYQDSNAKGNQVVHGSFITNPPACRESFDKTESSLNSLENFLREASEAFNISYDDGLPGPSSAVVITELHSSGESDPHVPSPVSRMHTSSAGAGDSLSSRDLTESTSCAESPRLPQIQPCTDSRTKVSEIDVNREPAVTETGPTRDQPAEEPPHVAAGVNDGFWQQFLTEQPGPDVHQEAQSERRDGDDDKGDQTRIGDRENFWWGKKNVEQMREKLGRLTSVEKT

SEQ ID NO: 26366 - protein, 261 aa, Zea mays subsp. mays
  misc_feature (1)..(261): Ceres Seq. ID no. 13503135
MAYVRDIVQAPGSFSSFVQQPDHHGKKRRLPVPISLYQDSNAKGNQVVHGSFITNPPACRESFDKTESSLNSLENFLREASEAFNISYDDGLPGPSSAVVITELHSSGESDPHVPSPVSRMHTSSAGAGDSLSSRDLTESTSCAESPRLPQIQPCTDSRTKVSEIDVNREPAVTETGPTRDQPAEEPPHVAAGVNDGFWQQFLTEQPGPDVHQEAQSERRDGDDDKGDQTRIGDRENFWWGKKNVEQMREKLGRLTSVEKT

SEQ ID NO: 26367 - protein, 185 aa, Zea mays subsp. mays
  misc_feature (1)..(185): Ceres Seq. ID no. 13503136
PRSNLVFWKSPSIRFRTAENFPFPRPPTNQTRATSLSHLPCAAPQPEEEEEDAVVWRGMEGASSLPPFLSKTYEMVDDPATDAVVAWTPLGTSFVVANQAEFWRDLLPKYFKHNNFSSFVRQLNTYVSPHRTARSFIFFAPSPSLSTCGFDQSGCVAACYCQLCCCPFAKKLHKLAFGGRILLAL

SEQ ID NO: 26368 - DNA, 1019 bp, Zea mays subsp. mays
  misc_feature (1)..(1019): Ceres Seq. ID no. 13503150
aaaaaacaaaacatatctatatatctgcaacgtcaaatcaacacaggctgttgtttgcttcttttggtaaaggctttagctgcggcagatccaccggcggcgccccgagaatcgaagatgccggtgaaggtgttcggatcgccgacgtcggcggaggtcgcccgcgtcctggcctgcctgttcgagaaggacgtcgagttccagctcatccgcgtcgactccttccgcggcaccaagcgcctgccccagtacctcaagctccagccgcacggcgaggcgctcaccttcgaggacggcaacgtcaccctcgtcgagtcgaggaagatcctgcgccacatcgccgacaagtacaagaaccaggggtacagggacctgttcggcccgggcgcgctggagcgggcctccatcgagcagtggctgcagacggaggcgcagagcttcgacgtccccagcgccgacatggtctacagcctcgcctacctgccgcccgacatgcagctcgacggcaggggcgtcggcggcctcccggcggcgacggggacgatgaacccggcgcaccggcagaaggtggaggagatgctgcagctgttcgagaagagccgcaggcagctgggcaagctgctggacatctacgagcagcgccttggcgaggaggccttcctggccggaggcaagttcacgctcgccgacctgtcccacctgcccaacgccgaccgcctcgccggcgacccgcggtccgcacgcctcatggagtcgcgcaggaacgtcagcaagtggtgggacaccgtatcccgccgcgactcttgggtcagggtcaaggagttgcagcgcccgccgtccgcggaggcgcccttctgatgtcgatcgatcgcaaattaaggcggtggcctttgctcaagcctacgtgttcggtttctgcataattttttaataaataaacgccactggcccctctacgtcattggcgattgttcattgtgtaataaatcgttcaagagcatatgatgcttcttgccgtg

SEQ ID NO: 26369 - protein, 306 aa, Zea mays subsp. mays
  misc_feature (1)..(306): Ceres Seq. ID no. 13503151
KTKHIYISATSNQHRLLFASFGKGFSCGRSTGGAPRIEDAGEGVRIADVGGGRPRPGLPVREGRRVPAHPRRLLPRHQAPAPVPQAPAARRGAHLRGRQRHPRRVEEDPAPHRRQVQEPGVQGPVRPGRAGAGLHRAVAADGGAELRRPQRRHGLQPRLPAARHAARRQGRRRPPGGDGDDEPGAPAEGGGDAAAVREEPQAAGQAAGHLRAAPWRGGLPGRRQVHARRPVPPAQRRPPRRRPAVRTPHGVAQERQQVVGHRIPPRLLGQGQGVAAPAVRGGALLMSIDRKLRRWPLLKPTCSVSA

SEQ ID NO: 26370 - protein, 285 aa, Zea mays subsp. mays
  misc_feature (1)..(285): Ceres Seq. ID no. 13503152
KKQNISIYLQRQINTGCCLLLLVKALAAADPPAAPRESKMPVKVFGSPTSAEVARVLACLFEKDVEFQLIRVDSFRGTKRLPQYLKLQPHGEALTFEDGNVTLVESRKILRHIADKYKNQGYRDLFGPGALERASIEQWLQTEAQSFDVPSADMVYSLAYLPPDMQLDGRGVGGLPAATGTMNPAHRQKVEEMLQLFEKSRRQLGKLLDIYEQRLGEEAFLAGGKFTLADLSHLPNADRLAGDPRSARLMESRRNVSKWWDTVSRRDSWVRVKELQRPPSAEAPF

SEQ ID NO: 26371 - protein, 246 aa, Zea mays subsp. mays
  misc_feature (1)..(246): Ceres Seq. ID no. 13503153
MPVKVFGSPTSAEVARVLACLFEKDVEFQLIRVDSFRGTKRLPQYLKLQPHGEALTFEDGNVTLVESRKILRHIADKYKNQGYRDLFGPGALERASIEQWLQTEAQSFDVPSADMVYSLAYLPPDMQLDGRGVGGLPAATGTMNPAHRQKVEEMLQLFEKSRRQLGKLLDIYEQRLGEEAFLAGGKFTLADLSHLPNADRLAGDPRSARLMESRRNVSKWWDTVSRRDSWVRVKELQRPPSAEAPF

SEQ ID NO: 26372 - DNA, 1329 bp, Zea mays subsp. mays
  misc_feature (1)..(1329): Ceres Seq. ID no. 13503166
gctttaaatccgcctcctcccagcgtctccctcctcccggcctgtcccctcacctccctccccctatctctccaccgccgcagctagctgcgacgtcatgcactcgccggcgccaccgccaccgcatactatctacaattagccagccgtaggcttacctatcctgtgtcaagcaagcctctcgcaagcaacaaggaaggaagctagctagttttatagctgctgtcggcggcggcggctgaagcgacgtgcctgagctaggatttaggttgagatcaggagagggagaaggcggcggcgatggggcgcgggaaggtgcagctgaagcggatcgagaacaagatcaaccgccaggtgacattctccaagcgccgctcggggctactcaagaaggcgcacgagatctccgtgctctgcgacgccgaggtcgcgctcatcatcttctccaccaagggcaagctctacgagtactctaccgattcatgtatggacaaaattcttgaacggtatgagcgctactcctatgcagaaaaggttctcatttccgcagaatatgaaactcagggcaattggtgccatgaatatagaaaactaaaggcgaaggtcgagacaatacagaaatgtcaaaagcacctcatgggagaggatcttgaaactttgaatctcaaagagcttcagcaactagagcagcagctggagagttcactgaaacatatcagaacaaggaagagccagcttatggtcgagtcaatttcagcgctccaacggaaggagaagtcactgcaggaggagaacaaggttctgcagaaggagctcgcggagaagcagaaagaccagcggcagcaagtgcaacgggaccaaactcaacagcagaccagttcgtcttccacgtccttcatgttaagggaagctgccccaacaacaaatgtcagcatcttccctgtggcagcaggcgggagggtggtggaaggggcagcagcgcagccgcaggctcgcgttggactgccaccatggatgcttagccatctgagctgctgaaggtttgccctcaccgtcgcgatgtgatagcccaaaatccagcaagtcttccccggaccccggactgtccccgcttctccgcctggtgcagtatcgtcgtgatcgcgagaagcagcagcagcggtttgccgtattttttaccactgtgtataagtagcatatctgcaatgtgtatattttgttcaccgttcctgctggggcggccgcacggtactttacgcatgtaatatatgtgcttcatcaaatcactttcactaccatagcatgtgccggtttgtggtagtttcatgt

SEQ ID NO: 26373 - protein, 245 aa, Zea mays subsp. mays
  misc_feature (1)..(245): Ceres Seq. ID no. 13503167
MGRGKVQLKRIENKINRQVTFSKRRSGLLKKAHEISVLCDAEVALIIFSTKGKLYEYSTDSCMDKILERYERYSYAEKVLISAEYETQGNWCHEYRKLKAKVETIQKCQKHLMGEDLETLNLKELQQLEQQLESSLKHIRTRKSQLMVESISALQRKEKSLQEENKVLQKELAEKQKDQRQQVQRDQTQQQTSSSSTSFMLREAAPTTNVSIFPVAAGGRVVEGAAAQPQARVGLPPWMLSHLSC

SEQ ID NO: 26374 - protein, 183 aa, Zea mays subsp. mays
  misc_feature (1)..(183): Ceres Seq. ID no. 13503168
MDKILERYERYSYAEKVLISAEYETQGNWCHEYRKLKAKVETIQKCQKHLMGEDLETLNLKELQQLEQQLESSLKHIRTRKSQLMVESISALQRKEKSLQEENKVLQKELAEKQKDQRQQVQRDQTQQQTSSSSTSFMLREAAPTTNVSIFPVAAGGRVVEGAAAQPQARVGLPPWMLSHLSC

SEQ ID NO: 26375 - protein, 133 aa, Zea mays subsp. mays
  misc_feature (1)..(133): Ceres Seq. ID no. 13503169
MGEDLETLNLKELQQLEQQLESSLKHIRTRKSQLMVESISALQRKEKSLQEENKVLQKELAEKQKDQRQQVQRDQTQQQTSSSSTSFMLREAAPTTNVSIFPVAAGGRVVEGAAAQPQARVGLPPWMLSHLSC

SEQ ID NO: 26376 - DNA, 1391 bp, Zea mays subsp. mays
  misc_feature (1)..(1391): Ceres Seq. ID no. 13504058
agcgcagggtcaggagaggcagaggcctcagagatacgccgggacgcaacacgtcgtgccgcgcggagggttttgccgagattttccctcaaaagggtattgccacccgcaccgagaaaagaaaacgatacacaccgagataaaaacataccctctccatcctctcctcttcttcctcctcccgtagcggcttcccccgatttgcatccgggcgcggccccatccccacctggccgccgcgcgccgccatggacggcctgcacggtacggacgcatgcttctcccccgcgagggctatctcgccgcaggtgaggccccccgggccgccggacgtaggcagtcagtacctggcggagctgctgcaggagcaccagaagctggggcccttcatgcaggtgctcccaatctgcagcaggctgctgaatcaagaaatagtgcgggtgtcgaatatacggcgccaacatggtgttgctggcgactttgagaggtttccagccgcaagccccaaccagatgcatccggcaccccccatgacaaacttttgtggaaacggttttagtccatggaatgggatgcattcagagagagtaggtgttccgcaaggagctatgggttggcaaggacccccacagagcccctcttcttatattgtcaagaagattttgcggttggaagtaccgacagaagcataccctaatttcaattttatcggccgtcttcttggaccaaggggaaactctttaaagatgattgaagcctccacaggctgtcgtgttttcatcagagggaaaggctcaattaaagattctggcaaggaggaacaactcaagggaagacctggctatgaacacttgagtgaacccctccatatcttgattgaagctgagttacctgctaatgtgattgatgcaagacttgcaaaggcacaagagatccttgaagagctgttgaaaccagtggacgaatcacaagactactacaagagacagcaactgcgagaacttgcaatgctaaattcgccactccgagaggagagtccacatccaggtggtgctcctcctagtcccttcagtaacggcggcatgaaaagagtgaaacaatgacaccgccgaggctcgttcctccatcttgactccccagcaaccccaatgcagtccataccttcacaccctatttttcaatgagcaagctttcatgacggtgttggtagtgtgtgacattcttcactgtactagcaggtgaattttgatctcccatcccatgttacattaaccttgagtgacagatgactatgcgtagtgtatcctctatggcagtataactagaacatttgatttatttgttactggtaatgctgagatatagtactgtgcagattntgagttacggtg

SEQ ID NO: 26377 - protein, 284 aa, Zea mays subsp. mays
  misc_feature (1)..(284): Ceres Seq. ID no. 13504059
MDGLHGTDACFSPARAISPQVRPPGPPDVGSQYLAELLQEHQKLGPFMQVLPICSRLLNQEIVRVSNIRRQHGVAGDFERFPAASPNQMHPAPPMTNFCGNGFSPWNGMHSERVGVPQGAMGWQGPPQSPSSYIVKKILRLEVPTEAYPNFNFIGRLLGPRGNSLKMIEASTGCRVFIRGKGSIKDSGKEEQLKGRPGYEHLSEPLHILIEAELPANVIDARLAKAQEILEELLKPVDESQDYYKRQQLRELAMLNSPLREESPHPGGAPPSPFSNGGMKRVKQ

SEQ ID NO: 26378 - protein, 237 aa, Zea mays subsp. mays
  misc_feature (1)..(237): Ceres Seq. ID no. 13504060
MQVLPICSRLLNQEIVRVSNIRRQHGVAGDFERFPAASPNQMHPAPPMTNFCGNGFSPWNGMHSERVGVPQGAMGWQGPPQSPSSYIVKKILRLEVPTEAYPNFNFIGRLLGPRGNSLKMIEASTGCRVFIRGKGSIKDSGKEEQLKGRPGYEHLSEPLHILIEAELPANVIDARLAKAQEILEELLKPVDESQDYYKRQQLRELAMLNSPLREESPHPGGAPPSPFSNGGMKRVKQ

SEQ ID NO: 26379 - protein, 196 aa, Zea mays subsp. mays
  misc_feature (1)..(196): Ceres Seq. ID no. 13504061
MHPAPPMTNFCGNGFSPWNGMHSERVGVPQGAMGWQGPPQSPSSYIVKKILRLEVPTEAYPNFNFIGRLLGPRGNSLKMIEASTGCRVFIRGKGSIKDSGKEEQLKGRPGYEHLSEPLHILIEAELPANVIDARLAKAQEILEELLKPVDESQDYYKRQQLRELAMLNSPLREESPHPGGAPPSPFSNGGMKRVKQ

SEQ ID NO: 26380 - DNA, 1610 bp, Zea mays subsp. mays
  misc_feature (1)..(1610): Ceres Seq. ID no. 13504118
gttgctctgaaatcatccgtgcattttctttctttttatttggcaagggactttccttctcttttctttctcctaatttatagtggtgaccaaacagataagggacctgcgcgtcgctgagagggaggaagacattggattctacgctggtttcctcggcgcagcatacatgatcggcagaggcgtcgcgtcggtcttctggggcgtggtggcggaccgcgttggccggaagcccgtcatcgcgttctccgtcctctcggtcgtggtgttcaacaccctgttcgggctgagcgccaagtactggatggctatcgctacgaggtttctcctgggcgccctcaacggcttccttgcgccagcgaaggcgtactccatcgaggtctgccggcctgagcagcaggctctgggtatatcggtcgtaagcacagcgtgggggatgggcgtcataatcggcccggccatcggtggctacctcgcgcagcctgccaaacagtatccgcacctgttccatgagaaatcagtgtttggaaggttcccgtacctgttgccatgcctgtgcatctcgttcttcgccgccttggttgtcataagctgcgcatggctcccggagaccctacacaagcacagaggcctggagagagcagcagctgaagtggcagaaggcacgacagcagcagcagcagctcaagaaagcaccccggagccggagccggagccacctaagagcagcctgctcaggaaccggccactcatgtcctccatcgtcacgtactgcgtcttctccctccacgacaccgcgtacgtcgagatattttctctgtggaccgtgagtggcagagatcacggcggcctcagcttcgcgtccaaggacgtcggccaagtcctcaccgtcgctggcgccagtctcctggtgtaccaaatcttcgcctaccgttgggtcaacaagatcctcggcccagtcaactcaacccgagtttcgtcggcgctatccataccgataatcgccgcttaccccttcatgacgcgcttgtcgggaataaggcttggtgtgcctctctacgtcgcggcgatgctcaaaagcgtcctcgccatcaccagagtcaccggcacatcgctcctgcagaacaacgctgtgccacaggagcagaggggcgctgcgaacgggatagctacgacggcgatgtctctgtccaaggcgttcgctccggccgtggccggcatcttgttctcgtgggcacagaagcgccagcatgccgcgttctttccaggtgaccagatggtgtttctgctcctgaatctgacggaggtcatcgggctcgtgctcaccttcaagcctttcctcgcggttccccagcagtacaaacagtgaaagcggtgctgcgtgcgtgcgtgctctgcatggatactatagagaggtagctagctgctagccagtgtgtgtgggcgagagcgagacgagggagatggacatgtcaagtagaagcagaggatatgatgtcattatacatatttactttgcgagatatgtagttcctcatgagtcttcgctgtgcggttttctaaaaaaaaattgagataaagttggtctctcaattatatggtgcattccg

SEQ ID NO: 26381 - protein, 399 aa, Zea mays subsp. mays
  misc_feature (1)..(399): Ceres Seq. ID no. 13504119
MIGRGVASVFWGVVADRVGRKPVIAFSVLSVVVFNTLFGLSAKYWMAIATRFLLGALNGFLAPAKAYSIEVCRPEQQALGISVVSTAWGMGVIIGPAIGGYLAQPAKQYPHLFHEKSVFGRFPYLLPCLCISFFAALVVISCAWLPETLHKHRGLERAAAEVAEGTTAAAAAQESTPEPEPEPPKSSLLRNRPLMSSIVTYCVFSLHDTAYVEIFSLWTVSGRDHGGLSFASKDVGQVLTVAGASLLVYQIFAYRWVNKILGPVNSTRVSSALSIPIIAAYPFMTRLSGIRLGVPLYVAAMLKSVLAITRVTGTSLLQNNAVPQEQRGAANGIATTAMSLSKAFAPAVAGILFSWAQKRQHAAFFPGDQMVFLLLNLTEVIGLVLTFKPFLAVPQQYKQ

SEQ ID NO: 26382 - protein, 354 aa, Zea mays subsp. mays
  misc_feature (1)..(354): Ceres Seq. ID no. 13504120
MAIATRFLLGALNGFLAPAKAYSIEVCRPEQQALGISVVSTAWGMGVIIGPAIGGYLAQPAKQYPHLFHEKSVFGRFPYLLPCLCISFFAALVVISCAWLPETLHKHRGLERAAAEVAEGTTAAAAAQESTPEPEPEPPKSSLLRNRPLMSSIVTYCVFSLHDTAYVEIFSLWTVSGRDHGGLSFASKDVGQVLTVAGASLLVYQIFAYRWVNKILGPVNSTRVSSALSIPIIAAYPFMTRLSGIRLGVPLYVAAMLKSVLAITRVTGTSLLQNNAVPQEQRGAANGIATTAMSLSKAFAPAVAGILFSWAQKRQHAAFFPGDQMVFLLLNLTEVIGLVLTFKPFLAVPQQYKQ

SEQ ID NO: 26383 - protein, 310 aa, Zea mays subsp. mays
  misc_feature (1)..(310): Ceres Seq. ID no. 13504121
MGVIIGPAIGGYLAQPAKQYPHLFHEKSVFGRFPYLLPCLCISFFAALVVISCAWLPETLHKHRGLERAAAEVAEGTTAAAAAQESTPEPEPEPPKSSLLRNRPLMSSIVTYCVFSLHDTAYVEIFSLWTVSGRDHGGLSFASKDVGQVLTVAGASLLVYQIFAYRWVNKILGPVNSTRVSSALSIPIIAAYPFMTRLSGIRLGVPLYVAAMLKSVLAITRVTGTSLLQNNAVPQEQRGAANGIATTAMSLSKAFAPAVAGILFSWAQKRQHAAFFPGDQMVFLLLNLTEVIGLVLTFKPFLAVPQQYKQ

SEQ ID NO: 26384 - DNA, 782 bp, Zea mays subsp. mays
  misc_feature (1)..(782): Ceres Seq. ID no. 13504943
ccatttcgactttcgagcgcagaaacgagagggccggagcagccgcagtcccggcgatcccgccgccggtcgccctcatacttcctcgtcactgccttcgatggtacccgtttgcgtgtgagcttgcaaaatcctgggcttggtcatctttcttcagagtttctctttccaacaatcaagatgagccgtggcggtagcgcgggtggtggtcaaagttctctgggttacctctttggaagcggtgagccccccaaaccagcagtggcaccagctgtaagtgctccacctgctgctgcaggtgctccacctgctgagaaaccacctgctgcaaagcctgatggcaccagtcagattgctgctggggttaccagccaaaccaataactaccacagggccgacggtcagaacaccggaaacttccttacggaccgtccttcgaccaaggtccacgctgctcctggcggtggctcttccctgggatacctgtttggtggcaactgatgccgctcaccaagctatcaccccccactgtcgccgcatgctttttctgaatcgtgaacagccgttgtcatttcatgtgtacccaaacctcccgtcccgcgtgggcccgtaagctgcgcctagatttcagggctaatcgtgtgcctgaaccctcatcataagtcgtctctgtacccagcttctcgtttcgtttgcacccgtgatggtatggtttggttgttgcccgctggacctatctattctttgcatttttcctttgaaatgtatccttgcccatttcc

SEQ ID NO: 26385 - protein, 166 aa, Zea mays subsp. mays
  misc_feature (1)..(166): Ceres Seq. ID no. 13504944
PFRLSSAETRGPEQPQSRRSRRRSPSYFLVTAFDGTRLRVSLQNPGLGHLSSEFLFPTIKMSRGGSAGGGQSSLGYLFGSGEPPKPAVAPAVSAPPAAAGAPPAEKPPAAKPDGTSQIAAGVTSQTNNYHRADGQNTGNFLTDRPSTKVHAAPGGGSSLGYLFGGN

SEQ ID NO: 26386 - protein, 106 aa, Zea mays subsp. mays
  misc_feature (1)..(106): Ceres Seq. ID no. 13504945
MSRGGSAGGGQSSLGYLFGSGEPPKPAVAPAVSAPPAAAGAPPAEKPPAAKPDGTSQIAAGVTSQTNNYHRADGQNTGNFLTDRPSTKVHAAPGGGSSLGYLFGGN

SEQ ID NO: 26387 - protein, 91 aa, Zea mays subsp. mays
  misc_feature (1)..(91): Ceres Seq. ID no. 13504946
MAPVRLLLGLPAKPITTTGPTVRTPETSLRTVLRPRSTLLLAVALPWDTCLVATDAAHQAITPHCRRMLFLNREQPLSFHVYPNLPSRVGP

SEQ ID NO: 26388 - DNA, 671 bp, Zea mays subsp. mays
  misc_feature (1)..(671): Ceres Seq. ID no. 13564010
agcttagtgatccttgtgatcaaattttgattgtggcaaacacacatatttattgggacccacaatggatcgatgtaaagttggctcaggcaaaatatcttctttcgagagtatctcagtttgagcaactcatctcaaataaatataattgtaaaccttcagtgatcattgctggtgacttcaattcgacacctggtgacaaggtatacaattaccttttatctgccaacctaggatctacggacgaagctccaatcaagttacgcagcctttatgctgcgaatggaggggagccagagtacacaaactacactcctggttttaccggaacactggactacatattcttgtcggatggtagttcgataaaacctactagcctacttcgtttgccgcgaggggattctgaggatgtgaaaggaggcttgcccaactttcgacatcctagcgatcatctcccaattggtgctgattttctggtagtcaacatctagtgcaggtgttgattgctttttcaacagaaatagtaaatgccgttgaataatttgtgttgttggctcaagtttcagagtttaaatgtaatatctcaaggaacaagcgtttcttttcttgtagagcaattaacaatgcgaattttattcatcaattttaatataataggagtattgtcc

SEQ ID NO: 26389 - protein, 163 aa, Zea mays subsp. mays
  misc_feature (1)..(163): Ceres Seq. ID no. 13564011
LSDPCDQILIVANTHIYWDPQWIDVKLAQAKYLLSRVSQFEQLISNKYNCKPSVIIAGDFNSTPGDKVYNYLLSANLGSTDEAPIKLRSLYAANGGEPEYTNYTPGFTGTLDYIFLSDGSSIKPTSLLRLPRGDSEDVKGGLPNFRHPSDHLPIGADFLVVNI

SEQ ID NO: 26390 - DNA, 566 bp, Zea mays subsp. mays
  misc_feature (1)..(566): Ceres Seq. ID no. 13564026
agcagaggcggtggagctgttctggaggatgagaaaggcgagggttaaggatgacgcagtgactatggttgccctgctataaaagcctgtgcggagctgggtgacctagaacttgggcggtgggtgcatgcacgagtggacttggaagggtggcagcggaggactgtgttgctggacaatgctctcatccatatgtatgtgaagtgtggtgctgtggaagatgcacatcgcttgtttgggatgatgccaaggcggagctccgtttcttggactactatgatctcgggtcttgcaatgcatggtcacccccaggaggcgctggacttgttccagagaatgcaggatcggcctgatggtgccacgctgctggcagttctgcgggcatgcagtctggcagggaggattgatgatgcacggtggtactttgaaagtatggaaagagtttacgggataaatccagagatacaacactatggatgcatggttgacatgctctgttgctggagacggttgaatgaarcacttgagcttgkggagaaaatgccattccagccaaacgagggtgc

SEQ ID NO: 26391 - protein, 124 aa, Zea mays subsp. mays
  misc_feature (1)..(124): Ceres Seq. ID no. 13564027
  misc_feature (110)..(110): Xaa is any aa, unknown or other
  misc_feature (114)..(114): Xaa is any aa, unknown or other
MYVKCGAVEDAHRLFGMMPRRSSVSWTTMISGLAMHGHPQEALDLFQRMQDRPDGATLLAVLRACSLAGRIDDARWYFESMERVYGINPEIQHYGCMVDMLCCWRRLNEXLELXEKMPFQPNEG

SEQ ID NO: 26392 - protein, 108 aa, Zea mays subsp. mays
  misc_feature (1)..(108): Ceres Seq. ID no. 13564028
  misc_feature (94)..(94): Xaa is any aa, unknown or other
  misc_feature (98)..(98): Xaa is any aa, unknown or other
MMPRRSSVSWTTMISGLAMHGHPQEALDLFQRMQDRPDGATLLAVLRACSLAGRIDDARWYFESMERVYGINPEIQHYGCMVDMLCCWRRLNEXLELXEKMPFQPNEG

SEQ ID NO: 26393 - protein, 107 aa, Zea mays subsp. mays
  misc_feature (1)..(107): Ceres Seq. ID no. 13564029
  misc_feature (93)..(93): Xaa is any aa, unknown or other
  misc_feature (97)..(97): Xaa is any aa, unknown or other
MPRRSSVSWTTMISGLAMHGHPQEALDLFQRMQDRPDGATLLAVLRACSLAGRIDDARWYFESMERVYGINPEIQHYGCMVDMLCCWRRLNEXLELXEKMPFQPNEG

SEQ ID NO: 26394 - DNA, 541 bp, Zea mays subsp. mays
  misc_feature (1)..(541): Ceres Seq. ID no. 13564049
aagacgatacaggaatgtgatggacatgaatgcggggataggtggctttgcagctgcattgatgaagtaccctctttgggtgatgaatgttgtgccttcaggcttggcccatgacaccctgggtgttatttacgaacgagggtttattggcacgtaccatgattggtgtgaggctttctcaacgtacccgaggacctacgacctcatccatgctgataaagttttcagcagttaccaggacaggtgtgacataacgtacatcctactggagatggaccgaattctaaggcctgaggggactgtgatcatcagggacaacgtagaggtgttggtgaaggtacaagctatcactggaggcatgaggtggaagagccaaatcatggaccatgagtccggtccattcaacaccgacaagatcctagtggctgtcaagacttactggaccgggaagctcgtgcaaaaacaataatcgtcgccttgttactgtttttcgtctgcgaaaatgtaggcatgacttgcctgtcagttctgtcttcattgc

SEQ ID NO: 26395 - protein, 155 aa, Zea mays subsp. mays
  misc_feature (1)..(155): Ceres Seq. ID no. 13564050
RRYRNVMDMNAGIGGFAAALMKYPLWVMNVVPSGLAHDTLGVIYERGFIGTYHDWCEAFSTYPRTYDLIHADKVFSSYQDRCDITYILLEMDRILRPEGTVIIRDNVEVLVKVQAITGGMRWKSQIMDHESGPFNTDKILVAVKTYWTGKLVQKQ

SEQ ID NO: 26396 - protein, 149 aa, Zea mays subsp. mays
  misc_feature (1)..(149): Ceres Seq. ID no. 13564051
MDMNAGIGGFAAALMKYPLWVMNVVPSGLAHDTLGVIYERGFIGTYHDWCEAFSTYPRTYDLIHADKVFSSYQDRCDITYILLEMDRILRPEGTVIIRDNVEVLVKVQAITGGMRWKSQIMDHESGPFNTDKILVAVKTYWTGKLVQKQ

SEQ ID NO: 26397 - protein, 147 aa, Zea mays subsp. mays
  misc_feature (1)..(147): Ceres Seq. ID no. 13564052
MNAGIGGFAAALMKYPLWVMNVVPSGLAHDTLGVIYERGFIGTYHDWCEAFSTYPRTYDLIHADKVFSSYQDRCDITYILLEMDRILRPEGTVIIRDNVEVLVKVQAITGGMRWKSQIMDHESGPFNTDKILVAVKTYWTGKLVQKQ

SEQ ID NO: 26398 - DNA, 1233 bp, Zea mays subsp. mays
  misc_feature (1)..(1233): Ceres Seq. ID no. 13564187
aacgcaacaaagccgaggtaaagcagggagcatcttgagtgttcgacagtgagccatggagaagacgtccgagagcgctataccgccggcggcatccccgctgatgctgttcgggtcgtgggcgagctcgtacacgcaccgcgtgcagctggcgctgcggctcaagggcctggagttcgactacgtggaggaggacctggggaacaagagcgacgagctgctgcgccacaaccccgtccacaagaaggtgcccgtgctcgtccacggcggccgcgcgctcccggagtccgtcattatcctccagtaccttgacgacgcctggccggagacccgcccgctgctccccgccgacgccttcgaccgcgcgctcgcgcggttctggtgccacttcgccgacgacaagctcgggccggcggtgggcgcggtgttcgcgtcgacgggggagggccaggaggcggcggtgcggcaggtgcacgagaacctggccctgatcgagtccgagctccgcgacggcgcgttccggggccgccgcttcttcggcggcgacgaggtgggcctgctggacgtcgtcctgggctgcggctcctactggctcgccgtgttcgaggaggtgaccggggtgcgcctcgtggacgccgacgccttcccgcgcttccacgcctggctgcgcgacttcgaggccctggacgaggtccgggagaccatccccgcggtggaccgcctgctcgagtacgcgcgcggcctccgccacatgctgctcggcctcgcgggggccggcgccggcgccggcgcggacgcgccctccaccgacgcccccgccgcaccgccggcctcggctgacatcgccgtcgacatttgaacgcagggcgtcgtcgcgccgggcgtctgccagcgccgtccggctagccatcagtagctagtacgtagtaccagtatagtttgcagagtcgattgcgccatgtgtggtggctgcgtgcctgtgcctgcctgccggcctggcctggagtgcggttctgctgccgccacagttaattggcccagtttgtctagctgtcgagttttttttttttcaactctctctgtctctctccgactcttcccttctttttgataaagttcgtccctgcagttaaatctctgtttgctgcgacttgttcttcttgtgtgtgagagtgggacgaaatctcgtgtgtttgtatgtggcagtttggctcgcttgttgaatgtaagcca

SEQ ID NO: 26399 - protein, 267 aa, Zea mays subsp. mays
  misc_feature (1)..(267): Ceres Seq. ID no. 13564188
MEKTSESAIPPAASPLMLFGSWASSYTHRVQLALRLKGLEFDYVEEDLGNKSDELLRHNPVHKKVPVLVHGGRALPESVIILQYLDDAWPETRPLLPADAFDRALARFWCHFADDKLGPAVGAVFASTGEGQEAAVRQVHENLALIESELRDGAFRGRRFFGGDEVGLLDVVLGCGSYWLAVFEEVTGVRLVDADAFPRFHAWLRDFEALDEVRETIPAVDRLLEYARGLRHMLLGLAGAGAGAGADAPSTDAPAAPPASADIAVDI

SEQ ID NO: 26400 - protein, 251 aa, Zea mays subsp. mays
  misc_feature (1)..(251): Ceres Seq. ID no. 13564189
MLFGSWASSYTHRVQLALRLKGLEFDYVEEDLGNKSDELLRHNPVHKKVPVLVHGGRALPESVIILQYLDDAWPETRPLLPADAFDRALARFWCHFADDKLGPAVGAVFASTGEGQEAAVRQVHENLALIESELRDGAFRGRRFFGGDEVGLLDVVLGCGSYWLAVFEEVTGVRLVDADAFPRFHAWLRDFEALDEVRETIPAVDRLLEYARGLRHMLLGLAGAGAGAGADAPSTDAPAAPPASADIAVDI

SEQ ID NO: 26401 - DNA, 407 bp, Zea mays subsp. mays
  misc_feature (1)..(407): Ceres Seq. ID no. 13564216
tacatggaaagttcattgatgcaacaccttttgcaaactcactcaaaaaggacaaggactccgacaagcctaattcgattgtggacgaattgggtcccatgcttgcatcttatgggtttaattatcatggaaacgarkcctttatagtggagtttttggmactgagatggactgtgagattttcatcggacctgtttattaccaacgtcttcgtcatatggtctcagacaaattccaggtccgcactaccggtcgtatagacmagataacaagacaacccataggaggaaggaagcatggtggagggatccgatttggtgagatggagcgtgatgccctcctcgcccatggttcgtnctacctcttgcatgacaggctccactcctgctcggattaccacatcgcag

SEQ ID NO: 26402 - protein, 85 aa, Zea mays subsp. mays
  misc_feature (1)..(85): Ceres Seq. ID no. 13564217
  misc_feature (45)..(45): Xaa is any aa, unknown or other
  misc_feature (46)..(46): Xaa is any aa, unknown or other
  misc_feature (53)..(53): Xaa is any aa, unknown or other
HGKFIDATPFANSLKKDKDSDKPNSIVDELGPMLASYGFNYHGNXXFIVEFLXLRWTVRFSSDLFITNVFVIWSQTNSRSALPVV

SEQ ID NO: 26403 - protein, 80 aa, Zea mays subsp. mays
  misc_feature (1)..(80): Ceres Seq. ID no. 13564218
  misc_feature (33)..(33): Xaa is any aa, unknown or other
  misc_feature (64)..(64): Xaa is any aa, unknown or other
MDCEIFIGPVYYQRLRHMVSDKFQVRTTGRIDXITRQPIGGRKHGGGIRFGEMERDALLAHGSXYLLHDRLHSCSDYHIA

SEQ ID NO: 26404 - protein, 63 aa, Zea mays subsp. mays
  misc_feature (1)..(63): Ceres Seq. ID no. 13564219
  misc_feature (16)..(16): Xaa is any aa, unknown or other
  misc_feature (47)..(47): Xaa is any aa, unknown or other
MVSDKFQVRTTGRIDXITRQPIGGRKHGGGIRFGEMERDALLAHGSXYLLHDRLHSCSDYHIA

SEQ ID NO: 26405 - DNA, 936 bp, Zea mays subsp. mays
  misc_feature (1)..(936): Ceres Seq. ID no. 13564260
gccccgtcccaaatccccctgtcccgctaggattcccccgaaaccctcccccaaaaccccagagcggagaagagcgcaagatgttcggcttcgggcaccacggccaccacggccagaacccgccggcgcacggcggcgtgcaccagcccaccttcaagatcttctgcaaggccgacgaggggtactgcctcaccgtccgcgacggcaacgtggtgctggcccccgccaacccgcgcgacgagcaccagcactggtacaaggacatgcgcttcagcacccaggtcaaggacgaggagggcaaccctgcgttcgccctcgtcaacaaggccactggggctcgccatcaagcactccctcggccagtcccacccggtgaagctggtgccgttcaacccggagtaccaggacgagtcggtgctgtggacggagagcggcgacgtgggcaagggcttccgctgcatccgcatggtgaacaacatccgcctcaacttcgacgccttccacggcggacaagggccacggcggcgtgcgcgacggcaccaacatcgtgctctggaagtggtgcgagggcgacaaccagcgctggaagatcgtcccctggtaaatgtgctgttctgtggctgcactggtcatcaccatgatctggagctttgaaggcatagccacctgtggtcagcaactgctgccgtgttgctagaataaagttggtggcgatcgatcgatcgatctttggtgatgggtgtccctccctgtgtgtttgtgtttagttccagtcgtttgtgaggaagtcagttatgtttgagtgagaggggtacttcgctcttcggttaactctgtacttgtcatgaggagagttttcatacccggagtgtagaaccctgtactgtactcggatccttcctttttcatccaagtgggttttattttatcaaccgc

SEQ ID NO: 26406 - protein, 212 aa, Zea mays subsp. mays
  misc_feature (1)..(212): Ceres Seq. ID no. 13564261
PVPNPPVPLGFPRNPPPKPQSGEERKMFGFGHHGHHGQNPPAHGGVHQPTFKIFCKADEGYCLTVRDGNVVLAPANPRDEHQHWYKDMRFSTQVKDEEGNPAFALVNKATGARHQALPRPVPPGEAGAVQPGVPGRVGAVDGERRRGQGLPLHPHGEQHPPQLRRLPRRTRATAACATAPTSCSGSGARATTSAGRSSPGKCAVLWLHWSSP

SEQ ID NO: 26407 - protein, 186 aa, Zea mays subsp. mays
  misc_feature (1)..(186): Ceres Seq. ID no. 13564262
MFGFGHHGHHGQNPPAHGGVHQPTFKIFCKADEGYCLTVRDGNVVLAPANPRDEHQHWYKDMRFSTQVKDEEGNPAFALVNKATGARHQALPRPVPPGEAGAVQPGVPGRVGAVDGERRRGQGLPLHPHGEQHPPQLRRLPRRTRATAACATAPTSCSGSGARATTSAGRSSPGKCAVLWLHWSSP

SEQ ID NO: 26408 - protein, 125 aa, Zea mays subsp. mays
  misc_feature (1)..(125): Ceres Seq. ID no. 13564263
MRFSTQVKDEEGNPAFALVNKATGARHQALPRPVPPGEAGAVQPGVPGRVGAVDGERRRGQGLPLHPHGEQHPPQLRRLPRRTRATAACATAPTSCSGSGARATTSAGRSSPGKCAVLWLHWSSP

SEQ ID NO: 26409 - DNA, 1834 bp, Zea mays subsp. mays
  misc_feature (1)..(1834): Ceres Seq. ID no. 13564511
tgattctattgtgagtggagatggattctgtgagaagttggttccagaagttccagccgagagacaaatcgaagaggccagtggtggctgccagacatggaaaagatccaggaaagcccccgatggacgatgccccttctagtgcgacgaaacagagggttgccgctgcaaaacagtacattgagaaccactacaagacccagatgaagtccctgcaagataggaaagagaggcgctggatgttggagagaaaattacaagatgccgaagttcctgtagaagagcaaaataacattcttaagcatttggagaaaaaagagactgaatatatgcgcttgcagagacacaagatgggagttgaagattttgaacttttgactattattgggagaggtgcattcggagaggtgcgtctttgtagagagaaggtctctaagaatgtttatgcaatgaaaaagctcaagaaatctgaaatgcttcgtaggggccaggtagaacatgtcaaagctgaaaggaaccttcttgctgaagttgatagtgcttacatagttaagctctattattctttccaagacgaagagttcttatatctcatcatggaatacctttcctggtggagacatgatgactttacttatgcgcaaagacacactaacagaagatgaagctagattttatattgcagaaactgtgcttgccatcgagtctattcacaagcacaactatgttcatcgggatatcaaaccagataatcttttgttagatcgcagtggtcacctgaagttttctgacttcggtttgtgtaaacctttggacagcagtaatttccctaatttgaatgaaccagattatatgtctggaaaagttaccacacctttgcctgataccactcggttaagcaacccttctgcaccaaggcgtacacagcaggagcaattgtcacactggcaaaagaaccgtcggatgttggcatactcaacagtcggtacacctgattatattgctccagaagtgctactgaagaaaggatatggaacggagtgtgactggtggtcccttggtgctattatgtatgaaatgctagttggttaccctccattttattcagaggacccaatgtctacttgcagaaagattgtgaactggagaagtcacttgaaattccctgaagaggcaaagcttcctcctgaagctaagactctcatcagcaagcttttgtgtaatgttgagcatcgacttggtacaaaaggagcccatgaaataaaagctcatccatggttcggaggtgttcagtgggagaagttgtatcagatgaaagctgctttcataccagaagttaatggagagttggatactcagaattttgagaatttcgaggagattggaactcaaattcaaagttcatccaagtcaggcccttggagaaagatgcttccatccaaagatgcaaactttgttgggtatacgtacaagaactttgaaattgtgaatgatgatgaagtggcaggaattgcagagttgaagaaaaagagttccaaaccaaagcgaccaaccatcaagacaatgtttgagaggatggacgaagaggagcctgttcaagggagtttcttaagtatgttgcccccggagggccaaccttcgtcccactccagcgttccacaggaaaaataccaacctcgccgtaaataggatatggaggtttggaaagtaaagcataggaaagtaaaacaagaaaaaaaaatcgtctgctgccttttgatctgttccctgtctaagttttgtaaatcctaaccaatgcgttctttagtcaaatgcttaaaaaaatctctccggc

SEQ ID NO: 26410 - protein, 355 aa, Zea mays subsp. mays
  misc_feature (1)..(355): Ceres Seq. ID no. 13564512
MMTLLMRKDTLTEDEARFYIAETVLAIESIHKHNYVHRDIKPDNLLLDRSGHLKFSDFGLCKPLDSSNFPNLNEPDYMSGKVTTPLPDTTRLSNPSAPRRTQQEQLSHWQKNRRMLAYSTVGTPDYIAPEVLLKKGYGTECDWWSLGAIMYEMLVGYPPFYSEDPMSTCRKIVNWRSHLKFPEEAKLPPEAKTLISKLLCNVEHRLGTKGAHEIKAHPWFGGVQWEKLYQMKAAFIPEVNGELDTQNFENFEEIGTQIQSSSKSGPWRKMLPSKDANFVGYTYKNFEIVNDDEVAGIAELKKKSSKPKRPTIKTMFERMDEEEPVQGSFLSMLPPEGQPSSHSSVPQEKYQPRRK

SEQ ID NO: 26411 - protein, 354 aa, Zea mays subsp. mays
  misc_feature (1)..(354): Ceres Seq. ID no. 13564513
MTLLMRKDTLTEDEARFYIAETVLAIESIHKHNYVHRDIKPDNLLLDRSGHLKFSDFGLCKPLDSSNFPNLNEPDYMSGKVTTPLPDTTRLSNPSAPRRTQQEQLSHWQKNRRMLAYSTVGTPDYIAPEVLLKKGYGTECDWWSLGAIMYEMLVGYPPFYSEDPMSTCRKIVNWRSHLKFPEEAKLPPEAKTLISKLLCNVEHRLGTKGAHEIKAHPWFGGVQWEKLYQMKAAFIPEVNGELDTQNFENFEEIGTQIQSSSKSGPWRKMLPSKDANFVGYTYKNFEIVNDDEVAGIAELKKKSSKPKRPTIKTMFERMDEEEPVQGSFLSMLPPEGQPSSHSSVPQEKYQPRRK

SEQ ID NO: 26412 - protein, 350 aa, Zea mays subsp. mays
  misc_feature (1)..(350): Ceres Seq. ID no. 13564514
MRKDTLTEDEARFYIAETVLAIESIHKHNYVHRDIKPDNLLLDRSGHLKFSDFGLCKPLDSSNFPNLNEPDYMSGKVTTPLPDTTRLSNPSAPRRTQQEQLSHWQKNRRMLAYSTVGTPDYIAPEVLLKKGYGTECDWWSLGAIMYEMLVGYPPFYSEDPMSTCRKIVNWRSHLKFPEEAKLPPEAKTLISKLLCNVEHRLGTKGAHEIKAHPWFGGVQWEKLYQMKAAFIPEVNGELDTQNFENFEEIGTQIQSSSKSGPWRKMLPSKDANFVGYTYKNFEIVNDDEVAGIAELKKKSSKPKRPTIKTMFERMDEEEPVQGSFLSMLPPEGQPSSHSSVPQEKYQPRRK

SEQ ID NO: 26413 - DNA, 583 bp, Zea mays subsp. mays
  misc_feature (1)..(583): Ceres Seq. ID no. 13564574
ttagaccgagcagtactcggtacgccaaagttcacgcggtactgctgtgtccttcgtttactaaggatcaaagtcaaacgtcgagaaatatagatttacctggaagttgctgataatccgccatctagtcggtaggcatgtatggcaaagttcagttggtgttcacttgttcctcaatggaggccaagaacaagaaaaaagggtcaaagatggagagagtttgtgagaacacagtggctgttgacttcaagcagactaagctgaacaactttgtcccattcatccggtcargggagtggktctgatattggagggtcgcggrttacatgggaagatgcccatgtgtgsatctctgatctggcaaagaattttggctatgactcagtcgatgatgaagtaatttccttctatggggtgtttgawggccataatggcaaagatgctgctcattatgtccgtgataacttgccacgggtcatcgtggaagacgctgattttcckcttgagcttgaaaaggtagtaaagaggtcatttgtgcaaactggatrgtaaagtttgcagagaaattctctcaccacagggg

SEQ ID NO: 26414 - protein, 55 aa, Zea mays subsp. mays
  misc_feature (1)..(55): Ceres Seq. ID no. 13564575
  misc_feature (52)..(52): Xaa is any aa, unknown or other
  misc_feature (55)..(55): Xaa is any aa, unknown or other
MYGKVQLVFTCSSMEAKNKKKGSKMERVCENTVAVDFKQTKLNNFVPFIRSXEWX

SEQ ID NO: 26415 - protein, 42 aa, Zea mays subsp. mays
  misc_feature (1)..(42): Ceres Seq. ID no. 13564576
  misc_feature (39)..(39): Xaa is any aa, unknown or other
  misc_feature (42)..(42): Xaa is any aa, unknown or other
MEAKNKKKGSKMERVCENTVAVDFKQTKLNNFVPFIRSXEWX

SEQ ID NO: 26416 - protein, 40 aa, Zea mays subsp. mays
  misc_feature (1)..(40): Ceres Seq. ID no. 13564577
MAKFSWCSLVPQWRPRTRKKGQRWREFVRTQWLLTSSRLS

SEQ ID NO: 26417 - DNA, 1418 bp, Zea mays subsp. mays
  misc_feature (1)..(1418): Ceres Seq. ID no. 13564606
gcacgagaccattacctagaacatcytaatcgaaaaacaagagtagggagtggtgcgagaaatcaatccgccccatgcccacatccgtcgccacccacgcaaccctcctcatcaaagccgcagccgccaagcccttcttctcsccccgcccggcggcccggatccccgccccttctcctcaccctcctcccccgcccgccggccgccgcctgccgaacacggcggccgctctcgccgccgcagcccgtcggttccggtggccgtcggcggccgcgtcggcgcgggggctgtgcgcgccgccgcattccggcggcgaggggatgggatctgatgcgggggcgggggccaggaagaggcgggacccggccgtgaacgggctcgccaaggacgtgccgccagtgaacgggatgatgatgcccaaggaggagccggcgaccgcgccgcccaggttgctcacgctgcccaccgtgctcaccattggccgcgtcgctgctgtgccgcttctgatcagcactttctacatggagggtccatgggcagctacggccacaacaggcatctttcttgctgctgcagtcactgattggctagatggttatatcgctagaaagatgcagctaggaacaccttttggtgcatttcttgatcctgtggctgacaagcttatggtagccgcaacattagttttactatgcaccaaacctttggaaacatcactgctcaatgatgggccatggcttctaacagtcccttccattgctatcattgggagagagattacaatgtcagctgtgagagaatgggccgcatctcagaatagtgaagctcttgaggctgttgcagttaacaacttagggaagtggaagacagcaacgcagatgacagcattgactctgcttctcgccagcagagacccaagtgtacctgcgcaaggtgctctagttgcccccggtgttgctctactttacatttccgctggactcgccatatggtccctagtggtgtacatgagaaagatatggcggatacttctaaaatagtattagcacaatatatatagtgtagtagaagaaacagaagcaaggcgaggttctattcgtgatcgtacgatttttggaaggctgcttagttgattggtggactgggacctagagctgcttgtgatcctcattcctcagtaacttgtgcgtcatctatttttgccgccaaatttgctgaagtatgccaggattctagacatgatgtgaccctgcgtgcttaaggagacataagtctgcaatgcagaagattgtaacccaatacaaacacaaaacccggaggtttgtgcatgtggagttctatcattgtaatctgcacataatatcatatgccaggagcatgcaattattcttttcagtggggacgatatccctgtctcc

SEQ ID NO: 26418 - protein, 321 aa, Zea mays subsp. mays
  misc_feature (1)..(321): Ceres Seq. ID no. 15222577
  misc_feature (23)..(23): Xaa is any aa, unknown or other
MPTSVATHATLLIKAAAAKPFFXPRPAARIPAPSPHPPPPPAGRRLPNTAAALAAAARRFRWPSAAASARGLCAPPHSGGEGMGSDAGAGARKRRDPAVNGLAKDVPPVNGMMMPKEEPATAPPRLLTLPTVLTIGRVAAVPLLISTFYMEGPWAATATTGIFLAAAVTDWLDGYIARKMQLGTPFGAFLDPVADKLMVAATLVLLCTKPLETSLLNDGPWLLTVPSIAIIGREITMSAVREWAASQNSEALEAVAVNNLGKWKTATQMTALTLLLASRDPSVPAQGALVAPGVALLYISAGLAIWSLVVYMRKIWRILLK

SEQ ID NO: 26419 - protein, 239 aa, Zea mays subsp. mays
  misc_feature (1)..(239): Ceres Seq. ID no. 15222578
MGSDAGAGARKRRDPAVNGLAKDVPPVNGMMMPKEEPATAPPRLLTLPTVLTIGRVAAVPLLISTFYMEGPWAATATTGIFLAAAVTDWLDGYIARKMQLGTPFGAFLDPVADKLMVAATLVLLCTKPLETSLLNDGPWLLTVPSIAIIGREITMSAVREWAASQNSEALEAVAVNNLGKWKTATQMTALTLLLASRDPSVPAQGALVAPGVALLYISAGLAIWSLVVYMRKIWRILLK

SEQ ID NO: 26420 - protein, 210 aa, Zea mays subsp. mays
  misc_feature (1)..(210): Ceres Seq. ID no. 15222579
MMMPKEEPATAPPRLLTLPTVLTIGRVAAVPLLISTFYMEGPWAATATTGIFLAAAVTDWLDGYIARKMQLGTPFGAFLDPVADKLMVAATLVLLCTKPLETSLLNDGPWLLTVPSIAIIGREITMSAVREWAASQNSEALEAVAVNNLGKWKTATQMTALTLLLASRDPSVPAQGALVAPGVALLYISAGLAIWSLVVYMRKIWRILLK

SEQ ID NO: 26421 - DNA, 528 bp, Zea mays subsp. mays
  misc_feature (1)..(528): Ceres Seq. ID no. 13564769
gtttctttttaggctgtcgaagtatcaagacggcagaacagggtgagggaatctactgggaatggcgatatggtatcaaaattggaagctgccgagtacaagcttgaagaactgaagtcaaacatggtgggattagggaaggaagctattgcagcaatgtcggctgttgaggctcagcagcaacggttgaccttacagcgtctcattgcactggttgaggctgagagaacttaccatcagagagttctggagatacttgacaaattggaagaagaaatggtgtctgagcgccaaaaaattgaagcacccccgactccagcagctgaaaaattatataccaccaccagcaccaccatcttatgatgaaattaatggagcatttgcatccacttctgttaacgagtcagtccaatctgtcgatttcttccttggagaggcccttgattcatttaatgctgaaagtgagtttgagcttaccttgtcagctggtgacattgtaattgtccgaaagatctcaagcaatggttg

SEQ ID NO: 26422 - protein, 97 aa, Zea mays subsp. mays
  misc_feature (1)..(97): Ceres Seq. ID no. 13564770
MVSKLEAAEYKLEELKSNMVGLGKEAIAAMSAVEAQQQRLTLQRLIALVEAERTYHQRVLEILDKLEEEMVSERQKIEAPPTPAAEKLYTTTSTTIL

SEQ ID NO: 26423 - protein, 79 aa, Zea mays subsp. mays
  misc_feature (1)..(79): Ceres Seq. ID no. 13564771
MVGLGKEAIAAMSAVEAQQQRLTLQRLIALVEAERTYHQRVLEILDKLEEEMVSERQKIEAPPTPAAEKLYTTTSTTIL

SEQ ID NO: 26424 - protein, 68 aa, Zea mays subsp. mays
  misc_feature (1)..(68): Ceres Seq. ID no. 13564772
MSAVEAQQQRLTLQRLIALVEAERTYHQRVLEILDKLEEEMVSERQKIEAPPTPAAEKLYTTTSTTIL

SEQ ID NO: 26425 - DNA, 1029 bp, Zea mays subsp. mays
  misc_feature (1)..(1029): Ceres Seq. ID no. 13564872
ctcgcaccaccaccgtcactcaacacagcacaggcagctcgagagagagagagaaagatgtcgtggttcgggcaccaccaccacaaccagccggctcccccggcgtcgggccccaaccaggtgttcaagatcttctgccgcgccaacgagaactactgcctggccgtccgcgacggcgccgtcgtgctggccccggtcaaccccaaggacgaccaccagcactggtacaaggacatgcgcttcagcacccgggtcaaggacgaggaaggcatgccggcgttcgcgctcgtcaacaaggccacggggctcgccatcaagcactccctcggccagtcccacccggtcaagctcgcgcctttcagcccggaccaggaggacgcgtcggtgctgtggacggagagcaaggacgtgggcaagggcttccgctgcatccgcatggtcaacaacacccgcctcaacttcgacgccttccacggcgacaaggaccacggcggcgtgcacgacggcaccaccgtggtgctgtgggagtgggccaagggcgacaaccagagctggaagatcctgccctggggcgacgaggcctacgccgggggcggcancagcgccgccaacgcgccccgcttcggcggcggcgagcccaccgtccgcatntactgcaaggccgacgaagggttcagcgccacggtccgcaacggcgccgtgtgcctcgcgcccaccaacccgcgcgacgagtaccagcactggatcaaggacatgcgccacatcaacagcgtcaaggacgaggaagggtacccggccttcgcgctcgtcaacagggtcaccggcgaggccatcaagcactccctgtgtgtttgtgtttagttccagtcgtttgtgaggaagtcagttatgtttgagtgagaggggtacttcgctcttcggttaactctgtacttgtcatgaggagagttttcatacccggagtgtagaactctgtactgtactcggatccttcctttttcatccaagtgggttttattttatcaaccg

SEQ ID NO: 26426 - protein, 297 aa, Zea mays subsp. mays
  misc_feature (1)..(297): Ceres Seq. ID no. 13564873
  misc_feature (199)..(199): Xaa is any aa, unknown or other
  misc_feature (217)..(217): Xaa is any aa, unknown or other
RTTTVTQHSTGSSREREKDVVVRAPPPQPAGSPGVGPQPGVQDLLPRQRELLPGRPRRRRRAGPGQPQGRPPALVQGHALQHPGQGRGRHAGVRARQQGHGARHQALPRPVPPGQARAFQPGPGGRVGAVDGEQGRGQGLPLHPHGQQHPPQLRRLPRRQGPRRRARRHHRGAVGVGQGRQPELEDPALGRRGLRRGRXQRRQRAPLRRRRAHRPHXLQGRRRVQRHGPQRRRVPRAHQPARRVPALDQGHAPHQQRQGRGRVPGLRARQQGHRRGHQALPVCLCLVPVVCEEVSYV

SEQ ID NO: 26427 - protein, 291 aa, Zea mays subsp. mays
  misc_feature (1)..(291): Ceres Seq. ID no. 13564874
  misc_feature (200)..(200): Xaa is any aa, unknown or other
  misc_feature (217)..(217): Xaa is any aa, unknown or other
SHHHRHSTQHRQLERERERCRGSGTTTTTSRLPRRRAPTRCSRSSAAPTRTTAWPSATAPSCWPRSTPRTTTSTGTRTCASAPGSRTRKACRRSRSSTRPRGSPSSTPSASPTRSSSRLSARTRRTRRCCGRRARTWARASAASAWSTTPASTSTPSTATRTTAACTTAPPWCCGSGPRATTRAGRSCPGATRPTPGAAXAPPTRPASAAASPPSAXTARPTKGSAPRSATAPCASRPPTRATSTSTGSRTCATSTASRTRKGTRPSRSSTGSPARPSSTPCVFVFSSSRL

SEQ ID NO: 26428 - protein, 286 aa, Zea mays subsp. mays
  misc_feature (1)..(286): Ceres Seq. ID no. 13564875
  misc_feature (200)..(200): Xaa is any aa, unknown or other
  misc_feature (217)..(217): Xaa is any aa, unknown or other
LAPPPSLNTAQAARERERKMSWFGHHHHNQPAPPASGPNQVFKIFCRANENYCLAVRDGAVVLAPVNPKDDHQHWYKDMRFSTRVKDEEGMPAFALVNKATGLAIKHSLGQSHPVKLAPFSPDQEDASVLWTESKDVGKGFRCIRMVNNTRLNFDAFHGDKDHGGVHDGTTVVLWEWAKGDNQSWKILPWGDEAYAGGGXSAANAPRFGGGEPTVRXYCKADEGFSATVRNGAVCLAPTNPRDEYQHWIKDMRHINSVKDEEGYPAFALVNRVTGEAIKHSLCVCV

SEQ ID NO: 26429 - protein, 267 aa, Zea mays subsp. mays
  misc_feature (1)..(267): Ceres Seq. ID no. 13564876
  misc_feature (181)..(181): Xaa is any aa, unknown or other
  misc_feature (198)..(198): Xaa is any aa, unknown or other
MSWFGHHHHNQPAPPASGPNQVFKIFCRANENYCLAVRDGAVVLAPVNPKDDHQHWYKDMRFSTRVKDEEGMPAFALVNKATGLAIKHSLGQSHPVKLAPFSPDQEDASVLWTESKDVGKGFRCIRMVNNTRLNFDAFHGDKDHGGVHDGTTVVLWEWAKGDNQSWKILPWGDEAYAGGGXSAANAPRFGGGEPTVRXYCKADEGFSATVRNGAVCLAPTNPRDEYQHWIKDMRHINSVKDEEGYPAFALVNRVTGEAIKHSLCVCV

SEQ ID NO: 26430 - DNA, 495 bp, Zea mays subsp. mays
  misc_feature (1)..(495): Ceres Seq. ID no. 13565414
agcgcccgcaggccgcagctgcagtctgcagagcacagccgtgcgcggtttgcaaccgtaccagcacaagcaccccaggcgggcaggaaacaagcctcctccgctgctccgccgcaatggcgtccccgcgcggccatcgccgggccagcgtgctgcagaaggcggcggcgctcctcctgctcgccctgtcctgctgcggctgcaccggtgccggcgccggtccatcggcgccaaccccgaaggtgccggcggtgatcgtgttcggggactcgacggtggacacgggcaacaacaacgcgatcgggaccatcctgaagagcaacttcccgccgtacgggcgcgacatggccggcggggcccagcccacggggcggttctgcaacgggcgcctgccgccggacttcatctccgaggcgctcggcctgccgccgctggtcccggcctacctcgaccccgcctacggcatccaggacttcgcccgcggcgtctgcttcg

SEQ ID NO: 26431 - protein, 164 aa, Zea mays subsp. mays
  misc_feature (1)..(164): Ceres Seq. ID no. 13565415
RPQAAAAVCRAQPCAVCNRTSTSTPGGQETSLLRCSAAMASPRGHRRASVLQKAAALLLLALSCCGCTGAGAGPSAPTPKVPAVIVFGDSTVDTGNNNAIGTILKSNFPPYGRDMAGGAQPTGRFCNGRLPPDFISEALGLPPLVPAYLDPAYGIQDFARGVCF

SEQ ID NO: 26432 - protein, 164 aa, Zea mays subsp. mays
  misc_feature (1)..(164): Ceres Seq. ID no. 13565416
APAGRSCSLQSTAVRGLQPYQHKHPRRAGNKPPPLLRRNGVPARPSPGQRAAEGGGAPPARPVLLRLHRCRRRSIGANPEGAGGDRVRGLDGGHGQQQRDRDHPEEQLPAVRARHGRRGPAHGAVLQRAPAAGLHLRGARPAAAGPGLPRPRLRHPGLRPRRLL

SEQ ID NO: 26433 - protein, 126 aa, Zea mays subsp. mays
  misc_feature (1)..(126): Ceres Seq. ID no. 13565417
MASPRGHRRASVLQKAAALLLLALSCCGCTGAGAGPSAPTPKVPAVIVFGDSTVDTGNNNAIGTILKSNFPPYGRDMAGGAQPTGRFCNGRLPPDFISEALGLPPLVPAYLDPAYGIQDFARGVCF

SEQ ID NO: 26434 - DNA, 504 bp, Zea mays subsp. mays
  misc_feature (1)..(504): Ceres Seq. ID no. 13565466
atttcgccattgctggcgcagsaacgcaaccgcgagatgttccatttgcgttgcacatacaagtgcaggagttcttgtacttcagagatagatccttagaactcatcgatcaaggtctaagtggtccaattgatgcacaaggattccaaaacgctctatatatgatagacatagggcagaacgatgtaaacgctcttctgtcaaactcgccctatgatcaagttattgccaaattcccaccaattcttgctgagattaaggacgctgtccagactctatatagcaacggtagccgaaacttctggatacatgggacgggggctctgggttgcctgccgcagaagcttgccataccaaggaaaaacgacagcgatcttgatcagtatggctgtctcaagacctataacagagctgcagttgcgttcaacgccgcgctgggcagcctctgcgacgagctgagtgcgcagatgaaagacgcgacgcttgtgtacacggacctgttcc

SEQ ID NO: 26435 - protein, 167 aa, Zea mays subsp. mays
  misc_feature (1)..(167): Ceres Seq. ID no. 13565467
  misc_feature (7)..(7): Xaa is any aa, unknown or other
FAIAGAXTQPRDVPFALHIQVQEFLYFRDRSLELIDQGLSGPIDAQGFQNALYMIDIGQNDVNALLSNSPYDQVIAKFPPILAEIKDAVQTLYSNGSRNFWIHGTGALGCLPQKLAIPRKNDSDLDQYGCLKTYNRAAVAFNAALGSLCDELSAQMKDATLVYTDLF

SEQ ID NO: 26436 - protein, 114 aa, Zea mays subsp. mays
  misc_feature (1)..(114): Ceres Seq. ID no. 13565468
MIDIGQNDVNALLSNSPYDQVIAKFPPILAEIKDAVQTLYSNGSRNFWIHGTGALGCLPQKLAIPRKNDSDLDQYGCLKTYNRAAVAFNAALGSLCDELSAQMKDATLVYTDLF

SEQ ID NO: 26437 - DNA, 1774 bp, Zea mays subsp. mays
  misc_feature (1)..(1774): Ceres Seq. ID no. 13565630
atccatctatccatcatcaccagctagcacctcctttcccacgactcccgagcgctctgcgtgtggcgcgcggcagcatggcgactgcgaacgggagcagcaaggggtcgttcgaggtgcccaaggtggaggtcaggttcaccaagctcttcatcgacggcaagttcgtcgacgccgtctccggcaagacgttcgagacccgggaccctcgcaccggcgaggtgatcgccagcatcgcggagggaggcaaggccgacgtcgacctcgccgtcaaggccgcccgggaggccttcgacaacgggccctggcccaggatgacgggatacgagcgtggtcggatcctccacaggttcgcggacctgatcgacgagcacgtggaggagctggcggcgctggacacggtggacgccggcaagctgttcgccgtgggcaaggcgcgggacatcccgggcgccgcgcacctgctgcgctactacgccggcgccgccgacaaggtgcacggcgcgacgctcaagatggcgcagcggatgcacgggtacacgctcaaggagcccgtgggcgtggtgggccacatcgtgccctggaactaccccaccaccatgttcttcttcaaggtagggcccgcgctcgccgccggctgcgccgtcgtcgtcaagcccgccgagcagacgccgctgtccgcgctcttctacgcgcacctcgccagggaggccggcgtcccagccggcgtgctcaacgtcgtgccgggattcgggcccacggccggggccgccgtcgccgcccacatggacgtcgacaaggtcagcttcaccgggtccacggaggtcggccgcctcgtcatgagggccgcggccgagagcaacctcaagcccgtgtcgctcgagctgggcggcaagtctcccgtcatcgtcttcgacgacgccgacctcgacatggccgttaacctcgtcaacttcgccacctacaccaacaagggcgagatctgtgtggccggcacacgcatctacgtgcaggaagggatctacgacgagttcgtgaagaaggccgccgagctcgccagcaagtccgtggtcggagacccgttcaacccgagtgtcagccagggcccccaggttgacaaggaccagtacgagaaggtcctcaggtacattgacatcggaaagcgcgaaggcgccacgctggtcaccggagggaagccctgcggcgacaataagggctactacatcgagcccaccatcttcacggacgtcaaggacgacatgacgatcgcacaggatgaaatctttgggccggtgatggctctcatgaaattcaagaccgtggaggaggtgatccagaaagcgaacaacacccggtacggcctggccgccggcatcgtgaccaagaacatcgacgtcgccaacaccgtgtcgcggtccatccgcgccggcgccatctggatcaactgctacttcgcgttcgacccggacgcgccgttcggcgggtacaagatgagcgggttcggcaaggacatgggcatggacgcgctcgacaagtacctgcagaccaagaccgtcgtcactccgctgtacaacactccatggctctgaccgaccgacctctcatcctgtccgatgaacagttcaacatcacaaacaagaagaaacatgtcttgtaagatactcctccaaaggatcgggtgcctgtagctgtactcttacacctgcatggattgatgtcttgatgatgtagtgcaatgtagcattcagaacaataaagacatgtttcggactgc

SEQ ID NO: 26438 - protein, 528 aa, Zea mays subsp. mays
  misc_feature (1)..(528): Ceres Seq. ID no. 13565631
PSIHHHQLAPPFPRLPSALRVARGSMATANGSSKGSFEVPKVEVRFTKLFIDGKFVDAVSGKTFETRDPRTGEVIASIAEGGKADVDLAVKAAREAFDNGPWPRMTGYERGRILHRFADLIDEHVEELAALDTVDAGKLFAVGKARDIPGAAHLLRYYAGAADKVHGATLKMAQRMHGYTLKEPVGVVGHIVPWNYPTTMFFFKVGPALAAGCAVVVKPAEQTPLSALFYAHLAREAGVPAGVLNVVPGFGPTAGAAVAAHMDVDKVSFTGSTEVGRLVMRAAAESNLKPVSLELGGKSPVIVFDDADLDMAVNLVNFATYTNKGEICVAGTRIYVQEGIYDEFVKKAAELASKSVVGDPFNPSVSQGPQVDKDQYEKVLRYIDIGKREGATLVTGGKPCGDNKGYYIEPTIFTDVKDDMTIAQDEIFGPVMALMKFKTVEEVIQKANNTRYGLAAGIVTKNIDVANTVSRSIRAGAIWINCYFAFDPDAPFGGYKMSGFGKDMGMDALDKYLQTKTVVTPLYNTPWL

SEQ ID NO: 26439 - protein, 503 aa, Zea mays subsp. mays
  misc_feature (1)..(503): Ceres Seq. ID no. 13565632
MATANGSSKGSFEVPKVEVRFTKLFIDGKFVDAVSGKTFETRDPRTGEVIASIAEGGKADVDLAVKAAREAFDNGPWPRMTGYERGRILHRFADLIDEHVEELAALDTVDAGKLFAVGKARDIPGAAHLLRYYAGAADKVHGATLKMAQRMHGYTLKEPVGVVGHIVPWNYPTTMFFFKVGPALAAGCAVVVKPAEQTPLSALFYAHLAREAGVPAGVLNVVPGFGPTAGAAVAAHMDVDKVSFTGSTEVGRLVMRAAAESNLKPVSLELGGKSPVIVFDDADLDMAVNLVNFATYTNKGEICVAGTRIYVQEGIYDEFVKKAAELASKSVVGDPFNPSVSQGPQVDKDQYEKVLRYIDIGKREGATLVTGGKPCGDNKGYYIEPTIFTDVKDDMTIAQDEIFGPVMALMKFKTVEEVIQKANNTRYGLAAGIVTKNIDVANTVSRSIRAGAIWINCYFAFDPDAPFGGYKMSGFGKDMGMDALDKYLQTKTVVTPLYNTPWL

SEQ ID NO: 26440 - protein, 424 aa, Zea mays subsp. mays
  misc_feature (1)..(424): Ceres Seq. ID no. 13565633
MTGYERGRILHRFADLIDEHVEELAALDTVDAGKLFAVGKARDIPGAAHLLRYYAGAADKVHGATLKMAQRMHGYTLKEPVGVVGHIVPWNYPTTMFFFKVGPALAAGCAVVVKPAEQTPLSALFYAHLAREAGVPAGVLNVVPGFGPTAGAAVAAHMDVDKVSFTGSTEVGRLVMRAAAESNLKPVSLELGGKSPVIVFDDADLDMAVNLVNFATYTNKGEICVAGTRIYVQEGIYDEFVKKAAELASKSVVGDPFNPSVSQGPQVDKDQYEKVLRYIDIGKREGATLVTGGKPCGDNKGYYIEPTIFTDVKDDMTIAQDEIFGPVMALMKFKTVEEVIQKANNTRYGLAAGIVTKNIDVANTVSRSIRAGAIWINCYFAFDPDAPFGGYKMSGFGKDMGMDALDKYLQTKTVVTPLYNTPWL

SEQ ID NO: 26441 - DNA, 540 bp, Zea mays subsp. mays
  misc_feature (1)..(540): Ceres Seq. ID no. 13566575
tgatgagatctctggtggtgaatatctgaagatcaaatgctataatgcagatatgtttggtgatgaaagcattggtagtgcgagagttaatttggagggacttttagagggtgctacccgtgatgtttgggtcccacttgaaaaagtagattcaggagagataaggcttgaaatagaggcaataaagaatgatcacaacaatagcttgcagagctcaagcagtaaagctggatctggttggattgagctagtcataatcgaagccagagatcttgttgctgcggatctgagaggcactagtgatccttatgttagggtgcactatgggagcaagaagaaacgaaccaaggtcatttacaaaacactgtctccacagtggaaccagacattcgagttcctggaaaccggagaacccctgattttgcatgtgaaggaccacaacgccgtccttccaaccgccagtatcggccattgcaccgtcgagtacagcatgctgtctccaaaccaatccgctgagaaatggataccgctccaaggcgt

SEQ ID NO: 26442 - protein, 179 aa, Zea mays subsp. mays
  misc_feature (1)..(179): Ceres Seq. ID no. 13566576
DEISGGEYLKIKCYNADMFGDESIGSARVNLEGLLEGATRDVWVPLEKVDSGEIRLEIEAIKNDHNNSLQSSSSKAGSGWIELVIIEARDLVAADLRGTSDPYVRVHYGSKKKRTKVIYKTLSPQWNQTFEFLETGEPLILHVKDHNAVLPTASIGHCTVEYSMLSPNQSAEKWIPLQG

SEQ ID NO: 26443 - protein, 162 aa, Zea mays subsp. mays
  misc_feature (1)..(162): Ceres Seq. ID no. 13566577
MFGDESIGSARVNLEGLLEGATRDVWVPLEKVDSGEIRLEIEAIKNDHNNSLQSSSSKAGSGWIELVIIEARDLVAADLRGTSDPYVRVHYGSKKKRTKVIYKTLSPQWNQTFEFLETGEPLILHVKDHNAVLPTASIGHCTVEYSMLSPNQSAEKWIPLQG

SEQ ID NO: 26444 - DNA, 1406 bp, Zea mays subsp. mays
  misc_feature (1)..(1406): Ceres Seq. ID no. 13566611
agttcaggctgatgctgcatttgctgcaaaagagtattacatagcagcatccttctatgcaaagataaattacatcctgtcgtttgaggagatcagcctgaaatttatatcaataggtgagcaggatgctctcagaactttcttattgagaaggctcgataacctcaccaaagaggacaagatgcagattacgatgatctcaacttgggctactgagctgtacttagacaagattaatcgtctcctattggaggataccactgtcaccattataaattcagtagcagagcctaatagctctgaatatcgttcgatagtaaatgaattccgtgcttttcttagtgacagcaaagatgtattagatgaagcaacaacaatgaaactactggaaagttacggaagagtggatgagcttgtgtactttgccggtttgaaggagcagtatgaaattgtagttcatcattacattcagcaaggagaagcaagaaaagcattggaagtgcttcaacggcgcaatgttcctgtagaccttgngtataaatttgctccagatttgatcatgttagatgcttatgagactgttgaatcatggatgatggcgagaaacaggttgaatccagggaaactcataccagcaatgatgcgttatgtgaagcganccacatgcaaagaatgaaacacatgaagttatcaaatacttggaattttgtgtgaaagatttgaacaatgtggaccctggagtgcataatctattgctatctctatatgccaagaaggaggatgaatcccagcttttgcaatttctcgacacaaaatttggtaaaggacaaacaaatggccctgacttcttttacgatccaaagtatgctctccgcctatgtcttcaagagaagagaatgcgtgcttgtgttcgtatttatagcatgatgtccatgcatgcggaagctgtggcacttgctttgaaggtggatttggaacttgcaaaggcagaagctgacaaagtagaagacgatgaagagcttaggaagaagctgtggcttaaggttgctaaacatgtcatcgagcaagagaaaggtgtcaagagagagaatataaagaaagcaatagaattcctttcggagaccaataacttgttaaagattgaggatatcttaccattcttcccagacttcgtattgattgacgatttcaaagaggaaatatgcaaatctctgaaggactacaacagccagatttagcagctcaagcaggagatggatgatgccacacgtggggcagataatatcagaagtgatattggtgccctcgctcagagatatacagtaattgaccgtgagcaggattgtggggtttgccggcgcaaaatattgactgttggagggttgcaccaggtagggagaagctat

SEQ ID NO: 26445 - protein, 224 aa, Zea mays subsp. mays
  misc_feature (1)..(224): Ceres Seq. ID no. 13566612
  misc_feature (178)..(178): Xaa is any aa, unknown or other
  misc_feature (220)..(220): Xaa is any aa, unknown or other
VQADAAFAAKEYYIAASFYAKINYILSFEEISLKFISIGEQDALRTFLLRRLDNLTKEDKMQITMISTWATELYLDKINRLLLEDTTVTIINSVAEPNSSEYRSIVNEFRAFLSDSKDVLDEATTMKLLESYGRVDELVYFAGLKEQYEIVVHHYIQQGEARKALEVLQRRNVPVDLXYKFAPDLIMLDAYETVESWMMARNRLNPGKLIPAMMRYVKRXTCKE

SEQ ID NO: 26446 - protein, 164 aa, Zea mays subsp. mays
  misc_feature (1)..(164): Ceres Seq. ID no. 13566613
  misc_feature (118)..(118): Xaa is any aa, unknown or other
  misc_feature (160)..(160): Xaa is any aa, unknown or other
MQITMISTWATELYLDKINRLLLEDTTVTIINSVAEPNSSEYRSIVNEFRAFLSDSKDVLDEATTMKLLESYGRVDELVYFAGLKEQYEIVVHHYIQQGEARKALEVLQRRNVPVDLXYKFAPDLIMLDAYETVESWMMARNRLNPGKLIPAMMRYVKRXTCKE

SEQ ID NO: 26447 - protein, 160 aa, Zea mays subsp. mays
  misc_feature (1)..(160): Ceres Seq. ID no. 13566614
  misc_feature (114)..(114): Xaa is any aa, unknown or other
  misc_feature (156)..(156): Xaa is any aa, unknown or other
MISTWATELYLDKINRLLLEDTTVTIINSVAEPNSSEYRSIVNEFRAFLSDSKDVLDEATTMKLLESYGRVDELVYFAGLKEQYEIVVHHYIQQGEARKALEVLQRRNVPVDLXYKFAPDLIMLDAYETVESWMMARNRLNPGKLIPAMMRYVKRXTCKE

SEQ ID NO: 26448 - DNA, 2116 bp, Zea mays subsp. mays
  misc_feature (1)..(2116): Ceres Seq. ID no. 13566658
aacacaagaagaaactgacggaggagcggagcggagccgagccacggccagtgccaggagcgaaaataaaaaggggtaggagttcctcctccccaacctcacaagtaaagcagcagcagcagaccttcttgacctagcaagcaatggggccgccgttcctcgccgtcgccgtcatcgtcgccttcctggccgccgccgcgcaggccgccgaccccttcgccttcttcgactgggacgtctcctacatcaccgcctcccctctcggcgtcccgcagcaggtcattgcagtcaacaagcagttcccaggccctatcatgaacgtcactaccaactacaatgtggtcgtcaatgtgctcaacagcttagacgagcccctgctcatcacttgggatgggatccagcagcgcaagaattgctggcaggatggggttctcggcaccacctgccccataccgccaggttggaactggacctacaacttccaggtcaaggaccagattggcagcttcttctacttcccaccccttggtatgcagcgtgccgcgggggggttcggaggtatcactgtcaacaaccgcgcggtcatctcggtcccattcgacacgcccgatggggacatcacgctcttcatcggggactggtacaagatgaaccacacgcacctgaggaagatgctcgacgacggcaaggaactggggatgccagacggtgttttgatgaatggcaaggggccatataggtataatgactcgctagtgccagatggcattgagcacgagactatcaaagttgagccaggaaaaacataccgtttccgtgtccacaatgttggtgtctccacaagcttgaacttacggattcagaatcacaacatggcccttgttgaaacagaaggttcatacacgatgaagcagaattttactaatctcgacatccacgtgggccagtcttactcatttctggtcactatggatcagaacgcaagcagtgattattacatcgtggccagtgctaggtttgtgaacgaatcgctttggaccagagtcaccggtgttgcaattttgcaatattcaaattcaaagggaaaagcatctggtcctcttcctgatccaccaaatgatgagtatgacaaaactttttcaatgaaccaggcacgttccatcaggatgaacgtgagcactggtgctgctcgtccgaatcctcaaggatcatttcactatgggtctatcaatgtgagccaagtttacaagctgaggaatgaaccacctgttatcatcaatgggaagaaacggactacactgagtggtatctcttattccccacccgacactcctctaaggttggcagatctgtacgacaagaaggatgtctacacacttgacttccctacaatgccaattgatggaccgccagtgatcagaacatctgtcattaactccacatacaagaactttttggaaattgtatttcagaacaatgactcaactgtccagacctaccacattgatggatatgcattctgggttgtaggaatggactatggcgagtggactgagaatagccgtgggacttacaacaagtgggatggtgtttctcgttgcacgactcangtgtttccgggagcatggactgctgtgatgctgtcacttgacagcccaggattttggaatgtacggacagaaaacctggacacgtggtatctgggtcaggagacttacatcagggtggtggatccaaatggaggctataatgttactgagatggtggctccagacaacatgctctactgtggcctcctcaaggataaacagaaggctcagaagcctcatggttcgaggtcatcagcctctgcagcaaaactgaactatcatgtgctcgcggctttggtctctttggtggtagccttggtgttgggccattgacaagaactgcctccagcttgtggtcagctgctgtttgcaggttgattaggcgtttgacagaaatactgttagtaggtcagtcgaattcgtaggttccattcatgatttgtctggcaattgagaaaaaaaaatgctgtgccattgcgcatcttcgtccatcggaattgattaacatgctgaagaactgtgcagtt

SEQ ID NO: 26449 - protein, 592 aa, Zea mays subsp. mays
  misc_feature (1)..(592): Ceres Seq. ID no. 13566659
  misc_feature (489)..(489): Xaa is any aa, unknown or other
MGPPFLAVAVIVAFLAAAAQAADPFAFFDWDVSYITASPLGVPQQVIAVNKQFPGPIMNVTTNYNVVVNVLNSLDEPLLITWDGIQQRKNCWQDGVLGTTCPIPPGWNWTYNFQVKDQIGSFFYFPPLGMQRAAGGFGGITVNNRAVISVPFDTPDGDITLFIGDWYKMNHTHLRKMLDDGKELGMPDGVLMNGKGPYRYNDSLVPDGIEHETIKVEPGKTYRFRVHNVGVSTSLNLRIQNHNMALVETEGSYTMKQNFTNLDIHVGQSYSFLVTMDQNASSDYYIVASARFVNESLWTRVTGVAILQYSNSKGKASGPLPDPPNDEYDKTFSMNQARSIRMNVSTGAARPNPQGSFHYGSINVSQVYKLRNEPPVIINGKKRTTLSGISYSPPDTPLRLADLYDKKDVYTLDFPTMPIDGPPVIRTSVINSTYKNFLEIVFQNNDSTVQTYHIDGYAFWVVGMDYGEWTENSRGTYNKWDGVSRCTTXVFPGAWTAVMLSLDSPGFWNVRTENLDTWYLGQETYIRVVDPNGGYNVTEMVAPDNMLYCGLLKDKQKAQKPHGSRSSASAAKLNYHVLAALVSLVVALVLGH

SEQ ID NO: 26450 - protein, 535 aa, Zea mays subsp. mays
  misc_feature (1)..(535): Ceres Seq. ID no. 13566660
  misc_feature (432)..(432): Xaa is any aa, unknown or other
MNVTTNYNVVVNVLNSLDEPLLITWDGIQQRKNCWQDGVLGTTCPIPPGWNWTYNFQVKDQIGSFFYFPPLGMQRAAGGFGGITVNNRAVISVPFDTPDGDITLFIGDWYKMNHTHLRKMLDDGKELGMPDGVLMNGKGPYRYNDSLVPDGIEHETIKVEPGKTYRFRVHNVGVSTSLNLRIQNHNMALVETEGSYTMKQNFTNLDIHVGQSYSFLVTMDQNASSDYYIVASARFVNESLWTRVTGVAILQYSNSKGKASGPLPDPPNDEYDKTFSMNQARSIRMNVSTGAARPNPQGSFHYGSINVSQVYKLRNEPPVIINGKKRTTLSGISYSPPDTPLRLADLYDKKDVYTLDFPTMPIDGPPVIRTSVINSTYKNFLEIVFQNNDSTVQTYHIDGYAFWVVGMDYGEWTENSRGTYNKWDGVSRCTTXVFPGAWTAVMLSLDSPGFWNVRTENLDTWYLGQETYIRVVDPNGGYNVTEMVAPDNMLYCGLLKDKQKAQKPHGSRSSASAAKLNYHVLAALVSLVVALVLGH

SEQ ID NO: 26451 - protein, 463 aa, Zea mays subsp. mays
  misc_feature (1)..(463): Ceres Seq. ID no. 13566661
  misc_feature (360)..(360): Xaa is any aa, unknown or other
MQRAAGGFGGITVNNRAVISVPFDTPDGDITLFIGDWYKMNHTHLRKMLDDGKELGMPDGVLMNGKGPYRYNDSLVPDGIEHETIKVEPGKTYRFRVHNVGVSTSLNLRIQNHNMALVETEGSYTMKQNFTNLDIHVGQSYSFLVTMDQNASSDYYIVASARFVNESLWTRVTGVAILQYSNSKGKASGPLPDPPNDEYDKTFSMNQARSIRMNVSTGAARPNPQGSFHYGSINVSQVYKLRNEPPVIINGKKRTTLSGISYSPPDTPLRLADLYDKKDVYTLDFPTMPIDGPPVIRTSVINSTYKNFLEIVFQNNDSTVQTYHIDGYAFWVVGMDYGEWTENSRGTYNKWDGVSRCTTXVFPGAWTAVMLSLDSPGFWNVRTENLDTWYLGQETYIRVVDPNGGYNVTEMVAPDNMLYCGLLKDKQKAQKPHGSRSSASAAKLNYHVLAALVSLVVALVLGH

SEQ ID NO: 26452 - DNA, 1980 bp, Zea mays subsp. mays
  misc_feature (1)..(1980): Ceres Seq. ID no. 13567373
ctcacgggcggcggctcgcgtgtcccgccagctagccgcacactttcctctctttcagtttcgcttcgcagacttcgcttgcgcttcacccaaccttaaccgcaacggttcccgtgcggagtttttattatgaatgaatgaatacgaattcagagcacgagcgccgttgattggccgctactagtactaccagctaggccactgctcctctgctacccgctaacctcgcgccggagtcgtcgcccacgatggcctaccgatccgcagtgctcttgcccgccctcctactggccgtcgccgtcgtcgtggcctccgccgccgccggggacgggaggtggcgggaggagcaggcgcgggaccgggtgccgcgggtgccggggcaggccttcaacaccagcttcgcgcagtacgccgggtacgtgaccgtcagcgagcagcgcggcgctgcgctcttctactggttctttgaggccgagaaggacccggggtccaagcccctcgtgctctggctcaacggagggcctggatgctcgtccattgcttttggacttggagaagaagtaggacctttccatgttaacgcagatgggaagggggtccatgtcaatccttattcttggaacaaagttgcaaatttactgttccttgattcacctgttggtgttggttactcatattcaaacacctctgatgatgctttaaaaaatggggatgcaagaactgccacggattcattggcattcttactgaagtggcttgaacgctttcctcaatacaaggaacgcgaattttatttgacaggggagagttatgctggtcactatgttcctcaactggctcaagccataaaaaggcaccatgaggctactggtgacaaatcaattaatctaaagggctatatggtagggaatgctctcactgatgatttccatgaccactatggaatatttcaattcatgtggactactggcctgatctctgatcaaacatacaagctgctgaatgttttctgtgactacgagtccttcgtgcattcgtctccacagtgtgataagattatggatattgctagcactgaagctggaaacattgattcatatagcatcttcacacctacatgtcatgcatcttttgcctcttcaaagaacaaagtgatgaaaaggctacattctgctggaaaaatgggagaacagtatgatccatgcactgagaagcattcaactgtatacttcaatctagctgaggttcagaaggcacttcatgttaatacagtcattggaaaatcaaaatgggagacttgcagtgaagctgttaatactcattggggggattgcgaaagatctgtgctgcatatctatcatgaacttatacagtatggcctccgtatatgggtgttcagtggagatacagatgcagtgattccagtgacttcaactagatacagcatcgatgctctcaagcttccaacaataactccatggcatgcttggtacgacgatgacggtgaggtcggtggatggacccaagggtacaggggactcaattttgtgaccgtgaggggagcaggtcacgaagtccctcttcatcgacccaaacaggccctcacgctaatcaaatcgttcttgactgggagcccaatgcctgtgcaatccagcacacacagcaacatgtaatccgtgttgttgcaactgattcacgagatgaatgaacatcccgaagcacccaagtcagccagttgtccaacccggcttgttctgcaacttgctgtagttgtttatgtatcagagctaccggtgccggttaccgcagcagccgtgcttttgtcggccctgttggtgcttgttgcagtaccagttatcccctaaggcaggggacagaaactgcggaatagtttttgtttgcattgacgtgacagcactgtaatcttaaacatcgtaccatagtcctttctatgacaaaggtgtggtttctgatgtctgc

SEQ ID NO: 26453 - protein, 474 aa, Zea mays subsp. mays
  misc_feature (1)..(474): Ceres Seq. ID no. 13567374
MAYRSAVLLPALLLAVAVVVASAAAGDGRWREEQARDRVPRVPGQAFNTSFAQYAGYVTVSEQRGAALFYWFFEAEKDPGSKPLVLWLNGGPGCSSIAFGLGEEVGPFHVNADGKGVHVNPYSWNKVANLLFLDSPVGVGYSYSNTSDDALKNGDARTATDSLAFLLKWLERFPQYKEREFYLTGESYAGHYVPQLAQAIKRHHEATGDKSINLKGYMVGNALTDDFHDHYGIFQFMWTTGLISDQTYKLLNVFCDYESFVHSSPQCDKIMDIASTEAGNIDSYSIFTPTCHASFASSKNKVMKRLHSAGKMGEQYDPCTEKHSTVYFNLAEVQKALHVNTVIGKSKWETCSEAVNTHWGDCERSVLHIYHELIQYGLRIWVFSGDTDAVIPVTSTRYSIDALKLPTITPWHAWYDDDGEVGGWTQGYRGLNFVTVRGAGHEVPLHRPKQALTLIKSFLTGSPMPVQSSTHSNM

SEQ ID NO: 26454 - protein, 257 aa, Zea mays subsp. mays
  misc_feature (1)..(257): Ceres Seq. ID no. 13567375
MVGNALTDDFHDHYGIFQFMWTTGLISDQTYKLLNVFCDYESFVHSSPQCDKIMDIASTEAGNIDSYSIFTPTCHASFASSKNKVMKRLHSAGKMGEQYDPCTEKHSTVYFNLAEVQKALHVNTVIGKSKWETCSEAVNTHWGDCERSVLHIYHELIQYGLRIWVFSGDTDAVIPVTSTRYSIDALKLPTITPWHAWYDDDGEVGGWTQGYRGLNFVTVRGAGHEVPLHRPKQALTLIKSFLTGSPMPVQSSTHSNM

SEQ ID NO: 26455 - protein, 238 aa, Zea mays subsp. mays
  misc_feature (1)..(238): Ceres Seq. ID no. 13567376
MWTTGLISDQTYKLLNVFCDYESFVHSSPQCDKIMDIASTEAGNIDSYSIFTPTCHASFASSKNKVMKRLHSAGKMGEQYDPCTEKHSTVYFNLAEVQKALHVNTVIGKSKWETCSEAVNTHWGDCERSVLHIYHELIQYGLRIWVFSGDTDAVIPVTSTRYSIDALKLPTITPWHAWYDDDGEVGGWTQGYRGLNFVTVRGAGHEVPLHRPKQALTLIKSFLTGSPMPVQSSTHSNM

SEQ ID NO: 26456 - DNA, 492 bp, Zea mays subsp. mays
  misc_feature (1)..(492): Ceres Seq. ID no. 13568253
ccggttttgtttgacgatagttgagtagacccctggcaatccacccttgcacggttcttttaggttttttgttcgtcatttgcagctgccattctgcctaaattgtttaagcgaacctcctccggggctctctttgttgaagttcgccacggtggcccatgtcagtgtgatgtaaggttggagttggagctgcaatgacataaaacatagaagccttgatgcatgattgaatacgaaaacaatgagcaggcgcaacagccgtaccatctatgtaggcaatctccctggggacatccgtgagagggaggttgaggatctcttctacaagtatggccgtattttggatattgacttgaaaatacctccgagacctcctggatacgcattcgttgagtttgaggatccacgtgatgctgatgatgcaatttatggccgtgatgggtataactttgatggctacaggttgagggttgaattagctcatggtggcag

SEQ ID NO: 26457 - protein, 83 aa, Zea mays subsp. mays
  misc_feature (1)..(83): Ceres Seq. ID no. 13568254
MSRRNSRTIYVGNLPGDIREREVEDLFYKYGRILDIDLKIPPRPPGYAFVEFEDPRDADDAIYGRDGYNFDGYRLRVELAHGG

SEQ ID NO: 26458 - DNA, 472 bp, Zea mays subsp. mays
  misc_feature (1)..(472): Ceres Seq. ID no. 13568255
caaagaggggagacccgtttatattgaaaggcttggaaaggttgaccctaggcaaacttatgaatgtyacaacsaatkggrwycgatatgtgcgataccatgtgaaggagtttgagaggagcttcttgattaaatttccagcttgctctgttgctgcaaaaaggcacattgattccagcacaacaattctggatgtccagggcgtgggtttgaaaaatttcagcaaaactgcacgtgaattaattcagcgactgcagaaaattgacaatgataactacccagagactctataccaaatgtttattgtcaatgctggtccgggtttccggctactatggaacactgtgaagtcctttcttgatcccaaaactaccgccaagatacatgttcttgggaacaaataccaaagtaagctgcttgaaataattgacgccagtgaattgccggaattccttggtggcacttgtacctg

SEQ ID NO: 26459 - protein, 156 aa, Zea mays subsp. mays
  misc_feature (1)..(156): Ceres Seq. ID no. 13568256
  misc_feature (22)..(22): Xaa is any aa, unknown or other
  misc_feature (24)..(24): Xaa is any aa, unknown or other
  misc_feature (26)..(26): Xaa is any aa, unknown or other
  misc_feature (27)..(27): Xaa is any aa, unknown or other
KRGDPFILKGLERLTLGKLMNXTXNXXRYVRYHVKEFERSFLIKFPACSVAAKRHIDSSTTILDVQGVGLKNFSKTARELIQRLQKIDNDNYPETLYQMFIVNAGPGFRLLWNTVKSFLDPKTTAKIHVLGNKYQSKLLEIIDASELPEFLGGTCT

SEQ ID NO: 26460 - protein, 137 aa, Zea mays subsp. mays
  misc_feature (1)..(137): Ceres Seq. ID no. 13568257
  misc_feature (3)..(3): Xaa is any aa, unknown or other
  misc_feature (5)..(5): Xaa is any aa, unknown or other
  misc_feature (7)..(7): Xaa is any aa, unknown or other
  misc_feature (8)..(8): Xaa is any aa, unknown or other
MNXTXNXXRYVRYHVKEFERSFLIKFPACSVAAKRHIDSSTTILDVQGVGLKNFSKTARELIQRLQKIDNDNYPETLYQMFIVNAGPGFRLLWNTVKSFLDPKTTAKIHVLGNKYQSKLLEIIDASELPEFLGGTCT

SEQ ID NO: 26461 - DNA, 665 bp, Zea mays subsp. mays
  misc_feature (1)..(665): Ceres Seq. ID no. 13568486
gcttgctcccaagatcaagcgcctcccgcctccagcactctaactcaggggacacgatcgccatggccgccacatcgaccgccgccgccgtgctgtccccgccgtccgtggccgggctccgcctggcgccgtctcccggccgggcgcgcgtgtcgttccgcgcggcgccgggcgccggcgcggcggtccgtggcggcgcgcgcggagctgagctcggcgctggtgatcagcctgagcacgggcgtgtcgctcttcctgggccgcttcgtcttcttcaacttccagcgggagaacgtggcgaagcaggtgcccgcgcagaacggcaagacgcacttcgacgccggcgacgagcgcgccaaggagttcgcggccctgctcaagtccaacgaccccgtgggcttcaacctcgtcgacgtcctccgcctggggctcgctcggccacatcgtcgcctactacatcctcgccacctccagcaacggatacgaccccaacttcttntgagcggtcgtcgaggatgtattctacagacanccgtgtgcgtgcgtgtgtgcttgtcatgtatccgatcaaagtttggttaatttggacaagtagtgcaactgcagaataattggtatttgtatagtgcaccatgccaacatgaatttgatctgtctctgtcttc

SEQ ID NO: 26462 - protein, 202 aa, Zea mays subsp. mays
  misc_feature (1)..(202): Ceres Seq. ID no. 13568487
  misc_feature (166)..(166): Xaa is any aa, unknown or other
  misc_feature (177)..(177): Xaa is any aa, unknown or other
LLPRSSASRLQHSNSGDTIAMAATSTAAAVLSPPSVAGLRLAPSPGRARVSFRAAPGAGAAVRGGARGAELGAGDQPEHGRVALPGPLRLLQLPAGERGEAGARAERQDALRRRRRARQGVRGPAQVQRPRGLQPRRRPPPGARSATSSPTTSSPPPATDTTPTSXERSSRMYSTDXRVRACVLVMYPIKVWLIWTSSATAE

SEQ ID NO: 26463 - protein, 193 aa, Zea mays subsp. mays
  misc_feature (1)..(193): Ceres Seq. ID no. 13568488
  misc_feature (167)..(167): Xaa is any aa, unknown or other
  misc_feature (178)..(178): Xaa is any aa, unknown or other
ACSQDQAPPASSTLTQGTRSPWPPHRPPPPCCPRRPWPGSAWRRLPAGRACRSARRRAPARRSVAARAELSSALVISLSTGVSLFLGRFVFFNFQRENVAKQVPAQNGKTHFDAGDERAKEFAALLKSNDPVGFNLVDVLRLGLARPHRRLLHPRHLQQRIRPQLLXSGRRGCILQTXVCVRVCLSCIRSKFG

SEQ ID NO: 26464 - protein, 182 aa, Zea mays subsp. mays
  misc_feature (1)..(182): Ceres Seq. ID no. 13568489
  misc_feature (146)..(146): Xaa is any aa, unknown or other
  misc_feature (157)..(157): Xaa is any aa, unknown or other
MAATSTAAAVLSPPSVAGLRLAPSPGRARVSFRAAPGAGAAVRGGARGAELGAGDQPEHGRVALPGPLRLLQLPAGERGEAGARAERQDALRRRRRARQGVRGPAQVQRPRGLQPRRRPPPGARSATSSPTTSSPPPATDTTPTSXERSSRMYSTDXRVRACVLVMYPIKVWLIWTSSATAE

SEQ ID NO: 26465 - DNA, 1446 bp, Zea mays subsp. mays
  misc_feature (1)..(1446): Ceres Seq. ID no. 13569613
ggctgccgcatttattatattggtttggtacttggtagtttggtgacgctgaggcctcgtccccgatcagacttgttcggcctcttcgacggcgtgcccgtctccccgggctcattcgccatgcattcctcagcctccgcgagaggaggacgagggctcctcttgccggcggctgcggcggcggttgtggtgctactgttgggtgcagtggcgccagcggcgggttgctatccgcgcgtgttcaacttcggggactctctggcggacacgggcaactacccgttcgtctatggcaacgactcagccaagctccggccaccctacggcgagaccttcttccaccgcgccaccgggcgcgcctccaacgggcgcctcgtggtcgacttcatcgcggacacgctcggcctcccgttcgtgcgaccgtatctgagcggacggagcgcggaggacttcgcgggcggggccaacttcgccgtgggcggcgccacggcgctcagcccggacttcttccgtgcaagggggttccacaacatgggaaaccgagtggacctcgacatggagatgaagtggttccgcggcctgctcgacctactctgccccggcaacctcgccggttgctcggatatgatgaaccaatctctcttcttagttggagaaatcgggggcaatgactacaacggacctcttctttctggagttcccttcgaggaaattcgcgccatcactccgagtgttgttgcgaaaatttcttctacaatcagcgaattgattcagctaggagccaagactcttgtggttccaggaaaccttcctattggatgtgtcccaaaatatctgatgatattcaagagcaataagaaagaggattatgatccacagacaggttgtcttagatggatgaacgagttctcacagtaccacaacaagcttcttgtggagcagctcaagaagcttcgcaggctccatcctggagtaaccatcatctatgctgattactatggagctgctatggaaatattcctttcccctgaacgatatgggatcgaatatcccctagtggcttgctgtggtgcagaaggaccctacggtgtgtccccaactacaagctgtggattgggagaatataagctgtgcgataatccagaaaggtatggatcatgggatggcctccatccaacagaatctgcatacaaggtcatcgctatgggcctgctactaggttcctatacaagaccgccaatcgcttccaccaccacttcatgtccacagcttatggagctcggctcttctgctgaatacaaacgcctctacgacctgtaataatttatgtaattatattttattgtatgtactccctcgcccacttcaataagtcccattttgcgagtacatgtactttgtaacttttaactaataacttatcaaactagctactatatatttgtt

SEQ ID NO: 26466 - protein, 439 aa, Zea mays subsp. mays
  misc_feature (1)..(439): Ceres Seq. ID no. 13569614
GCRIYYIGLVLGSLVTLRPRPRSDLFGLFDGVPVSPGSFAMHSSASARGGRGLLLPAAAAAVVVLLLGAVAPAAGCYPRVFNFGDSLADTGNYPFVYGNDSAKLRPPYGETFFHRATGRASNGRLVVDFIADTLGLPFVRPYLSGRSAEDFAGGANFAVGGATALSPDFFRARGFHNMGNRVDLDMEMKWFRGLLDLLCPGNLAGCSDMMNQSLFLVGEIGGNDYNGPLLSGVPFEEIRAITPSVVAKISSTISELIQLGAKTLVVPGNLPIGCVPKYLMIFKSNKKEDYDPQTGCLRWMNEFSQYHNKLLVEQLKKLRRLHPGVTIIYADYYGAAMEIFLSPERYGIEYPLVACCGAEGPYGVSPTTSCGLGEYKLCDNPERYGSWDGLHPTESAYKVIAMGLLLGSYTRPPIASTTTSCPQLMELGSSAEYKRLYDL

SEQ ID NO: 26467 - protein, 399 aa, Zea mays subsp. mays
  misc_feature (1)..(399): Ceres Seq. ID no. 13569615
MHSSASARGGRGLLLPAAAAAVVVLLLGAVAPAAGCYPRVFNFGDSLADTGNYPFVYGNDSAKLRPPYGETFFHRATGRASNGRLVVDFIADTLGLPFVRPYLSGRSAEDFAGGANFAVGGATALSPDFFRARGFHNMGNRVDLDMEMKWFRGLLDLLCPGNLAGCSDMMNQSLFLVGEIGGNDYNGPLLSGVPFEEIRAITPSVVAKISSTISELIQLGAKTLVVPGNLPIGCVPKYLMIFKSNKKEDYDPQTGCLRWMNEFSQYHNKLLVEQLKKLRRLHPGVTIIYADYYGAAMEIFLSPERYGIEYPLVACCGAEGPYGVSPTTSCGLGEYKLCDNPERYGSWDGLHPTESAYKVIAMGLLLGSYTRPPIASTTTSCPQLMELGSSAEYKRLYDL

SEQ ID NO: 26468 - protein, 262 aa, Zea mays subsp. mays
  misc_feature (1)..(262): Ceres Seq. ID no. 13569616
MGNRVDLDMEMKWFRGLLDLLCPGNLAGCSDMMNQSLFLVGEIGGNDYNGPLLSGVPFEEIRAITPSVVAKISSTISELIQLGAKTLVVPGNLPIGCVPKYLMIFKSNKKEDYDPQTGCLRWMNEFSQYHNKLLVEQLKKLRRLHPGVTIIYADYYGAAMEIFLSPERYGIEYPLVACCGAEGPYGVSPTTSCGLGEYKLCDNPERYGSWDGLHPTESAYKVIAMGLLLGSYTRPPIASTTTSCPQLMELGSSAEYKRLYDL

SEQ ID NO: 26469 - DNA, 2974 bp, Zea mays subsp. mays
  misc_feature (1)..(2974): Ceres Seq. ID no. 13569654
  misc_feature (2612)..(2612): n is a, c, t, g, unknown, or other
  misc_feature (2654)..(2654): n is a, c, t, g, unknown, or other
  misc_feature (2680)..(2680): n is a, c, t, g, unknown, or other
  misc_feature (2697)..(2697): n is a, c, t, g, unknown, or other
  misc_feature (2703)..(2703): n is a, c, t, g, unknown, or other
  misc_feature (2717)..(2717): n is a, c, t, g, unknown, or other
  misc_feature (2731)..(2731): n is a, c, t, g, unknown, or other
  misc_feature (2761)..(2761): n is a, c, t, g, unknown, or other
  misc_feature (2762)..(2762): n is a, c, t, g, unknown, or other
  misc_feature (2770)..(2770): n is a, c, t, g, unknown, or other
  misc_feature (2771)..(2771): n is a, c, t, g, unknown, or other
  misc_feature (2823)..(2823): n is a, c, t, g, unknown, or other
  misc_feature (2856)..(2856): n is a, c, t, g, unknown, or other
  misc_feature (2872)..(2872): n is a, c, t, g, unknown, or other
  misc_feature (2873)..(2873): n is a, c, t, g, unknown, or other
  misc_feature (2914)..(2914): n is a, c, t, g, unknown, or other
  misc_feature (2917)..(2917): n is a, c, t, g, unknown, or other
  misc_feature (2929)..(2929): n is a, c, t, g, unknown, or other
  misc_feature (2962)..(2962): n is a, c, t, g, unknown, or other
tcctaatcaaaaaaactaaaaaaaaagccaaaatggcggggggaggtcgtcgtctcccctccctgcgatcccctccatccgcgacgccatctcggccacttcatgatcactagggtttcgctcttctacccataagccctcgtcccgatgcgctggtggaagcgctcctcctccccctcctgccccgcctcctcatcctcagcatcgacccccgcttcccccgcccgcgcctccaccccccgtctcatcggcggttggggtagcggccctagctcacgccgcgatggcagcggggccagcaacgatccgcagccgcggctgatcagagcgcggcggatgcgctacgtcgtcgatgacctcgaggtcggggtctccgcgctcggcgtggactctccggcgaggagggacgcggcggcgggggtttgcgcttgagacagtgagctccgcgccgatctcgtggtctccgagcaacatggaggtggcgccggcgagatcctcgtcgacccccgtgctgctgccgcatccgctgccccttccaggcgagggggaatcgccgtgccgcgggccggggaggccgcttccgccaccggtgccaaggatgctcgacggggaggggaaagggcctgcagcggacgctcccggtgttttagagactgggagccaaaggatgacgccgttactcgcacggagagtggcggtccaaactctaccaaaggctcatgagcacaacgactttcggttaaatgggactacctgttgtcagcggagaaaggcttttaaagagaagttccaggataagaactgtgatgaaactttgaacttcagattgaacattcctgctaaaagtgctccaagcagtgggttttcaagccctgtacaaagtcctcgaagactgagtaatgtagatttctcatctgctgcaatctctatccaagataccaatgtatggtcagcacgatctctctggtcttctgatgcgatgggatcttcacctccttgtgattcacctgacaagtttgcaggtggtcaggagcgttctcctctctctagtccactgagaagtccagttttaaaatcaagaaacccaagtgcacctccatcaccaatgcatccaaagttgttcccggagaaccatgtttctcgccctgatggcaatggaagtgctagttttcacccattaccgctccctcctgcttctgtaagcccaaagcagacaaatgctagccaccagttagttccaaaagctgagatgccttcggtggctggtcaatggcagaaaggaaaactcttgggtagtggcacctttggatgcgtgtatgaggccaccaataggcacactggagctctttgtgccatgaaagaggtgaatataattccagatgatgctaaatcagtcgagtctctgaagcaattggaacaggaaattaagtttcttagtcaatttaagcatgaaaatattgtgcagtactatggcagtgaaactatcgaagatagattctacatatacctggagtatgttcatcctggttcaatccataagtatgttcatcaacactgtggatcgctgacagaagcagtcatccgtaacttcacacgtcatattctcaagggtcttgcttttttacatagccaaaagattatgcatagggatatcaaaggggcaaatttgttagttgatattaacggtgtagtgaaattggctgacttcggaatggcaaagcatttgagtactgcagctcctaatctttcattgaagggaacaccatactggatggctcctgaggttgttcgggctacactcgataaaagtgcaggttatgatcttctgttgatatttggagccttggctgcacaatcattgagatgtttacaggaaagccaccttggagtggtcttgaagggccggctgcaatgtttaaggtgttgcgcacggacccaccaattccagataacctgtcccctgaagggaaggattttctgagatgctgcttcaagagaaaccctactgagcgaccaacagcaaacaagttgctcgaacacccatttatccaaactttgaaccactacagcccacatagcgttgtacattcattttcgggaattaaatctccagatactgtgcacagcagtgcaagagataaagtaccctggaaaagtgattcatatatgagagggaaacatgcaaatggtgaaacaagcagtgctcggtcgtcagagtcattggcttatcggttgatgacacccctacccaacttgggaaccaatagtttgtcacctccacctttgagttcggcctccagttctggctctgcagcacatacaccgaacagtatgcatttttcagtcccataccatcagcctagtcctttgccaaagcctaacgggaaggaagcaataaatttggtttcccattgaataacagcatgccacctatcacaacatctgggcaaagtccacataaacagcgcaagtgtatccgtccctagcgtctgacccttgtactgccagtaatagctaacaattttctgggtcgtgtaaaaataatttccatgtaagggcttgttcggttattcctaatacacatggattggatgggattggaaaaaattganaagaagtttgacttgtttgggattcaaacccatccaatcccnctcaatccacatggattaagagctanccgaacaagccctaaanagatcnccgtgatatgatcncagggaaatgctgntaaatgagggagctttgtgaaatctgttgnnccgtttgnnttctgggaaactgattggattgcccatgtaacatatttttattagggtgtanctgtaggtgaaactaatggtcaagattgtgccnacaaataggacattanngttgtagctgtagcgtgttgttgatgctgtgtaatgatcanacntgatgtaatcantattgatttttttttggggaaggtaataatgcncgtcaattggcg

SEQ ID NO: 26470 - protein, 542 aa, Zea mays subsp. mays
  misc_feature (1)..(542): Ceres Seq. ID no. 13569655
MTSRSGSPRSAWTLRRGGTRRRGFALETVSSAPISWSPSNMEVAPARSSSTPVLLPHPLPLPGEGESPCRGPGRPLPPPVPRMLDGEGKGPAADAPGVLETGSQRMTPLLARRVAVQTLPKAHEHNDFRLNGTTCCQRRKAFKEKFQDKNCDETLNFRLNIPAKSAPSSGFSSPVQSPRRLSNVDFSSAAISIQDTNVWSARSLWSSDAMGSSPPCDSPDKFAGGQERSPLSSPLRSPVLKSRNPSAPPSPMHPKLFPENHVSRPDGNGSASFHPLPLPPASVSPKQTNASHQLVPKAEMPSVAGQWQKGKLLGSGTFGCVYEATNRHTGALCAMKEVNIIPDDAKSVESLKQLEQEIKFLSQFKHENIVQYYGSETIEDRFYIYLEYVHPGSIHKYVHQHCGSLTEAVIRNFTRHILKGLAFLHSQKIMHRDIKGANLLVDINGVVKLADFGMAKHLSTAAPNLSLKGTPYWMAPEVVRATLDKSAGYDLLLIFGALAAQSLRCLQESHLGVVLKGRLQCLRCCARTHQFQITCPLKGRIF

SEQ ID NO: 26471 - protein, 502 aa, Zea mays subsp. mays
  misc_feature (1)..(502): Ceres Seq. ID no. 13569656
MEVAPARSSSTPVLLPHPLPLPGEGESPCRGPGRPLPPPVPRMLDGEGKGPAADAPGVLETGSQRMTPLLARRVAVQTLPKAHEHNDFRLNGTTCCQRRKAFKEKFQDKNCDETLNFRLNIPAKSAPSSGFSSPVQSPRRLSNVDFSSAAISIQDTNVWSARSLWSSDAMGSSPPCDSPDKFAGGQERSPLSSPLRSPVLKSRNPSAPPSPMHPKLFPENHVSRPDGNGSASFHPLPLPPASVSPKQTNASHQLVPKAEMPSVAGQWQKGKLLGSGTFGCVYEATNRHTGALCAMKEVNIIPDDAKSVESLKQLEQEIKFLSQFKHENIVQYYGSETIEDRFYIYLEYVHPGSIHKYVHQHCGSLTEAVIRNFTRHILKGLAFLHSQKIMHRDIKGANLLVDINGVVKLADFGMAKHLSTAAPNLSLKGTPYWMAPEVVRATLDKSAGYDLLLIFGALAAQSLRCLQESHLGVVLKGRLQCLRCCARTHQFQITCPLKGRIF

SEQ ID NO: 26472 - protein, 460 aa, Zea mays subsp. mays
  misc_feature (1)..(460): Ceres Seq. ID no. 13569657
MLDGEGKGPAADAPGVLETGSQRMTPLLARRVAVQTLPKAHEHNDFRLNGTTCCQRRKAFKEKFQDKNCDETLNFRLNIPAKSAPSSGFSSPVQSPRRLSNVDFSSAAISIQDTNVWSARSLWSSDAMGSSPPCDSPDKFAGGQERSPLSSPLRSPVLKSRNPSAPPSPMHPKLFPENHVSRPDGNGSASFHPLPLPPASVSPKQTNASHQLVPKAEMPSVAGQWQKGKLLGSGTFGCVYEATNRHTGALCAMKEVNIIPDDAKSVESLKQLEQEIKFLSQFKHENIVQYYGSETIEDRFYIYLEYVHPGSIHKYVHQHCGSLTEAVIRNFTRHILKGLAFLHSQKIMHRDIKGANLLVDINGVVKLADFGMAKHLSTAAPNLSLKGTPYWMAPEVVRATLDKSAGYDLLLIFGALAAQSLRCLQESHLGVVLKGRLQCLRCCARTHQFQITCPLKGRIF

SEQ ID NO: 26473 - DNA, 948 bp, Zea mays subsp. mays
  misc_feature (1)..(948): Ceres Seq. ID no. 13570435
gccgcacgaacgtgcatcctcctccttagagtcatctcctcccgagcggtgggttcggacgcgagccgcagcgacgtcgccgcggagggcctgggcgcggcttccgtgggcggttcgtgcgcgtccagcggcgtggtctcggttgagcggtcgacgacgaccaggcatcgcagccgtgaagagaagaaggccttggtggtggaggtggcggatcatgaatgcgacgacgacttgggcgccggcgagtctgacatctccgaggagctgggtgcgaaccatgaaggaaacagtactgaaggtggcatatcatcggtcgacagcgtttctagcttgctcagtgggataagctaccaagacgttagctctggctgtgcctaccgagcatcctctcatcatcaccatcagaggaggaggacatccgaagaaaagggtgcccagcaattgcgtccttccaaacccggtccaaaggcggagaaggtcggtctcagacatgangcggtggacggtcggagggccgctgaggagtggatggtcgactacgctctccggaaggaagtcaagaggctggctcgtgctcagaagaggaaagttgagatgcttgtccaggccttcgaatctgttctgcccncggtagcaatagcaagcgagaagaagcccgggcaacacgatggccttcgaaagcatgcatgtagctgacagatagatagatagaatcatagatagccgacactcatcttgagtcaggtagtagtaggacgtgacaatttgagtcaggtagatgaaacgtttcaattcagtcaaacactagtcacaacggatacaaggtttgatgctccaccaaccactgatccgttgtgaacttgtagtagaagcaggccaccgctggcaatgtggcatgccatgccatcaacctaacatggaccattntgaatgtcggctcaaaacgtg

SEQ ID NO: 26474 - protein, 231 aa, Zea mays subsp. mays
  misc_feature (1)..(231): Ceres Seq. ID no. 13570436
  misc_feature (165)..(165): Xaa is any aa, unknown or other
  misc_feature (210)..(210): Xaa is any aa, unknown or other
AARTCILLLRVISSRAVGSDASRSDVAAEGLGAASVGGSCASSGVVSVERSTTTRHRSREEKKALVVEVADHECDDDLGAGESDISEELGANHEGNSTEGGISSVDSVSSLLSGISYQDVSSGCAYRASSHHHHQRRRTSEEKGAQQLRPSKPGPKAEKVGLRHXAVDGRRAAEEWMVDYALRKEVKRLARAQKRKVEMLVQAFESVLPXVAIASEKKPGQHDGLRKHACS

SEQ ID NO: 26475 - DNA, 582 bp, Zea mays subsp. mays
  misc_feature (1)..(582): Ceres Seq. ID no. 13570601
attcacgcacctagggttttcgcgccgccgccgccgccgccgctggggccgcgccgcagcccatcgtgttgaaggtcgacttgcattgcgccggctgcgccaacaaggtccgcaaggccatcaagcgcgcaccaggcgtggagtcggtgacgccggacatggcggcgggcaaggtggtcgtgaccggtccggcggacgcggtgcagctcaaggagcgcatcgaggctagggccaagaagcccgtgcagatcgtctccgccggcgccggttcgcccaagaaggacaaggagaagaaagctgacggcggcgagaaaaatgcggccaaagagaagggcggccgatgcagagaagaagaaggccgacaagaagaagggaggcggtgatggaggagagaaaaatgccgacaagaagaagggcggcggcggcggcgataagaaggccgacaaggagaagggcactggcaaacccaaggaggaagaggaggaggaggagamgcccaaggaacccaaggaggagacggktacgctcaagatccaactgcactgsgacggstgcatggaccgcatcaagcgccgcatntgc

SEQ ID NO: 26476 - protein, 89 aa, Zea mays subsp. mays
  misc_feature (1)..(89): Ceres Seq. ID no. 13570602
  misc_feature (60)..(60): Xaa is any aa, unknown or other
  misc_feature (69)..(69): Xaa is any aa, unknown or other
  misc_feature (77)..(77): Xaa is any aa, unknown or other
  misc_feature (79)..(79): Xaa is any aa, unknown or other
  misc_feature (88)..(88): Xaa is any aa, unknown or other
MRPKRRAADAEKKKADKKKGGGDGGEKNADKKKGGGGGDKKADKEKGTGKPKEEEEEEEXPKEPKEETXTLKIQLHXDXCMDRIKRRXC

SEQ ID NO: 26477 - protein, 79 aa, Zea mays subsp. mays
  misc_feature (1)..(79): Ceres Seq. ID no. 13570603
  misc_feature (52)..(52): Xaa is any aa, unknown or other
  misc_feature (61)..(61): Xaa is any aa, unknown or other
  misc_feature (69)..(69): Xaa is any aa, unknown or other
  misc_feature (71)..(71): Xaa is any aa, unknown or other
MQRRRRPTRRREAVMEERKMPTRRRAAAAAIRRPTRRRALANPRRKRRRRRXPRNPRRRRXRSRSNCTXTXAWTASSAA

SEQ ID NO: 26478 - protein, 75 aa, Zea mays subsp. mays
  misc_feature (1)..(75): Ceres Seq. ID no. 13570604
FTHLGFSRRRRRRRWGRAAAHRVEGRLALRRLRQQGPQGHQARTRRGVGDAGHGGGQGGRDRSGGRGAAQGAHRG

SEQ ID NO: 26479 - DNA, 1423 bp, Zea mays subsp. mays
  misc_feature (1)..(1423): Ceres Seq. ID no. 13570861
caaccccgcacgcacaactggccgcgccaaggcaaagctagaagaagacaacgcaaagggagaggacagaggaggagcagaggacgatgggcagcggcggcgctaacactgcccccctcctcaccccctacaagatgggaaaattcgatgttacccacagggtagtcctcgcaccactgacgagacagcggtcctacggcaacgttccccagcctcatgccatactgtactatcagcagagggcgactaaaggaggtcttctgatcgctgaggccacgggggtttcagacactgctcaagggtacaaggacactcctggcatttggacccatgagcaagtcgaagcatggaagccgatcgtagacggggttcaccagaaaggagggatatttttctgtcagatttggcacgtagggagagtctccaattccacgtttcagcctaatgggcaggctccaatttcaagcaccgataagccactaaagcctcaagtgagagccaatggtatagacgtggctactttcgcagttcctagacgcttagagactgatgaaatccctttggtcgtcaatgatttcagggtagctgctcgaaatgcgattgaagctggatttgatggtgtcgaaatccatggagctcacggttacctgattgatcagtttctaaaggacggggtcaacgaccgcacagacaaatacggtggcagtctggagaaccgctgccggtttgcactggaagtaactcaagccgtggtcgacgaaattggagctgacaaggtcgggataaggctgtcaccattcgctagctactcggaggcgccggactcggacccggaagctctgggcctgtacatggcgaacgcgctgaacgagttcgggattctctactgccacatcgtggagccgcggatggtgaaactcggtgaaaagttcgaaaccccctacagccttcgcccgataagggacgctttcaggggaacgttcatcgttgccggcggctacggcagggaggatgggaatcgagcgatctccactgggtatgctgatttggtcgcgttcgggcgcttgttcttggctaatcctgacctgcctcggaggttcgaagtagacgctccccttaacaagtacaacagagacacgttttacatccctgatccggttgttggatacactgactacccatttctttcgtcagatgtataaatgttctcttttcagcaatctgctttttagattgtgtagtaactggttggtgtaccagtaaattattagaggaataaaccattggtctgaatgcctcattctcatatatatggacaaaagcaatatgatcgttgtaattgtgcctcaaatcttatagttgtaaaaaatattgtgaagaagctcagtcagttgtcattgtaaaaaatattgtgaagaagctc

SEQ ID NO: 26480 - protein, 371 aa, Zea mays subsp. mays
  misc_feature (1)..(371): Ceres Seq. ID no. 13570862
MGSGGANTAPLLTPYKMGKFDVTHRVVLAPLTRQRSYGNVPQPHAILYYQQRATKGGLLIAEATGVSDTAQGYKDTPGIWTHEQVEAWKPIVDGVHQKGGIFFCQIWHVGRVSNSTFQPNGQAPISSTDKPLKPQVRANGIDVATFAVPRRLETDEIPLVVNDFRVAARNAIEAGFDGVEIHGAHGYLIDQFLKDGVNDRTDKYGGSLENRCRFALEVTQAVVDEIGADKVGIRLSPFASYSEAPDSDPEALGLYMANALNEFGILYCHIVEPRMVKLGEKFETPYSLRPIRDAFRGTFIVAGGYGREDGNRAISTGYADLVAFGRLFLANPDLPRRFEVDAPLNKYNRDTFYIPDPVVGYTDYPFLSSDV

SEQ ID NO: 26481 - protein, 355 aa, Zea mays subsp. mays
  misc_feature (1)..(355): Ceres Seq. ID no. 13570863
MGKFDVTHRVVLAPLTRQRSYGNVPQPHAILYYQQRATKGGLLIAEATGVSDTAQGYKDTPGIWTHEQVEAWKPIVDGVHQKGGIFFCQIWHVGRVSNSTFQPNGQAPISSTDKPLKPQVRANGIDVATFAVPRRLETDEIPLVVNDFRVAARNAIEAGFDGVEIHGAHGYLIDQFLKDGVNDRTDKYGGSLENRCRFALEVTQAVVDEIGADKVGIRLSPFASYSEAPDSDPEALGLYMANALNEFGILYCHIVEPRMVKLGEKFETPYSLRPIRDAFRGTFIVAGGYGREDGNRAISTGYADLVAFGRLFLANPDLPRRFEVDAPLNKYNRDTFYIPDPVVGYTDYPFLSSDV

SEQ ID NO: 26482 - DNA, 1517 bp, Zea mays subsp. mays
  misc_feature (1)..(1517): Ceres Seq. ID no. 13570867
agccacacaagcaaagaacttggccccgcctcccgtctcttaccgcacatgcgcgtcgggccgcgtcgacatagctgcttgccgccgacacccgcagccgcaatggccgtcgcccacgcgccgccgcgccggggcgtgctccccctcctgctcgtcgccgcgctcgtggcggcgttgccggccacctgcgccgcggccaggagcaagaagtcgtacacggccatcttcagcttcggggactcgctctccgacgccggcaacctcatcgtcaacggcacgcccaaggcgctcaccaccgcgcgccctccctacgggatgaccttcttccgcaagcccaccggccgctgctccaacggccgcctcgtcgtcgacttcctggccgagcatttcgggctgccactgccgccaccgtcgcaggccaagggcaaggacttcaagaagggcgccaacttcgccatcaccggcgcgacggccctggagtactccttcttcaaggcgcacggcatcgaccagcgcatctggaacaccggctccatcaacacccagatcggctggctccaggacatgaagccgtccctctgtaaatcggagcaagactgcaaggattacttcagcaaatccctgttcgtcgtcggggagttcgggggcaacgactacaacgcgccgctcttctccggcgtcccattttctgatgtcaagacttacgtgccccttgttgcaaaggctatcgccaatggcgttgagaaactgatcgagcttggggcaacagacctcctggtgcctggcgttctcccaattggctgcttcccgttgtacctgacgctgtacaacaccagcagcaaagcagattacaacgcccggaccgggtgccttcggaggtacaaccgcctggccttccaccacaacagggagctgaagcagcagcttgacgagcttcagaagaagtaccccaagacgaagatcatgtatggagattacttcaaggctgcactgcagtttgtcgtcaaccctgggaaatttggtttcagcacggctttgcaagcgtgctgcggcgccggagggcagggcaactacaacttcaacctgaagaagaagtgtggcgagcagggcgcgagcgtgtgctccaacccgtcgtcgtacgtgagctgggatggcatccacatgaccgaagctgcgtacagaaaggtcgccgatggctggttgaatggcccgtatgctcagcccccaattctcaagtcatgatcgagattactaggctgtgcgtaacaccgccgcagctgcatgctgcggctagagatatatatgaggagtgtttcaggcaatagatatgctaagttatggtaaagctatttggtctgttcattggaagatctgtataaactgcgccggtatagatatgttcccagctgaaatggctctagcacagatgtgcatggcatgttctctgattcttttcatttgttctaaaaaaatattgcggcagtaatatgagttgataaaagtaactaaatttctgc

SEQ ID NO: 26483 - protein, 413 aa, Zea mays subsp. mays
  misc_feature (1)..(413): Ceres Seq. ID no. 13570868
SHTSKELGPASRLLPHMRVGPRRHSCLPPTPAAAMAVAHAPPRRGVLPLLLVAALVAALPATCAAARSKKSYTAIFSFGDSLSDAGNLIVNGTPKALTTARPPYGMTFFRKPTGRCSNGRLVVDFLAEHFGLPLPPPSQAKGKDFKKGANFAITGATALEYSFFKAHGIDQRIWNTGSINTQIGWLQDMKPSLCKSEQDCKDYFSKSLFVVGEFGGNDYNAPLFSGVPFSDVKTYVPLVAKAIANGVEKLIELGATDLLVPGVLPIGCFPLYLTLYNTSSKADYNARTGCLRRYNRLAFHHNRELKQQLDELQKKYPKTKIMYGDYFKAALQFVVNPGKFGFSTALQACCGAGGQGNYNFNLKKKCGEQGASVCSNPSSYVSWDGIHMTEAAYRKVADGWLNGPYAQPPILKS

SEQ ID NO: 26484 - protein, 397 aa, Zea mays subsp. mays
  misc_feature (1)..(397): Ceres Seq. ID no. 13570869
MRVGPRRHSCLPPTPAAAMAVAHAPPRRGVLPLLLVAALVAALPATCAAARSKKSYTAIFSFGDSLSDAGNLIVNGTPKALTTARPPYGMTFFRKPTGRCSNGRLVVDFLAEHFGLPLPPPSQAKGKDFKKGANFAITGATALEYSFFKAHGIDQRIWNTGSINTQIGWLQDMKPSLCKSEQDCKDYFSKSLFVVGEFGGNDYNAPLFSGVPFSDVKTYVPLVAKAIANGVEKLIELGATDLLVPGVLPIGCFPLYLTLYNTSSKADYNARTGCLRRYNRLAFHHNRELKQQLDELQKKYPKTKIMYGDYFKAALQFVVNPGKFGFSTALQACCGAGGQGNYNFNLKKKCGEQGASVCSNPSSYVSWDGIHMTEAAYRKVADGWLNGPYAQPPILKS

SEQ ID NO: 26485 - protein, 379 aa, Zea mays subsp. mays
  misc_feature (1)..(379): Ceres Seq. ID no. 13570870
MAVAHAPPRRGVLPLLLVAALVAALPATCAAARSKKSYTAIFSFGDSLSDAGNLIVNGTPKALTTARPPYGMTFFRKPTGRCSNGRLVVDFLAEHFGLPLPPPSQAKGKDFKKGANFAITGATALEYSFFKAHGIDQRIWNTGSINTQIGWLQDMKPSLCKSEQDCKDYFSKSLFVVGEFGGNDYNAPLFSGVPFSDVKTYVPLVAKAIANGVEKLIELGATDLLVPGVLPIGCFPLYLTLYNTSSKADYNARTGCLRRYNRLAFHHNRELKQQLDELQKKYPKTKIMYGDYFKAALQFVVNPGKFGFSTALQACCGAGGQGNYNFNLKKKCGEQGASVCSNPSSYVSWDGIHMTEAAYRKVADGWLNGPYAQPPILKS

SEQ ID NO: 26486 - DNA, 886 bp, Zea mays subsp. mays
  misc_feature (1)..(886): Ceres Seq. ID no. 13571562
aaccgcagctgaagctgctggccatgtgggcgagcccgtttgccctacgggcgaagctagcgctcaacttcaagggcctggcctacgagtacgtagaggaggacctccgcagcaagagcgacctcctgctgagctcgaacccggtgcacaagaaggtgcccgtcctcatccacaacggcgtgcccgtctgtgagtcgcgggtcatcgtggagtacctcgacgaagtctacagcgccacgggcccccgcttcctccctgccgacccatacgagcgtgccatggcgcgcttctgggcctcattcatcgacgaaaagttcttggcgtcgtggctaaaggcaggaaggggcaagacggacgaggagaaggccgaagggttgaagctgacactcgcggccgtagaaaccttggaaggggcgttcatggagtgctccaaggggaagcccttctttggaggcgatagtgtcggctacctggacatcgcgctcggggccctggtagcgtggatgcgcgccaccgaggcgcgtcatggtctcaggctcttcgacgcctccagagtccgctgctggagaagtgggtggagcgcttcagcgagctggacgaggtcgtggcggtcatgccggacatcgaccggctagtagagctcggcaaggtgagggaggctgctgcggctgcagcagctgccgtaaacagctgaacggaacgcatctcgcggtattgaggcggtcaataagtcggagaaagatcttgatacctgtgtgtaacaagcgaatggtgtaataaagaatacaattagggtgtcgtttagttcacatgtcggtaacgtaatggataaccgataacattaaatcatgtttgttataagtccaatcgtaatcgatctcatact

SEQ ID NO: 26487 - protein, 210 aa, Zea mays subsp. mays
  misc_feature (1)..(210): Ceres Seq. ID no. 13571563
PQLKLLAMWASPFALRAKLALNFKGLAYEYVEEDLRSKSDLLLSSNPVHKKVPVLIHNGVPVCESRVIVEYLDEVYSATGPRFLPADPYERAMARFWASFIDEKFLASWLKAGRGKTDEEKAEGLKLTLAAVETLEGAFMECSKGKPFFGGDSVGYLDIALGALVAWMRATEARHGLRLFDASRVRCWRSGWSASASWTRSWRSCRTSTG

SEQ ID NO: 26488 - protein, 203 aa, Zea mays subsp. mays
  misc_feature (1)..(203): Ceres Seq. ID no. 13571564
MWASPFALRAKLALNFKGLAYEYVEEDLRSKSDLLLSSNPVHKKVPVLIHNGVPVCESRVIVEYLDEVYSATGPRFLPADPYERAMARFWASFIDEKFLASWLKAGRGKTDEEKAEGLKLTLAAVETLEGAFMECSKGKPFFGGDSVGYLDIALGALVAWMRATEARHGLRLFDASRVRCWRSGWSASASWTRSWRSCRTSTG

SEQ ID NO: 26489 - protein, 118 aa, Zea mays subsp. mays
  misc_feature (1)..(118): Ceres Seq. ID no. 13571565
MARFWASFIDEKFLASWLKAGRGKTDEEKAEGLKLTLAAVETLEGAFMECSKGKPFFGGDSVGYLDIALGALVAWMRATEARHGLRLFDASRVRCWRSGWSASASWTRSWRSCRTSTG

SEQ ID NO: 26490 - DNA, 498 bp, Zea mays subsp. mays
  misc_feature (1)..(498): Ceres Seq. ID no. 13572049
aggttccagtattccaccacgcggcgtcgctgcycgaaccccgaaccttctcgaggtcgaggcccctcccctttcgccaggagaaaacaatgagcaggcgcaacagccgtaccatctatgtaggcaatctccctggggacatccgtgagagggaggttgaggatctcttctacaagtatggccgtattttggatattgacttgaaaatacctccgagacctcctggatacgcattcgttgagtttgaggatccacgtgatgctgatgatgcaatttatggccgtgatgggtataactttgatggctacaggttgagggttgaattagctcatggtggcagaggccagtcttattcttatgatcgttcaagcagctatagcagtgcatgccgtggaggtgtttctaggcgctctgatttccgtgttatggtcactggtttacctcatcggcatcgtggcaagatctgaaggaccacatgcggcgcgctggtgatgtctg

SEQ ID NO: 26491 - protein, 154 aa, Zea mays subsp. mays
  misc_feature (1)..(154): Ceres Seq. ID no. 13572050
  misc_feature (11)..(11): Xaa is any aa, unknown or other
VPVFHHAASLXEPRTFSRSRPLPFRQEKTMSRRNSRTIYVGNLPGDIREREVEDLFYKYGRILDIDLKIPPRPPGYAFVEFEDPRDADDAIYGRDGYNFDGYRLRVELAHGGRGQSYSYDRSSSYSSACRGGVSRRSDFRVMVTGLPHRHRGKI

SEQ ID NO: 26492 - protein, 125 aa, Zea mays subsp. mays
  misc_feature (1)..(125): Ceres Seq. ID no. 13572051
MSRRNSRTIYVGNLPGDIREREVEDLFYKYGRILDIDLKIPPRPPGYAFVEFEDPRDADDAIYGRDGYNFDGYRLRVELAHGGRGQSYSYDRSSSYSSACRGGVSRRSDFRVMVTGLPHRHRGKI

SEQ ID NO: 26493 - DNA, 523 bp, Zea mays subsp. mays
  misc_feature (1)..(523): Ceres Seq. ID no. 13572553
tagtggcttgggccaacaggatcaastcatgcattggctgagcatcsygaaaatcttcaacagctatttgcatgtcctcagagccaatcatgttccctcaattttggtccacaaattgcttacccaaatattttctgtggtcaatgtgcaattgtttaacaggctcctyttgaggcgtgaatgctgttcctttagcaatgggcaatacatcaaagatgggctaactcaactaakatattggtgcaatgacgtcagtcaagagtttgcagactcagcatgggtagcactgaggcatataagacaagctgttgactttgtggtaatttctctgaagccgataaggacatgggaagagatatgcaatgatatttgcccggctctcagtttgcagcagctagagcggatagtcggtatgtattgggatgatttaaagggaacaaatgtaacttcagccgagttcatgtcaagcatgagagctatgctgcgcgaagaatcaaatagcgtctccagcttttcgggcctg

SEQ ID NO: 26494 - protein, 174 aa, Zea mays subsp. mays
  misc_feature (1)..(174): Ceres Seq. ID no. 13572554
  misc_feature (9)..(9): Xaa is any aa, unknown or other
  misc_feature (16)..(16): Xaa is any aa, unknown or other
  misc_feature (56)..(56): Xaa is any aa, unknown or other
  misc_feature (78)..(78): Xaa is any aa, unknown or other
SGLGQQDQXMHWLSIXKIFNSYLHVLRANHVPSILVHKLLTQIFSVVNVQLFNRLXLRRECCSFSNGQYIKDGLTQLXYWCNDVSQEFADSAWVALRHIRQAVDFVVISLKPIRTWEEICNDICPALSLQQLERIVGMYWDDLKGTNVTSAEFMSSMRAMLREESNSVSSFSGL

SEQ ID NO: 26495 - protein, 165 aa, Zea mays subsp. mays
  misc_feature (1)..(165): Ceres Seq. ID no. 13572555
  misc_feature (7)..(7): Xaa is any aa, unknown or other
  misc_feature (47)..(47): Xaa is any aa, unknown or other
  misc_feature (69)..(69): Xaa is any aa, unknown or other
MHWLSIXKIFNSYLHVLRANHVPSILVHKLLTQIFSVVNVQLFNRLXLRRECCSFSNGQYIKDGLTQLXYWCNDVSQEFADSAWVALRHIRQAVDFVVISLKPIRTWEEICNDICPALSLQQLERIVGMYWDDLKGTNVTSAEFMSSMRAMLREESNSVSSFSGL

SEQ ID NO: 26496 - DNA, 2368 bp, Zea mays subsp. mays
  misc_feature (1)..(2368): Ceres Seq. ID no. 13572858
ggtgagctcctcgtctctcttgctgagctcgacgcggcggtccggtgctcgctgcgaagctggtggatggcgaatatggattcggttgttgtgatggaggtggcgccggtgccgatcccgacgttcatggacgccactcccctgaaccccccactgccgcttgtggtggaggagctcgtgctgcgccgcagtgctcgttacctcaacaggccaacccggcctaactacgcggaccaggagcctccaaaaaaccccggcggccggggccggggcaagcgaaagagggatgaggagaagccggagctggcggcgcagcagggtaccaagaccccaggcaggaatgactccaatgttgaggcgggtgagaggaagccgatgcccgtgactgcggcggtgccggcctgttgcgctggcgttgctgcggaagacgatgcgacgccgactgggaagagcgccaagctgagggtgaaggagacactgagggcgttcaacagccactacctccactttgtccaggaggagcagaaaagagctcaggctgcgatacaggagattgaggctaagggtggcctcaaacgtcagaccaaggggggtaaaaagaagagcagtaagcaagaggctgaagctgaggagaaagagaaacgcccatcaaagcgacctgacctgaaggcaatcaccaagatgcaagaaatgaatgccgtgctttatcaggagaagacgattgggcatctaccagggctcgatgtcggagatcagttttattctcgcgctgaaatggtagtgttgggcatccacagccattggctcaatggcattgactatatggggatgaaataccaaggaaagaaggagtatgccaacttaactttcccattggccacatgtattgtaatgtcggggatatatgaagatgatctagacaaggctgatgaaattatttatactggtcaaggaggaaatgatttacttggtaaccaccgccaaattggctctcaacagttgaaacgtgggaatttagcattgaagaatagcaggaagaatggtaatcctgtccgagttattcgaggtcatttatcaaagaatagctatactggaaaggtctacacctacgatgggctttacaaggttgtagatgactgggtgcagaacggtgtgcaaggccatgttgttttcaaatttaagttgaagcggcttgagggtcagccatcattgacaacttctgaggtgcgatttactcgtgcagaagctccgacaactatttctgaattacctggactggtttgtgacgatatctctggagggcaagaaaacattccgattcctgccactaacttggttgatgatccacctgttcctccatctggtttcacatacttgaagtctctaaaaattccaaaggacatcaagatcccatctagtattattggctgtgattgtgaaggagattgtgctagcaacaaaaattgttcatgtgctcagcgcaatggttctgatctgccttatgtatcatataagaacattggcaggttggtggagcccaaagcagttgtatttgaatgcggggctaactgcagctgcaaccatgattgtgtaaacagaacatctcaacagggtttgcagtatcacttagaggtatttaagacagcttcaaaaggttggggagtcaggacttgggacactatcctccctggggctcccatctgtgagtacacgggggtgttgaggaggactgaagatctggatggttcacagaacaactattgttttgacattgattgtcttcaaaccatgaaaggtttggatggaagggagaaaagagctggatctgaaatgcacctgcctaatctttatccagagaatgactcagatgcaccacctgcacctgagtactgcatagacggcagttccattggcaattttgcaagatttataaatcatagttgccaacctaaccttttcgtccagtgcgtcatgagctcacacaacgatgttaaactagcaaaagtgatgctttttgctgctgacacaatacttcctcttcaggagctatcctatgactacggttatcgcttggacagtgttgttgggcctgatggtaaaattgtgaagctgccatgccactgtggtgctccagattgccggaagcgcctctactagacctgcagtgtgtttccattttgattttgcaggaaacaacctatattgtaggaaagcattcatgttatttatgtagttggcatgctctgatatatagcgaaagaggagcaacttaatntccttttagagcattnttattttgtgataattggaggacatgctggtcatggtagcatattttgcaggaaatcaattaactgatatgtctggg

SEQ ID NO: 26497 - protein, 718 aa, Zea mays subsp. mays
  misc_feature (1)..(718): Ceres Seq. ID no. 13572859
GELLVSLAELDAAVRCSLRSWWMANMDSVVVMEVAPVPIPTFMDATPLNPPLPLVVEELVLRRSARYLNRPTRPNYADQEPPKNPGGRGRGKRKRDEEKPELAAQQGTKTPGRNDSNVEAGERKPMPVTAAVPACCAGVAAEDDATPTGKSAKLRVKETLRAFNSHYLHFVQEEQKRAQAAIQEIEAKGGLKRQTKGGKKKSSKQEAEAEEKEKRPSKRPDLKAITKMQEMNAVLYQEKTIGHLPGLDVGDQFYSRAEMVVLGIHSHWLNGIDYMGMKYQGKKEYANLTFPLATCIVMSGIYEDDLDKADEIIYTGQGGNDLLGNHRQIGSQQLKRGNLALKNSRKNGNPVRVIRGHLSKNSYTGKVYTYDGLYKVVDDWVQNGVQGHVVFKFKLKRLEGQPSLTTSEVRFTRAEAPTTISELPGLVCDDISGGQENIPIPATNLVDDPPVPPSGFTYLKSLKIPKDIKIPSSIIGCDCEGDCASNKNCSCAQRNGSDLPYVSYKNIGRLVEPKAVVFECGANCSCNHDCVNRTSQQGLQYHLEVFKTASKGWGVRTWDTILPGAPICEYTGVLRRTEDLDGSQNNYCFDIDCLQTMKGLDGREKRAGSEMHLPNLYPENDSDAPPAPEYCIDGSSIGNFARFINHSCQPNLFVQCVMSSHNDVKLAKVMLFAADTILPLQELSYDYGYRLDSVVGPDGKIVKLPCHCGAPDCRKRLY

SEQ ID NO: 26498 - protein, 696 aa, Zea mays subsp. mays
  misc_feature (1)..(696): Ceres Seq. ID no. 13572860
MANMDSVVVMEVAPVPIPTFMDATPLNPPLPLVVEELVLRRSARYLNRPTRPNYADQEPPKNPGGRGRGKRKRDEEKPELAAQQGTKTPGRNDSNVEAGERKPMPVTAAVPACCAGVAAEDDATPTGKSAKLRVKETLRAFNSHYLHFVQEEQKRAQAAIQEIEAKGGLKRQTKGGKKKSSKQEAEAEEKEKRPSKRPDLKAITKMQEMNAVLYQEKTIGHLPGLDVGDQFYSRAEMVVLGIHSHWLNGIDYMGMKYQGKKEYANLTFPLATCIVMSGIYEDDLDKADEIIYTGQGGNDLLGNHRQIGSQQLKRGNLALKNSRKNGNPVRVIRGHLSKNSYTGKVYTYDGLYKVVDDWVQNGVQGHVVFKFKLKRLEGQPSLTTSEVRFTRAEAPTTISELPGLVCDDISGGQENIPIPATNLVDDPPVPPSGFTYLKSLKIPKDIKIPSSIIGCDCEGDCASNKNCSCAQRNGSDLPYVSYKNIGRLVEPKAVVFECGANCSCNHDCVNRTSQQGLQYHLEVFKTASKGWGVRTWDTILPGAPICEYTGVLRRTEDLDGSQNNYCFDIDCLQTMKGLDGREKRAGSEMHLPNLYPENDSDAPPAPEYCIDGSSIGNFARFINHSCQPNLFVQCVMSSHNDVKLAKVMLFAADTILPLQELSYDYGYRLDSVVGPDGKIVKLPCHCGAPDCRKRLY

SEQ ID NO: 26499 - protein, 693 aa, Zea mays subsp. mays
  misc_feature (1)..(693): Ceres Seq. ID no. 13572861
MDSVVVMEVAPVPIPTFMDATPLNPPLPLVVEELVLRRSARYLNRPTRPNYADQEPPKNPGGRGRGKRKRDEEKPELAAQQGTKTPGRNDSNVEAGERKPMPVTAAVPACCAGVAAEDDATPTGKSAKLRVKETLRAFNSHYLHFVQEEQKRAQAAIQEIEAKGGLKRQTKGGKKKSSKQEAEAEEKEKRPSKRPDLKAITKMQEMNAVLYQEKTIGHLPGLDVGDQFYSRAEMVVLGIHSHWLNGIDYMGMKYQGKKEYANLTFPLATCIVMSGIYEDDLDKADEIIYTGQGGNDLLGNHRQIGSQQLKRGNLALKNSRKNGNPVRVIRGHLSKNSYTGKVYTYDGLYKVVDDWVQNGVQGHVVFKFKLKRLEGQPSLTTSEVRFTRAEAPTTISELPGLVCDDISGGQENIPIPATNLVDDPPVPPSGFTYLKSLKIPKDIKIPSSIIGCDCEGDCASNKNCSCAQRNGSDLPYVSYKNIGRLVEPKAVVFECGANCSCNHDCVNRTSQQGLQYHLEVFKTASKGWGVRTWDTILPGAPICEYTGVLRRTEDLDGSQNNYCFDIDCLQTMKGLDGREKRAGSEMHLPNLYPENDSDAPPAPEYCIDGSSIGNFARFINHSCQPNLFVQCVMSSHNDVKLAKVMLFAADTILPLQELSYDYGYRLDSVVGPDGKIVKLPCHCGAPDCRKRLY

SEQ ID NO: 26500 - DNA, 558 bp, Zea mays subsp. mays
  misc_feature (1)..(558): Ceres Seq. ID no. 13572978
gattcaacagcacaagaatcatttttggaggcggtgaagcccagtggtcgtatcaatgcatgcttggccgtagggaaagatatgctctacttgtatggaggaatgatggaagtgaaagatagagaaattactcttgatgatctatattcacttaaccttagcaaacttgatgagtggaagtgtatcatatcggcctcagaatctgaatggttagaaatttctgaggaagaggaggatgatgatgatgagactgatgatgatgaaaatgaagagggggatgctagccagacagatgaagatgaagaagagtctgatgaagatgctgcaaagaacgtgtccagtgctgtgtctctgctgaagggtgaaagtaagaccatgcgtagaaaagagaagcgtgctcggatagaacagatcagggtcatccttggcctttctgattctcaaaggactccagtgcctggagaatcactgagagatttctacaagaggacaaatatgtactggcaaatggctgcctatgagcacacccaacacactggaaaggagctccgcaaagac

SEQ ID NO: 26501 - protein, 186 aa, Zea mays subsp. mays
  misc_feature (1)..(186): Ceres Seq. ID no. 13572979
DSTAQESFLEAVKPSGRINACLAVGKDMLYLYGGMMEVKDREITLDDLYSLNLSKLDEWKCIISASESEWLEISEEEEDDDDETDDDENEEGDASQTDEDEEESDEDAAKNVSSAVSLLKGESKTMRRKEKRARIEQIRVILGLSDSQRTPVPGESLRDFYKRTNMYWQMAAYEHTQHTGKELRKD

SEQ ID NO: 26502 - protein, 159 aa, Zea mays subsp. mays
  misc_feature (1)..(159): Ceres Seq. ID no. 13572980
MLYLYGGMMEVKDREITLDDLYSLNLSKLDEWKCIISASESEWLEISEEEEDDDDETDDDENEEGDASQTDEDEEESDEDAAKNVSSAVSLLKGESKTMRRKEKRARIEQIRVILGLSDSQRTPVPGESLRDFYKRTNMYWQMAAYEHTQHTGKELRKD

SEQ ID NO: 26503 - protein, 152 aa, Zea mays subsp. mays
  misc_feature (1)..(152): Ceres Seq. ID no. 13572981
MMEVKDREITLDDLYSLNLSKLDEWKCIISASESEWLEISEEEEDDDDETDDDENEEGDASQTDEDEEESDEDAAKNVSSAVSLLKGESKTMRRKEKRARIEQIRVILGLSDSQRTPVPGESLRDFYKRTNMYWQMAAYEHTQHTGKELRKD

SEQ ID NO: 26504 - DNA, 485 bp, Zea mays subsp. mays
  misc_feature (1)..(485): Ceres Seq. ID no. 13572986
gatgctgaaacagatcaagcagcactcctctctcagaggggatgccacacagaggttggcctattgttttgcagaaggactggaggcacgacttgctggcacagggagccaggtgtaccagtcgctcatggcaaaacgcacatccgttgtggagttcctcaaggcatacaagctatttttggcggccatcagcctcaataaggtgcatatcatcttctccaatgcgaacatcgtggatgccgtggcagggaggagcaagttgcacattgtagcatatggtgtacagtatggtttacagtggccaggcttgctacatttcctggcaggtagagaaggtgggcctccagaggtgagattcaccggcattgaccttccacagccagggttccgcccagcctaccagattgaagaaacaggccgccggcttarcaactgtgcccgtgaattcggcgtgccattcaagttccatgctatagcagcaaagt

SEQ ID NO: 26505 - protein, 161 aa, Zea mays subsp. mays
  misc_feature (1)..(161): Ceres Seq. ID no. 13572987
  misc_feature (143)..(143): Xaa is any aa, unknown or other
MLKQIKQHSSLRGDATQRLAYCFAEGLEARLAGTGSQVYQSLMAKRTSVVEFLKAYKLFLAAISLNKVHIIFSNANIVDAVAGRSKLHIVAYGVQYGLQWPGLLHFLAGREGGPPEVRFTGIDLPQPGFRPAYQIEETGRRLXNCAREFGVPFKFHAIAAK

SEQ ID NO: 26506 - protein, 119 aa, Zea mays subsp. mays
  misc_feature (1)..(119): Ceres Seq. ID no. 13572988
  misc_feature (101)..(101): Xaa is any aa, unknown or other
MAKRTSVVEFLKAYKLFLAAISLNKVHIIFSNANIVDAVAGRSKLHIVAYGVQYGLQWPGLLHFLAGREGGPPEVRFTGIDLPQPGFRPAYQIEETGRRLXNCAREFGVPFKFHAIAAK

SEQ ID NO: 26507 - DNA, 1674 bp, Zea mays subsp. mays
  misc_feature (1)..(1674): Ceres Seq. ID no. 13573191
aaatcgcggtcactgctccgaagtccgaaccttcatacacatcgtctcgtttccgatttccccaaattcaggccacaggcgctacaggacccaggcaccactcggtcggcggccaccgcgtcgccccgcctgctcgattggggtcgcgtgtgcgataggaagtattgtgttgtgtttgcaacgtgatagcttgtactgggaacaaaggtcaagatgggcgccttggacctacaccttgactttgcttctgctcaacatggacaagccaagttaaaggaatatgccaagagctctctgttgtctgatggaaactacaatacagacaagatcaatggttcaaaccctgatgactatgagaaatttgagaaagggataatgcactatgggtgtccacattatagaaggagatgccgcataagagctccttgctgcaatgaaatttttgattgccgacactgccacaatgaaactaagaattccattaaaattgataaaatgaagaggcatgaacttccacgccatgaagtgcagcaggttgtatgctcattgtgtggcactgaacaggaggtgcgacaagtatgtatcaattgcggtgtttgcatggggaagtacttctgtggtttgtgcaaactcttcgacgatgatgtctctaaacagcagtatcactgcaacggatgtggaatatgtagaatcggagggagggagaatttcttccactgttcaaaatgtggatgttgctattcaattgcgctgaagaatagtcatgcatgtgttgaaggggcgatgcatcatgactgtccaatctgcttcgagtacttgttcgattcgacaaatgatgtttccgtcctgccttgtggtcataccattcatgtaaagtgcctgaaagaaatggaagagcactgccagtttgcatgccccctttgctccaagtcggtttgtgacatgtcgaaggcatgggaaaggctcgacatggagctggcaactctgtctgactcctgtgatcacaaaatggtccgcatattatgcaacgactgcggggcaatatcagatgtgcagttccatttgattgcgcacaagtgccagaattgcaagtcatacaacacccgccagatttgaagtaagaatcgcaagtcacacaacaccgtcagatctgaaatagcaaatcctgtgggggtttctgcatttcttcaagaagcgtgatggactgatggccccttcccgtgagctgctgagcaccgggatgtctggcaagacactcatcactgtatccactccactgggtcctgcggaggcaaacagctcgagattgtatatctgctgctagctgccgcccttcgttatgcataagcctactcttgccgttttactcctgtcgctccgtgattctagtgtaataatgttatatttagtgctgcttcaagcgtacggctgcggttgaacggcggcggcggctgctgagccacagtaccttgctgttgctgagactgcacccagccacagtgcgccgccgccgcagcagcttgtagctggactttatgaaggtgcctttgttccgcaaggaagagttcttggttgcgggtagctattaaggccatctccaatagatgtcctattatatcccttatttcatcctctatttcaaactttatataaatagtattaaatatctcatct

SEQ ID NO: 26508 - protein, 300 aa, Zea mays subsp. mays
  misc_feature (1)..(300): Ceres Seq. ID no. 13573192
MGALDLHLDFASAQHGQAKLKEYAKSSLLSDGNYNTDKINGSNPDDYEKFEKGIMHYGCPHYRRRCRIRAPCCNEIFDCRHCHNETKNSIKIDKMKRHELPRHEVQQVVCSLCGTEQEVRQVCINCGVCMGKYFCGLCKLFDDDVSKQQYHCNGCGICRIGGRENFFHCSKCGCCYSIALKNSHACVEGAMHHDCPICFEYLFDSTNDVSVLPCGHTIHVKCLKEMEEHCQFACPLCSKSVCDMSKAWERLDMELATLSDSCDHKMVRILCNDCGAISDVQFHLIAHKCQNCKSYNTRQI

SEQ ID NO: 26509 - protein, 246 aa, Zea mays subsp. mays
  misc_feature (1)..(246): Ceres Seq. ID no. 13573193
MHYGCPHYRRRCRIRAPCCNEIFDCRHCHNETKNSIKIDKMKRHELPRHEVQQVVCSLCGTEQEVRQVCINCGVCMGKYFCGLCKLFDDDVSKQQYHCNGCGICRIGGRENFFHCSKCGCCYSIALKNSHACVEGAMHHDCPICFEYLFDSTNDVSVLPCGHTIHVKCLKEMEEHCQFACPLCSKSVCDMSKAWERLDMELATLSDSCDHKMVRILCNDCGAISDVQFHLIAHKCQNCKSYNTRQI

SEQ ID NO: 26510 - protein, 206 aa, Zea mays subsp. mays
  misc_feature (1)..(206): Ceres Seq. ID no. 13573194
MKRHELPRHEVQQVVCSLCGTEQEVRQVCINCGVCMGKYFCGLCKLFDDDVSKQQYHCNGCGICRIGGRENFFHCSKCGCCYSIALKNSHACVEGAMHHDCPICFEYLFDSTNDVSVLPCGHTIHVKCLKEMEEHCQFACPLCSKSVCDMSKAWERLDMELATLSDSCDHKMVRILCNDCGAISDVQFHLIAHKCQNCKSYNTRQI

SEQ ID NO: 26511 - DNA, 1486 bp, Zea mays subsp. mays
  misc_feature (1)..(1486): Ceres Seq. ID no. 13573960
agccgtggcgaaagcacacacggatcaatcacactcactcgcggccattgtcctgcccgtgcgtgctctgccttttcaggcgatcgaccaaccaacttctcgtcactgccatggctctgctctccgacctcatcaacctcgacctctcgggccgcaccgggaagatcatcgccgagtacatctgggttggcggttccgggatggacgtcaggagcaaagccaggacgctgtccggacctgttgatgaccccagcaagcttccgaagtggaacttcgacggctccagcaccggccaagctccgggcgacgacagcgaagtcatcctttgccctcgggccatcttcagggacccgttcaggaaggggcagaacatactggtcatgtgcgactgctacgagccgaacggggagccgatcccgagcaacaagcggcatggggccgcgaagatctttagccaccctgacgtcaaggctgaggaaccatggttcgggattgagcaggagtacacccttctccagaaggacaccaagtggcctctcggttggccgctggcgtaccctggccctcagggaccttactactgcgccgccggagcggacaagtcctacgggcgggacatcgtggactgcgcatacaaggcctgcctctacgccggcatcgacatcagtggcatcaacggggaggtcatgccggggcagtgggagttccaggtggcccctgccgtcggcgtctcggccggcgaccagctctgggtggctcgctacattcttgagaggatcaccgagatcgccggcgtggttgtctccttcgaccccaagccaattccgggggactggaatggcgctggtgcacacaccaactacagcaccaagtcgatgaggagcgacggcgggtacgaggtgatcaagaaggcgatcggcaagctgggcctccggcaccgggagcacatcgccgcgtacggggacggcaacgagcgcccgctcaccggccgccacgagaccgccgacatcaacaccttcgtctggggcgtgccgaaccgcggggcgtcggtgcgggtgggccgagacaccgagaaggaaggcaaaggctacttcgaggaccggaggccggcgtccaacatggacccgtacgtggtgacctgcctgatcgcggagacaaccatgctgtgggagcccagccactccaacggcgacggcaagggcgccgcggctccttgatttgattctgcggagactgagctctgtgtgtgagccggcctgcgtagatggcaaatgggactgaccctgtcagaaacttgagatgaccataataatagctgcagtgtgctcgttctggggttggataagacccaagaactttttttagctttcttcgaacaagtaatcatggtgctgaaccaacacagatgtgctactaaacacatctaacgagtcaaacgccgaagcatatcccaacgcacaaccccggttaatcttgttacccatgg

SEQ ID NO: 26512 - protein, 404 aa, Zea mays subsp. mays
  misc_feature (1)..(404): Ceres Seq. ID no. 13573961
PWRKHTRINHTHSRPLSCPCVLCLFRRSTNQLLVTAMALLSDLINLDLSGRTGKIIAEYIWVGGSGMDVRSKARTLSGPVDDPSKLPKWNFDGSSTGQAPGDDSEVILCPRAIFRDPFRKGQNILVMCDCYEPNGEPIPSNKRHGAAKIFSHPDVKAEEPWFGIEQEYTLLQKDTKWPLGWPLAYPGPQGPYYCAAGADKSYGRDIVDCAYKACLYAGIDISGINGEVMPGQWEFQVAPAVGVSAGDQLWVARYILERITEIAGVVVSFDPKPIPGDWNGAGAHTNYSTKSMRSDGGYEVIKKAIGKLGLRHREHIAAYGDGNERPLTGRHETADINTFVWGVPNRGASVRVGRDTEKEGKGYFEDRRPASNMDPYVVTCLIAETTMLWEPSHSNGDGKGAAAP

SEQ ID NO: 26513 - protein, 368 aa, Zea mays subsp. mays
  misc_feature (1)..(368): Ceres Seq. ID no. 13573962
MALLSDLINLDLSGRTGKIIAEYIWVGGSGMDVRSKARTLSGPVDDPSKLPKWNFDGSSTGQAPGDDSEVILCPRAIFRDPFRKGQNILVMCDCYEPNGEPIPSNKRHGAAKIFSHPDVKAEEPWFGIEQEYTLLQKDTKWPLGWPLAYPGPQGPYYCAAGADKSYGRDIVDCAYKACLYAGIDISGINGEVMPGQWEFQVAPAVGVSAGDQLWVARYILERITEIAGVVVSFDPKPIPGDWNGAGAHTNYSTKSMRSDGGYEVIKKAIGKLGLRHREHIAAYGDGNERPLTGRHETADINTFVWGVPNRGASVRVGRDTEKEGKGYFEDRRPASNMDPYVVTCLIAETTMLWEPSHSNGDGKGAAAP

SEQ ID NO: 26514 - protein, 338 aa, Zea mays subsp. mays
  misc_feature (1)..(338): Ceres Seq. ID no. 13573963
MDVRSKARTLSGPVDDPSKLPKWNFDGSSTGQAPGDDSEVILCPRAIFRDPFRKGQNILVMCDCYEPNGEPIPSNKRHGAAKIFSHPDVKAEEPWFGIEQEYTLLQKDTKWPLGWPLAYPGPQGPYYCAAGADKSYGRDIVDCAYKACLYAGIDISGINGEVMPGQWEFQVAPAVGVSAGDQLWVARYILERITEIAGVVVSFDPKPIPGDWNGAGAHTNYSTKSMRSDGGYEVIKKAIGKLGLRHREHIAAYGDGNERPLTGRHETADINTFVWGVPNRGASVRVGRDTEKEGKGYFEDRRPASNMDPYVVTCLIAETTMLWEPSHSNGDGKGAAAP

SEQ ID NO: 26515 - DNA, 460 bp, Zea mays subsp. mays
  misc_feature (1)..(460): Ceres Seq. ID no. 13573968
ctcaagaaaatgactggcttcaatgccttttggtttactcaccacttatttgttattgtgtatgcactgctcattgtccatgggacctgtttatatctaagcaggaaatggtacaagaaaacgacatggatgtaccttgctgtccctgtgctcttgtatgtaagtgagcgcattcttcggctatttaggagccatgatgctgttaggattcagaaggttgcagtatatccagggaatgttttggctctctatatgtccaagccacctggattcaggtatcggagtgggcagtatatcttcataaaatgcagtgatgtctctccatacgaatggcacccattttcgattacatcagcaccaggagatgattatcttagtgtccacattcgcacaaggggtgattggacttcacgtcttaggactgtcttctctgaggcatgccgccctccatctgatggag

SEQ ID NO: 26516 - protein, 153 aa, Zea mays subsp. mays
  misc_feature (1)..(153): Ceres Seq. ID no. 13573969
LKKMTGFNAFWFTHHLFVIVYALLIVHGTCLYLSRKWYKKTTWMYLAVPVLLYVSERILRLFRSHDAVRIQKVAVYPGNVLALYMSKPPGFRYRSGQYIFIKCSDVSPYEWHPFSITSAPGDDYLSVHIRTRGDWTSRLRTVFSEACRPPSDG

SEQ ID NO: 26517 - protein, 150 aa, Zea mays subsp. mays
  misc_feature (1)..(150): Ceres Seq. ID no. 13573970
MTGFNAFWFTHHLFVIVYALLIVHGTCLYLSRKWYKKTTWMYLAVPVLLYVSERILRLFRSHDAVRIQKVAVYPGNVLALYMSKPPGFRYRSGQYIFIKCSDVSPYEWHPFSITSAPGDDYLSVHIRTRGDWTSRLRTVFSEACRPPSDG

SEQ ID NO: 26518 - protein, 110 aa, Zea mays subsp. mays
  misc_feature (1)..(110): Ceres Seq. ID no. 13573971
MYLAVPVLLYVSERILRLFRSHDAVRIQKVAVYPGNVLALYMSKPPGFRYRSGQYIFIKCSDVSPYEWHPFSITSAPGDDYLSVHIRTRGDWTSRLRTVFSEACRPPSDG

SEQ ID NO: 26519 - DNA, 1802 bp, Zea mays subsp. mays
  misc_feature (1)..(1802): Ceres Seq. ID no. 13574390
gaaaaaaaggcaaaaaacatttaccttttttctatctgtatattatctgaataaatcaagaggaggaagaggggagggagcgagggagggggaggagtagcaaatccagactccatagcaaccagctcgcgagaaggggaaaagggggaggaagagcttcgcttgtgtattgattgctcgctgctccagtccctgcattcgtgccgtttttggcaagtaggtggcgtggcaagcatggtgccgggctatgactgcgccgcctccgtgctgctgtgcgcggaggacaacgctgctattctcggcctggacgacgatggggaggagtcctcctgggcggccgccgctacgccgccacgtgacaccgtcgccgccgccgccgccaccggggtcgccgtcgatgggattttgacggagttccccttgctctcggatgactgcgttgcgacgctcgtggagaaggaggtggagcacatgcccgcggaggggtacctccagaagctgcagcgacggcatggggacctggatttggccgccgtcaggaaggacgccatcgattggatttggaaggtcattgagcattacaatttcgcaccgttgactgccgttttgtctgtgaactacctcgatagattcctctccacgtatgagttccctgaaggcagagcttggatgactcagctcttggcagtggcttgcttgtctttggcttcgaaaatcgaagagacttttgtgccactccccttggatttgcaggtagcggaggcaaagtttgtttttgagggaaggaccataaaaaggatggagcttctggtgctaagcaccttaaagtggaggatgcatgctgttactgcttgctcatttgttgaatactttcttcataaattgagtgatcatggtgcaccctccttgcttgcacgctctcgctcttcggaccttgtcttgagcaccgctaaaggtgctgaattcgtggtattcagaccctccgagattgctgccagtgttgcacttgctgctatcggcgaatgcaggagttctgtaattgagagagctgctagtagctgcaaatatttggacaaggagagggttttaagatgccatgaaatgattcaagagaagattactgcgggaagcattgtcctaaagtctgctggatcatcaatctcctctgtgccacaaagcccaataggtgtcctggacgctgcagcctgtctgagtcaacaaagcgatgacgctactgtcgggtctcctgcagtatgttaccatagttcttccacaagcaagaggagaaggatcactagacgtctactctaattgtggtacgcttcaggtgtgctcctcaccgctctaggagtttttgattggttcaaacatcttaaatttagtttggccgctggaggattatggtttagtcaagtagttgctgaatggaacaacaaaacacgcacactacttggtccataaagacaagaaaataactggcagcgtcccgcgagccagcgctgcaatccagttcatgcaagaccctagagtccagggggggtgctggtgtaggtagagagggaacaaggcattcacatacgccgtagagatgagagagcctctcgtatgttttgtacttttgctccttcagtttgcaatgaactatataaacaaggattgccttggggcagtgaacatttgtcggatgaaaagaatcaaaaaggatgggggtcggcagaggaatagaacaatttgatatatttccataaactacagatatgtttcctttttcataatgatgagctatcatttttgttgatggt

SEQ ID NO: 26520 - protein, 358 aa, Zea mays subsp. mays
  misc_feature (1)..(358): Ceres Seq. ID no. 13574391
MVPGYDCAASVLLCAEDNAAILGLDDDGEESSWAAAATPPRDTVAAAAATGVAVDGILTEFPLLSDDCVATLVEKEVEHMPAEGYLQKLQRRHGDLDLAAVRKDAIDWIWKVIEHYNFAPLTAVLSVNYLDRFLSTYEFPEGRAWMTQLLAVACLSLASKIEETFVPLPLDLQVAEAKFVFEGRTIKRMELLVLSTLKWRMHAVTACSFVEYFLHKLSDHGAPSLLARSRSSDLVLSTAKGAEFVVFRPSEIAASVALAAIGECRSSVIERAASSCKYLDKERVLRCHEMIQEKITAGSIVLKSAGSSISSVPQSPIGVLDAAACLSQQSDDATVGSPAVCYHSSSTSKRRRITRRLL

SEQ ID NO: 26521 - protein, 279 aa, Zea mays subsp. mays
  misc_feature (1)..(279): Ceres Seq. ID no. 13574392
MPAEGYLQKLQRRHGDLDLAAVRKDAIDWIWKVIEHYNFAPLTAVLSVNYLDRFLSTYEFPEGRAWMTQLLAVACLSLASKIEETFVPLPLDLQVAEAKFVFEGRTIKRMELLVLSTLKWRMHAVTACSFVEYFLHKLSDHGAPSLLARSRSSDLVLSTAKGAEFVVFRPSEIAASVALAAIGECRSSVIERAASSCKYLDKERVLRCHEMIQEKITAGSIVLKSAGSSISSVPQSPIGVLDAAACLSQQSDDATVGSPAVCYHSSSTSKRRRITRRLL

SEQ ID NO: 26522 - protein, 213 aa, Zea mays subsp. mays
  misc_feature (1)..(213): Ceres Seq. ID no. 13574393
MTQLLAVACLSLASKIEETFVPLPLDLQVAEAKFVFEGRTIKRMELLVLSTLKWRMHAVTACSFVEYFLHKLSDHGAPSLLARSRSSDLVLSTAKGAEFVVFRPSEIAASVALAAIGECRSSVIERAASSCKYLDKERVLRCHEMIQEKITAGSIVLKSAGSSISSVPQSPIGVLDAAACLSQQSDDATVGSPAVCYHSSSTSKRRRITRRLL

SEQ ID NO: 26523 - DNA, 1786 bp, Zea mays subsp. mays; identical to SEQ ID NO: 698
  misc_feature (1)..(1786): Ceres Seq. ID no. 13574418

SEQ ID NO: 26524 - protein, 524 aa, Zea mays subsp. mays; identical to SEQ ID NO: 699
  misc_feature (1)..(524): Ceres Seq. ID no. 15222589

SEQ ID NO: 26525 - protein, 451 aa, Zea mays subsp. mays; identical to SEQ ID NO: 700
  misc_feature (1)..(451): Ceres Seq. ID no. 15222590

SEQ ID NO: 26526 - protein, 321 aa, Zea mays subsp. mays; identical to SEQ ID NO: 701
  misc_feature (1)..(321): Ceres Seq. ID no. 15222591

SEQ ID NO: 26527 - DNA, 2498 bp, Zea mays subsp. mays
  misc_feature (1)..(2498): Ceres Seq. ID no. 13574538
agactggtgagagcaagaggatggatcaggagcttgagccccaggaggggagcagtttgagcggatgcccaccaggaacaatgtttcctagatcacgatgtttgggccacttttggaagaggtcagggatgacatgttttcaagcttggaggacatcaccaacgcaacatatgcagatctgctctctattaattcaatgaggaaaggaaaggggtcatagaaattagtcttggcagatggaggggaacgtctcaatgactgaggcacatttttactaaattatccctaaaacatttgtattttttaaaataacatgtaatcttgttgatctggtttacttaagctgcatcgagtttgtacttggagaagaatcctggagttattttacttgtttccttgatttgtagagacatgccagtgaggagcagtttagtcggyycyyscyttatgaagtggnngcaattagaaagacgtacgagcgggccaacatctcgcggtggctcgccttgggcaatcggacctgcccgaccacgatgcaggagctctaggacgacgccctcacccccaacgccactctccgacaactcatcgccgcctggttctcccgcctggttctgcattttgttttcttatctgtcaatcatgtttttccatattactgcaggtgggtctgattaattatttaaatgtagtttatcttagatattgtttgaacgtatgggatgttggaggacagaagacaatcatgtcttactggagaaattactttgagcagactaatgggttagtttggtttgctgatagttcagacataaggaggcttgatgattgccgtgctgaactccacaacctcttgaaagaagaggataaaggtttacctatctaggcagtgttctattgttgatttttgcaaataagcaagacatgcaaggagctctaaaaccaactgaaatcgtgaaggtaagcgaacttcagtcatttattatatgcattagagacatgttttcctgtctatgacatcatttttaacttgtactgtgtttttccggtcctcatggttgccaagattttacttagttcgatgtgggagcaaaaggatatgccaaattgaatgtagtttcatcagttatgctctattatggatgttcagaggcatccaatttcagtgtgtactgcaatacttgggtccacctgcacgtggtagatgttctgcattttgttttcttataaattagatttggcttccattatgttgttctcttttggaacagagtcactctccgacagctcatcgccgcttggttctcccgtcggtacacaaggtttaagaagcgctacgcggacttccacggccgcgctgccgatctcgtccatggcctccggggcacggcgatgcccaggagacaggccctcgaggaagagcaatgtacagaagagaaaggtatctcgactattccaaagcacaagtatgcatccaaagcctgttccccaaaaggaacctttatctgcagctctctctacgcttactcttgttgtgcaatttaatgggtggctatcatttttcctcttgctttattataaacttcctctgcggccagaaactcacaagacatactatgaatacactggcttgtggcacatctatgggctccttgccatgaattcatggttctggagtgccatatatcacagttgtgacacaatttggacagaaaaagctatatttttcatcagatgctgcctttctagggtattccctcattttgatgatagttggtgagcatgtagtagcaagtttcatgggctctggtagattaactgacctttgtgtgttccattagcctgtgaagttcgaaactggtcatattgctaagaattctaggaggttactattagggcccagagtaaatgactacatgctgatgaaaatctgttcagattaatcattctggaacttgtactaacaattgaagcaagtggaggcatagcaccaattgtgtcagtgctgcagctctggatgtcagtagacaagaggtgtatcagagagaagcacttcaaggttaatttgagcaaattggagatgctggattttgtattttggttgctcatgggtggtgaatgatctgacgacttcagaagaggatagatctgagattacctttcatgcatgtcaaggaagttaagtagctgatgccatcaaagcaatggagaaacgtcaggtgaaccgcgagcagaattctgtggcgcatttgttagcgcagttagttaggactctgttcatacaactgttcgattaagccaaatacctaatttagttttatattggttgttgtcaaagaatttgtgaaatattgaggttgataatatatgtggcgttcgtttttatgtaatcattgttcactaatattttgtcgaatattttatattatatagacattactwaggaaaaaaaaaaaaaaaaaaaaaaaaaaaaaaaaaacctcgggggggggcccggt

SEQ ID NO: 26528 - protein, 191 aa, Zea mays subsp. mays
  misc_feature (1)..(191): Ceres Seq. ID no. 15222595
MFCILFSYKLDLASIMLFSFGTESLSDSSSPLGSPVGTQGLRSATRTSTAALPISSMASGARRCPGDRPSRKSNVQKRKVSRLFQSTSMHPKPVPQKEPLSAALSTLTLVVQFNGWLSFFLLLYYKLPLRPETHKTYYEYTGLWHIYGLLAMNSWFWSAIYHSCDTIWTEKAIFFIRCCLSRVFPHFDDSW

SEQ ID NO: 26529 - protein, 176 aa, Zea mays subsp. mays
  misc_feature (1)..(176): Ceres Seq. ID no. 15222596
MLFSFGTESLSDSSSPLGSPVGTQGLRSATRTSTAALPISSMASGARRCPGDRPSRKSNVQKRKVSRLFQSTSMHPKPVPQKEPLSAALSTLTLVVQFNGWLSFFLLLYYKLPLRPETHKTYYEYTGLWHIYGLLAMNSWFWSAIYHSCDTIWTEKAIFFIRCCLSRVFPHFDDSW

SEQ ID NO: 26530 - protein, 135 aa, Zea mays subsp. mays
  misc_feature (1)..(135): Ceres Seq. ID no. 15222597
MASGARRCPGDRPSRKSNVQKRKVSRLFQSTSMHPKPVPQKEPLSAALSTLTLVVQFNGWLSFFLLLYYKLPLRPETHKTYYEYTGLWHIYGLLAMNSWFWSAIYHSCDTIWTEKAIFFIRCCLSRVFPHFDDSW

SEQ ID NO: 26531 - DNA, 1099 bp, Zea mays subsp. mays
  misc_feature (1)..(1099): Ceres Seq. ID no. 13577617
ccaaaagggtcacagttccgcctccttttcctgccttcctcctcactagtcgctcccccgcggctcgcgcaggcgggcgacacaacgaggctaaatccctatcgcgaggaggcgtgtgaggccagcggctttgcgatgacagcaccagcggacaaggggaagaaggccaagactgatgccgacggcggcgaggagaacgaacagatcgacggcgtcctcgtcctctccatcgagaagctccaggagatacaggacgagctcgagaaggtaaatgaggaagcaagtgacaaggttatggaggtggagcagaaatacagtgagatccgcagacctgtctatctcaagaggggtgacattatcaagaccatcccggacttttggctcacagcgtttatgagccatcctctattaagtgagcttctgactgaagaggaccagaagatattcaagtacttagactccattgatgtggatgattctgatgttaaggcaggatactccattcatcttaacttctctgagaacccgtactttgaggacacaaagcttgcaaagacctatatctttgctgatgatggaacaaccacaataaaagcttccgaaattaagtggaaggaaggaatgggacctgcaaatggaaatggtattaacaagaaggggagtaagcggccattagtagaggaaagtttttttagctggtttggtgatacagagctcaagagtcttgctgatggtgtgcaagatgaggtggcggagatcataaaggaagatttgtggcctaatcctttgaagtacttcaacaatgaggttgacgatgaatttgaaggagatgaagatgatgatgatttggatggtgatgatgacgatgaaggcgatgatttggagaactgagcccttgcgcttggttcagaatgttgtccgtggatgatgtggctgggcggaactgtgacccttttgggagattttttgttgttgttgtttgacttagctggaactcaacgtagggaactgtttaatgccttatgaagtcaaccaacttgaaaggagactgcttatatcataatctcggtatatctatctagcaacgcaatttgacccc

SEQ ID NO: 26532 - protein, 296 aa, Zea mays subsp. mays
  misc_feature (1)..(296): Ceres Seq. ID no. 13577618
PKGSQFRLLFLPSSSLVAPPRLAQAGDTTRLNPYREEACEASGFAMTAPADKGKKAKTDADGGEENEQIDGVLVLSIEKLQEIQDELEKVNEEASDKVMEVEQKYSEIRRPVYLKRGDIIKTIPDFWLTAFMSHPLLSELLTEEDQKIFKYLDSIDVDDSDVKAGYSIHLNFSENPYFEDTKLAKTYIFADDGTTTIKASEIKWKEGMGPANGNGINKKGSKRPLVEESFFSWFGDTELKSLADGVQDEVAEIIKEDLWPNPLKYFNNEVDDEFEGDEDDDDLDGDDDDEGDDLEN

SEQ ID NO: 26533 - protein, 251 aa, Zea mays subsp. mays
  misc_feature (1)..(251): Ceres Seq. ID no. 13577619
MTAPADKGKKAKTDADGGEENEQIDGVLVLSIEKLQEIQDELEKVNEEASDKVMEVEQKYSEIRRPVYLKRGDIIKTIPDFWLTAFMSHPLLSELLTEEDQKIFKYLDSIDVDDSDVKAGYSIHLNFSENPYFEDTKLAKTYIFADDGTTTIKASEIKWKEGMGPANGNGINKKGSKRPLVEESFFSWFGDTELKSLADGVQDEVAEIIKEDLWPNPLKYFNNEVDDEFEGDEDDDDLDGDDDDEGDDLEN

SEQ ID NO: 26534 - protein, 198 aa, Zea mays subsp. mays
  misc_feature (1)..(198): Ceres Seq. ID no. 13577620
MEVEQKYSEIRRPVYLKRGDIIKTIPDFWLTAFMSHPLLSELLTEEDQKIFKYLDSIDVDDSDVKAGYSIHLNFSENPYFEDTKLAKTYIFADDGTTTIKASEIKWKEGMGPANGNGINKKGSKRPLVEESFFSWFGDTELKSLADGVQDEVAEIIKEDLWPNPLKYFNNEVDDEFEGDEDDDDLDGDDDDEGDDLEN

SEQ ID NO: 26535 - DNA, 1243 bp, Zea mays subsp. mays
  misc_feature (1)..(1243): Ceres Seq. ID no. 13577632
ggcacgaggcttgctgctgcagtgctgcctccccctcgcccagcagcagggagcagccatgccaggggaccacggctccaagggcgacatctccttcgccggacgcttcacggccagcgccatcgcagcatgcttcgcagagatatgtaccatcccgctcgacacggccaaggtcaggctccagctgcagaagaacgtcgtcgccgccgccgcctccggggacgccgcgccagcgcttcccaagtaccgcggcctgctcggaactgccgccaccatcgctagggaggaaggggccgcagcgctctggaagggcatcgtcccgggcctccaccgacagtgcatctacggggggctccgcattggcctctacgagcctgtcaaatccttctacgtcggcaaagaccacgttggggatgtccctttgtccaagaagatagccgccggcttcacaactggtgccatcgctatcagcatcgccaaccctactgaccttgtcaaggtcaggctccaggccgagggcaagcttgcgcctggtgtgccacgccgctacactggcgcaatggatgcttattccaagattgctagacaggaaggggttgccgctctgtggactggccttggaccaaatgtagcgcggaatgctatcatcaatgctgctgagttggccagttatgatcaagtcaagcagtcaattttgaaactccctgggttcaaagatgatgtggtcacccacctttttgctggtcttggtgctggcttctttgctgtttgtgttggttccccagttgatgtggttaagtcgagaatgatgggtgactcagcctacaaaagcactctcgattgttttgtgaagacgctaaagaatgatggccctttggcattttacaaaggcttcctgccaaactttgcaagactgggatcttggaatgtgattatgttcttgacattggagcaggttcaaaagctgtttgtgaggaaagcgacaagctgaagatagagtttttgcagtcaggtggcgtacaattgacgcacagggtttttcttctatagacaaaaggggagaaatgacacctcccccctcgagaattggggaacaaggacagatctgacacctcaattgcgagaaataaaaataacagccgacagttgcatgatccctgaacgaataaattcagaactagaaaacagatgtcagtaaacaacatgtggtgaatgttggaacttgaactggtcagttaggggc

SEQ ID NO: 26536 - protein, 329 aa, Zea mays subsp. mays
  misc_feature (1)..(329): Ceres Seq. ID no. 13577633
ARGLLLQCCLPLAQQQGAAMPGDHGSKGDISFAGRFTASAIAACFAEICTIPLDTAKVRLQLQKNVVAAAASGDAAPALPKYRGLLGTAATIAREEGAAALWKGIVPGLHRQCIYGGLRIGLYEPVKSFYVGKDHVGDVPLSKKIAAGFTTGAIAISIANPTDLVKVRLQAEGKLAPGVPRRYTGAMDAYSKIARQEGVAALWTGLGPNVARNAIINAAELASYDQVKQSILKLPGFKDDVVTHLFAGLGAGFFAVCVGSPVDVVKSRMMGDSAYKSTLDCFVKTLKNDGPLAFYKGFLPNFARLGSWNVIMFLTLEQVQKLFVRKATS

SEQ ID NO: 26537 - protein, 310 aa, Zea mays subsp. mays
  misc_feature (1)..(310): Ceres Seq. ID no. 13577634
MPGDHGSKGDISFAGRFTASAIAACFAEICTIPLDTAKVRLQLQKNVVAAAASGDAAPALPKYRGLLGTAATIAREEGAAALWKGIVPGLHRQCIYGGLRIGLYEPVKSFYVGKDHVGDVPLSKKIAAGFTTGAIAISIANPTDLVKVRLQAEGKLAPGVPRRYTGAMDAYSKIARQEGVAALWTGLGPNVARNAIINAAELASYDQVKQSILKLPGFKDDVVTHLFAGLGAGFFAVCVGSPVDVVKSRMMGDSAYKSTLDCFVKTLKNDGPLAFYKGFLPNFARLGSWNVIMFLTLEQVQKLFVRKATS

SEQ ID NO: 26538 - DNA, 1405 bp, Zea mays subsp. mays
  misc_feature (1)..(1405): Ceres Seq. ID no. 13577701
gcacgagaccattacctagaacatcctaatcgaaaaacccctaggaaacgacgaccgcaactacataccagccagccgacccgacccccagcagtcttgcaggctacagcccctgcggcaccagagggagcggccgcggcagggcgtcctcgtcgccgcggcagggcgctagggcaggcaggcatgcgctgatggaattcacggcccaggagggggaggagcccgtctcggaggagatgggcgcgagctccgcgccgccgccctgcctcggccccggccgcggcacggggaaccagaaccacgccgccgaggcgacgtaccacgagtgtctgcgcaaccacgcggcggcgctgggcggacacgtcgtcgatggctgcggcgagttcatgcccgaggacgccgacaggctcaagtgcgcagcctgcggctgccaccgcagcttccaccgcaagggcgacgcggggcgccgccaccagctcctgctgccgccgcccgccgcggcggtcccgcgcgtcccgctgctcctgcctccgccccacccctacgcggccggctgctgcccacccccactacgcgtcgccgccgctgttcccgtaccacggcacgcccagcggcaccacgaccgagtcgtccagcgaggagcgtggcccgccgtccgggttcgccgccgcgccgcacgcgcacgcgcagggccacgtccggcggaagcggatccggaccaagttcacgccggagcagaaggagcagatgctggcgttcgcggaacgcctcggctggcggatgcagaagcaggacgacgcgctggtgcagcacttctgcgaccaggtcggcgtccggcggcaggtcttcaaggtctggatgcacaacaacaagcacatcggcagcggcggcaggaggcagccgccgccgcacctgccgcctcccgaggggcagcaacagccccagcagccccagtagccacggtgggagacaaggctcagcagtcagcagcaccaccaccaccaccaccatttgcttaatcccccgcctcatttttttatgggctccgagagggggtgtgggattaaacaagggaagtcaggaggggttcctatcctttcttcccttccgtttttgggttcaccttatccttgattttttgtagtcacttcacgtcttcaccatcctcttttgcttcacgattcttgcttgcatatctttggttttattctgttcttactagcttgggggatcaattggaaggaggaggaggcactgtgcatgttttgtagctacaatcctgctaccttattgccatttagcccccttcggcgagcaaggttaaccaatctaaattccgatctatatttccatcttcacttaatctgttaatcaatagcgaatatagccggtggtctctcctccg

SEQ ID NO: 26539 - protein, 275 aa, Zea mays subsp. mays
  misc_feature (1)..(275): Ceres Seq. ID no. 13577702
MEFTAQEGEEPVSEEMGASSAPPPCLGPGRGTGNQNHAAEATYHECLRNHAAALGGHVVDGCGEFMPEDADRLKCAACGCHRSFHRKGDAGRRHQLLLPPPAAAVPRVPLLLPPPHPYAAGCCPPPLRVAAAVPVPRHAQRHHDRVVQRGAWPAVRVRRRAARARAGPRPAEADPDQVHAGAEGADAGVRGTPRLADAEAGRRAGAALLRPGRRPAAGLQGLDAQQQAHRQRRQEAAAAAPAASRGAATAPAAPVATVGDKAQQSAAPPPPPPFA

SEQ ID NO: 26540 - protein, 260 aa, Zea mays subsp. mays
  misc_feature (1)..(260): Ceres Seq. ID no. 13577703
MGASSAPPPCLGPGRGTGNQNHAAEATYHECLRNHAAALGGHVVDGCGEFMPEDADRLKCAACGCHRSFHRKGDAGRRHQLLLPPPAAAVPRVPLLLPPPHPYAAGCCPPPLRVAAAVPVPRHAQRHHDRVVQRGAWPAVRVRRRAARARAGPRPAEADPDQVHAGAEGADAGVRGTPRLADAEAGRRAGAALLRPGRRPAAGLQGLDAQQQAHRQRRQEAAAAAPAASRGAATAPAAPVATVGDKAQQSAAPPPPPPFA

SEQ ID NO: 26541 - protein, 210 aa, Zea mays subsp. mays
  misc_feature (1)..(210): Ceres Seq. ID no. 13577704
MPEDADRLKCAACGCHRSFHRKGDAGRRHQLLLPPPAAAVPRVPLLLPPPHPYAAGCCPPPLRVAAAVPVPRHAQRHHDRVVQRGAWPAVRVRRRAARARAGPRPAEADPDQVHAGAEGADAGVRGTPRLADAEAGRRAGAALLRPGRRPAAGLQGLDAQQQAHRQRRQEAAAAAPAASRGAATAPAAPVATVGDKAQQSAAPPPPPPFA

SEQ ID NO: 26542 - protein, 195 aa, Zea mays subsp. mays
  misc_feature (1)..(195): Ceres Seq. ID no. 13577705
MAAASSCPRTPTGSSAQPAAATAASTARATRGAATSSCCRRPPRRSRASRCSCLRPTPTRPAAAHPHYASPPLFPYHGTPSGTTTESSSEERGPPSGFAAAPHAHAQGHVRRKRIRTKFTPEQKEQMLAFAERLGWRMQKQDDALVQHFCDQVGVRRQVFKVWMHNNKHIGSGGRRQPPPHLPPPEGQQQPQQPQ

SEQ ID NO: 26543 - DNA, 945 bp, Zea mays subsp. mays
  misc_feature (1)..(945): Ceres Seq. ID no. 13577751
aattttgcttccggctgccgctcttctccgccgccgccccgatccccttcctccccaagcccttcaactatccactcccgcgtccccggagaagcggcgagatgtacggcatcctgacctccccctgccctcgagccccgcttctccgcgctctcccgagcccatccgcccgcgcattccccagaacactagccttccccgcgaggcccctcccccgcggtctccgcctgacccctccgcacgcmgmmgcggaggcatyggcggcagcacggcgttgggcgggcttctggcgtcgccgctctcgactctggaggccgccctgcggggcctcaacctcgcgccccttcgcgcccccgtggcggcggcgatgtcggcggccgtgcggtggctgggagtgtaccgggaggtgctgctcgtcggcgtgctgctctcctggttccccaacatcccctgggaccgccagcccttctcggccctgcgcgacctctgcgaccccttcctcgccctgtgccgtgaggtcatgccccccgtgttcgggcgcaagctcgacctcagcccgcttgttgcattcatggctattgacatcatcatcatgatcctgcgcccgcagccacgcatgtgatgactccctgcagcagtgggtttggacgatgttggttggtatgttaggctctgactgcaggaacaaggatctaaggctgttttcggtcatcagatggcaaagaaaggtgctgtgccgctcacctctatcagtacacaagtgcggtggttggatggattagttttgcgatcttagcatagctgttatggagggtgtaatgcaatataaatgatttcgatgtggcttcattcccaaaacttcctttttctcgtgtcctgtggttgttgtagtaatatgtgttggctacgtttacgtattggtaatcccagttttggtcagtgccc

SEQ ID NO: 26544 - protein, 206 aa, Zea mays subsp. mays
  misc_feature (1)..(206): Ceres Seq. ID no. 15222656
  misc_feature (82)..(82): Xaa is any aa, unknown or other
  misc_feature (83)..(83): Xaa is any aa, unknown or other
  misc_feature (86)..(86): Xaa is any aa, unknown or other
ILLPAAALLRRRPDPLPPQALQLSTPASPEKRRDVRHPDLPLPSSPASPRSPEPIRPRIPQNTSLPREAPPPRSPPDPSARXXGGXGGSTALGGLLASPLSTLEAALRGLNLAPLRAPVAAAMSAAVRWLGVYREVLLVGVLLSWFPNIPWDRQPFSALRDLCDPFLALCREVMPPVFGRKLDLSPLVAFMAIDIIIMILRPQPRM

SEQ ID NO: 26545 - protein, 197 aa, Zea mays subsp. mays
  misc_feature (1)..(197): Ceres Seq. ID no. 15222657
  misc_feature (81)..(81): Xaa is any aa, unknown or other
  misc_feature (82)..(82): Xaa is any aa, unknown or other
  misc_feature (86)..(86): Xaa is any aa, unknown or other
FCFRLPLFSAAAPIPFLPKPFNYPLPRPRRSGEMYGILTSPCPRAPLLRALPSPSARAFPRTLAFPARPLPRGLRLTPPHXXAEAXAAARRWAGFWRRRSRLWRPPCGASTSRPFAPPWRRRCRRPCGGWECTGRCCSSACCSPGSPTSPGTASPSRPCATSATPSSPCAVRSCPPCSGASSTSARLLHSWLLTSSS

SEQ ID NO: 26546 - protein, 164 aa, Zea mays subsp. mays
  misc_feature (1)..(164): Ceres Seq. ID no. 15222658
  misc_feature (48)..(48): Xaa is any aa, unknown or other
  misc_feature (49)..(49): Xaa is any aa, unknown or other
  misc_feature (53)..(53): Xaa is any aa, unknown or other
MYGILTSPCPRAPLLRALPSPSARAFPRTLAFPARPLPRGLRLTPPHXXAEAXAAARRWAGFWRRRSRLWRPPCGASTSRPFAPPWRRRCRRPCGGWECTGRCCSSACCSPGSPTSPGTASPSRPCATSATPSSPCAVRSCPPCSGASSTSARLLHSWLLTSSS

SEQ ID NO: 26547 - DNA, 1320 bp, Zea mays subsp. mays
  misc_feature (1)..(1320): Ceres Seq. ID no. 13577760
actaggtcgacaagaaaatggtggtagcgtcgagtggtggcgcgggaggcgtggagggtggcagcggctgcggtgtctcggcgtcggtgccgccggtggtgtcgtcgagcggtggcgcgggagaggtggagggtggcgacggcggctcggctgcggtgtcggggtcccgccggagggtgaaggggtcgtggacgccggaggaggacgagctgctgcggcgcgcgatcacgcggcacgggccgcggaactggaccgtgatcagctccgagatccccggccggtccggcaagtcgtgccgcctgcggtggtgcaaccagctcagccccagcgtggagcgccgcgccttcacgcccgaggaggacgccatcatcgtcgccgcgcacgcgcagcacggcaacaggtgggccaccatcgcgcggatgctccacggccgcaccgacaactccgtcaagaaccactggaactccacgctgctccgccagcgcagggcggcggccgcccacgccagcgccgccgggtgcgccctccagctgcggccggcaaccacggcctccgtcccgctccgccatctgctggatcgtcctaaggaggcggcggcatccgtttcgttccgtcgtctggacccaaaggcggaggaggaggaggacgaggacatggacgaaggcggcagcagcagcgaggattcggcgcatcggcatcgttcgctgtcacccgcgccggtcgagccgctcacactcaatctatttagcgacggagcccacgggctccctacccccgcccccgcacccgcaccgcagggtacggcagccagaacggagggtgccgccatgaggaggaaggcgaagctggagcaggacccgtggttgagcggcggagtccacggggcccccgcacccgcgccgcagagtgcggcagcgagaacggaaggtgccgtcgtcacgaggatgaagacgaagctggagcatgacccgtggttggtgaccttggtgcggcagatgatatctgtggaggtggagcggcagatgcatggagtgggcccgcaggccagaagcagcgccggtggtggtggtggtgcagacggcgacggcgtgaacggccaggacacgtcgatggacgtggacccgtgacggaatggcggcggtggcgttgggcttaccgagttccttctaccctgtttgtcccgttcgctaatcgcgcgcttgaaccattaacgtccgtcacaccatccgttgatacgtaggtattctagcttgtggttcagtattactttcactctagctgtgatcatcctatagattgaagcttctatttttttcttgg

SEQ ID NO: 26548 - protein, 369 aa, Zea mays subsp. mays
  misc_feature (1)..(369): Ceres Seq. ID no. 13577761
MVVASSGGAGGVEGGSGCGVSASVPPVVSSSGGAGEVEGGDGGSAAVSGSRRRVKGSWTPEEDELLRRAITRHGPRNWTVISSEIPGRSGKSCRLRWCNQLSPSVERRAFTPEEDAIIVAAHAQHGNRWATIARMLHGRTDNSVKNHWNSTLLRQRRAAAAHASAAGCALQLRPATTASVPLRHLLDRPKEAAASVSFRRLDPKAEEEEDEDMDEGGSSSEDSAHRHRSLSPAPVEPLTLNLFSDGAHGLPTPAPAPAPQGTAARTEGAAMRRKAKLEQDPWLSGGVHGAPAPAPQSAAARTEGAVVTRMKTKLEHDPWLVTLVRQMISVEVERQMHGVGPQARSSAGGGGGADGDGVNGQDTSMDVDP

SEQ ID NO: 26549 - protein, 235 aa, Zea mays subsp. mays
  misc_feature (1)..(235): Ceres Seq. ID no. 13577762
MLHGRTDNSVKNHWNSTLLRQRRAAAAHASAAGCALQLRPATTASVPLRHLLDRPKEAAASVSFRRLDPKAEEEEDEDMDEGGSSSEDSAHRHRSLSPAPVEPLTLNLFSDGAHGLPTPAPAPAPQGTAARTEGAAMRRKAKLEQDPWLSGGVHGAPAPAPQSAAARTEGAVVTRMKTKLEHDPWLVTLVRQMISVEVERQMHGVGPQARSSAGGGGGADGDGVNGQDTSMDVDP

SEQ ID NO: 26550 - protein, 194 aa, Zea mays subsp. mays
  misc_feature (1)..(194): Ceres Seq. ID no. 13577763
LGRQENGGSVEWWRGRRGGWQRLRCLGVGAAGGVVERWRGRGGGWRRRLGCGVGVPPEGEGVVDAGGGRAAAARDHAARAAELDRDQLRDPRPVRQVVPPAVVQPAQPQRGAPRLHARGGRHHRRRARAARQQVGHHRADAPRPHRQLRQEPLELHAAPPAQGGGRPRQRRRVRPPAAAGNHGLRPAPPSAGSS

SEQ ID NO: 26551 - DNA, 1676 bp, Zea mays subsp. mays
  misc_feature (1)..(1676): Ceres Seq. ID no. 13577775
gctcccatttcaaaacctcttcctcctctcctcgccgcagctcccaccattcccgcagacgccttgtccccttcccagcttcccctcccccaccccgccgcacgtccgcaagccccacgccaccgtcatgtctccgaccaccaccccgccgcccgcgcccgtggcagccccgacctccaagggcgccaagcgcagcctcatgtcctcgctcatggacgccactgcgctgctccgctcctcctctttcaaggaggactcgtacgtcgcggccgcgctcccggcgtccgagctccgcgcgctcgccgacctcaaggcgctgctcgccacccacccggaccccatctccatctggggcgtcccgctgaaccctcgctcccctcccgccgcggcggacgacgccgccccggtcgacgagcgcgccgacgtggtgctcctcaagttcctccgcgcgcgggacttccgcgtccgcgacgcccacgccatggtgctccgctgcgccgcctggcgcgccgagttcggcgccgacgccgtgctggacgaggagctgggcttcaaggacctggagggcatcgtcgcctacatgcacggctgggaccgcgacggccaccccgtctgctacaacgcctacggcgtcttcaaagacagggacatgtacgagcgcgtcttcggcgacggcgaccgcctcgcgcgcttcctccgctggcgcgtccaggtcatggagcgtggcgtgcgcgcgctcaccctgaggcccgggggcgtcaacgccatcatacaggtcaccgacctcaaggacatgccaaagcgggagctcagagccgccagcaaccagatcctctccctcttccaggacaactacccggagatggtagcgcggaaggtgttcattaacgtgccgtggtacttctccgtgctcttctccatgatctcgcccttcctcacggagcgcaccaagagcaagttcgtcatcgcgcgcgagggcaacgtcgccgagacactctacaagttcatccggccggagctggtgcctgtgcagtacggcgggctgagccgcaccggtgacctcgagaacggaccaccgaagccggcgtccgagttcaccatcaagggtggcgagaaggtcttcctggagatcgacggtatcgaggccggtgcaacgataacgtgggatctggtcgtcgggggctgggacctcgagtacggagccgagtacgtgccggcggccgaggacagctacacgctctgcgtggagaagacgaggatggtctcggccaccgccgaggagcccgtgcacaatgccttcacggctagggaagccggcaagatggtgctgtccatagacaattctgggttcccggaagcgcaaggttgccgcctacaggtacttcgtgcgcaagtcgtcggcgtaggcatgctgatgtcttgtggtggtcgtcgcggccggcaccttgccggcaggtagccgcgagggggaggttaacgtggaacaactggtgaagtgtttacttgggcttgtgggatttggtggggagaggtcaagttaggctgtttaattattagtgctataacgacatgcatgtattatgccatatgtagaatataatgtactccgtaagagctgttgcacttttgtcatcaccactgttataaagctaatgatgagttaagttttttgggct

SEQ ID NO: 26552 - protein, 485 aa, Zea mays subsp. mays
  misc_feature (1)..(485): Ceres Seq. ID no. 13577776
LPFQNLFLLSSPQLPPFPQTPCPLPSFPSPTPPHVRKPHATVMSPTTTPPPAPVAAPTSKGAKRSLMSSLMDATALLRSSSFKEDSYVAAALPASELRALADLKALLATHPDPISIWGVPLNPRSPPAAADDAAPVDERADVVLLKFLRARDFRVRDAHAMVLRCAAWRAEFGADAVLDEELGFKDLEGIVAYMHGWDRDGHPVCYNAYGVFKDRDMYERVFGDGDRLARFLRWRVQVMERGVRALTLRPGGVNAIIQVTDLKDMPKRELRAASNQILSLFQDNYPEMVARKVFINVPWYFSVLFSMISPFLTERTKSKFVIAREGNVAETLYKFIRPELVPVQYGGLSRTGDLENGPPKPASEFTIKGGEKVFLEIDGIEAGATITWDLVVGGWDLEYGAEYVPAAEDSYTLCVEKTRMVSATAEEPVHNAFTAREAGKMVLSIDNSGFPEAQGCRLQVLRAQVVGVGMLMSCGGRRGRHLAGR

SEQ ID NO: 26553 - protein, 443 aa, Zea mays subsp. mays
  misc_feature (1)..(443): Ceres Seq. ID no. 13577777
MSPTTTPPPAPVAAPTSKGAKRSLMSSLMDATALLRSSSFKEDSYVAAALPASELRALADLKALLATHPDPISIWGVPLNPRSPPAAADDAAPVDERADVVLLKFLRARDFRVRDAHAMVLRCAAWRAEFGADAVLDEELGFKDLEGIVAYMHGWDRDGHPVCYNAYGVFKDRDMYERVFGDGDRLARFLRWRVQVMERGVRALTLRPGGVNAIIQVTDLKDMPKRELRAASNQILSLFQDNYPEMVARKVFINVPWYFSVLFSMISPFLTERTKSKFVIAREGNVAETLYKFIRPELVPVQYGGLSRTGDLENGPPKPASEFTIKGGEKVFLEIDGIEAGATITWDLVVGGWDLEYGAEYVPAAEDSYTLCVEKTRMVSATAEEPVHNAFTAREAGKMVLSIDNSGFPEAQGCRLQVLRAQVVGVGMLMSCGGRRGRHLAGR

SEQ ID NO: 26554 - protein, 419 aa, Zea mays subsp. mays
  misc_feature (1)..(419): Ceres Seq. ID no. 13577778
MSSLMDATALLRSSSFKEDSYVAAALPASELRALADLKALLATHPDPISIWGVPLNPRSPPAAADDAAPVDERADVVLLKFLRARDFRVRDAHAMVLRCAAWRAEFGADAVLDEELGFKDLEGIVAYMHGWDRDGHPVCYNAYGVFKDRDMYERVFGDGDRLARFLRWRVQVMERGVRALTLRPGGVNAIIQVTDLKDMPKRELRAASNQILSLFQDNYPEMVARKVFINVPWYFSVLFSMISPFLTERTKSKFVIAREGNVAETLYKFIRPELVPVQYGGLSRTGDLENGPPKPASEFTIKGGEKVFLEIDGIEAGATITWDLVVGGWDLEYGAEYVPAAEDSYTLCVEKTRMVSATAEEPVHNAFTAREAGKMVLSIDNSGFPEAQGCRLQVLRAQVVGVGMLMSCGGRRGRHLAGR

SEQ ID NO: 26555 - DNA, 1725 bp, Zea mays subsp. mays
  misc_feature (1)..(1725): Ceres Seq. ID no. 13577779
gaccgttgtgcttgcggcttcgctcgttcccctccaccactccgtctccttcctattgctgagtgcggcacccttgcctataataaaccccgccgcacgcccgcaccggagaagaaagctcccaagtcccaatccacgttcctcgccccctgccgctccggagagtcatggccaccgccgtttccacccccgcggacctgtcgcccacgcctgccccgagacggcggggccggccgccgaagaaccccgccccagccgaggccccaggcagcccggcggaccaagcggaggtgattggggactacgagcgcgagagggacgcgaggatccgggagaacatggagcggatgcagaagctcggcatcctcgacctcgcgcacaccctcagccactgcgccgccgcctcgggtctgggtaccggcagcgggcggtggcgccggaagcccgtggagccggggtctgctggtggggccagggtgaagcccgcgtcgccggcgccctcgcggagatcgctcaggttgaaggacgtggaaccggttacctatcgtgaaattgagccaaagaaagagaaacgctctgaaggtggcaaaactgttttaatggaggtgggagccaaggaagaaatatacactgaagagcatgacaagcttttgggtacatgcaacactccttggactctctttgttgatggttatggcaaagatggaaaacgcatttatgatcaagtgaggggtcaaacctgtcatcagtgccgtcagaagactcttggtcatcatacaagctgctgtaaatgccagattgtccaaggacagttctgtggagactgtttgtacatgaggtatggtgaaaatgtgttagaggttaagaagaatcctaactggatatgtccagtttgccgtggcatctgtaattgcagtctatgcagaactaagaaaggatggttccctactgggtctgcgtataggaaggcgatcggacttgggtacaaatctgtggcacactttctaattgcaacacatcgagcatcatcagtcaattcaagctcagtcgacaataacaagctgccgtttgctaaatctgaaacctcgtgcatttctgaccatgccaatgagagcccagaggatggagaaacgaccagcaaagctaagcagaacaaagcaactcgccgccgagtgaggaagagttctgatggcgacaacgatagcagaagtgggtccgtggtgacatctgactgccaggatgatcaagccaacaaggatgctgggtgtgtgactccgtcgtctaagccagcgtcaacgaagaggaagtacgttgaacgaagccctgactgcatcgcaagcaggctgcggtctcggctcaatatgccatgagcccatgaagatgtgatcaggatcatgtatctcttttactgcctgaccgcaggctctgtcccttcttgcgatgatgttgtggctctttcatctacaagcagttcatggtttgccagtaacgatgttctgcgcgagtaagaaggtgattgttatagtctcttgcgcagctgtgttaagagcttgaaactagactcagtcatgtgtagtatttgtaccattagtgccaactgtggtctctggcattagtgcctactgtggtttgtgagctatgagttgacgcgatagcctgtagctttaatgtacaattcatgatatgcaagtgaatatgttcattttcagctggaaagaaaaaagg

SEQ ID NO: 26556 - protein, 400 aa, Zea mays subsp. mays
  misc_feature (1)..(400): Ceres Seq. ID no. 13577780
MATAVSTPADLSPTPAPRRRGRPPKNPAPAEAPGSPADQAEVIGDYERERDARIRENMERMQKLGILDLAHTLSHCAAASGLGTGSGRWRRKPVEPGSAGGARVKPASPAPSRRSLRLKDVEPVTYREIEPKKEKRSEGGKTVLMEVGAKEEIYTEEHDKLLGTCNTPWTLFVDGYGKDGKRIYDQVRGQTCHQCRQKTLGHHTSCCKCQIVQGQFCGDCLYMRYGENVLEVKKNPNWICPVCRGICNCSLCRTKKGWFPTGSAYRKAIGLGYKSVAHFLIATHRASSVNSSSVDNNKLPFAKSETSCISDHANESPEDGETTSKAKQNKATRRRVRKSSDGDNDSRSGSVVTSDCQDDQANKDAGCVTPSSKPASTKRKYVERSPDCIASRLRSRLNMP

SEQ ID NO: 26557 - protein, 343 aa, Zea mays subsp. mays
  misc_feature (1)..(343): Ceres Seq. ID no. 13577781
MERMQKLGILDLAHTLSHCAAASGLGTGSGRWRRKPVEPGSAGGARVKPASPAPSRRSLRLKDVEPVTYREIEPKKEKRSEGGKTVLMEVGAKEEIYTEEHDKLLGTCNTPWTLFVDGYGKDGKRIYDQVRGQTCHQCRQKTLGHHTSCCKCQIVQGQFCGDCLYMRYGENVLEVKKNPNWICPVCRGICNCSLCRTKKGWFPTGSAYRKAIGLGYKSVAHFLIATHRASSVNSSSVDNNKLPFAKSETSCISDHANESPEDGETTSKAKQNKATRRRVRKSSDGDNDSRSGSVVTSDCQDDQANKDAGCVTPSSKPASTKRKYVERSPDCIASRLRSRLNMP

SEQ ID NO: 26558 - protein, 340 aa, Zea mays subsp. mays
  misc_feature (1)..(340): Ceres Seq. ID no. 13577782
MQKLGILDLAHTLSHCAAASGLGTGSGRWRRKPVEPGSAGGARVKPASPAPSRRSLRLKDVEPVTYREIEPKKEKRSEGGKTVLMEVGAKEEIYTEEHDKLLGTCNTPWTLFVDGYGKDGKRIYDQVRGQTCHQCRQKTLGHHTSCCKCQIVQGQFCGDCLYMRYGENVLEVKKNPNWICPVCRGICNCSLCRTKKGWFPTGSAYRKAIGLGYKSVAHFLIATHRASSVNSSSVDNNKLPFAKSETSCISDHANESPEDGETTSKAKQNKATRRRVRKSSDGDNDSRSGSVVTSDCQDDQANKDAGCVTPSSKPASTKRKYVERSPDCIASRLRSRLNMP

SEQ ID NO: 26559 - DNA, 1635 bp, Zea mays subsp. mays
  misc_feature (1)..(1635): Ceres Seq. ID no. 13577792
gcaccaaccttgttgttgttgttcttctatttcttagtatcatagcacagtatttcgtgctctcgcttcgctcccttaatttatcaccattcctaatttattctatttcttagtatcatagcacagtatttcgctcgccccgatttcccaactcttcccgtgcctcagacagcatcggattgcttgatctcgattgtcagaataagattcagcgcaggtttggattcaccgaatccaccgattgcttgcgccccgcggtcgcgcgcggcggaatttcggccgccgccaattcgggcctctccggaagggtgtccccggtgtggttcgcctaatatccgctgccctcgtgcgggactcctcgtgattttcggctgtgcgcttggcttttccagtcccgtgttgtggttccagcctttcaggggatggggcgccgcgggttgctcaaggctgcgcttctgctgtgcttccttgctgcttgctccgggagagaacttacgatcaaacagaacccttccactaccatatacaactcgactcttgccaagatactcgtggaatatgcttctgcaatctatactgctgatttgacgcaattgtttacttggacatgtgccagatgcggtgacttgatcgaggggttcgagatgatagagatcattgtggatgtcgagaactgcttgcaggcatattttggttttgccagtgacataaacgcagtcgttgttgtttttagaggaactcaagagaacagcatccagaattggatagaggacttgttatggaaacaacttgatcttgactaccctggcatgcctgaagcaatggttcaccgagggttttattctgcatatcacaacacgacactacgtgatggagtagtcagtggtattcagaggactaggaaagcttacggagacattccaatcatgatcacgggtcattcaatgggtggagctatggcttcattctgtgcgctcgatcttgttgttaactacggactggatggcgtaaacctgatgacatttgggcagcctcgtattggcaatgctgcatttgcttcttatttcaagacatacttgcctcaagcgatccgagttactcatgcccatgatattgtgcctcacctgccaccatatttctcattcttcccacagaagacctaccatcacttcccaagagaggtatggacccacaatattggactaggaaccctagtgtaccccgtagaaaagatctgtgacgattctggtgaagaccctacatgctgcagatcagtaagtggaagtagcgtgcgagaccatatatactatcttggcgtcagcatgcatgcagaagactggagcagctgcagaatcgtcatggactacagcaaattgcagtatcagatggacctcaacggtaatctcgtattgtcgaagcagcccggtttgtcaaacgccagaggattcagtgctcagtgaaccagtctatgatttgtacagtataatagcttcacgaatcagtaatgttcaattgttaatggatcaaaggagaagggttggaaccagcatgccgattcggagatgcttattgtacatgtgattacgtaatgtattgttcagtttgcaaatatatattcacacacgccgatatttg

SEQ ID NO: 26560 - protein, 345 aa, Zea mays subsp. mays
  misc_feature (1)..(345): Ceres Seq. ID no. 13577793
MGRRGLLKAALLLCFLAACSGRELTIKQNPSTTIYNSTLAKILVEYASAIYTADLTQLFTWTCARCGDLIEGFEMIEIIVDVENCLQAYFGFASDINAVVVVFRGTQENSIQNWIEDLLWKQLDLDYPGMPEAMVHRGFYSAYHNTTLRDGVVSGIQRTRKAYGDIPIMITGHSMGGAMASFCALDLVVNYGLDGVNLMTFGQPRIGNAAFASYFKTYLPQAIRVTHAHDIVPHLPPYFSFFPQKTYHHFPREVWTHNIGLGTLVYPVEKICDDSGEDPTCCRSVSGSSVRDHIYYLGVSMHAEDWSSCRIVMDYSKLQYQMDLNGNLVLSKQPGLSNARGFSAQ

SEQ ID NO: 26561 - protein, 271 aa, Zea mays subsp. mays
  misc_feature (1)..(271): Ceres Seq. ID no. 13577794
MIEIIVDVENCLQAYFGFASDINAVVVVFRGTQENSIQNWIEDLLWKQLDLDYPGMPEAMVHRGFYSAYHNTTLRDGVVSGIQRTRKAYGDIPIMITGHSMGGAMASFCALDLVVNYGLDGVNLMTFGQPRIGNAAFASYFKTYLPQAIRVTHAHDIVPHLPPYFSFFPQKTYHHFPREVWTHNIGLGTLVYPVEKICDDSGEDPTCCRSVSGSSVRDHIYYLGVSMHAEDWSSCRIVMDYSKLQYQMDLNGNLVLSKQPGLSNARGFSAQ

SEQ ID NO: 26562 - protein, 216 aa, Zea mays subsp. mays
  misc_feature (1)..(216): Ceres Seq. ID no. 13577795
MPEAMVHRGFYSAYHNTTLRDGVVSGIQRTRKAYGDIPIMITGHSMGGAMASFCALDLVVNYGLDGVNLMTFGQPRIGNAAFASYFKTYLPQAIRVTHAHDIVPHLPPYFSFFPQKTYHHFPREVWTHNIGLGTLVYPVEKICDDSGEDPTCCRSVSGSSVRDHIYYLGVSMHAEDWSSCRIVMDYSKLQYQMDLNGNLVLSKQPGLSNARGFSAQ

SEQ ID NO: 26563 - DNA, 1108 bp, Zea mays subsp. mays
  misc_feature (1)..(1108): Ceres Seq. ID no. 13577820
attaatcccccacgttccccttccctttctctcccgccgccgcacgcccctctcaaacctccgcgctcccgcccagctagggtttccccgatctcccctccttctcaaccgccgccgtcgccgagagcgccgccacgatgttggagctgcggcttgtgcaggggagctcggggaaaccctagctgggcgggcgctgaaggcgttgcgggggctggtgaagctgcaggcgctggtccggggcaacatcgtgcggcggcggcggcggaaaccaccaccaccagcaccaccagtcgccgtgctcgacgacgatgggctccgagcagaacagccggagctacgcgaccatgccggagtcgccgtccaaggactcgacgaccgcgcagcagtcggtgccgagcccgccgtcggtgggcatggccgaggaggaggccctgagcccgctgcgcgtgcccgtgcccgcggacgtggccgagctctgcgacagcccccagttcttctcggccacgtcgtcgcggcccgggagctcgaggcggggcccgttcacgccgacggncaagagcgagtgctcgcgcagcctcttcggcggctactcccgactacccgaaactacatggccaacacggagtcgttccgcgccaaggcgcggtcgcagagcgcgccgaagcagaggccgcagtacgagcggtccagctccctacgcagggcgtcggcggcgcagaggtcggcggcggcggcggcctcctccctgcacgccaagttcaccaacaaggcgtacccgggctctggcaggctggatcggcttggcttgccggccaggtactgatactgagcctgcctaattcgcgtcaggatgatgtgctgccgctgtgtctcgagcgaggaggacgacgacgaagaagtgcaatcgactagtggtagttaggttcccccgtgccttggttgtgctattaccatcaacagttttttctgtttcttgctttgtgtagctagccatgtctaaagttgctggtagctgtaatgatgctataatgcgtgcttaactgctgacgaacctttttcctctacatttccgtggtatatatatatgtgccgtcaaatcatgcctggg

SEQ ID NO: 26564 - protein, 273 aa, Zea mays subsp. mays
  misc_feature (1)..(273): Ceres Seq. ID no. 13577821
  misc_feature (184)..(184): Xaa is any aa, unknown or other
LIPHVPLPFLSRRRTPLSNLRAPAQLGFPRSPLLLNRRRRRERRHDVGAAACAGELGETLAGRALKALRGLVKLQALVRGNIVRRRRRKPPPPAPPVAVLDDDGLRAEQPELRDHAGVAVQGLDDRAAVGAEPAVGGHGRGGGPEPAARARARGRGRALRQPPVLLGHVVAARELEAGPVHADXQERVLAQPLRRLLPTTRNYMANTESFRAKARSQSAPKQRPQYERSSSLRRASAAQRSAAAAASSLHAKFTNKAYPGSGRLDRLGLPARY

SEQ ID NO: 26565 - protein, 176 aa, Zea mays subsp. mays
  misc_feature (1)..(176): Ceres Seq. ID no. 13577822
  misc_feature (82)..(82): Xaa is any aa, unknown or other
MGSEQNSRSYATMPESPSKDSTTAQQSVPSPPSVGMAEEEALSPLRVPVPADVAELCDSPQFFSATSSRPGSSRRGPFTPTXKSECSRSLFGGYSRLPETTWPTRSRSAPRRGRRARRSRGRSTSGPAPYAGRRRRRGRRRRRPPPCTPSSPTRRTRALAGWIGLACRPGTDTEPA

SEQ ID NO: 26566 - protein, 164 aa, Zea mays subsp. mays
  misc_feature (1)..(164): Ceres Seq. ID no. 13577823
  misc_feature (70)..(70): Xaa is any aa, unknown or other
MPESPSKDSTTAQQSVPSPPSVGMAEEEALSPLRVPVPADVAELCDSPQFFSATSSRPGSSRRGPFTPTXKSECSRSLFGGYSRLPETTWPTRSRSAPRRGRRARRSRGRSTSGPAPYAGRRRRRGRRRRRPPPCTPSSPTRRTRALAGWIGLACRPGTDTEPA

SEQ ID NO: 26567 - DNA, 1466 bp, Zea mays subsp. mays
  misc_feature (1)..(1466): Ceres Seq. ID no. 13577847
atgtaaaaccgtccgacgcgagccccacctccgcgctcgcacgcggaaggagagggacgagcgagccaccgtcaccgagcgcggttacaagaaaatccaatctctcccccacgctcgtttcgactcgcgccatggaggcgcaggcgcaggacaatagggcggaggatggggacggcgcgcggcaacacgtagccggcggcgtcgcggcgacggggatggctatgggcgcgatccccatgcacgggttcatggtcccgaagccagagccggtggagttcttcggcgggatggccgtggtgcggagcaagccgccgccgcggaaccgcgaccggcacaccaaggtggaggggcgggggcggcggatccgcatgcccgcggcgtgcgcggccaggatcttccagctgacgcgggagctagggcacaagtccgacggcgagaccatccggtggctgctgcagcagtcggagcccgccatcatcgccgccaccggcaccggcacggtcccggcgatcgcgaccacggtcgacggcgtgctccgcatccccacgcagtcctcgtcgtcctccagcccctcgtccctcaccaccgtggtcgacggcgacgaggcgtccgccaagcgccgccgcaagctgcagccgacgcgagcggccgccggcgcgtccccgctcgccaccgccgcgcccgcggcgtactacccggtcctcgccgacccgctcctgcagggcaccggtggagcggccatctcggtgccgagcggcctcgcccccatcgccgcgtcgggcgcccctcaagggctcgtcccggtcttcgcggtccctgcggccggcagccccggcggcggcaaccgcatgattccgcaggccaccgccgtgtggatggtgccccagcctggcgccgcggccgcccagcccacgcaattctgggccatccagcccgcgccgcagctcatcaacctcggcggcgcgcaggccgccgtgttccccgcggcggtgaacgtcgccgacttccagggccagcagcccatctctagcttgtctcacaacagcaactcggagcatctgcacctggggtccgggtcccacgagcagcagcgcggcggtcgcagcgacgtcaaccatccggaggaggaagaagacgacgacgacgacgacgagccggtgtccgactccagcccagaagagtaacgcaccnccgtacccccagaaagtccaaccccaaagcttaggttccttttgctctaatttaatcgccccccctcgttttcccccttttcgcaatcctccttatgatgaactacatgatgctttctgtcgtagctcacgttcagttcagtgacccccagtgttagtggtagagagaagaagatgatgatnaaagaggtagtggaactgtanaagcagcgtgtaatgcaaatcaaaacgagcagctgatttgttattgagttaattaattgacgaccttttgcc

SEQ ID NO: 26568 - protein, 393 aa, Zea mays subsp. mays
  misc_feature (1)..(393): Ceres Seq. ID no. 13577848
VKPSDASPTSALARGRRGTSEPPSPSAVTRKSNLSPTLVSTRAMEAQAQDNRAEDGDGARQHVAGGVAATGMAMGAIPMHGFMVPKPEPVEFFGGMAVVRSKPPPRNRDRHTKVEGRGRRIRMPAACAARIFQLTRELGHKSDGETIRWLLQQSEPAIIAATGTGTVPAIATTVDGVLRIPTQSSSSSSPSSLTTVVDGDEASAKRRRKLQPTRAAAGASPLATAAPAAYYPVLADPLLQGTGGAAISVPSGLAPIAASGAPQGLVPVFAVPAAGSPGGGNRMIPQATAVWMVPQPGAAAAQPTQFWAIQPAPQLINLGGAQAAVFPAAVNVADFQGQQPISSLSHNSNSEHLHLGSGSHEQQRGGRSDVNHPEEEEDDDDDDEPVSDSSPEE

SEQ ID NO: 26569 - protein, 350 aa, Zea mays subsp. mays
  misc_feature (1)..(350): Ceres Seq. ID no. 13577849
MEAQAQDNRAEDGDGARQHVAGGVAATGMAMGAIPMHGFMVPKPEPVEFFGGMAVVRSKPPPRNRDRHTKVEGRGRRIRMPAACAARIFQLTRELGHKSDGETIRWLLQQSEPAIIAATGTGTVPAIATTVDGVLRIPTQSSSSSSPSSLTTVVDGDEASAKRRRKLQPTRAAAGASPLATAAPAAYYPVLADPLLQGTGGAAISVPSGLAPIAASGAPQGLVPVFAVPAAGSPGGGNRMIPQATAVWMVPQPGAAAAQPTQFWAIQPAPQLINLGGAQAAVFPAAVNVADFQGQQPISSLSHNSNSEHLHLGSGSHEQQRGGRSDVNHPEEEEDDDDDDEPVSDSSPEE

SEQ ID NO: 26570 - protein, 322 aa, Zea mays subsp. mays
  misc_feature (1)..(322): Ceres Seq. ID no. 13577850
MAMGAIPMHGFMVPKPEPVEFFGGMAVVRSKPPPRNRDRHTKVEGRGRRIRMPAACAARIFQLTRELGHKSDGETIRWLLQQSEPAIIAATGTGTVPAIATTVDGVLRIPTQSSSSSSPSSLTTVVDGDEASAKRRRKLQPTRAAAGASPLATAAPAAYYPVLADPLLQGTGGAAISVPSGLAPIAASGAPQGLVPVFAVPAAGSPGGGNRMIPQATAVWMVPQPGAAAAQPTQFWAIQPAPQLINLGGAQAAVFPAAVNVADFQGQQPISSLSHNSNSEHLHLGSGSHEQQRGGRSDVNHPEEEEDDDDDDEPVSDSSPEE

SEQ ID NO: 26571 - DNA, 1582 bp, Zea mays subsp. mays
  misc_feature (1)..(1582): Ceres Seq. ID no. 13577851
gaccagaggcggagagcactatagtcacgagctccacagtccaagctcgcactcgcaagtgctagcatctctcgggaatggcggagtcgcgtggtttcgtgatgacggctgtgatggtggtggtggtggccatggtatcagtggcgccgcgcggnnggnaggcgaagacgancgattgagccgtgctcggggtccgactcttgcccggcgctgctgggctacacgctctacgccgacatgaaggtgtccgaggtggccgcgctcttctccgtcgacccggcggcgttgctggccgccaacgcgctcgacttcggcgccccagggtgcggcgcacgcatcctgcccatgggcctcttcgtncgcgtncccacccgctgctcctgcgccgacggntccgcaagtccgtctccgtccgctacgccgcgcgcncggccganacgctcgccaccgtctccgangtcgtcttcgcngggctcgcctcctccgaccagatccgcaacgagaacggcctcacctccgacgaccccgacgcgccgctcgacgccggccagaagctcgccatcccgctgccatgcgtctgcttcaactcgtccgacaacaacctccccgcggtgtacctctcctacgtcgtgcaggtcggggacaccgtgcccgccatcgctgcaagctacgagaccaccgtcacggatgtcatgaatgtcaatgccatggggagtcccgtcgccgcgccaggcgacattctcgccatcccattgccagcatgtgcatctgcatttccaaaatctgcatcagaccacggactgattgtagcgaatggaacttacgcgcttaccgctagcaactgtgtgcagtgtagctgtggacctggcagcctcaatctatattgcacgccaacttcactgtcgggaacctgtcctagtatgcaatgtcctaacagcaacgtgatgcttggcaatgtgagcacccatccaaccggcgctggatgcaacgtctctgcttgcagctacggaggttttgttaatggaactataacagcttcgctaaccggaggtctccaagccagatgcccaggaccacgccagtttcccgcactgacggaaccacctaccacggtgagccacgactcgacgtaccttcctccgttatcagcgcctgggccagcggaagctggtggcgtcatgcctgagccaggctcgccagggccaggcgcctcggtgcaagcagggcccttcacgctcccgaaagtgtctaaggccaatggccccgctggcagcgtttcagcagctccgttggtgggtaaaccacttcaaatcctacccgtcctgntctcctgcctagccttctacttgcagctctgagtgaacccacatcgcgatgagntctttagcatagtatgcttttgaagcaccaagggacatcattgctcgatcactccctctgagttgttgttctagctttgtttcgcgaaatctccccggcaaaactgcgcgcctaaacggcatatctgatgatgtgttcgctgcttttgtacaaaaagacaatggccctgtgtaaagcagtaaagtggtagctattgttctcc

SEQ ID NO: 26572 - protein, 221 aa, Zea mays subsp. mays
  misc_feature (1)..(221): Ceres Seq. ID no. 13577852
  misc_feature (212)..(212): Xaa is any aa, unknown or other
MNVNAMGSPVAAPGDILAIPLPACASAFPKSASDHGLIVANGTYALTASNCVQCSCGPGSLNLYCTPTSLSGTCPSMQCPNSNVMLGNVSTHPTGAGCNVSACSYGGFVNGTITASLTGGLQARCPGPRQFPALTEPPTTVSHDSTYLPPLSAPGPAEAGGVMPEPGSPGPGASVQAGPFTLPKVSKANGPAGSVSAAPLVGKPLQILPVLXSCLAFYLQL

SEQ ID NO: 26573 - protein, 216 aa, Zea mays subsp. mays
  misc_feature (1)..(216): Ceres Seq. ID no. 13577853
  misc_feature (207)..(207): Xaa is any aa, unknown or other
MGSPVAAPGDILAIPLPACASAFPKSASDHGLIVANGTYALTASNCVQCSCGPGSLNLYCTPTSLSGTCPSMQCPNSNVMLGNVSTHPTGAGCNVSACSYGGFVNGTITASLTGGLQARCPGPRQFPALTEPPTTVSHDSTYLPPLSAPGPAEAGGVMPEPGSPGPGASVQAGPFTLPKVSKANGPAGSVSAAPLVGKPLQILPVLXSCLAFYLQL

SEQ ID NO: 26574 - protein, 152 aa, Zea mays subsp. mays
  misc_feature (1)..(152): Ceres Seq. ID no. 13577854
  misc_feature (41)..(41): Xaa is any aa, unknown or other
  misc_feature (43)..(43): Xaa is any aa, unknown or other
  misc_feature (52)..(52): Xaa is any aa, unknown or other
  misc_feature (64)..(64): Xaa is any aa, unknown or other
  misc_feature (67)..(67): Xaa is any aa, unknown or other
  misc_feature (74)..(74): Xaa is any aa, unknown or other
  misc_feature (78)..(78): Xaa is any aa, unknown or other
MKVSEVAALFSVDPAALLAANALDFGAPGCGARILPMGLFXRXPTRCSCADXSASPSPSATPRXRPXRSPPSPXSSSXGSPPPTRSATRTASPPTTPTRRSTPARSSPSRCHASASTRPTTTSPRCTSPTSCRSGTPCPPSLQATRPPSRMS

SEQ ID NO: 26575 - DNA, 2053 bp, Zea mays subsp. mays
  misc_feature (1)..(2053): Ceres Seq. ID no. 13577863
actagaacaccttggtggcctccgcgtctcgccgcctccccggactccgcatccagccccggcactcgcactcccaaagcagcggacactagtagggtttaaactttccccccgatccgcctcgcctccggnctgtcgcctgccgccagaccaacgcccccacacccagccggagacgacgatggtggggctcggctcgatggcgggctatgggatccagtcgatgctcaaggaaggccaccgccacctctccgggctcgaggaggccgtgctcaagaacatcgacgcctgccgcgagctctccgccatcacgcgcacatccctgggccccaacggaatgaacaagatggttatcaatcacttggacaagctgtttgtcacaaacgatgctgccaccatcgtgaatgagcttgaggttcagcacccggctgctaaaatcctggtactggctgccaaggctcaacaggaggagattggggatggagccaatctcaccatatcgtttgctggtgaactgnttgagaaggctgaggagctcatcaggatgggcttgcatccgagtgagatcatcattggctacaccaaagccatcaacaagacaattgaaattttagaggatcttgttgagaaaggctcanagaacatggacgtaagaaacaaggaggatgttgtgttgaggatgagatctgctgtcgcaagcaagcagtttggccaggaggatatgctgtgccctcttgtggctgatgcctgcattcaagtttgccccaaaaatcctgcaaactttaatgttgacaatgttagagtggctaagctacttggaggtggtttgcacaattcttctgtggtccgtgggatggttctgaaaaatgatgctgttggtagcatcaaaagggcggagaaggcaaagattgtcgtatttgctggtggtgtcgacacctcggcaactgaaacaaagggaaccgtgttgatccattccgctgagcagctagaaaattatgctaagaccgaggaagctaaggtggaggagcttatcaaagctgtcgctgactctggtgccaaggttattgtcagtggagctgcagtggggtgacatggcacttcatttctgtgaacgttataagctgatggttctgaaaatcagctcgaagtttgaactaagaaggttctgccgtactactggggctgttgcaattttgaaacttagccaacccaatgcggacgaactaggatacgcagattctgtttctgtagaagaaattggtggtactcgggttactgtcgtcaagaacgaagatggtggaaattcagtggctactgttgtcctgagaggcagtactgacagtatactagatgatcttgaaagagctgttgatgatggcgtcaatacatacaggtcaatgtgcagggacagtaggataattcctggtgctgctgcaacagaagttgagctggcaaagagattgaaggagttctctttgaaggaaacagggttggaccagtatgccattgcgaaatttgctgaaagctttgaaatggttccaagaaccctggcagaaaatgctggacttagcgcaatggagataatatcctctctttatgctgagcatgctagtggcaatgcgaaagttggcattgatctggaggaagncgcctgcaaggacatctcgactttaaaaatatgggacctctatgtcacaaagttttttgccctaaaatactctgccgatgctgcttgcacggtgctgcgggttgaccagatcattatggcaaagccggcaggaggtccaagaagagatgcccagcctggtggcgggatggacgaggattagtttgattatagttgttttctttgtatcacgtatgtgaggtttcagagcagagatcatactttatcttggcttttggttctgtagaaggtttgggtgcctggagttcacttttggaaggtctgcacggttgcgcggatatcacataggcaatttgtatgttttttcctggtgtattgcggtgcggatgtatcaaatgattcattacaggggccgttccgtcagtt

SEQ ID NO: 26576 - protein, 362 aa, Zea mays subsp. mays
  misc_feature (1)..(362): Ceres Seq. ID no. 13577864
  misc_feature (44)..(44): Xaa is any aa, unknown or other
  misc_feature (173)..(173): Xaa is any aa, unknown or other
  misc_feature (213)..(213): Xaa is any aa, unknown or other
LEHLGGLRVSPPPRTPHPAPALALPKQRTLVGFKLSPRSASPPXCRLPPDQRPHTQPETTMVGLGSMAGYGIQSMLKEGHRHLSGLEEAVLKNIDACRELSAITRTSLGPNGMNKMVINHLDKLFVTNDAATIVNELEVQHPAAKILVLAAKAQQEEIGDGANLTISFAGELXEKAEELIRMGLHPSEIIIGYTKAINKTIEILEDLVEKGSXNMDVRNKEDVVLRMRSAVASKQFGQEDMLCPLVADACIQVCPKNPANFNVDNVRVAKLLGGGLHNSSVVRGMVLKNDAVGSIKRAEKAKIVVFAGGVDTSATETKGTVLIHSAEQLENYAKTEEAKVEELIKAVADSGAKVIVSGAAVG

SEQ ID NO: 26577 - protein, 302 aa, Zea mays subsp. mays
  misc_feature (1)..(302): Ceres Seq. ID no. 13577865
  misc_feature (113)..(113): Xaa is any aa, unknown or other
  misc_feature (153)..(153): Xaa is any aa, unknown or other
MVGLGSMAGYGIQSMLKEGHRHLSGLEEAVLKNIDACRELSAITRTSLGPNGMNKMVINHLDKLFVTNDAATIVNELEVQHPAAKILVLAAKAQQEEIGDGANLTISFAGELXEKAEELIRMGLHPSEIIIGYTKAINKTIEILEDLVEKGSXNMDVRNKEDVVLRMRSAVASKQFGQEDMLCPLVADACIQVCPKNPANFNVDNVRVAKLLGGGLHNSSVVRGMVLKNDAVGSIKRAEKAKIVVFAGGVDTSATETKGTVLIHSAEQLENYAKTEEAKVEELIKAVADSGAKVIVSGAAVG

SEQ ID NO: 26578 - protein, 296 aa, Zea mays subsp. mays
  misc_feature (1)..(296): Ceres Seq. ID no. 13577866
  misc_feature (107)..(107): Xaa is any aa, unknown or other
  misc_feature (147)..(147): Xaa is any aa, unknown or other
MAGYGIQSMLKEGHRHLSGLEEAVLKNIDACRELSAITRTSLGPNGMNKMVINHLDKLFVTNDAATIVNELEVQHPAAKILVLAAKAQQEEIGDGANLTISFAGELXEKAEELIRMGLHPSEIIIGYTKAINKTIEILEDLVEKGSXNMDVRNKEDVVLRMRSAVASKQFGQEDMLCPLVADACIQVCPKNPANFNVDNVRVAKLLGGGLHNSSVVRGMVLKNDAVGSIKRAEKAKIVVFAGGVDTSATETKGTVLIHSAEQLENYAKTEEAKVEELIKAVADSGAKVIVSGAAVG

SEQ ID NO: 26579 - DNA, 1885 bp, Zea mays subsp. mays
  misc_feature (1)..(1885): Ceres Seq. ID no. 13577867
aacacatgtgtgtgcagtgtagacgagcgcgtacgtaacttattgggaggttgcgcgtacggcaactcccgtcgcctccgcgctcccctaaccgcctcccccttgtctcatggtggaagtggaacaaccctccgcctgcgccgctgcgaagtaagtgagaagggaaaacaagaaacgaggagggagggaggggacgacgtacggagcgagctagcggcgcggcgggcgtcgctcggcatggacgcggaggcggcggcggcggcggcggcgacggcggtggaggagagggagcggctgcggaggagcttcgcgtcggggaggacgcggccggcggcgtggcgggaggcgcagctgcgcggccttctgcgcatggccgccgagagggaggacgacatctgcgccgccctgcacgccgacctcgcgaagccccttaccgagtgttatgtacacgagntatcattggtcattncttcgtgcaaatttgctctcaagaatctcaagaaatggatgaagccccgaaaggtccccggcgggctgctgaccttcccgtcggcggccagcgtcgcggcggagcctctcggcgtcgtgctcgtcatctccgcctggaactaccccttcttgctggccatcgacccggtcgtgggggcattcgcggcgggcaacgccgtggcgctgaagccgtcggaggtggcgccggccacgtcgttgctgctggccgacctgctgccgcgctacgtggacccctcgtgcgtcagggtcgtgcagggcggcatcccggagaccaccgcgctgctggagctccagtgggacaagatcttctacacaggtaacagcagagtaggacgcatcgtcatgtcctacgctgccaatcacctgacgcccgtggtcttggagctcggtggcaaatgccctgtcgtcgtcgactccgacgtcaacctccacgtcgctgccaagaggatcgccgccggcaagtggggctgcaacagcggccaagcctgcgtctcgccggactacgtcgtcaccaccaaatcgttcgcgccaaagctgctggagtccctgaagcgagtgctattcgagttctacggggaggagccgctgcggtcgccggacctgtcgcgcgtcgtcaactccaaccacttcaacaggctcatggcgctcatggacgactactcggtctccggcaatgtcgcgttcggcggccagatcgacgagcggcggctaaggatcgccccgacgctgctgctggacgtcccgctcgactccgcgatgatgaaggaggagatcttcgggccgctgcttcccataatcacggtggacaagatcggcgagagcttcgctgtgatcaactccatgcccaagccgctggcagcttacctcttcagcaacgacgggcaggctcaagcagcagttcgagaggaccgtctcggcgggagggatcatgttcaacgacaccggcatccacctgacaaacccgaacctgccgttcggaggagtcggggagagcggcatgggcgcctaccacggcgccttcagcttcgacgccttctcccacaggaaggccgtcctggaccgcagcttcctcggcgaggccagggccaggtacccgccgtacacgccggcgaagctcgccatcctcaggggcgtgctcaatggcagcccgcttgccacggttcaggcggctgcggggtgtacaggaggggcatcagctgactgactgactgaccccccttcatgcttattattaataataagcataaatattcaccgcatacacattgctgtgcttttattaaggttgttgtgagggcgaaaaatgtattgaccctttgcgtgtgcgcgtgcgtgtatagcaactattaataaaagaaaaaagtgatgttcattc

SEQ ID NO: 26580 - protein, 569 aa, Zea mays subsp. mays
  misc_feature (1)..(569): Ceres Seq. ID no. 13577868
  misc_feature (152)..(152): Xaa is any aa, unknown or other
  misc_feature (157)..(157): Xaa is any aa, unknown or other
NTCVCSVDERVRNLLGGCAYGNSRRLRAPLTASPLSHGGSGTTLRLRRCEVSEKGKQETRREGGDDVRSELAARRASLGMDAEAAAAAAATAVEERERLRRSFASGRTRPAAWREAQLRGLLRMAAEREDDICAALHADLAKPLTECYVHEXSLVIXSCKFALKNLKKWMKPRKVPGGLLTFPSAASVAAEPLGVVLVISAWNYPFLLAIDPVVGAFAAGNAVALKPSEVAPATSLLLADLLPRYVDPSCVRVVQGGIPETTALLELQWDKIFYTGNSRVGRIVMSYAANHLTPVVLELGGKCPVVVDSDVNLHVAAKRIAAGKWGCNSGQACVSPDYVVTTKSFAPKLLESLKRVLFEFYGEEPLRSPDLSRVVNSNHFNRLMALMDDYSVSGNVAFGGQIDERRLRIAPTLLLDVPLDSAMMKEEIFGPLLPIITVDKIGESFAVINSMPKPLAAYLFSNDGQAQAAVREDRLGGRDHVQRHRHPPDKPEPAVRRSRGERHGRLPRRLQLRRLLPQEGRPGPQLPRRGQGQVPAVHAGEARHPQGRAQWQPACHGSGGCGVYRRGIS

SEQ ID NO: 26581 - protein, 490 aa, Zea mays subsp. mays
  misc_feature (1)..(490): Ceres Seq. ID no. 13577869
  misc_feature (73)..(73): Xaa is any aa, unknown or other
  misc_feature (78)..(78): Xaa is any aa, unknown or other
MDAEAAAAAAATAVEERERLRRSFASGRTRPAAWREAQLRGLLRMAAEREDDICAALHADLAKPLTECYVHEXSLVIXSCKFALKNLKKWMKPRKVPGGLLTFPSAASVAAEPLGVVLVISAWNYPFLLAIDPVVGAFAAGNAVALKPSEVAPATSLLLADLLPRYVDPSCVRVVQGGIPETTALLELQWDKIFYTGNSRVGRIVMSYAANHLTPVVLELGGKCPVVVDSDVNLHVAAKRIAAGKWGCNSGQACVSPDYVVTTKSFAPKLLESLKRVLFEFYGEEPLRSPDLSRVVNSNHFNRLMALMDDYSVSGNVAFGGQIDERRLRIAPTLLLDVPLDSAMMKEEIFGPLLPIITVDKIGESFAVINSMPKPLAAYLFSNDGQAQAAVREDRLGGRDHVQRHRHPPDKPEPAVRRSRGERHGRLPRRLQLRRLLPQEGRPGPQLPRRGQGQVPAVHAGEARHPQGRAQWQPACHGSGGCGVYRRGIS

SEQ ID NO: 26582 - protein, 446 aa, Zea mays subsp. mays
  misc_feature (1)..(446): Ceres Seq. ID no. 13577870
  misc_feature (29)..(29): Xaa is any aa, unknown or other
  misc_feature (34)..(34): Xaa is any aa, unknown or other
MAAEREDDICAALHADLAKPLTECYVHEXSLVIXSCKFALKNLKKWMKPRKVPGGLLTFPSAASVAAEPLGVVLVISAWNYPFLLAIDPVVGAFAAGNAVALKPSEVAPATSLLLADLLPRYVDPSCVRVVQGGIPETTALLELQWDKIFYTGNSRVGRIVMSYAANHLTPVVLELGGKCPVVVDSDVNLHVAAKRIAAGKWGCNSGQACVSPDYVVTTKSFAPKLLESLKRVLFEFYGEEPLRSPDLSRVVNSNHFNRLMALMDDYSVSGNVAFGGQIDERRLRIAPTLLLDVPLDSAMMKEEIFGPLLPIITVDKIGESFAVINSMPKPLAAYLFSNDGQAQAAVREDRLGGRDHVQRHRHPPDKPEPAVRRSRGERHGRLPRRLQLRRLLPQEGRPGPQLPRRGQGQVPAVHAGEARHPQGRAQWQPACHGSGGCGVYRRGIS

SEQ ID NO: 26583 - DNA, 1048 bp, Zea mays subsp. mays
  misc_feature (1)..(1048): Ceres Seq. ID no. 13577875
cagacttccagcatctccgctccggctgcgctctgccttgctttcctgctacctgctctagcgcgagcgagagaggtacggcggccgatctggcggcgcaggcggagggctcggccggggccggcaagtcggcgccgaacatggggaggggccgggtcgagctcaagcggatcgagaacaagatcaaccgccaggtcaccttcgccaagcgccgcaacggcctgctcaagaaggcgtacgagctctcggtgctctgcgacgccgaggtcgcgctcatcatcttctccaaccgcggcaagctctacgagttctccagcacgcagagcatgccaaaaacacttgaaaagtaccaaaaatgcagttttgcagggcctgaaacagcactccagaatagagagaatgagcaactgaaaagtagccgcaatgagtacctcaaactgaaggcacgtgttgataatttacagcggactcaaaggaacttgcttggtgaagatcttgagtcattaggcataaaagagctggagcacctggagaagcagctcgattcgtccttgaagcacataagatctacaaggacacaacacatggttgatcaactgacagaacttcagaaaaaagaacaaatgttttgtgaagcaaataagtgtcttcgaagaagactggaggagagcaaccaggttatatggcagcatgcgtgggagcaaagcgagcggcattctgaagtgcagccgcagcagctcaatggcaataacttcttccatcccctcgatggtgctggtgaacccacccttcagatagggtatccttcagaggcactgactagctcatgcatgaccaccttcctgcccccgtggttgccatgagatcgaactactgcgcaattccgaattaataagcatggccgcatgcagctgcctgtgctatacgttgtgcttggagtgtactttaaggttcttgcatggcaagtatgtgtgtaacatttgtgatgaacatggaaactatccacttaattctcgaataatcaatgaactgggtaagattgtaacat

SEQ ID NO: 26584 - protein, 286 aa, Zea mays subsp. mays
  misc_feature (1)..(286): Ceres Seq. ID no. 13577876
DFQHLRSGCALPCFPATCSSASERGTAADLAAQAEGSAGAGKSAPNMGRGRVELKRIENKINRQVTFAKRRNGLLKKAYELSVLCDAEVALIIFSNRGKLYEFSSTQSMPKTLEKYQKCSFAGPETALQNRENEQLKSSRNEYLKLKARVDNLQRTQRNLLGEDLESLGIKELEHLEKQLDSSLKHIRSTRTQHMVDQLTELQKKEQMFCEANKCLRRRLEESNQVIWQHAWEQSERHSEVQPQQLNGNNFFHPLDGAGEPTLQIGYPSEALTSSCMTTFLPPWLP

SEQ ID NO: 26585 - protein, 240 aa, Zea mays subsp. mays
  misc_feature (1)..(240): Ceres Seq. ID no. 13577877
MGRGRVELKRIENKINRQVTFAKRRNGLLKKAYELSVLCDAEVALIIFSNRGKLYEFSSTQSMPKTLEKYQKCSFAGPETALQNRENEQLKSSRNEYLKLKARVDNLQRTQRNLLGEDLESLGIKELEHLEKQLDSSLKHIRSTRTQHMVDQLTELQKKEQMFCEANKCLRRRLEESNQVIWQHAWEQSERHSEVQPQQLNGNNFFHPLDGAGEPTLQIGYPSEALTSSCMTTFLPPWLP

SEQ ID NO: 26586 - protein, 178 aa, Zea mays subsp. mays
  misc_feature (1)..(178): Ceres Seq. ID no. 13577878
MPKTLEKYQKCSFAGPETALQNRENEQLKSSRNEYLKLKARVDNLQRTQRNLLGEDLESLGIKELEHLEKQLDSSLKHIRSTRTQHMVDQLTELQKKEQMFCEANKCLRRRLEESNQVIWQHAWEQSERHSEVQPQQLNGNNFFHPLDGAGEPTLQIGYPSEALTSSCMTTFLPPWLP

SEQ ID NO: 26587 - DNA, 1805 bp, Zea mays subsp. mays
  misc_feature (1)..(1805): Ceres Seq. ID no. 13579576
taatcgaaaaaattgggcacagaagaggagacagagagacggagaggggagacccggtcactgccaatgccaagaacaagaaaccagagaggacagtcgtcaatccaatccgagtctcctccaaaaacccatcaatctgcaggaacgagagcagcaggagagcatcctaggaaaaaagttaggaccaactgaccgagcaaaaaaggtagcatctctgtatcaccaaggcaccgccgatcacagaccaaatccctcccccctcctctggtccatcccacacgtagagcagccggtatttcttcgatccgtgcttgcgctttttttttctctttgtaaagatttcgtttccctcccttttaactgttgtcgagaagtttcgacaagagtggtgtgagtgttgaagagctcctcaacatgatggatccggccttgcttgacgacgtcatacgccggctgctggaggtgaagaatctcaagcctgggaagaacgcgcagttgtcggagtcggagatcaagcagctctgcgctgccgccaaggagatcttcctgcaccagcccaacctgctggagctcgaggcgcccatcaaaatctgcggtgatgtccatggccagtactctgatctcctgaggctattcgattatggtggctatccgcctcaggccaactaccttttcttgggtgattatgtggatcgtggaaagcaaagcttggaaacaatatgtcttcttttggcctacaaggtcaagtacccagagaacttctttcttctaaggggaaaccatgaatgcgcatcagtaaatcgcatctatggtttttatgacgagtgcaaacgcagattcagtgtaaagctgtggaaaacattcactgactgttttaactgcttgccagtgtcagcattgatagacgaaaagatcctctgtatgcatggtggtctatctccagagttgaacaagctcgaacaaatacttaatctgagtcgccccacagacgtgcctgatactggattgctctgtgaccttctttggtctgatccttctaatgaagcaacaggatgggccataaatgatcgaggtgtttcatatacatttggtcctgataaagtttctgaattccttgagaagcatgatttggacctcatctgccgagcccatcaggttgtcgaagatggatatgagtttttcgctagccgccaactcgtaacaatgttttcagcccctaactactgtggagaatttgataacgctggtgccatgatgagtgtagatgagacattgatgtgctccttccaaatactgaaacctgcgaggaaggtgttgggtggttcaactaataacaaatcaggcttcaagtcatcgagaggatggtgacaatggcaagcctgatatcaggttggttggtgagcagcacgccagtggtcgacggggggttgttccatcataatcatattacagcggctgcaactgacaggcccaatgcatcttctcttccatgttggatcaacactcttgtaatgtattatttactgtgcggatctgagaggatgtgaatgatttcatttgcgtcctcaagttcaaaagattcaggaaggcatgcttgaaataaaaatagccagaaacatgcaaggtgctccacgacgcagcacggcatttccagtgttttctttttgctgtctagttctgaatatattttaccgccagaccagcacgtaagcttgcctggcaatggtttttatttgttgctatgccatctcaaaagtcaaaaccatggatttatatcaaaagtcaaaagactttgagaagtattt

SEQ ID NO: 26588 - protein, 317 aa, Zea mays subsp. mays
  misc_feature (1)..(317): Ceres Seq. ID no. 13579577
MMDPALLDDVIRRLLEVKNLKPGKNAQLSESEIKQLCAAAKEIFLHQPNLLELEAPIKICGDVHGQYSDLLRLFDYGGYPPQANYLFLGDYVDRGKQSLETICLLLAYKVKYPENFFLLRGNHECASVNRIYGFYDECKRRFSVKLWKTFTDCFNCLPVSALIDEKILCMHGGLSPELNKLEQILNLSRPTDVPDTGLLCDLLWSDPSNEATGWAINDRGVSYTFGPDKVSEFLEKHDLDLICRAHQVVEDGYEFFASRQLVTMFSAPNYCGEFDNAGAMMSVDETLMCSFQILKPARKVLGGSTNNKSGFKSSRGW

SEQ ID NO: 26589 - protein, 316 aa, Zea mays subsp. mays
  misc_feature (1)..(316): Ceres Seq. ID no. 13579578
MDPALLDDVIRRLLEVKNLKPGKNAQLSESEIKQLCAAAKEIFLHQPNLLELEAPIKICGDVHGQYSDLLRLFDYGGYPPQANYLFLGDYVDRGKQSLETICLLLAYKVKYPENFFLLRGNHECASVNRIYGFYDECKRRFSVKLWKTFTDCFNCLPVSALIDEKILCMHGGLSPELNKLEQILNLSRPTDVPDTGLLCDLLWSDPSNEATGWAINDRGVSYTFGPDKVSEFLEKHDLDLICRAHQVVEDGYEFFASRQLVTMFSAPNYCGEFDNAGAMMSVDETLMCSFQILKPARKVLGGSTNNKSGFKSSRGW

SEQ ID NO: 26590 - DNA, 2970 bp, Zea mays subsp. mays
  misc_feature (1)..(2970): Ceres Seq. ID no. 13579604
gaattcgcggccgccttatttctggttggccacatacatcatccaaaaaactttattattgaattacaactaataagcaatctaaaagagggcaccaccaatgatgtgttgttggtaggaggccgctgggtctgtcaaagcaagttggacaaagggcaacaattgttgtagttgtaagagggttgcggggttagccgcaaactgctggtagaaaggcagcaactgttgctgtgtcaagaaggaagcacggtttgctgcagctgttgtgccctgatggtttgtaccaatgactgcaccaaagatagggctggcgattgttgaaacaacaagggcgataaaggtatgttgcttgctgcgattgcttgttgaagcctatatggttgaagagctgggttttcacatattgaagctataattgatggaaggtatgggggaagaagggaagctataggagcttgtgagcattgagggaaaattgtcgcgttagcaacacatgtagaaagagcaaggagcataaggagggaaaatatcttggtcgccattgttgcgcgcgatccacggcccccgccccccgcgctcctgtctgctctccctctccgcaatggcgacgccctcggccgtgggcgccgcgtgcctcctcctcgcgcgggccgcctggccggccgccgtcggcgaccgggcgcgcccgcggcggctccagcgcgtgctgcgccgccggtgcgtcgcggagctgagcagggaggggcccgcgccgcgcccgctgccacccgcgctgctggcgcccccgctcgtgcccggcttcctcgcgccgccggccgagcccacgggtgagccggcatcgacgccgccgcccgtgcccgacgccggcctgggggacctcggtctcgaacctgaagggattgctgaaggttccatcgataacacagtagttgtggcaagtgagcaagattctgagattgtggttggaaaggagcaagctcgagctaaagtaacacaaagcattgtctttgtaaccggcgaagcttctccttatgcaaagtctgggggtctaggagatgtttgtggttcattgccagttgctcttgctgctcgtggtcaccgtgtgatggttgtaatgcccagatatttaaatggtacctccgataagaattatgcaaatgcattttacacagaaaaacacattcggattccatgctttggcggtgaacatgaagttaccttcttccatgagtatagagattcagttgactgggtgtttgttgatcatccctcatatcacagacctggaaatttatatggagataagtttggtgcttttggtgataatcagttcagatacacactcctttgctatgctgcatgtgaggctcctttgatccttgaattgggaggatatatttatggacagaattgcatgtttgttgtcaatgattggcatgccagtctagtgccagtccttcttgctgcaaaatatagaccatatggtgtttataaagactcccgcagcattcttgtaatacataatttagcacatcagggtgtagagcctgcaagcacatatcctgaccttgggttgccacctgaatggtatggagctctggagtgggtattccctgaatgggcgaggaggcatgcccttgacaagggtgaggcagttaattttttgaaaggtgcagttgtgacagcagatcgaatcgtgactgtcagtaagggttattcgtgggaggtcacaactgctgaaggtggacagggcctcaatgagctcttaagctccagaaagagtgtattaaacggaattgtaaatggaattgacattaatgattggaaccctgccacagacaaatgtatcccctgtcattattctgttgatgacctctctggaaaggccaaatgtaaaggtgcattgcagaaggagctgggtttacctataaggcctgatgttcctctgattggctttattggaaggttggattatcagaaaggcattgatctcattcaacttatcataccagatctcatgcgggaagatgttcaatttgtcatgcttggatctggtgacccagagcttgaagattggatgagatctacagagtcgatcttcaaggataaatttcgtggatgggttggatttagtgttccagtttcccaccgaataactgccggctgcgatatattgttaatgccatccagattcgaaccttgtggtctcaatcagctatatgctatgcagtatggcacagttcctgttgtccatgcaactgggggccttagagataccgtggagaacttcaaccctttcggtgagaatggagagcagggtacagggtgggcattcgcacccctaaccacagaaaacatgtttgtggacattgcgaactgcaatatctacatacagggaacacaagtcctcctgggaagggctaatgaagcgaggcatgtcaaaagacttcacgtgggaccatgccgctgaacaatacgaacaaatcttccagtgggccttcatcggatcgacccgatgttcaatggaaaaaagggaccaaagttggttggttccttgaagattatcagttcatcatcctatagtaagctgaatgatgaaagaaaacccctgtacattacatggaaggcagaccggctattggctccattgctccaatgtctgctttggctgccttgcctcgatggaccggatgcagtgaggaatccagncgaacgacagttttgaaggataggaaggggagctggaagcagtcacgcaggcaggcaagccttcgccgttaattcatatggaacaagctggagtcagtttctgctgtgccactcactgtttaccttaagattattacctgtgttgttctcctttgctcgttagggctgataacataatgactcattaagaatataattcactctgcctcgtttttaatcttaagtgaagtcgagatctacttcgtcattccttccccgttt

SEQ ID NO: 26591 - protein, 622 aa, Zea mays subsp. mays
  misc_feature (1)..(622): Ceres Seq. ID no. 13579605
MATPSAVGAACLLLARAAWPAAVGDRARPRRLQRVLRRRCVAELSREGPAPRPLPPALLAPPLVPGFLAPPAEPTGEPASTPPPVPDAGLGDLGLEPEGIAEGSIDNTVVVASEQDSEIVVGKEQARAKVTQSIVFVTGEASPYAKSGGLGDVCGSLPVALAARGHRVMVVMPRYLNGTSDKNYANAFYTEKHIRIPCFGGEHEVTFFHEYRDSVDWVFVDHPSYHRPGNLYGDKFGAFGDNQFRYTLLCYAACEAPLILELGGYIYGQNCMFVVNDWHASLVPVLLAAKYRPYGVYKDSRSILVIHNLAHQGVEPASTYPDLGLPPEWYGALEWVFPEWARRHALDKGEAVNFLKGAVVTADRIVTVSKGYSWEVTTAEGGQGLNELLSSRKSVLNGIVNGIDINDWNPATDKCIPCHYSVDDLSGKAKCKGALQKELGLPIRPDVPLIGFIGRLDYQKGIDLIQLIIPDLMREDVQFVMLGSGDPELEDWMRSTESIFKDKFRGWVGFSVPVSHRITAGCDILLMPSRFEPCGLNQLYAMQYGTVPVVHATGGLRDTVENFNPFGENGEQGTGWAFAPLTTENMFVDIANCNIYIQGTQVLLGRANEARHVKRLHVGPCR

SEQ ID NO: 26592 - protein, 454 aa, Zea mays subsp. mays
  misc_feature (1)..(454): Ceres Seq. ID no. 13579606
MVVMPRYLNGTSDKNYANAFYTEKHIRIPCFGGEHEVTFFHEYRDSVDWVFVDHPSYHRPGNLYGDKFGAFGDNQFRYTLLCYAACEAPLILELGGYIYGQNCMFVVNDWHASLVPVLLAAKYRPYGVYKDSRSILVIHNLAHQGVEPASTYPDLGLPPEWYGALEWVFPEWARRHALDKGEAVNFLKGAVVTADRIVTVSKGYSWEVTTAEGGQGLNELLSSRKSVLNGIVNGIDINDWNPATDKCIPCHYSVDDLSGKAKCKGALQKELGLPIRPDVPLIGFIGRLDYQKGIDLIQLIIPDLMREDVQFVMLGSGDPELEDWMRSTESIFKDKFRGWVGFSVPVSHRITAGCDILLMPSRFEPCGLNQLYAMQYGTVPVVHATGGLRDTVENFNPFGENGEQGTGWAFAPLTTENMFVDIANCNIYIQGTQVLLGRANEARHVKRLHVGPCR

SEQ ID NO: 26593 - protein, 451 aa, Zea mays subsp. mays
  misc_feature (1)..(451): Ceres Seq. ID no. 13579607
MPRYLNGTSDKNYANAFYTEKHIRIPCFGGEHEVTFFHEYRDSVDWVFVDHPSYHRPGNLYGDKFGAFGDNQFRYTLLCYAACEAPLILELGGYIYGQNCMFVVNDWHASLVPVLLAAKYRPYGVYKDSRSILVIHNLAHQGVEPASTYPDLGLPPEWYGALEWVFPEWARRHALDKGEAVNFLKGAVVTADRIVTVSKGYSWEVTTAEGGQGLNELLSSRKSVLNGIVNGIDINDWNPATDKCIPCHYSVDDLSGKAKCKGALQKELGLPIRPDVPLIGFIGRLDYQKGIDLIQLIIPDLMREDVQFVMLGSGDPELEDWMRSTESIFKDKFRGWVGFSVPVSHRITAGCDILLMPSRFEPCGLNQLYAMQYGTVPVVHATGGLRDTVENFNPFGENGEQGTGWAFAPLTTENMFVDIANCNIYIQGTQVLLGRANEARHVKRLHVGPCR

SEQ ID NO: 26594 - DNA, 2388 bp, Zea mays subsp. mays
  misc_feature (1)..(2388): Ceres Seq. ID no. 13579684
cggatttggaggagtcgaataaacaaggaaactcctcccggcccagaaagcacttcacttgcaacagtccccgtcagggagggagcattgctgtgcgggatggcgataaggaagagcggaggcggtggcggggtggggggtgtggcgcggcggctgctgcttctggcctgctgctgcatttggcctggtggacggatcttcactgctgcggacactgaccccaacgatcttaatgtcctcaatacgctcttcaccagtctgaattctcctgggcagctcagagcttggcgggcgaatggcggtgatccttgtggccagtcatggcagggcattacctgctcaggatcaggggtcactaaaatcctattaccaaacttgtcactcaccggaaatctggcctacaacatgaataacttgggttcattagttgagcttgacatgagccaaaataaccttggcggtggaggtcaaatacagtacaatcttcccaatatgaagcttgagaaactcaatcttgcaggaaatcaatttggtggaaatttaccctactcaatttcgacgatgcctaatcttaagtatttaaaccttaatcataaccaactacaaggaaacatcactgatgtattttccaacctttatagtttgtcagagctggatctctcctttaattctcttactggtgatctaccacaaagtttcactggattgtcaagcctgaaaagaatgtatttgcagaacaaccaatttactggttatatcaatgtcttagccaaccttccccttgaaaccctgaatgttggaaacaaccatttcactggttggattcccagtcagcttaagaagataaacaatctacagaccgacggaaattcttggagcacaggaccagcgccacctccacctccatatacagcgcctcctcctccaaaccattggaatggcgcgggtcagaatggtgatggttcatcaagttctggtggaagacctgggataggtggtggaggtgtagcaggaatcattatatcattgctgattgttggatcagttgttgcattttttctaatcaaaagaagaaaacacaaagctattatggaagaacaatttgaacagcatcagccgttcacttccttcccttcaaatgaagttaacgacatgaagcctatctatgagtccaccacagtagacatagagtctttggcttcacctgcttcgattaatctgaaaccacccccgaagatagaacagaacaaatcatttgatgatgatgatgatttttcaaacaagactgctgcaaatagaagtaatataacacctatgaaggcaactgtttattcagttgcagatctacagatggcaacagatagcttcagcttcgataaccttgttggagagggtacttttggacgtgtttacagggcacagttcaatggtggaaaggttctggccatcaagaaattagacattactgtgatgccatttcaatcgtctgatgactttgctgaactggtctcgaacatttcaaaattgcaccatccgaatctgaatgagcttgtaggctattgcatggaacatggccagcacttgcttgtgtatgatttccataggaatggatcgcttcatgatctacgccacctttcagatgagtacagcaaggcacttagctggaactctcgcatcaagttcgcactcggctctgcccgtgcactggagtaccttcatgaaatatgttctccatccatcatccataagaatttcaaggcatcaaatattttgctggactcagaattcaatccacacctttcagatactggacttgcaagcttcattcctggtgctgaattccaggcagcagaacaaagtgccggatacactgccccagaagtggacatgaccggtcagtacaccctcaagagtgatgtttacagctttggagttgtcatgcttgagctactgacaggacgtagaccatttgacagctctagacccaggtcagagcagtcacttgtgcggtgggcagcacctcagctgcatgacatcgatgcattggacagaatggtcgatcctgcactcaagggtctatacccagccaaatctctatcccgatttgctgatgtcctcgccctgtgtgtccagcctgaaccagaattcaggccaccaatgtcagaggtggtgcaagcattggttcgacttgtgcagagggccaacatgacgaagaggatgcttgatggaggagatacttctcgtggaccagatgatcaggaccaatatttcatatgacaagctgaactcgagcttttcagctacctctcagattgtatttatctcgtctcgttccactagcgcccggcagagacataatcacacaagtggaagagacagaactctgtc

SEQ ID NO: 26595 - protein, 758 aa, Zea mays subsp. mays
  misc_feature (1)..(758): Ceres Seq. ID no. 13579685
RIWRSRINKETPPGPESTSLATVPVREGALLCGMAIRKSGGGGGVGGVARRLLLLACCCIWPGGRIFTAADTDPNDLNVLNTLFTSLNSPGQLRAWRANGGDPCGQSWQGITCSGSGVTKILLPNLSLTGNLAYNMNNLGSLVELDMSQNNLGGGGQIQYNLPNMKLEKLNLAGNQFGGNLPYSISTMPNLKYLNLNHNQLQGNITDVFSNLYSLSELDLSFNSLTGDLPQSFTGLSSLKRMYLQNNQFTGYINVLANLPLETLNVGNNHFTGWIPSQLKKINNLQTDGNSWSTGPAPPPPPYTAPPPPNHWNGAGQNGDGSSSSGGRPGIGGGGVAGIIISLLIVGSVVAFFLIKRRKHKAIMEEQFEQHQPFTSFPSNEVNDMKPIYESTTVDIESLASPASINLKPPPKIEQNKSFDDDDDFSNKTAANRSNITPMKATVYSVADLQMATDSFSFDNLVGEGTFGRVYRAQFNGGKVLAIKKLDITVMPFQSSDDFAELVSNISKLHHPNLNELVGYCMEHGQHLLVYDFHRNGSLHDLRHLSDEYSKALSWNSRIKFALGSARALEYLHEICSPSIIHKNFKASNILLDSEFNPHLSDTGLASFIPGAEFQAAEQSAGYTAPEVDMTGQYTLKSDVYSFGVVMLELLTGRRPFDSSRPRSEQSLVRWAAPQLHDIDALDRMVDPALKGLYPAKSLSRFADVLALCVQPEPEFRPPMSEVVQALVRLVQRANMTKRMLDGGDTSRGPDDQDQYFI

SEQ ID NO: 26596 - protein, 725 aa, Zea mays subsp. mays
  misc_feature (1)..(725): Ceres Seq. ID no. 13579686
MAIRKSGGGGGVGGVARRLLLLACCCIWPGGRIFTAADTDPNDLNVLNTLFTSLNSPGQLRAWRANGGDPCGQSWQGITCSGSGVTKILLPNLSLTGNLAYNMNNLGSLVELDMSQNNLGGGGQIQYNLPNMKLEKLNLAGNQFGGNLPYSISTMPNLKYLNLNHNQLQGNITDVFSNLYSLSELDLSFNSLTGDLPQSFTGLSSLKRMYLQNNQFTGYINVLANLPLETLNVGNNHFTGWIPSQLKKINNLQTDGNSWSTGPAPPPPPYTAPPPPNHWNGAGQNGDGSSSSGGRPGIGGGGVAGIIISLLIVGSVVAFFLIKRRKHKAIMEEQFEQHQPFTSFPSNEVNDMKPIYESTTVDIESLASPASINLKPPPKIEQNKSFDDDDDFSNKTAANRSNITPMKATVYSVADLQMATDSFSFDNLVGEGTFGRVYRAQFNGGKVLAIKKLDITVMPFQSSDDFAELVSNISKLHHPNLNELVGYCMEHGQHLLVYDFHRNGSLHDLRHLSDEYSKALSWNSRIKFALGSARALEYLHEICSPSIIHKNFKASNILLDSEFNPHLSDTGLASFIPGAEFQAAEQSAGYTAPEVDMTGQYTLKSDVYSFGVVMLELLTGRRPFDSSRPRSEQSLVRWAAPQLHDIDALDRMVDPALKGLYPAKSLSRFADVLALCVQPEPEFRPPMSEVVQALVRLVQRANMTKRMLDGGDTSRGPDDQDQYFI

SEQ ID NO: 26597 - protein, 623 aa, Zea mays subsp. mays
  misc_feature (1)..(623): Ceres Seq. ID no. 13579687
MNNLGSLVELDMSQNNLGGGGQIQYNLPNMKLEKLNLAGNQFGGNLPYSISTMPNLKYLNLNHNQLQGNITDVFSNLYSLSELDLSFNSLTGDLPQSFTGLSSLKRMYLQNNQFTGYINVLANLPLETLNVGNNHFTGWIPSQLKKINNLQTDGNSWSTGPAPPPPPYTAPPPPNHWNGAGQNGDGSSSSGGRPGIGGGGVAGIIISLLIVGSVVAFFLIKRRKHKAIMEEQFEQHQPFTSFPSNEVNDMKPIYESTTVDIESLASPASINLKPPPKIEQNKSFDDDDDFSNKTAANRSNITPMKATVYSVADLQMATDSFSFDNLVGEGTFGRVYRAQFNGGKVLAIKKLDITVMPFQSSDDFAELVSNISKLHHPNLNELVGYCMEHGQHLLVYDFHRNGSLHDLRHLSDEYSKALSWNSRIKFALGSARALEYLHEICSPSIIHKNFKASNILLDSEFNPHLSDTGLASFIPGAEFQAAEQSAGYTAPEVDMTGQYTLKSDVYSFGVVMLELLTGRRPFDSSRPRSEQSLVRWAAPQLHDIDALDRMVDPALKGLYPAKSLSRFADVLALCVQPEPEFRPPMSEVVQALVRLVQRANMTKRMLDGGDTSRGPDDQDQYFI

SEQ ID NO: 26598 - DNA, 703 bp, Zea mays subsp. mays
  misc_feature (1)..(703): Ceres Seq. ID no. 13580129
atcagaaccgatccttacagagagacacacccagcgcgcgagatatctacatcgatcatcatcaccagcgagcgagccggccgagcagcaccgatggnggcgtacatgcgcgtgacgcaccgcgacgaggaaggcaagaaggtgacggagaagatgccggtcccggagacgcggcgcccggacacggccaagcacttcgagcgcaagctggaggagcagggcctccaccgcttcgagcggcacccggcgaacgcgccccggggcgtgggcatcggcgccccnccgcccaagtccgggcgcggcggcaagtacacctgggagggccccggcagcgtcgtcgaggaccagctngacccggcgccgcccgccatcgaccccaacgaccccaactacgaggaggcggaggacgacgaggcggccagggaggtggtcgtcggggaggtggaggtcgctaaggtcgccgagggcagggacggcgtcgccagggtngacgtcgcgccgggcctgctccaggaccagaagcagtaaaaagacttgtcttttctggatacgtntagagtntagatcgactcggtgtgtgtcagtgtgttcgagtttattccgtgcagagagtgcacgtcaactccgctttaattaatctgcttttgttaatatttctactgatcagtaatatgaaccagtggttgatatttggatggncctt

SEQ ID NO: 26599 - protein, 175 aa, Zea mays subsp. mays
  misc_feature (1)..(175): Ceres Seq. ID no. 13580130
  misc_feature (33)..(33): Xaa is any aa, unknown or other
  misc_feature (94)..(94): Xaa is any aa, unknown or other
  misc_feature (117)..(117): Xaa is any aa, unknown or other
  misc_feature (163)..(163): Xaa is any aa, unknown or other
IRTDPYRETHPAREISTSIIITSERAGRAAPMXAYMRVTHRDEEGKKVTEKMPVPETRRPDTAKHFERKLEEQGLHRFERHPANAPRGVGIGAXPPKSGRGGKYTWEGPGSVVEDQXDPAPPAIDPNDPNYEEAEDDEAAREVVVGEVEVAKVAEGRDGVARXDVAPGLLQDQKQ

SEQ ID NO: 26600 - protein, 150 aa, Zea mays subsp. mays
  misc_feature (1)..(150): Ceres Seq. ID no. 13580131
  misc_feature (32)..(32): Xaa is any aa, unknown or other
  misc_feature (94)..(94): Xaa is any aa, unknown or other
  misc_feature (117)..(117): Xaa is any aa, unknown or other
QNRSLQRDTPSARDIYIDHHHQRASRPSSTDXGVHARDAPRRGRQEGDGEDAGPGDAAPGHGQALRAQAGGAGPPPLRAAPGERAPGRGHRRPXAQVRARRQVHLGGPRQRRRGPAXPGAARHRPQRPQLRGGGGRRGGQGGGRRGGGGR

SEQ ID NO: 26601 - protein, 144 aa, Zea mays subsp. mays
  misc_feature (1)..(144): Ceres Seq. ID no. 13580132
  misc_feature (2)..(2): Xaa is any aa, unknown or other
  misc_feature (63)..(63): Xaa is any aa, unknown or other
  misc_feature (86)..(86): Xaa is any aa, unknown or other
  misc_feature (132)..(132): Xaa is any aa, unknown or other
MXAYMRVTHRDEEGKKVTEKMPVPETRRPDTAKHFERKLEEQGLHRFERHPANAPRGVGIGAXPPKSGRGGKYTWEGPGSVVEDQXDPAPPAIDPNDPNYEEAEDDEAAREVVVGEVEVAKVAEGRDGVARXDVAPGLLQDQKQ

SEQ ID NO: 26602 - DNA, 725 bp, Zea mays subsp. mays
  misc_feature (1)..(725): Ceres Seq. ID no. 13580161
acaagctcgacggaactgtgactagaactagtagatccaatccaacactcgggacgaaattaaaggagacgacgcatcatccggccggcagnatccgcacggtcaccaccatgncggcgcaggagggcggcatgaggctggtgtcgcacccgatcgcngcgcacgacgggcggctgccgcggcagtacacggcggaggggcagggcgccaagaaggacatgtcgccgccgctggagtggtacggcgtgcccgagggcgngcggntgctagcgctgctggtgcaggacatcgacgccgaccccgtcgtgccgtggacgcactgggtggtggccaacatcccgcccgccaccaggggcctccccgaggggttctccggcgccgcgggaccggggccggggcgcgagctcggcggcctgcaggagggggtcaacgactggaagcagcccggctggcgcgggcccgtgccgccctcccacggccaccgcatccagttcaagctctacgcgctcgacgacgaggtgcacctcggcaacaaggtgaccagggataagctcatggaggcgatcgacgggcacgtgctggaagaagccgagctgatcgccgtgttccagggagtcgtcgccaacaactaacacactcggagatatctttgttggcgtgctttgtatttgcttgtgtggctaccatgtaattctgatcgaataaaagggaacttcacatgtgcc

SEQ ID NO: 26603 - protein, 209 aa, Zea mays subsp. mays
  misc_feature (1)..(209): Ceres Seq. ID no. 13580162
  misc_feature (30)..(30): Xaa is any aa, unknown or other
  misc_feature (38)..(38): Xaa is any aa, unknown or other
  misc_feature (52)..(52): Xaa is any aa, unknown or other
  misc_feature (86)..(86): Xaa is any aa, unknown or other
  misc_feature (88)..(88): Xaa is any aa, unknown or other
KLDGTVTRTSRSNPTLGTKLKETTHHPAGXIRTVTTMXAQEGGMRLVSHPIXAHDGRLPRQYTAEGQGAKKDMSPPLEWYGVPEGXRXLALLVQDIDADPVVPWTHWVVANIPPATRGLPEGFSGAAGPGPGRELGGLQEGVNDWKQPGWRGPVPPSHGHRIQFKLYALDDEVHLGNKVTRDKLMEAIDGHVLEEAELIAVFQGVVANN

SEQ ID NO: 26604 - protein, 173 aa, Zea mays subsp. mays
  misc_feature (1)..(173): Ceres Seq. ID no. 13580163
  misc_feature (2)..(2): Xaa is any aa, unknown or other
  misc_feature (16)..(16): Xaa is any aa, unknown or other
  misc_feature (50)..(50): Xaa is any aa, unknown or other
  misc_feature (52)..(52): Xaa is any aa, unknown or other
MXAQEGGMRLVSHPIXAHDGRLPRQYTAEGQGAKKDMSPPLEWYGVPEGXRXLALLVQDIDADPVVPWTHWVVANIPPATRGLPEGFSGAAGPGPGRELGGLQEGVNDWKQPGWRGPVPPSHGHRIQFKLYALDDEVHLGNKVTRDKLMEAIDGHVLEEAELIAVFQGVVANN

SEQ ID NO: 26605 - protein, 166 aa, Zea mays subsp. mays
  misc_feature (1)..(166): Ceres Seq. ID no. 13580164
  misc_feature (9)..(9): Xaa is any aa, unknown or other
  misc_feature (43)..(43): Xaa is any aa, unknown or other
  misc_feature (45)..(45): Xaa is any aa, unknown or other
MRLVSHPIXAHDGRLPRQYTAEGQGAKKDMSPPLEWYGVPEGXRXLALLVQDIDADPVVPWTHWVVANIPPATRGLPEGFSGAAGPGPGRELGGLQEGVNDWKQPGWRGPVPPSHGHRIQFKLYALDDEVHLGNKVTRDKLMEAIDGHVLEEAELIAVFQGVVANN

SEQ ID NO: 26606 - DNA, 938 bp, Zea mays subsp. mays
  misc_feature (1)..(938): Ceres Seq. ID no. 13580171
cccactttactcctatccactgcggcctggacgcgtgcgagaggcttgaccaagcagcagcagcagcagcagcgatggcgcctctgaagctgtacgggatgccgctgtcccccaacgtggtgcgcgtggccaccgtgctcaacgagaagggcctcgacttcgagatcgtccccgtcgacctcaccaccggcgcccacaagcagcccgacttcctcgccctcaaccctttcggccagatcccggctctcgtcgacggagacgaagtcctcttcgagtcccgtgcgatcaaccggtacatcgccagcaagtacgcgtcggagggcacggacctgctccccgcgacggcgtcggcggcgaagctggaggtgtggctggaggtggagtcgcaccacttccacccgaacgcgtcgccgctggtgttccagctgctcgtgaggccgctcctgggcggcgcccccgacgcggcggtggtggagaagcacgcggagcagctcgccaaggtgctcgacgtgtacgaggcgcacctggcccgcaacaagtacctcgccggggacgagttcacgctcgccgacgccaaccacgcgctcctacctgctctcacctcagcaagacccccaaggccgggctgcgtcgccgcccgcccccacgtcaaggcctggtgggaggccatcgccgcccgccccgcgttccagaagaccgtcgccgccatccccttgcccccgccgccctcctcctcggcttgacctcgccttgcgttgcctgggtcgcggatgcgtcggagccctgagtcgaataaaagaggccgcatcctgtcttgcatttgctcgtgcgccatgtgctataacagcctgtgtaataaacactgttgcctttcgtgtgtgttcattgccttttggttggttggtccttgcatatcctactagtgctgatctttttgt

SEQ ID NO: 26607 - protein, 246 aa, Zea mays subsp. mays
  misc_feature (1)..(246): Ceres Seq. ID no. 13580172
HFTPIHCGLDACERLDQAAAAAAAMAPLKLYGMPLSPNVVRVATVLNEKGLDFEIVPVDLTTGAHKQPDFLALNPFGQIPALVDGDEVLFESRAINRYIASKYASEGTDLLPATASAAKLEVWLEVESHHFHPNASPLVFQLLVRPLLGGAPDAAVVEKHAEQLAKVLDVYEAHLARNKYLAGDEFTLADANHALLPALTSARPPRPGCVAARPHVKAWWEAIAARPAFQKTVAAIPLPPPPSSSA

SEQ ID NO: 26608 - protein, 222 aa, Zea mays subsp. mays
  misc_feature (1)..(222): Ceres Seq. ID no. 13580173
MAPLKLYGMPLSPNVVRVATVLNEKGLDFEIVPVDLTTGAHKQPDFLALNPFGQIPALVDGDEVLFESRAINRYIASKYASEGTDLLPATASAAKLEVWLEVESHHFHPNASPLVFQLLVRPLLGGAPDAAVVEKHAEQLAKVLDVYEAHLARNKYLAGDEFTLADANHALLPALTSARPPRPGCVAARPHVKAWWEAIAARPAFQKTVAAIPLPPPPSSSA

SEQ ID NO: 26609 - protein, 214 aa, Zea mays subsp. mays
  misc_feature (1)..(214): Ceres Seq. ID no. 13580174
MPLSPNVVRVATVLNEKGLDFEIVPVDLTTGAHKQPDFLALNPFGQIPALVDGDEVLFESRAINRYIASKYASEGTDLLPATASAAKLEVWLEVESHHFHPNASPLVFQLLVRPLLGGAPDAAVVEKHAEQLAKVLDVYEAHLARNKYLAGDEFTLADANHALLPALTSARPPRPGCVAARPHVKAWWEAIAARPAFQKTVAAIPLPPPPSSSA

SEQ ID NO: 26610 - DNA, 1834 bp, Zea mays subsp. mays
  misc_feature (1)..(1834): Ceres Seq. ID no. 13580193
gcgcctcccaaagctctcttgttcgttgctcatccccccccccccccccccgtgctggttaatcatccgttcgatttcgatcacatacatataatctccctcagctatcgcggccgcgcgcctgatcgacgtacgaccggtctggtacgtacgtgtgctcgcccgccatggctcgcggcgacggcgagctggagctgtccgtgggggtccgcggcaccggcggcgcggcggcggcggcggcggcggaccacgtggcgccgatcagcctcggcaggctcatcctcgccggcatggtcgccggcggcgtgcagtacggctgggcgctgcagctctccctcctcacgccctacgtgcagactctggggctctcacatgccctcacttcattcatgtggctatgcggtcctattgctggcttagtggtccaaccgctggttggcttgtacagtgataggtgcacagcaagatggggaagacgcaggccatttatcctgataggatgcatgctcatctgccttgccgtcattgttgttggcttctcgtccgacatcggagctgctctaggggacacgaaggaacactgcagcctctaccacggccctcgttggcatgctgcgatcgtctacgttctggggttttggctccttgacttctccaacaatactgtgcaaggtccagcgcgtgctatgatggctgatctgtgcggtcatcatgggcctagtgcagccaactcaatcttctgttcttggatggcgctgggaaacatcctaggctattcctctggttccacaaacaactggcacaagtggtttccgttccttttaacaaacgcgtgctgtgaagcctgcgcaaacctgaaaggcgcgtttctggtggctgtggtgttcctagtcatgtgcttgactgtaaccctgttcttcgccaacgaagtgccctacagaggaaaccagaacctccccacaaaggcaaacggcgaggtcgagactgaaccttccggcccactcgctgtgctcaagggcttcaagaacttgcccacggggatgccgtccgtgctcctcgtaactggactcacctggctctcttggttcccgttcatcctctacgacaccgactggatgggccgtgagatctaccacggcgaccccaagggtagcaacgctcagatctcggcgttcgacgaaggcgtcagagttggctcgttcgggctgctgctcaactcgatcgttctaggattcagctcgttcctgatcgagcccatgtgccggaaggtcgggccgagggtggtgtgggtgacgagcaacttcatggtctgcgtcgccatggcggccaccgcgctgatcagcttctggtcgctcaaggactaccacggatacgtgcaggacgccatcaccgccagcacgagcatcaaggccgtctgcctcgtcctcttcgcgttcctgggtgtccctctcgccatcctgtacagcgtcccgttcgcggtgacggcgcagctggcggccacgaaaggcggcgggcaggggctgtgcaccggcgtgctcaacatctccatcgtcatccctcaggtgatcatcgcgctgggcgcgggcccgtgggacgcgctgttcggcaagggcaacatcccggcgttcggcgtggcgtcggggttcgccctcatcggcggcgtcgtgggcgtgttcctgctgcccaagatctccaagcgccagttccgcgccgtcagcgcgggcggccactgatcgcggccgccgcgccggagcacggcacggcggcacagcccagccgtgctagagctgtatgttttgaaagttgaaacagaataagaagcgggcgaaacgag

SEQ ID NO: 26611 - protein, 521 aa, Zea mays subsp. mays
  misc_feature (1)..(521): Ceres Seq. ID no. 13580194
MARGDGELELSVGVRGTGGAAAAAAADHVAPISLGRLILAGMVAGGVQYGWALQLSLLTPYVQTLGLSHALTSFMWLCGPIAGLVVQPLVGLYSDRCTARWGRRRPFILIGCMLICLAVIVVGFSSDIGAALGDTKEHCSLYHGPRWHAAIVYVLGFWLLDFSNNTVQGPARAMMADLCGHHGPSAANSIFCSWMALGNILGYSSGSTNNWHKWFPFLLTNACCEACANLKGAFLVAVVFLVMCLTVTLFFANEVPYRGNQNLPTKANGEVETEPSGPLAVLKGFKNLPTGMPSVLLVTGLTWLSWFPFILYDTDWMGREIYHGDPKGSNAQISAFDEGVRVGSFGLLLNSIVLGFSSFLIEPMCRKVGPRVVWVTSNFMVCVAMAATALISFWSLKDYHGYVQDAITASTSIKAVCLVLFAFLGVPLAILYSVPFAVTAQLAATKGGGQGLCTGVLNISIVIPQVIIALGAGPWDALFGKGNIPAFGVASGFALIGGVVGVFLLPKISKRQFRAVSAGGH

SEQ ID NO: 26612 - protein, 480 aa, Zea mays subsp. mays
  misc_feature (1)..(480): Ceres Seq. ID no. 13580195
MVAGGVQYGWALQLSLLTPYVQTLGLSHALTSFMWLCGPIAGLVVQPLVGLYSDRCTARWGRRRPFILIGCMLICLAVIVVGFSSDIGAALGDTKEHCSLYHGPRWHAAIVYVLGFWLLDFSNNTVQGPARAMMADLCGHHGPSAANSIFCSWMALGNILGYSSGSTNNWHKWFPFLLTNACCEACANLKGAFLVAVVFLVMCLTVTLFFANEVPYRGNQNLPTKANGEVETEPSGPLAVLKGFKNLPTGMPSVLLVTGLTWLSWFPFILYDTDWMGREIYHGDPKGSNAQISAFDEGVRVGSFGLLLNSIVLGFSSFLIEPMCRKVGPRVVWVTSNFMVCVAMAATALISFWSLKDYHGYVQDAITASTSIKAVCLVLFAFLGVPLAILYSVPFAVTAQLAATKGGGQGLCTGVLNISIVIPQVIIALGAGPWDALFGKGNIPAFGVASGFALIGGVVGVFLLPKISKRQFRAVSAGGH

SEQ ID NO: 26613 - protein, 447 aa, Zea mays subsp. mays
  misc_feature (1)..(447): Ceres Seq. ID no. 13580196
MWLCGPIAGLVVQPLVGLYSDRCTARWGRRRPFILIGCMLICLAVIVVGFSSDIGAALGDTKEHCSLYHGPRWHAAIVYVLGFWLLDFSNNTVQGPARAMMADLCGHHGPSAANSIFCSWMALGNILGYSSGSTNNWHKWFPFLLTNACCEACANLKGAFLVAVVFLVMCLTVTLFFANEVPYRGNQNLPTKANGEVETEPSGPLAVLKGFKNLPTGMPSVLLVTGLTWLSWFPFILYDTDWMGREIYHGDPKGSNAQISAFDEGVRVGSFGLLLNSIVLGFSSFLIEPMCRKVGPRVVWVTSNFMVCVAMAATALISFWSLKDYHGYVQDAITASTSIKAVCLVLFAFLGVPLAILYSVPFAVTAQLAATKGGGQGLCTGVLNISIVIPQVIIALGAGPWDALFGKGNIPAFGVASGFALIGGVVGVFLLPKISKRQFRAVSAGGH

SEQ ID NO: 26614 - DNA, 1513 bp, Zea mays subsp. mays
  misc_feature (1)..(1513): Ceres Seq. ID no. 13580212
aggatgaatcggaagagagaatcctaccaaacctagctaccaactcgatcgtcgtcatcacgctcgaccgcacaactgcaccaaggggggaggagacctaaaaactactacatcttttagctacacatctagctaaagatcgagaggggtaaataaggacgagcgggcgcgagctagaagagcagctgcaggtactaccatcatcgtcgtcgtcgtcgccaggatgaccgtcgtcgacgccgtcgtctcctccaccgatgccggcgcccctgctgccgccgccaccgcggtaccggcggggaacgggcagaccgtgtgcgtgaccggcgcggccgggtacatcgcctcgtggttggtgaagctgctgctcgagaagggatacactgtgaagggcaccgtcaggaacccagatgacccgaagaacgcgcacctcaaggcgctggacggcgccgccgagcggctgatcctctgcaaggccgatctgctggactacgacgccatctgccgcgccgtgcagggctgccagggcgtcttccacaccgcctcccccgtcaccgacgacccggagcaaatggtggagccggcggtgcgcggcaccgagtacgtgatcaacgcggcggcggaggccggcacggtgcggcgggtggtgttcacgtcgtccatcggcgccgtgaccatggaccccaagcgcgggcccgacgtcgtggtcgacgagtcgtgctggagcgacctcgagttctgcgagaaaaccaggaactggtactgctacggcaaggcggtggcggagcacgcggcgtgggagacggcccggcggcggggcgtggacctggtggtggtgaaccccgtgctggtggtgggccccctgctgcaggcgacggtgaacgccagcatcgcgcacatcctcaagtacctggacggctcggcccgcaccttcgccaacgccgtgcaggcgtacgtggacgtgcgcgacgtggccgacgcgcacctccgcgtcttcgagagcccccgcgcgtccggccgccacctctgcgccgagcgcgtcctccaccgcgaggacgtcgtccgcatcctcgccaagctcttccccgagtaccccgtcccagccaggtgctccgacgaggtgaatccgcggaagcagccgtacaagttctccaaccagaagctccgggacctggggctgcagttccggccggtcagccagtcgctttacgacacggtgaagaacctccaggagaagggacacctgccggtgctcggagagcggacgacgacggaggccgccgacaaggatgcccccacggccgagatgcagcagggagggatcgccatccgtgcctgagagggcgatgccacacatgaacacaaagcaatgttcatactgctgccctgcacctgctgtgtaaacaggcctgtgtttgttctggctgatagtgatgtaccctaagacttgtaacgtcatgttcgttcttgtgaactatagcgagtgaataaaattggttaatgttggatgttc

SEQ ID NO: 26615 - protein, 371 aa, Zea mays subsp. mays
  misc_feature (1)..(371): Ceres Seq. ID no. 13580213
MTVVDAVVSSTDAGAPAAAATAVPAGNGQTVCVTGAAGYIASWLVKLLLEKGYTVKGTVRNPDDPKNAHLKALDGAAERLILCKADLLDYDAICRAVQGCQGVFHTASPVTDDPEQMVEPAVRGTEYVINAAAEAGTVRRVVFTSSIGAVTMDPKRGPDVVVDESCWSDLEFCEKTRNWYCYGKAVAEHAAWETARRRGVDLVVVNPVLVVGPLLQATVNASIAHILKYLDGSARTFANAVQAYVDVRDVADAHLRVFESPRASGRHLCAERVLHREDVVRILAKLFPEYPVPARCSDEVNPRKQPYKFSNQKLRDLGLQFRPVSQSLYDTVKNLQEKGHLPVLGERTTTEAADKDAPTAEMQQGGIAIRA

SEQ ID NO: 26616 - protein, 255 aa, Zea mays subsp. mays
  misc_feature (1)..(255): Ceres Seq. ID no. 13580214
MVEPAVRGTEYVINAAAEAGTVRRVVFTSSIGAVTMDPKRGPDVVVDESCWSDLEFCEKTRNWYCYGKAVAEHAAWETARRRGVDLVVVNPVLVVGPLLQATVNASIAHILKYLDGSARTFANAVQAYVDVRDVADAHLRVFESPRASGRHLCAERVLHREDVVRILAKLFPEYPVPARCSDEVNPRKQPYKFSNQKLRDLGLQFRPVSQSLYDTVKNLQEKGHLPVLGERTTTEAADKDAPTAEMQQGGIAIRA

SEQ ID NO: 26617 - protein, 220 aa, Zea mays subsp. mays
  misc_feature (1)..(220): Ceres Seq. ID no. 13580215
MDPKRGPDVVVDESCWSDLEFCEKTRNWYCYGKAVAEHAAWETARRRGVDLVVVNPVLVVGPLLQATVNASIAHILKYLDGSARTFANAVQAYVDVRDVADAHLRVFESPRASGRHLCAERVLHREDVVRILAKLFPEYPVPARCSDEVNPRKQPYKFSNQKLRDLGLQFRPVSQSLYDTVKNLQEKGHLPVLGERTTTEAADKDAPTAEMQQGGIAIRA

SEQ ID NO: 26618 - DNA, 1993 bp, Zea mays subsp. mays
  misc_feature (1)..(1993): Ceres Seq. ID no. 13586155
cttttttccttttcttttatcttatggttggctgtcccgtcccgtccatcagccgccacaccacaaacacccaccactctgctctcgcccgcttgctttctctcccccgctccagcttatggcggaggcggcgccagcagccggcggcggcatcggggacatcctcgccacgagcgatcgggacttcctcgtccgcaactccggcgagcaggtgaagatcagcagcgttgaggcgagccctgtggccatctacttctccgcctcatggtgcccgccatgcaggaggttcacgcccaagcttattgaagtatacgaaaaactggcctcacagggcaagagcttcgaggtcgtctttgcttcggccgatcgcaatgaggaagctttcaatgaatactttgcaaagatgccatggttggctgtccccttttctgacagtgaaggccgtgaggcccttgatggccagttcaaggtctctggtatcccacacctggtcatcctggatgcaaaaactggtgaagtttacactgaagatggtgttgaattcgtgagtgagtatggcgtggaggcttaccctttcacaccagatcggatcaatgaactgaaggaacaggaaaaggcagaaaaggagaatcaaactattcaaagcgtgcttgtcacatctactcgagactatctcatttcaaacaagggagacaaggtacccatctctgagcttgaggggaagtatgttggtctttgctttgtggtggatggctttccaccactcgctgaattcactgaggtgcttgctaagatctatgagaaactcaaagaagtgggagagaaatttgaagttgtagctgtatccttggacagtgaagagtcatcatttaatgagagttttgcaaagatgccttggcttgcaattcctcaaggtgacattaagtgtcagacgctggttcgttactttgagcttagttctcttccaacactagttctgattggccctgatgggaagacactgaacaacaatgtcgccgacataattgacgaccatggttttgaggcatgggagggcttccccttcagtgctgagaagctggaaattcttgctgagaaggcaaagattaaagctgcatcacagaccttggagtccattctaatcagtggtcatttagactttgtcattggaaaagatggtgcaaaggttcctgtatcagaacttgttgggaagactgtccttgtttacttctcaggaaaatggtgcccaccatgccgtgccttcctgcccacacttgtcaaggagtacaacaagatcaaagagaagaacagtgattttgagatcgtcttcatctctagtgacgaggatcagagctcattcgatgattttttctctgaaatgccatggcttgctgtaccctgggaagatgaaaggaaagcatcgctgaagaaaaccttcaagatccgtggaatcccttcacttgtcgccatcggacctactgggcagacagtcagcagggacgcaaagtcccagctgatgatccacggtgctgatgctttcccattcaccgaggagagacttgaggagctacagaagaagctggatgagatggcgaaggggtggcctcagaagctgaagcatgagctgcatgacgagcacgaacttgtcctgctgcgccgtggtacgtaccgctgtgatggttgtaacgagatgggcagcagctggtcctacaggtgcgacgagtgtgactttgacctgcaccccaagtgcgcgttgggtgaggaaaagatgggcgaggaagcccctgctgggtatgtgtgcgagggaggcgtgtgcaggaaggcctaatctgaatgctgtgaaggatgacaataatcgtgagatggctgtgttttgatgtaaggtttttcggccgttgatgtttgtgtgttaataaatagtagttgcaggagcaaatgtgtgtatgcaaaactatgtgagtattgtgtcagatcaaagtaatggttttgctgc

SEQ ID NO: 26619 - protein, 608 aa, Zea mays subsp. mays
  misc_feature (1)..(608): Ceres Seq. ID no. 13586156
FFPFLLSYGWLSRPVHQPPHHKHPPLCSRPLAFSPPLQLMAEAAPAAGGGIGDILATSDRDFLVRNSGEQVKISSVEASPVAIYFSASWCPPCRRFTPKLIEVYEKLASQGKSFEVVFASADRNEEAFNEYFAKMPWLAVPFSDSEGREALDGQFKVSGIPHLVILDAKTGEVYTEDGVEFVSEYGVEAYPFTPDRINELKEQEKAEKENQTIQSVLVTSTRDYLISNKGDKVPISELEGKYVGLCFVVDGFPPLAEFTEVLAKIYEKLKEVGEKFEVVAVSLDSEESSFNESFAKMPWLAIPQGDIKCQTLVRYFELSSLPTLVLIGPDGKTLNNNVADIIDDHGFEAWEGFPFSAEKLEILAEKAKIKAASQTLESILISGHLDFVIGKDGAKVPVSELVGKTVLVYFSGKWCPPCRAFLPTLVKEYNKIKEKNSDFEIVFISSDEDQSSFDDFFSEMPWLAVPWEDERKASLKKTFKIRGIPSLVAIGPTGQTVSRDAKSQLMIHGADAFPFTEERLEELQKKLDEMAKGWPQKLKHELHDEHELVLLRRGTYRCDGCNEMGSSWSYRCDECDFDLHPKCALGEEKMGEEAPAGYVCEGGVCRKA

SEQ ID NO: 26620 - protein, 569 aa, Zea mays subsp. mays
  misc_feature (1)..(569): Ceres Seq. ID no. 13586157
MAEAAPAAGGGIGDILATSDRDFLVRNSGEQVKISSVEASPVAIYFSASWCPPCRRFTPKLIEVYEKLASQGKSFEVVFASADRNEEAFNEYFAKMPWLAVPFSDSEGREALDGQFKVSGIPHLVILDAKTGEVYTEDGVEFVSEYGVEAYPFTPDRINELKEQEKAEKENQTIQSVLVTSTRDYLISNKGDKVPISELEGKYVGLCFVVDGFPPLAEFTEVLAKIYEKLKEVGEKFEVVAVSLDSEESSFNESFAKMPWLAIPQGDIKCQTLVRYFELSSLPTLVLIGPDGKTLNNNVADIIDDHGFEAWEGFPFSAEKLEILAEKAKIKAASQTLESILISGHLDFVIGKDGAKVPVSELVGKTVLVYFSGKWCPPCRAFLPTLVKEYNKIKEKNSDFEIVFISSDEDQSSFDDFFSEMPWLAVPWEDERKASLKKTFKIRGIPSLVAIGPTGQTVSRDAKSQLMIHGADAFPFTEERLEELQKKLDEMAKGWPQKLKHELHDEHELVLLRRGTYRCDGCNEMGSSWSYRCDECDFDLHPKCALGEEKMGEEAPAGYVCEGGVCRKA

SEQ ID NO: 26621 - protein, 474 aa, Zea mays subsp. mays
  misc_feature (1)..(474): Ceres Seq. ID no. 13586158
MPWLAVPFSDSEGREALDGQFKVSGIPHLVILDAKTGEVYTEDGVEFVSEYGVEAYPFTPDRINELKEQEKAEKENQTIQSVLVTSTRDYLISNKGDKVPISELEGKYVGLCFVVDGFPPLAEFTEVLAKIYEKLKEVGEKFEVVAVSLDSEESSFNESFAKMPWLAIPQGDIKCQTLVRYFELSSLPTLVLIGPDGKTLNNNVADIIDDHGFEAWEGFPFSAEKLEILAEKAKIKAASQTLESILISGHLDFVIGKDGAKVPVSELVGKTVLVYFSGKWCPPCRAFLPTLVKEYNKIKEKNSDFEIVFISSDEDQSSFDDFFSEMPWLAVPWEDERKASLKKTFKIRGIPSLVAIGPTGQTVSRDAKSQLMIHGADAFPFTEERLEELQKKLDEMAKGWPQKLKHELHDEHELVLLRRGTYRCDGCNEMGSSWSYRCDECDFDLHPKCALGEEKMGEEAPAGYVCEGGVCRKA

SEQ ID NO: 26622 - DNA, 1796 bp, Zea mays subsp. mays
  misc_feature (1)..(1796): Ceres Seq. ID no. 13586203
ggctggcggttgctctcctcctctcccctgccctcgcaaacgcacgcaccacagcatcgtccttcgttccattcccatccataccccctcgatcggccgggatgctgggtgtggggatggccgcggcggtgctgctcggggccgtggcgttgctgctcgcggacgccgctgcgaggagagcgcactggtggtacagggaggcggctgaggcggtgctggtcggcgccgtggctttggtggtggtggacgccgcggcgcggagggcgcacgggtggtacagggaagcggcgctgggcgcggcgcggcgggcgcggctgccgccgggggagatggggtggcccttggtcggcggcatgtgggccttcctccgcgccttcaagtccggcaagcccgacgccttcatcgcctccttcgtccggcggttcggtcgcacgggcgtgtaccgaagcttcatgttcagcagcccgactgtgctggtgacgacggcggaggggtgcaagcaggtgctgatggacgacgacgcgttcgtgacggggtggcccaaggcgacggttgcgctggtcgggccgcggtcgttcgtggcgatgccgtacgacgagcaccggcgcatccgcaagctgactgccgcgcccatcaacggcttcgacgcgctgacggggtacctgcccttcatcgaccgcaccgtcacgtcgtcgctgcgcgcgtgggcggaccacggcggcagcgtcgagttcctgacggagctgcggcgcatgacgttcaagatcatcgtgcagatcttcctgggcggcgcggaccaggccaccacgcgcgcgctggagcgcagctacacggagctcaactacggcatgcgcgccatggccatcaacctgcccggcttcgcgtaccgcggggcgctgcgcgcgcgccgccgcctcgtggccgtgctgcagggcgtgctggacgagcgccgcgccgccagggccaagggggtctcgggcggaggagtggacatgatggaccggctgatcgaggcccaggacgagcgcgggcggcacctggacgacgacgagatcatcgacgtgctcgtcatgtacctcaacgccggccacgagtcgtccggccacatcaccatgtgggccaccgtgttcctgcaggagaacccggacatgttcgcgagagcaaaggcggagcaggaggcgatcatgaggagcatcccgtcgtcgcagcgggggctgacgctcagggacttcaggaagatggagtacctgtcgcaggtgatcgacgagacgctgcggctcgtcaacatctccttcgtctccttccgtcaggccaccagagacgtcttcgtgaacggatacctcatccccaaggggtggaaggttcagctctggtaccggagcgtgcacatggacccacaggtgtaccctgaccccaccaagttcgacccgtcgagatgggagggccactcgccgagagccggcacgttcctggcgttcgggctgggcgccaggctctgccccggcaacgacctcgccaagctggagatttccgtcttcctccaccacttcctcctcggctacaagctggcgaggacgaaccctaggtgccgggtgaggtacctcccgcacccgaggccggtggacaactgcttggccaagatcaccagagtcggtagctagctgctagattgtgatggaagtacgaatgaaaaaaaagcccagcagaaactctagcggctgggccggctggaaattatgggccgggccattgtggttgccccccctgtctgtgcaaaaataaaacaagcagaaagg

SEQ ID NO: 26623 - protein, 552 aa, Zea mays subsp. mays
  misc_feature (1)..(552): Ceres Seq. ID no. 13586204
LAVALLLSPALANARTTASSFVPFPSIPPRSAGMLGVGMAAAVLLGAVALLLADAAARRAHWWYREAAEAVLVGAVALVVVDAAARRAHGWYREAALGAARRARLPPGEMGWPLVGGMWAFLRAFKSGKPDAFIASFVRRFGRTGVYRSFMFSSPTVLVTTAEGCKQVLMDDDAFVTGWPKATVALVGPRSFVAMPYDEHRRIRKLTAAPINGFDALTGYLPFIDRTVTSSLRAWADHGGSVEFLTELRRMTFKIIVQIFLGGADQATTRALERSYTELNYGMRAMAINLPGFAYRGALRARRRLVAVLQGVLDERRAARAKGVSGGGVDMMDRLIEAQDERGRHLDDDEIIDVLVMYLNAGHESSGHITMWATVFLQENPDMFARAKAEQEAIMRSIPSSQRGLTLRDFRKMEYLSQVIDETLRLVNISFVSFRQATRDVFVNGYLIPKGWKVQLWYRSVHMDPQVYPDPTKFDPSRWEGHSPRAGTFLAFGLGARLCPGNDLAKLEISVFLHHFLLGYKLARTNPRCRVRYLPHPRPVDNCLAKITRVGS

SEQ ID NO: 26624 - protein, 519 aa, Zea mays subsp. mays
  misc_feature (1)..(519): Ceres Seq. ID no. 13586205
MLGVGMAAAVLLGAVALLLADAAARRAHWWYREAAEAVLVGAVALVVVDAAARRAHGWYREAALGAARRARLPPGEMGWPLVGGMWAFLRAFKSGKPDAFIASFVRRFGRTGVYRSFMFSSPTVLVTTAEGCKQVLMDDDAFVTGWPKATVALVGPRSFVAMPYDEHRRIRKLTAAPINGFDALTGYLPFIDRTVTSSLRAWADHGGSVEFLTELRRMTFKIIVQIFLGGADQATTRALERSYTELNYGMRAMAINLPGFAYRGALRARRRLVAVLQGVLDERRAARAKGVSGGGVDMMDRLIEAQDERGRHLDDDEIIDVLVMYLNAGHESSGHITMWATVFLQENPDMFARAKAEQEAIMRSIPSSQRGLTLRDFRKMEYLSQVIDETLRLVNISFVSFRQATRDVFVNGYLIPKGWKVQLWYRSVHMDPQVYPDPTKFDPSRWEGHSPRAGTFLAFGLGARLCPGNDLAKLEISVFLHHFLLGYKLARTNPRCRVRYLPHPRPVDNCLAKITRVGS

SEQ ID NO: 26625 - protein, 514 aa, Zea mays subsp. mays
  misc_feature (1)..(514): Ceres Seq. ID no. 13586206
MAAAVLLGAVALLLADAAARRAHWWYREAAEAVLVGAVALVVVDAAARRAHGWYREAALGAARRARLPPGEMGWPLVGGMWAFLRAFKSGKPDAFIASFVRRFGRTGVYRSFMFSSPTVLVTTAEGCKQVLMDDDAFVTGWPKATVALVGPRSFVAMPYDEHRRIRKLTAAPINGFDALTGYLPFIDRTVTSSLRAWADHGGSVEFLTELRRMTFKIIVQIFLGGADQATTRALERSYTELNYGMRAMAINLPGFAYRGALRARRRLVAVLQGVLDERRAARAKGVSGGGVDMMDRLIEAQDERGRHLDDDEIIDVLVMYLNAGHESSGHITMWATVFLQENPDMFARAKAEQEAIMRSIPSSQRGLTLRDFRKMEYLSQVIDETLRLVNISFVSFRQATRDVFVNGYLIPKGWKVQLWYRSVHMDPQVYPDPTKFDPSRWEGHSPRAGTFLAFGLGARLCPGNDLAKLEISVFLHHFLLGYKLARTNPRCRVRYLPHPRPVDNCLAKITRVGS

SEQ ID NO: 26626 - DNA, 979 bp, Zea mays subsp. mays
  misc_feature (1)..(979): Ceres Seq. ID no. 13586215
gaaaaagcagccgtgacggatccagccgaaccccctcgcagtcgcagccccctcacgccacgcgacatgggcaagatcaggatgcccgtgccgtccctgttccgccgccgctcctccaagccgccgccgccgcagccgcagcagcaggcgcctgccgcgggcgacggcgacggcagcgggtccccggagcgggcgacggcggaggaggagatggcgcgcgtgttccgcaagttcgacgcgaacggcgacgggcggatctcgcggtcggagctggcggcgctgttcgagagcctgggccacggcgcgtcggacgacgaggtggcgcgcatgatggccgaggcggacgcggacggcgacggcttcatcagcctgcccgagttcgcggccctcaacgccacggtggccggcgacgcggccgccgtcgaggaggacctgcgccacgccttccgcgtcttcgacgccgacggcagcggcgccatctccgccgccgagctcgcgcgcgtcctccgcagcctcggcgagcccgcctccgtcgcgcagtgccgccgcatgatcgagggcgtcgaccagaacggcgacggcctcatctccttcgacgagttcaaggtcatgatggccaggggaggaggctgcttcgctaagatcgcctaggtaattagaggttccctcccggcccagccctttcgaatctctgctgctccacccatcccccccacctccgttcacagcagccgagagtatggcgtcgtgtgcggtcttaagtaaagtgtatatagaagccaagatcatcgtggagaagcactagcgctagattcttctctctactaataattgggaaccacggcggatattgctttttgcaagattggagcctggatgaaagcagtggttcagagctaacttctgttctagagatgcggatgcttgactctgtgaatgaaagagtagacgattcgaacctactcctatgtggatctct

SEQ ID NO: 26627 - protein, 216 aa, Zea mays subsp. mays
  misc_feature (1)..(216): Ceres Seq. ID no. 13586216
EKAAVTDPAEPPRSRSPLTPRDMGKIRMPVPSLFRRRSSKPPPPQPQQQAPAAGDGDGSGSPERATAEEEMARVFRKFDANGDGRISRSELAALFESLGHGASDDEVARMMAEADADGDGFISLPEFAALNATVAGDAAAVEEDLRHAFRVFDADGSGAISAAELARVLRSLGEPASVAQCRRMIEGVDQNGDGLISFDEFKVMMARGGGCFAKIA

SEQ ID NO: 26628 - protein, 212 aa, Zea mays subsp. mays
  misc_feature (1)..(212): Ceres Seq. ID no. 13586217
KSSRDGSSRTPSQSQPPHATRHGQDQDARAVPVPPPLLQAAAAAAAAAGACRGRRRRQRVPGAGDGGGGDGARVPQVRRERRRADLAVGAGGAVREPGPRRVGRRGGAHDGRGGRGRRRLHQPARVRGPQRHGGRRRGRRRGGPAPRLPRLRRRRQRRHLRRRARARPPQPRRARLRRAVPPHDRGRRPERRRPHLLRRVQGHDGQGRRLLR

SEQ ID NO: 26629 - protein, 194 aa, Zea mays subsp. mays
  misc_feature (1)..(194): Ceres Seq. ID no. 13586218
MGKIRMPVPSLFRRRSSKPPPPQPQQQAPAAGDGDGSGSPERATAEEEMARVFRKFDANGDGRISRSELAALFESLGHGASDDEVARMMAEADADGDGFISLPEFAALNATVAGDAAAVEEDLRHAFRVFDADGSGAISAAELARVLRSLGEPASVAQCRRMIEGVDQNGDGLISFDEFKVMMARGGGCFAKIA

SEQ ID NO: 26630 - DNA, 1789 bp, Zea mays subsp. mays
  misc_feature (1)..(1789): Ceres Seq. ID no. 13586275
taaagggaacaaaagctggagctccaccgcggtggcggccgctctagaactagtggatcccccgggctgcaggaattcgcacgagaccattacctagaacatcctaatcgaaaaaagacaccaaacacccatgcacacgcaacctatcaagatgaaaagaggcctcctggtactttggtccttgttctacttcagtgttgcaaacgctgacactagaaaccaggccaagcagcctcttgagttcaatcaattgagagtatcaaggaaatatgttcaaggaaaacaagattcaactcccaagaacggaaccagtccatcagtgcatagaggctcaacaagcaatcaacgggagcaggataagatcatatgtatgcctgggcaaacaggggtagcagagtttgaccaatatgcaggatatgtgactgtggatgccaaggctggaagggctttgttctactactttgttgaggctcctcaagatccttcaaacaaacctcttgtcctatggctgaatggagggcctggctgttcatcctttggatctggggccatggttgaacttggacctttctctgttcatagtgacaacaagacactgtacaagaaanggcatgcatggaacagaatggccaacatgttgttcattgagatcccagctggtgttggatactcatattcaaacactacatcagattactataacactggtgaccaaagaacaacagatgatgcatatacctttcttattacttggctagagaaatttcctgaatatcaggaccgtgatttcttcataactggtgagagctatgcaggtcactatataccagaacttgcaaatctgattctctctaagaatagagccaccaatgtaactagtatcaagcttaaaggtgttgcgattggaaatgcanacttggatgataatttgactctaagagcatcatatgactactattggatgcatgctatgatttcgggaaaagcttataaagccgtcaaggataagtgcggctttaacgggacatacactgaagactgccaaaatgccatggacttagccacccaagaaaaaggaaatattgatgactatgacatctatgcaccaatatgccaagatgcctcaaacccttctaaatcaagtgactcgttagtgtttggtgatccatgcacaaaccactacgtctnctcttacctaaatcgtcctgaggtccaaagggcactccatgcaaacacaacagggttaggctacccatggatggactgtagtcagcagatatttgataattggaaagattcaccagagacaatgctgccatcaatcaagaaactcatttcaagtggcacgagaatatggctgtacagtggtgatatggatgcagtgtgctcattcatttcaacacaatatgtgctggacaatcttgggcttcctatagaagcagcttggcgtccatggcacgtcgacaatgaggttgctggctacgtcattgggtataaagggctggtcttcgcgacggtcagaggagctgtgcacatggtgccatactaccagcctcgcagggcattggcattattctcgtcattcctcgaaggggagctccctccacgctgatcgattaagctagcagggtttgtgaatgccatttactcattttccacagcctatggaatcataggcggtacatgaggcctagtgtttttactatacttgtagctggcctttattttttatataaatatataaaacaaaccaagcagggagctgacgattatattaataaaaaatgag

SEQ ID NO: 26631 - protein, 493 aa, Zea mays subsp. mays
  misc_feature (1)..(493): Ceres Seq. ID no. 13586276
  misc_feature (160)..(160): Xaa is any aa, unknown or other
  misc_feature (262)..(262): Xaa is any aa, unknown or other
  misc_feature (353)..(353): Xaa is any aa, unknown or other
MHTQPIKMKRGLLVLWSLFYFSVANADTRNQAKQPLEFNQLRVSRKYVQGKQDSTPKNGTSPSVHRGSTSNQREQDKIICMPGQTGVAEFDQYAGYVTVDAKAGRALFYYFVEAPQDPSNKPLVLWLNGGPGCSSFGSGAMVELGPFSVHSDNKTLYKKXHAWNRMANMLFIEIPAGVGYSYSNTTSDYYNTGDQRTTDDAYTFLITWLEKFPEYQDRDFFITGESYAGHYIPELANLILSKNRATNVTSIKLKGVAIGNAXLDDNLTLRASYDYYWMHAMISGKAYKAVKDKCGFNGTYTEDCQNAMDLATQEKGNIDDYDIYAPICQDASNPSKSSDSLVFGDPCTNHYVXSYLNRPEVQRALHANTTGLGYPWMDCSQQIFDNWKDSPETMLPSIKKLISSGTRIWLYSGDMDAVCSFISTQYVLDNLGLPIEAAWRPWHVDNEVAGYVIGYKGLVFATVRGAVHMVPYYQPRRALALFSSFLEGELPPR

SEQ ID NO: 26632 - protein, 486 aa, Zea mays subsp. mays
  misc_feature (1)..(486): Ceres Seq. ID no. 13586277
  misc_feature (153)..(153): Xaa is any aa, unknown or other
  misc_feature (255)..(255): Xaa is any aa, unknown or other
  misc_feature (346)..(346): Xaa is any aa, unknown or other
MKRGLLVLWSLFYFSVANADTRNQAKQPLEFNQLRVSRKYVQGKQDSTPKNGTSPSVHRGSTSNQREQDKIICMPGQTGVAEFDQYAGYVTVDAKAGRALFYYFVEAPQDPSNKPLVLWLNGGPGCSSFGSGAMVELGPFSVHSDNKTLYKKXHAWNRMANMLFIEIPAGVGYSYSNTTSDYYNTGDQRTTDDAYTFLITWLEKFPEYQDRDFFITGESYAGHYIPELANLILSKNRATNVTSIKLKGVAIGNAXLDDNLTLRASYDYYWMHAMISGKAYKAVKDKCGFNGTYTEDCQNAMDLATQEKGNIDDYDIYAPICQDASNPSKSSDSLVFGDPCTNHYVXSYLNRPEVQRALHANTTGLGYPWMDCSQQIFDNWKDSPETMLPSIKKLISSGTRIWLYSGDMDAVCSFISTQYVLDNLGLPIEAAWRPWHVDNEVAGYVIGYKGLVFATVRGAVHMVPYYQPRRALALFSSFLEGELPPR

SEQ ID NO: 26633 - protein, 413 aa, Zea mays subsp. mays
  misc_feature (1)..(413): Ceres Seq. ID no. 13586278
  misc_feature (80)..(80): Xaa is any aa, unknown or other
  misc_feature (182)..(182): Xaa is any aa, unknown or other
  misc_feature (273)..(273): Xaa is any aa, unknown or other
MPGQTGVAEFDQYAGYVTVDAKAGRALFYYFVEAPQDPSNKPLVLWLNGGPGCSSFGSGAMVELGPFSVHSDNKTLYKKXHAWNRMANMLFIEIPAGVGYSYSNTTSDYYNTGDQRTTDDAYTFLITWLEKFPEYQDRDFFITGESYAGHYIPELANLILSKNRATNVTSIKLKGVAIGNAXLDDNLTLRASYDYYWMHAMISGKAYKAVKDKCGFNGTYTEDCQNAMDLATQEKGNIDDYDIYAPICQDASNPSKSSDSLVFGDPCTNHYVXSYLNRPEVQRALHANTTGLGYPWMDCSQQIFDNWKDSPETMLPSIKKLISSGTRIWLYSGDMDAVCSFISTQYVLDNLGLPIEAAWRPWHVDNEVAGYVIGYKGLVFATVRGAVHMVPYYQPRRALALFSSFLEGELPPR

SEQ ID NO: 26634 - DNA, 1101 bp, Zea mays subsp. mays
  misc_feature (1)..(1101): Ceres Seq. ID no. 13586344
caacctttcaaattgaattgggctaccagtggggctggtgagaaacgtggagacgatggttcagattatactatatttgttggggacttggcctcggatgttacagatttcattctacaagatacgttcaagagtcgttatccatcagttaagggtgcaaaagttgtctttgacagaactactggccgttcgaaaggctatggttttgtaaagtttgcagattcggatgaacagacacgggcaatgactgaaatgaatggacaatactgttctagcagggccatgcgccttggaccagcatccaacaagaagaatactggtggaccacaaccatcgagtgctatttaccagaacacccaaggaactgattctgatagcgatccgaacaatactactgtatttgttggtggccttgacccgagtgtgactgatgagcttctgaagcaaaccttcagtccatatggagagcttctctatgtcaaaatacctgtaggaaagcgctgcgggtttgtccaatattctaacagggcatcagctgaggaggccataagggtgctaaatggaagccagctgggaggtcagagcataaggctctcatggggccgtagccctgcaaacaagcagcctcagcaagagcagagccaatggagtggtggcggctattatgggtatccccaaggatacgatccatatggctatgctcggccccctcaagatcctgccatgtacgcctacgcagcatatccagggtatggaaattaccagcaacagccaccacagcagcccccgccacaacagtaatgatgtcccgagagtgatcatttgcaagctggtcgcaaagtagctgggggttggggcgcagcaactttggtgcgttggcatgagaaattttgcggcggttgcttgtgttgtgttgtattgttccgacgcccttgtacacgtagcctgtgttgtaactgaatttttgccgaggccttatgagtgactagtgtttcaactgtaactggattgcacatttttgtctcaaggaatgtactattattgtgtggctcgtgccgctttgaacgctgagtccaggtattaatttttcttcatgctctt

SEQ ID NO: 26635 - protein, 266 aa, Zea mays subsp. mays
  misc_feature (1)..(266): Ceres Seq. ID no. 13586345
QPFKLNWATSGAGEKRGDDGSDYTIFVGDLASDVTDFILQDTFKSRYPSVKGAKVVFDRTTGRSKGYGFVKFADSDEQTRAMTEMNGQYCSSRAMRLGPASNKKNTGGPQPSSAIYQNTQGTDSDSDPNNTTVFVGGLDPSVTDELLKQTFSPYGELLYVKIPVGKRCGFVQYSNRASAEEAIRVLNGSQLGGQSIRLSWGRSPANKQPQQEQSQWSGGGYYGYPQGYDPYGYARPPQDPAMYAYAAYPGYGNYQQQPPQQPPPQQ

SEQ ID NO: 26636 - protein, 185 aa, Zea mays subsp. mays
  misc_feature (1)..(185): Ceres Seq. ID no. 13586346
MTEMNGQYCSSRAMRLGPASNKKNTGGPQPSSAIYQNTQGTDSDSDPNNTTVFVGGLDPSVTDELLKQTFSPYGELLYVKIPVGKRCGFVQYSNRASAEEAIRVLNGSQLGGQSIRLSWGRSPANKQPQQEQSQWSGGGYYGYPQGYDPYGYARPPQDPAMYAYAAYPGYGNYQQQPPQQPPPQQ

SEQ ID NO: 26637 - protein, 182 aa, Zea mays subsp. mays
  misc_feature (1)..(182): Ceres Seq. ID no. 13586347
MNGQYCSSRAMRLGPASNKKNTGGPQPSSAIYQNTQGTDSDSDPNNTTVFVGGLDPSVTDELLKQTFSPYGELLYVKIPVGKRCGFVQYSNRASAEEAIRVLNGSQLGGQSIRLSWGRSPANKQPQQEQSQWSGGGYYGYPQGYDPYGYARPPQDPAMYAYAAYPGYGNYQQQPPQQPPPQQ

SEQ ID NO: 26638 - DNA, 1458 bp, Zea mays subsp. mays
  misc_feature (1)..(1458): Ceres Seq. ID no. 13586374
aaaaaacaacaactacttcctagtataaagtgacagtagcgggggagaagggaacgaaccaagcaacccaatccaaaccagacaagcaaggaatcccccgatggctcatcgcgttctcctcctcctctctctcgcgtcggccgccgcggttgccgccgccgtcgacgcggaggacccgctgatccggcaggtggttcccggtggagatgacaacgatctggagctgaacgcggagtcccacttcctgagcttcgtgcagcggttcggcaagtcctacaaggacgccgacgagcacgcgtaccggctgtccgttttcaaggacaacctgcgccgcgcgcgccggcaccagctgctggacccgtcggcggagcacggcgtcactaagttctccgacctcacgccggcagagttccgccggacctacctcggcctccgcaagtcccggcgcgctctcctcagagaactcggggagtcggcgcacgaggcgcccgtgctccccaccgatggtctccccgacgatttcgactggagggaccacggtgccgtcggccccgtcaagaaccagggttcgtgcgggtcgtgctggtcgttcagcgcgtctggagcgctggagggtgcgcactacctcgcaactggcaagctggaggtgctttcggagcagcagttcgtcgactgtgaccacgagtgtgattcatcggagcctgattcatgtgattcgggttgcaatggtgggctaatgacgacggcattcagttatctccagaaggccggtggccttgagagtgagaaggattacccttacactgggagtgatggcaaatgcaagtttgacaagtccaagattgttgcttcagttcagaacttcagtgttgtgtctgtggacgaggctcaaatttctgctaacctcatcaaacatgggccattggcaatcggcatcaatgctgcctacatgcagacatacatcggaggcgtgtcatgcccatacatctgtggcaggcaccttgaccatggtgttctccttgttggatatggtgcttctggtttcgcccccattcgcctgaaggacaagccttactggatcatcaagaactcgtggggcgagaactggggggagaacggatactacaagatatgcaggggttccaacgttcgcaacaagtgcggcgtcgattccatggtctctaccgtgtccgcagtccacgcctcgaaggagtagactctggtcagcggtgataatcgtgattccatatattgtagaactataatccctgctagtaatccatttgtgctgtttatgtatcgaaggcagcaaagatgtgtgaaagcggcaatgggatgcttgctgtaaggtaatatgtttggcttgctaggcatgctacacgctatttggatgtagcaacgttatcaccagctgtatacgctttttaatcgacaacatttgaataatatgtacataac

SEQ ID NO: 26639 - protein, 371 aa, Zea mays subsp. mays
  misc_feature (1)..(371): Ceres Seq. ID no. 13586375
MAHRVLLLLSLASAAAVAAAVDAEDPLIRQVVPGGDDNDLELNAESHFLSFVQRFGKSYKDADEHAYRLSVFKDNLRRARRHQLLDPSAEHGVTKFSDLTPAEFRRTYLGLRKSRRALLRELGESAHEAPVLPTDGLPDDFDWRDHGAVGPVKNQGSCGSCWSFSASGALEGAHYLATGKLEVLSEQQFVDCDHECDSSEPDSCDSGCNGGLMTTAFSYLQKAGGLESEKDYPYTGSDGKCKFDKSKIVASVQNFSVVSVDEAQISANLIKHGPLAIGINAAYMQTYIGGVSCPYICGRHLDHGVLLVGYGASGFAPIRLKDKPYWIIKNSWGENWGENGYYKICRGSNVRNKCGVDSMVSTVSAVHASKE

SEQ ID NO: 26640 - DNA, 1063 bp, Zea mays subsp. mays
  misc_feature (1)..(1063): Ceres Seq. ID no. 13586635
cacgcgattctcgactcccctccacccatacgtaacacgttctcctcccacgcccccactaaaacagatgccttcgcccttcgtgcgccacaacggaaaacccaccactcgcgagcaagtgcaggcaccgttgcccatccatcgttcatgatcccagcctgcctccgcggcctctgcacctgcttcgacgtggacgacgacaaggctaacaaccacgagcaagagccgacgatggccgccgccgccgccgctacaggcagcgccgacgacgaccagacggcaagcaccatcacccaccgcaccgtggagctgagcaccggcgtgcgcctgcacgtggcggaggccggcggcgcggcggcaacagcagcaggaggcgcgcccgcggtgctgctgctgcacggcttcccggagctgtggtacacctggcgccaccagatgcgggcgctggccgcggccgggtaccgcgccgtggcgccggacctgcgcgggtacggcggctccgacgcgccggcggtgggcggcggcgacgacgacgacgacccggccgcgcagtacaccgcgctgcacgtggtgggggacctggtggcgctcctcgacgcgctcggcgagagccaggtgttcgtggcggcgcacgactggggcgcgctcgtggcctggagcctctgcctgttccggcccgaccgggtgcgcgcgctcgtcgcgctcagcgtcgcctacacgccccgcagcgccgcgcggaagccagtcgacggcctccgggcgctcttcggcgacgactactacatctgccggatccaggagcccggggaaatagaagcagaatttgctgcagagtggtgtcttcgcccaaggatgggaagagcggggagaagacgatgaccatcgatgtaggcgtatgcagggaaggcgagttcagccaagtagcaggagcatgagcttttattagagatagatgaagataggaagatttcaaattcttttcttcttcctttttcttgtacgagtccgttcctcggagagtatgaacttgtctcgtttcaaatcccaccttttttgtttaaac

SEQ ID NO: 26641 - protein, 292 aa, Zea mays subsp. mays
  misc_feature (1)..(292): Ceres Seq. ID no. 13586636
HAILDSPPPIRNTFSSHAPTKTDAFALRAPQRKTHHSRASAGTVAHPSFMIPACLRGLCTCFDVDDDKANNHEQEPTMAAAAAATGSADDDQTASTITHRTVELSTGVRLHVAEAGGAAATAAGGAPAVLLLHGFPELWYTWRHQMRALAAAGYRAVAPDLRGYGGSDAPAVGGGDDDDDPAAQYTALHVVGDLVALLDALGESQVFVAAHDWGALVAWSLCLFRPDRVRALVALSVAYTPRSAARKPVDGLRALFGDDYYICRIQEPGEIEAEFAAEWCLRPRMGRAGRRR

SEQ ID NO: 26642 - protein, 243 aa, Zea mays subsp. mays
  misc_feature (1)..(243): Ceres Seq. ID no. 13586637
MIPACLRGLCTCFDVDDDKANNHEQEPTMAAAAAATGSADDDQTASTITHRTVELSTGVRLHVAEAGGAAATAAGGAPAVLLLHGFPELWYTWRHQMRALAAAGYRAVAPDLRGYGGSDAPAVGGGDDDDDPAAQYTALHVVGDLVALLDALGESQVFVAAHDWGALVAWSLCLFRPDRVRALVALSVAYTPRSAARKPVDGLRALFGDDYYICRIQEPGEIEAEFAAEWCLRPRMGRAGRRR

SEQ ID NO: 26643 - protein, 215 aa, Zea mays subsp. mays
  misc_feature (1)..(215): Ceres Seq. ID no. 13586638
MAAAAAATGSADDDQTASTITHRTVELSTGVRLHVAEAGGAAATAAGGAPAVLLLHGFPELWYTWRHQMRALAAAGYRAVAPDLRGYGGSDAPAVGGGDDDDDPAAQYTALHVVGDLVALLDALGESQVFVAAHDWGALVAWSLCLFRPDRVRALVALSVAYTPRSAARKPVDGLRALFGDDYYICRIQEPGEIEAEFAAEWCLRPRMGRAGRRR

SEQ ID NO: 26644 - DNA, 873 bp, Zea mays subsp. mays; identical to SEQ ID NO: 726
  misc_feature (1)..(873): Ceres Seq. ID no. 13586729

SEQ ID NO: 26645 - protein, 192 aa, Zea mays subsp. mays; identical to SEQ ID NO: 727
  misc_feature (1)..(192): Ceres Seq. ID no. 13586730

SEQ ID NO: 26646 - protein, 156 aa, Zea mays subsp. mays; identical to SEQ ID NO: 728
  misc_feature (1)..(156): Ceres Seq. ID no. 13586731

SEQ ID NO: 26647 - protein, 145 aa, Zea mays subsp. mays; identical to SEQ ID NO: 729
  misc_feature (1)..(145): Ceres Seq. ID no. 13586732

SEQ ID NO: 26648 - DNA, 1571 bp, Zea mays subsp. mays
  misc_feature (1)..(1571): Ceres Seq. ID no. 13586780
tctgcaccccggactacatcacgccggagatgccgcaggtggccaacgagttcgacgacgacgataaggagaacatcccctgcccaaaatctccggagaagtcagcgaaccctcgtagcaagcggtacagaaccgattgttctcccaaagctcgggaggttacggacttctctttcgaccatcagattacgccggttctgtttgacagcttgactcgagatgattcggaagaagagcagccgaagcagcctgcgctggaaaagaggggtggttatgtctcccagtcagcagtggctctgcgttgccgggtgatgcctccgccatgcgtcaagaatccatacctcaataccgatccatgcatagatgctgctgtttacggtgggaggcagtgcaactcagcagtattctctccttcaattggtggtaatggtctttcacgctatcgaactgatttccatgaaatagagaaaattggttatggcaacttcagtgttgtgttcaaagttctgaataggatagacgggtgcttgtatgctgttaaacggagcatcaagcaattgcataatgatatggaaaggaggcaagcagtgaaagaagtccaagctatggcagccttaggttctcacgagaacatagttcgatatttcacctcttggtttgagaatgagcaactttatattcagatggaactctgcgaccgctgtctatctatgaatcggaaccagccagtgaagcgtggggaagccctggaactgttgtatcagatctgcaaaggcttggatttcatgcacgaacgtggcatagcacaccttgatgtgaagcctgataatatatatgtcagaaatggtatttataagctcggggattttggctgtgctacacttgttaaccggagtctagcaattgaagatggagattcacgctatatgcctccggaaatgctgaatgataagtatgagcatctcgacaaggttgatatcttttctcttggggcagccgtctatgagctaataagaggcaccccgcttcccgagtctggatctcactttacaagcattagagagggtaagatcgcattgcttccagggtgcccgatgcagtttcaaagcttaatcaagtctatgatggaccctgatccggtgaggcggccttcagcaaaggagatcctgagacacccttcctttgacaagctccacaaggcctcatcgaagtagaagtgctgccgcgcccccatcagatcagagcagccggcaaagggaattccgcagctgcgtcacattcaccgtcagctgctcccaatttttggtgtatctatctatctctatgcgtgtgccatgtgccctgttctgatactgtagaagatggctggaaacgaagcagggatctgattttaattccaggaactggagcacgagcagcgtctgtaaaggactaaaggctgtggctgctgttgtgttaaggttgtgcctctcttttggtttctgatgcacgcttggaaccatcaaccctgtgcctttttttggggtgcttgttatcagttgcatttgggcagcgaatgctaatttggatcc

SEQ ID NO: 26649 - protein, 403 aa, Zea mays subsp. mays
  misc_feature (1)..(403): Ceres Seq. ID no. 13586781
CTPDYITPEMPQVANEFDDDDKENIPCPKSPEKSANPRSKRYRTDCSPKAREVTDFSFDHQITPVLFDSLTRDDSEEEQPKQPALEKRGGYVSQSAVALRCRVMPPPCVKNPYLNTDPCIDAAVYGGRQCNSAVFSPSIGGNGLSRYRTDFHEIEKIGYGNFSVVFKVLNRIDGCLYAVKRSIKQLHNDMERRQAVKEVQAMAALGSHENIVRYFTSWFENEQLYIQMELCDRCLSMNRNQPVKRGEALELLYQICKGLDFMHERGIAHLDVKPDNIYVRNGIYKLGDFGCATLVNRSLAIEDGDSRYMPPEMLNDKYEHLDKVDIFSLGAAVYELIRGTPLPESGSHFTSIREGKIALLPGCPMQFQSLIKSMMDPDPVRRPSAKEILRHPSFDKLHKASSK

SEQ ID NO: 26650 - protein, 394 aa, Zea mays subsp. mays
  misc_feature (1)..(394): Ceres Seq. ID no. 13586782
MPQVANEFDDDDKENIPCPKSPEKSANPRSKRYRTDCSPKAREVTDFSFDHQITPVLFDSLTRDDSEEEQPKQPALEKRGGYVSQSAVALRCRVMPPPCVKNPYLNTDPCIDAAVYGGRQCNSAVFSPSIGGNGLSRYRTDFHEIEKIGYGNFSVVFKVLNRIDGCLYAVKRSIKQLHNDMERRQAVKEVQAMAALGSHENIVRYFTSWFENEQLYIQMELCDRCLSMNRNQPVKRGEALELLYQICKGLDFMHERGIAHLDVKPDNIYVRNGIYKLGDFGCATLVNRSLAIEDGDSRYMPPEMLNDKYEHLDKVDIFSLGAAVYELIRGTPLPESGSHFTSIREGKIALLPGCPMQFQSLIKSMMDPDPVRRPSAKEILRHPSFDKLHKASSK

SEQ ID NO: 26651 - protein, 300 aa, Zea mays subsp. mays
  misc_feature (1)..(300): Ceres Seq. ID no. 13586783
MPPPCVKNPYLNTDPCIDAAVYGGRQCNSAVFSPSIGGNGLSRYRTDFHEIEKIGYGNFSVVFKVLNRIDGCLYAVKRSIKQLHNDMERRQAVKEVQAMAALGSHENIVRYFTSWFENEQLYIQMELCDRCLSMNRNQPVKRGEALELLYQICKGLDFMHERGIAHLDVKPDNIYVRNGIYKLGDFGCATLVNRSLAIEDGDSRYMPPEMLNDKYEHLDKVDIFSLGAAVYELIRGTPLPESGSHFTSIREGKIALLPGCPMQFQSLIKSMMDPDPVRRPSAKEILRHPSFDKLHKASSK

SEQ ID NO: 26652 - DNA, 1325 bp, Zea mays subsp. mays
  misc_feature (1)..(1325): Ceres Seq. ID no. 13587551
saacatcctaatcgaaaacatagttgtgttctatatagttcctctcactgctatcgctgctgttacaaccctggaaaacctggaggcgaagctgcccttcctgaagccagtggtggagcaaccagcaatcaagacggtttggaggcctaccttccccagattgcactcattgtgttcctcgcattgctacctactcttcttatgtttctctcgaaacaagaggggatcccttcgcagggccatgcagtcagggcggcatcgggaaagtatttctatttcatcgttttcaacgtcttcctttgctatacgcttggaagcacattgttcaaatctttgacgaccattatcaatcaccctgctgagattgtgaatatgcttgccaagagcctgcctggaagcgcaacgttcttcctcacgtttgtcgcgctgaagttcttggttggctatggccttgagctctctcgcctggttcctctcatcattttccacctgaaaaggaagtacctatgcaagacggaggaagaagtgagagcggcatgggctccagtggatctgggatataacaccaggataccaaatgacatgctcatcgcaacagttgttctgtgctactcagtcattgcgcctttgattattccgttcggtgttgcatactttgccctcggttggcttatagcaagaaatcagatcctgagagtttacgttcctagctacgaaagctacggacgaatgtggccacacatgcacacgaggatcatcgcggctctgatggtttaccagaccaccatgatcggcttcatctccctgaagaagttcgcctacgcgtccgttctcgtgcccctgcttccagccagcataatcttcgcctacgtctgccacatgcgcttctacccggcgttcgccaagactcccctggaggtggtggtgcggcacgacctgaaggagactccgaacatggaggccatctacaccgcgtacataccgccgtgcttgaagcctgataagctcgaagatctggacgctttcgaggacgcccagtcgcgcgccacctccagagtcccgtctatttagctgtgcacatcgttgacttccgcggaagacttgaagaaattctgttcacttgtcattacattcgtgtgggatttctgatggatttcaatgcttccacgttgaaccctctggacttgtttcaggataggaatctgatgtgaagaatgtacatatgctcgatctgtgtgtctgctgagcgtgtgtggatgtggactsctgtaggtaggtagatsctgtggatattggagggttctaagttgtcttcatttccatcc

SEQ ID NO: 26653 - protein, 356 aa, Zea mays subsp. mays
  misc_feature (1)..(356): Ceres Seq. ID no. 15220816
  misc_feature (1)..(1): Xaa is any aa, unknown or other
XHPNRKHSCVLYSSSHCYRCCYNPGKPGGEAALPEASGGATSNQDGLEAYLPQIALIVFLALLPTLLMFLSKQEGIPSQGHAVRAASGKYFYFIVFNVFLCYTLGSTLFKSLTTIINHPAEIVNMLAKSLPGSATFFLTFVALKFLVGYGLELSRLVPLIIFHLKRKYLCKTEEEVRAAWAPVDLGYNTRIPNDMLIATVVLCYSVIAPLIIPFGVAYFALGWLIARNQILRVYVPSYESYGRMWPHMHTRIIAALMVYQTTMIGFISLKKFAYASVLVPLLPASIIFAYVCHMRFYPAFAKTPLEVVVRHDLKETPNMEAIYTAYIPPCLKPDKLEDLDAFEDAQSRATSRVPSI

SEQ ID NO: 26654 - protein, 289 aa, Zea mays subsp. mays
  misc_feature (1)..(289): Ceres Seq. ID no. 15220817
MFLSKQEGIPSQGHAVRAASGKYFYFIVFNVFLCYTLGSTLFKSLTTIINHPAEIVNMLAKSLPGSATFFLTFVALKFLVGYGLELSRLVPLIIFHLKRKYLCKTEEEVRAAWAPVDLGYNTRIPNDMLIATVVLCYSVIAPLIIPFGVAYFALGWLIARNQILRVYVPSYESYGRMWPHMHTRIIAALMVYQTTMIGFISLKKFAYASVLVPLLPASIIFAYVCHMRFYPAFAKTPLEVVVRHDLKETPNMEAIYTAYIPPCLKPDKLEDLDAFEDAQSRATSRVPSI

SEQ ID NO: 26655 - protein, 232 aa, Zea mays subsp. mays
  misc_feature (1)..(232): Ceres Seq. ID no. 15220818
MLAKSLPGSATFFLTFVALKFLVGYGLELSRLVPLIIFHLKRKYLCKTEEEVRAAWAPVDLGYNTRIPNDMLIATVVLCYSVIAPLIIPFGVAYFALGWLIARNQILRVYVPSYESYGRMWPHMHTRIIAALMVYQTTMIGFISLKKFAYASVLVPLLPASIIFAYVCHMRFYPAFAKTPLEVVVRHDLKETPNMEAIYTAYIPPCLKPDKLEDLDAFEDAQSRATSRVPSI

SEQ ID NO: 26656 - DNA, 1483 bp, Zea mays subsp. mays; identical to SEQ ID NO: 805
  misc_feature (1)..(1483): Ceres Seq. ID no. 13587581

SEQ ID NO: 26657 - protein, 412 aa, Zea mays subsp. mays; identical to SEQ ID NO: 806
  misc_feature (1)..(412): Ceres Seq. ID no. 13587582

SEQ ID NO: 26658 - protein, 359 aa, Zea mays subsp. mays; identical to SEQ ID NO: 807
  misc_feature (1)..(359): Ceres Seq. ID no. 13587583

SEQ ID NO: 26659 - protein, 301 aa, Zea mays subsp. mays; identical to SEQ ID NO: 808
  misc_feature (1)..(301): Ceres Seq. ID no. 13587584

SEQ ID NO: 26660 - DNA, 1161 bp, Zea mays subsp. mays
  misc_feature (1)..(1161): Ceres Seq. ID no. 13587719
catcgagacacacacagaacttctcctgtcggcctactaatacagctagctagctgccctcttaggtatactgtgatggccacaaccttgtcctccacagtagtagttgcacttggtgcacctctcttcttgctccttgtaacgtgtggctcgtgcgcgaggccggtgagctttaacgcctccgacctcaccgccgatcccggctgggatgctgccagggccacctggtacggtgcgcccaccggcgccggccctgatgacgacggtggtgcctgtggattcaagaacgtgaatctgccgccgttctcggcaatgacgtcgtgcggcaacgagcccctgttcaaggacggcaagggctgcggctcctgctaccagatacgatgccaaaaccacccggcctgctccggcaacccagagacggtgatcatcactgacatgaactactaccccgtggccaagtaccacttcgacctcagcggcacggcgttcggcgccatggccaagcccggccgcaacgacgagctccgccacgccggcatcatcgacatccagttcaagagggtgccctgcaactaccccgggcagaaggtgacgttccacgtcgaggagggctccaaccccgtctacttcgcggtgctggtcgagttcgaagacggcgacggcgacgcggtgcaggtggacctcatggaggccaactctgcgtcgtggacgccgatgcgcgagtcctggggatccatctggaggctcgactccggccaccgcctcaccgcgccattctccctgcgcattacgaacgagtccggcaagacgctggtggctgaccatgtcatccccgccaactgggtgcccaacacctactaccgttctatcgtccagtattagccgctcccagctgctgcgccggccggataataatatacaattctgtgtcattgtgctttactattagtttggtattagtattgtatttctgcatgggactgatgaggcacagagctgaagtgaggtgcctcactccattgctaatttgctactaggtgttaagttggtgtgcggcttcagggagttgaagactgggaagtggaggaagcagtgctttttcccgcccattgtcgtgaatgcatgtaccagtgcgattaagattatataaattatattgac

SEQ ID NO: 26661 - protein, 293 aa, Zea mays subsp. mays
  misc_feature (1)..(293): Ceres Seq. ID no. 13587720
HRDTHRTSPVGLLIQLASCPLRYTVMATTLSSTVVVALGAPLFLLLVTCGSCARPVSFNASDLTADPGWDAARATWYGAPTGAGPDDDGGACGFKNVNLPPFSAMTSCGNEPLFKDGKGCGSCYQIRCQNHPACSGNPETVIITDMNYYPVAKYHFDLSGTAFGAMAKPGRNDELRHAGIIDIQFKRVPCNYPGQKVTFHVEEGSNPVYFAVLVEFEDGDGDAVQVDLMEANSASWTPMRESWGSIWRLDSGHRLTAPFSLRITNESGKTLVADHVIPANWVPNTYYRSIVQY

SEQ ID NO: 26662 - protein, 268 aa, Zea mays subsp. mays
  misc_feature (1)..(268): Ceres Seq. ID no. 13587721
MATTLSSTVVVALGAPLFLLLVTCGSCARPVSFNASDLTADPGWDAARATWYGAPTGAGPDDDGGACGFKNVNLPPFSAMTSCGNEPLFKDGKGCGSCYQIRCQNHPACSGNPETVIITDMNYYPVAKYHFDLSGTAFGAMAKPGRNDELRHAGIIDIQFKRVPCNYPGQKVTFHVEEGSNPVYFAVLVEFEDGDGDAVQVDLMEANSASWTPMRESWGSIWRLDSGHRLTAPFSLRITNESGKTLVADHVIPANWVPNTYYRSIVQY

SEQ ID NO: 26663 - protein, 189 aa, Zea mays subsp. mays
  misc_feature (1)..(189): Ceres Seq. ID no. 13587722
MTSCGNEPLFKDGKGCGSCYQIRCQNHPACSGNPETVIITDMNYYPVAKYHFDLSGTAFGAMAKPGRNDELRHAGIIDIQFKRVPCNYPGQKVTFHVEEGSNPVYFAVLVEFEDGDGDAVQVDLMEANSASWTPMRESWGSIWRLDSGHRLTAPFSLRITNESGKTLVADHVIPANWVPNTYYRSIVQY

SEQ ID NO: 26664 - DNA, 1204 bp, Zea mays subsp. mays
  misc_feature (1)..(1204): Ceres Seq. ID no. 13587732
ctgcaggttcagttcagtagtgtgctctgacagtgagatggcgagcgtgaaggttttcgggtcacccacctcggcggaggtcgcccgcgtgctcatgtgcctcttcgagaaggaggtggagttccagctgatccgcgtcgacgcctaccgcggcaccaagcgcatgccccagtacctcaagctgcagccgcaaggcgaggcgctcaccttcgaggacgagagcctcaccctctccgactccagggggatcctccgccacatctcccacaagtacgcgaagcagggcaacccgttacctgattggcacgggcgcgctggagcgggcgtccatcgagcagtggctgcagacggaggcgcagagcttcgacgcgcccagcgccgagatggtctacagcctcgccttcctgccgcccaccctgcccaagcagaacgacaacggcaacggcggcgcgttcaacgccagggacgccaccgtaggcagcaacgccgacgcgtccagcggcaagcgcggtgtggccgggtcacagccggcggcgagccagaccaaggtgagcgcgcagaaggaggaggagatgctgaagctgttcgagcagaggaagaaggacctggagaagctgctggacatctacgagcagcgcctggaggaggccacgttcctggccggcgacaacttcaccatcgccgacctgtcgcacctgccctacgcggaccacctcgtctccgacccgcgctcccgccgcatgttcgagtcccgcaagaacgtcagcaggtggtggcacgacgtctccggccgcgacacctggaagtacgtcaagaccctgcagcgcccgccgtccacgtccaccgacgccagcgccaagaacggccagctgggccagcagcagcacctgccgtcgtccaccgacggccacggcgtgaagagccaacggctggtccagaacgagcggcacttctagccgttgccgtcccttcccgccgacgaataaactacctgcgccgccgccaccgccgccgtccatcaacatggttcctgctgctgttcgtgtcgttttcatacgtcatacgtgtcttgctgcttttgaagctccgttcccgggtgcagggacctacgagtccattccgccgtttgctcattctgttcgtcgtgtaataaaatgaaaaccccaccccgttttgaatgaaattcaattctcagtgtcgtgtg

SEQ ID NO: 26665 - protein, 382 aa, Zea mays subsp. mays
  misc_feature (1)..(382): Ceres Seq. ID no. 13587733
CRFSSVVCSDSEMASVKVFGSPTSAEVARVLMCLFEKEVEFQLIRVDAYRGTKRMPQYLKLQPQGEALTFEDESLTLSDSRGILRHISHKYAKQGNPLPDWHGRAGAGVHRAVAADGGAELRRAQRRDGLQPRLPAAHPAQAERQRQRRRVQRQGRHRRQQRRRVQRQARCGRVTAGGEPDQGERAEGGGDAEAVRAEEEGPGEAAGHLRAAPGGGHVPGRRQLHHRRPVAPALRGPPRLRPALPPHVRVPQERQQVVARRLRPRHLEVRQDPAAPAVHVHRRQRQERPAGPAAAPAVVHRRPRREEPTAGPERAALLAVAVPSRRRINYLRRRHRRRPSTWFLLLFVSFSYVIRVLLLLKLRSRVQGPTSPFRRLLILFVV

SEQ ID NO: 26666 - protein, 370 aa, Zea mays subsp. mays
  misc_feature (1)..(370): Ceres Seq. ID no. 13587734
MASVKVFGSPTSAEVARVLMCLFEKEVEFQLIRVDAYRGTKRMPQYLKLQPQGEALTFEDESLTLSDSRGILRHISHKYAKQGNPLPDWHGRAGAGVHRAVAADGGAELRRAQRRDGLQPRLPAAHPAQAERQRQRRRVQRQGRHRRQQRRRVQRQARCGRVTAGGEPDQGERAEGGGDAEAVRAEEEGPGEAAGHLRAAPGGGHVPGRRQLHHRRPVAPALRGPPRLRPALPPHVRVPQERQQVVARRLRPRHLEVRQDPAAPAVHVHRRQRQERPAGPAAAPAVVHRRPRREEPTAGPERAALLAVAVPSRRRINYLRRRHRRRPSTWFLLLFVSFSYVIRVLLLLKLRSRVQGPTSPFRRLLILFVV

SEQ ID NO: 26667 - protein, 351 aa, Zea mays subsp. mays
  misc_feature (1)..(351): Ceres Seq. ID no. 13587735
MCLFEKEVEFQLIRVDAYRGTKRMPQYLKLQPQGEALTFEDESLTLSDSRGILRHISHKYAKQGNPLPDWHGRAGAGVHRAVAADGGAELRRAQRRDGLQPRLPAAHPAQAERQRQRRRVQRQGRHRRQQRRRVQRQARCGRVTAGGEPDQGERAEGGGDAEAVRAEEEGPGEAAGHLRAAPGGGHVPGRRQLHHRRPVAPALRGPPRLRPALPPHVRVPQERQQVVARRLRPRHLEVRQDPAAPAVHVHRRQRQERPAGPAAAPAVVHRRPRREEPTAGPERAALLAVAVPSRRRINYLRRRHRRRPSTWFLLLFVSFSYVIRVLLLLKLRSRVQGPTSPFRRLLILFVV

SEQ ID NO: 26668 - DNA, 829 bp, Zea mays subsp. mays
  misc_feature (1)..(829): Ceres Seq. ID no. 13587752
atggggaggagggcgtgttgcgcgaaggaaggcgttaagagaggggcgtggacgagcaaggaggacgatgccttggccgcctacgtcaaggcccatggcgaaggcaaatggagggaagtgccccagaaagccggtttgcgtcggtgcggcaagagctgccggctgcggtggctgaactacctccggcccaacatcaggcgcggcaacatctcctacgacgaggaggatctcatgatcatccgcctccacaggctcctcggcaacaggtggtcgctgattgcaggcaggctgcctggccgaacagaaaatgaaatcaagaactactggaacagcacgctgggccggagggcaggcgccggcgccggcggcagcagggtcgtcgtcgcgccggacaccggctcgcacgccaccccggccgcgacgtcgggcagcagcgagaccggccagaagggcgccgctcctcgcgcggaccccgactcggccgggacgacgacgacctcggcagcggcggtgtgggcgcccaaggccgtgcggtgcacgagcggactcttcttcttccaccgggacacgacgccggcgcacgcgggcgagacggcgacgccaatggccggtggaggtggagttggaggaggaggaggagaagcagggtcgtcggacgactgcagctcggcggcgtcggtatcgcctcgcgtcggaagccacgacgagccgtgcttctccggcgacggtgacggcgactcttggacgacgtgagggccctggcgtcgtttctcgagtccgacgaggactggctccgctgtcagacggccgggcagcttgcgtagacaac

SEQ ID NO: 26669 - protein, 250 aa, Zea mays subsp. mays
  misc_feature (1)..(250): Ceres Seq. ID no. 13587753
MGRRACCAKEGVKRGAWTSKEDDALAAYVKAHGEGKWREVPQKAGLRRCGKSCRLRWLNYLRPNIRRGNISYDEEDLMIIRLHRLLGNRWSLIAGRLPGRTENEIKNYWNSTLGRRAGAGAGGSRVVVAPDTGSHATPAATSGSSETGQKGAAPRADPDSAGTTTTSAAAVWAPKAVRCTSGLFFFHRDTTPAHAGETATPMAGGGGVGGGGGEAGSSDDCSSAASVSPRVGSHDEPCFSGDGDGDSWTT

SEQ ID NO: 26670 - protein, 173 aa, Zea mays subsp. mays
  misc_feature (1)..(173): Ceres Seq. ID no. 13587754
MIIRLHRLLGNRWSLIAGRLPGRTENEIKNYWNSTLGRRAGAGAGGSRVVVAPDTGSHATPAATSGSSETGQKGAAPRADPDSAGTTTTSAAAVWAPKAVRCTSGLFFFHRDTTPAHAGETATPMAGGGGVGGGGGEAGSSDDCSSAASVSPRVGSHDEPCFSGDGDGDSWTT

SEQ ID NO: 26671 - protein, 174 aa, Zea mays subsp. mays
  misc_feature (1)..(174): Ceres Seq. ID no. 13587755
MKSRTTGTARWAGGQAPAPAAAGSSSRRTPARTPPRPRRRAAARPARRAPLLARTPTRPGRRRPRQRRCGRPRPCGARADSSSSTGTRRRRTRARRRRQWPVEVELEEEEEKQGRRTTAARRRRYRLASEATTSRASPATVTATLGRREGPGVVSRVRRGLAPLSDGRAACVDN

SEQ ID NO: 26672 - DNA, 2294 bp, Zea mays subsp. mays
  misc_feature (1)..(2294): Ceres Seq. ID no. 13587778
ttgaccccaacgatcttaacgtcctcaacacgctcttcaccagtctgaattctcctgggcagctcacaggttggcaggcgaatgggggtgatccttgtggccagtcatggaagggcattacttgctcaggatcaggggtcactaaaatccaattacctaacttgtcactcactggaaatttggcctacaacatgaataacttgggttcattagttgagcttgacatgagccaaaataaccttggcggtggaggtcaagtacagtacaatcttcccaatatgaagcttgagaaactcaatcttgcaggaaatcaatttggtggaaatttaccctactcaatttcgacgatgcctaatcttaagtatttaaaccttaatcataaccaactacaaggaaacatcagtgatgtattttccaacctttacagtttgtcagaactggatctgtcctttaattcccttactggtgatctaccacaaagtttcactggattgtcaagcctgaaaaaagtgtatttgcagaacaaccaatttactggtaatatcaatgtcttagccaatctcccccttgaaactttgaatgttgcgaacaaccatttcactggttggattcctagtcagcttaagaagataaacagtctacagactgatggaaattcttggagcacaggaccagcgccacctccacctccatacacagcgccgcctcctcctccaaaccattggaatgctgatggttcatcaagttcatcaagttctggtggaagatctgggataggtggtggaggtgtagcaggaatcattatatcgttgctggttgttggatcagttgttgcatttcttgtgatcaaaagaagaaaacgcaaagctgctatgaaagaacattttgaacagcaccagccattcacttccttcccttcaaatgaagttaaagacatgaagcctgtctgcgaggccaccacagtagacatagagtctttggcttcacctgcttcagttaatctgaaaccacctccgaagatagaacgaaacaaatcatttgatgatgacgatgatttttcaaacaagcttgttgcaaagaaaagtaatataacacctataaatgcaactgtttattcagttgcagatctacagatggcaacagatagctttagcttcgacaaccttgttggagagggtacttttggacgtgtttacagggcacaattcaatgatggaaaggttctggcgatcaagaaattagatagtactgtgatgccatttcaatcatctgatgactttgctgaactggtctcgaacatttcaaaattgcaccatccgaatctgaatgagcttgtgggctattgcatggaacatggccagcacttgcttgtgtatgatttccacaggaatggatcacttcatgatctactccacctttcagatgagtacagcaagccacttagctggaacactcgtatcaagatcgcactcggctctgcccgtgcactggagtaccttcatgaaatatgttctccatccatcatccataagaatttcaagtcgtcaaacattttgctggactcagaattcaatccacacctttcagatgctggacttgcaagctttattcctgatgctgaattccaggcagcagaacaaagtgccggatacactgccccagaagtggacatgaccggtcagtacaccttcaagagtgatgtctacagctttggagttgtcatgcttgaactattgacaggacgtagaccatttgacagctctagacccaggtcagagcagtcacttgtgcggtgggcaacaccccagctgcatgacatcgacgcattggacaggatggtcgatcctgcactcaagggtctatacccagccaaatctctatcccgatttgctgatgtccttgccctgtgtgtccagcctgaaccagaattcaggccaccaatgtcagaggtggtgcaagcattggttcgacttgtgcagagggccaacatgacgaagaggatgcttgatggggatacttctcggcgaccagatgacctggaccaagatttcatatgacaagctgaactcttgtcagattgtatttatttcgttcgactagcggcccaagcaagagacataatcacacaagaggaagaaacagaactctgtcagcttcgccagtacataatcacaagtttttcctggtagcaaagttgtgctatatggttgtactgtgtctacaaaatagtaccttgatcttacgctaatggcatattgttataattctttggtaacttatatgcaaatccccag

SEQ ID NO: 26673 - protein, 684 aa, Zea mays subsp. mays
  misc_feature (1)..(684): Ceres Seq. ID no. 13587779
DPNDLNVLNTLFTSLNSPGQLTGWQANGGDPCGQSWKGITCSGSGVTKIQLPNLSLTGNLAYNMNNLGSLVELDMSQNNLGGGGQVQYNLPNMKLEKLNLAGNQFGGNLPYSISTMPNLKYLNLNHNQLQGNISDVFSNLYSLSELDLSFNSLTGDLPQSFTGLSSLKKVYLQNNQFTGNINVLANLPLETLNVANNHFTGWIPSQLKKINSLQTDGNSWSTGPAPPPPPYTAPPPPPNHWNADGSSSSSSSGGRSGIGGGGVAGIIISLLVVGSVVAFLVIKRRKRKAAMKEHFEQHQPFTSFPSNEVKDMKPVCEATTVDIESLASPASVNLKPPPKIERNKSFDDDDDFSNKLVAKKSNITPINATVYSVADLQMATDSFSFDNLVGEGTFGRVYRAQFNDGKVLAIKKLDSTVMPFQSSDDFAELVSNISKLHHPNLNELVGYCMEHGQHLLVYDFHRNGSLHDLLHLSDEYSKPLSWNTRIKIALGSARALEYLHEICSPSIIHKNFKSSNILLDSEFNPHLSDAGLASFIPDAEFQAAEQSAGYTAPEVDMTGQYTFKSDVYSFGVVMLELLTGRRPFDSSRPRSEQSLVRWATPQLHDIDALDRMVDPALKGLYPAKSLSRFADVLALCVQPEPEFRPPMSEVVQALVRLVQRANMTKRMLDGDTSRRPDDLDQDFI

SEQ ID NO: 26674 - protein, 621 aa, Zea mays subsp. mays
  misc_feature (1)..(621): Ceres Seq. ID no. 13587780
MNNLGSLVELDMSQNNLGGGGQVQYNLPNMKLEKLNLAGNQFGGNLPYSISTMPNLKYLNLNHNQLQGNISDVFSNLYSLSELDLSFNSLTGDLPQSFTGLSSLKKVYLQNNQFTGNINVLANLPLETLNVANNHFTGWIPSQLKKINSLQTDGNSWSTGPAPPPPPYTAPPPPPNHWNADGSSSSSSSGGRSGIGGGGVAGIIISLLVVGSVVAFLVIKRRKRKAAMKEHFEQHQPFTSFPSNEVKDMKPVCEATTVDIESLASPASVNLKPPPKIERNKSFDDDDDFSNKLVAKKSNITPINATVYSVADLQMATDSFSFDNLVGEGTFGRVYRAQFNDGKVLAIKKLDSTVMPFQSSDDFAELVSNISKLHHPNLNELVGYCMEHGQHLLVYDFHRNGSLHDLLHLSDEYSKPLSWNTRIKIALGSARALEYLHEICSPSIIHKNFKSSNILLDSEFNPHLSDAGLASFIPDAEFQAAEQSAGYTAPEVDMTGQYTFKSDVYSFGVVMLELLTGRRPFDSSRPRSEQSLVRWATPQLHDIDALDRMVDPALKGLYPAKSLSRFADVLALCVQPEPEFRPPMSEVVQALVRLVQRANMTKRMLDGDTSRRPDDLDQDFI

SEQ ID NO: 26675 - protein, 610 aa, Zea mays subsp. mays
  misc_feature (1)..(610): Ceres Seq. ID no. 13587781
MSQNNLGGGGQVQYNLPNMKLEKLNLAGNQFGGNLPYSISTMPNLKYLNLNHNQLQGNISDVFSNLYSLSELDLSFNSLTGDLPQSFTGLSSLKKVYLQNNQFTGNINVLANLPLETLNVANNHFTGWIPSQLKKINSLQTDGNSWSTGPAPPPPPYTAPPPPPNHWNADGSSSSSSSGGRSGIGGGGVAGIIISLLVVGSVVAFLVIKRRKRKAAMKEHFEQHQPFTSFPSNEVKDMKPVCEATTVDIESLASPASVNLKPPPKIERNKSFDDDDDFSNKLVAKKSNITPINATVYSVADLQMATDSFSFDNLVGEGTFGRVYRAQFNDGKVLAIKKLDSTVMPFQSSDDFAELVSNISKLHHPNLNELVGYCMEHGQHLLVYDFHRNGSLHDLLHLSDEYSKPLSWNTRIKIALGSARALEYLHEICSPSIIHKNFKSSNILLDSEFNPHLSDAGLASFIPDAEFQAAEQSAGYTAPEVDMTGQYTFKSDVYSFGVVMLELLTGRRPFDSSRPRSEQSLVRWATPQLHDIDALDRMVDPALKGLYPAKSLSRFADVLALCVQPEPEFRPPMSEVVQALVRLVQRANMTKRMLDGDTSRRPDDLDQDFI

SEQ ID NO: 26676 - DNA, 1441 bp, Zea mays subsp. mays
  misc_feature (1)..(1441): Ceres Seq. ID no. 13587836
accatccactgcgatacttcagacagctcttcttgcgttgcctactaagctctctctctctctctttctctcttgtgttcttgccttctgcctactacgagtgatggccagcctcactgacctcgtcaacctcgacctgagtgactgcacagacaggatcatcgccgagtacatctgggttggaggatccggcatagacctcaggagcaaagcaaggacggtgaaaggccccatcaccgatccgagccagctgccaaaatggaactacgacggctccagcaccgggcaggctcccggagaggacagcgaagtcatcctctaccctcaagtcattttcaaggacccgttcaggaagtgtaacaacatccttgtgatgtgtgactgctacacgccacaaggcgagccaatccccagtaacaagaggtacaaagctgccacggttttcagccaccccgatgttgcagctgaggtgccatggtacggtattgagcaggagtacactctccttcagaaggatgtgagctggccccttggctggcctgttggtggataccctggtccccagggaccatactactgtgctgccggtgccgataaggcctttgggcgcgacgtggttgacgcccactacaaagcctgcctctacgccggcatcaacatcagcggcatcaacggcgaagtcatgcctggacagtgggagttccaagtcgggccgtccgttgggatctctgccggcgacgagatatgggtcgcccgctacattctcgagaggatcactgagatggccggaatcgttctctccctcgacccgaagccgatcaagggtgactggaacggcgccggcgctcacaccaactacagcaccaagtcgatgagggaggccggtggctacgaggtgatcaaggaggcgatcgagaagctggggaagaggcacagggagcacatcgccgcgtacgacgggggcaacgagcgccgcctcacgggccgccacgagaccgccgacatcaacaccttcaaatggggcgtggcgaaccgcggcggctccatccgcgtcggccgcgacaccgagaaggagggcaagggatatttcgaggaccgcaggccggcttccaacatggacccctacgtcgtcaccggcatgatcgccgacaccaccatcctgtggaagggaaactgataaaaccactgttcttctcctgcacgcatgcatccgccccgtgctgtcactttttgttttttcaaatttcgattcccgtcctaaagtttgttaccacttattattacggtctccagtgtactgctcggaaagtccgaataaaaacggctctaatgattttgttttttttaaaaaaaaatttgccttcgccataggtgtacgattggctgcgcttcccgtttattgggtactagtacaattgatatgaatcaattgccattaacg

SEQ ID NO: 26677 - protein, 391 aa, Zea mays subsp. mays
  misc_feature (1)..(391): Ceres Seq. ID no. 13587837
PSTAILQTALLALPTKLSLSLFLSCVLAFCLLRVMASLTDLVNLDLSDCTDRIIAEYIWVGGSGIDLRSKARTVKGPITDPSQLPKWNYDGSSTGQAPGEDSEVILYPQVIFKDPFRKCNNILVMCDCYTPQGEPIPSNKRYKAATVFSHPDVAAEVPWYGIEQEYTLLQKDVSWPLGWPVGGYPGPQGPYYCAAGADKAFGRDVVDAHYKACLYAGINISGINGEVMPGQWEFQVGPSVGISAGDEIWVARYILERITEMAGIVLSLDPKPIKGDWNGAGAHTNYSTKSMREAGGYEVIKEAIEKLGKRHREHIAAYDGGNERRLTGRHETADINTFKWGVANRGGSIRVGRDTEKEGKGYFEDRRPASNMDPYVVTGMIADTTILWKGN

SEQ ID NO: 26678 - protein, 357 aa, Zea mays subsp. mays
  misc_feature (1)..(357): Ceres Seq. ID no. 13587838
MASLTDLVNLDLSDCTDRIIAEYIWVGGSGIDLRSKARTVKGPITDPSQLPKWNYDGSSTGQAPGEDSEVILYPQVIFKDPFRKCNNILVMCDCYTPQGEPIPSNKRYKAATVFSHPDVAAEVPWYGIEQEYTLLQKDVSWPLGWPVGGYPGPQGPYYCAAGADKAFGRDVVDAHYKACLYAGINISGINGEVMPGQWEFQVGPSVGISAGDEIWVARYILERITEMAGIVLSLDPKPIKGDWNGAGAHTNYSTKSMREAGGYEVIKEAIEKLGKRHREHIAAYDGGNERRLTGRHETADINTFKWGVANRGGSIRVGRDTEKEGKGYFEDRRPASNMDPYVVTGMIADTTILWKGN

SEQ ID NO: 26679 - protein, 267 aa, Zea mays subsp. mays
  misc_feature (1)..(267): Ceres Seq. ID no. 13587839
MCDCYTPQGEPIPSNKRYKAATVFSHPDVAAEVPWYGIEQEYTLLQKDVSWPLGWPVGGYPGPQGPYYCAAGADKAFGRDVVDAHYKACLYAGINISGINGEVMPGQWEFQVGPSVGISAGDEIWVARYILERITEMAGIVLSLDPKPIKGDWNGAGAHTNYSTKSMREAGGYEVIKEAIEKLGKRHREHIAAYDGGNERRLTGRHETADINTFKWGVANRGGSIRVGRDTEKEGKGYFEDRRPASNMDPYVVTGMIADTTILWKGN

SEQ ID NO: 26680 - DNA, 1619 bp, Zea mays subsp. mays
  misc_feature (1)..(1619): Ceres Seq. ID no. 13587844
attcgcagccctacccgcgccgccgcaccaggacccgccgcgccggcccagcagcgcgcggttttgcgggtggcgtcgtccaggacctcctccgcccgcccccgaagggccgccgccgccgtggccgcggccgcaatgcagccggccaaggcggtcgccgcggaggcctcccccgccgcggtggagatggggaacggcgccgcggcgccggggctgcagaggcccgacgccatgggcaggttcgggaggttcggcggcaagtacgtccccgagacgctcatgcacgcgctcaccgagctcgagagcgccttccacgcgctcgccaccgacgacgagttccagaaagaactggacggtattctcaaggactacgttggacgtgagagccccctatacttcgcggagcgcctaacggagcactacaagcgcgccgatggcacaggcccgctcatctacctcaagagggaggaccttaaccacacgggtgcccacaagatcaacaatgccgtggcgcaggccttgcttgccaagcgacttgggaagcagcgcatcattgccgagacaggggctggtcagcacggcgtcgccaccgccaccgtgtgccgccgtttcgggctgcagtgcatcatctacatgggcgcacaggatatggagaggcaggcgctcaatgttttccggatgaggcttcttggtgcagaggtcagggcggtacattctgggacagcaaccctgaaggatgcaacttcagaggctatccgtgactgggtcacaaatgtggagaccacacactatatcttgggctctgttgccggtccgcacccgtacccgatgatggtgagggagttccataaggttattggcaaggaaacccggaggcaggccatggacaagtggggtggcaagccggacgtattggttgcctgcgtcggcggcggatcaaacgccatgggcttattccatgagtttgttgaggatcaagatgtgaggctggttggactggaggcagctggccatggcgtagacaccgacaagcatgcggcgactttgacaaagggccaagtcggagttctccatggatccatgagctatttgctgcaggatgatgacggacaagttatcgaaccccactccatcagtgctgggctcgattaccctggcgttggacccgagcacagtttcttgaaggacattggacgtgccgaatacgatagtgtgactgaccaggaggcactggatgctttcaagcgcgtgtctcggttggagggcatcatccctgccctggagacctcccacgcgctggcctaccttgagaagctctgcccgacactggcggacggcgtgagggtggtggtgaactgcagcgggcgaggagacaaggacgtgcacaccgccagcaagtacctggacgtctaaaacaccagcgaggaggctggtttccatgtcaagttttggagggttcagcagtaattaatttagcgctgttctttttggataaaagcacaaataacctggaagctggtattgttgttgtagccggtagtgcccccctgtttttttattttacaagtaatctgaatggctttggagtgcataatcaataatcaaataaatacaaagct

SEQ ID NO: 26681 - protein, 470 aa, Zea mays subsp. mays
  misc_feature (1)..(470): Ceres Seq. ID no. 13587845
IRSPTRAAAPGPAAPAQQRAVLRVASSRTSSARPRRAAAAVAAAAMQPAKAVAAEASPAAVEMGNGAAAPGLQRPDAMGRFGRFGGKYVPETLMHALTELESAFHALATDDEFQKELDGILKDYVGRESPLYFAERLTEHYKRADGTGPLIYLKREDLNHTGAHKINNAVAQALLAKRLGKQRIIAETGAGQHGVATATVCRRFGLQCIIYMGAQDMERQALNVFRMRLLGAEVRAVHSGTATLKDATSEAIRDWVTNVETTHYILGSVAGPHPYPMMVREFHKVIGKETRRQAMDKWGGKPDVLVACVGGGSNAMGLFHEFVEDQDVRLVGLEAAGHGVDTDKHAATLTKGQVGVLHGSMSYLLQDDDGQVIEPHSISAGLDYPGVGPEHSFLKDIGRAEYDSVTDQEALDAFKRVSRLEGIIPALETSHALAYLEKLCPTLADGVRVVVNCSGRGDKDVHTASKYLDV

SEQ ID NO: 26682 - protein, 425 aa, Zea mays subsp. mays
  misc_feature (1)..(425): Ceres Seq. ID no. 13587846
MQPAKAVAAEASPAAVEMGNGAAAPGLQRPDAMGRFGRFGGKYVPETLMHALTELESAFHALATDDEFQKELDGILKDYVGRESPLYFAERLTEHYKRADGTGPLIYLKREDLNHTGAHKINNAVAQALLAKRLGKQRIIAETGAGQHGVATATVCRRFGLQCIIYMGAQDMERQALNVFRMRLLGAEVRAVHSGTATLKDATSEAIRDWVTNVETTHYILGSVAGPHPYPMMVREFHKVIGKETRRQAMDKWGGKPDVLVACVGGGSNAMGLFHEFVEDQDVRLVGLEAAGHGVDTDKHAATLTKGQVGVLHGSMSYLLQDDDGQVIEPHSISAGLDYPGVGPEHSFLKDIGRAEYDSVTDQEALDAFKRVSRLEGIIPALETSHALAYLEKLCPTLADGVRVVVNCSGRGDKDVHTASKYLDV

SEQ ID NO: 26683 - protein, 408 aa, Zea mays subsp. mays
  misc_feature (1)..(408): Ceres Seq. ID no. 13587847
MGNGAAAPGLQRPDAMGRFGRFGGKYVPETLMHALTELESAFHALATDDEFQKELDGILKDYVGRESPLYFAERLTEHYKRADGTGPLIYLKREDLNHTGAHKINNAVAQALLAKRLGKQRIIAETGAGQHGVATATVCRRFGLQCIIYMGAQDMERQALNVFRMRLLGAEVRAVHSGTATLKDATSEAIRDWVTNVETTHYILGSVAGPHPYPMMVREFHKVIGKETRRQAMDKWGGKPDVLVACVGGGSNAMGLFHEFVEDQDVRLVGLEAAGHGVDTDKHAATLTKGQVGVLHGSMSYLLQDDDGQVIEPHSISAGLDYPGVGPEHSFLKDIGRAEYDSVTDQEALDAFKRVSRLEGIIPALETSHALAYLEKLCPTLADGVRVVVNCSGRGDKDVHTASKYLDV

SEQ ID NO: 26684 - DNA, 2442 bp, Zea mays subsp. mays
  misc_feature (1)..(2442): Ceres Seq. ID no. 13589290
actttcgcaagcccccttccgaccttgcccctgcggtctcccgagtcccgaagcatccccttccaaaaccctcgccgcgccgcagccacccttgcttccgcacgctatcgcccgggaccagccatctatggcggcgtccctgctcctccgcgccgtgcgccgaagggagcttgcgtcccctctcggatccctgggtgccagcatacagtcaacatgtgttgccaacatatgctcaaaatggggaaggtttgcaagacctttcagtgcaaaagctgctggaaatgaggttattgggattgatttggggacaacgaactcatgtgtttctgttatggagggaaagaacccaaaagttattgagaatgctgaaggtgcgagaacaacaccatctgttgtcgcatttactcagaagggtgaaagacttgttggaactccagccaagcgccaggcagtaaccaacccccagaatactttctttggaacaaagaggttaattgggcgacgctttgatgatccacagacacagaaagagatgaagatggtgccatacacaatcgtgaaggctccaaatggtgatgcttgggttcaaacaacagatggcaagcagtactcaccaagtcaggtcggtgcatttgtgctgaccaagatgaaggagacagctgaatcttaccttggcaagtctatctcaaaggcagtgattactgttccagcttatttcaatgacgctcagcgtcaggccacaaaggatgcaggccgcattgctggccttgatgttgaaaggatcatcaatgaacctacagcagccgctctgtcttatggaatgaacaacaaggaaggcttgatagcggtatttgatcttggaggaggaacttttgatatctctattctggagatctcaaatggagtttttgaggtcaaagcaacaaatggtgatactttcttgggtggtgaagattttgataatacactattggagttcttggtgagtgatttcaagaaaactgagggcatagatctgtcgaaagatagattggccctgcaaaggcttcgtgaagctgctgagaaggcaaaggttgaactttcgtcgacttctcagacagaaatcaatctgccattcataacagctgatgcttcaggggcaaaacatttgaacatcacactgacaaggtcaaaatttgaatctcttgtacacgatctgattgagagaactagagatccatgcaagaactgtttgaaggatgccggaatatctactaaagaggtggatgaagtacttcttgttggtggaatgactagggttccaaaggtgcaggaggtagtctctgaaatctttgggaagaacccaagcaaaggagtcaatccagatgaagctgtggccatgggtgctgcacttcagggtggcattctccgtggagatgttaaggagcttcttcttcttgatgttactcccctgtcactaggtattgagacgctcggtggtatcttcaccagattgatcaacagaaacactacaatccccacaaagaaaagtcaggtgttctcaactgctgctgacaaccagacccaagtgggtatccgggtgttgcaaggtgagcgtgaaatggctacagacaacaagctccttggtgaatttgacctcgtgggcattccacctgccccaagaggcttgcctcagattgaggttacattcgacatcgatgccaatggaattgtgaccgtctcagccaaagataaggctaccgggaaggagcagaacatcaccatacgatcctcgggtgggctgtcagaggctgacatccagaagatggtgcaagaagctgagctgcatgcccagaaggaccaggagcggaaagccctcattgacatcaggaacaatgccgacaccactatctacagcatcgagaagagtcttggagagtacagggacaagatcccggcagaggttgcatctgagatcgaggcagccatcgctgacctccgccaggagatggcctcggatgacattgagaagatcaaggccaagcttgaggctgccaacaaggctgtctcgaagattggacagcacatgtctggtggtggctctggcggctcgcagtcaggatctggacctcagggtggcggcgaccaggcgccggaggcagagtatgaggaggttaagaagtgaggctgcgggagttcaagggaattgtagcggcttgtttagaagtagctcgtttttttttttgggaacgcagatagtcagatgtctcagatgaggtgtaacctgtgttgcaataatctatgaacttacccctcttgttttctcctgcagtgaaacaggtcacacgacattgtcatggcttttattgcatatgaagccttgttctgcccgatgtactcgcacagcgaaaaccatcggcgagttctgttaatggattgaagtatatttgttcctgtgttttg

SEQ ID NO: 26685 - protein, 720 aa, Zea mays subsp. mays
  misc_feature (1)..(720): Ceres Seq. ID no. 13589291
LSQAPFRPCPCGLPSPEASPSKTLAAPQPPLLPHAIARDQPSMAASLLLRAVRRRELASPLGSLGASIQSTCVANICSKWGRFARPFSAKAAGNEVIGIDLGTTNSCVSVMEGKNPKVIENAEGARTTPSVVAFTQKGERLVGTPAKRQAVTNPQNTFFGTKRLIGRRFDDPQTQKEMKMVPYTIVKAPNGDAWVQTTDGKQYSPSQVGAFVLTKMKETAESYLGKSISKAVITVPAYFNDAQRQATKDAGRIAGLDVERIINEPTAAALSYGMNNKEGLIAVFDLGGGTFDISILEISNGVFEVKATNGDTFLGGEDFDNTLLEFLVSDFKKTEGIDLSKDRLALQRLREAAEKAKVELSSTSQTEINLPFITADASGAKHLNITLTRSKFESLVHDLIERTRDPCKNCLKDAGISTKEVDEVLLVGGMTRVPKVQEVVSEIFGKNPSKGVNPDEAVAMGAALQGGILRGDVKELLLLDVTPLSLGIETLGGIFTRLINRNTTIPTKKSQVFSTAADNQTQVGIRVLQGEREMATDNKLLGEFDLVGIPPAPRGLPQIEVTFDIDANGIVTVSAKDKATGKEQNITIRSSGGLSEADIQKMVQEAELHAQKDQERKALIDIRNNADTTIYSIEKSLGEYRDKIPAEVASEIEAAIADLRQEMASDDIEKIKAKLEAANKAVSKIGQHMSGGGSGGSQSGSGPQGGGDQAPEAEYEEVKK

SEQ ID NO: 26686 - protein, 678 aa, Zea mays subsp. mays
  misc_feature (1)..(678): Ceres Seq. ID no. 13589292
MAASLLLRAVRRRELASPLGSLGASIQSTCVANICSKWGRFARPFSAKAAGNEVIGIDLGTTNSCVSVMEGKNPKVIENAEGARTTPSVVAFTQKGERLVGTPAKRQAVTNPQNTFFGTKRLIGRRFDDPQTQKEMKMVPYTIVKAPNGDAWVQTTDGKQYSPSQVGAFVLTKMKETAESYLGKSISKAVITVPAYFNDAQRQATKDAGRIAGLDVERIINEPTAAALSYGMNNKEGLIAVFDLGGGTFDISILEISNGVFEVKATNGDTFLGGEDFDNTLLEFLVSDFKKTEGIDLSKDRLALQRLREAAEKAKVELSSTSQTEINLPFITADASGAKHLNITLTRSKFESLVHDLIERTRDPCKNCLKDAGISTKEVDEVLLVGGMTRVPKVQEVVSEIFGKNPSKGVNPDEAVAMGAALQGGILRGDVKELLLLDVTPLSLGIETLGGIFTRLINRNTTIPTKKSQVFSTAADNQTQVGIRVLQGEREMATDNKLLGEFDLVGIPPAPRGLPQIEVTFDIDANGIVTVSAKDKATGKEQNITIRSSGGLSEADIQKMVQEAELHAQKDQERKALIDIRNNADTTIYSIEKSLGEYRDKIPAEVASEIEAAIADLRQEMASDDIEKIKAKLEAANKAVSKIGQHMSGGGSGGSQSGSGPQGGGDQAPEAEYEEVKK

SEQ ID NO: 26687 - protein, 610 aa, Zea mays subsp. mays
  misc_feature (1)..(610): Ceres Seq. ID no. 13589293
MEGKNPKVIENAEGARTTPSVVAFTQKGERLVGTPAKRQAVTNPQNTFFGTKRLIGRRFDDPQTQKEMKMVPYTIVKAPNGDAWVQTTDGKQYSPSQVGAFVLTKMKETAESYLGKSISKAVITVPAYFNDAQRQATKDAGRIAGLDVERIINEPTAAALSYGMNNKEGLIAVFDLGGGTFDISILEISNGVFEVKATNGDTFLGGEDFDNTLLEFLVSDFKKTEGIDLSKDRLALQRLREAAEKAKVELSSTSQTEINLPFITADASGAKHLNITLTRSKFESLVHDLIERTRDPCKNCLKDAGISTKEVDEVLLVGGMTRVPKVQEVVSEIFGKNPSKGVNPDEAVAMGAALQGGILRGDVKELLLLDVTPLSLGIETLGGIFTRLINRNTTIPTKKSQVFSTAADNQTQVGIRVLQGEREMATDNKLLGEFDLVGIPPAPRGLPQIEVTFDIDANGIVTVSAKDKATGKEQNITIRSSGGLSEADIQKMVQEAELHAQKDQERKALIDIRNNADTTIYSIEKSLGEYRDKIPAEVASEIEAAIADLRQEMASDDIEKIKAKLEAANKAVSKIGQHMSGGGSGGSQSGSGPQGGGDQAPEAEYEEVKK

SEQ ID NO: 26688 - DNA, 1400 bp, Zea mays subsp. mays
  misc_feature (1)..(1400): Ceres Seq. ID no. 13589375
tcttccttgctcactctcctcaccactacctgacctgctcccaagctccctctgcctgcctttataaatcaccggggcagagcnactcactgacacacgccgctgctccaagaaaccaccgccgagcccaaccgcacaagcgcgcgaggcaggagagagagagaggcggggagcaaaacaatggaggggaaagaggaggacgtgcgcctgggcgccaacaagttctcggagcgccagcccatcgggacggcggcgcagggcgccgctgacgacaaggactacaaggagcccccgccggcgccgctgttcgagcccggggagctcaagtcctggtccttctaccgcgcgggcatcgccgagttcgtcgccaccttcctcttcctctacatcaccatcctcaccgtcatgggcgtctccaagtccacctccaagtgcgccaccgtcggcatccagggcatcgcctggtccttcggaggaatgatcttcgcgctcgtctactgcaccgccggcatctccggaggacacatcaacccagctgtgactttcgggctgttcttagccaggaagctgtccctgactagggccctcttctacatcatcatgcaatgcctgggtgccgtctgtggagctggagtggtgaagggcttccagcagggactttacatgggcaacggtggtggcgccaatgttgtcgcacctggctacaccaagggtgatggccttggcgctgagattgttggcaccttcatcctagtctacaccgtcttctcagccaccgatgccaagaggaatgccagggactcccatgttcctatccttgccccactgccaattgggttcgcggtgttcctggtccaccttgccaccatccccattactggcactggcatcaacccagctaggagccttggcgctgccatcatctacaacagggatcacgcctggaacgaccattggatcttctgggtcggccccttcattggcgctgccctggctgccatctaccaccaggtgatcatcagagccatcccgttcaagagcaggtcttaagctgccgtggccgtgccgagacatgccagtccgaagaacgggcgtcttcctgtgatgtcttcttgtctgcccacgcctagtttctctgtcgattcctattcgtcgtctcttcagggctggtgctcactgctgcgccgttctgttaaccgaaacaagaactctgtgtattcctgtaccgagctgtgcatgttttttttttctttccattgtggagaatttaagttattatccatttgctgcaaggtttgccgtctcattttatgcgttgggatgttggcaagaaagggcagatgtcatgtgagaatttaagttaagtgaaatcgattcagggttttcttgatttcagtttc

SEQ ID NO: 26689 - protein, 289 aa, Zea mays subsp. mays
  misc_feature (1)..(289): Ceres Seq. ID no. 13589376
MEGKEEDVRLGANKFSERQPIGTAAQGAADDKDYKEPPPAPLFEPGELKSWSFYRAGIAEFVATFLFLYITILTVMGVSKSTSKCATVGIQGIAWSFGGMIFALVYCTAGISGGHINPAVTFGLFLARKLSLTRALFYIIMQCLGAVCGAGVVKGFQQGLYMGNGGGANVVAPGYTKGDGLGAEIVGTFILVYTVFSATDAKRNARDSHVPILAPLPIGFAVFLVHLATIPITGTGINPARSLGAAIIYNRDHAWNDHWIFWVGPFIGAALAAIYHQVIIRAIPFKSRS

SEQ ID NO: 26690 - protein, 214 aa, Zea mays subsp. mays
  misc_feature (1)..(214): Ceres Seq. ID no. 13589377
MGVSKSTSKCATVGIQGIAWSFGGMIFALVYCTAGISGGHINPAVTFGLFLARKLSLTRALFYIIMQCLGAVCGAGVVKGFQQGLYMGNGGGANVVAPGYTKGDGLGAEIVGTFILVYTVFSATDAKRNARDSHVPILAPLPIGFAVFLVHLATIPITGTGINPARSLGAAIIYNRDHAWNDHWIFWVGPFIGAALAAIYHQVIIRAIPFKSRS

SEQ ID NO: 26691 - protein, 190 aa, Zea mays subsp. mays
  misc_feature (1)..(190): Ceres Seq. ID no. 13589378
MIFALVYCTAGISGGHINPAVTFGLFLARKLSLTRALFYIIMQCLGAVCGAGVVKGFQQGLYMGNGGGANVVAPGYTKGDGLGAEIVGTFILVYTVFSATDAKRNARDSHVPILAPLPIGFAVFLVHLATIPITGTGINPARSLGAAIIYNRDHAWNDHWIFWVGPFIGAALAAIYHQVIIRAIPFKSRS

SEQ ID NO: 26692 - DNA, 1129 bp, Zea mays subsp. mays
  misc_feature (1)..(1129): Ceres Seq. ID no. 13589476
ttctcgccgaacggaaaaccctgcccggaccttcgttgcagcgctacgagcttcgacgggccgctcgatctccacctctgaagtggctgcttgtgatctagatctgaaagctgcagtggttgacagctgagtgtgaaactgtgaatcgaagatgagcgtggtgggcttcgacctcggcaatgagagctgcatcgtggcggtcgcgcggcagcgcggcatcgacgtggtcctcaacgaggagtccaagcgcgagacacccgccatcgtctgcttcggggacaagcagcggttcatcggcaccgccggcgccgcgtcctctaccatgaaccccaagaactccatttctcagatcaagcgcttgctaggccgcaagtactccgaccccgagctacagagagatctcgcctccttcccgttccgtgtcacggagggccccgatggttttcccctggtccatgtacgatacctgggcgaggaacggacgttcacctctaccaagctgcttgccatggtgctgtccaatttgaagggcattgctgagggtaacctgaatgctgcagttgttgattgttgcattggtattccagtctactttacggatctgcagcgcagggctgttcttgatgctgctactattgcgggtctccagccattgcgattgttccatgagacaacagccactgcactggcatatggtatttataagactgatctcccggagaatgaccagttgaacgttgcatttgttgatgtcggtcatgcaagcatgcaggtcagtgttgtcggttacaagaagggacagctcaagatgttgtcgcatacgtatgaccagtctcttggcgggagggactttgatgaggccctgtttaagcactttgcagctaaattcaaagaggaatataagattgatgtgtaccagaatgcgcgtgcatgcattaggttgcgtgtggcatgtgagaaacttaagaaggtactgagcgccaacccagaggccccactgaacattgagtgtttgatggatgagaaggatgtgcggggttttattaaaagggaggagttcgaacagatcagtgcctcggtgctggaacgcgtgaaaggaccactggaaaaggccttggctgaagctggg

SEQ ID NO: 26693 - protein, 326 aa, Zea mays subsp. mays
  misc_feature (1)..(326): Ceres Seq. ID no. 13589477
MSVVGFDLGNESCIVAVARQRGIDVVLNEESKRETPAIVCFGDKQRFIGTAGAASSTMNPKNSISQIKRLLGRKYSDPELQRDLASFPFRVTEGPDGFPLVHVRYLGEERTFTSTKLLAMVLSNLKGIAEGNLNAAVVDCCIGIPVYFTDLQRRAVLDAATIAGLQPLRLFHETTATALAYGIYKTDLPENDQLNVAFVDVGHASMQVSVVGYKKGQLKMLSHTYDQSLGGRDFDEALFKHFAAKFKEEYKIDVYQNARACIRLRVACEKLKKVLSANPEAPLNIECLMDEKDVRGFIKREEFEQISASVLERVKGPLEKALAEAG

SEQ ID NO: 26694 - protein, 269 aa, Zea mays subsp. mays
  misc_feature (1)..(269): Ceres Seq. ID no. 13589478
MNPKNSISQIKRLLGRKYSDPELQRDLASFPFRVTEGPDGFPLVHVRYLGEERTFTSTKLLAMVLSNLKGIAEGNLNAAVVDCCIGIPVYFTDLQRRAVLDAATIAGLQPLRLFHETTATALAYGIYKTDLPENDQLNVAFVDVGHASMQVSVVGYKKGQLKMLSHTYDQSLGGRDFDEALFKHFAAKFKEEYKIDVYQNARACIRLRVACEKLKKVLSANPEAPLNIECLMDEKDVRGFIKREEFEQISASVLERVKGPLEKALAEAG

SEQ ID NO: 26695 - protein, 207 aa, Zea mays subsp. mays
  misc_feature (1)..(207): Ceres Seq. ID no. 13589479
MVLSNLKGIAEGNLNAAVVDCCIGIPVYFTDLQRRAVLDAATIAGLQPLRLFHETTATALAYGIYKTDLPENDQLNVAFVDVGHASMQVSVVGYKKGQLKMLSHTYDQSLGGRDFDEALFKHFAAKFKEEYKIDVYQNARACIRLRVACEKLKKVLSANPEAPLNIECLMDEKDVRGFIKREEFEQISASVLERVKGPLEKALAEAG

SEQ ID NO: 26696 - DNA, 986 bp, Zea mays subsp. mays
  misc_feature (1)..(986): Ceres Seq. ID no. 13589517
gaggccagggcggagtccgagccctggggtcgggcgaggcggagtttcgtcgtcttccgggtcttagcccgagtccgagccctggggtcgggcggagcggagttcgccgtcttccgggtcttagcccgagtccgagccctggggtcgggcggagcggagttcgccgtcttccgggtcttagcccgagtccgagccctggggtcgggcggagcggagttcgccgtcttccgggtcttagcccgagtccgagccctggggtcgggcggagcggagttcgccgtcttccgggtcttagcccgagtccgagccctggggtcgggcggagcggagttcgccgtcttccgggtcttagcccgagtccgagccctggggtcgggcggagcggagttcgccgtggcgcctctggcaaggcctgactgcctgtcagactcactctgtcgagtggcaccgcagtcggggtggcgcaggcggcgctgtccttctgtcagactggtcagtggagcggtggagtgacagcggtcacttcggctctgccgggggggcgcgtgtcaggataaaggtgtcaggccacctttgcgttaaatgctcctgcaacttggtcagtcggtgtggtgatttagtcagggttgcttctgagcgaagccaaggcctcgggcgagccggtgatgtgtccgccgtaaaaaggggggcctcgggcgagacggaagntctctcgaggtcggctgccttcggccgaggctaggctcgggtggaagngcgatcgagtcactcgtgtggactggatccctggacttaatcggtgcccatcaggcctttgcagcttttngcttnatgggggttaccaagctgagaaattangcngtcttggagggtacccctaattatggtccccgacagtagcccccgaagctcncaaggggagtggtagcactcgcttgggaggcttttgtcgcactttttttgcaaggggacagcccttttctccg

SEQ ID NO: 26697 - protein, 170 aa, Zea mays subsp. mays
  misc_feature (1)..(170): Ceres Seq. ID no. 13589518
EARAESEPWGRARRSFVVFRVLARVRALGSGGAEFAVFRVLARVRALGSGGAEFAVFRVLARVRALGSGGAEFAVFRVLARVRALGSGGAEFAVFRVLARVRALGSGGAEFAVFRVLARVRALGSGGAEFAVAPLARPDCLSDSLCRVAPQSGWRRRRCPSVRLVSGAVE

SEQ ID NO: 26698 - protein, 137 aa, Zea mays subsp. mays
  misc_feature (1)..(137): Ceres Seq. ID no. 13589519
GQGGVRALGSGEAEFRRLPGLSPSPSPGVGRSGVRRLPGLSPSPSPGVGRSGVRRLPGLSPSPSPGVGRSGVRRLPGLSPSPSPGVGRSGVRRLPGLSPSPSPGVGRSGVRRLPGLSPSPSPGVGRSGVRRGASGKA

SEQ ID NO: 26699 - DNA, 706 bp, Zea mays subsp. mays
  misc_feature (1)..(706): Ceres Seq. ID no. 13589561
gttggtgatgctgtaatggaaaattcatttctacgacctcttggccatttggagttggacctgccagatgccccagaaaaagccccacgtcctcctgcacaagctgttgacccattctcaaaatttgggccaaaggcagagatatcacatatattccgcgcaccagagaagaggccacccaaggagctctcgctcgcgttcacgggtctcacgcttctgccatctattggattcttgatagggctcgttcgtcttggagtgaacttgaagaacttcccgtccttgccaggaccggccgcatttgcctcacttttccatgctgggataggagcagtcctgatgctctacgttctcttctggatcaagttggaccttttcacaactctcaagtacctcggcttccttggcatcttccttgtgtttgtgggccatagggctctatcctacctttcctcggtgtcgacaaaacagaagacggcatgagtggacagagttttttccaaccatccatttcttgaggggggggccattgcaggcccttgggtgtcttatgagggagggctcggtttatttcagttggctttgcagaatactgataactagaaaaagtagtaggacctcaccttcgtgtattatgatgatgcacatacaattttctgagtagaatggatgttgaatcatagaactaatgaataatatgaacact

SEQ ID NO: 26700 - protein, 160 aa, Zea mays subsp. mays
  misc_feature (1)..(160): Ceres Seq. ID no. 13589562
VGDAVMENSFLRPLGHLELDLPDAPEKAPRPPAQAVDPFSKFGPKAEISHIFRAPEKRPPKELSLAFTGLTLLPSIGFLIGLVRLGVNLKNFPSLPGPAAFASLFHAGIGAVLMLYVLFWIKLDLFTTLKYLGFLGIFLVFVGHRALSYLSSVSTKQKTA

SEQ ID NO: 26701 - protein, 155 aa, Zea mays subsp. mays
  misc_feature (1)..(155): Ceres Seq. ID no. 13589563
MENSFLRPLGHLELDLPDAPEKAPRPPAQAVDPFSKFGPKAEISHIFRAPEKRPPKELSLAFTGLTLLPSIGFLIGLVRLGVNLKNFPSLPGPAAFASLFHAGIGAVLMLYVLFWIKLDLFTTLKYLGFLGIFLVFVGHRALSYLSSVSTKQKTA

SEQ ID NO: 26702 - DNA, 844 bp, Zea mays subsp. mays; identical to SEQ ID NO: 819
  misc_feature (1)..(844): Ceres Seq. ID no. 13598823

SEQ ID NO: 26703 - protein, 142 aa, Zea mays subsp. mays; identical to SEQ ID NO: 820
  misc_feature (1)..(142): Ceres Seq. ID no. 15222429

SEQ ID NO: 26704 - protein, 123 aa, Zea mays subsp. mays; identical to SEQ ID NO: 821
  misc_feature (1)..(123): Ceres Seq. ID no. 15222430

SEQ ID NO: 26705 - protein, 111 aa, Zea mays subsp. mays; identical to SEQ ID NO: 822
  misc_feature (1)..(111): Ceres Seq. ID no. 15222431

SEQ ID NO: 26706 - DNA, 1042 bp, Zea mays subsp. mays
  misc_feature (1)..(1042): Ceres Seq. ID no. 13598836
agcatcaccattcttcatccctcgttgtcatctcacagcttgggctagagaccaaacaaaccaaagggaagcatggcagcaggcctgcaagtgtttggccagccggcgtctactgatgttgccagggttctgacgtgcctgtttgagaagaaattggagtttgagcttgtccgcattgatacatttaagacacatcacaggcttcctgagttcatcaggctgcgggatccgaatgggcaagtgaccttcaagcatggcgacaaaacccttgttgattcaagggacatatgccggtacgtttgcaaccagtttccaaattacggaaacaagagcctctatggatctggtgctctagaacgggcatcgatagaacagtggctccaggcagaagcccagaactttggccctcccagctctgcgcttgtgtttcagctggcgttcgttccgcacctcagtcacctgggcgttcgtcaggaccctgctgttattgctgaaaacgaggacaaactgaagcaggttcttgatgtttacgacgaaatactctccaagaacgagtacctggctggtgatgagttcaccctggccgacctgtctcaccttccgaactcgcactacatcgtaaacaccgagagaggaaggaagctcttcaccaacaagaagaatgtggcgaaatggtatgacaggctctcgaagcgcgagacatgggtgcaggtcgtcaagatgcagaaggaacatcctggtgcgttcaagtaatggcttgtcttggggagttgtgagtatggcttcatcgtccgtgttggtctggctcatcagtgttaaaagcccatcagtgtcgtcaaccagaataatgtgaagcccaactgtgatgtatggtcttttttttttttaaaagcgcatttgtaaactattggctatttcttgcacgtgccaattcatcgtcacatataaaataaactgtatctttggaccttgaaaaaaaaaaaaaaaaaaaaaaaaagaaaaaaaaaaaaaaaaaacggcacgagaagccggcacgagaagc

SEQ ID NO: 26707 - protein, 226 aa, Zea mays subsp. mays; identical to SEQ ID NO: 14816
  misc_feature (1)..(226): Ceres Seq. ID no. 15222432

SEQ ID NO: 26708 - DNA, 1315 bp, Zea mays subsp. mays; identical to SEQ ID NO: 827
  misc_feature (1)..(1315): Ceres Seq. ID no. 13598890

SEQ ID NO: 26709 - protein, 304 aa, Zea mays subsp. mays; identical to SEQ ID NO: 828
  misc_feature (1)..(304): Ceres Seq. ID no. 13598891

SEQ ID NO: 26710 - protein, 293 aa, Zea mays subsp. mays; identical to SEQ ID NO: 829
  misc_feature (1)..(293): Ceres Seq. ID no. 13598892

SEQ ID NO: 26711 - protein, 273 aa, Zea mays subsp. mays; identical to SEQ ID NO: 830
  misc_feature (1)..(273): Ceres Seq. ID no. 13598893

SEQ ID NO: 26712 - DNA, 1644 bp, Zea mays subsp. mays; identical to SEQ ID NO: 837
  misc_feature (1)..(1644): Ceres Seq. ID no. 13598923

SEQ ID NO: 26713 - protein, 474 aa, Zea mays subsp. mays; identical to SEQ ID NO: 838
  misc_feature (1)..(474): Ceres Seq. ID no. 15222449

SEQ ID NO: 26714 - protein, 439 aa, Zea mays subsp. mays; identical to SEQ ID NO: 839
  misc_feature (1)..(439): Ceres Seq. ID no. 15222450

SEQ ID NO: 26715 - protein, 400 aa, Zea mays subsp. mays; identical to SEQ ID NO: 840
  misc_feature (1)..(400): Ceres Seq. ID no. 15222451

SEQ ID NO: 26716 - DNA, 833 bp, Zea mays subsp. mays
  misc_feature (1)..(833): Ceres Seq. ID no. 13598937
acaaagaggaggaagccatgtcccccaacctgcatagcgccatcaagagtcaggtgtcggcgctgctcctgaggtgcctctttagggtgtccgggccgggcaaggccaagaagttccagcagatcctggtgctgatggggaggcggtgggtgttcatgcagacggaggcgagccgcgttctcggcatggacctggaccgcggggacaacacgcacaccttcatacgctcggactcgccgccactgctcacccggaacagcatcaaccagagtccgaagttgctccaccccgtgcctcagccctgtctccaaggacttcgagcacaaggactgcagcggcctggtagagatgctctgctgctccatcaggttgtgcctagaaaaagaggcaccaccaactagaaattgttctatgtggaagcagcaagttgttgtctcatggccacatgcccacatggtcactgctgttggtggccacaacggttatccagggggcaaggtgttcgtttnngcggaacagtctgttccaaatttggcagttaggtcatggagattactctgcctcacgcacaaaagtatttcgcatggtgaatactcttggagtcaacaatgaagccaagcaaacaatacaagtactgcaagctgaactaaatgaaacaaaagagaggctgcacacagttgaagaactgaaaggacaaactgcacattatttgtattgttcatgaccctatggatttctgttttaatttatttccatatgtagaaagttgtttactacttctgtttactgtaatctacaatgtatttgcgtcgctatggtaattccttgtagtt

SEQ ID NO: 26717 - protein, 132 aa, Zea mays subsp. mays
  misc_feature (1)..(132): Ceres Seq. ID no. 13598938
KEEEAMSPNLHSAIKSQVSALLLRCLFRVSGPGKAKKFQQILVLMGRRWVFMQTEASRVLGMDLDRGDNTHTFIRSDSPPLLTRNSINQSPKLLHPVPQPCLQGLRAQGLQRPGRDALLLHQVVPRKRGTTN

SEQ ID NO: 26718 - protein, 127 aa, Zea mays subsp. mays
  misc_feature (1)..(127): Ceres Seq. ID no. 13598939
MSPNLHSAIKSQVSALLLRCLFRVSGPGKAKKFQQILVLMGRRWVFMQTEASRVLGMDLDRGDNTHTFIRSDSPPLLTRNSINQSPKLLHPVPQPCLQGLRAQGLQRPGRDALLLHQVVPRKRGTTN

SEQ ID NO: 26719 - protein, 92 aa, Zea mays subsp. mays
  misc_feature (1)..(92): Ceres Seq. ID no. 13598940
  misc_feature (22)..(22): Xaa is any aa, unknown or other
MPTWSLLLVATTVIQGARCSFXRNSLFQIWQLGHGDYSASRTKVFRMVNTLGVNNEAKQTIQVLQAELNETKERLHTVEELKGQTAHYLYCS

SEQ ID NO: 26720 - DNA, 1144 bp, Zea mays subsp. mays
  misc_feature (1)..(1144): Ceres Seq. ID no. 13598993
gtagcgcaactccgcaagcaaatcctcctatctccaagcctccaatctgtgaacggtgaaccccaatcgaatgacgccgacggcgagcctcctcctcccggctcccccattcgtctctatctccgatgtgcgccgcctccagctccccccgcgcggcggccaccggcctcgcccctgctggaagggcttggagtgcggctccgtacagacgcggatggtctcttctttcgttgggagcagaacacgccgcagaaacgttatatgtgcttccctgttcggagttggagctcccgaagcactggtcattggagtagtcgccttgttggtgttcggccccaagggtctagcagaggtagccaggaatttggggaagactttgcgtgctttccaaccaaccattagagagatacaggatgtatcaagggagttcaggagcactcttgaacgagaaatcggaattgatgaggtttcccagtcgacgaattatacacccacgaccatgaataacaaccaacaacctgctgccgactcaaatatcaagcctgcacctgcaccttacaccagcgatgaacttgtgaaagtaactgaagaacaaattgctgcatcagctgctgcagcttggaacccgcaacaacctgcatcgtcgcaacagcaagaagtgtacactactccgagtgaggacgctcctacatcaggaggaagcgatggtcctgctgctccagctcttgctgcgagtgactcggatccaaagcaagtgaatctggacaaggcggaaacacagagatgactccgcttaacagcttgacactggatgggatgagcagcactgaacacgtcaggacgagcagtcttattttaattttgtaggcgatggacttcagattaaagccagttatttggactgctgcagctataatctatagagacataacactgtaaaaatagtagaatccgttttagattaaagccaaacgagatgagagcgttttctgtgtttactaggcttgttctgtagcagcatgcatgggcaggttcatacaaaaaggctatgtgtatgcgtaacataaccacgagtttatatggattaaatatatttagccacgttgaaaaaccggttcagttaataaaataatgtcagttggtt

SEQ ID NO: 26721 - protein, 238 aa, Zea mays subsp. mays
  misc_feature (1)..(238): Ceres Seq. ID no. 13598994
MTPTASLLLPAPPFVSISDVRRLQLPPRGGHRPRPCWKGLECGSVQTRMVSSFVGSRTRRRNVICASLFGVGAPEALVIGVVALLVFGPKGLAEVARNLGKTLRAFQPTIREIQDVSREFRSTLEREIGIDEVSQSTNYTPTTMNNNQQPAADSNIKPAPAPYTSDELVKVTEEQIAASAAAAWNPQQPASSQQQEVYTTPSEDAPTSGGSDGPAAPALAASDSDPKQVNLDKAETQR

SEQ ID NO: 26722 - protein, 190 aa, Zea mays subsp. mays
  misc_feature (1)..(190): Ceres Seq. ID no. 13598995
MVSSFVGSRTRRRNVICASLFGVGAPEALVIGVVALLVFGPKGLAEVARNLGKTLRAFQPTIREIQDVSREFRSTLEREIGIDEVSQSTNYTPTTMNNNQQPAADSNIKPAPAPYTSDELVKVTEEQIAASAAAAWNPQQPASSQQQEVYTTPSEDAPTSGGSDGPAAPALAASDSDPKQVNLDKAETQR

SEQ ID NO: 26723 - protein, 133 aa, Zea mays subsp. mays
  misc_feature (1)..(133): Ceres Seq. ID no. 13598996
VAQLRKQILLSPSLQSVNGEPQSNDADGEPPPPGSPIRLYLRCAPPPAPPARRPPASPLLEGLGVRLRTDADGLFFRWEQNTPQKRYMCFPVRSWSSRSTGHWSSRLVGVRPQGSSRGSQEFGEDFACFPTNH

SEQ ID NO: 26724 - DNA, 1191 bp, Zea mays subsp. mays
  misc_feature (1)..(1191): Ceres Seq. ID no. 13599050
ggtatttaagacagcttcaaaaggttggggagtcaggacttgggacactatcctccctggggctcccatctgtgagtacacgggggtgttgaggaggactgaagatctggatggttcacagaacaactattgttttgacattgattgtcttcaaaccatgaaaggtttggatggaagggagaaaagagctggatctgaaatgcacctgcctaatctttatccagagaatgactcagatgcaccacctgcacctgagtactgcatagacggcagttccattggcaattttgcaagatttataaatcatagttgccaacctaaccttttcgtccagtgcgtcatgagctcacacaacgatgttaaactagcaaaagtgatgctttttgctgctgacacaatacttcctcttcaggagctatcctatgactacggttatcgcttggacagtgttgttgggcctgatggtaaaattgtgaagctgccatgccactgtggtgctccagattgccggaagcgcctctactagacctgcagtgtgtttccattttgattttgcaggaaacaacctatattgtaggaaagcattcatgttatttatgtagttggcatgctctgatatatagcgaaagaggagcaacttaatctccttttagagcattcttattttgtgataattggaggacatgctggtcatggtagcatattttgcaggaaatcaattaactgannanaaaaaaaaaaaaaaaaaaaaaaaaaaaaaaaaaaaaaaaaaaaaaaaaaaaaaaaaggagaaaaaaaaaaaaaaaaaggaattcctgcaccccggggaatccacaatttcaaaaggggccccccccgcgggggagccccagcttttgttcccttggggaggctgccaatttactgatttagggaatgagggggtttttgaggggctccaggggtttctgtttcaatcagttgcccctcctgttcagttactgaggggggggggggaaagggaaaaagaaccgccggacataagggttatttctgttctcattgccgaaaaacatggaaattgaagttcatttacaccgtttctcaacccggtacgcaccaaaaaatcattgatatggccataaagggcgttgaatgccggcaaacagcccgaattatgggggttggcctcaacacgattttacgtcactt

SEQ ID NO: 26725 - protein, 174 aa, Zea mays subsp. mays
  misc_feature (1)..(174): Ceres Seq. ID no. 13599051
VFKTASKGWGVRTWDTILPGAPICEYTGVLRRTEDLDGSQNNYCFDIDCLQTMKGLDGREKRAGSEMHLPNLYPENDSDAPPAPEYCIDGSSIGNFARFINHSCQPNLFVQCVMSSHNDVKLAKVMLFAADTILPLQELSYDYGYRLDSVVGPDGKIVKLPCHCGAPDCRKRLY

SEQ ID NO: 26726 - protein, 126 aa, Zea mays subsp. mays
  misc_feature (1)..(126): Ceres Seq. ID no. 13599052
  misc_feature (15)..(15): Xaa is any aa, unknown or other
  misc_feature (16)..(16): Xaa is any aa, unknown or other
MLVMVAYFAGNQLTXXKKKKKKKKKKKKKKKKKKKEKKKKKKEFLHPGESTISKGAPPAGEPQLLFPWGGCQFTDLGNEGVFEGLQGFLFQSVAPPVQLLRGGGEREKEPPDIRVISVLIAEKHGN

SEQ ID NO: 26727 - protein, 123 aa, Zea mays subsp. mays
  misc_feature (1)..(123): Ceres Seq. ID no. 13599053
  misc_feature (12)..(12): Xaa is any aa, unknown or other
  misc_feature (13)..(13): Xaa is any aa, unknown or other
MVAYFAGNQLTXXKKKKKKKKKKKKKKKKKKKEKKKKKKEFLHPGESTISKGAPPAGEPQLLFPWGGCQFTDLGNEGVFEGLQGFLFQSVAPPVQLLRGGGEREKEPPDIRVISVLIAEKHGN

SEQ ID NO: 26728 - protein, 122 aa, Zea mays subsp. mays
  misc_feature (1)..(122): Ceres Seq. ID no. 13599054
MKGLDGREKRAGSEMHLPNLYPENDSDAPPAPEYCIDGSSIGNFARFINHSCQPNLFVQCVMSSHNDVKLAKVMLFAADTILPLQELSYDYGYRLDSVVGPDGKIVKLPCHCGAPDCRKRLY

SEQ ID NO: 26729 - DNA, 1617 bp, Zea mays subsp. mays
  misc_feature (1)..(1617): Ceres Seq. ID no. 13599123
catatggctcaatgctgaaaaatctgacatttgtcaagacttttgcctctggaatacttgttcccaaaagctatatctggcctgttacaccagataattacctgctgccttatacttcagtggttgatgatgctcacaaagcaggactagaaatctatgccgctgattttgcaaatgacttaaccatcagctataactacagctttgatccattagcggaatatcttttcttcattgataacggtgccttctctgttgatggtgtattgactgatttcccgattactccttcagaggcagttggttgctttagtaacctgaacaccagcaagattgatcatgctaaacctctagttatctcgcataatggtgctagtggtgactacccagactgcactgaccaagcttatgaaaaggcagttgccgatggtgcggatgtcattgactgtcctgttcaagtgactaaagatggcatactgatatgcatgagctctgttgacctaatggatgttactactgttgcaaaatcacaatttgcttcgcaagtaactaccatcaacagtctgaaggctgggtctggagtcttcaccttcaaccttacttgggatgatatttctaagaacctaaagcccatgatatcgaacccaatgagcacctataatctgtacagaaatcctagaaacaagaacgcaggaaacttcatgagattgtcagactttttgacctttgcaaatggaaaggatttgtcaggaatcatgataactgttgagcatgctgcattcatggcagaggagcttgggtttggtgtggtagatgcagtgatcaaagcacttgatgactctggttatagcaaacagactgcccagaatgttatgattcagtcaaccaacagctcagttctggtgaagttcaagcaggaaaccaagtacaaccttgtctacatgatcgaagaaagtgtccgagatgccgcaccttcctcccttgcggacattaagaagtttgctgatgctgtttctgttggcaccacatctgttttcccggaaacccattactatttgacgaaccagaccaataagcttgttccgacccttaagtctgccggcctccaagtttacgtttacgtgctcatgaatgagtttgcttcccagccaaatgacttcttcgcagacgccacttcacagatcaatgcttatgtgcaaagtgctaaggtggatggtgtcatcactgatttccctgggactgctcacagatacaaactgaactcctgcacgagcatgggaaagaacatgccactattcatgcagcctccgcaaccaggtggcctcctttcaaccattctcccagatgcacagccaccagcagcagcgccaatgccgctcttgacggacgctgacgtcgcagaaccagccctacctccggtcagcaacaccaccacggctgcatcgccttcgcatgccgccctcagaatgcgaacccatgtcttgagcatcgccacattgctgatgctatgtgcttccctcctcatctgaagatagtcttgcccaacatcatacgcggcgtggcgcattagagctgaggattttcacattgagctgctaatagcaattctttccacct

SEQ ID NO: 26730 - protein, 508 aa, Zea mays subsp. mays
  misc_feature (1)..(508): Ceres Seq. ID no. 13599124
YGSMLKNLTFVKTFASGILVPKSYIWPVTPDNYLLPYTSVVDDAHKAGLEIYAADFANDLTISYNYSFDPLAEYLFFIDNGAFSVDGVLTDFPITPSEAVGCFSNLNTSKIDHAKPLVISHNGASGDYPDCTDQAYEKAVADGADVIDCPVQVTKDGILICMSSVDLMDVTTVAKSQFASQVTTINSLKAGSGVFTFNLTWDDISKNLKPMISNPMSTYNLYRNPRNKNAGNFMRLSDFLTFANGKDLSGIMITVEHAAFMAEELGFGVVDAVIKALDDSGYSKQTAQNVMIQSTNSSVLVKFKQETKYNLVYMIEESVRDAAPSSLADIKKFADAVSVGTTSVFPETHYYLTNQTNKLVPTLKSAGLQVYVYVLMNEFASQPNDFFADATSQINAYVQSAKVDGVITDFPGTAHRYKLNSCTSMGKNMPLFMQPPQPGGLLSTILPDAQPPAAAPMPLLTDADVAEPALPPVSNTTTAASPSHAALRMRTHVLSIATLLMLCASLLI

SEQ ID NO: 26731 - protein, 505 aa, Zea mays subsp. mays
  misc_feature (1)..(505): Ceres Seq. ID no. 13599125
MLKNLTFVKTFASGILVPKSYIWPVTPDNYLLPYTSVVDDAHKAGLEIYAADFANDLTISYNYSFDPLAEYLFFIDNGAFSVDGVLTDFPITPSEAVGCFSNLNTSKIDHAKPLVISHNGASGDYPDCTDQAYEKAVADGADVIDCPVQVTKDGILICMSSVDLMDVTTVAKSQFASQVTTINSLKAGSGVFTFNLTWDDISKNLKPMISNPMSTYNLYRNPRNKNAGNFMRLSDFLTFANGKDLSGIMITVEHAAFMAEELGFGVVDAVIKALDDSGYSKQTAQNVMIQSTNSSVLVKFKQETKYNLVYMIEESVRDAAPSSLADIKKFADAVSVGTTSVFPETHYYLTNQTNKLVPTLKSAGLQVYVYVLMNEFASQPNDFFADATSQINAYVQSAKVDGVITDFPGTAHRYKLNSCTSMGKNMPLFMQPPQPGGLLSTILPDAQPPAAAPMPLLTDADVAEPALPPVSNTTTAASPSHAALRMRTHVLSIATLLMLCASLLI

SEQ ID NO: 26732 - protein, 347 aa, Zea mays subsp. mays
  misc_feature (1)..(347): Ceres Seq. ID no. 13599126
MSSVDLMDVTTVAKSQFASQVTTINSLKAGSGVFTFNLTWDDISKNLKPMISNPMSTYNLYRNPRNKNAGNFMRLSDFLTFANGKDLSGIMITVEHAAFMAEELGFGVVDAVIKALDDSGYSKQTAQNVMIQSTNSSVLVKFKQETKYNLVYMIEESVRDAAPSSLADIKKFADAVSVGTTSVFPETHYYLTNQTNKLVPTLKSAGLQVYVYVLMNEFASQPNDFFADATSQINAYVQSAKVDGVITDFPGTAHRYKLNSCTSMGKNMPLFMQPPQPGGLLSTILPDAQPPAAAPMPLLTDADVAEPALPPVSNTTTAASPSHAALRMRTHVLSIATLLMLCASLLI

SEQ ID NO: 26733 - DNA, 763 bp, Zea mays subsp. mays
  misc_feature (1)..(763): Ceres Seq. ID no. 13599144
ttcgcacgagacctttattgtgtttaaacactagaacatcctaatcgaaaaatacctaaagatttagcctgaatagaagtgcatggaaaacaactattcatgtgtctgaatcttaatcgtggtttctattggtttttaactctagcctaccctaacttgcttgagataaaagactttgttgttgttgttatagacttatagtgttaacttttcatgttgtatccatgttattttcataaacctgtcgtagatgtcactgggcttgcatgtagagatttttgttatgtttgttttcttgttgcagggaggatgggagaatgatgaaactgttgaagaggcagcagctcgagaagctatagaagaagctggagttcgaggtgatatagtgcattttctggggctctatgacttcaaaagcaagacgcatcaagatgcgtgctgccctgagggtatgtgcagagctgcagtgtttgcgctgcatgtaaaggaagagctggcctcatggcctgagcagagcacccgacagaggacctggctcacggtccctgaagctgcatcaagttgccgataccagtggatgcaagaggccttgctgacaggcttctctgactggcacgacaagtggagcagaggcggcggcggcacaaactgtgacccggcctaactgctgacaggcccatctgcagtcgtccaatttgttcatctcctctctttccctaggcccccaaccttgcagaatgcaataatacagtgtacttgtctt

SEQ ID NO: 26734 - protein, 137 aa, Zea mays subsp. mays
  misc_feature (1)..(137): Ceres Seq. ID no. 15222524
MSLGLHVEIFVMFVFLLQGGWENDETVEEAAAREAIEEAGVRGDIVHFLGLYDFKSKTHQDACCPEGMCRAAVFALHVKEELASWPEQSTRQRTWLTVPEAASSCRYQWMQEALLTGFSDWHDKWSRGGGGTNCDPA

SEQ ID NO: 26735 - protein, 126 aa, Zea mays subsp. mays
  misc_feature (1)..(126): Ceres Seq. ID no. 15222525
MFVFLLQGGWENDETVEEAAAREAIEEAGVRGDIVHFLGLYDFKSKTHQDACCPEGMCRAAVFALHVKEELASWPEQSTRQRTWLTVPEAASSCRYQWMQEALLTGFSDWHDKWSRGGGGTNCDPA

SEQ ID NO: 26736 - protein, 70 aa, Zea mays subsp. mays
  misc_feature (1)..(70): Ceres Seq. ID no. 15222526
MCRAAVFALHVKEELASWPEQSTRQRTWLTVPEAASSCRYQWMQEALLTGFSDWHDKWSRGGGGTNCDPA

SEQ ID NO: 26737 - DNA, 808 bp, Zea mays subsp. mays
  misc_feature (1)..(808): Ceres Seq. ID no. 13599228
ctctctcgccgtccgccgctactcccctgcctcccccagagctcgttagggttttctcttttttcgggggagaaatctcaagaggcggcaccatgctcgtgtaccaggacaagctttccggcgacgagcttctgtcggattcgttcccttacagggagctggagaacggcgtgctctgggaagtcgatggccattgggtcgttcaaggagcagttgatgtggacattggagccaatccctctgctgagggtggtggtgatgatgagggtgttgatgaccaggccgtgaaggtggttgacattgttgacaccttccgtcttcaggagcaacctgcttttgacaagaagcagtttatctctcacatgaagcgctacatcaagaacctctctgccaagcttgaaggggatgacctagatgctttcaagaagaatgttgagtccgccacaaagtatcttcttagcaagctcaaggaccttcagttctttgttggcgagagcatgcatgatgatggcggcgtggtgttcgcctactacaaggagggagctgctgatccaactttcctgtactttgcacatgggctgaaagaggtcaagtgctaatcgcactgtatgctaaaatctatgctgtcttcagtatttttgctcttatctatggttgtcagtcgactctccaatgttggtgtcagtaactgtcagatgttgagtgtcttgaaaactttctgataattgtgggatttgctttgtaatggtaatcgtgaaattggtgtggttgtgttttggttgaatcaagagattctgccctgttattc

SEQ ID NO: 26738 - protein, 198 aa, Zea mays subsp. mays
  misc_feature (1)..(198): Ceres Seq. ID no. 13599229
LSPSAATPLPPPELVRVFSFFGGEISRGGTMLVYQDKLSGDELLSDSFPYRELENGVLWEVDGHWVVQGAVDVDIGANPSAEGGGDDEGVDDQAVKVVDIVDTFRLQEQPAFDKKQFISHMKRYIKNLSAKLEGDDLDAFKKNVESATKYLLSKLKDLQFFVGESMHDDGGVVFAYYKEGAADPTFLYFAHGLKEVKC

SEQ ID NO: 26739 - protein, 168 aa, Zea mays subsp. mays
  misc_feature (1)..(168): Ceres Seq. ID no. 13599230
MLVYQDKLSGDELLSDSFPYRELENGVLWEVDGHWVVQGAVDVDIGANPSAEGGGDDEGVDDQAVKVVDIVDTFRLQEQPAFDKKQFISHMKRYIKNLSAKLEGDDLDAFKKNVESATKYLLSKLKDLQFFVGESMHDDGGVVFAYYKEGAADPTFLYFAHGLKEVKC

SEQ ID NO: 26740 - DNA, 857 bp, Zea mays subsp. mays
  misc_feature (1)..(857): Ceres Seq. ID no. 13599298
atacatagtggatatagccagagagaaagtaggacgtgttcttaaccttggagctattgaaggaggtgctaatgcttggaaaaacatggacgttcttgtcttcaattcttggcattggtggactcacaaaggcaattctcaagggtgggattacattagagatgggtcgtctttggtgagagacatgaaccgtcttgatgctttctacaaaggacttagcacttggggtcgatgggttgaccaaaacgtcgataccaccaaaaccaaagttttcttccaaggcatttctcccactcactacgagggaagggaatggaacgagccgagaaaaagttgtactgggcaaatgcagccgttgggtggatcaaattacccaagtggccagcctgcatctgcaggagttgtgtccaaagtgttgggagcgatgaaaacgcgtgtgtccttgcttgatatcaccacgctatctcagctgagaaaagatgctcatccttctacttatggtggcgatggaggaaatgattgcagccactggtgccttcccgggttgccagatacttggaaccaacttctctacgcagctttgttcatgtgaatttgaacaatacatctttacaaagaaagtgcaaacacacctttgttctgtaattacattcttggaggtgcaaagaagctgacagttttactttgggggtggtctttaagtgaagactaggagcataaggaagatggattgtaaagcgccttttatttatattgttttcgtatgggatgaaaacaataatctaaaaatttgtctaattaaatattgtgtgatgttatagaaagaaattaataaacaaaggagacattctaagtct

SEQ ID NO: 26741 - protein, 196 aa, Zea mays subsp. mays
  misc_feature (1)..(196): Ceres Seq. ID no. 13599299
YIVDIAREKVGRVLNLGAIEGGANAWKNMDVLVFNSWHWWTHKGNSQGWDYIRDGSSLVRDMNRLDAFYKGLSTWGRWVDQNVDTTKTKVFFQGISPTHYEGREWNEPRKSCTGQMQPLGGSNYPSGQPASAGVVSKVLGAMKTRVSLLDITTLSQLRKDAHPSTYGGDGGNDCSHWCLPGLPDTWNQLLYAALFM

SEQ ID NO: 26742 - protein, 168 aa, Zea mays subsp. mays
  misc_feature (1)..(168): Ceres Seq. ID no. 13599300
MDVLVFNSWHWWTHKGNSQGWDYIRDGSSLVRDMNRLDAFYKGLSTWGRWVDQNVDTTKTKVFFQGISPTHYEGREWNEPRKSCTGQMQPLGGSNYPSGQPASAGVVSKVLGAMKTRVSLLDITTLSQLRKDAHPSTYGGDGGNDCSHWCLPGLPDTWNQLLYAALFM

SEQ ID NO: 26743 - protein, 135 aa, Zea mays subsp. mays
  misc_feature (1)..(135): Ceres Seq. ID no. 13599301
MNRLDAFYKGLSTWGRWVDQNVDTTKTKVFFQGISPTHYEGREWNEPRKSCTGQMQPLGGSNYPSGQPASAGVVSKVLGAMKTRVSLLDITTLSQLRKDAHPSTYGGDGGNDCSHWCLPGLPDTWNQLLYAALFM

SEQ ID NO: 26744 - DNA, 696 bp, Zea mays subsp. mays
  misc_feature (1)..(696): Ceres Seq. ID no. 13599396
ctggactctggactggagggcaccaagctaacatttagttgcaaaggagcgctaggaagaagaagcaacgagccatggcctccggtggcccgaaacccaaactggcctacatcatcttgtacgtgagggacgtggagaaggccgcctccttctacgacgccgccttcggctacaccgtccgccgcctcgaccagtcccgcaagtgggcggagctggagagcggggcgacgaccatcgcgttcacgccgctgcaccagcgggagacggacgagctgtcgggggcggtgcagctgccggactcgtcggccgccgggaggggctccgtagaggtctgcttcgcctacgcggacgtcgacgcggcgtacaagcgcgccgtggacaacggggccgtggccgtgagcgcgccggaggacaagccctggggccagaagtccggcttcgtgcgggacatggacggcaacatcgtgcgcatcgcgagctacgtgcgagagtagtcgcattccgctgcatcaccatcggtcgatcgatcagcctttcccatgcatgtctcgtatactacacgtctacacgtgtaccaaaaaaataaatataatcgttgtgcaggtcatgtttgtcttgggagaggtaggaccgtggaagatgtaaatggaaccgtggagcagtgaatacaaaaagcgccatctcgtccctgtttcc

SEQ ID NO: 26745 - protein, 139 aa, Zea mays subsp. mays
  misc_feature (1)..(139): Ceres Seq. ID no. 15218622
MASGGPKPKLAYIILYVRDVEKAASFYDAAFGYTVRRLDQSRKWAELESGATTIAFTPLHQRETDELSGAVQLPDSSAAGRGSVEVCFAYADVDAAYKRAVDNGAVAVSAPEDKPWGQKSGFVRDMDGNIVRIASYVRE

SEQ ID NO: 26746 - DNA, 613 bp, Zea mays subsp. mays; identical to SEQ ID NO: 1059
  misc_feature (1)..(613): Ceres Seq. ID no. 13599530

SEQ ID NO: 26747 - protein, 150 aa, Zea mays subsp. mays; identical to SEQ ID NO: 1060
  misc_feature (1)..(150): Ceres Seq. ID no. 13599531

SEQ ID NO: 26748 - protein, 123 aa, Zea mays subsp. mays; identical to SEQ ID NO: 1061
  misc_feature (1)..(123): Ceres Seq. ID no. 13599532

SEQ ID NO: 26749 - DNA, 1446 bp, Zea mays subsp. mays
  misc_feature (1)..(1446): Ceres Seq. ID no. 13599626
ctagaacatcctaatcgaaaaacagtcacagactcacagcacacgcagccaccgaggactgcattgctagcatccatcgccatcagtcgccatatcgatctgcatggatcgggtgccgccgccggtctccatgcaggtggctgcgatgcagcgacatcagcagcagcagcagttcgtccaccacctgcagcaggtccaccagcaaggtacgcagcacgagcaaccgccgccaccgcaccagaacggcagcagcagcagcggcaggaccggcggcggccgcaagtgctgcccgctgcggcggtcgcgcaaggggtgcatgaagggcaagggcgggccggacaaccagcagtgccccttccgcggcgtccggcagcgcacctggggcaagtgggtggccgagatccgcgagcccaaccgcggcgcgcgcctctggctcggcaccttcggcagcgcgctcgaggccgcgcgcgcctacgacgccgcggccaggacgctctacggcgactgcgctcgcctaaacctgcagctagtgcctccgtcggcggctgcggcagccgccggaggaggaggaccggcggtcgtcgcgtctccgtcccctgacaccgtggctggccctgctgctgctggtggtggtggtggacacaactgccatcaccagtacctgcagcagcagcacgccatggcggcgcctatgatgatgatgcactcctcctgctgctccgccgacgggtcgtcgtcaaactccgattccatttccaactcctgctcgtcaccggtgaccacggcggcctcgccagcctacagccaccaccagacgacgttccaggcacctgcaccgccgccgtcatgcggcgcaatgacgatggcggccgctgcgccgcatgtgcagggcttccacgtcggcgacgacgacactaccaccgcgatggcgatgcaccgtcatcagcagatgatgcgcgagctggcggaggcgcctctgcaccaggaggcagacgacttcgaggacttcgtgacgcggctgcccaaggcggaggacttcggcctgcagggcttccaggaggtggccctcgaggtgttcgacgacgccgccggcatctgggaccacgcggccgcctgggagccccccaccatgatgatcgactctggcgcccagccccagcagcagctcgtcgtccctctttgactcgctcgtcgatgacgccgcgcgccctgcaccagctactgcttcgttcccagctgcatcgaactggccggtgtacgtggcggagtgatacgacgcgcgcgccatgcatgacaccactgcacaggtggttcctgcatgtgttgcttacgcctcgagacgtacgtacataataccagtatgtatgtaccggatggttactctgatatgactgtatttctcctagttattcgtgagtttcatttggataatgtttcaggttttgt

SEQ ID NO: 26750 - protein, 359 aa, Zea mays subsp. mays
  misc_feature (1)..(359): Ceres Seq. ID no. 15218863
MDRVPPPVSMQVAAMQRHQQQQQFVHHLQQVHQQGTQHEQPPPPHQNGSSSSGRTGGGRKCCPLRRSRKGCMKGKGGPDNQQCPFRGVRQRTWGKWVAEIREPNRGARLWLGTFGSALEAARAYDAAARTLYGDCARLNLQLVPPSAAAAAAGGGGPAVVASPSPDTVAGPAAAGGGGGHNCHHQYLQQQHAMAAPMMMMHSSCCSADGSSSNSDSISNSCSSPVTTAASPAYSHHQTTFQAPAPPPSCGAMTMAAAAPHVQGFHVGDDDTTTAMAMHRHQQMMRELAEAPLHQEADDFEDFVTRLPKAEDFGLQGFQEVALEVFDDAAGIWDHAAAWEPPTMMIDSGAQPQQQLVVPL

SEQ ID NO: 26751 - protein, 350 aa, Zea mays subsp. mays
  misc_feature (1)..(350): Ceres Seq. ID no. 15218864
MQVAAMQRHQQQQQFVHHLQQVHQQGTQHEQPPPPHQNGSSSSGRTGGGRKCCPLRRSRKGCMKGKGGPDNQQCPFRGVRQRTWGKWVAEIREPNRGARLWLGTFGSALEAARAYDAAARTLYGDCARLNLQLVPPSAAAAAAGGGGPAVVASPSPDTVAGPAAAGGGGGHNCHHQYLQQQHAMAAPMMMMHSSCCSADGSSSNSDSISNSCSSPVTTAASPAYSHHQTTFQAPAPPPSCGAMTMAAAAPHVQGFHVGDDDTTTAMAMHRHQQMMRELAEAPLHQEADDFEDFVTRLPKAEDFGLQGFQEVALEVFDDAAGIWDHAAAWEPPTMMIDSGAQPQQQLVVPL

SEQ ID NO: 26752 - protein, 345 aa, Zea mays subsp. mays
  misc_feature (1)..(345): Ceres Seq. ID no. 15218865
MQRHQQQQQFVHHLQQVHQQGTQHEQPPPPHQNGSSSSGRTGGGRKCCPLRRSRKGCMKGKGGPDNQQCPFRGVRQRTWGKWVAEIREPNRGARLWLGTFGSALEAARAYDAAARTLYGDCARLNLQLVPPSAAAAAAGGGGPAVVASPSPDTVAGPAAAGGGGGHNCHHQYLQQQHAMAAPMMMMHSSCCSADGSSSNSDSISNSCSSPVTTAASPAYSHHQTTFQAPAPPPSCGAMTMAAAAPHVQGFHVGDDDTTTAMAMHRHQQMMRELAEAPLHQEADDFEDFVTRLPKAEDFGLQGFQEVALEVFDDAAGIWDHAAAWEPPTMMIDSGAQPQQQLVVPL

SEQ ID NO: 26753 - DNA, 2172 bp, Zea mays subsp. mays
  misc_feature (1)..(2172): Ceres Seq. ID no. 13599720
gtttatctccacccatgcgtccctgctctcctctagttgagctcaatcccaagtgctcgcttaagctgtgtggccaggttccctttcctggtcgccgtcgatggaagccctgccatcgatatcgcatgatattggttgttttcttcgaccacgtcaatgcctcacaggatttggacaccttgtcgacactcgaccatgtgttcgctcgttaccacgccatcttcagcatcatggttctataaaactctgcgcactcgtcggcacccgtctgtcaatctccaccacgcagcgctgcatcggacttaccctgtatgatgttcgacgacaagcccgaaccagtatttatcagcattctcgcgagtagtgagtcacgtttgatgctggtacgataattactcgcgtgatgcggaagacgacccaagtcgaccccaagcgcgggctaatccgcaggataaagcggatgaactaatctgaagacggatagatgaaacaagtatcacaacaaggataatcatcaagtggacgtcgtctaacaacactaacctagtgttactcaggttctaactttgtgctgttgttgatggtgttaagtgccggtgggctcggccttcttataagtctaactttaccgatcacgtgcctcttccccttcttgtatttcatggtaagggacttccgcgtcgctgaaacagaggaagacatcggattctatgctggttttcttgctgcgtcgtacatggtgggcagaggcttctcttccatcttctggggcgtcatcgccgaccgcgttggacggaagcctgtcatcacgttttcgatactgtccgtggtcgtattcagcgcgctgtttggtctgagcacgacgtactggatggcgatcgccacgaggctcgtgctgggcgctctcaacggcctgctcgccccgataaaggcgtactgcgttgaagtttgccagacccagcaccaggcgcttggactctcgcttgtgaacacggcatgggctctgggtctcattgttggtccagctcttggaggctacctttcgcagccagctgagaaatatcctcacgtgttttccaaagactctgtatttggcagatttccataccttttgccctgtctaagtgtatcagcgtttgctacacttgtcctgataagctgtgagtggcttccggagactatacacaagcataaggttcccgaaatggacaccaaagcattcaaagccctgtcgtcaaaagagggctattgcgatccacctcgcaagaagaagagcttgctccagaacaggccttggatatcaaccctgctaccttactgctttttcagtcttcatgacacagcatatagtgagatactttccttatgggctgtgagcgaccggaagtatggcggccttagcttctcgactgaagatactggtcaggttcttgctatggcaggcgctagtcttctagtgtaccagcttgtcatttatcgctgggtccatagaattcttgggacagtcaactcagcacgaattgcatctgctgtgtccatacttgttcttgcaacttatccctttatgacatacctatcgggagtgaaactttccttggctctttgttccgcagccatgatgagaagtgctcttgcgatcactgtcaccacaggaatttcacttctacagaataatgctgtgtgccaagaacaaagaggcaccgcaaatggtatatcgacaactgcaatgtcattcttcaagtcaattgctccagtaggtgcaggggctctattctcatgggcacaaaaacgtcaagatgttgctttcctgccaggtgatcaagtggtgttcatggtgctgaatttggtgcagcttctcgggctgatatccacctttgagccctttctagtgttacctgcactaccagagtagtagtgtttaaggctagaagacattatgaaaataaatgtaccttggcacatagttacagttgatcgagtgcaagacagaaggaacatgattgtagccacttgttacactactaaagatgtctgattagcccaagattcaaaaagaagaatgttttattaattagcaaacttgatctattgtaatatcactgttccccaaaaaaaaaaaaaaaaaaaaaaaaaaaaaaaaaaaaaaaaaaaaacctcgggggggggcccggt

SEQ ID NO: 26754 - protein, 443 aa, Zea mays subsp. mays
  misc_feature (1)..(443): Ceres Seq. ID no. 13599721
MVLSAGGLGLLISLTLPITCLFPFLYFMVRDFRVAETEEDIGFYAGFLAASYMVGRGFSSIFWGVIADRVGRKPVITFSILSVVVFSALFGLSTTYWMAIATRLVLGALNGLLAPIKAYCVEVCQTQHQALGLSLVNTAWALGLIVGPALGGYLSQPAEKYPHVFSKDSVFGRFPYLLPCLSVSAFATLVLISCEWLPETIHKHKVPEMDTKAFKALSSKEGYCDPPRKKKSLLQNRPWISTLLPYCFFSLHDTAYSEILSLWAVSDRKYGGLSFSTEDTGQVLAMAGASLLVYQLVIYRWVHRILGTVNSARIASAVSILVLATYPFMTYLSGVKLSLALCSAAMMRSALAITVTTGISLLQNNAVCQEQRGTANGISTTAMSFFKSIAPVGAGALFSWAQKRQDVAFLPGDQVVFMVLNLVQLLGLISTFEPFLVLPALPE

SEQ ID NO: 26755 - protein, 416 aa, Zea mays subsp. mays; identical to SEQ ID NO: 18081
  misc_feature (1)..(416): Ceres Seq. ID no. 13599722

SEQ ID NO: 26756 - protein, 391 aa, Zea mays subsp. mays
  misc_feature (1)..(391): Ceres Seq. ID no. 13599723
MVGRGFSSIFWGVIADRVGRKPVITFSILSVVVFSALFGLSTTYWMAIATRLVLGALNGLLAPIKAYCVEVCQTQHQALGLSLVNTAWALGLIVGPALGGYLSQPAEKYPHVFSKDSVFGRFPYLLPCLSVSAFATLVLISCEWLPETIHKHKVPEMDTKAFKALSSKEGYCDPPRKKKSLLQNRPWISTLLPYCFFSLHDTAYSEILSLWAVSDRKYGGLSFSTEDTGQVLAMAGASLLVYQLVIYRWVHRILGTVNSARIASAVSILVLATYPFMTYLSGVKLSLALCSAAMMRSALAITVTTGISLLQNNAVCQEQRGTANGISTTAMSFFKSIAPVGAGALFSWAQKRQDVAFLPGDQVVFMVLNLVQLLGLISTFEPFLVLPALPE

SEQ ID NO: 26757 - DNA, 2345 bp, Zea mays subsp. mays
  misc_feature (1)..(2345): Ceres Seq. ID no. 13599868
taactccatgcacaaaactactccctgcgcaaaacacagagtagaatagaggctcaattaaccaatctttattaactccctgcgcaaaacacacggaatagaatacatgctcaattaatcaattaaccatttttttattaactccctgcacaaaactagcctaagcagtgatttttacagtaattttgataccttggcaccacgcttatattttgataaatcgtaccatatctatgatttatcttttgttaaatcatagatccctaacacttatattttgttgttatggacagtttgcatgaacacttgattgtacacctatatatcaattctacatgattgttgtttgcttgagattatttccccaaatattgatatgattccagattcatcatgacatgccatatgtttttttggatttgatgcttacatgtagatggataagaagaccaaggttatagtttgtgttgctgctgcacatatattactgtcatgtcaatgatggctatgattattcattctagaaaaagaaaacgaaatgcaaggaggactgggattacctatgcaccaatgcatgaaagggatagaactagaattgaatatctcaacacaaagatttggagggatgacacaacatgtataaacatgattagaatgaaaagggcttgtttctttcacctaactaaacattttagagagcgtggtttacttcaggacactatccatatgtgtgttgaacaacaagtggccatgtttctaaatacagttgggcataaccttagaaataggttgattggcatgaattttggtagatctggggaaacagttagtcgatgtttcaataaagttcttcgtgcaattggtgagctacgtggggaactaattaggccaccttcattggacactccaaccaaaatagcagggaactacagatgggatccgtattttaaggattgtattggagctattgatggtacacatgtaagagccactattcctagagatatggagcatgcctttcgtggtaggaagtcctatgcgactcaaaatgtaatggcggctgtagattttgatctacgcttcacttatgtgttggctggttgggagggaacatctcatgatgctaatgtattacgggatgctttagaacgtgtgaatggccttcgcgttccacaagctttggtaattggtcgtatagtccctcatcatcggaatggtggggtcacttatctttcactcacctaatgtggatccgaaggcagagaatcctaatgagatggttacagctggtgtgctttcaagccttcagaatttcctacgcaagtgcctcatagctatcctctcatatggcccaatgccgaagcacattgcatttattatggatggcaatcgtcgatatgctaaattcagaagcatgcaagaaggagctggtcacaggatgggtttctctacccttattgcaagtctgatgtactgctatgaaatgggtgtgaagtacatcactgtctacgcattcagcatcgacaattttaaaagggacccaagtgaggtggaatccttgatgcagttaatggaggaaaaaatcaacgaactcttagagaaccaaagtgtaatcaacaagattaactgtaagatcaacttttggggtaacttggacttgttatatgagccggtgcggttggcggctgagaagctgatggcgagcacagctgggaacacagggctggtcttttctatctgcatgccatacaactcgacttctgagattgtcaatgctgtcagtcaagtctgtgcggaaaggatggaaatgtttcagagcgaacatattggcgaatgcaatggtcatgctgcaaataacggtgtgcgatcagagatttcagtggcggatttggatcgccacatgtatagtgccgaatgcccagatcctgatattgtcatccggacttcgggcgagactcgattgagcaatttcctcctttggcagacaacgtttagtcacttgcagaatccagatcctctgtggcccgagttctcttttaggcaccttgtttgggctatcttgcagtatcagagagtttaccctgctctggagcataacagaaagttggctaagaagcagttgtgattccatgttatttgcaaggaggtatcatgaagggctattaacatcaaacttttccttctcaatttcccggtaatgggaaatgcaaagaacatactagcatataacattatgaatagatcaccatgtaacttaagtgtgattgctaccataaccatgtaacttatttgagctcgtacaaatgctgtgattcctaaatatatatatatagagtgcccggggt

SEQ ID NO: 26758 - protein, 303 aa, Zea mays subsp. mays; identical to SEQ ID NO: 23025
  misc_feature (1)..(303): Ceres Seq. ID no. 13599869

SEQ ID NO: 26759 - protein, 282 aa, Zea mays subsp. mays; identical to SEQ ID NO: 23026
  misc_feature (1)..(282): Ceres Seq. ID no. 13599870

SEQ ID NO: 26760 - protein, 256 aa, Zea mays subsp. mays; identical to SEQ ID NO: 23027
  misc_feature (1)..(256): Ceres Seq. ID no. 13599871

SEQ ID NO: 26761 - DNA, 767 bp, Zea mays subsp. mays
  misc_feature (1)..(767): Ceres Seq. ID no. 13600184
ctccgtctccggtctccagtctcgctgcttccacaagtccacaaccgtaccagcaccaccgcgccatggcgtcctccgccgatcccgatgccgccacgccaccatccgcgccgcagccggagcccgcacggaaggcagtccgcgtggtggtgaaggggagcgtcacgggggtggggttccgcgactggacggcgtccacggccgagtcgctcggtctcgccggctgggtccgcaaccgccgtgacggcagtgtggaggccctcctctccggagaccccgcgaagatcgaagacatgataacccgccgcctccccgtcggccccccagccgccaccgtcaccgccgtcgtcccgtccggccgagcccgtggatccgtccaccgggttcgagatcaagttcaccgtctgatccccccgtcccgcgacaggttcgcgtctcgccgcgcgttcttggacggtctattcgtgcactactactgcgaatctgcgattaaagatcagaggcgacatctaatgtaccgtagtctgtttacctgaaaagctccgctatctgcttgggttggaattcatgccagattgtgggtgcaaacctgtttccttactacctagtgtccaagtcggaatattaataagctatgccaggattcagatcgaaatatttctgtctctgagagatgtgttgcgtgacaacttttcgaagactgttgcctgaacaatatctgtgtgtttatccctagactctaatgtacaaacagagtcttatacagt

SEQ ID NO: 26762 - protein, 177 aa, Zea mays subsp. mays
  misc_feature (1)..(177): Ceres Seq. ID no. 13600185
PSPVSSLAASTSPQPYQHHRAMASSADPDAATPPSAPQPEPARKAVRVVVKGSVTGVGFRDWTASTAESLGLAGWVRNRRDGSVEALLSGDPAKIEDMITRRLPVGPPAATVTAVVPSGRARGSVHRVRDQVHRLIPPSRDRFASRRAFLDGLFVHYYCESAIKDQRRHLMYRSLFT

SEQ ID NO: 26763 - protein, 156 aa, Zea mays subsp. mays
  misc_feature (1)..(156): Ceres Seq. ID no. 13600186
MASSADPDAATPPSAPQPEPARKAVRVVVKGSVTGVGFRDWTASTAESLGLAGWVRNRRDGSVEALLSGDPAKIEDMITRRLPVGPPAATVTAVVPSGRARGSVHRVRDQVHRLIPPSRDRFASRRAFLDGLFVHYYCESAIKDQRRHLMYRSLFT

SEQ ID NO: 26764 - DNA, 1960 bp, Zea mays subsp. mays
  misc_feature (1)..(1960): Ceres Seq. ID no. 13600301
gaacttcagtagattgagggatctaagagagtcaagggtagctgaagtagttccattgaaagaagttgaagaggaaatcatgtccagaaggcatacagaaatttctgatgataatacaccacctgagcaggaaagagagccaaagcaaggtgggaccggaaaaccaagtcagttggtggatacttcaaccaaagctacatctgagcaggttgctgcaaagttggaggaaagtgaaatggaaaaagaattatgtgcagaggcagaggacccttcagagttcatcactcatcgagccaaagattttgtgtcgagcatgaaggacattgaaacccggtttatgcgtgcagctgaagcaggaaatgaggtttccagaatgcttgaaaccaagaagatccgacttgacatatgtgctaaaataccaggttctccagtcaagctaccttctgcccgatttgtgtcagcacttcgagtgtgctgcaatcgtgatgttattctcaaccaggaaactgcgcagcatgtttcaaaggttgtcacatggaagcgttctgtctcatctctttcatcatcatctaagagtgcacttatgacatcgataatgaaagatgatgtggatgacagtaatagtgattttgttgaggaattcgccatggtatccggaagccattcttctacgttggacaggctacacgcatgggagagaaaactatatgatgaaatcaaggcaagtgaaaatgttaggaaggcctatgatgagaaatgtaacctactccgacgccaatttgcacgaggcctaaatgcgcaggtgattgataagactagagctgttgtgaaggatctccattccagggtatctgttgtgattcaagctgttgatgcaatctccaaaagaattgagaagataagggatgaagaactgcagccacagcttgtcgagctaattcaagggctaatcagaatgtggaaactgatgctggaatgtcaccacaaacagttcatcacgatcacattagcataccacgtgaaagactcgacctcggcgcgtcaaggtgagcaccaccatcaccgccaggcggcgatgcatctgtggaatgagatggacagcttctcctccagcttcagaaactgggtcaccgctcacaaatcgtacgtcgaggccctcaacgcgtggctccagaagtgcgtcctgcagccgccccaggaccggcgcaggcgcaaacgcaaggtctccttccctcctcggcaggccgtctcccctcccatattcatcctctgcggggactggctcgccaggacagaacctctccctgctgacgagctatgcagatccctcaaagacgtgatgcagctcctccgcgactcgttcgagcaccgcgacgagcagaacaggcccagaagcggcgagtcgcaggagtgcgggatgctggagaacagtagcgagcaggaggcggcggctaagagtgggagttgtgcagcatcagctgaagggctgcagtcgagactgacggcggttcttgaccgcctgacaaagttctcggaggcatcactgaagtgctacgaggagctcaagcagaactacgagatggcctgtgctgattataggagagttggaccaaatgctcagcttgcttaggattgatgttggttgtggtgtgtgacttcttgctatctctgttctggatgacaaattctctagtgttttggtatatattttgtgaacaatcaggtgatagcacaatctttggccgaatattactgatgatttagtgctatcagttatgtatgctccactgtgggccctgccctgatgcttcgaaaggcctatgagaaccgttttcaccacgatataacaggcaaaatataccatgatttctgtgcgctaaaaaaaaaaaaaaaaaaaactcgagggggggcccggtacccaattcgtgttaaacacaataaagttggaacgggagggggg

SEQ ID NO: 26765 - protein, 542 aa, Zea mays subsp. mays
  misc_feature (1)..(542): Ceres Seq. ID no. 13600302
NFSRLRDLRESRVAEVVPLKEVEEEIMSRRHTEISDDNTPPEQEREPKQGGTGKPSQLVDTSTKATSEQVAAKLEESEMEKELCAEAEDPSEFITHRAKDFVSSMKDIETRFMRAAEAGNEVSRMLETKKIRLDICAKIPGSPVKLPSARFVSALRVCCNRDVILNQETAQHVSKVVTWKRSVSSLSSSSKSALMTSIMKDDVDDSNSDFVEEFAMVSGSHSSTLDRLHAWERKLYDEIKASENVRKAYDEKCNLLRRQFARGLNAQVIDKTRAVVKDLHSRVSVVIQAVDAISKRIEKIRDEELQPQLVELIQGLIRMWKLMLECHHKQFITITLAYHVKDSTSARQGEHHHHRQAAMHLWNEMDSFSSSFRNWVTAHKSYVEALNAWLQKCVLQPPQDRRRRKRKVSFPPRQAVSPPIFILCGDWLARTEPLPADELCRSLKDVMQLLRDSFEHRDEQNRPRSGESQECGMLENSSEQEAAAKSGSCAASAEGLQSRLTAVLDRLTKFSEASLKCYEELKQNYEMACADYRRVGPNAQLA

SEQ ID NO: 26766 - protein, 516 aa, Zea mays subsp. mays
  misc_feature (1)..(516): Ceres Seq. ID no. 13600303
MSRRHTEISDDNTPPEQEREPKQGGTGKPSQLVDTSTKATSEQVAAKLEESEMEKELCAEAEDPSEFITHRAKDFVSSMKDIETRFMRAAEAGNEVSRMLETKKIRLDICAKIPGSPVKLPSARFVSALRVCCNRDVILNQETAQHVSKVVTWKRSVSSLSSSSKSALMTSIMKDDVDDSNSDFVEEFAMVSGSHSSTLDRLHAWERKLYDEIKASENVRKAYDEKCNLLRRQFARGLNAQVIDKTRAVVKDLHSRVSVVIQAVDAISKRIEKIRDEELQPQLVELIQGLIRMWKLMLECHHKQFITITLAYHVKDSTSARQGEHHHHRQAAMHLWNEMDSFSSSFRNWVTAHKSYVEALNAWLQKCVLQPPQDRRRRKRKVSFPPRQAVSPPIFILCGDWLARTEPLPADELCRSLKDVMQLLRDSFEHRDEQNRPRSGESQECGMLENSSEQEAAAKSGSCAASAEGLQSRLTAVLDRLTKFSEASLKCYEELKQNYEMACADYRRVGPNAQLA

SEQ ID NO: 26767 - protein, 464 aa, Zea mays subsp. mays
  misc_feature (1)..(464): Ceres Seq. ID no. 13600304
MEKELCAEAEDPSEFITHRAKDFVSSMKDIETRFMRAAEAGNEVSRMLETKKIRLDICAKIPGSPVKLPSARFVSALRVCCNRDVILNQETAQHVSKVVTWKRSVSSLSSSSKSALMTSIMKDDVDDSNSDFVEEFAMVSGSHSSTLDRLHAWERKLYDEIKASENVRKAYDEKCNLLRRQFARGLNAQVIDKTRAVVKDLHSRVSVVIQAVDAISKRIEKIRDEELQPQLVELIQGLIRMWKLMLECHHKQFITITLAYHVKDSTSARQGEHHHHRQAAMHLWNEMDSFSSSFRNWVTAHKSYVEALNAWLQKCVLQPPQDRRRRKRKVSFPPRQAVSPPIFILCGDWLARTEPLPADELCRSLKDVMQLLRDSFEHRDEQNRPRSGESQECGMLENSSEQEAAAKSGSCAASAEGLQSRLTAVLDRLTKFSEASLKCYEELKQNYEMACADYRRVGPNAQLA

SEQ ID NO: 26768 - DNA, 2805 bp, Zea mays subsp. mays
  misc_feature (1)..(2805): Ceres Seq. ID no. 13600310
ggaaaagatcccctgcagaggacatgagaaacggcgttgcagattccaaaacccatcagaaaacttctgtcttttctggacaaaaggttcgtgaagttttccaattaaaacgcggaacatattcagatcttactgctgccaagatttcagagatgatgcactctaatagcttagataatgcaccgacacagtcgcttattagtgttgttaatggtattttggatgaaagcatagaaaggaaaaagggagaaataccacatcgtgtagtttacttactgcggaaagtcgttcaagagattgagcaccgtctctgtattcaagcagagcacataagaagtcaaaatgttaccatcaagacaagagaacaaaagtactgttcaaaaattaaagcacttgaaatgttggtaaatggcacaaatgaagaaaaccagatggcaataaacaggcttcagatagtcaagaatgagaagtcacaaatcgaagagaaaaaagaactctgtgagaaagatgttcaacgattaatgaaagagaaagaatattccaaaagcatcataatgaacctaacaaaagatatggaagccatgaatagattgcatgagcagcaacttgagcaaattggaagaaaggcaaaggaaatggaggaacaattaaccaccagggtaaaagaagtagagtatctcttgctacaatcgaataagaaagttgaagaacttgagattgcttctaagctaaaatcacagttatgggatcagaaagagaacatttttcagagttacatggataatcaacaattagttatcaaggacataagaatattgtcacagtcatatgaaaatgatatgtatgcacttcaaatgcagtggagaaatgaaatctctaacttaggatctgggttaaaatgtttggttgatgccgctgaaaattatcataaagtcctgacagagaaccaaaagttatttaatgaagtgcaagaactaaaaggtaatataagagtatattgtcgtgttaggccatttctttccggtcaagataaaaagtccaccacaattgactacatgggggaaaatggtgagcttcttatatcaaatccatttaagcaagggaaggacggacatagaatgttcaagtttaataaagtgtttactccatttgcttcccaagctgaggttttttctgacatacaaccactgatccgatcagttctggatggattcaacgtttgtatttttgcatatggccagactggttctggcaaaacttacactatgagtgggcctaccacatcaaaacaagattggggtgtcaattatcgagctttaaatgatttgtttgatatttcactaagtaggagaaatgccttctcatatgaggtgggggtacaaatggttgagatatacaatgaacaagtccgtgatctgctatcaaatgatattgcacaaagaagacttgggatttggaacacttctcaacccaatgggcttgttgttccagatgcaagcttgcactcagttaagtcgacatctgatgtattagacttgatggagattggacaagcaaatagagcagttggttcaacagcgctaaatgaacgaagtagtcggtcacacagtattctaactgtacatgttcgagggatggatttgaagaatggatcaacctctaggggttgtttgcatcttattgatcttgctggtagtgagagggtagagaagtctgaagtaaccggcgatagattaaaagaagctcaatacattaacaaatcactctctgcgttaggtgatgttatttttgctttgtcacagaaaagtgcccatgtgccttatagaaacagcaagttaacacaagttcttcaaagttctttaggtggacaagcaaaaactctaatgtttgttcagataaatcctgatgttgagtcatattcagaaactataagtactttaaagtttgctgaaagggtgtctggagtagagttaggtgctgctagaagtaacaaggagggaaaagatataaaagagctattggaacaggttgcgtctttgaaagacacaattttgcgcaaagatatggaaatagagcagatccaggtcatcaaagacaaagtaaaatccccaaatttgttgttagatagaaatgtgcctggcttgacgaagactacagcaaaccaacctagccaactattatcaggcgaacgaatgcttaagtctagtgacagagttctatcggatcgtcagagttacggcgaggtgaatgtagatcctaaccaccatgtgatggatactgcaccagtgagcatagatgaagcaggatatgagaacaatgcatcggatgatggtttatcgggtgaaaccgagaatgataattcagctgctgagatgacagcggaacggctgcatagatttccatcaagaataagcaggttcactctcacaaagaacgggcagccatctatgtctagatcgaacccaaaggatgctaagactccaagcaatacgaaagctccatcgagccggttgacaggaggctcttcagccaggtctaaaagacggcagtagagcacgatcatgttgctcgttttgatgtgcattgtagttgaaatgtgaatttggtgggtagttgtaggaccgttttatgattgtaactttagaaaatgtcagacactgatggcagaatatttgagacatttgtttgatcatttgcttatgccgagcaaaacagcaaacaatgctcgattgtatgtgaaacactctgacctgtgaccatttgaatgtcggtgcgcctccggaagtccggagttgtgtatatacc

SEQ ID NO: 26769 - protein, 849 aa, Zea mays subsp. mays
  misc_feature (1)..(849): Ceres Seq. ID no. 13600311
KRSPAEDMRNGVADSKTHQKTSVFSGQKVREVFQLKRGTYSDLTAAKISEMMHSNSLDNAPTQSLISVVNGILDESIERKKGEIPHRVVYLLRKVVQEIEHRLCIQAEHIRSQNVTIKTREQKYCSKIKALEMLVNGTNEENQMAINRLQIVKNEKSQIEEKKELCEKDVQRLMKEKEYSKSIIMNLTKDMEAMNRLHEQQLEQIGRKAKEMEEQLTTRVKEVEYLLLQSNKKVEELEIASKLKSQLWDQKENIFQSYMDNQQLVIKDIRILSQSYENDMYALQMQWRNEISNLGSGLKCLVDAAENYHKVLTENQKLFNEVQELKGNIRVYCRVRPFLSGQDKKSTTIDYMGENGELLISNPFKQGKDGHRMFKFNKVFTPFASQAEVFSDIQPLIRSVLDGFNVCIFAYGQTGSGKTYTMSGPTTSKQDWGVNYRALNDLFDISLSRRNAFSYEVGVQMVEIYNEQVRDLLSNDIAQRRLGIWNTSQPNGLVVPDASLHSVKSTSDVLDLMEIGQANRAVGSTALNERSSRSHSILTVHVRGMDLKNGSTSRGCLHLIDLAGSERVEKSEVTGDRLKEAQYINKSLSALGDVIFALSQKSAHVPYRNSKLTQVLQSSLGGQAKTLMFVQINPDVESYSETISTLKFAERVSGVELGAARSNKEGKDIKELLEQVASLKDTILRKDMEIEQIQVIKDKVKSPNLLLDRNVPGLTKTTANQPSQLLSGERMLKSSDRVLSDRQSYGEVNVDPNHHVMDTAPVSIDEAGYENNASDDGLSGETENDNSAAEMTAERLHRFPSRISRFTLTKNGQPSMSRSNPKDAKTPSNTKAPSSRLTGGSSARSKRRQ

SEQ ID NO: 26770 - protein, 842 aa, Zea mays subsp. mays
  misc_feature (1)..(842): Ceres Seq. ID no. 13600312
MRNGVADSKTHQKTSVFSGQKVREVFQLKRGTYSDLTAAKISEMMHSNSLDNAPTQSLISVVNGILDESIERKKGEIPHRVVYLLRKVVQEIEHRLCIQAEHIRSQNVTIKTREQKYCSKIKALEMLVNGTNEENQMAINRLQIVKNEKSQIEEKKELCEKDVQRLMKEKEYSKSIIMNLTKDMEAMNRLHEQQLEQIGRKAKEMEEQLTTRVKEVEYLLLQSNKKVEELEIASKLKSQLWDQKENIFQSYMDNQQLVIKDIRILSQSYENDMYALQMQWRNEISNLGSGLKCLVDAAENYHKVLTENQKLFNEVQELKGNIRVYCRVRPFLSGQDKKSTTIDYMGENGELLISNPFKQGKDGHRMFKFNKVFTPFASQAEVFSDIQPLIRSVLDGFNVCIFAYGQTGSGKTYTMSGPTTSKQDWGVNYRALNDLFDISLSRRNAFSYEVGVQMVEIYNEQVRDLLSNDIAQRRLGIWNTSQPNGLVVPDASLHSVKSTSDVLDLMEIGQANRAVGSTALNERSSRSHSILTVHVRGMDLKNGSTSRGCLHLIDLAGSERVEKSEVTGDRLKEAQYINKSLSALGDVIFALSQKSAHVPYRNSKLTQVLQSSLGGQAKTLMFVQINPDVESYSETISTLKFAERVSGVELGAARSNKEGKDIKELLEQVASLKDTILRKDMEIEQIQVIKDKVKSPNLLLDRNVPGLTKTTANQPSQLLSGERMLKSSDRVLSDRQSYGEVNVDPNHHVMDTAPVSIDEAGYENNASDDGLSGETENDNSAAEMTAERLHRFPSRISRFTLTKNGQPSMSRSNPKDAKTPSNTKAPSSRLTGGSSARSKRRQ

SEQ ID NO: 26771 - protein, 799 aa, Zea mays subsp. mays
  misc_feature (1)..(799): Ceres Seq. ID no. 13600313
MMHSNSLDNAPTQSLISVVNGILDESIERKKGEIPHRVVYLLRKVVQEIEHRLCIQAEHIRSQNVTIKTREQKYCSKIKALEMLVNGTNEENQMAINRLQIVKNEKSQIEEKKELCEKDVQRLMKEKEYSKSIIMNLTKDMEAMNRLHEQQLEQIGRKAKEMEEQLTTRVKEVEYLLLQSNKKVEELEIASKLKSQLWDQKENIFQSYMDNQQLVIKDIRILSQSYENDMYALQMQWRNEISNLGSGLKCLVDAAENYHKVLTENQKLFNEVQELKGNIRVYCRVRPFLSGQDKKSTTIDYMGENGELLISNPFKQGKDGHRMFKFNKVFTPFASQAEVFSDIQPLIRSVLDGFNVCIFAYGQTGSGKTYTMSGPTTSKQDWGVNYRALNDLFDISLSRRNAFSYEVGVQMVEIYNEQVRDLLSNDIAQRRLGIWNTSQPNGLVVPDASLHSVKSTSDVLDLMEIGQANRAVGSTALNERSSRSHSILTVHVRGMDLKNGSTSRGCLHLIDLAGSERVEKSEVTGDRLKEAQYINKSLSALGDVIFALSQKSAHVPYRNSKLTQVLQSSLGGQAKTLMFVQINPDVESYSETISTLKFAERVSGVELGAARSNKEGKDIKELLEQVASLKDTILRKDMEIEQIQVIKDKVKSPNLLLDRNVPGLTKTTANQPSQLLSGERMLKSSDRVLSDRQSYGEVNVDPNHHVMDTAPVSIDEAGYENNASDDGLSGETENDNSAAEMTAERLHRFPSRISRFTLTKNGQPSMSRSNPKDAKTPSNTKAPSSRLTGGSSARSKRRQ

SEQ ID NO: 26772 - DNA, 821 bp, Zea mays subsp. mays
  misc_feature (1)..(821): Ceres Seq. ID no. 13600326
aagatcgccttcgcttgattccaacaacccattggcagtggcaggcaaaaaattcgccttctatatgtgccgcggcctcccaactccagctccagctccagcgcttcaatttcagtcccaggattgcagtcggcagcagcgaggtactacccaagcaccgcccggccgagcgagcgagtccgtgcgtgcgtgcatggcagcagagaggaaggcggcctcccgcccggccgcctgcgggcgaatgcgcggcgccgagggtgccaagccgcggggccgtcaggcaaaggcagcgcgggcaccaccgggccaggggtacttcacggcggggctggcggcgctgttcctttgcctcaccacgctgctcgtgttcctgcctctcgtgctgccgccgctgccgccgccgccgttgctgctgctgctcgtgcccgtgggcctcatggctgtactgcttgcgctggcgctcgtgccgtccgacggccgggccgccgccgccgccgtcgcttcttcatcgtgcgtgtgctgaagacggacgacgcatcgcacgtgtgctagacacgccgagagactgtactgtaaaaatgtggcggtttaacatttgttttgttaatttgatataaggaatagtgatttcctacttctctctctgtgttctgaaatgatctttcagttgttaatcctgaggcagttttactgttttcatgctccaagataaaatggtagtagcgtagctatcacgccacatctgtgaaaagctctcggtcattggaccgtggttttttttaattttgaatcttcttaataatgttataataataaccgtc

SEQ ID NO: 26773 - protein, 204 aa, Zea mays subsp. mays
  misc_feature (1)..(204): Ceres Seq. ID no. 13600327
DRLRLIPTTHWQWQAKNSPSICAAASQLQLQLQRFNFSPRIAVGSSEVLPKHRPAERASPCVRAWQQRGRRPPARPPAGECAAPRVPSRGAVRQRQRGHHRARGTSRRGWRRCSFASPRCSCSCLSCCRRCRRRRCCCCSCPWASWLYCLRWRSCRPTAGPPPPPSLLHRACAEDGRRIARVLDTPRDCTVKMWRFNICFVNLI

SEQ ID NO: 26774 - protein, 173 aa, Zea mays subsp. mays
  misc_feature (1)..(173): Ceres Seq. ID no. 13600328
RSPSLDSNNPLAVAGKKFAFYMCRGLPTPAPAPALQFQSQDCSRQQRGTTQAPPGRASESVRACMAAERKAASRPAACGRMRGAEGAKPRGRQAKAARAPPGQGYFTAGLAALFLCLTTLLVFLPLVLPPLPPPPLLLLLVPVGLMAVLLALALVPSDGRAAAAAVASSSCVC

SEQ ID NO: 26775 - protein, 152 aa, Zea mays subsp. mays; identical to SEQ ID NO: 1258
  misc_feature (1)..(152): Ceres Seq. ID no. 13600329

SEQ ID NO: 26776 - DNA, 1080 bp, Zea mays subsp. mays
  misc_feature (1)..(1080): Ceres Seq. ID no. 13600524
atttctcaaacaagagcagattccattacatatgatgttaaagttcagatgattgaaatatacaatgagcaagagggatttattaatgactgatggtgcaaacaaaagattagagatacgcaataattctcatgtaaatggactcaacatcccagatgccaatattgtgccagtcaagtgcgcacaagatgttttggatctgatgaaagttggccagagaaaccgagcagttggatcaactgctcttaatgaacgaagtagccgctcacacagtgtgttgacagctcatgtacaaggaaaggaggtaatttcaggctcaactctaagagggtgtcttcatctagtggatctcgcgggaagtgagagggtagacaaatctgaagcgactggagaaagactaactgaagccaagcacataaacaaatctctgtcagcacttggtgatgttatatctgcacttgcccaaaagagttcccatgttccatatagaaatagcaagtttacacaagtgctgcaggatgccttaggtggtcaagcaaaaacattgatgtttgtgcatgtgaaccctgaaacagactcttttagtgaaacaatgagcactctcaaattcgctgagcgtgtagctacaatagaacttggtgccgcccgtgcaaacaaggaagcaggccaggtcaaagacctaaaggaagagatcgccaagcttaaattggcattagatgaaaaggaaaatgaagtggcacagtttaaagatcttgctaaccgtgtgacttctgagatgagaaatgcaagaacaagatcacctttaaccgccagcatgtccttgaaacctgaagtcagtcaagaatccagtgtagacacctgtacaagtgagataagaagttcatcatctggcaagcaaagaaggttccgttcaccgttgtcagtgagagagctagacgataagtcacctgtcatcagcagggaactgtacctgagtgcgcgaaagtacaagactccctctcctccggttagaagctcactctctgtcgagagaggcagctttgccaaaatcgtggagaacactggaagcatcgactgcac

SEQ ID NO: 26777 - protein, 338 aa, Zea mays subsp. mays
  misc_feature (1)..(338): Ceres Seq. ID no. 13600525
MSKRDLLMTDGANKRLEIRNNSHVNGLNIPDANIVPVKCAQDVLDLMKVGQRNRAVGSTALNERSSRSHSVLTAHVQGKEVISGSTLRGCLHLVDLAGSERVDKSEATGERLTEAKHINKSLSALGDVISALAQKSSHVPYRNSKFTQVLQDALGGQAKTLMFVHVNPETDSFSETMSTLKFAERVATIELGAARANKEAGQVKDLKEEIAKLKLALDEKENEVAQFKDLANRVTSEMRNARTRSPLTASMSLKPEVSQESSVDTCTSEIRSSSSGKQRRFRSPLSVRELDDKSPVISRELYLSARKYKTPSPPVRSSLSVERGSFAKIVENTGSIDC

SEQ ID NO: 26778 - protein, 331 aa, Zea mays subsp. mays
  misc_feature (1)..(331): Ceres Seq. ID no. 13600526
MTDGANKRLEIRNNSHVNGLNIPDANIVPVKCAQDVLDLMKVGQRNRAVGSTALNERSSRSHSVLTAHVQGKEVISGSTLRGCLHLVDLAGSERVDKSEATGERLTEAKHINKSLSALGDVISALAQKSSHVPYRNSKFTQVLQDALGGQAKTLMFVHVNPETDSFSETMSTLKFAERVATIELGAARANKEAGQVKDLKEEIAKLKLALDEKENEVAQFKDLANRVTSEMRNARTRSPLTASMSLKPEVSQESSVDTCTSEIRSSSSGKQRRFRSPLSVRELDDKSPVISRELYLSARKYKTPSPPVRSSLSVERGSFAKIVENTGSIDC

SEQ ID NO: 26779 - protein, 292 aa, Zea mays subsp. mays
  misc_feature (1)..(292): Ceres Seq. ID no. 13600527
MKVGQRNRAVGSTALNERSSRSHSVLTAHVQGKEVISGSTLRGCLHLVDLAGSERVDKSEATGERLTEAKHINKSLSALGDVISALAQKSSHVPYRNSKFTQVLQDALGGQAKTLMFVHVNPETDSFSETMSTLKFAERVATIELGAARANKEAGQVKDLKEEIAKLKLALDEKENEVAQFKDLANRVTSEMRNARTRSPLTASMSLKPEVSQESSVDTCTSEIRSSSSGKQRRFRSPLSVRELDDKSPVISRELYLSARKYKTPSPPVRSSLSVERGSFAKIVENTGSIDC

SEQ ID NO: 26780 - DNA, 800 bp, Zea mays subsp. mays
  misc_feature (1)..(800): Ceres Seq. ID no. 13600565
cccaacattagcacaaagaacacaatagaccactgatttcacaatgaaaagggagacaatgccttcatggctagaactgttgcttgcaacacaattctttacgacttgtgctaaccatcttcttgctagtcgcaatgaatgtaacctattttgcacccagtgtgagaccaaaccagctgctttctgtaactattgtcgttcaagtgatcattccacccaccgtgtaatccagataaggcgttcatcgtaccatgacgttgtgagggtgtccgagattgaggatatctttgatgtcagcgatgtgcaaacttatgtaatcaatagtgcaaggattgtattcctgaatgagcggccacaactgcgtgcttctagtgtccccatttgtaaggcacccacatcatcaacacatagctgtgagacatgtagccgtgtgctacttgatgcatttcgcttctgctctcttggatgcaatcttagaggcttaaatatggaagctggtatgcaagctatggttggcaacaaccctcggtccaatggtatggatcatgtggctaggattgacaatgttggttcaagtactacaaatgaccaaaacagctgcaatgacaagaactacgaagaaccaccaccaaaaagggttgctcgtcacagacgcaagggaattccccaacgtgcgccattcttctaatctgaacatcatgacaatgtccagtaaatgttgtgggaaataagaagagataatatttgtcatgggtgaaatgaatgaatgaaataaataaaagaatgaatgaatggcccct

SEQ ID NO: 26781 - protein, 214 aa, Zea mays subsp. mays
  misc_feature (1)..(214): Ceres Seq. ID no. 13600566
MKRETMPSWLELLLATQFFTTCANHLLASRNECNLFCTQCETKPAAFCNYCRSSDHSTHRVIQIRRSSYHDVVRVSEIEDIFDVSDVQTYVINSARIVFLNERPQLRASSVPICKAPTSSTHSCETCSRVLLDAFRFCSLGCNLRGLNMEAGMQAMVGNNPRSNGMDHVARIDNVGSSTTNDQNSCNDKNYEEPPPKRVARHRRKGIPQRAPFF

SEQ ID NO: 26782 - protein, 209 aa, Zea mays subsp. mays
  misc_feature (1)..(209): Ceres Seq. ID no. 13600567
MPSWLELLLATQFFTTCANHLLASRNECNLFCTQCETKPAAFCNYCRSSDHSTHRVIQIRRSSYHDVVRVSEIEDIFDVSDVQTYVINSARIVFLNERPQLRASSVPICKAPTSSTHSCETCSRVLLDAFRFCSLGCNLRGLNMEAGMQAMVGNNPRSNGMDHVARIDNVGSSTTNDQNSCNDKNYEEPPPKRVARHRRKGIPQRAPFF

SEQ ID NO: 26783 - DNA, 578 bp, Zea mays subsp. mays
  misc_feature (1)..(578): Ceres Seq. ID no. 13600582
accgctttttcctcctcctcctcctcctcctcttccaccccagagtccagagctatggcgctcgccaaggccaaggagatcgtcgcctccgctcccgtcgtcgtcttcagcaagtcttactgccctttctgcgtacaagtgaagaagttgttcacgcagctgggagcaagtttcaaggccattgagttggacactgaaagcgatggaactgagattcagtcagctcttgctgaatggactgggcagaggactgttcccaatgtcttcatcaatggaaaacacattggtggctgtgacgatactattgcactgaacaagggagggaagctggttgctctgctgacggaggctggagcgatctcgggttcttcttcgaagaccactgtcactgcttagctctgtttgcgagttgtcgtgatcgacatgttagtgtgttacatgtgttgcatcgttcccgtgtcatgaaataacgtagttggatatgtttggcaagttcagggcttgttgctgtctagtatttctgcagtaaatgtctttgtgtaaaactcgttggaaataaatcaaattatgtcggcgat

SEQ ID NO: 26784 - protein, 131 aa, Zea mays subsp. mays
  misc_feature (1)..(131): Ceres Seq. ID no. 13600583
TAFSSSSSSSSSTPESRAMALAKAKEIVASAPVVVFSKSYCPFCVQVKKLFTQLGASFKAIELDTESDGTEIQSALAEWTGQRTVPNVFINGKHIGGCDDTIALNKGGKLVALLTEAGAISGSSSKTTVTA

SEQ ID NO: 26785 - protein, 113 aa, Zea mays subsp. mays
  misc_feature (1)..(113): Ceres Seq. ID no. 13600584
MALAKAKEIVASAPVVVFSKSYCPFCVQVKKLFTQLGASFKAIELDTESDGTEIQSALAEWTGQRTVPNVFINGKHIGGCDDTIALNKGGKLVALLTEAGAISGSSSKTTVTA

SEQ ID NO: 26786 - DNA, 1299 bp, Zea mays subsp. mays; identical to SEQ ID NO: 1185
  misc_feature (1)..(1299): Ceres Seq. ID no. 13600673

SEQ ID NO: 26787 - protein, 224 aa, Zea mays subsp. mays; identical to SEQ ID NO: 1186
  misc_feature (1)..(224): Ceres Seq. ID no. 15218992
  misc_feature (219)..(219): Xaa is any aa, unknown or other
  misc_feature (221)..(221): Xaa is any aa, unknown or other

SEQ ID NO: 26788 - protein, 218 aa, Zea mays subsp. mays; identical to SEQ ID NO: 1187
  misc_feature (1)..(218): Ceres Seq. ID no. 15218993
  misc_feature (213)..(213): Xaa is any aa, unknown or other
  misc_feature (215)..(215): Xaa is any aa, unknown or other

SEQ ID NO: 26789 - protein, 203 aa, Zea mays subsp. mays; identical to SEQ ID NO: 1188
  misc_feature (1)..(203): Ceres Seq. ID no. 15218994
  misc_feature (198)..(198): Xaa is any aa, unknown or other
  misc_feature (200)..(200): Xaa is any aa, unknown or other

SEQ ID NO: 26790 - DNA, 2207 bp, Zea mays subsp. mays
  misc_feature (1)..(2207): Ceres Seq. ID no. 13600680
ccccgccctctccgccccgctctcccactcgtaggtgttctccccgtctccgcccgcactcgctcgtccgcgcgcaggaaggttgacctgtcgagggccggcgaacccggtaagtaagagtgaaaatggatggaagtagtaaagggagtgggcattctgaagcattaaggaactacaacctgggaagaactttaggtatcggtacatttggaagtgaagattgcagagcataagcttactggacatagggttgctataaagatcatcaactgccgccaaatgagaaatatggaaatggaagagaaagcaaagagagaattcaagatattgaagttgttcattcacccccatatcattcggctttatgaggtcatatacacacctacagatatatatgttgtgatggaatattgtaagtatggcgagttatttgattacattgttgagaaaggcagattacaggaagatgaagctcgtcgaatcttccagcaggtatttatcacttttcttggctggttacttctagtaacatgctttttttgagtcacaataggtagttatcaaagaacggttttatcttgttgctttgaattttgatatttatggatagtgcattcatattcttcatttgtttctgttgtgtttaatgtgctctcattaagtatctggattagttttgccttgccttatttttatcttctgatctgccaccattttgacttgcaagcatgatgtggtaattgctttgtcttagggtatcactattgcatgtagttcagaatttcaaatcatgatttaaacattacatctttccatggaggatacgacaattaaaatattcctttttcttttatatctaaattccaggtttgttttattagttgttttttcacattggaaaaattcatgaacagatcatatctggcgtcgaatactgccatagaaacatggttgtccaccgtgacctaaagccggaaaacttgttacttgattcaaagtataatgtaaaacttgcggattttggtctgagcaatgtcatgcatgatggccattttctgaagactagctgtgggagtccgaactatgctgctccagaggtaatatctggtaaactatatgctggacctgaggtcgatgtatggagttgtggggtgattctttatgctcttctttgtggaactcttccatttgatgatgagaatattcccaatctgttcaaaaaaaattaagggaggtatctacacagttccaagtcatttgtctgctttggccagggatttgatcccacgaatgcttgttgttgagcctatgaagagaatcacaattagggaaattcgggagcatcaatggttccagattcgccttccacgttacttggcagtgcctccaccagatacgacacaacaagccaaaatgattgatgaagatacacttcgagatgttgttaatatgggatttaacaagaaccatgtgtgtgaatcactgtgcagcagacttcaaaatgaggcaactgttgcatattatttactattggacaatcggtttagagcaactagtggctatcttggggcagattatcaagaatcaatggacaggaatttaaatcagctggcgtcatctgaatcatctagttctggtacgaggaattatgttccaggaagcagtgatcctcatagcagtggtttgcggccatattatcctgttgaaagaaaatgggcgcttggacttcagtctcgggcccaccctcgtgaaataatggttgaggtcttaaaagcacttcaagaattaaacgtcagatggaagaagaatgggcactacaacgtgaaatgcagatggtgcccagggtttcctgaagttaatgacacgttagatgccagcaacagctttcttggtgactctaccatcatggataatgatgatgctaatgggaggctacctactgtgatcaagtttgaattccagctttacaagacgaaggacgacaagtacctcttagatatgcagagagttactggacctcagctgctcttccttgacttctgtgcggccttccttaccaagcttagggttctatagtggtctaccatgtgcaaattttcactgtggtgatgaataaccgaaagcatgtaaataggaaccttgttctcgtcttttggacaacgaaaaaaaaaaaaaaaaaaaaactcgagggggggcccggtacccaa

SEQ ID NO: 26791 - protein, 304 aa, Zea mays subsp. mays
  misc_feature (1)..(304): Ceres Seq. ID no. 15219000
MLFFVELFHLMMRIFPICSKKIKGGIYTVPSHLSALARDLIPRMLVVEPMKRITIREIREHQWFQIRLPRYLAVPPPDTTQQAKMIDEDTLRDVVNMGFNKNHVCESLCSRLQNEATVAYYLLLDNRFRATSGYLGADYQESMDRNLNQLASSESSSSGTRNYVPGSSDPHSSGLRPYYPVERKWALGLQSRAHPREIMVEVLKALQELNVRWKKNGHYNVKCRWCPGFPEVNDTLDASNSFLGDSTIMDNDDANGRLPTVIKFEFQLYKTKDDKYLLDMQRVTGPQLLFLDFCAAFLTKLRVL

SEQ ID NO: 26792 - protein, 294 aa, Zea mays subsp. mays
  misc_feature (1)..(294): Ceres Seq. ID no. 15219001
MMRIFPICSKKIKGGIYTVPSHLSALARDLIPRMLVVEPMKRITIREIREHQWFQIRLPRYLAVPPPDTTQQAKMIDEDTLRDVVNMGFNKNHVCESLCSRLQNEATVAYYLLLDNRFRATSGYLGADYQESMDRNLNQLASSESSSSGTRNYVPGSSDPHSSGLRPYYPVERKWALGLQSRAHPREIMVEVLKALQELNVRWKKNGHYNVKCRWCPGFPEVNDTLDASNSFLGDSTIMDNDDANGRLPTVIKFEFQLYKTKDDKYLLDMQRVTGPQLLFLDFCAAFLTKLRVL

SEQ ID NO: 26793 - protein, 293 aa, Zea mays subsp. mays
  misc_feature (1)..(293): Ceres Seq. ID no. 15219002
MRIFPICSKKIKGGIYTVPSHLSALARDLIPRMLVVEPMKRITIREIREHQWFQIRLPRYLAVPPPDTTQQAKMIDEDTLRDVVNMGFNKNHVCESLCSRLQNEATVAYYLLLDNRFRATSGYLGADYQESMDRNLNQLASSESSSSGTRNYVPGSSDPHSSGLRPYYPVERKWALGLQSRAHPREIMVEVLKALQELNVRWKKNGHYNVKCRWCPGFPEVNDTLDASNSFLGDSTIMDNDDANGRLPTVIKFEFQLYKTKDDKYLLDMQRVTGPQLLFLDFCAAFLTKLRVL

SEQ ID NO: 26794 - DNA, 892 bp, Zea mays subsp. mays
  misc_feature (1)..(892): Ceres Seq. ID no. 13622167
aggagcaggtcttctccacctactcggacaaccagcccggtgtcctgatccaggtctacgagggtgagaggacccggacacgcgacaacaacctgctgggcaagttcgagctctccggcatcccccctgcaccccgtggtgtgccacagatcaccgtgtgctttgacatcgacgccaacggcatcctgaacgtgtctgccgaggacaagacaacggggcagaagaacaagatcacaatcaccaacgacaagggccgtctctccaaggaggagatcgagaagatggttcaggacgctgagaagtacaagtctgaggatgaggagcacaagaagaaggtggaggccaagaactcgctggagaactactcctacaacatgcgcaacacgatcaaggacgagaagattgcgtccaagctgccggccgatgacaagaagaagatcgaggacgccatcgacgcggccatcagctggctggacgccaaccagctcgccgaggcggacgagttcgaggacaagatgaaggagctggagagcctctgcaaccccatcatcgccaagatgtaccagggcgcgggtgaagacatgggcggcgctggcggcatggacgaggacgcccctgccggcagcggcggccctggccccaagatcgaggaggtggactaagcggtttgttgtcagtcttgagtgtgctgcagttgctggctggcccagttgctgccgagagttatcgtcagttggtgcggtgtgtccgcttaaactttatttgtggttggttggtacttttgtggtggttatttttttggacctcgtgatagtcggtcggttcaatgttatcgcggctactggcaaaccttaagtgatacggtattcttcttttcggtatttgtttctgc

SEQ ID NO: 26795 - protein, 219 aa, Zea mays subsp. mays
  misc_feature (1)..(219): Ceres Seq. ID no. 13622168
EQVFSTYSDNQPGVLIQVYEGERTRTRDNNLLGKFELSGIPPAPRGVPQITVCFDIDANGILNVSAEDKTTGQKNKITITNDKGRLSKEEIEKMVQDAEKYKSEDEEHKKKVEAKNSLENYSYNMRNTIKDEKIASKLPADDKKKIEDAIDAAISWLDANQLAEADEFEDKMKELESLCNPIIAKMYQGAGEDMGGAGGMDEDAPAGSGGPGPKIEEVD

SEQ ID NO: 26796 - protein, 126 aa, Zea mays subsp. mays
  misc_feature (1)..(126): Ceres Seq. ID no. 13622169
MVQDAEKYKSEDEEHKKKVEAKNSLENYSYNMRNTIKDEKIASKLPADDKKKIEDAIDAAISWLDANQLAEADEFEDKMKELESLCNPIIAKMYQGAGEDMGGAGGMDEDAPAGSGGPGPKIEEVD

SEQ ID NO: 26797 - DNA, 482 bp, Zea mays subsp. mays
  misc_feature (1)..(482): Ceres Seq. ID no. 13622219
caagtacagtgattttgtcacgtctgaggacaaggaaggtttgattgctaagcttcaggaggttgaagactggctctatgaagatggcgaggatgaaactaagggggtttatattgctaagctagaagaacttaaaaaagttggtgatcctattgagctgcgcttcaaggaatgggagattagaagttctgctgttagccaactggtatactgcatcaatagcttcagagaagctgcacagtctaccgaccagaagtttgaacacatagacatgtcagaaaagcgaaaggtcattaatgagtgttcggaagcagagacttggctaatagagaaaaagcagcagcaggatgctctgccaaagcatgctaatccggtcctccttgctgctgaccttaagaagaaagctgaaacacttgacaggttctgcaagccgatcatgacgaaaccgnagccagctcctaagccacagactccgcctgtgg

SEQ ID NO: 26798 - protein, 160 aa, Zea mays subsp. mays
  misc_feature (1)..(160): Ceres Seq. ID no. 13622220
  misc_feature (150)..(150): Xaa is any aa, unknown or other
KYSDFVTSEDKEGLIAKLQEVEDWLYEDGEDETKGVYIAKLEELKKVGDPIELRFKEWEIRSSAVSQLVYCINSFREAAQSTDQKFEHIDMSEKRKVINECSEAETWLIEKKQQQDALPKHANPVLLAADLKKKAETLDRFCKPIMTKPXPAPKPQTPPV

SEQ ID NO: 26799 - protein, 70 aa, Zea mays subsp. mays
  misc_feature (1)..(70): Ceres Seq. ID no. 13622221
  misc_feature (60)..(60): Xaa is any aa, unknown or other
MSEKRKVINECSEAETWLIEKKQQQDALPKHANPVLLAADLKKKAETLDRFCKPIMTKPXPAPKPQTPPV

SEQ ID NO: 26800 - DNA, 931 bp, Zea mays subsp. mays
  misc_feature (1)..(931): Ceres Seq. ID no. 13622442
aggatatgtcacgactcacgacgacggaaacagtagtgctgccagtagagagctctcagaactcgggaaaaaaatgtcagaggccgccgtgcgtgtgatcggcctatggccgagcccgttcgtgatccgcgtcctgatcgccctgaagctgaagggcgtcgagttcgagttcgtggaggaggtggtgggcaggaagagcgagctgctgctgaggtcgaacccggtgcacaagaagatccccgtcctgctccaccacggcaagcccatctccgagtctctgatcgtcgtccagtacatcgacgaggtctggtcctccggcgcgccggccttcctccccgtcgacgctcacgcccgcgccgtccagcggttctgggcgcagtacgtcgacgacaagctgccttgggcgatccgcatactgaagggaacggacgacgggggcatggagcaggcggcggggcagctgtccgcggccctgcagctcctagaggaggctttcgcgcagctcagccaggggaagcgctacttcggcggggacagcgtcgggtacctggacatcgctctggtgtcgcatgtcggctgggtgaaggcggtggagaagatcgccggggtcaccctgctggacaaggccaaggtcccgaacctggtggcgtgggctgatcgtctgtgtgcccacccggccgtggtcgacgccatccctgacgcggacaagttcgttgagttcagcgtcacctatggctccttttcgaagcctatcaatgctcccgccaagtgagcaaaaagggtccgtgcatgctttcgtcattttcactttcactgcgcgtgtgccggtgcgtgtcaaaattgcatagcaaggggattcttctcccacatagatcttcttgtgatcatagtcaccaaatcagctctgaaaatgaagattttctgcccttcc

SEQ ID NO: 26801 - protein, 256 aa, Zea mays subsp. mays
  misc_feature (1)..(256): Ceres Seq. ID no. 13622443
GYVTTHDDGNSSAASRELSELGKKMSEAAVRVIGLWPSPFVIRVLIALKLKGVEFEFVEEVVGRKSELLLRSNPVHKKIPVLLHHGKPISESLIVVQYIDEVWSSGAPAFLPVDAHARAVQRFWAQYVDDKLPWAIRILKGTDDGGMEQAAGQLSAALQLLEEAFAQLSQGKRYFGGDSVGYLDIALVSHVGWVKAVEKIAGVTLLDKAKVPNLVAWADRLCAHPAVVDAIPDADKFVEFSVTYGSFSKPINAPAK

SEQ ID NO: 26802 - protein, 232 aa, Zea mays subsp. mays
  misc_feature (1)..(232): Ceres Seq. ID no. 13622444
MSEAAVRVIGLWPSPFVIRVLIALKLKGVEFEFVEEVVGRKSELLLRSNPVHKKIPVLLHHGKPISESLIVVQYIDEVWSSGAPAFLPVDAHARAVQRFWAQYVDDKLPWAIRILKGTDDGGMEQAAGQLSAALQLLEEAFAQLSQGKRYFGGDSVGYLDIALVSHVGWVKAVEKIAGVTLLDKAKVPNLVAWADRLCAHPAVVDAIPDADKFVEFSVTYGSFSKPINAPAK

SEQ ID NO: 26803 - protein, 183 aa, Zea mays subsp. mays
  misc_feature (1)..(183): Ceres Seq. ID no. 13622445
MAEPVRDPRPDRPEAEGRRVRVRGGGGGQEERAAAEVEPGAQEDPRPAPPRQAHLRVSDRRPVHRRGLVLRRAGLPPRRRSRPRRPAVLGAVRRRQAALGDPHTEGNGRRGHGAGGGAAVRGPAAPRGGFRAAQPGEALLRRGQRRVPGHRSGVACRLGEGGGEDRRGHPAGQGQGPEPGGVG

SEQ ID NO: 26804 - DNA, 543 bp, Zea mays subsp. mays
  misc_feature (1)..(543): Ceres Seq. ID no. 13622597
aattcttccagctttttgttggaagatgtctacagaaacccaggcccgctccagtttgaaggaccaggtgccgattcaaagcctatttcattgtgcgttgaggatcaagactatatgggcagaataaaaaagttgcaggaatacttggagaaggtgaagaggattgtgaagcctgggtgctcgcaggatgttcttaaagcggcgctgagtgccatgtcttctgtgacggaaacactgaacatcatgacttcatcttctaccggccagactccactgagtcattaggtaccatttcatggtatggatcataatccccacttttttcagtggtggcgattaacgagtttaggaacagcaaccctggtatcatacgggttattcttttgtagccttttggagagttctatcggttttggattcggtagtttatgaaggcttgttgatgagtttgagctcgaatagcttttgaaacagccggatgatgccatctttaataaaccaaattctgtgactgcattcacatttctgtcagttacctgagtc

SEQ ID NO: 26805 - protein, 94 aa, Zea mays subsp. mays
  misc_feature (1)..(94): Ceres Seq. ID no. 13622598
NSSSFLLEDVYRNPGPLQFEGPGADSKPISLCVEDQDYMGRIKKLQEYLEKVKRIVKPGCSQDVLKAALSAMSSVTETLNIMTSSSTGQTPLSH

SEQ ID NO: 26806 - protein, 56 aa, Zea mays subsp. mays
  misc_feature (1)..(56): Ceres Seq. ID no. 13622599
MGRIKKLQEYLEKVKRIVKPGCSQDVLKAALSAMSSVTETLNIMTSSSTGQTPLSH

SEQ ID NO: 26807 - DNA, 900 bp, Zea mays subsp. mays
  misc_feature (1)..(900): Ceres Seq. ID no. 13622703
aaacgaaatccagcagaccgacgcgaaccgagaaaaatcccacgaaatctcgtggccgcggcgaccggaagaagaggacgacgacggacggagcggcgatggcgtgccgcgcacttgccctccgctccctgctcctccccgacccgctacaccgcctcccggccgcggcgccacctgtttggagagcgtcccgcggtggccgccgtccgcacctccgctgctgctccggcggcgggggcggggagcccgggcagccgccgcaagaagctgtgctcgaggccatatccaagatagcaaggtctaaaggaagggttgcactcacaacaaatatggtcatgggtggtactgtgactgacgatgcaagtgatgaatggcttgttctggatcagaaggtaaattcctaccccacagatagaggatttacagcaattggcactggaggtgatgattttgtccagtcaatggtagttgctgttgaatctgttcttcaagaatcaattcccaagggccgggtatctcagaaattatcttcaagagggaaatatgtttctgtaaacattgggccaattcgtgttgtttctagtgagcaggtccaagctgtgtatcgtgccatgagaagagataacaggatgaaatacttcttatgaagtgcaatttcatgtcctggatgttccctagtccattccatgttgtatcctacgatgcattttcgccatatttgctggacctccggtgaattccaatgacttttatgtgccattcaagcccaaattgaagcttctctactacaaaacaatatgttgggtccagctacgttatttagtgcagggggcgtatatagctactatgtattccctttcttctataatgaataagattcaaaggttcacagtttgtcct

SEQ ID NO: 26808 - protein, 214 aa, Zea mays subsp. mays
  misc_feature (1)..(214): Ceres Seq. ID no. 15219364
TKSSRPTRTEKNPTKSRGRGDRKKRTTTDGAAMACRALALRSLLLPDPLHRLPAAAPPVWRASRGGRRPHLRCCSGGGGGEPGQPPQEAVLEAISKIARSKGRVALTTNMVMGGTVTDDASDEWLVLDQKVNSYPTDRGFTAIGTGGDDFVQSMVVAVESVLQESIPKGRVSQKLSSRGKYVSVNIGPIRVVSSEQVQAVYRAMRRDNRMKYFL

SEQ ID NO: 26809 - protein, 182 aa, Zea mays subsp. mays
  misc_feature (1)..(182): Ceres Seq. ID no. 15219365
MACRALALRSLLLPDPLHRLPAAAPPVWRASRGGRRPHLRCCSGGGGGEPGQPPQEAVLEAISKIARSKGRVALTTNMVMGGTVTDDASDEWLVLDQKVNSYPTDRGFTAIGTGGDDFVQSMVVAVESVLQESIPKGRVSQKLSSRGKYVSVNIGPIRVVSSEQVQAVYRAMRRDNRMKYFL

SEQ ID NO: 26810 - DNA, 387 bp, Zea mays subsp. mays
  misc_feature (1)..(387): Ceres Seq. ID no. 13622708
gatagatgcccgaccaatctaatagcgccgcaacgcgaagcgcgaagccgcgaagcctcacctacagttccttcgcgcaccggcaccgcggcggcagttcagcatggtggcagcatccgtagccgagcgggcctatgaggcggcgacgcggtccgcgctggtggcgctggagcgcaacctcatcccggacgcggtgacccggcgcctgacgcggctcctgctcgcgcagcgcctccgccagggctacctcccctccgcgccgctccagctgcagcagctcctccagttcgtccactctcttgaagagatgcccattgccattgaaacagacaaagctaaagcccaacactatgagttgccaactacatttttcaagctagtgctggg

SEQ ID NO: 26811 - protein, 94 aa, Zea mays subsp. mays
  misc_feature (1)..(94): Ceres Seq. ID no. 13622709
MVAASVAERAYEAATRSALVALERNLIPDAVTRRLTRLLLAQRLRQGYLPSAPLQLQQLLQFVHSLEEMPIAIETDKAKAQHYELPTTFFKLVL

SEQ ID NO: 26812 - DNA, 2017 bp, Zea mays subsp. mays
  misc_feature (1)..(2017): Ceres Seq. ID no. 13622795
atccttctagcttcgatctctatatacctctgtatgtgagtgaggccaatgagagccctcgtagtcgtaagtttcgcttcggcgtgcttgctgctgctgttgcagctcgcaggagcgtcgcatgtcgtctacaactacaaggacctcgaagccgaggctgctgcggcgacggaccaggtgccgccgtccatcgtcaaccccctgctcaggacggggtaccacttccagccccccaagaactggatcaatgatcccaacgcgcccatgtactacaaggggtggtaccatttcttctaccaatacaatcccaagggcgccgtatggggcaacatcgtgtgggcgcactcggtgtcgcgagacctcatcaactgggtggcgctagagccggcgctcagaccaagcatcccgggcgacaggtacggctgctggtccgggtcggcgacggtgctgcccgacggcggcggcccggtgatcatgtacacgggcgtggaccacccggacatcaactaccaggtccagaacgtggcgtacccgaagaacgtgtcggacccgctgctccgggagtgggtgaagccctcgcacaaccccgtcatcgtccccgagggcggcatcaacgcgacgcagttccgcgacccgaccacggcctggcgcggccccggccccgagcagtggcggctgctcgtcggcagcgcggcggggtcgtcgccgccccgcggcgtggcgtacgtgtaccgtagccgcgacttccggcggtggaggcgggtgcggcggccgctgcactcggcgcccacggggatgtgggagtgccctgacttctacccggtgagcaagggcggcgcgccgcgcgcggggctcgagacgtccgtgccgcccggcccaagggtcaagcacgtgctcaagaacagcctcgacctccggcggtacgactactacaccgtgggcacgtaccacccgagggccgagcggtacgtgccggacgaccccgccggcgacgagcaccgcctgcgctacgactacggcaacttctacgcgtccaagacgttctacgacccggccaagcggcgccgcatcctgtggggctgggctaacgagtccgacaccgccgccgacgatgtggctaaaggctgggctggaatccaggcgattccaaggacggtgtggctggaccccagtgggaagcagctgctgcagtggcctatcgaggaggtggaggcgctgagagcaaagtcggtcactctcaggaacagggtaatcaaggcaggacatcacgtcgaggtgaccgggatacaaacggcacaggctgacgtggaggtgagcttcgaagtgtcgccggcggccctggccggtgccgagacgctggacccggcgctggcctacgacgcggagaggctgtgcggcgtgaagcgcgcggacgtgaggggcggcgtggggccgttcgggctgtgggtgctggcctccgccaaccgcaaggagagaaccgcggtgttcttcagggtgttcaagcccgccgccggcgacaagcccgtggtgctcatgtgcaccgaccctaccaagtcgtccctgaacccgaacctgtaccgcccgacatttgcaggatttgtcgacacggacatctcgaacggcaagatatccctgagaagcctgatcgaccggtcggtcgttgagagcttcggagccgggggcaagacctgcatcctctccagggtctacccgtcgctggccatcggcaaggacgctcgcctctacgtgttcaacaacgggagggcgcacgtcaaggtgtcccgtctcaccgcgtgggagatgaagaagccggtcatgaacggggcctgaagatcttgaataaatatatcactcatgcatgacatatagtggcgcctgagaaatctttccttatatatatatatattttagatatatcgtttaagaattcattttctacactaaaagggcgccccgttatgttacaatggtaccagctgcacttctagtaacaaagacaattgactatttgttgttc

SEQ ID NO: 26813 - protein, 593 aa, Zea mays subsp. mays
  misc_feature (1)..(593): Ceres Seq. ID no. 13622796
MRALVVVSFASACLLLLLQLAGASHVVYNYKDLEAEAAAATDQVPPSIVNPLLRTGYHFQPPKNWINDPNAPMYYKGWYHFFYQYNPKGAVWGNIVWAHSVSRDLINWVALEPALRPSIPGDRYGCWSGSATVLPDGGGPVIMYTGVDHPDINYQVQNVAYPKNVSDPLLREWVKPSHNPVIVPEGGINATQFRDPTTAWRGPGPEQWRLLVGSAAGSSPPRGVAYVYRSRDFRRWRRVRRPLHSAPTGMWECPDFYPVSKGGAPRAGLETSVPPGPRVKHVLKNSLDLRRYDYYTVGTYHPRAERYVPDDPAGDEHRLRYDYGNFYASKTFYDPAKRRRILWGWANESDTAADDVAKGWAGIQAIPRTVWLDPSGKQLLQWPIEEVEALRAKSVTLRNRVIKAGHHVEVTGIQTAQADVEVSFEVSPAALAGAETLDPALAYDAERLCGVKRADVRGGVGPFGLWVLASANRKERTAVFFRVFKPAAGDKPVVLMCTDPTKSSLNPNLYRPTFAGFVDTDISNGKISLRSLIDRSVVESFGAGGKTCILSRVYPSLAIGKDARLYVFNNGRAHVKVSRLTAWEMKKPVMNGA

SEQ ID NO: 26814 - protein, 521 aa, Zea mays subsp. mays
  misc_feature (1)..(521): Ceres Seq. ID no. 13622797
MYYKGWYHFFYQYNPKGAVWGNIVWAHSVSRDLINWVALEPALRPSIPGDRYGCWSGSATVLPDGGGPVIMYTGVDHPDINYQVQNVAYPKNVSDPLLREWVKPSHNPVIVPEGGINATQFRDPTTAWRGPGPEQWRLLVGSAAGSSPPRGVAYVYRSRDFRRWRRVRRPLHSAPTGMWECPDFYPVSKGGAPRAGLETSVPPGPRVKHVLKNSLDLRRYDYYTVGTYHPRAERYVPDDPAGDEHRLRYDYGNFYASKTFYDPAKRRRILWGWANESDTAADDVAKGWAGIQAIPRTVWLDPSGKQLLQWPIEEVEALRAKSVTLRNRVIKAGHHVEVTGIQTAQADVEVSFEVSPAALAGAETLDPALAYDAERLCGVKRADVRGGVGPFGLWVLASANRKERTAVFFRVFKPAAGDKPVVLMCTDPTKSSLNPNLYRPTFAGFVDTDISNGKISLRSLIDRSVVESFGAGGKTCILSRVYPSLAIGKDARLYVFNNGRAHVKVSRLTAWEMKKPVMNGA

SEQ ID NO: 26815 - protein, 451 aa, Zea mays subsp. mays
  misc_feature (1)..(451): Ceres Seq. ID no. 13622798
MYTGVDHPDINYQVQNVAYPKNVSDPLLREWVKPSHNPVIVPEGGINATQFRDPTTAWRGPGPEQWRLLVGSAAGSSPPRGVAYVYRSRDFRRWRRVRRPLHSAPTGMWECPDFYPVSKGGAPRAGLETSVPPGPRVKHVLKNSLDLRRYDYYTVGTYHPRAERYVPDDPAGDEHRLRYDYGNFYASKTFYDPAKRRRILWGWANESDTAADDVAKGWAGIQAIPRTVWLDPSGKQLLQWPIEEVEALRAKSVTLRNRVIKAGHHVEVTGIQTAQADVEVSFEVSPAALAGAETLDPALAYDAERLCGVKRADVRGGVGPFGLWVLASANRKERTAVFFRVFKPAAGDKPVVLMCTDPTKSSLNPNLYRPTFAGFVDTDISNGKISLRSLIDRSVVESFGAGGKTCILSRVYPSLAIGKDARLYVFNNGRAHVKVSRLTAWEMKKPVMNGA

SEQ ID NO: 26816 - DNA, 2285 bp, Zea mays subsp. mays
  misc_feature (1)..(2285): Ceres Seq. ID no. 13622799
ggatctttcgctttccttaccccgttagcgttcctgcttgatacactacgactgcagattctttggcagaccgctaccaagtgcaagtgtgcaacgcacacacatcactcacagtctcacggtgtctctgtgcgcgcgcgtgggacacaggagggagagagacacagagaagggggcgggacgatcagctctagctcagctggtatcgtctaaactgcataaaaggggagggaaaaaaagttgcaatgatgcatcccggcgcatagatagagagagagagagaagagagagccccgactcgagagccaagaacgccgtgtgttgtgtttgtgtgcatctatctccgtacacgcacgctcgtacgcaccagctagcacgaccgccatggccgccaccaggagagccttcttccacagcgccgtcgacggcattgcgcgcgccgggccgggggaggccgagcggctgccggcgccgccgcaggtcgggcgaccggtggaaggcgccagcagcatggtcttgggcttccccgtgccgcggcccacgatgccggaccgccggccggccgccgtcacccagcagttctttccgcccactactacggccgcgcagcaggcgacgatggaggagcaatgccacgtgcccgccggtagcgcggcggagcagtgggtccggtcgtcggcgtccaggaagagccggcgcggcccgcggtcacggagctcgcagtaccgcggcgtcaccttctaccgccgcaccggccgctgggagtcccacatctgggactgtgggaaacaggtgtacttgggtggattcgacacggcgcaggccgctgcgagggcctacgaccaagccgcgatcaagttccgcggcctgaacgcggacatcaacttcaccctggacgactacaaggacgagatgaagaagatgaaggacttgagcaaggaggagttcgtgttggtgctccggcggcagggcgccggcttcgtcaggggcagctccaggttccggggagtcacccagcacaagtgcggcaagtgggaggccaggatcggccagctcatgggcaagaagtatgtgtacctgggcctgtatgacacagagacggaggctgcccaggcatatgacaaggctgccatcaagtgctacggcaaggaggcggtgaccaacttcgatgcccagagctacgacaaggagctccagtcgcagccctgggacggcgagctggatctcgagctcagtctgggctgcgccagcagcgatccgtccacggtcgccgtcgaggcgttcagccccgcgacgagcagcagtagccgcaagcagaggacgatgacgctgacgctcggtctgccggaggaggaggagacgggcgccggctaccctcaccctgctgccggcatgttcgggcgcccggctgatggccacgtccacgtagcaccgccgccacaccggcaatggcagcagcagcagcagggacagcacgcagctccagatgcggcgcctgagcgacgagcggcagagccagcagatcggcagcggtggggccggggcgcgcgctggcccatcgccagcgccagcggcattaactgggcctgggcgccgccgtacgccaccgcccgcgccggcaccgacgacgacgacgccagcagcgccgccgctgcagcatcatcaggattcccactgtggcagctgggtgcggcgtcgtccaggtccagctggcccagctgctgagcctttcctgtcgtcccgcgccaccaacagtgacgctgctgggccacgtactgacggcgactggtgacctgctggaaccgccgccggcctgtttcccttttctaggtaaaagcagtggcagaggggcgagctagcgacagcgtgcctcgtcatccatcgtccctgcgccgtggctggcggggtgggaaaaagtctgagcagttttgagcgtccggaggagctcgagatttcctccctcgaatagtcacttggggtggccactagttattatttctttccttccccctcgttgattctgctacccattatagcctctgtatctagctacatgcatgatgctgctctagcgctgttggacgttgatggcacggtgtacggatatgggacagggttcgtgtgaccccatgtccactgctaggcctgtttccaaatggagtatttctgcagtaccatggcttatagaaatgccgagtattttaaaccattaggtgcttggttactttcccaaaaactaggttttcaaagctatggtataatgaataccacggtatatatttttc

SEQ ID NO: 26817 - protein, 446 aa, Zea mays subsp. mays
  misc_feature (1)..(446): Ceres Seq. ID no. 13622800
MAATRRAFFHSAVDGIARAGPGEAERLPAPPQVGRPVEGASSMVLGFPVPRPTMPDRRPAAVTQQFFPPTTTAAQQATMEEQCHVPAGSAAEQWVRSSASRKSRRGPRSRSSQYRGVTFYRRTGRWESHIWDCGKQVYLGGFDTAQAAARAYDQAAIKFRGLNADINFTLDDYKDEMKKMKDLSKEEFVLVLRRQGAGFVRGSSRFRGVTQHKCGKWEARIGQLMGKKYVYLGLYDTETEAAQAYDKAAIKCYGKEAVTNFDAQSYDKELQSQPWDGELDLELSLGCASSDPSTVAVEAFSPATSSSSRKQRTMTLTLGLPEEEETGAGYPHPAAGMFGRPADGHVHVAPPPHRQWQQQQQGQHAAPDAAPERRAAEPADRQRWGRGARWPIASASGINWAWAPPYATARAGTDDDDASSAAAAASSGFPLWQLGAASSRSSWPSC

SEQ ID NO: 26818 - protein, 404 aa, Zea mays subsp. mays
  misc_feature (1)..(404): Ceres Seq. ID no. 13622801
MVLGFPVPRPTMPDRRPAAVTQQFFPPTTTAAQQATMEEQCHVPAGSAAEQWVRSSASRKSRRGPRSRSSQYRGVTFYRRTGRWESHIWDCGKQVYLGGFDTAQAAARAYDQAAIKFRGLNADINFTLDDYKDEMKKMKDLSKEEFVLVLRRQGAGFVRGSSRFRGVTQHKCGKWEARIGQLMGKKYVYLGLYDTETEAAQAYDKAAIKCYGKEAVTNFDAQSYDKELQSQPWDGELDLELSLGCASSDPSTVAVEAFSPATSSSSRKQRTMTLTLGLPEEEETGAGYPHPAAGMFGRPADGHVHVAPPPHRQWQQQQQGQHAAPDAAPERRAAEPADRQRWGRGARWPIASASGINWAWAPPYATARAGTDDDDASSAAAAASSGFPLWQLGAASSRSSWPSC

SEQ ID NO: 26819 - protein, 393 aa, Zea mays subsp. mays
  misc_feature (1)..(393): Ceres Seq. ID no. 13622802
MPDRRPAAVTQQFFPPTTTAAQQATMEEQCHVPAGSAAEQWVRSSASRKSRRGPRSRSSQYRGVTFYRRTGRWESHIWDCGKQVYLGGFDTAQAAARAYDQAAIKFRGLNADINFTLDDYKDEMKKMKDLSKEEFVLVLRRQGAGFVRGSSRFRGVTQHKCGKWEARIGQLMGKKYVYLGLYDTETEAAQAYDKAAIKCYGKEAVTNFDAQSYDKELQSQPWDGELDLELSLGCASSDPSTVAVEAFSPATSSSSRKQRTMTLTLGLPEEEETGAGYPHPAAGMFGRPADGHVHVAPPPHRQWQQQQQGQHAAPDAAPERRAAEPADRQRWGRGARWPIASASGINWAWAPPYATARAGTDDDDASSAAAAASSGFPLWQLGAASSRSSWPSC

SEQ ID NO: 26820 - DNA, 693 bp, Zea mays subsp. mays
  misc_feature (1)..(693): Ceres Seq. ID no. 13622871
gtctgtctccactctacagttgtgccgcctcgtctctctcctttcygctgcgcccccctatcgtgcgtgattctatccaggattctagggttcgttcgcctcgtctcgcgatggacaagggcagcgtcgtcgtgcccccggcccctgccgccgccgccgcgaagaaggccaagcgcttcgagatcaagaagtggaacgccgtctctctctgggcctgggacatcgtggtggacaactgcgccatctgccgcaaccacatcatggacctttgcatcgagtgccaggcgaaccaggcgagcgccaccagcgaggagtgcaccgtcgcttggggaatttgcaaccatgcattccacttccactgtatcagccgttggctaaagacccgtcaagtgtgccctcttgacaacagtgagtgggagttccagaagtatggtcactagagagaatggcttcggcgtggaattgcttcatgtttctcgtcgtttagcagtagtggttactgaatagattctggtgaacatgctatggatctgtaacgtttctgaagttctgccttacttgaagctgtaggcgaatactctggttatgccatattcgtccttcggggcgctgttgaacagctcttcctcacatgaaggtgtagacgaattactcagtttgcagaaattaattggtaattgtgggctataggct

SEQ ID NO: 26821 - protein, 145 aa, Zea mays subsp. mays
  misc_feature (1)..(145): Ceres Seq. ID no. 15219336
  misc_feature (15)..(15): Xaa is any aa, unknown or other
LSPLYSCAASSLSFXLRPPIVRDSIQDSRVRSPRLAMDKGSVVVPPAPAAAAAKKAKRFEIKKWNAVSLWAWDIVVDNCAICRNHIMDLCIECQANQASATSEECTVAWGICNHAFHFHCISRWLKTRQVCPLDNSEWEFQKYGH

SEQ ID NO: 26822 - protein, 125 aa, Zea mays subsp. mays
  misc_feature (1)..(125): Ceres Seq. ID no. 15219337
  misc_feature (16)..(16): Xaa is any aa, unknown or other
VCLHSTVVPPRLSPFXCAPLSCVILSRILGFVRLVSRWTRAASSCPRPLPPPPRRRPSASRSRSGTPSLSGPGTSWWTTAPSAATTSWTFASSARRTRRAPPARSAPSLGEFATMHSTSTVSAVG

SEQ ID NO: 26823 - protein, 109 aa, Zea mays subsp. mays
  misc_feature (1)..(109): Ceres Seq. ID no. 15219338
MDKGSVVVPPAPAAAAAKKAKRFEIKKWNAVSLWAWDIVVDNCAICRNHIMDLCIECQANQASATSEECTVAWGICNHAFHFHCISRWLKTRQVCPLDNSEWEFQKYGH

SEQ ID NO: 26824 - DNA, 1181 bp, Zea mays subsp. mays
  misc_feature (1)..(1181): Ceres Seq. ID no. 13622983
aaacgatacacgccgcgatagaaacactcagacacaccctctccatccgcccctccaccctcctcttcctcctcccgtcgcggcttcccccgattggcatccggggcgggcccatcccccacccggccgccgcgcgcgtccatggacggcctgcacggtacggacgcctgcttctcccccgcgagggccgtctcgccgcaggtgaggctaccggggccgccggacgtgggcagtcagtacctggcggagctgctgcaggagcaccagaagctgggacccttcatgcaggtgctcccaatctgcagcaggctgctgaatcaagagagtaggtgttccgcaaggagctatgggttggcaaggacccccacagagccctgcttcttatatcgtcaagaagattttgcggttggaagtaccgacagaaacataccctaatttcaattttatcggtcgtcttcttggaccaaggggaaattctttaaagaggattgaagcctgtacaggctgtcgtgtattcatcagagggaaaggctcaattaaagattctggcaaggaggaacaactcaagggaagacctggctatgaacacttgagtgaacccctccatatcttgattgaagctgagttacctgctaatgtgattgatgcaagacttgcaaaggcacaagagatccttgaagagttgttgaaaccagtggacgagtcacaagactactacaagagacagcaactccgagaacttgccatgttgaattcgccactccgagaggagagtccacgttcaggcggtgctcctccaagtcccttcagtaagactgtctccggtaggccgaataaaacaggggacacagaattgtagatgacactatttatcactgtttgaagagagaagtttgaaataggggatctactggagatagcctaacggcggcatgaaaagagtgaaacaatgacacccattcctccatcttgatcctccggcaaccccacttagtccatgccttcacatcctattttccatgagcaaagctttcatgatggtgttggtagtgtgtgacatcctttaatgtactagcaggtgaattttgatctcccatcccatgtgacattaaccttgagtgacagatgactatgcgtagtgtatcctctatgactgtataattagaacatttgatttatct

SEQ ID NO: 26825 - protein, 170 aa, Zea mays subsp. mays
  misc_feature (1)..(170): Ceres Seq. ID no. 13622984
MGWQGPPQSPASYIVKKILRLEVPTETYPNFNFIGRLLGPRGNSLKRIEACTGCRVFIRGKGSIKDSGKEEQLKGRPGYEHLSEPLHILIEAELPANVIDARLAKAQEILEELLKPVDESQDYYKRQQLRELAMLNSPLREESPRSGGAPPSPFSKTVSGRPNKTGDTEL

SEQ ID NO: 26826 - protein, 108 aa, Zea mays subsp. mays
  misc_feature (1)..(108): Ceres Seq. ID no. 13622985
TIHAAIETLRHTLSIRPSTLLFLLPSRLPPIGIRGGPIPHPAAARVHGRPARYGRLLLPREGRLAAGEATGAAGRGQSVPGGAAAGAPEAGTLHAGAPNLQQAAESRE

SEQ ID NO: 26827 - protein, 97 aa, Zea mays subsp. mays
  misc_feature (1)..(97): Ceres Seq. ID no. 13622986
MDGLHGTDACFSPARAVSPQVRLPGPPDVGSQYLAELLQEHQKLGPFMQVLPICSRLLNQESRCSARSYGLARTPTEPCFLYRQEDFAVGSTDRNIP

SEQ ID NO: 26828 - DNA, 1059 bp, Zea mays subsp. mays
  misc_feature (1)..(1059): Ceres Seq. ID no. 13623013
gaacagaaccgaaacctcagacactctgcatatatcctctgcgcgtgtatctcgtcgaacagagccgaaagctggagcttccaatggcgggaggcaacgacctgaaggtgctcggcgtgtggacgagcccgttcgtgatccgggtccgcatcgtgctcaacctgaagggcctggcgtacgagtacgtggaggaggacctcggcaacaagagcgcgctcctcctgggatccaacccggtgcacaagagcgtgccggtgctcctccacgccggccgcgccataaacgagtcccaggtcatcctgcagtacatcgacgaggtgtgggcggggacggggccggccgtgcttccggccgacccctacgagcgcgcggtggcgcggttctggggcgcgtacatcgacgacaaggtggagtcggcgtggctggggatgctgttcaggtgcgcgaacgaggaggagagggcggcggcggtggcgcgcgcccgcgaggcgctcgacgcgctggagggcgcgttccgggactgctccagggggaggccgttcttcggcggcgacgacatcgggttcgtggacgccgttctcggcgggtacctcggctggttcggggccgtcggcaggatcatcgggagcaggctcatcgacccggcccggacgccgctgctggccgcgtgggaggaccggttccgcgccgccgacgtggccaagggcgtcgtgcccgacgacctcgacaagatgctcgcgttcctgcagaccctgcgcgctatgaactacgccaagtgagagtgtttcgtcgcatgaacgtgtgccgtgccgtgcacgacctatgatcagttcatgtcgatacgtctatcactcagttttgcttcttccgtcaataatcggtgtgctgaatacatgtacaacagctgcctataattttgcttctttcttctaatacctccgtttttaatttgatagttcaactttataataacaaatgtcaaatttaaaaaaaaaatcggaaggagtatttttttaatacatccaagtccatccaataaaagtgctcgtggggctttct

SEQ ID NO: 26829 - protein, 274 aa, Zea mays subsp. mays
  misc_feature (1)..(274): Ceres Seq. ID no. 13623014
NRTETSDTLHISSARVSRRTEPKAGASNGGRQRPEGARRVDEPVRDPGPHRAQPEGPGVRVRGGGPRQQERAPPGIQPGAQERAGAPPRRPRHKRVPGHPAVHRRGVGGDGAGRASGRPLRARGGAVLGRVHRRQGGVGVAGDAVQVRERGGEGGGGGARPRGARRAGGRVPGLLQGEAVLRRRRHRVRGRRSRRVPRLVRGRRQDHREQAHRPGPDAAAGRVGGPVPRRRRGQGRRARRPRQDARVPADPARYELRQVRVFRRMNVCRAVHDL

SEQ ID NO: 26830 - protein, 258 aa, Zea mays subsp. mays
  misc_feature (1)..(258): Ceres Seq. ID no. 13623015
TEPKPQTLCIYPLRVYLVEQSRKLELPMAGGNDLKVLGVWTSPFVIRVRIVLNLKGLAYEYVEEDLGNKSALLLGSNPVHKSVPVLLHAGRAINESQVILQYIDEVWAGTGPAVLPADPYERAVARFWGAYIDDKVESAWLGMLFRCANEEERAAAVARAREALDALEGAFRDCSRGRPFFGGDDIGFVDAVLGGYLGWFGAVGRIIGSRLIDPARTPLLAAWEDRFRAADVAKGVVPDDLDKMLAFLQTLRAMNYAK

SEQ ID NO: 26831 - protein, 231 aa, Zea mays subsp. mays
  misc_feature (1)..(231): Ceres Seq. ID no. 13623016
MAGGNDLKVLGVWTSPFVIRVRIVLNLKGLAYEYVEEDLGNKSALLLGSNPVHKSVPVLLHAGRAINESQVILQYIDEVWAGTGPAVLPADPYERAVARFWGAYIDDKVESAWLGMLFRCANEEERAAAVARAREALDALEGAFRDCSRGRPFFGGDDIGFVDAVLGGYLGWFGAVGRIIGSRLIDPARTPLLAAWEDRFRAADVAKGVVPDDLDKMLAFLQTLRAMNYAK

SEQ ID NO: 26832 - DNA, 2231 bp, Zea mays subsp. mays
  misc_feature (1)..(2231): Ceres Seq. ID no. 13623107
ccccccccccccattagaaggcagaatcatggttcacgcatacttcactcttcctcggttgacatggggaacatgaaggttggtatggctaggcaatcttcagatgttttgttcaaaaggaattcagctgagcaatcttctttgaagaatgtgtctttggaaagacggtggagtcttgaggtggctattgaaaaatttattggccatgaatccagcgaaagttctggtctagaaagcttggaaaacttgagtgattctcgtttgcccatactggaaagagaatacaagcaaggtgttctaatcagtgaggtggttcttgacaggagtttttcagactcctcaaagaagacaaaacgccgccagaagaaaacggtgagggacacaaaaaagcctggagagacaataattaagggacacagaagctatgatttaatgctcagcctgcagcttggaatcaggtacacagttggaaagatcacaccaattcaaaaacgtgaagttcgtgcttcagattttggaccaagagcaagtttctggatgaacttcccaaaagaaggatctcggcttactccttcacattcagcggaagattttaaatggaaagactactgtcccatggttttcaggaatttgagagagatgttcaagattgatgctgcagactatatgatctccatatgtggaaattctgctcttaggcaactatcttcccctggaaagagtggaagtgtctttttcctgtcacaagatgatagattcatgattaagactctccgaaaatctgaagtgcaggttcttttacgaatgcttccaaactattatgatcatgtccgtacctatgagaacaccctcataactaagttttttggcctccacagggtgaaaccttctagtggtcaaaagtttcggtttgttgtaatgggaaacatgttttgcactgaattgagaatccaccggaggtttgatttgaaaggatcatctttaggccgttctactgataaaattgaaattgacgagaacacaactctgaaggatttggatcttaactattccttttatcttgaaccttcctggcgtgaggctcttcttaaacagattgaaacagacagtgattttttgagaacacagcggataatggattacagcctactgcttggtgtccattatagagctccacagcacttgcggacacgtgcatcttatcaccggagcatggcagcagatagattgactgttgtttcagaagaagatgctcaggaagatgatgcccttagccatccagaaggactagtcttggttcaaagcagtggtgagaacagtgttattgttggccctcacataagaggcagccgcttgcgtgcatcggctgctggatttggcgaagtagacctactgctgcctggaacagccaggcttcagatccagctaggagttaacatgcctgcaagggcagagcagacccctaaggaagatgaaagcaaaccgttccgtgaggtgtacgatgtggtcctctacctgggcatcattgacatactgcaagagtacaacatgacaaagaaaatcgagcacgctgtcaagtccatgcagtatgactcggtctcgatctcggctgtggacccccagttctactcggagcgtttcttgaacttcatccagaccgtcttccctgagaattcgtagctccatccaccaatacttttcttggaagatgcccgcccactaccacttgctgagaacttcatccagacgacagtccatgtcttcgaatttggagcttgcgagcatcataagaacattgcactctcttcagtgcgtgcctgttccttcctggatgaactggcaggaagagtggccaacaaaatgagattcgttagtgaaattgtgcagaagcaaatcgatcttctctaggctattttgccccgatccctggggtcaccggatcagccgtctggcttcctggagtaggcttggcgtattgggactcgagcaggaagtagatgtgagttgcgaggattctagtgacagcggcgccatagagctctgggattcactgttatgtctcggcagttgcagaaagctgaagcgcctgttgcctctggctcgtgtttcatctgttaaggtgctatggaggatatgtttaataagtccctgaaaacacgcatcaagctccgatacatttttttgtaggacaaacaaaagagtactatgtattttatcgcaaaaacgaaaag

SEQ ID NO: 26833 - protein, 559 aa, Zea mays subsp. mays
  misc_feature (1)..(559): Ceres Seq. ID no. 13623108
PPPPIRRQNHGSRILHSSSVDMGNMKVGMARQSSDVLFKRNSAEQSSLKNVSLERRWSLEVAIEKFIGHESSESSGLESLENLSDSRLPILEREYKQGVLISEVVLDRSFSDSSKKTKRRQKKTVRDTKKPGETIIKGHRSYDLMLSLQLGIRYTVGKITPIQKREVRASDFGPRASFWMNFPKEGSRLTPSHSAEDFKWKDYCPMVFRNLREMFKIDAADYMISICGNSALRQLSSPGKSGSVFFLSQDDRFMIKTLRKSEVQVLLRMLPNYYDHVRTYENTLITKFFGLHRVKPSSGQKFRFVVMGNMFCTELRIHRRFDLKGSSLGRSTDKIEIDENTTLKDLDLNYSFYLEPSWREALLKQIETDSDFLRTQRIMDYSLLLGVHYRAPQHLRTRASYHRSMAADRLTVVSEEDAQEDDALSHPEGLVLVQSSGENSVIVGPHIRGSRLRASAAGFGEVDLLLPGTARLQIQLGVNMPARAEQTPKEDESKPFREVYDVVLYLGIIDILQEYNMTKKIEHAVKSMQYDSVSISAVDPQFYSERFLNFIQTVFPENS

SEQ ID NO: 26834 - protein, 538 aa, Zea mays subsp. mays
  misc_feature (1)..(538): Ceres Seq. ID no. 13623109
MGNMKVGMARQSSDVLFKRNSAEQSSLKNVSLERRWSLEVAIEKFIGHESSESSGLESLENLSDSRLPILEREYKQGVLISEVVLDRSFSDSSKKTKRRQKKTVRDTKKPGETIIKGHRSYDLMLSLQLGIRYTVGKITPIQKREVRASDFGPRASFWMNFPKEGSRLTPSHSAEDFKWKDYCPMVFRNLREMFKIDAADYMISICGNSALRQLSSPGKSGSVFFLSQDDRFMIKTLRKSEVQVLLRMLPNYYDHVRTYENTLITKFFGLHRVKPSSGQKFRFVVMGNMFCTELRIHRRFDLKGSSLGRSTDKIEIDENTTLKDLDLNYSFYLEPSWREALLKQIETDSDFLRTQRIMDYSLLLGVHYRAPQHLRTRASYHRSMAADRLTVVSEEDAQEDDALSHPEGLVLVQSSGENSVIVGPHIRGSRLRASAAGFGEVDLLLPGTARLQIQLGVNMPARAEQTPKEDESKPFREVYDVVLYLGIIDILQEYNMTKKIEHAVKSMQYDSVSISAVDPQFYSERFLNFIQTVFPENS

SEQ ID NO: 26835 - protein, 535 aa, Zea mays subsp. mays
  misc_feature (1)..(535): Ceres Seq. ID no. 13623110
MKVGMARQSSDVLFKRNSAEQSSLKNVSLERRWSLEVAIEKFIGHESSESSGLESLENLSDSRLPILEREYKQGVLISEVVLDRSFSDSSKKTKRRQKKTVRDTKKPGETIIKGHRSYDLMLSLQLGIRYTVGKITPIQKREVRASDFGPRASFWMNFPKEGSRLTPSHSAEDFKWKDYCPMVFRNLREMFKIDAADYMISICGNSALRQLSSPGKSGSVFFLSQDDRFMIKTLRKSEVQVLLRMLPNYYDHVRTYENTLITKFFGLHRVKPSSGQKFRFVVMGNMFCTELRIHRRFDLKGSSLGRSTDKIEIDENTTLKDLDLNYSFYLEPSWREALLKQIETDSDFLRTQRIMDYSLLLGVHYRAPQHLRTRASYHRSMAADRLTVVSEEDAQEDDALSHPEGLVLVQSSGENSVIVGPHIRGSRLRASAAGFGEVDLLLPGTARLQIQLGVNMPARAEQTPKEDESKPFREVYDVVLYLGIIDILQEYNMTKKIEHAVKSMQYDSVSISAVDPQFYSERFLNFIQTVFPENS

SEQ ID NO: 26836 - DNA, 3505 bp, Zea mays subsp. mays
  misc_feature (1)..(3505): Ceres Seq. ID no. 13623374
gacaaatatggctgataatggtgatgccaaagggggatctggcgcctatgcaattaatatagagaattttagtaagcggctgaaggtattctatgaccattggaaggagcacaagtctgatctttggggctcgtctgatgctattgcaattgctaccccacctccttctgatgatctccgttatttgaaatcatcagccctggatatttggttacttggatatgaatttccagaaacaataattgttttcatgcacaagcaaatacatgttttaagcagtcagaagaaaggaaatcttattgggaccctcaagaaggctgcaaacgaggctgttggtgttgacattgtgttgcatgtgaaaaccaagaatagtgatggtgctgacttgatggatgacatagtgcatgctgctcgtaatcaatcaaaatcagataagccagttgttggacacatagccaaagaggcacctgagggtaagcttcttgaaacatggataaaaaaattatctggatcaggcctacgactcgttgatgtaacaaacggcttctctgagctctttgctgtgaaggacaccacagagatcacatgtgtgaagaaggctgcttacttaacttcatccgttctgaaaaattttgtgattcctaagttggagaaggttatcgatgaggagaaggaagtctcacactcatcgttgatggatgacgcagagaaggctattctggacccactaaaggtcaaggtgaaattgaagcctgataatgttgatatatgctaccctccagtctttcaaagtgggggtaagtttgatctaaagcctggtgcgtctagcaatgacgagtacctgtattatgattcagcaagtattatcatctgtgcaattggttccaaatacagtagctattgctcaaatgttgctcggacatatcttatcgacgctacccctacacagaataaagcatatgagacccttaggaaagctcatgaagctgctattcaacaagtgaaaccaggcaatcagatgagtgcagtttatcaagctgcagtggctgtgattgagagggatgcacctgaacttcttcctaatctaacaaagtcagctggaactggaataggccttgaattccgagaatctggcttaaatctgaatgccaagaatgatcgtaggataaaaaagggaatggtttttaatgtatcccttggtttgcataacatccaggcagaaacaaccagtgagaagacaaagcagttttcactattattagctgatacagttttagtcaatgaaagaggacatgagatcttaacagcaccctgctccaaggcattcaaagatgttgcttattcgttcaacgaagatgatgatgctgttgctgctgaggttaagataaagtcgaagaccatagatgttatgccaaccaaggcaactctcaggtcagacaaccaggagatgtcgaaggaagagctcaggagacagcaccaggctgaacttgctcgccagaagaatgaagagactgctagaaggcttgctggggttggtactggatctggtgacggacgtggtcctgcgagggcttcaaatgagcttgttgcatataagaatgttaatgatgtaccatttgtaagagatttggtgatccaagtagatcagaagaatgaagctgtcctcttacctatttatggtagtatggttcctttccatgtttctactgtcaagagtgtgacaagtcaccaggacaaccgcacctgcactatccgtatcttcttcaatgtgcctggcatgccattctcaaatgatagcaagtttaattctcaaggtgctatctatctgaaagaaattacattccgctcaaaagatccacggcatagcagtgaagttgttcagcagatcaaaacattgaggaggcaagtggcatcaagggagtcagagagagctgaaagggcaactcttgttacccaggagaaacttcagattggaagcaacagaatgaagatgatgaggctttctgatgtgtggatacgacctgcatttggtggtcgtgggaggaagctcacaggaaatcttgaggctcatttcaatggtttcagatattctacttcaaggtctgatgagcgtgtggacatcatgtttggaaatataaagcatgcctttttccagcctgcagagaaagaaatgattactctccttcacttccatttgcacaaccatatcatggttggaaacaagaagacaaaggatgttcagttctatgttgaagttatggatgttgtacagacgcttgggggcagtagaagatcggcacttgatcctgatgagattgaagaagagcagcgtgagagggataggaagaacagaataaacatggatttccagaactttgtgaacaaggttaacgaccactggtcgcaaccacagttcaaggggcttgacctggagtttgatgtcccccttagagagcttgggttccatggtgtcccatataaagcttctgctttcattattccaacttctacatgtttggttgagctgattgagacccccttccttgtggtgagcctgagcgagatagagattgttaacctggagagggtgggctttgggacaaagaacttcgacatggctatcgtgttcaaggatttcaagaaagacgttctccgcattgactccatcccttcagcatcgcttgacgcgataaaggaatggctggacacaactgacctcaagtactatgagagcaggctgaatctgaactggcgccctatcctgaaaactataatcgatgatcctcagaagttcattgacgatggcggctgggagttcctgaacatggaggcgagtgactcagagactgaggacacagaggaatcagaccaaggctatgtgccttcagacgctgagcccgaatccgagtcagaagatgatgactctgacagtgagtccttggtggaatctgatgatgacgatgaggagtcagacgaggactcagaggaggagaagggcaagacctgggaggagctggagcgtgaggcaagcaacgcggaccgtgagcacggtgcggagtcggacagcgaggaggagaggaggcgccgcaaggcaaagaccttcggcaagtcgcgtgcgccggagcgcagcagcttcaagggagcgccgccctccaagaagccaaagttcaggtgaatgctgccttcggcaattcgctcgtgccaaagtgcagcagcttcaagggagcaccacctccaagaaggcagctctggttaatgggactccttgaagctttggcccccggagtagacgtgtctgtaggagtgtggtttgttatatctagattatctgcagtagcttagtccatctaaatgaaatgtgacagctgaactttggaagtcgcatcattggggaaacgaaatttaagtcgattgatttgttaatgccctcgttgatgtaatatttcccttgttcggtggatttccggtctgtataatatttatgcacgcttgcctttatccatgg

SEQ ID NO: 26837 - protein, 1057 aa, Zea mays subsp. mays
  misc_feature (1)..(1057): Ceres Seq. ID no. 13623375
TNMADNGDAKGGSGAYAINIENFSKRLKVFYDHWKEHKSDLWGSSDAIAIATPPPSDDLRYLKSSALDIWLLGYEFPETIIVFMHKQIHVLSSQKKGNLIGTLKKAANEAVGVDIVLHVKTKNSDGADLMDDIVHAARNQSKSDKPVVGHIAKEAPEGKLLETWIKKLSGSGLRLVDVTNGFSELFAVKDTTEITCVKKAAYLTSSVLKNFVIPKLEKVIDEEKEVSHSSLMDDAEKAILDPLKVKVKLKPDNVDICYPPVFQSGGKFDLKPGASSNDEYLYYDSASIIICAIGSKYSSYCSNVARTYLIDATPTQNKAYETLRKAHEAAIQQVKPGNQMSAVYQAAVAVIERDAPELLPNLTKSAGTGIGLEFRESGLNLNAKNDRRIKKGMVFNVSLGLHNIQAETTSEKTKQFSLLLADTVLVNERGHEILTAPCSKAFKDVAYSFNEDDDAVAAEVKIKSKTIDVMPTKATLRSDNQEMSKEELRRQHQAELARQKNEETARRLAGVGTGSGDGRGPARASNELVAYKNVNDVPFVRDLVIQVDQKNEAVLLPIYGSMVPFHVSTVKSVTSHQDNRTCTIRIFFNVPGMPFSNDSKFNSQGAIYLKEITFRSKDPRHSSEVVQQIKTLRRQVASRESERAERATLVTQEKLQIGSNRMKMMRLSDVWIRPAFGGRGRKLTGNLEAHFNGFRYSTSRSDERVDIMFGNIKHAFFQPAEKEMITLLHFHLHNHIMVGNKKTKDVQFYVEVMDVVQTLGGSRRSALDPDEIEEEQRERDRKNRINMDFQNFVNKVNDHWSQPQFKGLDLEFDVPLRELGFHGVPYKASAFIIPTSTCLVELIETPFLVVSLSEIEIVNLERVGFGTKNFDMAIVFKDFKKDVLRIDSIPSASLDAIKEWLDTTDLKYYESRLNLNWRPILKTIIDDPQKFIDDGGWEFLNMEASDSETEDTEESDQGYVPSDAEPESESEDDDSDSESLVESDDDDEESDEDSEEEKGKTWEELEREASNADREHGAESDSEEERRRRKAKTFGKSRAPERSSFKGAPPSKKPKFR

SEQ ID NO: 26838 - protein, 1055 aa, Zea mays subsp. mays
  misc_feature (1)..(1055): Ceres Seq. ID no. 13623376
MADNGDAKGGSGAYAINIENFSKRLKVFYDHWKEHKSDLWGSSDAIAIATPPPSDDLRYLKSSALDIWLLGYEFPETIIVFMHKQIHVLSSQKKGNLIGTLKKAANEAVGVDIVLHVKTKNSDGADLMDDIVHAARNQSKSDKPVVGHIAKEAPEGKLLETWIKKLSGSGLRLVDVTNGFSELFAVKDTTEITCVKKAAYLTSSVLKNFVIPKLEKVIDEEKEVSHSSLMDDAEKAILDPLKVKVKLKPDNVDICYPPVFQSGGKFDLKPGASSNDEYLYYDSASIIICAIGSKYSSYCSNVARTYLIDATPTQNKAYETLRKAHEAAIQQVKPGNQMSAVYQAAVAVIERDAPELLPNLTKSAGTGIGLEFRESGLNLNAKNDRRIKKGMVFNVSLGLHNIQAETTSEKTKQFSLLLADTVLVNERGHEILTAPCSKAFKDVAYSFNEDDDAVAAEVKIKSKTIDVMPTKATLRSDNQEMSKEELRRQHQAELARQKNEETARRLAGVGTGSGDGRGPARASNELVAYKNVNDVPFVRDLVIQVDQKNEAVLLPIYGSMVPFHVSTVKSVTSHQDNRTCTIRIFFNVPGMPFSNDSKFNSQGAIYLKEITFRSKDPRHSSEVVQQIKTLRRQVASRESERAERATLVTQEKLQIGSNRMKMMRLSDVWIRPAFGGRGRKLTGNLEAHFNGFRYSTSRSDERVDIMFGNIKHAFFQPAEKEMITLLHFHLHNHIMVGNKKTKDVQFYVEVMDVVQTLGGSRRSALDPDEIEEEQRERDRKNRINMDFQNFVNKVNDHWSQPQFKGLDLEFDVPLRELGFHGVPYKASAFIIPTSTCLVELIETPFLVVSLSEIEIVNLERVGFGTKNFDMAIVFKDFKKDVLRIDSIPSASLDAIKEWLDTTDLKYYESRLNLNWRPILKTIIDDPQKFIDDGGWEFLNMEASDSETEDTEESDQGYVPSDAEPESESEDDDSDSESLVESDDDDEESDEDSEEEKGKTWEELEREASNADREHGAESDSEEERRRRKAKTFGKSRAPERSSFKGAPPSKKPKFR

SEQ ID NO: 26839 - protein, 974 aa, Zea mays subsp. mays
  misc_feature (1)..(974): Ceres Seq. ID no. 13623377
MHKQIHVLSSQKKGNLIGTLKKAANEAVGVDIVLHVKTKNSDGADLMDDIVHAARNQSKSDKPVVGHIAKEAPEGKLLETWIKKLSGSGLRLVDVTNGFSELFAVKDTTEITCVKKAAYLTSSVLKNFVIPKLEKVIDEEKEVSHSSLMDDAEKAILDPLKVKVKLKPDNVDICYPPVFQSGGKFDLKPGASSNDEYLYYDSASIIICAIGSKYSSYCSNVARTYLIDATPTQNKAYETLRKAHEAAIQQVKPGNQMSAVYQAAVAVIERDAPELLPNLTKSAGTGIGLEFRESGLNLNAKNDRRIKKGMVFNVSLGLHNIQAETTSEKTKQFSLLLADTVLVNERGHEILTAPCSKAFKDVAYSFNEDDDAVAAEVKIKSKTIDVMPTKATLRSDNQEMSKEELRRQHQAELARQKNEETARRLAGVGTGSGDGRGPARASNELVAYKNVNDVPFVRDLVIQVDQKNEAVLLPIYGSMVPFHVSTVKSVTSHQDNRTCTIRIFFNVPGMPFSNDSKFNSQGAIYLKEITFRSKDPRHSSEVVQQIKTLRRQVASRESERAERATLVTQEKLQIGSNRMKMMRLSDVWIRPAFGGRGRKLTGNLEAHFNGFRYSTSRSDERVDIMFGNIKHAFFQPAEKEMITLLHFHLHNHIMVGNKKTKDVQFYVEVMDVVQTLGGSRRSALDPDEIEEEQRERDRKNRINMDFQNFVNKVNDHWSQPQFKGLDLEFDVPLRELGFHGVPYKASAFIIPTSTCLVELIETPFLVVSLSEIEIVNLERVGFGTKNFDMAIVFKDFKKDVLRIDSIPSASLDAIKEWLDTTDLKYYESRLNLNWRPILKTIIDDPQKFIDDGGWEFLNMEASDSETEDTEESDQGYVPSDAEPESESEDDDSDSESLVESDDDDEESDEDSEEEKGKTWEELEREASNADREHGAESDSEEERRRRKAKTFGKSRAPERSSFKGAPPSKKPKFR

SEQ ID NO: 26840 - DNA, 1604 bp, Zea mays subsp. mays
  misc_feature (1)..(1604): Ceres Seq. ID no. 13623434
atttgttttgtagggacttgtttacagactatgctgacttctgttttaagacctacggcgatcgcgtaaagcactggtttacattcaatgagccaaggatagtagcgctacttggctatgacacagggtcaaatcctcctcaaaggtgcaccagatgcgctgctggtgggaattcagcaaccgaaccttacatagttgctcataattttctcttggcacatgctactgcagttgcaagataccgtacgaaatatcaggtatttccatcttgagaacctcagaagttcctctgaaaaataacatcactctagcactcctaggagtggtaaactgatgttattttattcaatgaagtgtgtggtccaggattttatttttaaatgaaatgtgggcagggtctatatatgcttggaagttggaacaatggtcagcatactttcacattaataactctactgttcatgaaatgcattagcttgttctcctaaacgattggacatgtgcctgtcgaatttcattagtttcttggactgaaaactgctgatggaagagtgacatgatgttttaaaaacataggctgctcagaagggtaaggtcggaatagtcctggacttcaactggtacgaggctcttacaaactcacctgatgaccaagcagcagcccaaagagccagggacttccacattggctggtttgttgatccattgataaacggacactatccacagataatgcaagatctcgtgaaggagaggctgcccaggttcactcctgagcaggctaaactggtgaagggctcggcagactacatcggtatcaacgagtacacatccagctacatgaaggggcagaagctggtccagctggcgcccagtagctactctgccgattggcaggttcaatatgtttgtgagtttaatttcttgtgctttaaactcgatatttcgaataaatatgtatttgccttggatatatatttttttcaccaaacctaaacatccgtcccataaattctgtagttgcacgcaatggcaaaccgattggaccacaggcgaattctaagtggctctacatcgccccgacggggatgtacgggtgcgtgaactacctcaaggagaagtatgggaatccaacgatctacataacggagaacggaatggaccagcctggaaacttgacccgagaccagtacctgcgcgacgccacgagggtgcggttctacaggagctacatcggccagctgaagaaggccatagaccagggagcgaacgtggctggctacttcgcctggtctctcctcgacaacttcgagtggctggcagggtactcgtccaagttcggcatcgtctacgtggacttcaacacgctcgaacgccacccgaaggcgtcggcctactggttcagggacatgcttcagaagcattgagatctccagagccgagcctgagcacggaaggtaccattttgttcagcttcgcctagtgtttgggatggcccaatggttcaaatccggctcagtgcctggctaccaaaatgggaacaaaggacagctaccccgatcaattgtgatgttgtgtgtttgtgggtatgttctctctggagt

SEQ ID NO: 26841 - protein, 112 aa, Zea mays subsp. mays
  misc_feature (1)..(112): Ceres Seq. ID no. 13623435
MYGCVNYLKEKYGNPTIYITENGMDQPGNLTRDQYLRDATRVRFYRSYIGQLKKAIDQGANVAGYFAWSLLDNFEWLAGYSSKFGIVYVDFNTLERHPKASAYWFRDMLQKH

SEQ ID NO: 26842 - protein, 89 aa, Zea mays subsp. mays
  misc_feature (1)..(89): Ceres Seq. ID no. 13623436
MDQPGNLTRDQYLRDATRVRFYRSYIGQLKKAIDQGANVAGYFAWSLLDNFEWLAGYSSKFGIVYVDFNTLERHPKASAYWFRDMLQKH

SEQ ID NO: 26843 - protein, 89 aa, Zea mays subsp. mays
  misc_feature (1)..(89): Ceres Seq. ID no. 13623437
LFCRDLFTDYADFCFKTYGDRVKHWFTFNEPRIVALLGYDTGSNPPQRCTRCAAGGNSATEPYIVAHNFLLAHATAVARYRTKYQVFPS

SEQ ID NO: 26844 - DNA, 1222 bp, Zea mays subsp. mays
  misc_feature (1)..(1222): Ceres Seq. ID no. 13623625
actaccgctgcgagtggccgctcccgcaggttctgctctccgccttctccatccacaacgagaccctcaacgtctggacgcatcttataggatttttcatctttctcgctctgaccatatacacagcaacacaagttccaaatgcagtagatatccggagcttgcagcatttgccagatgtactgagaaaggctgatattcataagattcaggcagagcttgtgtcatgtcttccgtcgttacctcacctttcagatctacaaaagctgaaggatgagctgaagacctcttggaattctatggaggttcttccatctctgtcccgttggcatctcttggagttactcgcaaattgtctgccacacagatttacccatcccaatgaaacaagtttgtctgttcttcaaagcatgaaggaggatctagcaagcctgattgcaccgcaactgatcagaccaattgcgcggtggccattctatgccttcttgggaggagccatgttctgcctccttgccagcagcacttgccaccttctctcctgccattctcgccgcctagcatacattatgcttcggcttgattacgcaggcatcgcagctctaatcgccacgtccttctaccctccagtatactattctttcatgtgctaccccttcttttgcaacctgtacctcagtttcataaccatcctaggagtggcaactatcgcgttctctctacttccggtcttccagaatccggagttcagaaccatcagagcatgcctcttctttggcatgggtgcatctggcgtgatacctgttcttcacaagctggtcctcttctggcaccaaccggaggcattgcacacgaccggatacgaaattctgatggggctcttctacgggctgggagcattggtatatgcggcacgggtacctgagcgctggatgcctgggaagtttgacatcgccgggcacagccaccagctgttccacgtcttggttgttgccggagcctacacacactaccacgcagggcttgtgtacctcaagtggagagacctgcaaggctgctgaaaggtgctgcatcgttgaggatgtggatagattgtagattccgtgaattcaggctgaaggtcatggtctgttgtaaattgtaacagtaatcatgaaacaattgctacaagtctaccaggtagtcgggcttccattaataatcaattgaagactagtatttatgc

SEQ ID NO: 26845 - protein, 351 aa, Zea mays subsp. mays
  misc_feature (1)..(351): Ceres Seq. ID no. 13623626
YRCEWPLPQVLLSAFSIHNETLNVWTHLIGFFIFLALTIYTATQVPNAVDIRSLQHLPDVLRKADIHKIQAELVSCLPSLPHLSDLQKLKDELKTSWNSMEVLPSLSRWHLLELLANCLPHRFTHPNETSLSVLQSMKEDLASLIAPQLIRPIARWPFYAFLGGAMFCLLASSTCHLLSCHSRRLAYIMLRLDYAGIAALIATSFYPPVYYSFMCYPFFCNLYLSFITILGVATIAFSLLPVFQNPEFRTIRACLFFGMGASGVIPVLHKLVLFWHQPEALHTTGYEILMGLFYGLGALVYAARVPERWMPGKFDIAGHSHQLFHVLVVAGAYTHYHAGLVYLKWRDLQGC

SEQ ID NO: 26846 - protein, 252 aa, Zea mays subsp. mays
  misc_feature (1)..(252): Ceres Seq. ID no. 13623627
MEVLPSLSRWHLLELLANCLPHRFTHPNETSLSVLQSMKEDLASLIAPQLIRPIARWPFYAFLGGAMFCLLASSTCHLLSCHSRRLAYIMLRLDYAGIAALIATSFYPPVYYSFMCYPFFCNLYLSFITILGVATIAFSLLPVFQNPEFRTIRACLFFGMGASGVIPVLHKLVLFWHQPEALHTTGYEILMGLFYGLGALVYAARVPERWMPGKFDIAGHSHQLFHVLVVAGAYTHYHAGLVYLKWRDLQGC

SEQ ID NO: 26847 - protein, 215 aa, Zea mays subsp. mays
  misc_feature (1)..(215): Ceres Seq. ID no. 13623628
MKEDLASLIAPQLIRPIARWPFYAFLGGAMFCLLASSTCHLLSCHSRRLAYIMLRLDYAGIAALIATSFYPPVYYSFMCYPFFCNLYLSFITILGVATIAFSLLPVFQNPEFRTIRACLFFGMGASGVIPVLHKLVLFWHQPEALHTTGYEILMGLFYGLGALVYAARVPERWMPGKFDIAGHSHQLFHVLVVAGAYTHYHAGLVYLKWRDLQGC

SEQ ID NO: 26848 - DNA, 1071 bp, Zea mays subsp. mays
  misc_feature (1)..(1071): Ceres Seq. ID no. 13624136
agtcaactaccaattttctcgctcagacatacagaattacagagtcgaagtgcgctgtggcctgtggactctcccctccccaactccggcgaagggagcagaaacgttggcgtgttggttgggtggcgtcggcatggacgaggcaacgaagaagaatgtggaggctacggtgctggagatcctccggggctccgatatggagtccgtgacggagtacaaggtccgcgccgctgccagcgaccgcctcggcatcgacctctccatacccgaccgcaagctcttcgtccgcggcgtcgttgaggaatacctactttcactctcctccaaggaggaggcgaaggcggaggaggagggcgtcactggcagggagagcaagggcaaggaacacgaagaggaggacgaagaggatgacgatgaggaggaggatgaaggtaagggtggcgggaagagagagtacgatgaccaaggtgaccttatcctgtgccgcctttcgagcaagaggagggtgactttatcggagtttaagggcaggtcgttggtgtccatccgcgagttctacgtgaaggacggcaaggagatgccctccgccaaaggtatcagtatgactttggagcagtgggaagcattttgcaatgctgtacctgcaatagaggatgccatcaaaaagcttgaagattcagactgaactggttttaagagcctcttcttatgcccgtgtcaaatgaaaaagcctgggaagcatttcgcaatgctgtatctgcaatagatgatgcatgaaaaagcttgaagattcagacagaactggtttaggagcctcttattttgcctgtatcaaataaaaaagcctatttctgacccttaacgagggccatatatgtgtcttgcaagagctaagttctgtaaaagatttctacatgtaccatgtgtaggagttaggatagagtgatagacgtactgctgcatacagttcggaatatttgctagtaacaagtaatctaccattaggtggcctggagttcacatgctatgctatggatgatcggggatgtgtcctagcaatagcaagctcag

SEQ ID NO: 26849 - protein, 227 aa, Zea mays subsp. mays
  misc_feature (1)..(227): Ceres Seq. ID no. 13624137
VNYQFSRSDIQNYRVEVRCGLWTLPSPTPAKGAETLACWLGGVGMDEATKKNVEATVLEILRGSDMESVTEYKVRAAASDRLGIDLSIPDRKLFVRGVVEEYLLSLSSKEEAKAEEEGVTGRESKGKEHEEEDEEDDDEEEDEGKGGGKREYDDQGDLILCRLSSKRRVTLSEFKGRSLVSIREFYVKDGKEMPSAKGISMTLEQWEAFCNAVPAIEDAIKKLEDSD

SEQ ID NO: 26850 - protein, 183 aa, Zea mays subsp. mays
  misc_feature (1)..(183): Ceres Seq. ID no. 13624138
MDEATKKNVEATVLEILRGSDMESVTEYKVRAAASDRLGIDLSIPDRKLFVRGVVEEYLLSLSSKEEAKAEEEGVTGRESKGKEHEEEDEEDDDEEEDEGKGGGKREYDDQGDLILCRLSSKRRVTLSEFKGRSLVSIREFYVKDGKEMPSAKGISMTLEQWEAFCNAVPAIEDAIKKLEDSD

SEQ ID NO: 26851 - protein, 162 aa, Zea mays subsp. mays
  misc_feature (1)..(162): Ceres Seq. ID no. 13624139
MESVTEYKVRAAASDRLGIDLSIPDRKLFVRGVVEEYLLSLSSKEEAKAEEEGVTGRESKGKEHEEEDEEDDDEEEDEGKGGGKREYDDQGDLILCRLSSKRRVTLSEFKGRSLVSIREFYVKDGKEMPSAKGISMTLEQWEAFCNAVPAIEDAIKKLEDSD

SEQ ID NO: 26852 - DNA, 913 bp, Zea mays subsp. mays
  misc_feature (1)..(913): Ceres Seq. ID no. 13624158
agggtttcgtcgcttccagccgccgccgcgtccgcctcgccaagcgcagcagccgccgcagcacatctctctctcgatctcagccatggcggaggtggagcagcaacaggacacgccgaagctgttcaaccgctggaccttcgatgatgtccaggtgaacgacatctcgctgaacgactacctcgctgtgaacgcgacgaagcacgcgatgtacctgccgcacaccgcggggcgttactccaaanaagcggttccgcaaggcgcagtgcccgatcgtcgagcgcctcacaaactccctcatgatgcacgggcgcaacaacggcaagaaggtcatggctgtccgcatcatcaagcataccctggagatcattcacctgctcaccgatgccaaccccatccaggtcgtcgtcgacgcgatcatcaacagtggaccccgtgaggatgccacccgtattggttccgctggtgttgtgaggaggcaggccgtggatatctcacccctgaggagggtgaaccaggccatctacctcctcaccactggtgccagggagagtgctttccggaacatcaaaaccattgccgagtgccttgcagatgagctgatcaacgctgccaagggctcatccaacagttacgccatcaagaagaaggacgagattgagcgtgttgccaaggccaaccgttgaacggagcttgtatcctggtgcactctgcgctggaaacttttatgttactggcagtcgtatcggttcctgttttaccaatgtttagagttttttgagacctatatgcggttttggttttcagtgcacaattaaaattactgagtaatgtagttgattgggaacagaaagtgcctggtttaccgaactccatttctcttgtcatttttctttattctgtagtctgtatt

SEQ ID NO: 26853 - protein, 145 aa, Zea mays subsp. mays
  misc_feature (1)..(145): Ceres Seq. ID no. 13624159
  misc_feature (82)..(82): Xaa is any aa, unknown or other
GFRRFQPPPRPPRQAQQPPQHISLSISAMAEVEQQQDTPKLFNRWTFDDVQVNDISLNDYLAVNATKHAMYLPHTAGRYSKXAVPQGAVPDRRAPHKLPHDARAQQRQEGHGCPHHQAYPGDHSPAHRCQPHPGRRRRDHQQWTP

SEQ ID NO: 26854 - protein, 128 aa, Zea mays subsp. mays
  misc_feature (1)..(128): Ceres Seq. ID no. 13624160
MMHGRNNGKKVMAVRIIKHTLEIIHLLTDANPIQVVVDAIINSGPREDATRIGSAGVVRRQAVDISPLRRVNQAIYLLTTGARESAFRNIKTIAECLADELINAAKGSSNSYAIKKKDEIERVAKANR

SEQ ID NO: 26855 - protein, 127 aa, Zea mays subsp. mays
  misc_feature (1)..(127): Ceres Seq. ID no. 13624161
MHGRNNGKKVMAVRIIKHTLEIIHLLTDANPIQVVVDAIINSGPREDATRIGSAGVVRRQAVDISPLRRVNQAIYLLTTGARESAFRNIKTIAECLADELINAAKGSSNSYAIKKKDEIERVAKANR

SEQ ID NO: 26856 - protein, 117 aa, Zea mays subsp. mays
  misc_feature (1)..(117): Ceres Seq. ID no. 13624162
  misc_feature (54)..(54): Xaa is any aa, unknown or other
MAEVEQQQDTPKLFNRWTFDDVQVNDISLNDYLAVNATKHAMYLPHTAGRYSKXAVPQGAVPDRRAPHKLPHDARAQQRQEGHGCPHHQAYPGDHSPAHRCQPHPGRRRRDHQQWTP

SEQ ID NO: 26857 - DNA, 2758 bp, Zea mays subsp. mays
  misc_feature (1)..(2758): Ceres Seq. ID no. 13624481
tccctttccgcgcgcgctccccaaggtgagatcagcatctccgtctcttccccgccgctcctcactcccctaccgccacccctaaaactagccccattcccttaccagcgtccgatcacactcctcggtcccacgcttggatggattccgtcggtacaaatcggcccccgctgcgccccgttgccgccgcagctactcgacgcggcgcgcttcctgccccccctagccacctcgggctcggctaatcgttttgcggagactaagcttgggatcgcgtcagggtgtggaggagggggagggtattttggaaaggtacagggatttgatgccttgcggagtaccacgacgaaagttcagagcgggaaggcggggaggagtgtgaccaaggaaatgggacacacttcatctggcaatgaagtgcccttgaaatattcttcaggcaaagccttccccctaggagtgtcacaagttgacgatgggttaaattttgcaatattctcacaacatgcttcttctgtcaccctttgcttgaattttcctgagagaggcaaccaagatgatgtggacattgtagagtttgctttagaccgccagaggaataaaactggagatatatggcatgtgtcagtggagggtttgcctgcttctggtgttctttatgggtatcgcattaatggtcctcaagggtggcaacaaggtcatagatttgatgacagcgttattcttctggacccctatgcaaaattagtttatggtcgaaagcactttgctgttgaaaaagagaagccaagccagcttttcggaacatatgatttcgatagctcaccttttgactggggtgacaattataagcttcctaatttgcctgagacagatcttgttatatatgaaatgaatgtccgtgccttcactgccgacgagtcaagcaggcttgctccagctattcgtggaagttaccttggtgtcattgataaaattcctcatttgctggaacttggcgttaatgcagtggaactacttcctgtttttgagttcgatgagctggagttgaagaggttccctaacccaagggaccacatggtaaatacatggggatattctacaatcaacctttttgcgcccatgagtcgttatgctagtgctggtggtggacctgtggctgcttccaaagagctcaaacagatggtcaaggcatttcataattctggaattgaggttattttggatgtagtttacaaccatacaaatgaagctgatgatgttaacccttacatgacttcctttcgtggtattgataacaaggtctattacatgttagatctcaacaacagtgcacagctgctgaacttctcgggttgcgggaatacactaaactgcaaccatcctgttgtcaaggagcttgtacttgacagtttaagacattgggttaaggagtatcacatagatggatttcggtttgaccttgcgagtgttctttgtcgtggaccagatggcagtcctcttgatgcacctccacttattaaggaaattgccaaagactctgtattgtctagatgtaagatcattgctgaaccttgggactgtggtggcctttatctagtagggaggttccctaattgggacaggtgggctgaatggaacgggaagtacagagatgatattcgaagatttattaagggagatcctggtatgaagggggtgtttgcaactcgcgtttctggttctgcagatctctaccaggtgaacaatcggaagccttaccatagtgtgaactttgtaattgctcatgatggatttactttatgcgaccttgtttcgtataactccaagcacaatgatgcaaatggagaaggtggtcgtgatgggtgcaatgacaactacagctggaactgtggcattgaaggagaaacaaatgatttgaatgtgctaagtcttcgttcaaggcaaatgaagaacttccatgtggcattaatgatttcccagggtactccaatgatgctgatgggagatgaatatggtcacacacgttatggaaacaacaatagctatggacatgatactcacataaataattttcagtggggccagttggaagaaaggaaggatggccatttcaggtttttctcagagatgatcaagtttcggcataaccatcctatattgagacgagacaggtttctcaacaaaaatgatgtcacctggcatgaaaatcgttgggagaaccaggacagcaaatttttggcatttacgatacatgatcacagttctggtggagacatctatttggcattcaatgctcatgagtattttgtggatgctgtaattcccccaccaccacaccataaatcttggagtcgtgtggtggataccaacctggaatcaccaaaggatattgtcccagaaggggtgccattcacaggttcagggtacaggattgctccttactcttccatcttgcttaaggcaaagccttagaaagttagaatggctgagacaagtcattctcaagagaagccatggttgcaacaagtatactcatccagatattgtccataagacaataacaacatggcaaacacaagtaatttccacacatcgtagccagaagagcctttcattaggggaagctagtattcacagtctccttaatattttagcattcctttgttccatatttgtgttgtacttagattctattaagctatttctttcatcgaacatatgttggacaatggatgccccagaaccttttgctttc

SEQ ID NO: 26858 - protein, 824 aa, Zea mays subsp. mays
  misc_feature (1)..(824): Ceres Seq. ID no. 13624482
SLSARAPQGEISISVSSPPLLTPLPPPLKLAPFPYQRPITLLGPTLGWIPSVQIGPRCAPLPPQLLDAARFLPPLATSGSANRFAETKLGIASGCGGGGGYFGKVQGFDALRSTTTKVQSGKAGRSVTKEMGHTSSGNEVPLKYSSGKAFPLGVSQVDDGLNFAIFSQHASSVTLCLNFPERGNQDDVDIVEFALDRQRNKTGDIWHVSVEGLPASGVLYGYRINGPQGWQQGHRFDDSVILLDPYAKLVYGRKHFAVEKEKPSQLFGTYDFDSSPFDWGDNYKLPNLPETDLVIYEMNVRAFTADESSRLAPAIRGSYLGVIDKIPHLLELGVNAVELLPVFEFDELELKRFPNPRDHMVNTWGYSTINLFAPMSRYASAGGGPVAASKELKQMVKAFHNSGIEVILDVVYNHTNEADDVNPYMTSFRGIDNKVYYMLDLNNSAQLLNFSGCGNTLNCNHPVVKELVLDSLRHWVKEYHIDGFRFDLASVLCRGPDGSPLDAPPLIKEIAKDSVLSRCKIIAEPWDCGGLYLVGRFPNWDRWAEWNGKYRDDIRRFIKGDPGMKGVFATRVSGSADLYQVNNRKPYHSVNFVIAHDGFTLCDLVSYNSKHNDANGEGGRDGCNDNYSWNCGIEGETNDLNVLSLRSRQMKNFHVALMISQGTPMMLMGDEYGHTRYGNNNSYGHDTHINNFQWGQLEERKDGHFRFFSEMIKFRHNHPILRRDRFLNKNDVTWHENRWENQDSKFLAFTIHDHSSGGDIYLAFNAHEYFVDAVIPPPPHHKSWSRVVDTNLESPKDIVPEGVPFTGSGYRIAPYSSILLKAKP

SEQ ID NO: 26859 - protein, 694 aa, Zea mays subsp. mays
  misc_feature (1)..(694): Ceres Seq. ID no. 13624483
MGHTSSGNEVPLKYSSGKAFPLGVSQVDDGLNFAIFSQHASSVTLCLNFPERGNQDDVDIVEFALDRQRNKTGDIWHVSVEGLPASGVLYGYRINGPQGWQQGHRFDDSVILLDPYAKLVYGRKHFAVEKEKPSQLFGTYDFDSSPFDWGDNYKLPNLPETDLVIYEMNVRAFTADESSRLAPAIRGSYLGVIDKIPHLLELGVNAVELLPVFEFDELELKRFPNPRDHMVNTWGYSTINLFAPMSRYASAGGGPVAASKELKQMVKAFHNSGIEVILDVVYNHTNEADDVNPYMTSFRGIDNKVYYMLDLNNSAQLLNFSGCGNTLNCNHPVVKELVLDSLRHWVKEYHIDGFRFDLASVLCRGPDGSPLDAPPLIKEIAKDSVLSRCKIIAEPWDCGGLYLVGRFPNWDRWAEWNGKYRDDIRRFIKGDPGMKGVFATRVSGSADLYQVNNRKPYHSVNFVIAHDGFTLCDLVSYNSKHNDANGEGGRDGCNDNYSWNCGIEGETNDLNVLSLRSRQMKNFHVALMISQGTPMMLMGDEYGHTRYGNNNSYGHDTHINNFQWGQLEERKDGHFRFFSEMIKFRHNHPILRRDRFLNKNDVTWHENRWENQDSKFLAFTIHDHSSGGDIYLAFNAHEYFVDAVIPPPPHHKSWSRVVDTNLESPKDIVPEGVPFTGSGYRIAPYSSILLKAKP

SEQ ID NO: 26860 - protein, 527 aa, Zea mays subsp. mays
  misc_feature (1)..(527): Ceres Seq. ID no. 13624484
MNVRAFTADESSRLAPAIRGSYLGVIDKIPHLLELGVNAVELLPVFEFDELELKRFPNPRDHMVNTWGYSTINLFAPMSRYASAGGGPVAASKELKQMVKAFHNSGIEVILDVVYNHTNEADDVNPYMTSFRGIDNKVYYMLDLNNSAQLLNFSGCGNTLNCNHPVVKELVLDSLRHWVKEYHIDGFRFDLASVLCRGPDGSPLDAPPLIKEIAKDSVLSRCKIIAEPWDCGGLYLVGRFPNWDRWAEWNGKYRDDIRRFIKGDPGMKGVFATRVSGSADLYQVNNRKPYHSVNFVIAHDGFTLCDLVSYNSKHNDANGEGGRDGCNDNYSWNCGIEGETNDLNVLSLRSRQMKNFHVALMISQGTPMMLMGDEYGHTRYGNNNSYGHDTHINNFQWGQLEERKDGHFRFFSEMIKFRHNHPILRRDRFLNKNDVTWHENRWENQDSKFLAFTIHDHSSGGDIYLAFNAHEYFVDAVIPPPPHHKSWSRVVDTNLESPKDIVPEGVPFTGSGYRIAPYSSILLKAKP

SEQ ID NO: 26861 - DNA, 1438 bp, Zea mays subsp. mays
  misc_feature (1)..(1438): Ceres Seq. ID no. 13624551
cagacggactcacagctcgcagcacctgcaccacttgacaaccagccagctagctaaccaaccggcggagccaagaacaagcaagagacaacttgccctgtccaggcagcatgtgcaactccaacgtcaagtccgcgggcgtcgcccagatcgacggccgcccggtgctgcagccggcgggcaaccgcgtggcggcgccggacgccgcccgcccgctcaagaagtccctgcacaagtccttctccatgccgccttcctacgacaacaatgccaccgtgcccgcccgtcccgcccctgccgagaacacccgtgcggcgccggcgccgccttctctgctgcctcctacgacgccggccccggccccggccgccgcgagggcgaccaaggcggcgggcgccgtgcccgcggagaagcccaggtccaaggccaggaagcccggcgccgtgctgccggtggcgacgttcgcggcgccagaggcgttcgagccggcggggagcatcgccgcggcgcggcgggagcatgccgcgcaggcgcaggcgcagcgcaagtcgcggatcgcgcactacggccgcaccgcgtccttctcccgggtggagggccgagtcggcgccaccgccacggccgagccggccgtcccagcctcccccaccaccgggctcgacgagaagcgctgtagcttcatcacgccctactctgaccccttgtatgtggcgtaccacgacgaggagtggggagtgcccgtgcacgacgacgagttgctgttcgagatgctcacactgtctggcgtgcaagtcggggccgattggacttccatcctcaagaaaagacacgtctacagggaggcgttctccggcttcgacgtggatgcggtcgccaagtacaccgagaagcagatggcgtcgctgagcgccgactacgggctggatttgggcaccgtcagaggaaccgtcaacaacgcctgccggattcttgaggtgcggagggacttttgctcgctggacaagtacgtgtgggcgttcgtgaacaacaagccgctgtcgccgagctacaagtacagccggaagatcccggtgaagacgtccaagtcggagtccatcagcaaggacatggtccggcgcggcttccgcttcgtcggccccactgtcatccactccttcatggaggcggtcgggctcaccaacgaccacctcgtctcgtgcccgcgcccacgcgtctgctccgccgccgcccgcgtaaataactgattctgctgacgaccaccaagcaaaacacaagagggaattatctaaggacaaccaagacgagagagagagagagaggtagcagtagtaatatacaaaagagagtgttggcggtttgcatgtgtgtatgatgacccagtgtgcttgtgtagattaattacggcctctgattagcgaattgtttaaacacaataaag

SEQ ID NO: 26862 - protein, 377 aa, Zea mays subsp. mays
  misc_feature (1)..(377): Ceres Seq. ID no. 13624552
MCNSNVKSAGVAQIDGRPVLQPAGNRVAAPDAARPLKKSLHKSFSMPPSYDNNATVPARPAPAENTRAAPAPPSLLPPTTPAPAPAAARATKAAGAVPAEKPRSKARKPGAVLPVATFAAPEAFEPAGSIAAARREHAAQAQAQRKSRIAHYGRTASFSRVEGRVGATATAEPAVPASPTTGLDEKRCSFITPYSDPLYVAYHDEEWGVPVHDDELLFEMLTLSGVQVGADWTSILKKRHVYREAFSGFDVDAVAKYTEKQMASLSADYGLDLGTVRGTVNNACRILEVRRDFCSLDKYVWAFVNNKPLSPSYKYSRKIPVKTSKSESISKDMVRRGFRFVGPTVIHSFMEAVGLTNDHLVSCPRPRVCSAAARVNN

SEQ ID NO: 26863 - protein, 332 aa, Zea mays subsp. mays
  misc_feature (1)..(332): Ceres Seq. ID no. 13624553
MPPSYDNNATVPARPAPAENTRAAPAPPSLLPPTTPAPAPAAARATKAAGAVPAEKPRSKARKPGAVLPVATFAAPEAFEPAGSIAAARREHAAQAQAQRKSRIAHYGRTASFSRVEGRVGATATAEPAVPASPTTGLDEKRCSFITPYSDPLYVAYHDEEWGVPVHDDELLFEMLTLSGVQVGADWTSILKKRHVYREAFSGFDVDAVAKYTEKQMASLSADYGLDLGTVRGTVNNACRILEVRRDFCSLDKYVWAFVNNKPLSPSYKYSRKIPVKTSKSESISKDMVRRGFRFVGPTVIHSFMEAVGLTNDHLVSCPRPRVCSAAARVNN

SEQ ID NO: 26864 - protein, 224 aa, Zea mays subsp. mays
  misc_feature (1)..(224): Ceres Seq. ID no. 13624554
RRTHSSQHLHHLTTSQLANQPAEPRTSKRQLALSRQHVQLQRQVRGRRPDRRPPGAAAGGQPRGGAGRRPPAQEVPAQVLLHAAFLRQQCHRARPSRPCREHPCGAGAAFSAASYDAGPGPGRREGDQGGGRRARGEAQVQGQEARRRAAGGDVRGARGVRAGGEHRRGAAGACRAGAGAAQVADRALRPHRVLLPGGGPSRRHRHGRAGRPSLPHHRARREAL

SEQ ID NO: 26865 - DNA, 549 bp, Zea mays subsp. mays
  misc_feature (1)..(549): Ceres Seq. ID no. 13624847
gctagcttttgtctctgtgtcgccttcctcctcctaagtttgtaaacctaattttgagcaaagttcatagcttttatcttcctcatggccactcgtcttcagtttgagaataactgtgaagttggagtcttttcaaaactcactaacgcctattgcttagtcgctattggaggctctgagaatttttacagtgcttttgagtcggagttagctgatgttatccctatcgttaagacctctcttggtggaacacgaatcattggccgtctttgcgctggaaacaagaatggtcttcttgtccctcatacaactactgaccaagagcttcagcacttgaggaacagtttacctgatgcagttgtggtccagagaatcgaggaacgtctgtctgctcttggaaattgcattgcctgcaatgaccatgtcgcccttgctcacaccgatcttgacaaggaaactgaggagataatagcagatgtgcttggtgttgaagttttccgtcagacaattgcaggcaacattcttgttggcagttactgtgccttgtcc

SEQ ID NO: 26866 - protein, 155 aa, Zea mays subsp. mays
  misc_feature (1)..(155): Ceres Seq. ID no. 13624848
MATRLQFENNCEVGVFSKLTNAYCLVAIGGSENFYSAFESELADVIPIVKTSLGGTRIIGRLCAGNKNGLLVPHTTTDQELQHLRNSLPDAVVVQRIEERLSALGNCIACNDHVALAHTDLDKETEEIIADVLGVEVFRQTIAGNILVGSYCALS

SEQ ID NO: 26867 - DNA, 596 bp, Zea mays subsp. mays
  misc_feature (1)..(596): Ceres Seq. ID no. 13625083
acagtgcctctcgctcactgactgactactgtaataccagagatcgaacaacttggtcctgcagctcaagaagagagttttgtgcatttgggggccgggggcaagagagagagagagagccatggcggcggaccagcagccgcagctgcaggaggagatgaacgacgctgccggcggcggcctcaggctgcctccagggttccgcttccacccgagcgacttcgagattgtcagcttctacctcaccaacaaggtgctcaacacgcgcttcacctgcaccgccatcacggaggccgacctaaacaagattgagccatgggacctcccgagcaaggcgaagatgggcgagaaagagtggtacttcttctaccagaaggaccgcaagtacccgacggggctgagggcgaaccgggccaccgaggccggttactggaaggcgacgggcaaggacaaggaggtctacaacgccgcggaaggggtggcggtactggtcggcatgaagaagacgctcgtcttctacaggggcagggctcccaggggtgacaagacaaactgggtcatgcacgagtacaggctcgaaggcagcggcaggctcc

SEQ ID NO: 26868 - protein, 158 aa, Zea mays subsp. mays
  misc_feature (1)..(158): Ceres Seq. ID no. 13625084
MAADQQPQLQEEMNDAAGGGLRLPPGFRFHPSDFEIVSFYLTNKVLNTRFTCTAITEADLNKIEPWDLPSKAKMGEKEWYFFYQKDRKYPTGLRANRATEAGYWKATGKDKEVYNAAEGVAVLVGMKKTLVFYRGRAPRGDKTNWVMHEYRLEGSGRL

SEQ ID NO: 26869 - protein, 146 aa, Zea mays subsp. mays
  misc_feature (1)..(146): Ceres Seq. ID no. 13625085
MNDAAGGGLRLPPGFRFHPSDFEIVSFYLTNKVLNTRFTCTAITEADLNKIEPWDLPSKAKMGEKEWYFFYQKDRKYPTGLRANRATEAGYWKATGKDKEVYNAAEGVAVLVGMKKTLVFYRGRAPRGDKTNWVMHEYRLEGSGRL

SEQ ID NO: 26870 - protein, 85 aa, Zea mays subsp. mays
  misc_feature (1)..(85): Ceres Seq. ID no. 13625086
MGEKEWYFFYQKDRKYPTGLRANRATEAGYWKATGKDKEVYNAAEGVAVLVGMKKTLVFYRGRAPRGDKTNWVMHEYRLEGSGRL

SEQ ID NO: 26871 - DNA, 538 bp, Zea mays subsp. mays
  misc_feature (1)..(538): Ceres Seq. ID no. 13625118
attgcgcacaccttgatgctgggcatgagcaggacggggttggccggagcggcgctgcgggtggcgctgacggcgctgctgccgctggtcctgccggcgtactacgtgtacaagctgaccacgtacctcctcggcgccgtcttccccgaggacgtcgccggcaaggtggtactcatcaccggcgcctcctccggcatcggcgagcacctggcctatgagtacgcgaagcggggagcctacctggnnnnnggtggcgaggagggaggcgagcctccgcgaggtcggcgacgtcgcgctggggctgggctcgccgggcgtcctcgtcctcccggctgacgtctccaagcctcgggactgcgagggcttcatcgacgacacgattagctacttcggtagactggatcacctggtgaacaacgcgtccatctggcaagtgtgcaagttcgaagagatccaggacgtcaggcacttgagagccctgatggacatcaacttctggggccacgtgtacccaacccggctcgccatccctcacctc

SEQ ID NO: 26872 - protein, 111 aa, Zea mays subsp. mays
  misc_feature (1)..(111): Ceres Seq. ID no. 13625119
  misc_feature (82)..(82): Xaa is any aa, unknown or other
  misc_feature (83)..(83): Xaa is any aa, unknown or other
IAHTLMLGMSRTGLAGAALRVALTALLPLVLPAYYVYKLTTYLLGAVFPEDVAGKVVLITGASSGIGEHLAYEYAKRGAYLXXGGEEGGEPPRGRRRRAGAGLAGRPRPPG

SEQ ID NO: 26873 - protein, 108 aa, Zea mays subsp. mays
  misc_feature (1)..(108): Ceres Seq. ID no. 13625120
  misc_feature (11)..(11): Xaa is any aa, unknown or other
  misc_feature (12)..(12): Xaa is any aa, unknown or other
MSTRSGEPTWXXVARREASLREVGDVALGLGSPGVLVLPADVSKPRDCEGFIDDTISYFGRLDHLVNNASIWQVCKFEEIQDVRHLRALMDINFWGHVYPTRLAIPHL

SEQ ID NO: 26874 - protein, 106 aa, Zea mays subsp. mays
  misc_feature (1)..(106): Ceres Seq. ID no. 13625121
  misc_feature (77)..(77): Xaa is any aa, unknown or other
  misc_feature (78)..(78): Xaa is any aa, unknown or other
MLGMSRTGLAGAALRVALTALLPLVLPAYYVYKLTTYLLGAVFPEDVAGKVVLITGASSGIGEHLAYEYAKRGAYLXXGGEEGGEPPRGRRRRAGAGLAGRPRPPG

SEQ ID NO: 26875 - DNA, 916 bp, Zea mays subsp. mays
  misc_feature (1)..(916): Ceres Seq. ID no. 13625767
ggttggcgagaaagagcagagggacaccgaaacagagaggagcagaggggagcgacgacaggtcagcggagatggaagcagcggcaggaggagtggaggcggagggggtgatgagggtgctggtngtggacgactcccccgtcgaccgccgggggagtcgtcacgcacgcactcctcatcttatcccccgcctcctccggtcctcccgccgctgttgctcacttctgagtcccgacgcacgagctcccaagagctagccatggcgtccaccaccctctcctccgccttcaccctcctatcccgcccctccacctccccgtgccccgccgcctcgctcccgaggtcctcccacgccgcgccccacatccgccggggccgccgcgccgtcgccgtcgcgtgcaccgccaccgagtcccccaagatcctggagctcggggacgccatcgccgggctcacgctcgaggaggcccgcagcctcgtcgaccacctccaggagcggctcggcgtcaccgccgcggccttcgcgccggccgccgtcgtcgcggcgcccggggcgggcggcggggccgcggccgaggaggaggcccccgtcgagaagacggagttcgacgtgatgatcgaagaggtgcccagcagcgcgcgtatcgccactatcaaggtggtgcgcgcgctcaccagcctcgcgctcaaggaggccaaggaccttatcgagggtctccccaagaaggtcaaggaggccgtcagcaaggacgaggccgaggacgccaagaagcagctcgaggaggtcggcgccaaggtgtctatcgcgtgacactaggtatacgaggactcctttttttttttctttagtttcttttgtttgcatccccaatctcttgtatccccactatcgttcgtaaggaattgctgtttcatg

SEQ ID NO: 26876 - protein, 269 aa, Zea mays subsp. mays
  misc_feature (1)..(269): Ceres Seq. ID no. 13625768
  misc_feature (42)..(42): Xaa is any aa, unknown or other
VGEKEQRDTETERSRGERRQVSGDGSSGRRSGGGGGDEGAGXGRLPRRPPGESSRTHSSSYPPPPPVLPPLLLTSESRRTSSQELAMASTTLSSAFTLLSRPSTSPCPAASLPRSSHAAPHIRRGRRAVAVACTATESPKILELGDAIAGLTLEEARSLVDHLQERLGVTAAAFAPAAVVAAPGAGGGAAAEEEAPVEKTEFDVMIEEVPSSARIATIKVVRALTSLALKEAKDLIEGLPKKVKEAVSKDEAEDAKKQLEEVGAKVSIA

SEQ ID NO: 26877 - protein, 183 aa, Zea mays subsp. mays
  misc_feature (1)..(183): Ceres Seq. ID no. 13625769
MASTTLSSAFTLLSRPSTSPCPAASLPRSSHAAPHIRRGRRAVAVACTATESPKILELGDAIAGLTLEEARSLVDHLQERLGVTAAAFAPAAVVAAPGAGGGAAAEEEAPVEKTEFDVMIEEVPSSARIATIKVVRALTSLALKEAKDLIEGLPKKVKEAVSKDEAEDAKKQLEEVGAKVSIA

SEQ ID NO: 26878 - DNA, 2628 bp, Zea mays subsp. mays
  misc_feature (1)..(2628): Ceres Seq. ID no. 13627034
atcacttgttcttcttcgagctaccagctgcctatcatggtcatcatggtcgagctgctgcccccacttgcctctctaatcctcagtcctctgtagagctggtcctcctacccctcactttgccttgagcaatttggtttctagcatctgtggggtggcttgtgggtggtcgccttggactgctccttcctccacctgccgcgccggcagggcgacgaggtccaaaagcctggtggggctcatcatcaagaacaccgaagcggcgagagtggcatgggatctgatccgaggcggagctcgaggagctgagggctgtacgtgctcttggatccggtagagatcacgtgccctcgtgttcgtccccggccgccgcgatggggaacacgtgcgtcggccccagcatcaccatgaacggcttcttccagtccgtgtccacggcgctgtggaagacgccgcaggaaggcgacgcgctgcccgccgccgccaatggccccggcgggccagccggggccggttcgcagtcggcgctgccgaagccggcgtccgacgtgcaccacgtcgccgtgcagagcgaggcccctgagcccgtcaagatcgccgcctaccactcggagccggcgcccgccgtgcggagcgaggcccctgagcccgtcaagatcgccgcctctcactcggagccggcgcccatggccgccaagcctggtggcgccgccgccaacgccagccccagccccagccccaggccgcgtccgcaggtgaagcgcgtgtcgagcgccgggctgctgctggggtcggtgctgaggcgcaagacggagaacctcaaggacaagtacagcctggggcggcggctcgggcaggggcagttcggcacgacgcacctgtgcgtggagcgcgccacggggaaggagctcgcgtgcaagtcgatcctgaagcgcaagctgggcagcgacgacgacgtggaggacgtgcggcgggagatccagataatgcaccacctggcgggccaccccagcgtggtcggcatccgcggcgcgtacgaggacgccgtggccgtgcacctcgtcatggagctctgcggcggcggcgagctgttcgaccggatcgtgcggaggggccactacaccgagaggaaggccgccgagctcgcccgcgtcatcgtcggcgtcgtggaggcgtgccactccatgggcgtcatgcaccgggacctcaagcccgagaacttcctcttcgctgaccactcggaggaggccgctctcaagaccattgacttcggtctctccatcttctttcgccctggccaaattttcaccgacgtcgtgggcagcccttactacgtggcgccggaggtactgaagaagagatacgggccagaggcggacgtctggagcgctggcgtaatcatctacatcctgctgtgcggagtgccgccattctgggcagagaacgagcagggcatattcgaggaggttctgcacgggaggctggacttcgagtcggagccgtggcccagcatctccgacggcgccaaggatctcgtgaggaggatgcttgtcagggacccgaggaagagactgaccgctcacgaagttctacggcatccgtgggttcaggtcggtggagtggctcctgacaggccgctggactcggccgttctgtctcgcatgaagcagttctcggctatgaataagctgaagaagatggctcttagggtgatcgccgagaacctgtcggaggacgagatcgccgggctgagggagatgttcaagatgatcgacgcggacaacagcgggcagatcacgttcgaggagctcaaggttggcctggagaaggtgggcgccaacctgcaggagtcggagatctacgcgctcatgcaagccgcggacgtggacaacaacggcacgatcgactacggcgagttcatcgcggccacgctgcacctgaacaaggtggagcgggaggaccacctgttcgcggcgttccagtacttcgacaaggacggcagcggctacatcaccgccgacgagctgcaggtggcgtgcgaggagttcggcctgggcgacgtccagctggaggacttgatcggggaagtcgaccaggacaacgacgggcgcatagactacaacgagttcgtggcgatgatgcagaagccgacggtggggggatcccgaagaaggccgatctgcagaacagcttcagcatcgggttcagcatcgggttcagggaggcgctcaggatggcctagacctctgtgtctctggcttccctgctgcctgcgtgtaggtgtagatgattgaattgagtgggtgtcagtgcagttgctgtagagaccaccgtagcatagagatctgatgagatgcgagttgaggcgggccaggagacgtgtacatgtgccatagccatacaggcggccctgcatcggtttgatttgattgcttggttccaaacggtcctgtgtttcatgtcgcgtgcacatgtgccatatctgcctgctgctgctactactgctatatgccgtgcacgtgcacgtcggtgacctgaaacttggctgtccggcggtccggccaccgagctctaaggctatccatagcggtttttctaaatttttatccttatatcattttttgcgtc

SEQ ID NO: 26879 - protein, 639 aa, Zea mays subsp. mays
  misc_feature (1)..(639): Ceres Seq. ID no. 13627035
MGNTCVGPSITMNGFFQSVSTALWKTPQEGDALPAAANGPGGPAGAGSQSALPKPASDVHHVAVQSEAPEPVKIAAYHSEPAPAVRSEAPEPVKIAASHSEPAPMAAKPGGAAANASPSPSPRPRPQVKRVSSAGLLLGSVLRRKTENLKDKYSLGRRLGQGQFGTTHLCVERATGKELACKSILKRKLGSDDDVEDVRREIQIMHHLAGHPSVVGIRGAYEDAVAVHLVMELCGGGELFDRIVRRGHYTERKAAELARVIVGVVEACHSMGVMHRDLKPENFLFADHSEEAALKTIDFGLSIFFRPGQIFTDVVGSPYYVAPEVLKKRYGPEADVWSAGVIIYILLCGVPPFWAENEQGIFEEVLHGRLDFESEPWPSISDGAKDLVRRMLVRDPRKRLTAHEVLRHPWVQVGGVAPDRPLDSAVLSRMKQFSAMNKLKKMALRVIAENLSEDEIAGLREMFKMIDADNSGQITFEELKVGLEKVGANLQESEIYALMQAADVDNNGTIDYGEFIAATLHLNKVEREDHLFAAFQYFDKDGSGYITADELQVACEEFGLGDVQLEDLIGEVDQDNDGRIDYNEFVAMMQKPTVGGSRRRPICRTASASGSASGSGRRSGWPRPLCLWLPCCLRVGVDD

SEQ ID NO: 26880 - protein, 628 aa, Zea mays subsp. mays
  misc_feature (1)..(628): Ceres Seq. ID no. 13627036
MNGFFQSVSTALWKTPQEGDALPAAANGPGGPAGAGSQSALPKPASDVHHVAVQSEAPEPVKIAAYHSEPAPAVRSEAPEPVKIAASHSEPAPMAAKPGGAAANASPSPSPRPRPQVKRVSSAGLLLGSVLRRKTENLKDKYSLGRRLGQGQFGTTHLCVERATGKELACKSILKRKLGSDDDVEDVRREIQIMHHLAGHPSVVGIRGAYEDAVAVHLVMELCGGGELFDRIVRRGHYTERKAAELARVIVGVVEACHSMGVMHRDLKPENFLFADHSEEAALKTIDFGLSIFFRPGQIFTDVVGSPYYVAPEVLKKRYGPEADVWSAGVIIYILLCGVPPFWAENEQGIFEEVLHGRLDFESEPWPSISDGAKDLVRRMLVRDPRKRLTAHEVLRHPWVQVGGVAPDRPLDSAVLSRMKQFSAMNKLKKMALRVIAENLSEDEIAGLREMFKMIDADNSGQITFEELKVGLEKVGANLQESEIYALMQAADVDNNGTIDYGEFIAATLHLNKVEREDHLFAAFQYFDKDGSGYITADELQVACEEFGLGDVQLEDLIGEVDQDNDGRIDYNEFVAMMQKPTVGGSRRRPICRTASASGSASGSGRRSGWPRPLCLWLPCCLRVGVDD

SEQ ID NO: 26881 - protein, 535 aa, Zea mays subsp. mays
  misc_feature (1)..(535): Ceres Seq. ID no. 13627037
MAAKPGGAAANASPSPSPRPRPQVKRVSSAGLLLGSVLRRKTENLKDKYSLGRRLGQGQFGTTHLCVERATGKELACKSILKRKLGSDDDVEDVRREIQIMHHLAGHPSVVGIRGAYEDAVAVHLVMELCGGGELFDRIVRRGHYTERKAAELARVIVGVVEACHSMGVMHRDLKPENFLFADHSEEAALKTIDFGLSIFFRPGQIFTDVVGSPYYVAPEVLKKRYGPEADVWSAGVIIYILLCGVPPFWAENEQGIFEEVLHGRLDFESEPWPSISDGAKDLVRRMLVRDPRKRLTAHEVLRHPWVQVGGVAPDRPLDSAVLSRMKQFSAMNKLKKMALRVIAENLSEDEIAGLREMFKMIDADNSGQITFEELKVGLEKVGANLQESEIYALMQAADVDNNGTIDYGEFIAATLHLNKVEREDHLFAAFQYFDKDGSGYITADELQVACEEFGLGDVQLEDLIGEVDQDNDGRIDYNEFVAMMQKPTVGGSRRRPICRTASASGSASGSGRRSGWPRPLCLWLPCCLRVGVDD

SEQ ID NO: 26882 - DNA, 955 bp, Zea mays subsp. mays
  misc_feature (1)..(955): Ceres Seq. ID no. 13627624
gaaccgcacaaacgcgctcggcgcttccccacccaaaaaggaaaaccaaccaccactcccaccaccctccgcctccgcctgcgccacagctgccgattcgaaagccctcgtcctgacccctcgcaaaaccctagctccaaccaccatgaagggcaaggccaacgcctccaagaaggatgaggccaggctccgggccggcggcggcggcgccggaaagcgcaagaaggccgccgcgagcggcaagcccaagcgccctccctccgccttcttcgtcttcatgtctgaattcaggcaggagtaccaggcgcagcaccctggcaacaagagcgttgcggccgtgagcaaggcagcaggggaaaagtggcgctctatgtcagagcaagagaagcaaccctatgtggaccaagctgggcagaagaagcaggactatgagaagactaaggcaaatattgagaaggagagcacaagctcaaagaaggctaagactgatgacgacgatggctcgaagtccgaggtcgatgatgaggatggcggtagtgacgaggataacgacgacgacgagtaaatagtatttccgctgttgtgaggtagcaaatcgattgttaggtccccaattagctcactggtttgctatctttaatgttaagttgtttggaacaggtgtttatgaaggggatctattagtttcgtgaggttgttagtttagtgcattagcaaagaaaaagccgaatgctgctagctattatgttgcttttcttttgctaatcacttgtgtcacaactttctgtacctgtttcattgactaatctagtgactagtcagttatgggtttaatgtttggttttggttttatatatttctttgttgcattctgtgcggtctacggaagtcatctgtgctgtatgaatgatgaatatctgcttgtggctcgtttcagtttagtgagtttttgttt

SEQ ID NO: 26883 - protein, 187 aa, Zea mays subsp. mays
  misc_feature (1)..(187): Ceres Seq. ID no. 13627625
NRTNALGASPPKKENQPPLPPPSASACATAADSKALVLTPRKTLAPTTMKGKANASKKDEARLRAGGGGAGKRKKAAASGKPKRPPSAFFVFMSEFRQEYQAQHPGNKSVAAVSKAAGEKWRSMSEQEKQPYVDQAGQKKQDYEKTKANIEKESTSSKKAKTDDDDGSKSEVDDEDGGSDEDNDDDE

SEQ ID NO: 26884 - protein, 139 aa, Zea mays subsp. mays
  misc_feature (1)..(139): Ceres Seq. ID no. 13627626
MKGKANASKKDEARLRAGGGGAGKRKKAAASGKPKRPPSAFFVFMSEFRQEYQAQHPGNKSVAAVSKAAGEKWRSMSEQEKQPYVDQAGQKKQDYEKTKANIEKESTSSKKAKTDDDDGSKSEVDDEDGGSDEDNDDDE

SEQ ID NO: 26885 - protein, 95 aa, Zea mays subsp. mays
  misc_feature (1)..(95): Ceres Seq. ID no. 13627627
MSEFRQEYQAQHPGNKSVAAVSKAAGEKWRSMSEQEKQPYVDQAGQKKQDYEKTKANIEKESTSSKKAKTDDDDGSKSEVDDEDGGSDEDNDDDE

SEQ ID NO: 26886 - DNA, 717 bp, Zea mays subsp. mays
  misc_feature (1)..(717): Ceres Seq. ID no. 13628146
ccaactacggtaactcgtctgctcgcatttcctcccaatccatcccgcctccaaacccgaactccaagtcgccccgcatcgatggcgcccaaggccgagaagaagcccgcggcgaagaagccggcggaggaggagcccgctgccgagaaggcgccggccgggaagaagcccaaggcggagaagcgtgtcccagcaggcaagtccgccggcaaggagggcggcgagggaaagaggggccggaagaagggcaagaagagcgtggagacctacaagatctacatcttcaaggtgctgaagcaggtgcacccggacatcggcatctcctctaaggccatgtccatcatgaactccttcatcaacgacatcttcgagaagctcgccgccgaggccgccaagctcgcgcggtacaacaagaagcccaccatcacctcccgtgagatccagacctccgtgcgcctcgtcctccccggggagctcgccaagcacgccgtctccgagggcaccaaggccgtcaccaagttcacctcgtcctaggctgcgtggcctccgcttgcaggcttccctcgtatgttcgcgtgtcttgctgtagttaggtgctgctgtgtctggtctcctccggtagcaactgttatctgatggaacagtaacaatgcttattgaatccagctagttgcttatttgtggatcctctctctttgttgttggccacctttatct

SEQ ID NO: 26887 - protein, 177 aa, Zea mays subsp. mays
  misc_feature (1)..(177): Ceres Seq. ID no. 13628147
PTTVTRLLAFPPNPSRLQTRTPSRPASMAPKAEKKPAAKKPAEEEPAAEKAPAGKKPKAEKRVPAGKSAGKEGGEGKRGRKKGKKSVETYKIYIFKVLKQVHPDIGISSKAMSIMNSFINDIFEKLAAEAAKLARYNKKPTITSREIQTSVRLVLPGELAKHAVSEGTKAVTKFTSS

SEQ ID NO: 26888 - protein, 150 aa, Zea mays subsp. mays
  misc_feature (1)..(150): Ceres Seq. ID no. 13628148
MAPKAEKKPAAKKPAEEEPAAEKAPAGKKPKAEKRVPAGKSAGKEGGEGKRGRKKGKKSVETYKIYIFKVLKQVHPDIGISSKAMSIMNSFINDIFEKLAAEAAKLARYNKKPTITSREIQTSVRLVLPGELAKHAVSEGTKAVTKFTSS

SEQ ID NO: 26889 - protein, 108 aa, Zea mays subsp. mays
  misc_feature (1)..(108): Ceres Seq. ID no. 13628149
NYGNSSARISSQSIPPPNPNSKSPRIDGAQGREEARGEEAGGGGARCREGAGREEAQGGEACPSRQVRRQGGRRGKEGPEEGQEERGDLQDLHLQGAEAGAPGHRHLL

SEQ ID NO: 26890 - DNA, 1147 bp, Zea mays subsp. mays
  misc_feature (1)..(1147): Ceres Seq. ID no. 13628192
aacccctgcaaaaacccgccactctcagatccgcacagcgacgcccgccagccagacccgatcccctccctcgctagggttttcgtccccgcgccgccgcgctcccggatcccaccgaaacaaccatggccggcggtcccgcggcggtgtcgttcctgaccaacatcgcgaaggtggctgcggggctcggagccgcggcctcgctcgcctccgcgtcgctctacaccgtcgacggcggcgagcgcgccgtcatcttcgaccgtttccgcggggtgctcccggagaccgtcggcgagggcacccatttcctcgtgccctggctgcagaagcccttcatcttcgacatccgcacgcgcccgcacaacttctcctccaactcggggaccaaggacctgcagatggtcaacctcacgctccgtctcctctcccgccccgacgtccagcacctccccaccatcttcacctccctcggactcgagtacgacgacaaagtgctcccctccatcggcaacgaggtgctcaaggccgtcgtcgcccagttcaatgccgaccagctcctcaccgaccgcccccacgtctccgccctcgtccgcgacgctctcatccgccgcgcccgcgagttcaacatcatcctcgacgacgtcgccatcacccacctctcctatggtatcgagttctcgctggccgttgagaagaagcaggtcgcgcagcaggaggccgagcgctccaagttcctcgtcgccaaggcggagcaggagaggcgggcggccatcgtgcgcgctgagggagagagcgagtccgcgcgcctcatctctgaggccacggcgatggctgggacagggctgatcgagctcaggaggatcgaggcggccaaggagattgccgcagagctggctcgctcaccgaatgtggcatacattccttctggggaaaacggaaagatgctgcttggtctcaatgctactggatttggccggtgattcactgtttttttagtctgcttgtgctatgtgctgatgcatgactaaaacggaggttcgaactttgaaggacagtgatatctgctatccttgcttatgttaagttttccttgtcttggaactaaatgtgtctgttgtgctccaaataagttttggtttttgactgc

SEQ ID NO: 26891 - protein, 284 aa, Zea mays subsp. mays
  misc_feature (1)..(284): Ceres Seq. ID no. 13628193
MAGGPAAVSFLTNIAKVAAGLGAAASLASASLYTVDGGERAVIFDRFRGVLPETVGEGTHFLVPWLQKPFIFDIRTRPHNFSSNSGTKDLQMVNLTLRLLSRPDVQHLPTIFTSLGLEYDDKVLPSIGNEVLKAVVAQFNADQLLTDRPHVSALVRDALIRRAREFNIILDDVAITHLSYGIEFSLAVEKKQVAQQEAERSKFLVAKAEQERRAAIVRAEGESESARLISEATAMAGTGLIELRRIEAAKEIAAELARSPNVAYIPSGENGKMLLGLNATGFGR

SEQ ID NO: 26892 - protein, 229 aa, Zea mays subsp. mays
  misc_feature (1)..(229): Ceres Seq. ID no. 13628194
TPAKTRHSQIRTATPASQTRSPPSLGFSSPRRRAPGSHRNNHGRRSRGGVVPDQHREGGCGARSRGLARLRVALHRRRRRARRHLRPFPRGAPGDRRRGHPFPRALAAEALHLRHPHAPAQLLLQLGDQGPADGQPHAPSPLPPRRPAPPHHLHLPRTRVRRQSAPLHRQRGAQGRRRPVQCRPAPHRPPPRLRPRPRRSHPPRPRVQHHPRRRRHHPPLLWYRVLAGR

SEQ ID NO: 26893 - protein, 193 aa, Zea mays subsp. mays
  misc_feature (1)..(193): Ceres Seq. ID no. 13628195
MVNLTLRLLSRPDVQHLPTIFTSLGLEYDDKVLPSIGNEVLKAVVAQFNADQLLTDRPHVSALVRDALIRRAREFNIILDDVAITHLSYGIEFSLAVEKKQVAQQEAERSKFLVAKAEQERRAAIVRAEGESESARLISEATAMAGTGLIELRRIEAAKEIAAELARSPNVAYIPSGENGKMLLGLNATGFGR

SEQ ID NO: 26894 - DNA, 685 bp, Zea mays subsp. mays
  misc_feature (1)..(685): Ceres Seq. ID no. 13628874
aaacaacagcgaacacatctgcttcgcatttcttcccatcccccttcgcaacccaaaccccaactcgctccgcatcgatggcgcccaaggccgagaagaagcccgcggcgaagaagccggcggaggaggagcccgcggctgagaaggcgcccgccgggaagaagccgaaggcggagaagcgggtccccgctggcaagtccgctgccaaggagggcggcgagggcaagaggggcaggaagaagggcaagaagagcgtggagacctacaagatctacatcttcaaggtgctgaagcaggtgcacccggacattggcatctcctccaaggccatgtcgatcatgaactccttcattaacgatatcttcgagaagctagctgctgaggccgccaagctcgcgcgctataacaagaagccaaccatcacctcccgtgagatacagacttccgtgcgcctcgtccttcccggggagctcgccaagcacgccgtctccgagggcaccaaggccgtcaccaagttcacctcggcctaggctgcgctgccgccgcttgcaggattgtctcctgtgttcacgtgtattgctgtagttaggtgctgctggtttctgtctgttacccatctgtctgtagcaactttgttatctgataggaccgtaatggtgcttatttaacccagctatatgtttct

SEQ ID NO: 26895 - protein, 175 aa, Zea mays subsp. mays
  misc_feature (1)..(175): Ceres Seq. ID no. 13628875
TTANTSASHFFPSPFATQTPTRSASMAPKAEKKPAAKKPAEEEPAAEKAPAGKKPKAEKRVPAGKSAAKEGGEGKRGRKKGKKSVETYKIYIFKVLKQVHPDIGISSKAMSIMNSFINDIFEKLAAEAAKLARYNKKPTITSREIQTSVRLVLPGELAKHAVSEGTKAVTKFTSA

SEQ ID NO: 26896 - protein, 150 aa, Zea mays subsp. mays
  misc_feature (1)..(150): Ceres Seq. ID no. 13628876
MAPKAEKKPAAKKPAEEEPAAEKAPAGKKPKAEKRVPAGKSAAKEGGEGKRGRKKGKKSVETYKIYIFKVLKQVHPDIGISSKAMSIMNSFINDIFEKLAAEAAKLARYNKKPTITSREIQTSVRLVLPGELAKHAVSEGTKAVTKFTSA

SEQ ID NO: 26897 - protein, 96 aa, Zea mays subsp. mays
  misc_feature (1)..(96): Ceres Seq. ID no. 13628877
KQQRTHLLRISSHPPSQPKPQLAPHRWRPRPRRSPRRRSRRRRSPRLRRRPPGRSRRRRSGSPLASPLPRRAARARGAGRRARRAWRPTRSTSSRC

SEQ ID NO: 26898 - DNA, 542 bp, Zea mays subsp. mays
  misc_feature (1)..(542): Ceres Seq. ID no. 13629835
gaagccagagaaaaggttactccgcagaaagcaaaaccctagcccactccggcgcgccaccggccgatggtttcgatgagcaccacgccgaagccgcttgactccgccgtcgtcagcgcagccgttgacggcggggatgagggtggtggtggaggcggtggcgggaagaagcaggcgcacggggcggtgatggcgccgccaccgatggtggtcccggccgcggcgcccgcggccgaggaggaggttcggaaggtcaggaagccgtacaccatcaccaagtcgcgggagagctggacggagccggagcacgacaagttcctcgaggccctgcagctttttgatcgtgattggaagaaaattgaagcatatgttggctcaaagactgttatacagataaggagnnatgcacagaatacctttcctgaaggttcagaagaaatggtacgggcgagcatctgcccccacccaggccaaaacgaaaggcagctcatccatatccacagaaaggcatctaaaaatgtttctcaagctattttatcaca

SEQ ID NO: 26899 - protein, 158 aa, Zea mays subsp. mays
  misc_feature (1)..(158): Ceres Seq. ID no. 13629836
  misc_feature (112)..(112): Xaa is any aa, unknown or other
  misc_feature (113)..(113): Xaa is any aa, unknown or other
MVSMSTTPKPLDSAVVSAAVDGGDEGGGGGGGGKKQAHGAVMAPPPMVVPAAAPAAEEEVRKVRKPYTITKSRESWTEPEHDKFLEALQLFDRDWKKIEAYVGSKTVIQIRXXAQNTFPEGSEEMVRASICPHPGQNERQLIHIHRKASKNVSQAILS

SEQ ID NO: 26900 - protein, 155 aa, Zea mays subsp. mays
  misc_feature (1)..(155): Ceres Seq. ID no. 13629837
  misc_feature (109)..(109): Xaa is any aa, unknown or other
  misc_feature (110)..(110): Xaa is any aa, unknown or other
MSTTPKPLDSAVVSAAVDGGDEGGGGGGGGKKQAHGAVMAPPPMVVPAAAPAAEEEVRKVRKPYTITKSRESWTEPEHDKFLEALQLFDRDWKKIEAYVGSKTVIQIRXXAQNTFPEGSEEMVRASICPHPGQNERQLIHIHRKASKNVSQAILS

SEQ ID NO: 26901 - protein, 117 aa, Zea mays subsp. mays
  misc_feature (1)..(117): Ceres Seq. ID no. 13629838
  misc_feature (71)..(71): Xaa is any aa, unknown or other
  misc_feature (72)..(72): Xaa is any aa, unknown or other
MAPPPMVVPAAAPAAEEEVRKVRKPYTITKSRESWTEPEHDKFLEALQLFDRDWKKIEAYVGSKTVIQIRXXAQNTFPEGSEEMVRASICPHPGQNERQLIHIHRKASKNVSQAILS

SEQ ID NO: 26902 - DNA, 546 bp, Zea mays subsp. mays
  misc_feature (1)..(546): Ceres Seq. ID no. 13633184
atcccaacattctcgttccaacttgaaattcacatccaaatcttctccttcaactatcaccatggccagcatcaaagtccacggagtccccatgtccaccgccaccatgcgcgttctcgccgctctttacgagaaggagctcgagttcgagttgatccccgtcgacatgagagccggcgctcacaagcaggagcctttcctttccctcaaccccttcggtcagatccctgctctccaagacggtgacttaactctattcgagtcacgagccatcacagagtacatagcggatgagtacagtgagaaaggcgagaagcttatgtgcccaggctgcaacaaagtcaaggcactcaccaaggtctggcttaacgttgaaggtcaacagtttgaccctatcgcctctaagatcgccttcgagcgtgtcttcaaaggcatgtttggcatgaccaccgatcctgccgctgtccaagatctcgaaggcaaagctcgtcagggtcttggatatctacgaggcgaggtctccaaatccgagttcctcgcttgtga

SEQ ID NO: 26903 - protein, 181 aa, Zea mays subsp. mays
  misc_feature (1)..(181): Ceres Seq. ID no. 13633185
SQHSRSNLKFTSKSSPSTITMASIKVHGVPMSTATMRVLAALYEKELEFELIPVDMRAGAHKQEPFLSLNPFGQIPALQDGDLTLFESRAITEYIADEYSEKGEKLMCPGCNKVKALTKVWLNVEGQQFDPIASKIAFERVFKGMFGMTTDPAAVQDLEGKARQGLGYLRGEVSKSEFLAC

SEQ ID NO: 26904 - protein, 161 aa, Zea mays subsp. mays
  misc_feature (1)..(161): Ceres Seq. ID no. 13633186
MASIKVHGVPMSTATMRVLAALYEKELEFELIPVDMRAGAHKQEPFLSLNPFGQIPALQDGDLTLFESRAITEYIADEYSEKGEKLMCPGCNKVKALTKVWLNVEGQQFDPIASKIAFERVFKGMFGMTTDPAAVQDLEGKARQGLGYLRGEVSKSEFLAC

SEQ ID NO: 26905 - protein, 151 aa, Zea mays subsp. mays
  misc_feature (1)..(151): Ceres Seq. ID no. 13633187
MSTATMRVLAALYEKELEFELIPVDMRAGAHKQEPFLSLNPFGQIPALQDGDLTLFESRAITEYIADEYSEKGEKLMCPGCNKVKALTKVWLNVEGQQFDPIASKIAFERVFKGMFGMTTDPAAVQDLEGKARQGLGYLRGEVSKSEFLAC

SEQ ID NO: 26906 - DNA, 386 bp, Zea mays subsp. mays
  misc_feature (1)..(386): Ceres Seq. ID no. 13633461
acaacaacgagttaacgaaagccttttatccaagctcaggaaagctcacagtttcgttggatccaatcttagttttatccaagctcagcaatggcttctcgtcagcagcatcctactagctaccacgccggcgagacaaaggcccgtgccgaggagaagacgggtcaagtgatgnnngcggcgcaggagaaaggcagggaggccaagcacaaggcgtccgacgccgccgaccgcgccatggggatgggccacgaccccagggaggcgaccagggagaacgcgcgcgccgccgcgaaccgaatcatggggatgggccacgacgtcgctaagacggccaaggacagggagtagcgggtcaaggacgcggcctccggtgccgatgtccg

SEQ ID NO: 26907 - protein, 86 aa, Zea mays subsp. mays
  misc_feature (1)..(86): Ceres Seq. ID no. 13633462
  misc_feature (29)..(29): Xaa is any aa, unknown or other
MASRQQHPTSYHAGETKARAEEKTGQVMXAAQEKGREAKHKASDAADRAMGMGHDPREATRENARAAANRIMGMGHDVAKTAKDRE

SEQ ID NO: 26908 - protein, 59 aa, Zea mays subsp. mays
  misc_feature (1)..(59): Ceres Seq. ID no. 13633463
  misc_feature (2)..(2): Xaa is any aa, unknown or other
MXAAQEKGREAKHKASDAADRAMGMGHDPREATRENARAAANRIMGMGHDVAKTAKDRE

SEQ ID NO: 26909 - protein, 56 aa, Zea mays subsp. mays
  misc_feature (1)..(56): Ceres Seq. ID no. 13633464
QQRVNESLLSKLRKAHSFVGSNLSFIQAQQWLLVSSILLATTPARQRPVPRRRRVK

SEQ ID NO: 26910 - DNA, 1665 bp, Zea mays subsp. mays
  misc_feature (1)..(1665): Ceres Seq. ID no. 13633473
attaaccgcctctccctcgctcctctcgctcgctcggctcactccctctccaaagcggcagcctcacgcagtcacgcgctccaccacgccacctccctctactcactcatgttgttttccgtccatccgcccaccggttcgtagcccgcgccgcaaaaccctagccccgggaggatcgcggggcgcctccgcggtgccagcgacgtggctcgtttgatccgattgctggtcgagccccgcccctcgctgccgcgcttcgctccggctgtgcagcggcgtgagcaccgagcacactcgcgaatggggaactgctggggtgcgcggatcaaggatgggagccctcaccctggcgcctcaggaatgttctcaaagagtagtggcaaggatgggagtaggcttagcggctgtagtagtcgagcctcttcagcttctatgccaccaagtgcgaagactgaatgtgaaatcctgcaatccgccaatgttaagatcttcaccttcaataatctcaaggcagccacaaggaatttccgtcctgatagtgttctaggtgaaggagggtttggatctgtctataaaggatggatagatgagaacacattatcaccttgcagacctggcactggaatcgctgttgctgtgaaaagactcaaccatgagggtttgcaagggcaccgagagtggttggcggaagttaattacctaggtcagttctgtcatcccaaccttgtcaagctgattggatactgcttagaggatgagcaccgactgctagtatacgagttcatgccccgtgggaacatggaaaaccatctgtttaggagaggctcatacttccaacctctgtcatggaaccttagaatgaaggttgcactgggagcagcaaaaggactagcttaccttcatagtgcagaggcaaaagttatttaccgagattttaagacttcgaacatcctccttgacacagattattctgcgaagctttctgattttggattggctaaggatggtcctgtcggtgagaagagccatgtgtccacaagagttatgggaacatatggttatgcagctcctgagtatctttcaacaggtcacctaactgcaaagagcgacatctatagctttggggtagtgcttctggagatgctgtcaggccgccgcgccatcgacaagaaccgcccccagggtgagcacaatcttgtggagtgggctcgaccttacctcacacataagcgcaagatattccggatcctggatacgaggctggaaggtcaatacaatctgaacggtgcacaaacaattgctgcccttgctctcgaatgcctatcctacgaagctaagatgaggccgactatggacgctgtggttgctattctagaagagctccagggctctggtgaagccgagaagaagcttcaagaacccaaggccggaaccaaacaggcacctgctgctgtgagtgctagcatgagcagcagccgcaagcctcgccggaaaagtctgggagacacaaaggagactgttggtggtccagatcccaaaccattggcccattctcgttagcaagggaaagcattgcctggtcattgtcgttagttagactgtagctcgcttgtgaatatgctatggtctgtgtatgtatgttcagagggtaatcgggcttttggc

SEQ ID NO: 26911 - protein, 419 aa, Zea mays subsp. mays
  misc_feature (1)..(419): Ceres Seq. ID no. 13633474
MGNCWGARIKDGSPHPGASGMFSKSSGKDGSRLSGCSSRASSASMPPSAKTECEILQSANVKIFTFNNLKAATRNFRPDSVLGEGGFGSVYKGWIDENTLSPCRPGTGIAVAVKRLNHEGLQGHREWLAEVNYLGQFCHPNLVKLIGYCLEDEHRLLVYEFMPRGNMENHLFRRGSYFQPLSWNLRMKVALGAAKGLAYLHSAEAKVIYRDFKTSNILLDTDYSAKLSDFGLAKDGPVGEKSHVSTRVMGTYGYAAPEYLSTGHLTAKSDIYSFGVVLLEMLSGRRAIDKNRPQGEHNLVEWARPYLTHKRKIFRILDTRLEGQYNLNGAQTIAALALECLSYEAKMRPTMDAVVAILEELQGSGEAEKKLQEPKAGTKQAPAAVSASMSSSRKPRRKSLGDTKETVGGPDPKPLAHSR

SEQ ID NO: 26912 - protein, 399 aa, Zea mays subsp. mays
  misc_feature (1)..(399): Ceres Seq. ID no. 13633475
MFSKSSGKDGSRLSGCSSRASSASMPPSAKTECEILQSANVKIFTFNNLKAATRNFRPDSVLGEGGFGSVYKGWIDENTLSPCRPGTGIAVAVKRLNHEGLQGHREWLAEVNYLGQFCHPNLVKLIGYCLEDEHRLLVYEFMPRGNMENHLFRRGSYFQPLSWNLRMKVALGAAKGLAYLHSAEAKVIYRDFKTSNILLDTDYSAKLSDFGLAKDGPVGEKSHVSTRVMGTYGYAAPEYLSTGHLTAKSDIYSFGVVLLEMLSGRRAIDKNRPQGEHNLVEWARPYLTHKRKIFRILDTRLEGQYNLNGAQTIAALALECLSYEAKMRPTMDAVVAILEELQGSGEAEKKLQEPKAGTKQAPAAVSASMSSSRKPRRKSLGDTKETVGGPDPKPLAHSR

SEQ ID NO: 26913 - protein, 375 aa, Zea mays subsp. mays
  misc_feature (1)..(375): Ceres Seq. ID no. 13633476
MPPSAKTECEILQSANVKIFTFNNLKAATRNFRPDSVLGEGGFGSVYKGWIDENTLSPCRPGTGIAVAVKRLNHEGLQGHREWLAEVNYLGQFCHPNLVKLIGYCLEDEHRLLVYEFMPRGNMENHLFRRGSYFQPLSWNLRMKVALGAAKGLAYLHSAEAKVIYRDFKTSNILLDTDYSAKLSDFGLAKDGPVGEKSHVSTRVMGTYGYAAPEYLSTGHLTAKSDIYSFGVVLLEMLSGRRAIDKNRPQGEHNLVEWARPYLTHKRKIFRILDTRLEGQYNLNGAQTIAALALECLSYEAKMRPTMDAVVAILEELQGSGEAEKKLQEPKAGTKQAPAAVSASMSSSRKPRRKSLGDTKETVGGPDPKPLAHSR

SEQ ID NO: 26914 - DNA, 485 bp, Zea mays subsp. mays
  misc_feature (1)..(485): Ceres Seq. ID no. 13634595
aaagcaccacgcacgatcgccttcgccaaccgcgccgctctctctctctttctctctcgcacgagccgcgccggcgccgccaccacgcgcgcgggagacagagaccacagccgcagccaccgacgggcggaataggaatggtggcgccggggggaggagcaggaggaggtccgttgcggtggccggcggcggaggagcttgacactgtacggaagaaggtggtggagattagtggaagggatgaacaagaggttatggttgctgcttgcccctacagaatttgccctttgggggctcatattgatcatcagggtggagtagtcacagctatgaccataaattatggagtactccttggtttcgttccctctaatggttctgagcaacctttatttttctttcaggttttacttcattctggtcagtttgaaggtgctataagattcagagttgatgacttgcaaaagcctattgataaacctgag

SEQ ID NO: 26915 - protein, 161 aa, Zea mays subsp. mays
  misc_feature (1)..(161): Ceres Seq. ID no. 13634596
STTHDRLRQPRRSLSLSLSHEPRRRRHHARGRQRPQPQPPTGGIGMVAPGGGAGGGPLRWPAAEELDTVRKKVVEISGRDEQEVMVAACPYRICPLGAHIDHQGGVVTAMTINYGVLLGFVPSNGSEQPLFFFQVLLHSGQFEGAIRFRVDDLQKPIDKPE

SEQ ID NO: 26916 - protein, 116 aa, Zea mays subsp. mays
  misc_feature (1)..(116): Ceres Seq. ID no. 13634597
MVAPGGGAGGGPLRWPAAEELDTVRKKVVEISGRDEQEVMVAACPYRICPLGAHIDHQGGVVTAMTINYGVLLGFVPSNGSEQPLFFFQVLLHSGQFEGAIRFRVDDLQKPIDKPE

SEQ ID NO: 26917 - DNA, 1191 bp, Zea mays subsp. mays
  misc_feature (1)..(1191): Ceres Seq. ID no. 13634967
agctccctttaatacctcaccctcctctcctcccttctctggactggccggatctcttccctgcagatcgagaggcactgccacaccaccatcaccccatgctcaacatgatgactgatctgagctgcgggccgtcgtccaaggtcaaggagcaggtggcggcggcgcgacgggctccggcgacaggcaggggcaggggagaggcaagatcgagatcaagcgcatcgagaacacgacgagccggcaggtgaccttctgcaagcgccgcaacggcctgctcaagaaggcgtacgagctctcggtgctctgcgacgccgaggtcgcgctcgtcgtcttctccagccgcggccgcctctacgagtacgccaacaacagtgtgaagtccaccattgagaggtacaagaaggccaacagtgactcctccaactctgggcacagttgcagaagtcaatgcccagtactaccagcaggagtcctccaagctgcgacagatgatccacagcttgcaaaacgcaaacactaggaacatagtgggagattccatccacaccatgggcctcagggatcttaaacaaatggagggcaagctggagaaagccataatcaagattagagctagaaagaatgagctgctatacgctgaagttgactatatgcaaaaaagggagatggatctgcagactgacaacatgtacctgaggagcaagatcgctgagagtaatgaaacggggcagccggcgatgcacatgacgatgggagcgccgccgacgagcgagtacgaccacatggcccctttcgactcgagaaactttctgcaagtgagcatgcctcagcactactcccatcagctgcaacctacaaccctccagctcggatgatgaaatcagcgctatacctggcggcgcccggcccccaatcgagatagatcacgcatgcagttatatcatgtgccaaatcgagatctcaagtaactctacgtacgtttgcttaattattaataattgtgattagtgcaactgttagggtatatatatttgtgagtgccaccactgtgtgcgtgcatttgtacgtgtgaatttagctgttgcatctactactattgtaccctccggccaggccatatcatcagaaacgcgggtttatttacgcatacttatatatatatatgatttgtgtgctttatatagattg

SEQ ID NO: 26918 - protein, 128 aa, Zea mays subsp. mays
  misc_feature (1)..(128): Ceres Seq. ID no. 13634968
MIHSLQNANTRNIVGDSIHTMGLRDLKQMEGKLEKAIIKIRARKNELLYAEVDYMQKREMDLQTDNMYLRSKIAESNETGQPAMHMTMGAPPTSEYDHMAPFDSRNFLQVSMPQHYSHQLQPTTLQLG

SEQ ID NO: 26919 - protein, 108 aa, Zea mays subsp. mays
  misc_feature (1)..(108): Ceres Seq. ID no. 13634969
MGLRDLKQMEGKLEKAIIKIRARKNELLYAEVDYMQKREMDLQTDNMYLRSKIAESNETGQPAMHMTMGAPPTSEYDHMAPFDSRNFLQVSMPQHYSHQLQPTTLQLG

SEQ ID NO: 26920 - protein, 100 aa, Zea mays subsp. mays
  misc_feature (1)..(100): Ceres Seq. ID no. 13634970
MEGKLEKAIIKIRARKNELLYAEVDYMQKREMDLQTDNMYLRSKIAESNETGQPAMHMTMGAPPTSEYDHMAPFDSRNFLQVSMPQHYSHQLQPTTLQLG

SEQ ID NO: 26921 - DNA, 2365 bp, Zea mays subsp. mays
  misc_feature (1)..(2365): Ceres Seq. ID no. 13635021
cgagcaagcagttcgaaacaaggatcgatccaggagcttccagaaggcgaggaggaagagggagaagggcgcgcgcgcgcgcagcgttcaagtggtgctggtgtcggccatggatcgggttcgtggatccgcgttcctgctcggcgtcctgctcgcaggatccctgttcgcgttttcagttgctaaggaggagaccaagaagctcggcactgtgattggtatcgatctcggaaccacctactcctgtgtgggtgtgtacaagaacggtcatgtcgagatcatcgccaatgaccagggtaaccgtatcacaccctcatgggttgccttcaccgatagcgagaggctcatcggtgaggctgccaagaaccaggcagctgtcaaccctgagaggaccatctttgacgtcaagcgtctcatcggaagaaagtttcaggataaggaagtccagagggacatgaaacttgtcccctacaagattattaacaaggatggcaagccatacattcaggtcaagatcaaggatggggagaacaaggtcttcagccccgaggagatcagtgccatgattcttggcaagatgaaggatactgctgaggcgtaccttggcaagaagatcaacgatgccgtcgtcactgtccctgcatacttcaatgatgcgcagaggcaggcaaccaaggatgctggtgtcattgccggcctcaatgttgctaggatcatcaatgagccaactgctgctgctattgcctatggtttggacaagaagggtggcgagaagaacatccttgtctttgaccttggtggtggtacttttgatgtcagtatcttgaccattgataacggtgtgtttgaggtgctggccaccaatggtgacacccatcttggaggtgaggattttgaccagaggatcatggaatacttcatcaagttgatcaagaagaagtacagcaaggacatcagcaaggacaaccgtgctcttggaaagctgaggagggaagctgagcgtgccaagagagcccttagcaaccagcaccaggtccgagttgagatcgagtccctctttgacgggaccgacttctcggagccgctgacccgtgccaggtttgaggagctgaacaacgatctgttccgcaagactatgggtcctgtcaagaaggccatggaggacgctggccttgagaagagccagatccacgagatcgtcctggttggtggaagcaccaggattcccaaggtccagcagctcctgaaggactacttcaatggcaaggagcccaacaagggtgtgaaccctgatgaggctgttgcctttggtgccgcggtgcagggaagcatcttgagcggcgagggtggtgacgagacaaaagatatcctcctccttgacgtggctcctctcaccctgggtattgagaccgtcggtggagtcatgaccaagttgatcccgaggaacactgtcatcccgaccaagaaatcgcaggtgttcaccacctaccaggaccagcagaccactgtctccatccaggtctttgagggtgagcgcagcatgaccaaggactgccgtcttctgggcaagttcgacctcaatggcattccgtcagctccgaggggcacaccccagatcgaggtgaccttcgaggtggacgccaacggtatcctgaacgtgaaggcggaggacaagggcacgggcaagtcggagaagatcacgatcacgaacgagaaggggcggctgagccaggaggagatcgaccgcatggtgcgggaggcggaggagttcgcggaggaggacaagaaggtgaaggagcggatcgacgcccgcaaccagctggagacgtacgtgtacaacatgaagaacacggtgggcgacaaggacaagctcgcggacaagctggaggcggaggagaaggagaaggtggaggaggccctcaaggaggcgctcgagtggctggacgacaaccagtccgccgagaaggaggactacgaggagaagctcaaggaggtggaggccgtgtgcaaccccatcgtgtcggccgtgtaccagcggtcgggcggcgcccccggtggcgatgccgacggcggcgtcgacgacgaccacgacgagctgtagatggtggtggggagcggtgacgtggagtgccgggaaccaagccaaattttgtaatgatgtttaggagggagggtggtggacaaaaaaactaatcttggtgctgctctgccaatagacgggctgagcatagaactttttttcccttctacttccttgtgattgttctttttatagaggattcgcattgcagtgtaatgtaaaaaaaagaagacgcgcttctgaaacttgttactacaagttaataatgaaatggtgcattgcatc

SEQ ID NO: 26922 - protein, 699 aa, Zea mays subsp. mays
  misc_feature (1)..(699): Ceres Seq. ID no. 13635022
EQAVRNKDRSRSFQKARRKREKGARARSVQVVLVSAMDRVRGSAFLLGVLLAGSLFAFSVAKEETKKLGTVIGIDLGTTYSCVGVYKNGHVEIIANDQGNRITPSWVAFTDSERLIGEAAKNQAAVNPERTIFDVKRLIGRKFQDKEVQRDMKLVPYKIINKDGKPYIQVKIKDGENKVFSPEEISAMILGKMKDTAEAYLGKKINDAVVTVPAYFNDAQRQATKDAGVIAGLNVARIINEPTAAAIAYGLDKKGGEKNILVFDLGGGTFDVSILTIDNGVFEVLATNGDTHLGGEDFDQRIMEYFIKLIKKKYSKDISKDNRALGKLRREAERAKRALSNQHQVRVEIESLFDGTDFSEPLTRARFEELNNDLFRKTMGPVKKAMEDAGLEKSQIHEIVLVGGSTRIPKVQQLLKDYFNGKEPNKGVNPDEAVAFGAAVQGSILSGEGGDETKDILLLDVAPLTLGIETVGGVMTKLIPRNTVIPTKKSQVFTTYQDQQTTVSIQVFEGERSMTKDCRLLGKFDLNGIPSAPRGTPQIEVTFEVDANGILNVKAEDKGTGKSEKITITNEKGRLSQEEIDRMVREAEEFAEEDKKVKERIDARNQLETYVYNMKNTVGDKDKLADKLEAEEKEKVEEALKEALEWLDDNQSAEKEDYEEKLKEVEAVCNPIVSAVYQRSGGAPGGDADGGVDDDHDEL

SEQ ID NO: 26923 - protein, 663 aa, Zea mays subsp. mays
  misc_feature (1)..(663): Ceres Seq. ID no. 13635023
MDRVRGSAFLLGVLLAGSLFAFSVAKEETKKLGTVIGIDLGTTYSCVGVYKNGHVEIIANDQGNRITPSWVAFTDSERLIGEAAKNQAAVNPERTIFDVKRLIGRKFQDKEVQRDMKLVPYKIINKDGKPYIQVKIKDGENKVFSPEEISAMILGKMKDTAEAYLGKKINDAVVTVPAYFNDAQRQATKDAGVIAGLNVARIINEPTAAAIAYGLDKKGGEKNILVFDLGGGTFDVSILTIDNGVFEVLATNGDTHLGGEDFDQRIMEYFIKLIKKKYSKDISKDNRALGKLRREAERAKRALSNQHQVRVEIESLFDGTDFSEPLTRARFEELNNDLFRKTMGPVKKAMEDAGLEKSQIHEIVLVGGSTRIPKVQQLLKDYFNGKEPNKGVNPDEAVAFGAAVQGSILSGEGGDETKDILLLDVAPLTLGIETVGGVMTKLIPRNTVIPTKKSQVFTTYQDQQTTVSIQVFEGERSMTKDCRLLGKFDLNGIPSAPRGTPQIEVTFEVDANGILNVKAEDKGTGKSEKITITNEKGRLSQEEIDRMVREAEEFAEEDKKVKERIDARNQLETYVYNMKNTVGDKDKLADKLEAEEKEKVEEALKEALEWLDDNQSAEKEDYEEKLKEVEAVCNPIVSAVYQRSGGAPGGDADGGVDDDHDEL

SEQ ID NO: 26924 - protein, 548 aa, Zea mays subsp. mays
  misc_feature (1)..(548): Ceres Seq. ID no. 13635024
MKLVPYKIINKDGKPYIQVKIKDGENKVFSPEEISAMILGKMKDTAEAYLGKKINDAVVTVPAYFNDAQRQATKDAGVIAGLNVARIINEPTAAAIAYGLDKKGGEKNILVFDLGGGTFDVSILTIDNGVFEVLATNGDTHLGGEDFDQRIMEYFIKLIKKKYSKDISKDNRALGKLRREAERAKRALSNQHQVRVEIESLFDGTDFSEPLTRARFEELNNDLFRKTMGPVKKAMEDAGLEKSQIHEIVLVGGSTRIPKVQQLLKDYFNGKEPNKGVNPDEAVAFGAAVQGSILSGEGGDETKDILLLDVAPLTLGIETVGGVMTKLIPRNTVIPTKKSQVFTTYQDQQTTVSIQVFEGERSMTKDCRLLGKFDLNGIPSAPRGTPQIEVTFEVDANGILNVKAEDKGTGKSEKITITNEKGRLSQEEIDRMVREAEEFAEEDKKVKERIDARNQLETYVYNMKNTVGDKDKLADKLEAEEKEKVEEALKEALEWLDDNQSAEKEDYEEKLKEVEAVCNPIVSAVYQRSGGAPGGDADGGVDDDHDEL

SEQ ID NO: 26925 - DNA, 509 bp, Zea mays subsp. mays
  misc_feature (1)..(509): Ceres Seq. ID no. 13635129
aatatccattccaccttggtccatcagcagcgagcgaacaggcaaaaaggaaaggccgagaagcgctttatccggccgtacgtagcgataagagtggtgcacccgtagcggcacggcatggcggccacggcgtactccgtggcgctcctcggcggcgcacgctgccggccgccttcctccctcgacgcagcagcgtgtgccaccaccagcttcgcctccaagacgcaccgaggctgatctccctgcaccgtgccagggccgcttccgaggacacgtcggcctccggcggcgacgagctcatcgaagacctcaaggcaaagtgggacgccgttgaggacaagcccaccgtcctcctgtacggcggcggcgntccgtncgcgctatggttgacgtccgttgtcgtcggcgccatcaacgccgtgccgctgctccccaagatcctggagctcgttggcctcggctacaccggctggttcgtctaccgctacctcctcttcaagcaaagcagg

SEQ ID NO: 26926 - protein, 169 aa, Zea mays subsp. mays
  misc_feature (1)..(169): Ceres Seq. ID no. 13635130
  misc_feature (123)..(123): Xaa is any aa, unknown or other
  misc_feature (125)..(125): Xaa is any aa, unknown or other
YPFHLGPSAASEQAKRKGREALYPAVRSDKSGAPVAARHGGHGVLRGAPRRRTLPAAFLPRRSSVCHHQLRLQDAPRLISLHRARAASEDTSASGGDELIEDLKAKWDAVEDKPTVLLYGGGXPXALWLTSVVVGAINAVPLLPKILELVGLGYTGWFVYRYLLFKQSR

SEQ ID NO: 26927 - DNA, 433 bp, Zea mays subsp. mays
  misc_feature (1)..(433): Ceres Seq. ID no. 13635227
gcttcactcgcgtccgccccgccgccgcctttcgtcccagcccctaaaccattctccattcctctcatcagtttagcacaatggcactggctaataagcttggtggtctgctcaagaaagccacaagttcaaatctgtctgtctaccaagcaatcagatgcatgtcatccaagctctttgttggagggatttcttatcaaactgatgatcacagtctcagggacgagtttgccaaatatgggcaagtcattgaagctaggattatcattgaccgtgaatctgggaggtctagaggttttggctttgtaacttacacgtcttctgaggaggcttcagctgccattactgccttggatggaaagactctcgatggacggagcatacgtgttaatcatgctaacgagaagacaggtggctttcgtggcggcggtgg

SEQ ID NO: 26928 - protein, 117 aa, Zea mays subsp. mays
  misc_feature (1)..(117): Ceres Seq. ID no. 13635228
MALANKLGGLLKKATSSNLSVYQAIRCMSSKLFVGGISYQTDDHSLRDEFAKYGQVIEARIIIDRESGRSRGFGFVTYTSSEEASAAITALDGKTLDGRSIRVNHANEKTGGFRGGG

SEQ ID NO: 26929 - protein, 102 aa, Zea mays subsp. mays
  misc_feature (1)..(102): Ceres Seq. ID no. 13635229
ASLASAPPPPFVPAPKPFSIPLISLAQWHWLISLVVCSRKPQVQICLSTKQSDACHPSSLLEGFLIKLMITVSGTSLPNMGKSLKLGLSLTVNLGGLEVLAL

SEQ ID NO: 26930 - protein, 90 aa, Zea mays subsp. mays
  misc_feature (1)..(90): Ceres Seq. ID no. 13635230
MSSKLFVGGISYQTDDHSLRDEFAKYGQVIEARIIIDRESGRSRGFGFVTYTSSEEASAAITALDGKTLDGRSIRVNHANEKTGGFRGGG

SEQ ID NO: 26931 - DNA, 1113 bp, Zea mays subsp. mays
  misc_feature (1)..(1113): Ceres Seq. ID no. 13635288
atcaaccaaaccctctaatccatttcggcatttccaacgccttcgccctaccagccacgtcgcttcgaggccgatcgaccgagcagctggtggcaatggcggcggcggcggaggtcgtgctgctggacttctgggtgagccccttcgggcagcgctgccggatcgcgctggcggagaagggcgtggcctacgagtaccgcgagcaggacctcctggacaagggcgagctgctcctccgctccaaccccatccacaagaagatccccgtcctgctccacgccggcaggcccgtctgcgagtcgctcgtcatcctccagtacatcgacgaggcctggccggacgtcgcgccgctcctccccaaggacgacccctacgcccgcgcgcaggcgcgtttctgggccgattacatcgacaagaagatctatgacagccagactcggctgtggaagttcgagggcgaggcgcgggagcaggcgaagaaggacctggtggaggtcctggagaccctggagggggagctcgccgacaagcctttcttcggcggcggcgccctcggcttcgtggacgtggctctggtgcccttcacgtcctggttcctcgcctacgagaagctgggcgggttcagcgtccaggagcactgccccaggatcgtggcctgggccgcgcgctgcagggagcgggagagcgtggccaaggccatgtccgaccctgccaaggtgctcgagttcgtccagttcctccagagcaagttcggggccaagtgatcggaagcattgcgtgtgctgctagcctgatatgccctatgcaggccaggctggtgctttgatctgctcgatcagctctatgcccatgctagcgttgcatagcgcagttgatgtgtgatgtgtctggttggttgtagctgctctttgcctggtttcgtacgtcagtgtaaggtttcaggttttcagtgtctggggtagctctgcgttgcccttgcccctgccccctacctagcggctcttgagctcttcggctcgccagcaataaagttgcagaggctttagctaaaagtttctgtattttttagttgacgattattggtccaatgtattcgggaattttgttctctct

SEQ ID NO: 26932 - protein, 253 aa, Zea mays subsp. mays
  misc_feature (1)..(253): Ceres Seq. ID no. 13635289
QPNPLIHFGISNAFALPATSLRGRSTEQLVAMAAAAEVVLLDFWVSPFGQRCRIALAEKGVAYEYREQDLLDKGELLLRSNPIHKKIPVLLHAGRPVCESLVILQYIDEAWPDVAPLLPKDDPYARAQARFWADYIDKKIYDSQTRLWKFEGEAREQAKKDLVEVLETLEGELADKPFFGGGALGFVDVALVPFTSWFLAYEKLGGFSVQEHCPRIVAWAARCRERESVAKAMSDPAKVLEFVQFLQSKFGAK

SEQ ID NO: 26933 - protein, 222 aa, Zea mays subsp. mays
  misc_feature (1)..(222): Ceres Seq. ID no. 13635290
MAAAAEVVLLDFWVSPFGQRCRIALAEKGVAYEYREQDLLDKGELLLRSNPIHKKIPVLLHAGRPVCESLVILQYIDEAWPDVAPLLPKDDPYARAQARFWADYIDKKIYDSQTRLWKFEGEAREQAKKDLVEVLETLEGELADKPFFGGGALGFVDVALVPFTSWFLAYEKLGGFSVQEHCPRIVAWAARCRERESVAKAMSDPAKVLEFVQFLQSKFGAK

SEQ ID NO: 26934 - protein, 141 aa, Zea mays subsp. mays
  misc_feature (1)..(141): Ceres Seq. ID no. 13635291
STKPSNPFRHFQRLRPTSHVASRPIDRAAGGNGGGGGGRAAGLLGEPLRAALPDRAGGEGRGLRVPRAGPPGQGRAAPPLQPHPQEDPRPAPRRQARLRVARHPPVHRRGLAGRRAAPPQGRPLRPRAGAFLGRLHRQEDL

SEQ ID NO: 26935 - DNA, 516 bp, Zea mays subsp. mays
  misc_feature (1)..(516): Ceres Seq. ID no. 13635370
attatcgcgctcaggctcgtgccgctcgtggtcgtacgctgcagcaggcgatcggagcaaactaagaagcgaacaggccgcccgtcgacgccatggcgccggatctggtgaacggcgtgctcaactgggtggggacgccggccatggtggccagcctgctgctcttctacccgccctactatctcttcaagacatgctactccttcctttcctggctcttccccgaggacctcgccggcaaggtcgtcctcatcactggcgcttcctccggcatcggcgagcaactggcctaccagtacgcgctgaatcgggcgtccctcgccctcgtcgcgagaagggagtcgagcctccggcacgtcgccgaccgagcactcgagctcggcgcgcgcgacgtcgtcgtcctcccaggcgacgtctccacccccgacgactgcgacaggttcgttcggaccgcgatcagtcactacgaccgattggaccatctcgtgtgcyatgctggcgtcgcgagcgtcggcg

SEQ ID NO: 26936 - protein, 171 aa, Zea mays subsp. mays
  misc_feature (1)..(171): Ceres Seq. ID no. 13635371
  misc_feature (164)..(164): Xaa is any aa, unknown or other
LSRSGSCRSWSYAAAGDRSKLRSEQAARRRHGAGSGERRAQLGGDAGHGGQPAALLPALLSLQDMLLLPFLALPRGPRRQGRPHHWRFLRHRRATGLPVRAESGVPRPRREKGVEPPARRRPSTRARRARRRRPPRRRLHPRRLRQVRSDRDQSLRPIGPSRVXCWRRERR

SEQ ID NO: 26937 - protein, 141 aa, Zea mays subsp. mays
  misc_feature (1)..(141): Ceres Seq. ID no. 13635372
  misc_feature (134)..(134): Xaa is any aa, unknown or other
MAPDLVNGVLNWVGTPAMVASLLLFYPPYYLFKTCYSFLSWLFPEDLAGKVVLITGASSGIGEQLAYQYALNRASLALVARRESSLRHVADRALELGARDVVVLPGDVSTPDDCDRFVRTAISHYDRLDHLVCXAGVASVG

SEQ ID NO: 26938 - protein, 124 aa, Zea mays subsp. mays
  misc_feature (1)..(124): Ceres Seq. ID no. 13635373
  misc_feature (117)..(117): Xaa is any aa, unknown or other
MVASLLLFYPPYYLFKTCYSFLSWLFPEDLAGKVVLITGASSGIGEQLAYQYALNRASLALVARRESSLRHVADRALELGARDVVVLPGDVSTPDDCDRFVRTAISHYDRLDHLVCXAGVASVG

SEQ ID NO: 26939 - DNA, 1856 bp, Zea mays subsp. mays
  misc_feature (1)..(1856): Ceres Seq. ID no. 13635560
gatgatgggagggcgcgctctgctgctgctcctggtctcggcgctgctcgttcagatccgcgcctctgacccgctgctgtacgagccgtttgatgaggacttcgagggtagatggatcgtctccaagaaggatgaataccaaggtgtatggaagcatgccaagagtgatgggcatgaggactatggcctccttgttagtgacaaggcaaggaaatacgccataatcaaggagcttgatgagccagttaccttaaatgatgggacagtggtcctgcagtttgaagtgagacttcagaatggccttgaatgtggaggtgcctacattaagtacatccgccctcaggatgctggatgggatgccaaggagtttgataatgagactccatacactattatgtttggtccagataaatgtgggtcaaccaacaaggttcatttcatccttaagcacaagaatcctaagactggaaagtatgttgagcatcacctcaaattcccaccttctgtcccatacgacaagctctctcatgtctacacagctatcttgaagccagacaatgaggtcagaattttgatcgatggggaagaaaagaagaaggcaaacttcctttctgctgatgactttgagccagcacttatcccatccaagaccattcctgaccctgatgacaagaagccggaggactgggatgagagagctaaaatccctgatccagatgcagtgaagcctgatgattgggatgaggatgcccccatggaaattgtggatgaggaagccaccaagcctgagggatggttggatgatgaacccgaggagattgatgatcctgaggcagccaagcccgaggactgggacgatgaagaggatggtgaatgggaggcaccaaagattgacaaccccaagtgtgaagaggcacctggatgtggcgagtggaagaggccgatgaagcagaatcctgcttacaaaggcaagtggcatgcacctatgattgacaaccccaactacaagggaatctggaagcctcaggagatacccaaccctgagtactttgagcttgacaggcctgattttgatccaattgctgctattgggattgagatctggacaatgcaggatggcatcctgttcgacaatatcttgattgctgatgatgagaaagttgccacctccattctggagaagacatggaagcccaagtatgatgttgagaaggaaaaggagaaggctgaggaggctgctgctggtgcagatggtctttctgacttccagaagaagatttttgacgtcctgtacaagattgctgatattccgttcttggcaccctacaagaccaagattattgatgttatcgagaagggagagaagcagcccaacatcactattggcattttggtctccgttgtcatcgtgttcgttaccgttctcttcaagatcctttttggtggcaagaaaccagtggcacctgtgaaacctgcagctgagggcgnaagtaagcccaaggccgcggagacggacggtgctggaagcagtggtgacaaggatgagaaagaggatgaaaaggacgagacaggcccacgtcggaggacccgaagaggagacatagacctgtttttgacgtgttttagctcttctggcgtctgcttattttgagaactcttaatatttgtgagtgtataataggagcttatgtcacctctgcggcttcccccgctgctgatttgtttttaatggttagaccaggacccttcacgagcgtagaatttagttcttgttggtcatttatgtgctgtgcctgacggtgttcaatcagatagaggtgatggtttttttggtagatcaaatcaaggaatatttc

SEQ ID NO: 26940 - protein, 549 aa, Zea mays subsp. mays
  misc_feature (1)..(549): Ceres Seq. ID no. 13635561
  misc_feature (496)..(496): Xaa is any aa, unknown or other
MMGGRALLLLLVSALLVQIRASDPLLYEPFDEDFEGRWIVSKKDEYQGVWKHAKSDGHEDYGLLVSDKARKYAIIKELDEPVTLNDGTVVLQFEVRLQNGLECGGAYIKYIRPQDAGWDAKEFDNETPYTIMFGPDKCGSTNKVHFILKHKNPKTGKYVEHHLKFPPSVPYDKLSHVYTAILKPDNEVRILIDGEEKKKANFLSADDFEPALIPSKTIPDPDDKKPEDWDERAKIPDPDAVKPDDWDEDAPMEIVDEEATKPEGWLDDEPEEIDDPEAAKPEDWDDEEDGEWEAPKIDNPKCEEAPGCGEWKRPMKQNPAYKGKWHAPMIDNPNYKGIWKPQEIPNPEYFELDRPDFDPIAAIGIEIWTMQDGILFDNILIADDEKVATSILEKTWKPKYDVEKEKEKAEEAAAGADGLSDFQKKIFDVLYKIADIPFLAPYKTKIIDVIEKGEKQPNITIGILVSVVIVFVTVLFKILFGGKKPVAPVKPAAEGXSKPKAAETDGAGSSGDKDEKEDEKDETGPRRRTRRGDIDLFLTCFSSSGVCLF

SEQ ID NO: 26941 - protein, 548 aa, Zea mays subsp. mays
  misc_feature (1)..(548): Ceres Seq. ID no. 13635562
  misc_feature (495)..(495): Xaa is any aa, unknown or other
MGGRALLLLLVSALLVQIRASDPLLYEPFDEDFEGRWIVSKKDEYQGVWKHAKSDGHEDYGLLVSDKARKYAIIKELDEPVTLNDGTVVLQFEVRLQNGLECGGAYIKYIRPQDAGWDAKEFDNETPYTIMFGPDKCGSTNKVHFILKHKNPKTGKYVEHHLKFPPSVPYDKLSHVYTAILKPDNEVRILIDGEEKKKANFLSADDFEPALIPSKTIPDPDDKKPEDWDERAKIPDPDAVKPDDWDEDAPMEIVDEEATKPEGWLDDEPEEIDDPEAAKPEDWDDEEDGEWEAPKIDNPKCEEAPGCGEWKRPMKQNPAYKGKWHAPMIDNPNYKGIWKPQEIPNPEYFELDRPDFDPIAAIGIEIWTMQDGILFDNILIADDEKVATSILEKTWKPKYDVEKEKEKAEEAAAGADGLSDFQKKIFDVLYKIADIPFLAPYKTKIIDVIEKGEKQPNITIGILVSVVIVFVTVLFKILFGGKKPVAPVKPAAEGXSKPKAAETDGAGSSGDKDEKEDEKDETGPRRRTRRGDIDLFLTCFSSSGVCLF

SEQ ID NO: 26942 - protein, 418 aa, Zea mays subsp. mays
  misc_feature (1)..(418): Ceres Seq. ID no. 13635563
  misc_feature (365)..(365): Xaa is any aa, unknown or other
MFGPDKCGSTNKVHFILKHKNPKTGKYVEHHLKFPPSVPYDKLSHVYTAILKPDNEVRILIDGEEKKKANFLSADDFEPALIPSKTIPDPDDKKPEDWDERAKIPDPDAVKPDDWDEDAPMEIVDEEATKPEGWLDDEPEEIDDPEAAKPEDWDDEEDGEWEAPKIDNPKCEEAPGCGEWKRPMKQNPAYKGKWHAPMIDNPNYKGIWKPQEIPNPEYFELDRPDFDPIAAIGIEIWTMQDGILFDNILIADDEKVATSILEKTWKPKYDVEKEKEKAEEAAAGADGLSDFQKKIFDVLYKIADIPFLAPYKTKIIDVIEKGEKQPNITIGILVSVVIVFVTVLFKILFGGKKPVAPVKPAAEGXSKPKAAETDGAGSSGDKDEKEDEKDETGPRRRTRRGDIDLFLTCFSSSGVCLF

SEQ ID NO: 26943 - DNA, 767 bp, Zea mays subsp. mays
  misc_feature (1)..(767): Ceres Seq. ID no. 13635648
acggcccggggaagggtttcaccgactttgctgctgtgaggaaagagattgctgatgaaacagatcgcataactgggaaaactaaagctatttcaaacgttcccatccatttgagtatatattcaccacatgttgttaacttgacacttatcgatcttcctggactgacaaaggtcgctgtagaggggcaaccagaatctattgttcaagatattgaaaacatggttcgagcttatgttgacaagccaaattgcatcatcttggctatctccccagctaaccaagatattgcaacgtcagatgctatcaagcttgctagggatgttgatccttcaggtgacaggacttttggagtcttaacaaagcttgatttaatggacaagggtaccaatgctgttgatgtgcttgaagggaggcaatatcgcttacaacacccctgggttggaattgtcaatcgctcacaagctgatatcaacaagaatgtcgatatgctctcagcaagacgcaaagaaaaagagtactttgagagtagtcctgaatatggtcacttggcacataaaatgggtgcagagtatcttgccaagcttctgtcacagcatttagaggctgtgatcagggcaaaaattccaagtattatagctatgattaacaaaacaattgatgaaatagaagcccagttggatcgacttggtaggccaattggaggtgacgctggggctcagttgtacacaatcttggatatgtgtcgggcatttgaccgtgtcttt

SEQ ID NO: 26944 - protein, 255 aa, Zea mays subsp. mays
  misc_feature (1)..(255): Ceres Seq. ID no. 13635649
GPGKGFTDFAAVRKEIADETDRITGKTKAISNVPIHLSIYSPHVVNLTLIDLPGLTKVAVEGQPESIVQDIENMVRAYVDKPNCIILAISPANQDIATSDAIKLARDVDPSGDRTFGVLTKLDLMDKGTNAVDVLEGRQYRLQHPWVGIVNRSQADINKNVDMLSARRKEKEYFESSPEYGHLAHKMGAEYLAKLLSQHLEAVIRAKIPSIIAMINKTIDEIEAQLDRLGRPIGGDAGAQLYTILDMCRAFDRVF

SEQ ID NO: 26945 - protein, 182 aa, Zea mays subsp. mays
  misc_feature (1)..(182): Ceres Seq. ID no. 13635650
MVRAYVDKPNCIILAISPANQDIATSDAIKLARDVDPSGDRTFGVLTKLDLMDKGTNAVDVLEGRQYRLQHPWVGIVNRSQADINKNVDMLSARRKEKEYFESSPEYGHLAHKMGAEYLAKLLSQHLEAVIRAKIPSIIAMINKTIDEIEAQLDRLGRPIGGDAGAQLYTILDMCRAFDRVF

SEQ ID NO: 26946 - protein, 131 aa, Zea mays subsp. mays
  misc_feature (1)..(131): Ceres Seq. ID no. 13635651
MDKGTNAVDVLEGRQYRLQHPWVGIVNRSQADINKNVDMLSARRKEKEYFESSPEYGHLAHKMGAEYLAKLLSQHLEAVIRAKIPSIIAMINKTIDEIEAQLDRLGRPIGGDAGAQLYTILDMCRAFDRVF

SEQ ID NO: 26947 - DNA, 2887 bp, Zea mays subsp. mays
  misc_feature (1)..(2887): Ceres Seq. ID no. 13635664
ggctgagaccgctcagcgacaaggagatttcaaggggggacccggcggagtgggagtgcatcaacgacactaccatcatctcccggagcaccttcccggaccggcccactgctccgactgcgtattcgttcgatagggtatttcgttctgactgtactaccaaagaagtatatgaggaagggaccaaagcagttgccctctctgtagttagtggcattaactcaagtgtttttgcatatggtcaaacaagtagtggaaaaacatacaccatgactggaataacggaatatacagcagcagatatctatgattacattgccaagcatgaagagagagcgtttgtattgaaattttcagcaatcgaaatatataacgaagttgtaagggatcttcttagtgcagaaaacacatcgcttagactttgggatgatgcagagaagggaacatgtgtagagaaccttacagaggtgaccttgagggattcagaccacctgaaagaacttattctacgtgtgaagctcaaaaggaggaccggagagacatacttaaatgaaaacagctccagatcacaccaaatacttaaactgactattgaaagttctgctcatgagttcttgggtaaggacaagtcaacaacacttgttgctagtgtgaacttcgttgatttggctggaagtgaacgtgcatcccaggcattatcagctgggactaggctgaaggaaggttgtcatattaatagaagtctacttaccctaggaactggtattcggaaactaagcaaggtaagaaatgggcacataccataccgagattcaaagctcacgcgcatattcaccttctctaggaggcaatgcaagaacagcaattatttgtacaatgagcccagcccggagccatatggacagtcaaggaataccttgttgtttgcaagttgtgcaaaggaagtggtgacaaatgcccaggttaatgtcgttatgtctgataaggcactggttaagcaattacaaaaagaacttgcaaggttggagagtgaattgcgatgcccagcttcatattctggtcttgaagcattagtgagagaaaaagataatcaaatccggaagatggataaagaaattaaggaactgaagttacatcgtgatcttgctcagtctagactgcaagatttgctcaaggttgttggagataaccacggttcgaagcaccccctggcttcttctgcaagaaattttacttttgatgttcctcagccatgtgaggatgagcaatcgacgacatcagaagctttcagcagtggccaaattttaggcttcaaggcgcctgacacacaaagagattataggtcacagcaatctgaaaatgatgtgcagtttgctacccctcttagctattcaatcagcagtcccccattcagtgggatgcctccaactaatggcagaaatgataactctcatatatctgatgaagattcagaggatctttgcaaagaagtacggtgcatagagaccaatgaaacagaagaaaatgaatgcttagagtcgtcagctgtgggaagcaatagtctgcaagattcaaatttagcttccagcatgcatgggaacgacaatacaaatcgatctgtgaattctggacggaatgatgcatcttctattaccctggaacaacatctggagaatgtcaaaaaaccgtttgccaatcctggcatggatctgggatcctctacacgtaactcgtcaagctcaaaagtaattggcagaagcaggagctgtaggtctctgatgggttctactctgttggaagacttggagaaagaagtttgcacccctccaagcagaagtttcatggactacccagggaggcccgaaacatgtcaaagaagggtacccgcactgaactacgatgcagagagtgaagctttatccagggcaggatcaatgctatctgaaattaccaccacgaggggtggactgaaggaaaacagctctgctgctggtgatacagaatttgttgctggcataggtgaatttgtcgcggagctaaaagaaatggcccagggtcataatggagaattggctgaagggaccataaggagcgtggggctggatcccattatggatatcttgcaatcaccttctcgctggcctttggaattcgagaagaaacagcaggagatcattgacctgtggcatggatgcaacgtttccttggtccacaggacttactttttcctgctgttcaaaggggacccagccgacgccatttacatggaagtggagcttaggaggttatcatttctcaagaacacatactccaacggaagcatggggtatgatatggtggcaggcagcttgagcacttctctggtttcaagtgcaaagaaactgcaacgcgagagggagatgctctgcaggcagatgcagaagcggctgacgatccaggaacgggagagcctgtacaccaagtggggagtctcgctgtcctccaagaggaggcggctgcaggtcgctcggcgcctttggacggagaccagggacctggagcatgtgagggagagcgcgtccctcgtggccagactgatcgggctcctggagcctgggaaggcgctgagggagatgtttggtctgagcttcgcgccgcagcagtccacccggaggtcgcacagtagttggcggtatggccgttcttctctagactgactgagctcgaaagacgcagctgacaaaaaaacaacaacagttattccgttgttttcgttttgtgtagtgcctgatttttttgctgtcctctcggaaaatagaaattcctgaacattttgtgaccagtctgcgagaaaatttggtagcattttcaagatttattgatgtttacaatttggaaaccgtcaacg

SEQ ID NO: 26948 - protein, 897 aa, Zea mays subsp. mays
  misc_feature (1)..(897): Ceres Seq. ID no. 13635665
LRPLSDKEISRGDPAEWECINDTTIISRSTFPDRPTAPTAYSFDRVFRSDCTTKEVYEEGTKAVALSVVSGINSSVFAYGQTSSGKTYTMTGITEYTAADIYDYIAKHEERAFVLKFSAIEIYNEVVRDLLSAENTSLRLWDDAEKGTCVENLTEVTLRDSDHLKELILRVKLKRRTGETYLNENSSRSHQILKLTIESSAHEFLGKDKSTTLVASVNFVDLAGSERASQALSAGTRLKEGCHINRSLLTLGTGIRKLSKVRNGHIPYRDSKLTRIFTFSRRQCKNSNYLYNEPSPEPYGQSRNTLLFASCAKEVVTNAQVNVVMSDKALVKQLQKELARLESELRCPASYSGLEALVREKDNQIRKMDKEIKELKLHRDLAQSRLQDLLKVVGDNHGSKHPLASSARNFTFDVPQPCEDEQSTTSEAFSSGQILGFKAPDTQRDYRSQQSENDVQFATPLSYSISSPPFSGMPPTNGRNDNSHISDEDSEDLCKEVRCIETNETEENECLESSAVGSNSLQDSNLASSMHGNDNTNRSVNSGRNDASSITLEQHLENVKKPFANPGMDLGSSTRNSSSSKVIGRSRSCRSLMGSTLLEDLEKEVCTPPSRSFMDYPGRPETCQRRVPALNYDAESEALSRAGSMLSEITTTRGGLKENSSAAGDTEFVAGIGEFVAELKEMAQGHNGELAEGTIRSVGLDPIMDILQSPSRWPLEFEKKQQEIIDLWHGCNVSLVHRTYFFLLFKGDPADAIYMEVELRRLSFLKNTYSNGSMGYDMVAGSLSTSLVSSAKKLQREREMLCRQMQKRLTIQERESLYTKWGVSLSSKRRRLQVARRLWTETRDLEHVRESASLVARLIGLLEPGKALREMFGLSFAPQQSTRRSHSSWRYGRSSLD

SEQ ID NO: 26949 - protein, 808 aa, Zea mays subsp. mays
  misc_feature (1)..(808): Ceres Seq. ID no. 13635666
MTGITEYTAADIYDYIAKHEERAFVLKFSAIEIYNEVVRDLLSAENTSLRLWDDAEKGTCVENLTEVTLRDSDHLKELILRVKLKRRTGETYLNENSSRSHQILKLTIESSAHEFLGKDKSTTLVASVNFVDLAGSERASQALSAGTRLKEGCHINRSLLTLGTGIRKLSKVRNGHIPYRDSKLTRIFTFSRRQCKNSNYLYNEPSPEPYGQSRNTLLFASCAKEVVTNAQVNVVMSDKALVKQLQKELARLESELRCPASYSGLEALVREKDNQIRKMDKEIKELKLHRDLAQSRLQDLLKVVGDNHGSKHPLASSARNFTFDVPQPCEDEQSTTSEAFSSGQILGFKAPDTQRDYRSQQSENDVQFATPLSYSISSPPFSGMPPTNGRNDNSHISDEDSEDLCKEVRCIETNETEENECLESSAVGSNSLQDSNLASSMHGNDNTNRSVNSGRNDASSITLEQHLENVKKPFANPGMDLGSSTRNSSSSKVIGRSRSCRSLMGSTLLEDLEKEVCTPPSRSFMDYPGRPETCQRRVPALNYDAESEALSRAGSMLSEITTTRGGLKENSSAAGDTEFVAGIGEFVAELKEMAQGHNGELAEGTIRSVGLDPIMDILQSPSRWPLEFEKKQQEIIDLWHGCNVSLVHRTYFFLLFKGDPADAIYMEVELRRLSFLKNTYSNGSMGYDMVAGSLSTSLVSSAKKLQREREMLCRQMQKRLTIQERESLYTKWGVSLSSKRRRLQVARRLWTETRDLEHVRESASLVARLIGLLEPGKALREMFGLSFAPQQSTRRSHSSWRYGRSSLD

SEQ ID NO: 26950 - protein, 573 aa, Zea mays subsp. mays
  misc_feature (1)..(573): Ceres Seq. ID no. 13635667
MSDKALVKQLQKELARLESELRCPASYSGLEALVREKDNQIRKMDKEIKELKLHRDLAQSRLQDLLKVVGDNHGSKHPLASSARNFTFDVPQPCEDEQSTTSEAFSSGQILGFKAPDTQRDYRSQQSENDVQFATPLSYSISSPPFSGMPPTNGRNDNSHISDEDSEDLCKEVRCIETNETEENECLESSAVGSNSLQDSNLASSMHGNDNTNRSVNSGRNDASSITLEQHLENVKKPFANPGMDLGSSTRNSSSSKVIGRSRSCRSLMGSTLLEDLEKEVCTPPSRSFMDYPGRPETCQRRVPALNYDAESEALSRAGSMLSEITTTRGGLKENSSAAGDTEFVAGIGEFVAELKEMAQGHNGELAEGTIRSVGLDPIMDILQSPSRWPLEFEKKQQEIIDLWHGCNVSLVHRTYFFLLFKGDPADAIYMEVELRRLSFLKNTYSNGSMGYDMVAGSLSTSLVSSAKKLQREREMLCRQMQKRLTIQERESLYTKWGVSLSSKRRRLQVARRLWTETRDLEHVRESASLVARLIGLLEPGKALREMFGLSFAPQQSTRRSHSSWRYGRSSLD

SEQ ID NO: 26951 - DNA, 1150 bp, Zea mays subsp. mays
  misc_feature (1)..(1150): Ceres Seq. ID no. 13636132
acacataaccagcacacagctctcgccttctctctcccatcggcacacccgagctcgctccctccttccacgtcgaggtccgagtcctgctttgatggcgaccgacgtggctgagactcccgcgccgttggtggatgcggccccagaggcgcccgccgacgccccggcggcgcctgctgccgacgcgaagccggccaaggccaagaaggccaccgcgccgaagaagcgcgccagcccgacccacccgccgtacgccgagatggtctcggaggcgatcacgtcgctcaaggagaggacggggtccagcagctatgcgattgccaagttcgtggaggacaagcacaaggacaagctcccgcccaacttccgcaagcttctgaacgttcagctcaagaagctcgtcgccggcggcaagctgaccaaggtgaagaactcgtacaagctgtcgtccgccaccaagccgaatcccaagcccaaggccgccccgaagaagcccaagaccggcgctaagaagcccaaggccgctgccaagcccaaagctaagacccccgccaaggcgaagcccgccacaaagcccaagcccgccgcgaagccgaaagccgtagtgaaaccgaagacacccgccaagcccaaggccaagccagctgccaaggcgaagcccaagaccgccggcgctaagccgaagccacttgctaagaaggccggccgcgccaaggcggcgaagacgtcggccaaggacacgccagggaagaaggcccctgccaagaaggccgctccctcaaagaaggcggcgaccccggtgcggaaagcgccgtcccgtaaggccaagaagtaaagcggccaagaaggggggcgcgatgctgtaaatttgatatcggagaggctcgggtacactggtcattcagtatccgagaccgatagctgaggctagtggcgatggaggactgtgttattactactataaactggtggttgtgtttctgtaactggtgaatgatcaagttggaagcttttagtctatcttagatatatcagtggatagtgttttttgtattttcgttttcttttccaatgtgtgttgggtcttgtggattatcctttttttctaatctaatacaatgaagaggcatgtcttttgaagcttcccctg

SEQ ID NO: 26952 - protein, 277 aa, Zea mays subsp. mays
  misc_feature (1)..(277): Ceres Seq. ID no. 13636133
HITSTQLSPSLSHRHTRARSLLPRRGPSPALMATDVAETPAPLVDAAPEAPADAPAAPAADAKPAKAKKATAPKKRASPTHPPYAEMVSEAITSLKERTGSSSYAIAKFVEDKHKDKLPPNFRKLLNVQLKKLVAGGKLTKVKNSYKLSSATKPNPKPKAAPKKPKTGAKKPKAAAKPKAKTPAKAKPATKPKPAAKPKAVVKPKTPAKPKAKPAAKAKPKTAGAKPKPLAKKAGRAKAAKTSAKDTPGKKAPAKKAAPSKKAATPVRKAPSRKAKK

SEQ ID NO: 26953 - protein, 246 aa, Zea mays subsp. mays
  misc_feature (1)..(246): Ceres Seq. ID no. 13636134
MATDVAETPAPLVDAAPEAPADAPAAPAADAKPAKAKKATAPKKRASPTHPPYAEMVSEAITSLKERTGSSSYAIAKFVEDKHKDKLPPNFRKLLNVQLKKLVAGGKLTKVKNSYKLSSATKPNPKPKAAPKKPKTGAKKPKAAAKPKAKTPAKAKPATKPKPAAKPKAVVKPKTPAKPKAKPAAKAKPKTAGAKPKPLAKKAGRAKAAKTSAKDTPGKKAPAKKAAPSKKAATPVRKAPSRKAKK

SEQ ID NO: 26954 - protein, 191 aa, Zea mays subsp. mays
  misc_feature (1)..(191): Ceres Seq. ID no. 13636135
MVSEAITSLKERTGSSSYAIAKFVEDKHKDKLPPNFRKLLNVQLKKLVAGGKLTKVKNSYKLSSATKPNPKPKAAPKKPKTGAKKPKAAAKPKAKTPAKAKPATKPKPAAKPKAVVKPKTPAKPKAKPAAKAKPKTAGAKPKPLAKKAGRAKAAKTSAKDTPGKKAPAKKAAPSKKAATPVRKAPSRKAKK

SEQ ID NO: 26955 - DNA, 945 bp, Zea mays subsp. mays
  misc_feature (1)..(945): Ceres Seq. ID no. 13636168
atatagaacgctagctgccggccggtgcagaccacgggaggcgcgggcgcgcgctataaaagccgagccagtgggcgcggccagtgtcacaactcacaattcacatcgaggtctcagcttcaggaaagggaaggaagcatgttcgggcaccaccaccaccacggccacggcgggcaccaccaggccccgccgccgcacgagcagacgctgttcaggatcttctgccgcgccgacgaggcgtactgcctcaccgtgcgccacgacgccgtcgtcctcgcgcccaccaacccccgcgacgagtaccagcactggtacaaggacatgaggcacagcacgaaggtgagggacgcggagggcccagccggcgttcgcgctcatcaacagggccaccggcctcgccatcaagcactcgctcggccagtcccatcccgtgaagctagtgccctacaacgcggagtacctggacgagtcggtgctgtggacggagagccgcgacgtcgggcacggcttccgctgcgtgcgcatggtgaacaacatctacctcaacatggacgccttccacggcgacaaggaccacggcggcgtccacgacggcaccaccgtcgtcctctgggagtgggccaagggcgacaaccagcgctggaagatcctgccctggtgaacgtgaacagagacgagctagatgaatccaaggaaccttacctagctgctgccgccgccgcctaattcgtcctcctccgctctagctgttatctgtctgtgtcttcgcgtcctcggttcctgaatggacgaataatatatagcatgcatgtacggctagcgaccatgtctgaatgacatcttcgttgctgctgctgctgctactgctacctgtccgtttggtgttctaaaagactctgatgagtggttctgaatgtctgcatttcaagtttgctgtgtgatgtc

SEQ ID NO: 26956 - protein, 195 aa, Zea mays subsp. mays
  misc_feature (1)..(195): Ceres Seq. ID no. 13636169
MFGHHHHHGHGGHHQAPPPHEQTLFRIFCRADEAYCLTVRHDAVVLAPTNPRDEYQHWYKDMRHSTKVRDAEGPAGVRAHQQGHRPRHQALARPVPSREASALQRGVPGRVGAVDGEPRRRARLPLRAHGEQHLPQHGRLPRRQGPRRRPRRHHRRPLGVGQGRQPALEDPALVNVNRDELDESKEPYLAAAAAA

SEQ ID NO: 26957 - protein, 134 aa, Zea mays subsp. mays
  misc_feature (1)..(134): Ceres Seq. ID no. 13636170
MRHSTKVRDAEGPAGVRAHQQGHRPRHQALARPVPSREASALQRGVPGRVGAVDGEPRRRARLPLRAHGEQHLPQHGRLPRRQGPRRRPRRHHRRPLGVGQGRQPALEDPALVNVNRDELDESKEPYLAAAAAA

SEQ ID NO: 26958 - protein, 107 aa, Zea mays subsp. mays
  misc_feature (1)..(107): Ceres Seq. ID no. 13636171
YRTLAAGRCRPREARARAIKAEPVGAASVTTHNSHRGLSFRKGKEACSGTTTTTATAGTTRPRRRTSRRCSGSSAAPTRRTASPCATTPSSSRPPTPATSTSTGTRT

SEQ ID NO: 26959 - DNA, 1628 bp, Zea mays subsp. mays
  misc_feature (1)..(1628): Ceres Seq. ID no. 13636255
actagctgctctggctcccccgaggcaatcgagtaatcgacgaaggccaccaccacctccacaccactttgcctcgagaaggttccaccaagcctctcggctagggtttggggactttgggggcgatcgcaatggagggacgcggcgcggaacaagcacccgaggcggcggcggaggtgaaaaatccgaggtgcttcatggacgtcaccatcggcggcgagatggaggggaggatcgttgtagagctctacgcttccgtggtaccgcggacggcggagaacttccgcgcgctctgcacaggggagaaaggcatcggcgccgccagcgggcaagccgcttcactttaagggctcatgcttccaccgtgttattaaagggtttatgattcaagggggagacacaactgctggagacggaactgggggatagtcaatttatgggtccaaatttgaggacgagaattttgttttaaagcatgagaggaaaggaatgctttcaatggctaattctggtcccaacacaaatggttctcagtttttcatcactactacacggacacctcatttagacgggaaacatgttgtttttggtagagtgatgaaaggaatgggggtagttcgctctattgagcatgtttctgtcggagaagctgactgccccactcttgaagttaaaattgttgattgtggggagcttcctgaaggtgctgatgatggagttgtaaactttttcaaagatggtgatacgtacccagattggcccaatgatcttgaagagaagcctgctgaggtttcatggtggatggatgctgtggagtctgctaaagcttatgggaatgacaatttcaagaaacaggactacaaggcagctctcagaaagtacaggaaagctctgcgctacttggatctttgctgggagaaagaagagatagatgaagataagagcacagcactgcggaagaccaagtcaataatactcactaatagctccgcatgcaaattaaagttaggagattcaagtggggctttattagacgcagattttgcactgcgtgaaagggagggaaatgctaaagcttttttccgacaaggacaggcacacattgcacttaatgacattgatgcagccgtggagagctttaaacaggcattggagttggagccaaatgatgctggaatcaaaagagagctggctgctgcaaagaagaagattgctgacagaagagatcaggagcggaaggcatttgctaggattttccaatcttctggaaagtctgacaagagcaacgaagagaataattgatctacagttcctttcccccgtctgaaactttgcttagcttaaatctggggcacattggaacaggagtctcatgggagtctgctctgcaaaaaaacgcagattactgatctttagatagaaggaaacatagtggggggaaaggaagcttttgttttcttgtactacagaagtagcaattcgtgcttttgtcccggtcttagtttattcaggaaacggacattgaatttaaatgtgcaatttttagacccaacctgacgattcacatcttttgtgggtagttcgcccgtttcactttcgtggtgttttcttgtagccttttgtctgct

SEQ ID NO: 26960 - protein, 270 aa, Zea mays subsp. mays
  misc_feature (1)..(270): Ceres Seq. ID no. 13636256
MLSMANSGPNTNGSQFFITTTRTPHLDGKHVVFGRVMKGMGVVRSIEHVSVGEADCPTLEVKIVDCGELPEGADDGVVNFFKDGDTYPDWPNDLEEKPAEVSWWMDAVESAKAYGNDNFKKQDYKAALRKYRKALRYLDLCWEKEEIDEDKSTALRKTKSIILTNSSACKLKLGDSSGALLDADFALREREGNAKAFFRQGQAHIALNDIDAAVESFKQALELEPNDAGIKRELAAAKKKIADRRDQERKAFARIFQSSGKSDKSNEENN

SEQ ID NO: 26961 - protein, 267 aa, Zea mays subsp. mays
  misc_feature (1)..(267): Ceres Seq. ID no. 13636257
MANSGPNTNGSQFFITTTRTPHLDGKHVVFGRVMKGMGVVRSIEHVSVGEADCPTLEVKIVDCGELPEGADDGVVNFFKDGDTYPDWPNDLEEKPAEVSWWMDAVESAKAYGNDNFKKQDYKAALRKYRKALRYLDLCWEKEEIDEDKSTALRKTKSIILTNSSACKLKLGDSSGALLDADFALREREGNAKAFFRQGQAHIALNDIDAAVESFKQALELEPNDAGIKRELAAAKKKIADRRDQERKAFARIFQSSGKSDKSNEENN

SEQ ID NO: 26962 - protein, 234 aa, Zea mays subsp. mays
  misc_feature (1)..(234): Ceres Seq. ID no. 13636258
MKGMGVVRSIEHVSVGEADCPTLEVKIVDCGELPEGADDGVVNFFKDGDTYPDWPNDLEEKPAEVSWWMDAVESAKAYGNDNFKKQDYKAALRKYRKALRYLDLCWEKEEIDEDKSTALRKTKSIILTNSSACKLKLGDSSGALLDADFALREREGNAKAFFRQGQAHIALNDIDAAVESFKQALELEPNDAGIKRELAAAKKKIADRRDQERKAFARIFQSSGKSDKSNEENN

SEQ ID NO: 26963 - DNA, 1396 bp, Zea mays subsp. mays
  misc_feature (1)..(1396): Ceres Seq. ID no. 13636262
caattaaccctcactaaagggaacaaaagctggagctccaccgcggtggcggccgctctagaactagtggatcccccgggctgcaggaattcgcacgagaccattacctagaacatcctaatcgaaaaaagttccatatccaacacacacagcaacgctcgctcggcactgtcactagctagttgctctactagagggcgggtatagagctgcctgcaatccgccgctgagaagggaggatcggaagcgacgatgaggtcgtttgctcctgtctttctgtcggcggtcgtggcctggctggagctggcgggcaccgcgcagggcggcaacttctaccaggacacagagatgacctggggcgatggccgcggcaaggtagtggacggcgggcgcgggctggacctgacgctggaccgcacgtccggctccgggttccagtccaagagcgagtacctgttcggcaagatcgacatgcagatcaagctggtgccaggcaactccgctggcacggtcaccaccttctacctgtcgtccccagggcgacgcgcacgacgagatcgacttcgagttcctgggcaacgtgagcggggagccctacacgctgcacaccaacgtgttcacgcgcggacagggccagcgggagcagcagttccgcctctggttcgaccctaccactgccttccacacctactccatcctgtggaacccgcagcacgtgatcttcgcggtggacggcaccccggtgcgggacttcaagaaccacgaggcgcgcggggtggcgttcccgaggatgcagcccatgaggctgtacgccagcctgtggaacgccgacgactgggccacgcagggcgggcgcgtcaaggcggactggtccaaggcccccttcgtcgcctccttccgcggtttcagcgccgacgcctgcgtctgggacggcggcaggcagcgctgccctgagggcaccatggaggccgccgccgtcgcgggtgccggctccggccgcggctggtggaaccagcagctcagcgacatgagctaccgccgcatgcgctgggtgcagcgcaagttcatgatctacaactactgcgccgacgccaagcgcttcccgcagggcgtgcccgccgagtgcaagctccggtgagggagcgaggtttgttgggacgtccgtggggcatcaaaaccaagcacgatccctagtcgtggaaagtagaaaccaggcatcgattcgatcgtcgtcgacggtcttagtagtagctacttatttcgcagtgggcgatgaaagaatggtgtcatgtaaatgtagctctagtcgtgtcgcattctttgatttgttgtttcagcagcaccggatgtacaagtattgagtttgggctagcaagaataagtaatctttttcggc

SEQ ID NO: 26964 - protein, 233 aa, Zea mays subsp. mays
  misc_feature (1)..(233): Ceres Seq. ID no. 13636263
MRSFAPVFLSAVVAWLELAGTAQGGNFYQDTEMTWGDGRGKVVDGGRGLDLTLDRTSGSGFQSKSEYLFGKIDMQIKLVPGNSAGTVTTFYLSSPGRRARRDRLRVPGQRERGALHAAHQRVHARTGPAGAAVPPLVRPYHCLPHLLHPVEPAARDLRGGRHPGAGLQEPRGARGGVPEDAAHEAVRQPVERRRLGHAGRARQGGLVQGPLRRLLPRFQRRRLRLGRRQAALP

SEQ ID NO: 26965 - protein, 201 aa, Zea mays subsp. mays
  misc_feature (1)..(201): Ceres Seq. ID no. 13636264
MTWGDGRGKVVDGGRGLDLTLDRTSGSGFQSKSEYLFGKIDMQIKLVPGNSAGTVTTFYLSSPGRRARRDRLRVPGQRERGALHAAHQRVHARTGPAGAAVPPLVRPYHCLPHLLHPVEPAARDLRGGRHPGAGLQEPRGARGGVPEDAAHEAVRQPVERRRLGHAGRARQGGLVQGPLRRLLPRFQRRRLRLGRRQAALP

SEQ ID NO: 26966 - protein, 160 aa, Zea mays subsp. mays
  misc_feature (1)..(160): Ceres Seq. ID no. 13636265
MQIKLVPGNSAGTVTTFYLSSPGRRARRDRLRVPGQRERGALHAAHQRVHARTGPAGAAVPPLVRPYHCLPHLLHPVEPAARDLRGGRHPGAGLQEPRGARGGVPEDAAHEAVRQPVERRRLGHAGRARQGGLVQGPLRRLLPRFQRRRLRLGRRQAALP

SEQ ID NO: 26967 - DNA, 1931 bp, Zea mays subsp. mays
  misc_feature (1)..(1931): Ceres Seq. ID no. 13636275
actactagtgatcagaccagtgagctagcgactgtaccatgcagcagctgtaggagagcctggtggtaggtaggataggagtagcgccagccgccaagtgcgcgtccgggctggctgcttcgacgagcaggagggagccgcaccgccgggctcccgcaatgtcgcctcctccgcccccgccgctgctgcgcaacgagctgtcgcgcaggacggcggtgctgggcctgcgcctgtgggtgctggtgggcatcgccgtcggggccgccttcgtgctgctcctcgtgctcatctccctccacctcgccgcggcgcggcggaggcggcccaggaagggcgtcgcgcacgcgccggcgggggcgccgccgctgtccccgtccaccatcccgcccgtgtccaaggagatccaggaggtggccgtccacgtcggctcgctccgccactacctggagacggggcacgcgttcctcaaggacggcggcgacggcgacggcgacggcgagtccgtggcgcacgggtcgcagcgcgtccacatcgaggccggcaagggccagcgcatggtcgcggcggcttccgacgcgctgtcggcggccgtgggccccgaggtgtcgcacctcggctggggccactggtacacgctgcgggagctggaggaggccaccgccgcgttcgctcccgagcacgtcgtcggcgagggcgggtacggcatcgtctaccgcggcgtcctcgccgacggctaccaggtcgccgtgaagaacctcctcaacaacaggggacaagccgagcgggagttcagggtggaggtggaggccatcggccgcgtccggcacaagaatctggtccggctactgggctactgcgccgagggcgcccaacggatacttgtgtacgagtacgtggacaacggcaacctcgagcagtggctgcacggcgacgtcggggcagtgagcccgctcacctgggacgtccggatgaacatcgtgctcggcatggccaaagggatcacgtacctgcacgaggggctggaacccaaggtggtgcacagggacatcaagtcgagcaacatcctgctggacaggaggtggaacccgaaggtctcggacttcggcctcgccaagctcctgggggcggacagcaactacgtcaccaccagagtgatgggaacgtttggctacggccccagagtacgctagcaccggcatgctgaacgagaggagcgacgtgtacagcttcgggatcctgatcatggagatcatctccggccgaagccccgtcgactacgccaggcctgccggagaggtaaaccttgtagagtggctcaagaacaaggtgaccaacagggactacgaggccatcgtggacccgaagctgccggagaagccgtcctccaaggcgctcaagaaggcgctcctggtcgcgctgaggtgcgtggatcccgactcgcagaaacggcccaagatggggcacgtaatccacatgctcgaagtcgacgacttcccgtatcgagaggatcgtcgaactcttcggccgggcaacggcagccccctggagaaggcgaggaatccggcggcggggtcatgcgacggcagcagctgctacgggggcgacacgaccaccgcgagcacgccgtccagactagtgcaggacatgtagtagtgatgtgtttgtagccagctgctgctggccttctgagctctgcctgcgggctgcggggcaacatggagatggacatgctgcaactctgctccgtcgttaattaaaggttcccttcctaggtgttgattttggactcaacagtgacttgacgtaagttttgccgcccgatggccaactgtttgtatagggaactgctgctcttcatctcaggccctaagtttgactgttctttgattcgcgtcatgatgtaaaaataaaagcgtgcgtctgtattggtc

SEQ ID NO: 26968 - protein, 343 aa, Zea mays subsp. mays
  misc_feature (1)..(343): Ceres Seq. ID no. 13636276
MSPPPPPPLLRNELSRRTAVLGLRLWVLVGIAVGAAFVLLLVLISLHLAAARRRRPRKGVAHAPAGAPPLSPSTIPPVSKEIQEVAVHVGSLRHYLETGHAFLKDGGDGDGDGESVAHGSQRVHIEAGKGQRMVAAASDALSAAVGPEVSHLGWGHWYTLRELEEATAAFAPEHVVGEGGYGIVYRGVLADGYQVAVKNLLNNRGQAEREFRVEVEAIGRVRHKNLVRLLGYCAEGAQRILVYEYVDNGNLEQWLHGDVGAVSPLTWDVRMNIVLGMAKGITYLHEGLEPKVVHRDIKSSNILLDRRWNPKVSDFGLAKLLGADSNYVTTRVMGTFGYGPRVR

SEQ ID NO: 26969 - protein, 211 aa, Zea mays subsp. mays
  misc_feature (1)..(211): Ceres Seq. ID no. 13636277
MVAAASDALSAAVGPEVSHLGWGHWYTLRELEEATAAFAPEHVVGEGGYGIVYRGVLADGYQVAVKNLLNNRGQAEREFRVEVEAIGRVRHKNLVRLLGYCAEGAQRILVYEYVDNGNLEQWLHGDVGAVSPLTWDVRMNIVLGMAKGITYLHEGLEPKVVHRDIKSSNILLDRRWNPKVSDFGLAKLLGADSNYVTTRVMGTFGYGPRVR

SEQ ID NO: 26970 - DNA, 834 bp, Zea mays subsp. mays
  misc_feature (1)..(834): Ceres Seq. ID no. 13636282
gtgctttcttagaggtgggttggcttctcctccccctccggttcgggttcgggttcgtgaggttctccggggttcggtttcgtgggtgagcggatcgagatggcggcgtcggatgttgagtaccgctgcttcgtcggcggcctcgcctgggccacggacgaccactccctccacaacgccttcagcacctacggcgaggtcctcgagtccaagatcatcctcgatcgggagacgcagaggtcccgcggcttcggcttcgtcaccttctccacggaggagcgcatgcggaaccgcatcgagggcatgaacggcaaggagctggacggccgcaacatcaccgtcaacgaggcccagtcccgcggcggccgtggaggcggcggcggtgggtacggtggtggccgtggaggcggcggctacggcggtggcgggcgccgtgatggcggcggcggctacggcggtggcggcggctacggtggcggcggcggctacggtggtggtggcggcggctacggcggtggcaaccgtggcggcggctacggcaactccgacgggaactggaggaactgagcggtggggcccgcgcggccaagttatcctgttcgctgccgtgatgtttaccctagtccagagggtttatcttcgttcgtctcgtgtttgttgttgcccatctgtgtttttgattgcaaggtcgctctgtgtcagttgttagtgctgtgttcatcctcggctccagcagacccatgcatcaaacagcatggactgcggatcgatggatgctgttacccccgtcaggctttattctaagttaatcttaaggaaaaaatggtgcttctt

SEQ ID NO: 26971 - protein, 155 aa, Zea mays subsp. mays
  misc_feature (1)..(155): Ceres Seq. ID no. 13636283
MAASDVEYRCFVGGLAWATDDHSLHNAFSTYGEVLESKIILDRETQRSRGFGFVTFSTEERMRNRIEGMNGKELDGRNITVNEAQSRGGRGGGGGGYGGGRGGGGYGGGGRRDGGGGYGGGGGYGGGGGYGGGGGGYGGGNRGGGYGNSDGNWRN

SEQ ID NO: 26972 - protein, 101 aa, Zea mays subsp. mays
  misc_feature (1)..(101): Ceres Seq. ID no. 13636284
CFLRGGLASPPPPVRVRVREVLRGSVSWVSGSRWRRRMLSTAASSAASPGPRTTTPSTTPSAPTARSSSPRSSSIGRRRGPAASASSPSPRRSACGTASRA

SEQ ID NO: 26973 - protein, 94 aa, Zea mays subsp. mays
  misc_feature (1)..(94): Ceres Seq. ID no. 13636285
MRNRIEGMNGKELDGRNITVNEAQSRGGRGGGGGGYGGGRGGGGYGGGGRRDGGGGYGGGGGYGGGGGYGGGGGGYGGGNRGGGYGNSDGNWRN

SEQ ID NO: 26974 - DNA, 1361 bp, Zea mays subsp. mays
  misc_feature (1)..(1361): Ceres Seq. ID no. 13636326
attcgcaccaccgccgcgccgcccaaatcacagccaccgccgccatggccgcctccagccgccctctcgtctccgtgaaagccctggagggcgacatggtcacggacgcccccggcatcgccttaccgcccgtcttcggggcaccgatccgcccggacgtggtccgcttcacccacaagctgctgtcctgcaacaagcgccagccttacgcagtctcccgccgcgctggccaccagacgtcggccgagtcctggggtacgggccgcgctgtgtcccgtatcccccgtgtccccggcggcggcacccaccgcgccggccagggagcattcggcaacatgtgccgcggcggacgcatgttcgcgcccaccaagatctggcgcaagtggcaccgccgcgtcaacgtcaacctccgccgcgtcgccgtcgcctcggcgctcgccgccaccgccgtcccggccctcgtccaggcgcgcggccaccgcatcgagaccgttcccgagatgcccctggttatctccgactcggcagagtccatcgagaagacctcccaggcgctcaagatcctgaagcaggtcggcgcctacgccgacgccgagaaggccaaggactccgtcggcatccgccccggcaagggtaagatgcgcaaccgccgctacattaaccgcaagggcccgctcgtcgtctacggcacagaaggctccaaggtcgtcaaggccttccgcaacctccccggcgtggacgtcgccaacgtcgagcgcctcaacctgctcgacctcgcccccggtggccacctcgggcgctttgtgatctggaccgagagcgcgttcaagaagctcgaggaggtgtatgggagcttcgacgcgccgtcgcagaagaagaagggctttgttctgccgaggcccaagatggccaacgctgacctgggcaggattatcaactctaacgaggtgcagtctgtggttaagccactcaacaaggaggtgaagcgcagggagaagaggaagaacccgctcaagaacatggctgctgtgctcaagctgaacccctacctcggcactgcccggaagatggccacccttgctgaggctgcccgagtcaaggcccggaaggagaagcttgattccaagaggaccaagcttacctcggaggagactgccaaggtcaaggctgccggcaaggcgtggtacaagaccatgatctcggacagtgactacaccgagtttgagaacttcaccaagtggctcggagtgacgcagtgaagcggcctttgagacctagttaagttttgattagttgtgtcgctgaactttgtattgagacgaaatagtattttatcaatctgtcttatcctgcatcttcrc

SEQ ID NO: 26975 - protein, 418 aa, Zea mays subsp. mays
  misc_feature (1)..(418): Ceres Seq. ID no. 15219393
SHHRRAAQITATAAMAASSRPLVSVKALEGDMVTDAPGIALPPVFGAPIRPDVVRFTHKLLSCNKRQPYAVSRRAGHQTSAESWGTGRAVSRIPRVPGGGTHRAGQGAFGNMCRGGRMFAPTKIWRKWHRRVNVNLRRVAVASALAATAVPALVQARGHRIETVPEMPLVISDSAESIEKTSQALKILKQVGAYADAEKAKDSVGIRPGKGKMRNRRYINRKGPLVVYGTEGSKVVKAFRNLPGVDVANVERLNLLDLAPGGHLGRFVIWTESAFKKLEEVYGSFDAPSQKKKGFVLPRPKMANADLGRIINSNEVQSVVKPLNKEVKRREKRKNPLKNMAAVLKLNPYLGTARKMATLAEAARVKARKEKLDSKRTKLTSEETAKVKAAGKAWYKTMISDSDYTEFENFTKWLGVTQ

SEQ ID NO: 26976 - protein, 404 aa, Zea mays subsp. mays
  misc_feature (1)..(404): Ceres Seq. ID no. 15219394
MAASSRPLVSVKALEGDMVTDAPGIALPPVFGAPIRPDVVRFTHKLLSCNKRQPYAVSRRAGHQTSAESWGTGRAVSRIPRVPGGGTHRAGQGAFGNMCRGGRMFAPTKIWRKWHRRVNVNLRRVAVASALAATAVPALVQARGHRIETVPEMPLVISDSAESIEKTSQALKILKQVGAYADAEKAKDSVGIRPGKGKMRNRRYINRKGPLVVYGTEGSKVVKAFRNLPGVDVANVERLNLLDLAPGGHLGRFVIWTESAFKKLEEVYGSFDAPSQKKKGFVLPRPKMANADLGRIINSNEVQSVVKPLNKEVKRREKRKNPLKNMAAVLKLNPYLGTARKMATLAEAARVKARKEKLDSKRTKLTSEETAKVKAAGKAWYKTMISDSDYTEFENFTKWLGVTQ

SEQ ID NO: 26977 - protein, 387 aa, Zea mays subsp. mays
  misc_feature (1)..(387): Ceres Seq. ID no. 15219395
MVTDAPGIALPPVFGAPIRPDVVRFTHKLLSCNKRQPYAVSRRAGHQTSAESWGTGRAVSRIPRVPGGGTHRAGQGAFGNMCRGGRMFAPTKIWRKWHRRVNVNLRRVAVASALAATAVPALVQARGHRIETVPEMPLVISDSAESIEKTSQALKILKQVGAYADAEKAKDSVGIRPGKGKMRNRRYINRKGPLVVYGTEGSKVVKAFRNLPGVDVANVERLNLLDLAPGGHLGRFVIWTESAFKKLEEVYGSFDAPSQKKKGFVLPRPKMANADLGRIINSNEVQSVVKPLNKEVKRREKRKNPLKNMAAVLKLNPYLGTARKMATLAEAARVKARKEKLDSKRTKLTSEETAKVKAAGKAWYKTMISDSDYTEFENFTKWLGVTQ

SEQ ID NO: 26978 - DNA, 1555 bp, Zea mays subsp. mays
  misc_feature (1)..(1555): Ceres Seq. ID no. 13636431
gaaaaaacaaagaaagtcgcggcggaggcaatgtgctgcaacgcgaaggtctcgccactgccggttgagatggacacctccgcctccaaagtgctcaccaacgacgatctccttcacgacatccttctccgcctaggatgcccgagctgcctcgtcagtgccgcgctcaccagcaagtgctggctgcgtggcgcctccgatcaggtcttcgcgcgcgacttctgcgcggaccaccagccgcgcctacttgggatctacgtctccagcggcggcatctctgggtcggagttcatcccattcaggcaacctgctggtggctctaggccggaggtgagtactgtcctcaaccatgccgatttcggtttgggcgacctgccggcgccgagcgtttgggactgccggaacggcatggtcctcttccagttcggtggcgagacctttaaccccgctggtctcgctgcgcgttccccgctgctgtatcctaacatgcacgagagcgtggtgctcccgccgtcgccgcagccgtcctacttcccggagtaccctcacgcgatgctcctccctaccgacaaaggcgacgacgccttgtgctaccgcgtcgacgtccgcatctgggagtcgcacaacaaggccgcggcactggtgtgggtcctgcggtccggctcctggcacatccgctgcatagccgcgggtgttctcgccaagtcgccggcccagatcctgccgactaccgtgctcgacggcggcaagatctacatggcgacccaggcggggtacatcctgggactggacctcgccacggcgagattcttcatcgtcgatctccctcggggtgtggagcttgaccagtacccaggcaaccttgtccactgccgcggggacgactctgtcctctacctcttccatgtggacggggacaacaggctcaacgtctggctccgcaggatggaagacgaccagaaggggcacggcggccctggtgctgctggcggcagcgccggcgccaccaaggggtgggtgctcagggacaccatttccgtgcgtgagacctgtggccatctcgtggagcagggttgggagaaggcaggtgacggggacgaggacgctgctgcagtgatgatagtgggcgccggggacaacgccgagttcgtgttcttggagctcggtgtgactggcgtcgttgcgtacatgcacgtcaagaccagagaggtgaagcaggtgtaccagaggcagccagacgacgaccacttcatcagtgttcgtccgttcatgctcgtcaagccttctgttttcccagtactggaggatgctcatgaaggcgaggccgcagccgcactgcatcaggagtaatcatcccagcagtgccagcagtatcttctctagtatttatttacttatattaaactgcataaggtttgttaaatgttatagattccaggagacagaaatcgagcgttcgatcggcgcgtcctgtgatttctgtcattctgagctatgaacatgtttgctttaatcatgttatcggattcagatgcattaattaatcagtttggtg

SEQ ID NO: 26979 - protein, 449 aa, Zea mays subsp. mays
  misc_feature (1)..(449): Ceres Seq. ID no. 13636432
EKTKKVAAEAMCCNAKVSPLPVEMDTSASKVLTNDDLLHDILLRLGCPSCLVSAALTSKCWLRGASDQVFARDFCADHQPRLLGIYVSSGGISGSEFIPFRQPAGGSRPEVSTVLNHADFGLGDLPAPSVWDCRNGMVLFQFGGETFNPAGLAARSPLLYPNMHESVVLPPSPQPSYFPEYPHAMLLPTDKGDDALCYRVDVRIWESHNKAAALVWVLRSGSWHIRCIAAGVLAKSPAQILPTTVLDGGKIYMATQAGYILGLDLATARFFIVDLPRGVELDQYPGNLVHCRGDDSVLYLFHVDGDNRLNVWLRRMEDDQKGHGGPGAAGGSAGATKGWVLRDTISVRETCGHLVEQGWEKAGDGDEDAAAVMIVGAGDNAEFVFLELGVTGVVAYMHVKTREVKQVYQRQPDDDHFISVRPFMLVKPSVFPVLEDAHEGEAAAALHQE

SEQ ID NO: 26980 - protein, 439 aa, Zea mays subsp. mays
  misc_feature (1)..(439): Ceres Seq. ID no. 13636433
MCCNAKVSPLPVEMDTSASKVLTNDDLLHDILLRLGCPSCLVSAALTSKCWLRGASDQVFARDFCADHQPRLLGIYVSSGGISGSEFIPFRQPAGGSRPEVSTVLNHADFGLGDLPAPSVWDCRNGMVLFQFGGETFNPAGLAARSPLLYPNMHESVVLPPSPQPSYFPEYPHAMLLPTDKGDDALCYRVDVRIWESHNKAAALVWVLRSGSWHIRCIAAGVLAKSPAQILPTTVLDGGKIYMATQAGYILGLDLATARFFIVDLPRGVELDQYPGNLVHCRGDDSVLYLFHVDGDNRLNVWLRRMEDDQKGHGGPGAAGGSAGATKGWVLRDTISVRETCGHLVEQGWEKAGDGDEDAAAVMIVGAGDNAEFVFLELGVTGVVAYMHVKTREVKQVYQRQPDDDHFISVRPFMLVKPSVFPVLEDAHEGEAAAALHQE

SEQ ID NO: 26981 - protein, 426 aa, Zea mays subsp. mays
  misc_feature (1)..(426): Ceres Seq. ID no. 13636434
MDTSASKVLTNDDLLHDILLRLGCPSCLVSAALTSKCWLRGASDQVFARDFCADHQPRLLGIYVSSGGISGSEFIPFRQPAGGSRPEVSTVLNHADFGLGDLPAPSVWDCRNGMVLFQFGGETFNPAGLAARSPLLYPNMHESVVLPPSPQPSYFPEYPHAMLLPTDKGDDALCYRVDVRIWESHNKAAALVWVLRSGSWHIRCIAAGVLAKSPAQILPTTVLDGGKIYMATQAGYILGLDLATARFFIVDLPRGVELDQYPGNLVHCRGDDSVLYLFHVDGDNRLNVWLRRMEDDQKGHGGPGAAGGSAGATKGWVLRDTISVRETCGHLVEQGWEKAGDGDEDAAAVMIVGAGDNAEFVFLELGVTGVVAYMHVKTREVKQVYQRQPDDDHFISVRPFMLVKPSVFPVLEDAHEGEAAAALHQE

SEQ ID NO: 26982 - DNA, 1958 bp, Zea mays subsp. mays
  misc_feature (1)..(1958): Ceres Seq. ID no. 13636500
aaccaacaaatcgacctagctaggcacaagagcgctagacgccgcagcgcagcacgcaccacccaccgagcggcggcggaggcagggcaatccgcaggaagcagaggccgcgcgcgcaggcatgggcgcgccggtgcacggcgccctcgacttgttcctcctgctcctggtgggggcaggggcggcgcccgaggtgacggcgccgcangaacccacattgccagccaccggctccggcgctaccggngcagcggcggtcggagtcaactccaactccgtgctggtggcgctgctggattcgcactacacggagctggcggaactggtggagaaggcgctgctcctgcagacgctggaggacgccgtcgggaagcacaacgtcaccatcttcgcgccgcggaacgaggcgctggagcgggacctggatccggagttcaagcgcttcctgctggagccgcgcaacctcaggtcgctgcaggcgctgctgctctaccacgtcctcccctcgcgcctgccctccgactcctggcccgcggcgtcccaccccacgctgtccggcgaggaggtcgagctcgcccccgccgccggcgccggcatgcgcgtcggccacgccgccgtcacgcgcccggacgccgtgctcaggcccgacggggtcatccacggcatcgagcgcctcctcgtgcccgcgctccgtgcaggaggacttcaaccgccgccgcagcctcgcggcgatctcggccgtgctgcccacgggcgcgcccgaggtggacccgcggacgcaccgcctcaagaagcccgcgccgccggttccccccggcgcgccccccgtgctccccgtctgggacgccatggcgcccggcccctccatcgcccccgcgccggcgcctggcccgggctccgggaagcaccacttcgacgggcacagccaggtcaaggacttcatccagacgctgctcctctacggcggctacaacgagctcgccgacatcctcgtcaacctcacctccctcgccaccgagatgggccgcctcgtctccgagggctacgtcctcaccgtgctcgcccccaacgacgaggccatggcgcgcctcaccacggaccagctcagcgagcccggctcgcccgagaacatcctctactaccacatgatccccgagtaccagaccgaggagtccatgtacaacgccgtgcgccgcttcggcaaggtgcgctacgacacgctgcgcctgccgcacaaggtcgtggcgcgggaggccgacggctccgtcaagttcggccagggcgagggctccgcctacctcttcgacccggacatctacaccgacgggaggatctccgtgcagggcatcgacgccgtgctgttcgcgccggacgacaccaaggccacgcagacagccgaccctaacaggaagcctcccgccatcgtcacccacaagaagaagatcaagctccggcgaggcaagttgttagaggcgacgtgccagatggccgggctcttcggtcagcgatcgcgattcgcgagctgccagtagacggagaaaggatctgttgatctccacgacaccgaaagacgaacgaacgaactgatgggctgccgcaggaggagggggagccgtccacattattgcttgtattttttttcactcttttgtttattgttgagaataataatgaatcaggtgggggatgtaaactctgtgggttgttgttggtgtgtcgtccagatggggaaaaaaatgagaaaaagaaaggcagccaaaaaaaattgtccatacatgaatgaagaagcccaggatcgttgtctttgtataggagaaggaattgaaaccttttgttttttctttttctgccattctttgcttctgttcccgttttgacaatgagaaatatcgggtaaacacacaatcattcttacttattatccattttccttcttttttatatatggtttttcgtcg

SEQ ID NO: 26983 - protein, 427 aa, Zea mays subsp. mays
  misc_feature (1)..(427): Ceres Seq. ID no. 13636501
  misc_feature (29)..(29): Xaa is any aa, unknown or other
  misc_feature (42)..(42): Xaa is any aa, unknown or other
MGAPVHGALDLFLLLLVGAGAAPEVTAPXEPTLPATGSGATXAAAVGVNSNSVLVALLDSHYTELAELVEKALLLQTLEDAVGKHNVTIFAPRNEALERDLDPEFKRFLLEPRNLRSLQALLLYHVLPSRLPSDSWPAASHPTLSGEEVELAPAAGAGMRVGHAAVTRPDAVLRPDGVIHGIERLLVPALRAGGLQPPPQPRGDLGRAAHGRARGGPADAPPQEARAAGSPRRAPRAPRLGRHGARPLHRPRAGAWPGLREAPLRRAQPGQGLHPDAAPLRRLQRARRHPRQPHLPRHRDGPPRLRGLRPHRARPQRRGHGAPHHGPAQRARLAREHPLLPHDPRVPDRGVHVQRRAPLRQGALRHAAPAAQGRGAGGRRLRQVRPGRGLRLPLRPGHLHRREDLRAGHRRRAVRAGRHQGHADSRP

SEQ ID NO: 26984 - protein, 382 aa, Zea mays subsp. mays
  misc_feature (1)..(382): Ceres Seq. ID no. 13636502
  misc_feature (70)..(70): Xaa is any aa, unknown or other
  misc_feature (83)..(83): Xaa is any aa, unknown or other
NQQIDLARHKSARRRSAARTTHRAAAEAGQSAGSRGRARRHGRAGARRPRLVPPAPGGGRGGARGDGAAXTHIASHRLRRYRXSGGRSQLQLRAGGAAGFALHGAGGTGGEGAAPADAGGRRREAQRHHLRAAERGAGAGPGSGVQALPAGAAQPQVAAGAAALPRPPLAPALRLLARGVPPHAVRRGGRARPRRRRRHARRPRRRHAPGRRAQARRGHPRHRAPPRARAPCRRTSTAAAASRRSRPCCPRARPRWTRGRTASRSPRRRFPPARPPCSPSGTPWRPAPPSPPRRRLARAPGSTTSTGTARSRTSSRRCSSTAATTSSPTSSSTSPPSPPRWAASSPRATSSPCSPPTTRPWRASPRTSSASPARPRTSSTTT

SEQ ID NO: 26985 - protein, 269 aa, Zea mays subsp. mays
  misc_feature (1)..(269): Ceres Seq. ID no. 13636503
MRVGHAAVTRPDAVLRPDGVIHGIERLLVPALRAGGLQPPPQPRGDLGRAAHGRARGGPADAPPQEARAAGSPRRAPRAPRLGRHGARPLHRPRAGAWPGLREAPLRRAQPGQGLHPDAAPLRRLQRARRHPRQPHLPRHRDGPPRLRGLRPHRARPQRRGHGAPHHGPAQRARLAREHPLLPHDPRVPDRGVHVQRRAPLRQGALRHAAPAAQGRGAGGRRLRQVRPGRGLRLPLRPGHLHRREDLRAGHRRRAVRAGRHQGHADSRP

SEQ ID NO: 26986 - DNA, 1211 bp, Zea mays subsp. mays
  misc_feature (1)..(1211): Ceres Seq. ID no. 13636562
acaccttccctcggtcccttccatctcctagccgccgccgccgccgccgctgcccaaaaccctacctaccctcttcttcccctcactctcctttcatctccattctaatggcggcccaacccgtccggcgaagctgctagtgcttgtatctactatcttcatcaggtacttcgcgatcctactgaagtattccccgccgccgctgccatggccaccctcaaccctttcgaactccttggcgccgacgacaacgacgacccgacgcagctgattgcggcggcggcggctgctgctcagaaagccgaggcgaagaagtccgccgtggcgcctgctgggaaggctgcccagcctgcggcgaccaccaagttcccgaccaagcccgctcctccctcgcagacggttcgggatgcacgcggcggtggctcatcagctcgtggaggctttggccgtggtgaacgtggccgtggcagaggtggacggggatatggccagaaccgtggcttcagtggtgacaatggcaatgagttccagggaggttatggtggcggaggctatggggatggtgctgtaactgggtggatctgcaaggatgctactgcaaatgaggaggaagaaaaggaagaggacaaggagatgactctggaggaatttgagaaaataagagaggagaagaggaaagcactacttgcattgaaggctgaggagaggaaagttgaagttgacaaggatttgcagtctctgcagccactttcaaacaagaaagaaaatgatgaagttttcattaagctgggttctgacaaggataagaagaaggaaaatgcttgagcgtgatgagcgtgccaagaagtcggtgagcatcaacgagttcctgaaacctgctgaaggagaaaggtactacggcggccgtggccgtggaaggggccgtggggatcgtggtggttttagaggcggatacagagggggatacagtcgtggcccagctgctgctgctccatccattgaggatcaagctcagttcccaagccttggtgggaagtgaagggcgcccagctgctgctgtcaccgagcgttgtgttgtctgctgttgtcatatttaaattttgtccgacgttaaatttctgtgccacggtttaaacggaacaaataatgatgttgcatgtggctatctttagttatgtggtacttgacgttgaataccggagttgttgttt

SEQ ID NO: 26987 - protein, 205 aa, Zea mays subsp. mays
  misc_feature (1)..(205): Ceres Seq. ID no. 13636563
MATLNPFELLGADDNDDPTQLIAAAAAAAQKAEAKKSAVAPAGKAAQPAATTKFPTKPAPPSQTVRDARGGGSSARGGFGRGERGRGRGGRGYGQNRGFSGDNGNEFQGGYGGGGYGDGAVTGWICKDATANEEEEKEEDKEMTLEEFEKIREEKRKALLALKAEERKVEVDKDLQSLQPLSNKKENDEVFIKLGSDKDKKKENA

SEQ ID NO: 26988 - DNA, 1401 bp, Zea mays subsp. mays
  misc_feature (1)..(1401): Ceres Seq. ID no. 13636633
gtcatcaatcaaatactcacacaaccatggggcaccaggcgcagcacggcacggacgacaccgaggagctgctcgcagcccaccggcagctgtggtgccatgccctgggctacgtcaagtccatggcgctcaagtgcgccctggacctgcgcatccccgacaccatcgaccgctgcggcgggagcgccaccctgggcgagctgctcgccgcaagcgagatctcggcgtccaaccacgactacctccgacgggtcatgcgcacgctgacagccatgcgcatcttcgcggccagccacgaccccgccaaggccgacgacgcggccgccatctcctaccagctcaccccggcgtcccggctgctcgtcagcagcagcagcagcgtcgacgacgccgccgggcctcgaaggagaacactactaccccgagcatcctccccaacatcgcccacctggtccgccccaacaccatctccctgctgttcagcatgggcgagtggatgaaggacgagagcgcggcgtccgtgtcgctgtacgagacggtgcaccggcaggggatgtgggcgtgcgtggaggacgacgcggccaacagggccagcttctacgagagcatggacgccgacacccggctcgtgatgcaggccgtggtccgccggtgcccgcacgtgttcgacggcatcaagtcgctcgtcgacgtcggcggcggccgcggcaccgccgccgccgccatcgtcgccgccttcccgcacatccagaggtgcaccgtcatggacctcccccacgtcgtcgccgaggctcccgccggcaccgccggcctgtccttccacggcggcgacatgttcgagcacatcccgtcggctgacgcactcatgctcaagtggatcctgcacgactgggatgaggacaagtgcatcaagataatggagcgctgcaaggaagcgatcggtggcaaggaagcaggggggaaggtgataataatagacacggtgctcggatctcgggcagacgacgacgacgacaagacgtgcagggagacgtatgtgttggatctccacatactgagcttcgtgaacggggcggagcgggaggagcacgagtggaggaggatcttcctggcggctgggttccgtgactacaagatcacgcacacccgaggcatcccgtccatcatcgaggtcttcccgtgatgatcatggatcgagagtcgatcatatatgcatgtttgtacgtgtttgtgtcataataaatcgatcgatcatgttgtttactctttttatttcggtatgtagttgcatctgtgggcgggctaaaataaatcacggccggccgggcttcatcaagcccatgtatccagctgtgtgtaataatgcaatggaaaacgaaccaaaaagaatgcttccattcc

SEQ ID NO: 26989 - protein, 393 aa, Zea mays subsp. mays
  misc_feature (1)..(393): Ceres Seq. ID no. 15220370
SSIKYSHNHGAPGAARHGRHRGAARSPPAAVVPCPGLRQVHGAQVRPGPAHPRHHRPLRRERHPGRAARRKRDLGVQPRLPPTGHAHADSHAHLRGQPRPRQGRRRGRHLLPAHPGVPAARQQQQQRRRRRRASKENTTTPSILPNIAHLVRPNTISLLFSMGEWMKDESAASVSLYETVHRQGMWACVEDDAANRASFYESMDADTRLVMQAVVRRCPHVFDGIKSLVDVGGGRGTAAAAIVAAFPHIQRCTVMDLPHVVAEAPAGTAGLSFHGGDMFEHIPSADALMLKWILHDWDEDKCIKIMERCKEAIGGKEAGGKVIIIDTVLGSRADDDDDKTCRETYVLDLHILSFVNGAEREEHEWRRIFLAAGFRDYKITHTRGIPSIIEVFP

SEQ ID NO: 26990 - protein, 232 aa, Zea mays subsp. mays
  misc_feature (1)..(232): Ceres Seq. ID no. 15220371
MGEWMKDESAASVSLYETVHRQGMWACVEDDAANRASFYESMDADTRLVMQAVVRRCPHVFDGIKSLVDVGGGRGTAAAAIVAAFPHIQRCTVMDLPHVVAEAPAGTAGLSFHGGDMFEHIPSADALMLKWILHDWDEDKCIKIMERCKEAIGGKEAGGKVIIIDTVLGSRADDDDDKTCRETYVLDLHILSFVNGAEREEHEWRRIFLAAGFRDYKITHTRGIPSIIEVFP

SEQ ID NO: 26991 - protein, 228 aa, Zea mays subsp. mays
  misc_feature (1)..(228): Ceres Seq. ID no. 15220372
MKDESAASVSLYETVHRQGMWACVEDDAANRASFYESMDADTRLVMQAVVRRCPHVFDGIKSLVDVGGGRGTAAAAIVAAFPHIQRCTVMDLPHVVAEAPAGTAGLSFHGGDMFEHIPSADALMLKWILHDWDEDKCIKIMERCKEAIGGKEAGGKVIIIDTVLGSRADDDDDKTCRETYVLDLHILSFVNGAEREEHEWRRIFLAAGFRDYKITHTRGIPSIIEVFP

SEQ ID NO: 26992 - DNA, 616 bp, Zea mays subsp. mays
  misc_feature (1)..(616): Ceres Seq. ID no. 13636790
atgcacactcactcactccagtgcccactgcccactgcccactgcccgacgaggaagtttcacgatcccaacccgtataaatcgacgccgcgagggggagcgacgagcgatccccgtaattaacctgtcccagccgcaccgatccaccccccctcggcctcggcctccctccggccatggaggtgttctactacgtcgtgttcggcgcgctggccgccgtcgtggcggggctcgagctcggcaagagcggcaaggaccgcgtcgccaccacctccgcattcaactccttcaagaacaactacgtcctcgtctactccctcatgatgtccggggactggctgcagggcccctacgtctactacctctacagccagtatggcttcgacaagggcgacatcggccgcctcttcatcgccggcttcggatcctccatgctcttcggcaccatcgtcggctccctcgccgacaaacagggccgcaagagggcctgcgtcacctattgcatcagctacatcctcagctgcatcaccaagcactcccccgagtacagggtcctcatgatcggccgcatcctcgggggcatcgccacctcgctgctcttctccgccttcgagtc

SEQ ID NO: 26993 - protein, 205 aa, Zea mays subsp. mays
  misc_feature (1)..(205): Ceres Seq. ID no. 13636791
CTLTHSSAHCPLPTARRGSFTIPTRINRRREGERRAIPVINLSQPHRSTPPRPRPPSGHGGVLLRRVRRAGRRRGGARARQERQGPRRHHLRIQLLQEQLRPRLLPHDVRGLAAGPLRLLPLQPVWLRQGRHRPPLHRRLRILHALRHHRRLPRRQTGPQEGLRHLLHQLHPQLHHQALPRVQGPHDRPHPRGHRHLAALLRLRV

SEQ ID NO: 26994 - protein, 146 aa, Zea mays subsp. mays
  misc_feature (1)..(146): Ceres Seq. ID no. 13636792
MEVFYYVVFGALAAVVAGLELGKSGKDRVATTSAFNSFKNNYVLVYSLMMSGDWLQGPYVYYLYSQYGFDKGDIGRLFIAGFGSSMLFGTIVGSLADKQGRKRACVTYCISYILSCITKHSPEYRVLMIGRILGGIATSLLFSAFE

SEQ ID NO: 26995 - DNA, 388 bp, Zea mays subsp. mays
  misc_feature (1)..(388): Ceres Seq. ID no. 13636823
aagcaaatcgtaaaccgctacaaaaccgtcaaataggaaaaagtaatttgtgtttgtttagtttgttaagaagaatccgatggagtcgtcaccagcagcagcagcgaagccggcgagaggcacaggaggaaggaaaggaggtgatcggaagaagagtgtttccaagtccgtcaaggctggtcttcagtttcccgtcggtcgtatctctcgttacttgaagaaaggtcgttacgcgatcaggtacggcgccggtgctcccgtctacctcgccgccgtcctcgagtaccnnnnnngccgaggttctggagcttgctgggaacgcagcgagggacaacaagaagaacaggataaacccgaggcatctctgcttggcgataaggaacgatga

SEQ ID NO: 26996 - protein, 102 aa, Zea mays subsp. mays
  misc_feature (1)..(102): Ceres Seq. ID no. 13636824
  misc_feature (70)..(70): Xaa is any aa, unknown or other
  misc_feature (71)..(71): Xaa is any aa, unknown or other
  misc_feature (72)..(72): Xaa is any aa, unknown or other
MESSPAAAAKPARGTGGRKGGDRKKSVSKSVKAGLQFPVGRISRYLKKGRYAIRYGAGAPVYLAAVLEYXXXRGSGACWERSEGQQEEQDKPEASLLGDKER

SEQ ID NO: 26997 - protein, 71 aa, Zea mays subsp. mays
  misc_feature (1)..(71): Ceres Seq. ID no. 13636825
ANRKPLQNRQIGKSNLCLFSLLRRIRWSRHQQQQRSRREAQEEGKEVIGRRVFPSPSRLVFSFPSVVSLVT

SEQ ID NO: 26998 - DNA, 455 bp, Zea mays subsp. mays
  misc_feature (1)..(455): Ceres Seq. ID no. 13636910
taatcgtccatccgtatttccgtcacaactcacaacccgagccccccaaacccgaagcagcaggagctcccctgaccttgctccgcctccgatcaaggaaaaggaagatgagctactacggccagcagccccccgtcggcgtcccgccgcagcaaggctacccggggaaggacggctacccgccagcggggtacccgccggccggctaccccccgccggcgcagggctacccgccgcagggctacccgcagcagggttacccacagcagggctacccgccgcagtacgcgcagccgcctccacagcagcagcagagcagcgggccttccttcatggaaggatgcttggctgccctctgctgctgctgcctcctggacgcctgcttctgacggaaccatccgtgccgggtccaacacggctgcaagtgaagcaaccagcttacggaagagctggaa

SEQ ID NO: 26999 - protein, 151 aa, Zea mays subsp. mays
  misc_feature (1)..(151): Ceres Seq. ID no. 13636911
NRPSVFPSQLTTRAPQTRSSRSSPDLAPPPIKEKEDELLRPAAPRRRPAAARLPGEGRLPASGVPAGRLPPAGAGLPAAGLPAAGLPTAGLPAAVRAAASTAAAEQRAFLHGRMLGCPLLLLPPGRLLLTEPSVPGPTRLQVKQPAYGRAG

SEQ ID NO: 27000 - protein, 128 aa, Zea mays subsp. mays
  misc_feature (1)..(128): Ceres Seq. ID no. 13636912
IVHPYFRHNSQPEPPKPEAAGAPLTLLRLRSRKRKMSYYGQQPPVGVPPQQGYPGKDGYPPAGYPPAGYPPPAQGYPPQGYPQQGYPQQGYPPQYAQPPPQQQQSSGPSFMEGCLAALCCCCLLDACF

SEQ ID NO: 27001 - protein, 93 aa, Zea mays subsp. mays
  misc_feature (1)..(93): Ceres Seq. ID no. 13636913
MSYYGQQPPVGVPPQQGYPGKDGYPPAGYPPAGYPPPAQGYPPQGYPQQGYPQQGYPPQYAQPPPQQQQSSGPSFMEGCLAALCCCCLLDACF

SEQ ID NO: 27002 - DNA, 1747 bp, Zea mays subsp. mays
  misc_feature (1)..(1747): Ceres Seq. ID no. 13637284
ggattgggctttcccctccgcctccctcccctcacaaaaaggcggcagcacagcgccacccctcctgtcccgccgagttcggagcgcagcgcaaggcggggggaggagcaagaagccgccggcctccctcctccggctcaccaccaggcttactccgcaccgcgctgccacgggtaggagcggcgtcaaattcgggattcccaagcggcttcagcccggaggttgagccaaagctattttctaagaaaaatggcggcaatgatggtggcgatgactgcgaggagcaagaacagcatattaaccgtggagaagaagcagggctggtctattcagctaccagagctccggttcccttgggattcacatgaagacaagggtttctctctaagtctgcaaggctctggaccttctcatggcggcctgtttgctagtgtgggtcttaaagtgtcgacaggtgcgccagcagtggcgcccggaccggggtgacaaggatattaagattccattcactgatcattgtatgaagtacgtgtccgaggcagttgggtaccaggttattagcactgaagctgagccagtggaggaggtggtggatgctaaggcaaagaaggcagccaagaaacgtgggctgcagctgaaaattaagattgggaacccacatttgaggaggctggttagtggagctattgcaggtgctgtttccaggacttgtgtggcaccactggagacgatcaggactcacttgatggttgggagcaacggtgactccatgacagaggtgttccagtcaatcatgaacactgaggggtggactgggcttttccgtgggaattttgtcaatgttatccgagttgcgccaagcaaagcaattgagctttttgcttttgatactgccaagaaattcttgactccaaaggctgatgagtctccaaagaccttcctacctccatcacttattgctggagcacttgcaggagtcagctcaaccctgtgcacatatcctttggagttgattaagaccagattgacgatagagaaagatgtctataacaacttcctccatgctttcgtcaagattttacgagaagaaggtccatcagagctctaccgtggtctgacaccaagtctgataggagtggtgccatatgccgcgactaattactacgcctatgacaccctaaagaagctctataggaagacgttcaagcaggaggagatcagcaacatcgcaactctcctaattggttcagccgctggcgccatctccagcactgccacattccctctcgaggtggcccgcaagcaaatgcaggtaggagcagtaggagggaggcaggtctacaagaatgtgttccatgcgctctactgcataatggagaaggaaggggttggcggcctgtacaaggggctcggaccgagctgcatcaagttgatgcctgcagcaggcatctcgttcatgtgctacgaggcctgtaagaagatcctggtcgaagacaatgaggatagtgagtgaagctgaagcatgtatgcccctgaggaggggtatgactgatgtgccaggctagaagaggtttgggttgggttgggttggggagtataccctagtattatcaactgatgaaaatgtagatccaagatatttgaacgccctttagatcataatttggttcagttttgtgctgaaatccataaacaatacactcacttgatggtgcatgttgcaaaggggcaattttgtcatgtggcc

SEQ ID NO: 27003 - protein, 366 aa, Zea mays subsp. mays
  misc_feature (1)..(366): Ceres Seq. ID no. 13637285
MAACLLVWVLKCRQVRQQWRPDRGDKDIKIPFTDHCMKYVSEAVGYQVISTEAEPVEEVVDAKAKKAAKKRGLQLKIKIGNPHLRRLVSGAIAGAVSRTCVAPLETIRTHLMVGSNGDSMTEVFQSIMNTEGWTGLFRGNFVNVIRVAPSKAIELFAFDTAKKFLTPKADESPKTFLPPSLIAGALAGVSSTLCTYPLELIKTRLTIEKDVYNNFLHAFVKILREEGPSELYRGLTPSLIGVVPYAATNYYAYDTLKKLYRKTFKQEEISNIATLLIGSAAGAISSTATFPLEVARKQMQVGAVGGRQVYKNVFHALYCIMEKEGVGGLYKGLGPSCIKLMPAAGISFMCYEACKKILVEDNEDSE

SEQ ID NO: 27004 - protein, 330 aa, Zea mays subsp. mays
  misc_feature (1)..(330): Ceres Seq. ID no. 13637286
MKYVSEAVGYQVISTEAEPVEEVVDAKAKKAAKKRGLQLKIKIGNPHLRRLVSGAIAGAVSRTCVAPLETIRTHLMVGSNGDSMTEVFQSIMNTEGWTGLFRGNFVNVIRVAPSKAIELFAFDTAKKFLTPKADESPKTFLPPSLIAGALAGVSSTLCTYPLELIKTRLTIEKDVYNNFLHAFVKILREEGPSELYRGLTPSLIGVVPYAATNYYAYDTLKKLYRKTFKQEEISNIATLLIGSAAGAISSTATFPLEVARKQMQVGAVGGRQVYKNVFHALYCIMEKEGVGGLYKGLGPSCIKLMPAAGISFMCYEACKKILVEDNEDSE

SEQ ID NO: 27005 - protein, 255 aa, Zea mays subsp. mays
  misc_feature (1)..(255): Ceres Seq. ID no. 13637287
MVGSNGDSMTEVFQSIMNTEGWTGLFRGNFVNVIRVAPSKAIELFAFDTAKKFLTPKADESPKTFLPPSLIAGALAGVSSTLCTYPLELIKTRLTIEKDVYNNFLHAFVKILREEGPSELYRGLTPSLIGVVPYAATNYYAYDTLKKLYRKTFKQEEISNIATLLIGSAAGAISSTATFPLEVARKQMQVGAVGGRQVYKNVFHALYCIMEKEGVGGLYKGLGPSCIKLMPAAGISFMCYEACKKILVEDNEDSE

SEQ ID NO: 27006 - DNA, 1932 bp, Zea mays subsp. mays
  misc_feature (1)..(1932): Ceres Seq. ID no. 13637288
aaaaaggggaaaaaaaggagagagaacacacacacacacaaaccccaatcccctgcggcggcgatggacccgtcatcggcgggctccggcggcaactccctcccgtccgtcggccccgacgggcagaagcggcgcgtgtgctacttctacgacccggatgtgggcaactactactacgggcagggccatccgatgaagccgcaccgcatccggatgacgcactcgctgctggcgcgctacggcctcctcaaccagatgcaggtgtaccgccccaacccggcccgcgaccgcgacctctgccgcttccacgccgacgactacatcaacttcctgcgctccgtcacgccggaaacgcagcaggaccagatccgcctgctcaagcgcttcaacgtcggcgaggactgccccgtcttcgacggcctctacagcttctgccagacctatgcgggcgcctccgtcggcggggccgtcaagctcaaccacggccatgacatcgcaatcaactggtcggggggcctgcaccacgccaagaagtgcgaggcgtcgggcttctgctacgtcaatgacatcgtgctcgccatactcgagctgctcaagcatcacgagagagttctgtatgtcgatatcgatatccaccatggtgatggagtggaggaggctttctacacaacagatagggttatgactgtctcgttccacaagtttggtgattatttcccaggaacaggggatatccgtgacattgggcactcaaaagggaagtactactccctgaatgtccctctagatgatgggattgatgatgaaagctaccagtccctttttaagccaatcatgggcaaagttatggaggttttccgccctggtgcagttgtgcttcagtgtggtgctgattccttgtctggggataggttgggctgcttcaacctctcaatcaaaggtcatgcggaatgtgttaggtatatgaggtctttcaacgttccattgttgctccttggtggtggtggatataccataagaaatgttgcacgctgttggtgttatgagactggagttgctcttggccaagagcctgaagacaagatgcctgttaatgagtactatgaatacttcggtccagattacactcttcatgttgcaccaagtaacatggagaacaaaaatacacgacaacaactggatgatatacgatctaaacttctggataatctttcaaaacttcgacatgctcctagtgtccactttcaagagagagttcctgacacagaaatacctgagcaagatgaagatcaagatgatccagatgaacgacatgatcctgactctgatatggaagtggatgaccacaaggctgtggaagagtcatcgaggaggagcattctaggtataaaaatcaagagagaatttggtgaaaatgcgaccagagtacaggatggtggcagggttgcatctgaacatagaggactggaacccatggcagaagacattggttcctccaagcaagctcctcaggcagatgccagtgcaatggccatcgatgaaccaagcaatgtcaagaatgaacctgagagctcaactaaattgcaaggccaagcagctgcgtaccacaagccatagctgcgaccatcaagagttgctgggtttctgctaggcaacttcctgcttgatttggacagtccagaaaacagaagtgaatccgcaatacgtccctgccatttcaaatttgacttggttacacctatctgtgacaatgttaatgtaatgagatcccatggcactagtgaagttcccaggtgtccacctgggattgcttgcggttgagagagacgatagtctgatgacccatgtatacatgaagcccatgatctcagttgtacagtcattagccaatacaaatatgcagtggactaaagggtgattcattgcgtgttc

SEQ ID NO: 27007 - protein, 538 aa, Zea mays subsp. mays
  misc_feature (1)..(538): Ceres Seq. ID no. 13637289
KKGKKRRENTHTHKPQSPAAAMDPSSAGSGGNSLPSVGPDGQKRRVCYFYDPDVGNYYYGQGHPMKPHRIRMTHSLLARYGLLNQMQVYRPNPARDRDLCRFHADDYINFLRSVTPETQQDQIRLLKRFNVGEDCPVFDGLYSFCQTYAGASVGGAVKLNHGHDIAINWSGGLHHAKKCEASGFCYVNDIVLAILELLKHHERVLYVDIDIHHGDGVEEAFYTTDRVMTVSFHKFGDYFPGTGDIRDIGHSKGKYYSLNVPLDDGIDDESYQSLFKPIMGKVMEVFRPGAVVLQCGADSLSGDRLGCFNLSIKGHAECVRYMRSFNVPLLLLGGGGYTIRNVARCWCYETGVALGQEPEDKMPVNEYYEYFGPDYTLHVAPSNMENKNTRQQLDDIRSKLLDNLSKLRHAPSVHFQERVPDTEIPEQDEDQDDPDERHDPDSDMEVDDHKAVEESSRRSILGIKIKREFGENATRVQDGGRVASEHRGLEPMAEDIGSSKQAPQADASAMAIDEPSNVKNEPESSTKLQGQAAAYHKP

SEQ ID NO: 27008 - protein, 517 aa, Zea mays subsp. mays
  misc_feature (1)..(517): Ceres Seq. ID no. 13637290
MDPSSAGSGGNSLPSVGPDGQKRRVCYFYDPDVGNYYYGQGHPMKPHRIRMTHSLLARYGLLNQMQVYRPNPARDRDLCRFHADDYINFLRSVTPETQQDQIRLLKRFNVGEDCPVFDGLYSFCQTYAGASVGGAVKLNHGHDIAINWSGGLHHAKKCEASGFCYVNDIVLAILELLKHHERVLYVDIDIHHGDGVEEAFYTTDRVMTVSFHKFGDYFPGTGDIRDIGHSKGKYYSLNVPLDDGIDDESYQSLFKPIMGKVMEVFRPGAVVLQCGADSLSGDRLGCFNLSIKGHAECVRYMRSFNVPLLLLGGGGYTIRNVARCWCYETGVALGQEPEDKMPVNEYYEYFGPDYTLHVAPSNMENKNTRQQLDDIRSKLLDNLSKLRHAPSVHFQERVPDTEIPEQDEDQDDPDERHDPDSDMEVDDHKAVEESSRRSILGIKIKREFGENATRVQDGGRVASEHRGLEPMAEDIGSSKQAPQADASAMAIDEPSNVKNEPESSTKLQGQAAAYHKP

SEQ ID NO: 27009 - protein, 474 aa, Zea mays subsp. mays
  misc_feature (1)..(474): Ceres Seq. ID no. 13637291
MKPHRIRMTHSLLARYGLLNQMQVYRPNPARDRDLCRFHADDYINFLRSVTPETQQDQIRLLKRFNVGEDCPVFDGLYSFCQTYAGASVGGAVKLNHGHDIAINWSGGLHHAKKCEASGFCYVNDIVLAILELLKHHERVLYVDIDIHHGDGVEEAFYTTDRVMTVSFHKFGDYFPGTGDIRDIGHSKGKYYSLNVPLDDGIDDESYQSLFKPIMGKVMEVFRPGAVVLQCGADSLSGDRLGCFNLSIKGHAECVRYMRSFNVPLLLLGGGGYTIRNVARCWCYETGVALGQEPEDKMPVNEYYEYFGPDYTLHVAPSNMENKNTRQQLDDIRSKLLDNLSKLRHAPSVHFQERVPDTEIPEQDEDQDDPDERHDPDSDMEVDDHKAVEESSRRSILGIKIKREFGENATRVQDGGRVASEHRGLEPMAEDIGSSKQAPQADASAMAIDEPSNVKNEPESSTKLQGQAAAYHKP

SEQ ID NO: 27010 - DNA, 1628 bp, Zea mays subsp. mays
  misc_feature (1)..(1628): Ceres Seq. ID no. 13637378
cctcaatgttgctaggatcatcaatgagccaactgctgctgctattgcctatggtttggacaagaagggtggcgagaagaacatccttgtctttgaccttggtggtggtacttttgatgtcagtatcttgaccattgacaacggtgtgtttgaggtgctggccaccaatggtgacactcatcttggaggtgaggactttgaccagaggatcatggagtacttcatcaagttgatcaagaagaagtacagcaaggacatcagcaaggacaaccgtgctcttggaaagctgaggagggaagccgagcgcgccaagagagccctcagcaaccagcaccaggtccgtgttgagatcgagtccctctttgacgggaccgatttctcggagccgctgacccgtgccaggtttgaggagctgaacaacgacctcttccgcaagaccatgggccctgtcaagaaggccatggaggatgctggccttgagaagagccagatccatgagatcgtcctggttggtggaagcaccaggattcccaaggtccagcagctcctgcgggactacttcgacggcaaggagcccaacaagggtgtcaaccctgatgaggctgttgcctttggtgccgctgtgcagggaagcatcttgagcggcgagggtggtgacgagaccaaagatatcctcctccttgatgtggctcccctcaccctgggtatcgagaccgtcggtggagtcatgaccaagttgatcccgaggaacactgtcatcccgaccaagaagtcgcaggtgttcaccacctaccaggaccagcagaccactgtctccatccaggtctttgagggtgagcgcagtatgaccaaggactgccgtcttctcggcaagttcgacctcaacggcattgcgccagctccaaggggcacaccccagatcgaggtgaccttcgaggtggacgccaacggtatcctaaacgtgaaggcggaggacaagggcacgggcaagtcggagaagatcacgatcacgaacgagaaggggcggctgagccaggaggagatcgaccgcatggtgcgggaggcggaggagttcgcggaggaggacaagaaggtgaaggagcggatcgacgcccgcaaccagctggagacgtacgtgtacaacatgaagaacacggtgggcgacaaggacaagctcgcggacaagctggaggcggaggagaaggagaaggtggaggaggccctcaaggaggcgctggagtggctggacgacaaccagtcggccgagaaggaggactacgaggagaagctcaaggaggtggaggccgtgtgcaaccccatcgtgtcggccgtgtaccagcggtcgggcggcgcccctggcggtgacgctgacggcggtgttgacgacgaccacgacgagctgtatatggttgtagatggtggtggtgacgtggagtgccgggagccgagccaaattttgtaacggtgtttagcggcggacaatacttattactaatcttggtgctgctctgccaatagccgtgctgagcgtagtaactgtttgtttgtaattttttttcttctacttccttggttgttcaggattcgcattcgaattttatgtgaaaaaaagaaggcgcgcttttaat

SEQ ID NO: 27011 - protein, 486 aa, Zea mays subsp. mays
  misc_feature (1)..(486): Ceres Seq. ID no. 13637379
LNVARIINEPTAAAIAYGLDKKGGEKNILVFDLGGGTFDVSILTIDNGVFEVLATNGDTHLGGEDFDQRIMEYFIKLIKKKYSKDISKDNRALGKLRREAERAKRALSNQHQVRVEIESLFDGTDFSEPLTRARFEELNNDLFRKTMGPVKKAMEDAGLEKSQIHEIVLVGGSTRIPKVQQLLRDYFDGKEPNKGVNPDEAVAFGAAVQGSILSGEGGDETKDILLLDVAPLTLGIETVGGVMTKLIPRNTVIPTKKSQVFTTYQDQQTTVSIQVFEGERSMTKDCRLLGKFDLNGIAPAPRGTPQIEVTFEVDANGILNVKAEDKGTGKSEKITITNEKGRLSQEEIDRMVREAEEFAEEDKKVKERIDARNQLETYVYNMKNTVGDKDKLADKLEAEEKEKVEEALKEALEWLDDNQSAEKEDYEEKLKEVEAVCNPIVSAVYQRSGGAPGGDADGGVDDDHDELYMVVDGGGDVECREPSQIL

SEQ ID NO: 27012 - protein, 416 aa, Zea mays subsp. mays
  misc_feature (1)..(416): Ceres Seq. ID no. 13637380
MEYFIKLIKKKYSKDISKDNRALGKLRREAERAKRALSNQHQVRVEIESLFDGTDFSEPLTRARFEELNNDLFRKTMGPVKKAMEDAGLEKSQIHEIVLVGGSTRIPKVQQLLRDYFDGKEPNKGVNPDEAVAFGAAVQGSILSGEGGDETKDILLLDVAPLTLGIETVGGVMTKLIPRNTVIPTKKSQVFTTYQDQQTTVSIQVFEGERSMTKDCRLLGKFDLNGIAPAPRGTPQIEVTFEVDANGILNVKAEDKGTGKSEKITITNEKGRLSQEEIDRMVREAEEFAEEDKKVKERIDARNQLETYVYNMKNTVGDKDKLADKLEAEEKEKVEEALKEALEWLDDNQSAEKEDYEEKLKEVEAVCNPIVSAVYQRSGGAPGGDADGGVDDDHDELYMVVDGGGDVECREPSQIL

SEQ ID NO: 27013 - protein, 340 aa, Zea mays subsp. mays
  misc_feature (1)..(340): Ceres Seq. ID no. 13637381
MGPVKKAMEDAGLEKSQIHEIVLVGGSTRIPKVQQLLRDYFDGKEPNKGVNPDEAVAFGAAVQGSILSGEGGDETKDILLLDVAPLTLGIETVGGVMTKLIPRNTVIPTKKSQVFTTYQDQQTTVSIQVFEGERSMTKDCRLLGKFDLNGIAPAPRGTPQIEVTFEVDANGILNVKAEDKGTGKSEKITITNEKGRLSQEEIDRMVREAEEFAEEDKKVKERIDARNQLETYVYNMKNTVGDKDKLADKLEAEEKEKVEEALKEALEWLDDNQSAEKEDYEEKLKEVEAVCNPIVSAVYQRSGGAPGGDADGGVDDDHDELYMVVDGGGDVECREPSQIL

SEQ ID NO: 27014 - DNA, 2345 bp, Zea mays subsp. mays
  misc_feature (1)..(2345): Ceres Seq. ID no. 13637382
atcagacagacgcagactctctcacccgactcgtcagacgtcagccagcagttcgaaaccaaggatcgatccaggagcttccggaaggcgaggcgcgcgcgcagcgtcgaggtgctggtgccggtgccgcccatggatcgggctcgcggatccgcgttcctgctcggcgtcctgctcgcaggatccttgttcgcgttttcagttgccatagaggagaccaagaagctcgggaccgtgatcggtatcgatctcggtaccacctactcctgtgtcggtgtgtacaagaacggtcatgtcgagatcatcgccaatgaccagggtaaccgtatcacaccctcatgggttgccttcaccgatagcgagaggctcatcgggtgaggctgccaagaaccaggcagccgtcaaccctgagaggaccatctttgacgtcaagcgtctcatcggaagaaagttcgcggacaaggaagtccagagggacatgaaacttgttccctacaagattattaacaaggatggcaagccctacattcaggtcaagatcaaggatggggagaacaaggtcttcagccctgaggagatcagtgccatgattcttggcaagatgaaggatactgctgaggcataccttggcaagaagatcaatgatgctgtcgtcactgtccctgcgtacttcaatgatgcgcagaggcaggcaaccaaggatgctggtgtcattgctggcctcaatgttgctaggatcatcaatgagccaactgctgctgctattgcctatggtttggacaagaagggtggcgagaagaacatccttgtctttgaccttggtggtggcacttttgatgtcagtatcttgaccattgacaacggtgtgtttgaggtgctggccaccaatggtgacactcatcttggaggtgaggactttgaccagaggatcatggagtacttcatcaagttgatcaagaagaagtacagcaaggacatcagcaaggacaaccgtgctcttggaaagctgaggagggaagccgagcgcgccaagagagccctcagcaaccagcaccaggtccgtgttgagatcgagtccctctttgacgggaccgatttctcggagccgctgacccgtgccaggtttgaggagctgaacaacgacctcttccgcaagaccatgggccctgtcaagaaggccatggaggatgctggccttgagaagagccagatccacgagatcgtcctggttggtggaagcaccaggattcccaaggtccagcagctcctgcgggactacttcgacggcaaggagcccaacaagggtgtcaaccctgatgaggctgttgcctttggtgccgctgtgcagggaagcatcttgagcggcgagggtggtgacgagaccaaagatatcctcctccttgatgtggctcccctcaccctgggtatcgagaccgtcggtggagtcatgaccaagttgatcccgaggaacactgtcatcccgaccaagaagtcgcaggtgttcaccacctaccaggaccagcagaccactgtctccatccaggtctttgagggtgagcgcagtatgaccaaggactgccgtcttctcggcaagttcgacctcaacggcattgcgccagctccaaggggcacaccccagatcgaggtgaccttcgaggtggacgccaacggtatcctgaacgtgaaggcggaggacaagggcacgggcaagtcggagaagatcacgatcacgaacgagaaggggcggctgagccaggaggagatcgaccgcatggtgcgggaggcggaggagttcgcggaggaggacaagaaggtgaaggagcggatcgacgcccgcaaccagctggagacgtacgtgtacaacatgaagaacacggtgggcgacaaggacaagctcgcggacaagctggaggcggaggagaaggagaaggtggaggaggccctcaaggaggcgctggagtggctggacgacaaccagtcggccgagaaggaggactacgaggagaagctcaaggaggtggaggccgtgtgcaaccccatcgtgtcggccgtgtaccagcggtcgggcggcgcccctggcggtgacgctgacggcggtgttgacgacgaccacgacgagctgtagatggttgtagatggtggtggtgacgtggagtgccgggagccgagccaaattttgtaacggtgtttagcggcggacaatacttattactaatcttggtgctgctctgccaatagccgtgctgagcgtagaaactgtttgtttgtaatttttttttcttctacttccttggttgttcaggattcggattcgaattttatgtgaaaaaagaagtcgcgctttt

SEQ ID NO: 27015 - protein, 610 aa, Zea mays subsp. mays
  misc_feature (1)..(610): Ceres Seq. ID no. 13637383
MSRSSPMTRVTVSHPHGLPSPIARGSSGEAAKNQAAVNPERTIFDVKRLIGRKFADKEVQRDMKLVPYKIINKDGKPYIQVKIKDGENKVFSPEEISAMILGKMKDTAEAYLGKKINDAVVTVPAYFNDAQRQATKDAGVIAGLNVARIINEPTAAAIAYGLDKKGGEKNILVFDLGGGTFDVSILTIDNGVFEVLATNGDTHLGGEDFDQRIMEYFIKLIKKKYSKDISKDNRALGKLRREAERAKRALSNQHQVRVEIESLFDGTDFSEPLTRARFEELNNDLFRKTMGPVKKAMEDAGLEKSQIHEIVLVGGSTRIPKVQQLLRDYFDGKEPNKGVNPDEAVAFGAAVQGSILSGEGGDETKDILLLDVAPLTLGIETVGGVMTKLIPRNTVIPTKKSQVFTTYQDQQTTVSIQVFEGERSMTKDCRLLGKFDLNGIAPAPRGTPQIEVTFEVDANGILNVKAEDKGTGKSEKITITNEKGRLSQEEIDRMVREAEEFAEEDKKVKERIDARNQLETYVYNMKNTVGDKDKLADKLEAEEKEKVEEALKEALEWLDDNQSAEKEDYEEKLKEVEAVCNPIVSAVYQRSGGAPGGDADGGVDDDHDEL

SEQ ID NO: 27016 - protein, 604 aa, Zea mays subsp. mays
  misc_feature (1)..(604): Ceres Seq. ID no. 13637384
MTRVTVSHPHGLPSPIARGSSGEAAKNQAAVNPERTIFDVKRLIGRKFADKEVQRDMKLVPYKIINKDGKPYIQVKIKDGENKVFSPEEISAMILGKMKDTAEAYLGKKINDAVVTVPAYFNDAQRQATKDAGVIAGLNVARIINEPTAAAIAYGLDKKGGEKNILVFDLGGGTFDVSILTIDNGVFEVLATNGDTHLGGEDFDQRIMEYFIKLIKKKYSKDISKDNRALGKLRREAERAKRALSNQHQVRVEIESLFDGTDFSEPLTRARFEELNNDLFRKTMGPVKKAMEDAGLEKSQIHEIVLVGGSTRIPKVQQLLRDYFDGKEPNKGVNPDEAVAFGAAVQGSILSGEGGDETKDILLLDVAPLTLGIETVGGVMTKLIPRNTVIPTKKSQVFTTYQDQQTTVSIQVFEGERSMTKDCRLLGKFDLNGIAPAPRGTPQIEVTFEVDANGILNVKAEDKGTGKSEKITITNEKGRLSQEEIDRMVREAEEFAEEDKKVKERIDARNQLETYVYNMKNTVGDKDKLADKLEAEEKEKVEEALKEALEWLDDNQSAEKEDYEEKLKEVEAVCNPIVSAVYQRSGGAPGGDADGGVDDDHDEL

SEQ ID NO: 27017 - protein, 548 aa, Zea mays subsp. mays
  misc_feature (1)..(548): Ceres Seq. ID no. 13637385
MKLVPYKIINKDGKPYIQVKIKDGENKVFSPEEISAMILGKMKDTAEAYLGKKINDAVVTVPAYFNDAQRQATKDAGVIAGLNVARIINEPTAAAIAYGLDKKGGEKNILVFDLGGGTFDVSILTIDNGVFEVLATNGDTHLGGEDFDQRIMEYFIKLIKKKYSKDISKDNRALGKLRREAERAKRALSNQHQVRVEIESLFDGTDFSEPLTRARFEELNNDLFRKTMGPVKKAMEDAGLEKSQIHEIVLVGGSTRIPKVQQLLRDYFDGKEPNKGVNPDEAVAFGAAVQGSILSGEGGDETKDILLLDVAPLTLGIETVGGVMTKLIPRNTVIPTKKSQVFTTYQDQQTTVSIQVFEGERSMTKDCRLLGKFDLNGIAPAPRGTPQIEVTFEVDANGILNVKAEDKGTGKSEKITITNEKGRLSQEEIDRMVREAEEFAEEDKKVKERIDARNQLETYVYNMKNTVGDKDKLADKLEAEEKEKVEEALKEALEWLDDNQSAEKEDYEEKLKEVEAVCNPIVSAVYQRSGGAPGGDADGGVDDDHDEL

SEQ ID NO: 27018 - DNA, 980 bp, Zea mays subsp. mays
  misc_feature (1)..(980): Ceres Seq. ID no. 13637386
ctctccgtcgcatttcccgtccggtctttccgttacccggcggcttaaaccctagttcccattccatcttcgtttccgctccgccgccgtcgatggagttctggggtctcgaggtcaaacctggatccactgtcaagtgtgagcctggacatggctttatcctgcacgtttcccaggctgcccttggggaatcaaagaaaagtgacagtgccttaatgtatgtcaaagttgatgacaagaagcttgccattggaacgctctctatcgacaaatacccacagatacaattcgatttggttttcaataaagagtttgagctgtcacacacatcgaaaactaccagtgtatttttctctggttacaaggttgagcagccaattgagggagatgaaatggatcttgattctgaggatgaagaggaggagctaaacattccagtaatcaaggaaaatggcaaaggtgatgggaaggaggagcagaaaaatcaagagaaggcagtagctgctacagcttcaaaatcaagtcttggccttgaaaagaaaagcaaggatgactctgatgattctgatgaggatgagtctgatgattctgatgaggatgattctgatgattctgatgagggcgagggattatctcctgacgaaggcgatgatgattcaagtgatgaggatgataccagtgatgatgacgaggaagaaaccccaactcctaaaaagccagaggcaggcaagaagagaggtgctgaaaatgctctgaaaacgcctctttntgataagaaagcaaaggttgccacaccgccagcccagaaaacaggtggcaagaagggtgccacccatgtggcaactccacacccagcaaaaggcaagacccctgcaaacaatgacaaatcaacggagaagtctccaaaatntggtgggtcagtcccttgcaaatcatgcaacaagacattcaatagtgagatggctntgcaggctcagctc

SEQ ID NO: 27019 - protein, 326 aa, Zea mays subsp. mays
  misc_feature (1)..(326): Ceres Seq. ID no. 13637387
  misc_feature (256)..(256): Xaa is any aa, unknown or other
  misc_feature (303)..(303): Xaa is any aa, unknown or other
  misc_feature (322)..(322): Xaa is any aa, unknown or other
LRRISRPVFPLPGGLNPSSHSIFVSAPPPSMEFWGLEVKPGSTVKCEPGHGFILHVSQAALGESKKSDSALMYVKVDDKKLAIGTLSIDKYPQIQFDLVFNKEFELSHTSKTTSVFFSGYKVEQPIEGDEMDLDSEDEEEELNIPVIKENGKGDGKEEQKNQEKAVAATASKSSLGLEKKSKDDSDDSDEDESDDSDEDDSDDSDEGEGLSPDEGDDDSSDEDDTSDDDEEETPTPKKPEAGKKRGAENALKTPLXDKKAKVATPPAQKTGGKKGATHVATPHPAKGKTPANNDKSTEKSPKXGGSVPCKSCNKTFNSEMAXQAQL

SEQ ID NO: 27020 - protein, 296 aa, Zea mays subsp. mays
  misc_feature (1)..(296): Ceres Seq. ID no. 13637388
  misc_feature (226)..(226): Xaa is any aa, unknown or other
  misc_feature (273)..(273): Xaa is any aa, unknown or other
  misc_feature (292)..(292): Xaa is any aa, unknown or other
MEFWGLEVKPGSTVKCEPGHGFILHVSQAALGESKKSDSALMYVKVDDKKLAIGTLSIDKYPQIQFDLVFNKEFELSHTSKTTSVFFSGYKVEQPIEGDEMDLDSEDEEEELNIPVIKENGKGDGKEEQKNQEKAVAATASKSSLGLEKKSKDDSDDSDEDESDDSDEDDSDDSDEGEGLSPDEGDDDSSDEDDTSDDDEEETPTPKKPEAGKKRGAENALKTPLXDKKAKVATPPAQKTGGKKGATHVATPHPAKGKTPANNDKSTEKSPKXGGSVPCKSCNKTFNSEMAXQAQL

SEQ ID NO: 27021 - protein, 255 aa, Zea mays subsp. mays
  misc_feature (1)..(255): Ceres Seq. ID no. 13637389
  misc_feature (185)..(185): Xaa is any aa, unknown or other
  misc_feature (232)..(232): Xaa is any aa, unknown or other
  misc_feature (251)..(251): Xaa is any aa, unknown or other
MYVKVDDKKLAIGTLSIDKYPQIQFDLVFNKEFELSHTSKTTSVFFSGYKVEQPIEGDEMDLDSEDEEEELNIPVIKENGKGDGKEEQKNQEKAVAATASKSSLGLEKKSKDDSDDSDEDESDDSDEDDSDDSDEGEGLSPDEGDDDSSDEDDTSDDDEEETPTPKKPEAGKKRGAENALKTPLXDKKAKVATPPAQKTGGKKGATHVATPHPAKGKTPANNDKSTEKSPKXGGSVPCKSCNKTFNSEMAXQAQL

SEQ ID NO: 27022 - DNA, 2187 bp, Zea mays subsp. mays
  misc_feature (1)..(2187): Ceres Seq. ID no. 13666028
accgaaccaaacaacacacgtcaaagcggaaaacctcagaaaaccacaataaatcatcctcgtccaccactgcccccgctctgctgcaactccactcggcccggccgctctttccacccaccttgatcctctgatccgttggtgcttgaccgatccatggacacccacatcggatccgtgaacggggcggcgtcgaaccagacggttggctgcccggcgtcggcgccggggtgcccgatggcgtccacgccggcgcagcccgcggcgaccctgtcggcgggggaggcgtcgctggggcgccacctcgcgcgtcgcctcgtgcaggtcggcgtcaacgatgtattcgcggttccgggggacttcaacctcacgctgctcgaccacctgatcgccgagcccggcctgcgcctcgtcggctgctgcaacgagctcaacgccgggtacgccgccgacgggtacgcgcgcgcgcgcggcgtcggggcctgcgccgtcacgttcacagtcggggggctcagcgtgctcaacgccatcgcgggcgcctacagcgagaacctgcccgtcatctgcatcgccggcgggcccaactccaacgactacgggaccaaccgcatcctccaccacaccatcggcctccccgacttctcgcaggagctccgctgcttccagaccgtcacctgccatcaggcggtggtgaacaatctggatgacgcgcacgagcagatcgacacggccattgccacggcactgagggagagcaagcccgtgtacctcagcatcagctgcaacctccctgggctgcctcatcctaccttcagccgcgacccagtgcccttcttcctcacccccaggacgagcaacaagatggggctagaggctgcagtggaggcaactgtcgaattcctgaacaaggcggtgaagccagtccttgtcgccggccccaaactgcgtgtggcaaaggcaggaaaggcatttgtcgatatggtagatgccagtggctatgcctatgccgtgatgccatcggccaagggtcttgtgccagagactcacccccacttcatcggcacctactggggcgccgtcagcaccgccttctgtgcggagattgttgagtccgcagatgcctacctctttgcaggccccattttcaatgactacagctctgttggctactcattcctcctcaagaaggaaaaggccatcatcgtccagcctgagcgtgtgatagtggggaatgggccggcattcggatgtgtgatgatgaaagagttcttgtctgaattggctaagagggttaataagaacaccactgcctatgagaattacaagaggatctttgtacctgagggccagccgctggaaagcgagccaaatgagccactgcgagtgaatgtgctcttcaagcacgtccagaagatgttgactggtgatagtgcggtgattgctgagactggtgactcctggttcaactgccagaagcttaagctgccagaaggctgtgggtatgaattccaaatgcagtatggttcgattggatggtcagtgggtgcattgctcggatatgctcagggtgcgaaccacaagcgtgtgattgccttcattggtgatgggagcttccaggttacagcacaggatgtgtcaactatgctgcgatgtgagcagaacagcataatcttcctgatcaacaacggtgggtacacgattgaggtggaaatccatgacgggccatacaacgtcatcaagaactggaactacactggctttgtggacgccatccacaatggcttgggcaagtgctggacctccaaggtgaagagcgaggaggacctgacggctgccattgagacagcgctaggggagaagaaggactgcctgtgcttcatcgaggtgatcgcgcacaaggacgacaccagcaaagagctgctggaatggggctctagggtttctgccgccaactcccgaccaccaaatcctcagtagaagtccgcaggctccaagcctcggagtgtcattagtgatagtaagctgtagcacggtgggggctcaaccgaataacctgaacgcattgccctttctgttacgtgttttattttattgtgtttctgtggtcgtatatctgttttgtgacgtgttccctgcttctcccatgtgaattccagaagaactatgagaaaattcaggttggttgtc

SEQ ID NO: 27023 - protein, 606 aa, Zea mays subsp. mays
  misc_feature (1)..(606): Ceres Seq. ID no. 13666029
MDTHIGSVNGAASNQTVGCPASAPGCPMASTPAQPAATLSAGEASLGRHLARRLVQVGVNDVFAVPGDFNLTLLDHLIAEPGLRLVGCCNELNAGYAADGYARARGVGACAVTFTVGGLSVLNAIAGAYSENLPVICIAGGPNSNDYGTNRILHHTIGLPDFSQELRCFQTVTCHQAVVNNLDDAHEQIDTAIATALRESKPVYLSISCNLPGLPHPTFSRDPVPFFLTPRTSNKMGLEAAVEATVEFLNKAVKPVLVAGPKLRVAKAGKAFVDMVDASGYAYAVMPSAKGLVPETHPHFIGTYWGAVSTAFCAEIVESADAYLFAGPIFNDYSSVGYSFLLKKEKAIIVQPERVIVGNGPAFGCVMMKEFLSELAKRVNKNTTAYENYKRIFVPEGQPLESEPNEPLRVNVLFKHVQKMLTGDSAVIAETGDSWFNCQKLKLPEGCGYEFQMQYGSIGWSVGALLGYAQGANHKRVIAFIGDGSFQVTAQDVSTMLRCEQNSIIFLINNGGYTIEVEIHDGPYNVIKNWNYTGFVDAIHNGLGKCWTSKVKSEEDLTAAIETALGEKKDCLCFIEVIAHKDDTSKELLEWGSRVSAANSRPPNPQ

SEQ ID NO: 27024 - protein, 579 aa, Zea mays subsp. mays
  misc_feature (1)..(579): Ceres Seq. ID no. 13666030
MASTPAQPAATLSAGEASLGRHLARRLVQVGVNDVFAVPGDFNLTLLDHLIAEPGLRLVGCCNELNAGYAADGYARARGVGACAVTFTVGGLSVLNAIAGAYSENLPVICIAGGPNSNDYGTNRILHHTIGLPDFSQELRCFQTVTCHQAVVNNLDDAHEQIDTAIATALRESKPVYLSISCNLPGLPHPTFSRDPVPFFLTPRTSNKMGLEAAVEATVEFLNKAVKPVLVAGPKLRVAKAGKAFVDMVDASGYAYAVMPSAKGLVPETHPHFIGTYWGAVSTAFCAEIVESADAYLFAGPIFNDYSSVGYSFLLKKEKAIIVQPERVIVGNGPAFGCVMMKEFLSELAKRVNKNTTAYENYKRIFVPEGQPLESEPNEPLRVNVLFKHVQKMLTGDSAVIAETGDSWFNCQKLKLPEGCGYEFQMQYGSIGWSVGALLGYAQGANHKRVIAFIGDGSFQVTAQDVSTMLRCEQNSIIFLINNGGYTIEVEIHDGPYNVIKNWNYTGFVDAIHNGLGKCWTSKVKSEEDLTAAIETALGEKKDCLCFIEVIAHKDDTSKELLEWGSRVSAANSRPPNPQ

SEQ ID NO: 27025 - protein, 371 aa, Zea mays subsp. mays
  misc_feature (1)..(371): Ceres Seq. ID no. 13666031
MGLEAAVEATVEFLNKAVKPVLVAGPKLRVAKAGKAFVDMVDASGYAYAVMPSAKGLVPETHPHFIGTYWGAVSTAFCAEIVESADAYLFAGPIFNDYSSVGYSFLLKKEKAIIVQPERVIVGNGPAFGCVMMKEFLSELAKRVNKNTTAYENYKRIFVPEGQPLESEPNEPLRVNVLFKHVQKMLTGDSAVIAETGDSWFNCQKLKLPEGCGYEFQMQYGSIGWSVGALLGYAQGANHKRVIAFIGDGSFQVTAQDVSTMLRCEQNSIIFLINNGGYTIEVEIHDGPYNVIKNWNYTGFVDAIHNGLGKCWTSKVKSEEDLTAAIETALGEKKDCLCFIEVIAHKDDTSKELLEWGSRVSAANSRPPNPQ

SEQ ID NO: 27026 - DNA, 3723 bp, Zea mays subsp. mays
  misc_feature (1)..(3723): Ceres Seq. ID no. 13666073
taggatcaaaaccgtctcgccgctgcaataatcttttgtcaattcttaatccctcgcgtcgacagcgacagcggaaccaactcacgttgccgcggcttcctccatcggtgcggtgccctgtccttttctctcgtccctcctccccccgtatagttaagccccgccccgctactactactactagcagcagcagcgctctcgcagcgggagatgcggtgttgatccgtgccccgctcggatctcgggactggtgccggctctgcccaggccccaggctccaggccagctccctcgacgtttctcggcgagctcgcttgccatggagggcgacgcggacggcgtgaagtcggggaggcgcggtggcggacaggtgtgccagatctgcggcgacggcgtgggcaccacggcggagggggacgtcttcgccgcctgcgacgtctgcgggtttccggtgtgccgcccctgctacgagtacgagcgcaaggacggcacgcaggcgtgcccccagtgcaagaccaagtacaagcgccacaaggggagcccggcgatccgtggggaggaaggagacgacactgatgccgatagcgacttcaattaccttgcatctggcaatgaggaccagaagcagaagattgccgacagaatgcgcagctggcgcatgaacgttgggggcagcggggatgttggtcgccccaagtatgacagtggcgagatcgggcttaccaagtatgacagtggcgagattcctcggggatacatcccatcagtcactaacagccagatctcaggagaaatccctggtgcttcccctgaccatcatatgatgtccccaactgggaacattggcaagcgtgctccatttccctatgtgaaccattcgccaaatccgtcaagggagttctctggtagcattgggaatgttgcctggaaagagagggttgatggctggaaaatgaagcaggacaaggggacgattcccatgacgaatggcacaagcattgctccctctgagggtcggggtgttggtgatattgatgcatcaactgattacaacatggaagatgccttattgaacgacgaaactcgacagcctctatctaggaaagttccacttccttcctccaggataaatccatacaggatggtcattgtgctgcgattgattgttctaagcatcttcttgcactaccgtatcacaaatcctgtgcgcaatgcatacccattatggcttctatctgttatatgtgagatctggtttgctctttcgtggatattggatcagttccctaagtggtttccaatcaaccgggagacgtaccttgataggctggcattaaggtatgaccgggaaggtgagccatctcagttggctgctgttgacattttcgtcagtacagtcgacccaatgaaggagcctcctcttgtcactgccaataccgtgctatccattcttgctgtggattaccctgtggataaggtctcttgctatgtatctgatgatggagctgcgatgctgacatttgatgcactagctgagacttcagagtttgctagaaaatgggtaccatttgttaagaagtacaacattgaacctagagctcctgaatggtacttctcccagaaaattgattacttgaaggacaaagtgcacccttcatttgttaaagaccgccgggccatgaagagagaatatgaagaattcaaagttagggtaaatggccttgttgctaaggcacagaaagttcctgaggaaggatggatcatgcaagatggcacaccatggccaggaaacaataccngggaccatcctggaatgattcaggttttccttggtcacagtggtggccttgatactgagggcaatgagctaccccgtttggtctatgtttctcgtgaaaagcgtcctggattccagcatcacaagaaagctggtgccatgaatgctcttgttcgtgtctcagctgtgcttaccaatggacaatacatgttgaatcttgattgtgatcactacattaacaacagtaaggctctcagggaagctatgtgcttccttatggaccctaacctaggaaggagtgtctgctacgtccagtttccccagagattcgatggcattgacaggaatgatcgatatgccaacaggaacaccgtgtttttcgatattaacttgagaggtcttgatggcatccaaggaccagtttatgtcggaactggctgtgttttcaaccgaacagctctatatggttatgagcccccaattaagcagaagaagggtggtttcttgtcatcactatgtggcggtaggaagaaggcaagcaaatcaaagaagggctcggacaagaagaagtcgcagaagcatgtggacagttctgtgccagtattcaaccttgaagatatagaggagggagttgaaggcgctggatttgacgacgagaaatcacttcttatgtctcaaatgagcctggagaagagatttggccagtccgcagcgtttgttgcctccactctgatggagtatggtggtgttcctcagtccgcaactccggagtctcttctgaaagaagctatccatgttataagctgtggctatgaggacaagactgaatggggaactgagatcgggtggatctacggttctgtgacagaagacattctcaccggattcaagatgcacgcgcgaggctggcggtcgatctactgcatgcccaagcggccagctttcaaggggtctgcccccatcaatctttcggaccgtctgaaccaggtgctccggtgggctcttgggtccgtggagatcctcttcagccggcactgccccctgtggtacggctacggagggcggctcaagttcctggagagattcgcgtacatcaacaccaccatctacccgctcacgtccatcccgcttctcatctactgcatcctgcccgccatctgtctgctcaccggaaagttcatcattccagagatcagcaacttcgccagcatctggttcatctccctcttcatctcgatcttcgccacgggcatcctggagatgaggtggagcggggtgggcatcgacgagtggtggaggaacgagcagttctgggtgatcgggggcatctccgcgcacctcttcgccgtgttccagggcctgctcaaggtgctggccggcatcgacaccaacttcaccgtcacctccaaggcctcggacgaggacggcgacttcgcggagctgtacatgttcaagtggacgacgctcctgatcccgcccaccaccatcctgatcatcaacctggtcggcgtcgtcgccggcatctcctacgccatcaacagcggataccagtcgtggggcccgctcttcggcaagctcttcttcgccttctgggtcatcgtccacctgtacccgttcctcaagggcctcatgggcaggcagaaccgcaccccgaccatcgtcgtcgtctgggccatcctgctggcgtccatcttctccttgctgtgggttcgcatcgaccccttcaccacccgcgtcactggcccggatacccagacgtgtggcatcaactgctagggaagtggaaggtttgtactttgtagaaacggaggaataccacgtgccatctgttgtctgttaagttatatatatataagcagcaagtggcgttatttacagctacgtacagaccagtggatattgtttaccacaaagttttacttgtgttaatatgcattcttttgttg

SEQ ID NO: 27027 - protein, 1077 aa, Zea mays subsp. mays
  misc_feature (1)..(1077): Ceres Seq. ID no. 13666074
  misc_feature (494)..(494): Xaa is any aa, unknown or other
MEGDADGVKSGRRGGGQVCQICGDGVGTTAEGDVFAACDVCGFPVCRPCYEYERKDGTQACPQCKTKYKRHKGSPAIRGEEGDDTDADSDFNYLASGNEDQKQKIADRMRSWRMNVGGSGDVGRPKYDSGEIGLTKYDSGEIPRGYIPSVTNSQISGEIPGASPDHHMMSPTGNIGKRAPFPYVNHSPNPSREFSGSIGNVAWKERVDGWKMKQDKGTIPMTNGTSIAPSEGRGVGDIDASTDYNMEDALLNDETRQPLSRKVPLPSSRINPYRMVIVLRLIVLSIFLHYRITNPVRNAYPLWLLSVICEIWFALSWILDQFPKWFPINRETYLDRLALRYDREGEPSQLAAVDIFVSTVDPMKEPPLVTANTVLSILAVDYPVDKVSCYVSDDGAAMLTFDALAETSEFARKWVPFVKKYNIEPRAPEWYFSQKIDYLKDKVHPSFVKDRRAMKREYEEFKVRVNGLVAKAQKVPEEGWIMQDGTPWPGNNTXDHPGMIQVFLGHSGGLDTEGNELPRLVYVSREKRPGFQHHKKAGAMNALVRVSAVLTNGQYMLNLDCDHYINNSKALREAMCFLMDPNLGRSVCYVQFPQRFDGIDRNDRYANRNTVFFDINLRGLDGIQGPVYVGTGCVFNRTALYGYEPPIKQKKGGFLSSLCGGRKKASKSKKGSDKKKSQKHVDSSVPVFNLEDIEEGVEGAGFDDEKSLLMSQMSLEKRFGQSAAFVASTLMEYGGVPQSATPESLLKEAIHVISCGYEDKTEWGTEIGWIYGSVTEDILTGFKMHARGWRSIYCMPKRPAFKGSAPINLSDRLNQVLRWALGSVEILFSRHCPLWYGYGGRLKFLERFAYINTTIYPLTSIPLLIYCILPAICLLTGKFIIPEISNFASIWFISLFISIFATGILEMRWSGVGIDEWWRNEQFWVIGGISAHLFAVFQGLLKVLAGIDTNFTVTSKASDEDGDFAELYMFKWTTLLIPPTTILIINLVGVVAGISYAINSGYQSWGPLFGKLFFAFWVIVHLYPFLKGLMGRQNRTPTIVVVWAILLASIFSLLWVRIDPFTTRVTGPDTQTCGINC

SEQ ID NO: 27028 - protein, 969 aa, Zea mays subsp. mays
  misc_feature (1)..(969): Ceres Seq. ID no. 13666075
  misc_feature (386)..(386): Xaa is any aa, unknown or other
MRSWRMNVGGSGDVGRPKYDSGEIGLTKYDSGEIPRGYIPSVTNSQISGEIPGASPDHHMMSPTGNIGKRAPFPYVNHSPNPSREFSGSIGNVAWKERVDGWKMKQDKGTIPMTNGTSIAPSEGRGVGDIDASTDYNMEDALLNDETRQPLSRKVPLPSSRINPYRMVIVLRLIVLSIFLHYRITNPVRNAYPLWLLSVICEIWFALSWILDQFPKWFPINRETYLDRLALRYDREGEPSQLAAVDIFVSTVDPMKEPPLVTANTVLSILAVDYPVDKVSCYVSDDGAAMLTFDALAETSEFARKWVPFVKKYNIEPRAPEWYFSQKIDYLKDKVHPSFVKDRRAMKREYEEFKVRVNGLVAKAQKVPEEGWIMQDGTPWPGNNTXDHPGMIQVFLGHSGGLDTEGNELPRLVYVSREKRPGFQHHKKAGAMNALVRVSAVLTNGQYMLNLDCDHYINNSKALREAMCFLMDPNLGRSVCYVQFPQRFDGIDRNDRYANRNTVFFDINLRGLDGIQGPVYVGTGCVFNRTALYGYEPPIKQKKGGFLSSLCGGRKKASKSKKGSDKKKSQKHVDSSVPVFNLEDIEEGVEGAGFDDEKSLLMSQMSLEKRFGQSAAFVASTLMEYGGVPQSATPESLLKEAIHVISCGYEDKTEWGTEIGWIYGSVTEDILTGFKMHARGWRSIYCMPKRPAFKGSAPINLSDRLNQVLRWALGSVEILFSRHCPLWYGYGGRLKFLERFAYINTTIYPLTSIPLLIYCILPAICLLTGKFIIPEISNFASIWFISLFISIFATGILEMRWSGVGIDEWWRNEQFWVIGGISAHLFAVFQGLLKVLAGIDTNFTVTSKASDEDGDFAELYMFKWTTLLIPPTTILIINLVGVVAGISYAINSGYQSWGPLFGKLFFAFWVIVHLYPFLKGLMGRQNRTPTIVVVWAILLASIFSLLWVRIDPFTTRVTGPDTQTCGINC

SEQ ID NO: 27029 - protein, 964 aa, Zea mays subsp. mays
  misc_feature (1)..(964): Ceres Seq. ID no. 13666076
  misc_feature (381)..(381): Xaa is any aa, unknown or other
MNVGGSGDVGRPKYDSGEIGLTKYDSGEIPRGYIPSVTNSQISGEIPGASPDHHMMSPTGNIGKRAPFPYVNHSPNPSREFSGSIGNVAWKERVDGWKMKQDKGTIPMTNGTSIAPSEGRGVGDIDASTDYNMEDALLNDETRQPLSRKVPLPSSRINPYRMVIVLRLIVLSIFLHYRITNPVRNAYPLWLLSVICEIWFALSWILDQFPKWFPINRETYLDRLALRYDREGEPSQLAAVDIFVSTVDPMKEPPLVTANTVLSILAVDYPVDKVSCYVSDDGAAMLTFDALAETSEFARKWVPFVKKYNIEPRAPEWYFSQKIDYLKDKVHPSFVKDRRAMKREYEEFKVRVNGLVAKAQKVPEEGWIMQDGTPWPGNNTXDHPGMIQVFLGHSGGLDTEGNELPRLVYVSREKRPGFQHHKKAGAMNALVRVSAVLTNGQYMLNLDCDHYINNSKALREAMCFLMDPNLGRSVCYVQFPQRFDGIDRNDRYANRNTVFFDINLRGLDGIQGPVYVGTGCVFNRTALYGYEPPIKQKKGGFLSSLCGGRKKASKSKKGSDKKKSQKHVDSSVPVFNLEDIEEGVEGAGFDDEKSLLMSQMSLEKRFGQSAAFVASTLMEYGGVPQSATPESLLKEAIHVISCGYEDKTEWGTEIGWIYGSVTEDILTGFKMHARGWRSIYCMPKRPAFKGSAPINLSDRLNQVLRWALGSVEILFSRHCPLWYGYGGRLKFLERFAYINTTIYPLTSIPLLIYCILPAICLLTGKFIIPEISNFASIWFISLFISIFATGILEMRWSGVGIDEWWRNEQFWVIGGISAHLFAVFQGLLKVLAGIDTNFTVTSKASDEDGDFAELYMFKWTTLLIPPTTILIINLVGVVAGISYAINSGYQSWGPLFGKLFFAFWVIVHLYPFLKGLMGRQNRTPTIVVVWAILLASIFSLLWVRIDPFTTRVTGPDTQTCGINC

SEQ ID NO: 27030 - DNA, 1538 bp, Zea mays subsp. mays
  misc_feature (1)..(1538): Ceres Seq. ID no. 13666239
cgtgcccgtcggaatcccgggtcgacgacgcgtccgcttctcctcacaaggcttcctcccaccacctccagtcctccaccggaccaccacctccagtcctccaccggaccaccacctccaccactcctctctcagaacacgcgcaaaccgctcgaaccctagctggtggcgggaggcggaagtggctccgggatgacgcggcggtgctcgcactgcagccacaacgggcacaactcgcggacgtgccccaaccgcggggtcaagatcttcggggtgcacctcaccgatggctcggccatccgcaagagcgcgagcatggggaacctctccctcctctccgcgggatccaccagcggcggcgcgtcccccgccgacgggcccgacctcgccgacggcggcgggggctacgcctccgacgacttcgtccaggggtcgtcctccgccagccgcgatcgaaagaaggtgttccttggactggagaagaacaccggagtttttgctgggattacaaaagctcgggaaaggggatggcgaggaatttctcgtaattttgtggtctcaagaacacctactcaagtagcaagtcatgctcaaaagtattttatacgccaatcaaatatgagcagaaggaagagaaggtctagccttttcgacatggttcctgatgagtccatggaccttccgccccttcctggaagtcaagaaccagagacctcaatgttaaatcaaccgccactgcctcctgctgtggaggaggaggtggaatcgatggagtcagatacttctgctgtcgcagagagttctggagcttctgctctcatgcccgagagtttacagcctacctatccgatgattgttccagcttatttctcgccgttcttgcaattctcagttcctttctggccaaatcaggaagatggaggcgatcttccccaagaaacacacgagattgtcaagcctgttgcagttcattcccagaatccaattaatgttgatgaactcgtgggcatgtcaaagctaagcatatgggagcatggtcaggagacagtgtatacttctctgtcgctaaatctgctagggggtcaaaataggcagtcggctttccatgcaaaccctcaaacaagagctcaagcctgatcatcccctaccagcacagaaactgcattttagatggaatcctgggcaaaataagctttgctcttttttcttcttctaaatttaagatcactgagtcataaggtcactggttcgaagtagcttctccgtatttgcggggaaagcctgccctggtttctctccttcatcagaccccactcatatgggagccttcaatattgtcttttttatatatttaagattgaccgtgctcggtagcttgtatcatgtgctgtaagttatgctatgtatgaatgtacctgtagtttgtatggcacgcatggtatgccactcttatgttagcaaagtcattaatgttagtgctgatctttatggttgtaattttataaacttctaaaaaaaagtataagccagttcttttc

SEQ ID NO: 27031 - protein, 314 aa, Zea mays subsp. mays
  misc_feature (1)..(314): Ceres Seq. ID no. 13666240
MTRRCSHCSHNGHNSRTCPNRGVKIFGVHLTDGSAIRKSASMGNLSLLSAGSTSGGASPADGPDLADGGGGYASDDFVQGSSSASRDRKKVFLGLEKNTGVFAGITKARERGWRGISRNFVVSRTPTQVASHAQKYFIRQSNMSRRKRRSSLFDMVPDESMDLPPLPGSQEPETSMLNQPPLPPAVEEEVESMESDTSAVAESSGASALMPESLQPTYPMIVPAYFSPFLQFSVPFWPNQEDGGDLPQETHEIVKPVAVHSQNPINVDELVGMSKLSIWEHGQETVYTSLSLNLLGGQNRQSAFHANPQTRAQA

SEQ ID NO: 27032 - protein, 273 aa, Zea mays subsp. mays
  misc_feature (1)..(273): Ceres Seq. ID no. 13666241
MGNLSLLSAGSTSGGASPADGPDLADGGGGYASDDFVQGSSSASRDRKKVFLGLEKNTGVFAGITKARERGWRGISRNFVVSRTPTQVASHAQKYFIRQSNMSRRKRRSSLFDMVPDESMDLPPLPGSQEPETSMLNQPPLPPAVEEEVESMESDTSAVAESSGASALMPESLQPTYPMIVPAYFSPFLQFSVPFWPNQEDGGDLPQETHEIVKPVAVHSQNPINVDELVGMSKLSIWEHGQETVYTSLSLNLLGGQNRQSAFHANPQTRAQA

SEQ ID NO: 27033 - protein, 181 aa, Zea mays subsp. mays
  misc_feature (1)..(181): Ceres Seq. ID no. 13666242
CPSESRVDDASASPHKASSHHLQSSTGPPPPVLHRTTTSTTPLSEHAQTARTLAGGGRRKWLRDDAAVLALQPQRAQLADVPQPRGQDLRGAPHRWLGHPQEREHGEPLPPLRGIHQRRRVPRRRARPRRRRRGLRLRRLRPGVVLRQPRSKEGVPWTGEEHRSFCWDYKSSGKGMARNFS

SEQ ID NO: 27034 - DNA, 1385 bp, Zea mays subsp. mays
  misc_feature (1)..(1385): Ceres Seq. ID no. 13666259
ccacgcgtccgcaaatttcaatctccatcgatcgattcctcccgaacccgacccgatggcctccgacgccgccgccgagccctcctccggcgtcacccaccccccgcgctacgtcatcggttacgcgctcgcgccgaagaagcagcaaagcttcatccagccgtcgctggtggcccaggcggcgtcgcggggcatggacctcgtccccgtggatgcgtcgcagcccctggcagagcaagggcccttccacctcctcatccacaagctctacggagacgactggcgcgcccagctcgtggccttcgccgcgcgccacccggccgtccccatcgtcgacccgccccacgccatcgaccgcctccacaaccgcatctccatgctccaggtcgtctccgagctcgaccacgccgccgaccaggacagcactttcggtatccccagccaggtcgtcgtctacgacgctgccgcgctcgccgacttcggactccttgccgcgctccgcttcccgctcatcgccaagcccctcgtcgccgacggcaccgccaagtcccacaagatgtcgctcgtctaccaccgcgagggcctcggcaagctccgcccgccgcttgtgctccaggagttcgtcaaccatggcggcgtcatcttcaaggtctacgtcgtcggcggccacgtcacttgcgtcaagcgccgtagcctgcccgacgtgtcccccgaggatgacgcatcggcccagggatccgtctccttctcccaggtctccaacctccccactgagcgcacggcggaggagtactacggcgaaaagagtctcgaggacgccgtcgtgccgcccgccgcattcatcaaccagatcgcgggcggcctccgccgcgcgctgggcctgcaactcttcaacttcgacatgatccgcgacgtccgcgccggcgaccgctatctcgtcattgacatcaactacttcccgggctacgccaagatgccaggatacgagactgtcctcacggatttcttctgggagatggtccataaggacggcgtgggcaaccaacaggaggagaaaggggccaaccatgttgtcgtgaaataagatgatgattgatggcactggatatctggcgaatgctgctgattctggatgcagaattcgatgaggggatttagttggttgtagtatctggcgaatgctgctggttctggatgcagaatttgatgaggggatttagttggatttcaacccatagcatgccgaggacctcctagctctttccaaaccagttgtttaggtatcttttctgggtaagtcagcttcatctagtttagtctgtctgaacaaaagagtgggacatgacccaaacggaattctaatgaaaaacgagctctctatctgc

SEQ ID NO: 27035 - protein, 360 aa, Zea mays subsp. mays
  misc_feature (1)..(360): Ceres Seq. ID no. 13666260
HASANFNLHRSIPPEPDPMASDAAAEPSSGVTHPPRYVIGYALAPKKQQSFIQPSLVAQAASRGMDLVPVDASQPLAEQGPFHLLIHKLYGDDWRAQLVAFAARHPAVPIVDPPHAIDRLHNRISMLQVVSELDHAADQDSTFGIPSQVVVYDAAALADFGLLAALRFPLIAKPLVADGTAKSHKMSLVYHREGLGKLRPPLVLQEFVNHGGVIFKVYVVGGHVTCVKRRSLPDVSPEDDASAQGSVSFSQVSNLPTERTAEEYYGEKSLEDAVVPPAAFINQIAGGLRRALGLQLFNFDMIRDVRAGDRYLVIDINYFPGYAKMPGYETVLTDFFWEMVHKDGVGNQQEEKGANHVVVK

SEQ ID NO: 27036 - protein, 342 aa, Zea mays subsp. mays
  misc_feature (1)..(342): Ceres Seq. ID no. 13666261
MASDAAAEPSSGVTHPPRYVIGYALAPKKQQSFIQPSLVAQAASRGMDLVPVDASQPLAEQGPFHLLIHKLYGDDWRAQLVAFAARHPAVPIVDPPHAIDRLHNRISMLQVVSELDHAADQDSTFGIPSQVVVYDAAALADFGLLAALRFPLIAKPLVADGTAKSHKMSLVYHREGLGKLRPPLVLQEFVNHGGVIFKVYVVGGHVTCVKRRSLPDVSPEDDASAQGSVSFSQVSNLPTERTAEEYYGEKSLEDAVVPPAAFINQIAGGLRRALGLQLFNFDMIRDVRAGDRYLVIDINYFPGYAKMPGYETVLTDFFWEMVHKDGVGNQQEEKGANHVVVK

SEQ ID NO: 27037 - protein, 300 aa, Zea mays subsp. mays
  misc_feature (1)..(300): Ceres Seq. ID no. 13666262
TRPQISISIDRFLPNPTRWPPTPPPSPPPASPTPRATSSVTRSRRRSSKASSSRRWWPRRRRGAWTSSPWMRRSPWQSKGPSTSSSTSSTETTGAPSSWPSPRATRPSPSSTRPTPSTASTTASPCSRSSPSSTTPPTRTALSVSPARSSSTTLPRSPTSDSLPRSASRSSPSPSSPTAPPSPTRCRSSTTARASASSARRLCSRSSSTMAASSSRSTSSAATSLASSAVACPTCPPRMTHRPRDPSPSPRSPTSPLSARRRSTTAKRVSRTPSCRPPHSSTRSRAASAARWACNSSTST

SEQ ID NO: 27038 - DNA, 1378 bp, Zea mays subsp. mays
  misc_feature (1)..(1378): Ceres Seq. ID no. 13666291
catggactgaaggagtagaaaattgttcagcaacaacaacaacacaaatcatcggttccgttccgtcgcagaaatagaaaaaaggctttcttgtcccacagggcagggagaccgagagagcagtctagtgattagttgatcaccagacgtccagacaccatgagctcccgcatggctggagcagcgcttctgcgccacctaggcccgcgcctgttcgcggccgggcctgcggtgtccgggctcaccgcgaggggcggcatgcccgcggccgcgaggcttctccccgcgcggatggccagcaccgctgcggaggctgccagagaggacgccggtgcaaataaacagcacggcggcaccgagaagcatgaggaggaggcagcaggcgggcagagcaagaaggccgtcgtcagctactggggcatcgacacgcccaagctcgtgaaggaagacggcacggagtggaagtggaccagcttccggccgtgggacgcgtacacgtcggacacgtccatcgacatagggaagcaccacgcgccgacgacgctgcccgacaaggcggcgtacctgatcgtcaagtcgctgcgcgtgcccatggacctcttcttccagcgccggcacgccagccacgcgctgctgctcgagacggtggcggccgtgccgggcatggtgggcggcatgctcctccacctgcgctccctccgccgcttcgagcacagcggcggctggatccgcgcgctgctcgaggaggccgagaacgagcgcatgcacctcatgacgttcctcgaggtcacgcagccgcgctggtgggagcgcgcgctcgtgctcaccgctcagggcgtcttcttcaacgcctacttcctcggctacctcctctcccccaagttcgcgcaccgcgtcgtcggctacctcgaggaggaggcagtccactcgtacaccgagtacctcaaggacctcgaggccggcatcatcgacaacaccccggcgccggccatcgccatcgactattggcgcctccccgccgacgccaagctcaaggacgtcgtcaccgtcgtgcgcgccgacgaggcgcaccaccgcgacgtcaaccacttcgcgtcggacatacattaccaggggatgaaactcaaggacacgcccgcaccgctcagttatcactgacaagtaggcgttgcctgcctgctgctcaattcagagttcttacacgttagactatcgttggtcttaatatgttgttgtgctagccaaagttgcttagcagatcaagactggtttgctactcggaggtgaactagttgcctatatggtttgtactttgtacgtaccagtatattgtagatatttgaaataacaaatataagaatccagtgtgatgttactt

SEQ ID NO: 27039 - protein, 332 aa, Zea mays subsp. mays
  misc_feature (1)..(332): Ceres Seq. ID no. 13666292
MSSRMAGAALLRHLGPRLFAAGPAVSGLTARGGMPAAARLLPARMASTAAEAAREDAGANKQHGGTEKHEEEAAGGQSKKAVVSYWGIDTPKLVKEDGTEWKWTSFRPWDAYTSDTSIDIGKHHAPTTLPDKAAYLIVKSLRVPMDLFFQRRHASHALLLETVAAVPGMVGGMLLHLRSLRRFEHSGGWIRALLEEAENERMHLMTFLEVTQPRWWERALVLTAQGVFFNAYFLGYLLSPKFAHRVVGYLEEEAVHSYTEYLKDLEAGIIDNTPAPAIAIDYWRLPADAKLKDVVTVVRADEAHHRDVNHFASDIHYQGMKLKDTPAPLSYH

SEQ ID NO: 27040 - protein, 328 aa, Zea mays subsp. mays
  misc_feature (1)..(328): Ceres Seq. ID no. 13666293
MAGAALLRHLGPRLFAAGPAVSGLTARGGMPAAARLLPARMASTAAEAAREDAGANKQHGGTEKHEEEAAGGQSKKAVVSYWGIDTPKLVKEDGTEWKWTSFRPWDAYTSDTSIDIGKHHAPTTLPDKAAYLIVKSLRVPMDLFFQRRHASHALLLETVAAVPGMVGGMLLHLRSLRRFEHSGGWIRALLEEAENERMHLMTFLEVTQPRWWERALVLTAQGVFFNAYFLGYLLSPKFAHRVVGYLEEEAVHSYTEYLKDLEAGIIDNTPAPAIAIDYWRLPADAKLKDVVTVVRADEAHHRDVNHFASDIHYQGMKLKDTPAPLSYH

SEQ ID NO: 27041 - protein, 299 aa, Zea mays subsp. mays
  misc_feature (1)..(299): Ceres Seq. ID no. 13666294
MPAAARLLPARMASTAAEAAREDAGANKQHGGTEKHEEEAAGGQSKKAVVSYWGIDTPKLVKEDGTEWKWTSFRPWDAYTSDTSIDIGKHHAPTTLPDKAAYLIVKSLRVPMDLFFQRRHASHALLLETVAAVPGMVGGMLLHLRSLRRFEHSGGWIRALLEEAENERMHLMTFLEVTQPRWWERALVLTAQGVFFNAYFLGYLLSPKFAHRVVGYLEEEAVHSYTEYLKDLEAGIIDNTPAPAIAIDYWRLPADAKLKDVVTVVRADEAHHRDVNHFASDIHYQGMKLKDTPAPLSYH

SEQ ID NO: 27042 - DNA, 961 bp, Zea mays subsp. mays
  misc_feature (1)..(961): Ceres Seq. ID no. 13666333
ctgctgctagctagctggacaccgagagagaaagagagagagagcgagagatgggcaggagggcgtgctgcgccaaggaaggggtgaagagaggggcgtggacggccaaggaagacgataccttggccgcctacgtcaaggcccacggcgaaggcaaatggagggaggtgccccagaaagccggtttgcgtcggtgcggcaagagctgccggctgcggtggctgaactacctccggcccaacatcaagcgcggcaacatctcctacgacgaggaggatctcatcgtccggctccacaagctcctcggcaacaggtggtcgctgattgcaggcaggctgccgggccgaacagacaatgaaatcaagaactactggaacagcacgctgggccggagggccggcgccggcgccggcggcagcagggtcgtcttcgcgccggacaccggctcgcacgccactccggcggcggcggggagccacgagatgaccggcggccagaagggcgccgctcctcgcgcggacctcggctcgcccggctccgcagcagtagtgtgggcgcccaaggcggcgcggtgcacgggcgggctcttcttccaccgggacacgccgcacgcgggcgagacggagacgccgacgccaatgatgatggccggtggtggaggaggagaagcacggtcgtcggacgactgcagctcggcggcgtcggtatctcccctcgtaggaagcagccagcacgacccgtgcttctccggcgacggcgacggcgactggatggacgacgtgagggccctggcgtcgtttctcgagtccgacgaggagtggctccgctgtcacacggccgagcagcttgtgtagacaacaagtacacgtacggagtacaattatatatagccatgcgtatgtatacttttttcccttctccaatccaaacagaaatacgtatgcgtatgaaatagtatcgg

SEQ ID NO: 27043 - protein, 267 aa, Zea mays subsp. mays
  misc_feature (1)..(267): Ceres Seq. ID no. 13666334
MGRRACCAKEGVKRGAWTAKEDDTLAAYVKAHGEGKWREVPQKAGLRRCGKSCRLRWLNYLRPNIKRGNISYDEEDLIVRLHKLLGNRWSLIAGRLPGRTDNEIKNYWNSTLGRRAGAGAGGSRVVFAPDTGSHATPAAAGSHEMTGGQKGAAPRADLGSPGSAAVVWAPKAARCTGGLFFHRDTPHAGETETPTPMMMAGGGGGEARSSDDCSSAASVSPLVGSSQHDPCFSGDGDGDWMDDVRALASFLESDEEWLRCHTAEQLV

SEQ ID NO: 27044 - DNA, 960 bp, Zea mays subsp. mays
  misc_feature (1)..(960): Ceres Seq. ID no. 13666335
ctgctgctagctagctggacaccgagagagaaagagagagagagcgagagatgggcaggagggcgtgctgcgccaaggaaggggtgaagagaggggcgtggacggccaaggaagacgataccttggccgcctacgtcaaggcccacggcgaaggcaaatggagggaggtgccccagaaagccggtttgcgtcggtgcggcaagagctgccggctgcggtggctgaactacctccggcccaacatcaagcgcggcaacatctcctacgacgaggaggatctcatcgtccggctccacaagctcctcggcaacaggtggtcgctgattgcaggcaggctgccgggccgaacagacaatgaaatcaagaactactggaacagcacgctgggccggagggccggcgctggcgccggcgccggcggcagcagggtcgtcttcgcgccggacaccggctcgcacgccaccccggcggcggcggggagccacgagatgaccggcggccagaagggcgccgctcctcgcgcggacctcggctcgcccggctccgcagcagaagtgtgggcgcccaaggcggcgcggtgcacgggcgggctcttcttccaccggcgggacacgcacacgccgcacgcgggcgggacggagacgccgacgccaatgatggccggtggtggaggaggagaagcacggtcgtcggacgactgcagctcggcggcgtcggtatctcccctcgtaggaagcagccagcacgacccgtgcttctccggcgacggcgacggcgactggatggacgacgtgagggccctggcatcgtttctcgagtccgacgaggagtggctccgctgtcacacgggcgagcagcttgtgtagacaacaagtacacgtacggggtacaattatatatcacactttctatttcaaacttcatcgtgtaaacaatataatctatagtataaaataatgt

SEQ ID NO: 27045 - protein, 271 aa, Zea mays subsp. mays
  misc_feature (1)..(271): Ceres Seq. ID no. 13666336
MGRRACCAKEGVKRGAWTAKEDDTLAAYVKAHGEGKWREVPQKAGLRRCGKSCRLRWLNYLRPNIKRGNISYDEEDLIVRLHKLLGNRWSLIAGRLPGRTDNEIKNYWNSTLGRRAGAGAGAGGSRVVFAPDTGSHATPAAAGSHEMTGGQKGAAPRADLGSPGSAAEVWAPKAARCTGGLFFHRRDTHTPHAGGTETPTPMMAGGGGGEARSSDDCSSAASVSPLVGSSQHDPCFSGDGDGDWMDDVRALASFLESDEEWLRCHTGEQLV

SEQ ID NO: 27046 - DNA, 1147 bp, Zea mays subsp. mays
  misc_feature (1)..(1147): Ceres Seq. ID no. 13666372
cttccctgcagatcgagaggcactgccacaccaccatcaccccatgctcaacatgatgactgatctgagctgcgggccgtcgtccaaggtcaaggagcaggtggcggcggcgccgacgggctccggcgacaggcaggggcaggggagaggcaagatcgagatcaagcgcatcgagaacacgacgaaccggcaggtgaccttctgcaagcgccgcaacggcctgctcaagaaggcgtacgagctctcggtgctctgcgacgccgaggtcgcgctcgtcgtcttctccagccgcggccgcctctacgagtacgccaacaacagtgtaaagtccaccattgagaggtacaagaaggccaacagtgactcctccaactctggcacagttgcagaagtcaatgcccagtactaccagcaggagtcctccaagctgcgacagatgatccacagcttgcaaaacgcaaacactaggaacatagtgggagattcaatccacaccatgggcctcagggatcttaagcaaatggagggcaagctggagaaagccataagcaagattagagctagaaagaatgagctgctatatgctgaagttgactatatgcaaaaaagggagatggatctgcagactgacaacatgtacctgacgagcaagatcgctgagagtaatgaaacggggcagccggcgatgcacatgatgggagtgccgccgccgacgagcgagtacgaccacatggcccctttcgactcgagaaactttctgcaagtgagcatgcctcagcactactcccatcagctgcaacctacaaccctccagctcggatgatgaaatcagctatacctggcggcgcccggcccacaatcgaggtagatcacgcatgcagttatatcatgtgccaaatcgagatctcaagtaactctacgtttgcttaattattaataatcgtgattagtgcaactgttagggatatatatatatgtgagtgccaccactgtgtgcgtgcatttgtacgtgtgaatttagctgttgcatctactactattgtactctccggtcagtccatatcatcagaaacgcgggtttatttacgcatacttatatatgatttgtgtgctttatatagattattgaaaagagtatattggcctc

SEQ ID NO: 27047 - protein, 273 aa, Zea mays subsp. mays
  misc_feature (1)..(273): Ceres Seq. ID no. 13666373
FPADREALPHHHHPMLNMMTDLSCGPSSKVKEQVAAAPTGSGDRQGQGRGKIEIKRIENTTNRQVTFCKRRNGLLKKAYELSVLCDAEVALVVFSSRGRLYEYANNSVKSTIERYKKANSDSSNSGTVAEVNAQYYQQESSKLRQMIHSLQNANTRNIVGDSIHTMGLRDLKQMEGKLEKAISKIRARKNELLYAEVDYMQKREMDLQTDNMYLTSKIAESNETGQPAMHMMGVPPPTSEYDHMAPFDSRNFLQVSMPQHYSHQLQPTTLQLG

SEQ ID NO: 27048 - protein, 259 aa, Zea mays subsp. mays
  misc_feature (1)..(259): Ceres Seq. ID no. 13666374
MLNMMTDLSCGPSSKVKEQVAAAPTGSGDRQGQGRGKIEIKRIENTTNRQVTFCKRRNGLLKKAYELSVLCDAEVALVVFSSRGRLYEYANNSVKSTIERYKKANSDSSNSGTVAEVNAQYYQQESSKLRQMIHSLQNANTRNIVGDSIHTMGLRDLKQMEGKLEKAISKIRARKNELLYAEVDYMQKREMDLQTDNMYLTSKIAESNETGQPAMHMMGVPPPTSEYDHMAPFDSRNFLQVSMPQHYSHQLQPTTLQLG

SEQ ID NO: 27049 - protein, 256 aa, Zea mays subsp. mays
  misc_feature (1)..(256): Ceres Seq. ID no. 13666375
MMTDLSCGPSSKVKEQVAAAPTGSGDRQGQGRGKIEIKRIENTTNRQVTFCKRRNGLLKKAYELSVLCDAEVALVVFSSRGRLYEYANNSVKSTIERYKKANSDSSNSGTVAEVNAQYYQQESSKLRQMIHSLQNANTRNIVGDSIHTMGLRDLKQMEGKLEKAISKIRARKNELLYAEVDYMQKREMDLQTDNMYLTSKIAESNETGQPAMHMMGVPPPTSEYDHMAPFDSRNFLQVSMPQHYSHQLQPTTLQLG

SEQ ID NO: 27050 - DNA, 743 bp, Zea mays subsp. mays
  misc_feature (1)..(743): Ceres Seq. ID no. 14301971
aaggtttaatgtcattagacgactttgacgatgctgaaggcggctccaagctggaacgattctcacgggagacgctggatccatcattgtcatggaaggacgtggagtggctcaagtccatcaccagcctgccgattctgctcaagggcatcgtcaccgcggaagacgcgaggaaggccgtggaggcgtgggcggccggcttgatcgtgtccaaccacggcgcccggcagctggactatgcgccggccaccatctcggcgctcgaagaggtggttaaggcggtggcgggggctgtgccggtgctggtggacggcggcgtccggcgcggcaccgacgtgttgaaggcgctggcgctcggcgccaaggcagtcatggtgggcaggccggtgttctttgggctggcggcgcgcggggaagccggcgcgaggcacgtgatcgagatgttgaacaaggagctggagttggccatggcgctctgcggctgccgtagcgtcgcggaggtcaccagggcgcacgtccagaccgagggcgaccggatcagggccctgctgtgacttataaataagcgaccatatccgaggccgaccaccgtgctgtctgggttgcgatatgatttatatgatacgtgagggcatgtgatcgattgttgcctccacacagataagcttactattgccagagcctgggctggactatgctttcagtgattatctaaatcaaatagactgaatgctaaagggaac

SEQ ID NO: 27051 - protein, 183 aa, Zea mays subsp. mays
  misc_feature (1)..(183): Ceres Seq. ID no. 14301972
GLMSLDDFDDAEGGSKLERFSRETLDPSLSWKDVEWLKSITSLPILLKGIVTAEDARKAVEAWAAGLIVSNHGARQLDYAPATISALEEVVKAVAGAVPVLVDGGVRRGTDVLKALALGAKAVMVGRPVFFGLAARGEAGARHVIEMLNKELELAMALCGCRSVAEVTRAHVQTEGDRIRALL

SEQ ID NO: 27052 - protein, 181 aa, Zea mays subsp. mays
  misc_feature (1)..(181): Ceres Seq. ID no. 14301973
MSLDDFDDAEGGSKLERFSRETLDPSLSWKDVEWLKSITSLPILLKGIVTAEDARKAVEAWAAGLIVSNHGARQLDYAPATISALEEVVKAVAGAVPVLVDGGVRRGTDVLKALALGAKAVMVGRPVFFGLAARGEAGARHVIEMLNKELELAMALCGCRSVAEVTRAHVQTEGDRIRALL

SEQ ID NO: 27053 - DNA, 849 bp, Zea mays subsp. mays
  misc_feature (1)..(849): Ceres Seq. ID no. 14303259
atgtcgctgagccgcttctcccagtggatatggccggggagcagaactagaaatcctagaggccgcgagccaccggcggggagcacggccttgacggaaggcctcttcccggactccccgtcggggttccgggatccagaccctggttctggcgcggcacagcggcgtaagggcaagagccgccgtcgcggtggccgcgtggaggcgaaggtcgatggcgagcacggcatggttatcgtgcagtccgacggtgacggctgcctgtctgactcggactccgacggctccgactggtccatcggctggctcgagccgctcgcgccggacctccagagtgacgttgactccgagggaagcttcgccgtcctcgtgcggtgctatcgccgcggccgcgctgaccggcctgaccgtcctgatggcaagttccctgctcctggtggtgtcgctcacggtcacggtggtgtttctggtaacaagaattttgtggagcaatgagtgtcttcccttcagaactgatttctccatttccattcttagttggcttcaatgtgtatacagcatttttacatgacctgtcaaatttctcatgtgcgaaacatatatatgaaggaagagaggaaacccaaaatggggaagaaagaggaaagaatcacagaacaaaacactaccagtggatttttattaaaaaaatgcaatggatggggggggggggggggggtgcatccttcttcctgaggttccaggctacggtattattgcagaataaaacatgttttgtgattggattcaaatgttattgacatttctgacaatgagcaatgaattgatggcctcatcccattttcttgt

SEQ ID NO: 27054 - protein, 164 aa, Zea mays subsp. mays
  misc_feature (1)..(164): Ceres Seq. ID no. 14303260
MSLSRFSQWIWPGSRTRNPRGREPPAGSTALTEGLFPDSPSGFRDPDPGSGAAQRRKGKSRRRGGRVEAKVDGEHGMVIVQSDGDGCLSDSDSDGSDWSIGWLEPLAPDLQSDVDSEGSFAVLVRCYRRGRADRPDRPDGKFPAPGGVAHGHGGVSGNKNFVEQ

SEQ ID NO: 27055 - protein, 118 aa, Zea mays subsp. mays
  misc_feature (1)..(118): Ceres Seq. ID no. 14303261
MASTAWLSCSPTVTAACLTRTPTAPTGPSAGSSRSRRTSRVTLTPREASPSSCGAIAAAALTGLTVLMASSLLLVVSLTVTVVFLVTRILWSNECLPFRTDFSISILSWLQCVYSIFT

SEQ ID NO: 27056 - protein, 102 aa, Zea mays subsp. mays
  misc_feature (1)..(102): Ceres Seq. ID no. 14303262
MSVFPSELISPFPFLVGFNVYTAFLHDLSNFSCAKHIYEGREETQNGEERGKNHRTKHYQWIFIKKMQWMGGGGGGASFFLRFQATVLLQNKTCFVIGFKCY

SEQ ID NO: 27057 - DNA, 1378 bp, Zea mays subsp. mays
  misc_feature (1)..(1378): Ceres Seq. ID no. 14303290
ctctttctcttccaaggagaacaaccaccgtctctctctcccccgtctatctcttcttggagcctggagaagaggaaggatcagggaacgggggaagaggttgctgccacagctcaggtctcaagtttggattcagacaagtagacaaacaccagttggttaagatggcagctggtttccagatcggtgtgatcgggtcacttgcactctctgttgcatcttcagtttccattgtcctctgcaacaaagctctcatcagcacacttggttttccattcgctacaacattaacaagctggcatctgatggtgaccttctgcaccctccatgtggcacagcgcttacgtttcttcgagcccaaggcaattgatggacagacagtcatactctttgggttgctgaatggcacgtcaattggtcttctcaatctgagtttaggattcaactccattggattctaccagatgacaaaattggcgatcatacctttcactgtgctattggagactatcttcttgaagaaaagattcagcgagagtatcaagctttctcttctggtcttacttcttggagtaggaattgcttcagttactgatctcaagctaaatctgcttgggtccatcctttctggcctcgccattgccaccacctgtgttggccaaattctcacaaatacaatacagaagaggttgaaggtctcctcaacgcaacttctgtaccaatctgcgccttaccaggcggcaattctgtttgcatctgggccttttgtagatcaactccttactaaccggagtgtctttgcacacaaatactctgctacagttctgggtttcgttgtcctctcttgcttgattgcggtgtctgtgaacttcagtacatttcttgtgattggaacaacatccccagtgacgtaccaggtgcttggtcaccttaagacatgtctggttctatcatttggctacactctattacatgatcctttcactctaaggaacatattgggcattctaattgccatatttgggatggcactatactcctatttctctgtaagagagggcaagaagaagtcagcaaatgatgccctgccagtttcacagatgccagataaggaggttgaaccgcttttggcaactaaagacagcaatgacaccaagaaagcaaatggtttatctcacgactgctagggcttttcttgtagtttaggtctagtatgaactgcccttagaatttaatggacttggaaagccattcttttcattcttgatttcctttttaggaaaggaagattttaaaatttgtagataatgtgtattttgacgttaaagttattgtttgattgtattctacacacagcagttccatctgaagttttact

SEQ ID NO: 27058 - protein, 394 aa, Zea mays subsp. mays
  misc_feature (1)..(394): Ceres Seq. ID no. 14303291
LSLPRRTTTVSLSPVYLFLEPGEEEGSGNGGRGCCHSSGLKFGFRQVDKHQLVKMAAGFQIGVIGSLALSVASSVSIVLCNKALISTLGFPFATTLTSWHLMVTFCTLHVAQRLRFFEPKAIDGQTVILFGLLNGTSIGLLNLSLGFNSIGFYQMTKLAIIPFTVLLETIFLKKRFSESIKLSLLVLLLGVGIASVTDLKLNLLGSILSGLAIATTCVGQILTNTIQKRLKVSSTQLLYQSAPYQAAILFASGPFVDQLLTNRSVFAHKYSATVLGFVVLSCLIAVSVNFSTFLVIGTTSPVTYQVLGHLKTCLVLSFGYTLLHDPFTLRNILGILIAIFGMALYSYFSVREGKKKSANDALPVSQMPDKEVEPLLATKDSNDTKKANGLSHDC

SEQ ID NO: 27059 - protein, 340 aa, Zea mays subsp. mays
  misc_feature (1)..(340): Ceres Seq. ID no. 14303292
MAAGFQIGVIGSLALSVASSVSIVLCNKALISTLGFPFATTLTSWHLMVTFCTLHVAQRLRFFEPKAIDGQTVILFGLLNGTSIGLLNLSLGFNSIGFYQMTKLAIIPFTVLLETIFLKKRFSESIKLSLLVLLLGVGIASVTDLKLNLLGSILSGLAIATTCVGQILTNTIQKRLKVSSTQLLYQSAPYQAAILFASGPFVDQLLTNRSVFAHKYSATVLGFVVLSCLIAVSVNFSTFLVIGTTSPVTYQVLGHLKTCLVLSFGYTLLHDPFTLRNILGILIAIFGMALYSYFSVREGKKKSANDALPVSQMPDKEVEPLLATKDSNDTKKANGLSHDC

SEQ ID NO: 27060 - protein, 293 aa, Zea mays subsp. mays
  misc_feature (1)..(293): Ceres Seq. ID no. 14303293
MVTFCTLHVAQRLRFFEPKAIDGQTVILFGLLNGTSIGLLNLSLGFNSIGFYQMTKLAIIPFTVLLETIFLKKRFSESIKLSLLVLLLGVGIASVTDLKLNLLGSILSGLAIATTCVGQILTNTIQKRLKVSSTQLLYQSAPYQAAILFASGPFVDQLLTNRSVFAHKYSATVLGFVVLSCLIAVSVNFSTFLVIGTTSPVTYQVLGHLKTCLVLSFGYTLLHDPFTLRNILGILIAIFGMALYSYFSVREGKKKSANDALPVSQMPDKEVEPLLATKDSNDTKKANGLSHDC

SEQ ID NO: 27061 - DNA, 777 bp, Zea mays subsp. mays
  misc_feature (1)..(777): Ceres Seq. ID no. 14305063
catcaacttcgtctcagcatgcattacagggagcgctccgctcacagcggtgcaactgttgtgggtgaatatgattatggatacattaggggctctagctctagcaacggagcctccaaacgatgacatgatgaagagaccacctgtcgggcgaggggaaagcttcatcaccaaggtcatgtggagaaatatcattgggcaaagtttgtatcagttggttgtgctcggagccctcatgtttggcggggaacagtttctgaacatcaagggcgcggattccaaatctgttgtcaacactctcatattcaactccttcgtgttctgccaggtgttcaacgaaataaacagcagagaaatggagaagatcaacgtgttccgcggcatggtcaccaactggatcttcatcgcgatcatagccgcgacggtcctgttccaagtggtgatcgtagagctgctaggcacctttgccagcaccgtcccactcgactggcggctttggctgctcagcgtcggcctcgggtcggtcagcttggtcgtcggtgccgtcctcaagtgcgtaccagttgccaaatccaacgcagctcctgcgagtgccaacggctacgccccgctccccagcggtcctgacgacatttagctgaagaagaggggatgcatggagaaaagaagttgcatccgatttttgcgtcttgtttgtaataagtaatgaaccacggtctaggctcagctttagcagattgttctatatatatatatatatatatagccttgtcctgc

SEQ ID NO: 27062 - protein, 211 aa, Zea mays subsp. mays
  misc_feature (1)..(211): Ceres Seq. ID no. 14305064
INFVSACITGSAPLTAVQLLWVNMIMDTLGALALATEPPNDDMMKRPPVGRGESFITKVMWRNIIGQSLYQLVVLGALMFGGEQFLNIKGADSKSVVNTLIFNSFVFCQVFNEINSREMEKINVFRGMVTNWIFIAIIAATVLFQVVIVELLGTFASTVPLDWRLWLLSVGLGSVSLVVGAVLKCVPVAKSNAAPASANGYAPLPSGPDDI

SEQ ID NO: 27063 - protein, 188 aa, Zea mays subsp. mays
  misc_feature (1)..(188): Ceres Seq. ID no. 14305065
MIMDTLGALALATEPPNDDMMKRPPVGRGESFITKVMWRNIIGQSLYQLVVLGALMFGGEQFLNIKGADSKSVVNTLIFNSFVFCQVFNEINSREMEKINVFRGMVTNWIFIAIIAATVLFQVVIVELLGTFASTVPLDWRLWLLSVGLGSVSLVVGAVLKCVPVAKSNAAPASANGYAPLPSGPDDI

SEQ ID NO: 27064 - protein, 186 aa, Zea mays subsp. mays
  misc_feature (1)..(186): Ceres Seq. ID no. 14305066
MDTLGALALATEPPNDDMMKRPPVGRGESFITKVMWRNIIGQSLYQLVVLGALMFGGEQFLNIKGADSKSVVNTLIFNSFVFCQVFNEINSREMEKINVFRGMVTNWIFIAIIAATVLFQVVIVELLGTFASTVPLDWRLWLLSVGLGSVSLVVGAVLKCVPVAKSNAAPASANGYAPLPSGPDDI

SEQ ID NO: 27065 - DNA, 969 bp, Zea mays subsp. mays
  misc_feature (1)..(969): Ceres Seq. ID no. 14305076
aaaattcaatgaattcgagacaagatcatccaatgagcggcactaatggtggcccatataatggaggcaatgtggctattccgaaggtgaactctacaagctcactgcagtcaaatccgtctacctctttcccttccccagcaccgacaacatccaataacagcatgatgcatgctcctcaaaacacaaatcagctgagctccccaactacatcatcaagcatacctcccatgcagccacctgatactcaacctcaggaggctgagccaagcgactcgcaaagctcggttcagaagatcttgcaagatctgatgtcatcctgtgttggccactcaggtaatgatacgaagacaccaaatggactaacccatggtgttaatggggttaattgcttagttggcaatgctgtcacgaataactcaggaatgggaggaatgggatttggcgccatgaatgggttcggtcatgggatgagaacggcaatgacaaacaatccgatggcaatgggtgcaaggatgggaatgaaccacagtgcacatgacctatcgcaattgggtcagttacaccagcagcagcagcagcatcaacagcagcatgacataggaaaccagctgttgggtggatttagatcagcgagcagcttcaataacattcaatatgactggaaaccctcacaatagagcagccagaaaccatagagtttcagtgtgatgatgcatctggcttcgctggcaatgcgtgtggagcatccacatttatggtgccataacctccccttggcccaatagcatttgggcctttgcattaatgccgccatcaaagggtaccataagcgatagcaagcatcccagctggtacatgtaagtctaactgtcagtttagctatctcgtgtgtagctccctgagttttacaacattagtcgattttaccgggagttgcaataccatcatgtgtcacattgtttgtcc

SEQ ID NO: 27066 - protein, 225 aa, Zea mays subsp. mays
  misc_feature (1)..(225): Ceres Seq. ID no. 14305077
NSMNSRQDHPMSGTNGGPYNGGNVAIPKVNSTSSLQSNPSTSFPSPAPTTSNNSMMHAPQNTNQLSSPTTSSSIPPMQPPDTQPQEAEPSDSQSSVQKILQDLMSSCVGHSGNDTKTPNGLTHGVNGVNCLVGNAVTNNSGMGGMGFGAMNGFGHGMRTAMTNNPMAMGARMGMNHSAHDLSQLGQLHQQQQQHQQQHDIGNQLLGGFRSASSFNNIQYDWKPSQ

SEQ ID NO: 27067 - protein, 223 aa, Zea mays subsp. mays
  misc_feature (1)..(223): Ceres Seq. ID no. 14305078
MNSRQDHPMSGTNGGPYNGGNVAIPKVNSTSSLQSNPSTSFPSPAPTTSNNSMMHAPQNTNQLSSPTTSSSIPPMQPPDTQPQEAEPSDSQSSVQKILQDLMSSCVGHSGNDTKTPNGLTHGVNGVNCLVGNAVTNNSGMGGMGFGAMNGFGHGMRTAMTNNPMAMGARMGMNHSAHDLSQLGQLHQQQQQHQQQHDIGNQLLGGFRSASSFNNIQYDWKPSQ

SEQ ID NO: 27068 - protein, 215 aa, Zea mays subsp. mays
  misc_feature (1)..(215): Ceres Seq. ID no. 14305079
MSGTNGGPYNGGNVAIPKVNSTSSLQSNPSTSFPSPAPTTSNNSMMHAPQNTNQLSSPTTSSSIPPMQPPDTQPQEAEPSDSQSSVQKILQDLMSSCVGHSGNDTKTPNGLTHGVNGVNCLVGNAVTNNSGMGGMGFGAMNGFGHGMRTAMTNNPMAMGARMGMNHSAHDLSQLGQLHQQQQQHQQQHDIGNQLLGGFRSASSFNNIQYDWKPSQ

SEQ ID NO: 27069 - DNA, 947 bp, Zea mays subsp. mays
  misc_feature (1)..(947): Ceres Seq. ID no. 14305114
atcacccctcgttgtcatctcatatcctgagccagagatcaaagaaaccagagggagcgaggcatggcagcaggcttgcaggtgtttggccagccggcgtctactgatgtctccagggttctgacatgcctgtttgagaagaaactggagttcgatcttgtccgcatcgatacgttcaagacgcatcacaagcttcccgagttcatcaggcttcgggatcctaatgggcaagtgaccttgaagcacggcgacaaaactctcgttgattcgagggacatctgccggtacgtctgcacccagtttccaaacgatggaaacaagagcctttacggatccggcgctctagaacgggcgtcgatagaacagtggcttcaggcggaggctcagaacttcgggccccccagctccgcgctcgtcttccagctggcgttcgtccctcacctcactcacctgggcgttcgtcaggaccctgccgtgatcgccgagaacgaggataagctgaagcaggtccttgatgtctacgacgagatactctcgaggaacgagtacctggctggcgacgagttcaccctggccgacctctcccacctcccgaactcgcactacatcgtgaacaccgagagaggaaggaagctcttcactaacaagaagaacgtggccaagtggtacgagaagctctcgaagcgcgagacgtggaagcaggtcgctaagatgcagaaggaacatcctggtgcgttcgagtgattgcttgtcttggggggagctgcgagtgcaccatcatgaatggcttcatcgtctgtgtcggtctggctctacagttcattttgttttgagtgatccattgtttaattcctcctatcagtgttgtcgtgtgcaccaaaaataatgtgaagcccagctgtgatgtatatgatccttttgctctaatctatcatgacgtataagct

SEQ ID NO: 27070 - protein, 226 aa, Zea mays subsp. mays; identical to SEQ ID NO: 25394
  misc_feature (1)..(226): Ceres Seq. ID no. 14305115

SEQ ID NO: 27071 - DNA, 1097 bp, Zea mays subsp. mays; identical to SEQ ID NO: 176
  misc_feature (1)..(1097): Ceres Seq. ID no. 14305144

SEQ ID NO: 27072 - protein, 316 aa, Zea mays subsp. mays; identical to SEQ ID NO: 177
  misc_feature (1)..(316): Ceres Seq. ID no. 14305145

SEQ ID NO: 27073 - protein, 313 aa, Zea mays subsp. mays; identical to SEQ ID NO: 178
  misc_feature (1)..(313): Ceres Seq. ID no. 14305146

SEQ ID NO: 27074 - protein, 302 aa, Zea mays subsp. mays; identical to SEQ ID NO: 179
  misc_feature (1)..(302): Ceres Seq. ID no. 14305147

SEQ ID NO: 27075 - protein, 259 aa, Zea mays subsp. mays; identical to SEQ ID NO: 180
  misc_feature (1)..(259): Ceres Seq. ID no. 16625452

SEQ ID NO: 27076 - DNA, 1091 bp, Zea mays subsp. mays
  misc_feature (1)..(1091): Ceres Seq. ID no. 14305188
ccaactacttcgccgaggcgctcatcgccgaggcggagcaggacagcaagatcgtggccatccacgcggccatgggcggcggcacggggctcaactacttcctccgccgcttcccgagccggtgcttcgacgtcgggatcgcggagcagcacgccgtcacgttcgcggccggcctggcctgcgagggcctcaagcccttctgcgccatctactcgtctttcctgcagcgcggctacgaccaggtcgtgcacgacgtcgatctgcagaagctaccggtgcggttcgccatggacagggccgggctggtcggcgcggacgggccgacccactgcggtgcgttcgacgtcgcgtacatggcctgcctgcccaacatggtcgtcatggccccgtccgacgaggccgagctctgccacatggtcgccaccgccgcggccatcgacgaccgcccgtcctgcttccgctacccgagaggcaacggcgttggcgtcccgttgcctcccaactacaaaggcactcccctcgaggtcggcaaaggcaggatcctgcttgagggcgaccgggtggcgctgctggggtacgggtcggcagtgcagtactgcctgactgccgcgtccctggtgcagcgccacggcctcaaggtcaccgtcgccgacgcgaggttctgcaagccgctggaccacgccctgatcaggagcctggccaagtcccacgaggtgctcatcaccgtggaggaaggctccatcggcgggttcggctcgcacgtcgcccagttcatggccctggacggccttctcgacggcaaactcaagtggcgaccgctggtgcttcctgacaggtacatcgaccatggatcgccggccgatcagctggccgaggctgggctgacgccgtcacacatcgccgcgtcggtgttcaacatcctggggcagaacagggaggctcttgccatcatggcagtgccaaacgcgtagaacttgtgctgatctgggcctatagagatgattgtacattttgtcgttaactagagtgtctgaacttgggagattagtcttctttggatgaaagtgtcgccggaacaacagttaccgttg

SEQ ID NO: 27077 - protein, 322 aa, Zea mays subsp. mays
  misc_feature (1)..(322): Ceres Seq. ID no. 14305189
NYFAEALIAEAEQDSKIVAIHAAMGGGTGLNYFLRRFPSRCFDVGIAEQHAVTFAAGLACEGLKPFCAIYSSFLQRGYDQVVHDVDLQKLPVRFAMDRAGLVGADGPTHCGAFDVAYMACLPNMVVMAPSDEAELCHMVATAAAIDDRPSCFRYPRGNGVGVPLPPNYKGTPLEVGKGRILLEGDRVALLGYGSAVQYCLTAASLVQRHGLKVTVADARFCKPLDHALIRSLAKSHEVLITVEEGSIGGFGSHVAQFMALDGLLDGKLKWRPLVLPDRYIDHGSPADQLAEAGLTPSHIAASVFNILGQNREALAIMAVPNA

SEQ ID NO: 27078 - protein, 299 aa, Zea mays subsp. mays
  misc_feature (1)..(299): Ceres Seq. ID no. 14305190
MGGGTGLNYFLRRFPSRCFDVGIAEQHAVTFAAGLACEGLKPFCAIYSSFLQRGYDQVVHDVDLQKLPVRFAMDRAGLVGADGPTHCGAFDVAYMACLPNMVVMAPSDEAELCHMVATAAAIDDRPSCFRYPRGNGVGVPLPPNYKGTPLEVGKGRILLEGDRVALLGYGSAVQYCLTAASLVQRHGLKVTVADARFCKPLDHALIRSLAKSHEVLITVEEGSIGGFGSHVAQFMALDGLLDGKLKWRPLVLPDRYIDHGSPADQLAEAGLTPSHIAASVFNILGQNREALAIMAVPNA

SEQ ID NO: 27079 - protein, 227 aa, Zea mays subsp. mays
  misc_feature (1)..(227): Ceres Seq. ID no. 14305191
MDRAGLVGADGPTHCGAFDVAYMACLPNMVVMAPSDEAELCHMVATAAAIDDRPSCFRYPRGNGVGVPLPPNYKGTPLEVGKGRILLEGDRVALLGYGSAVQYCLTAASLVQRHGLKVTVADARFCKPLDHALIRSLAKSHEVLITVEEGSIGGFGSHVAQFMALDGLLDGKLKWRPLVLPDRYIDHGSPADQLAEAGLTPSHIAASVFNILGQNREALAIMAVPNA

SEQ ID NO: 27080 - DNA, 975 bp, Zea mays subsp. mays
  misc_feature (1)..(975): Ceres Seq. ID no. 14305221
ataaaggggcattggcttgggatcacctctgcatctcgcctgggatctgctagcttgatctctcctagtcctagcccattcgcttctcctgttcgtcgctcttaatttgcttgctcgatccctggcagtggcagctgctgcaatggcttccggtggcgcgtcgtcactggccttggccgcgctgctcctcgtgagctgcgcctcggcggcggtggcgaccaagtacaccgtcggggacgcgtccggctggacgaccaccggcgactacgccacctgggccagcggcaagaagttcaaagtcggcgacagtctcgagttcaaatacgccggcggggcgcacacggtggacgaggtgagcgcggcggactacgccgcctgctcctccagcaacgcgctcagcaccgacagcgccggcgccacgaccgtgaccctcaagacggccggcaagcactacttcatctgcggcgtggcgggccattgcagcagcggcatgaagctcgcggtggacgtggccaaggcggtgaccgccccggcgccggccccagccgcggccccggccccggccgcggacacagccccagatgcccccgacaccacgccgtcgaccccgacgtccccctcgagctccggcggccgcacgcccaagagcccagacacgacggtcctgtcgccgccggacaagaagtccacctcctccggcgccaccgggctcagcgccgcggcgtgggccggcttgggcctggccgggctcgtggccgtgcacctcggcgcgttctaggccagcccgctggcctggccagggaggagacagtgccgtgtgttgttgttaggctgcacgtcatggattggattggtgtattggttgagggacttgactgcttaccagagagagatctcttttggttcagggaactgtgctgtagacctgtagttggataccttggatgttatgctatcagttttgctgttgttatc

SEQ ID NO: 27081 - protein, 211 aa, Zea mays subsp. mays
  misc_feature (1)..(211): Ceres Seq. ID no. 14305222
MASGGASSLALAALLLVSCASAAVATKYTVGDASGWTTTGDYATWASGKKFKVGDSLEFKYAGGAHTVDEVSAADYAACSSSNALSTDSAGATTVTLKTAGKHYFICGVAGHCSSGMKLAVDVAKAVTAPAPAPAAAPAPAADTAPDAPDTTPSTPTSPSSSGGRTPKSPDTTVLSPPDKKSTSSGATGLSAAAWAGLGLAGLVAVHLGAF

SEQ ID NO: 27082 - DNA, 934 bp, Zea mays subsp. mays
  misc_feature (1)..(934): Ceres Seq. ID no. 14305241
agagaatacaggggagaagccgagagccgaacgaagagaccgagcccccgccgcccgcggcgtctgttcctttcgtgccgcttcgtggtggcgccgtggcgcccaccaccacctcacctctcagtctctcaccacctatagcaataccacgagtccacgatccatggaatagactagactacaccgctcggccggtgacgacgacggcgacagccgacagtctatccccaactacgctctgcaccagcgccttatccgccgcctggggtttgttctggcgcggtggcagttgataaaggcgggagggattagagcaaggagagggatcggcgatgagcttcgcggatctggaggcgggggctctcagggcgcccctcgggaggaaagcgagaggggggccaaacgacgcgagagcgctcgtcttccagataaccaccgcggtggcctcgtaccgccgcctcctcaactcgctcggcacgcccaaggacaccatcacgcttcgtgataacctgcataagactagtcagaacatccttcaattagcaaaggatgcgaaagataagctccaaaaggctgctgaagcagacaagagcactgatacaagtgcagacaagaggatagctgatatgaagcttgccaaagattttgctgccacaatggaggagttcaggaaacttcagagtcttgcgattcagagggagacggcatataagccagttgttccacagaatacgcagtcaaactattctacagatgagcgaagttccgaatctggtaatatgcctgagcagcgtgcattactcgctgaatcaatgagacaagaggtgctgcaattggacaatgaaattgtttacaatgaagctataattgaggaaagggagcaagccattcaagatatccaacagcagattggtgaagtacatgaagtgttcaa

SEQ ID NO: 27083 - protein, 200 aa, Zea mays subsp. mays
  misc_feature (1)..(200): Ceres Seq. ID no. 14305242
MSFADLEAGALRAPLGRKARGGPNDARALVFQITTAVASYRRLLNSLGTPKDTITLRDNLHKTSQNILQLAKDAKDKLQKAAEADKSTDTSADKRIADMKLAKDFAATMEEFRKLQSLAIQRETAYKPVVPQNTQSNYSTDERSSESGNMPEQRALLAESMRQEVLQLDNEIVYNEAIIEEREQAIQDIQQQIGEVHEVF

SEQ ID NO: 27084 - protein, 102 aa, Zea mays subsp. mays
  misc_feature (1)..(102): Ceres Seq. ID no. 14305243
MKLAKDFAATMEEFRKLQSLAIQRETAYKPVVPQNTQSNYSTDERSSESGNMPEQRALLAESMRQEVLQLDNEIVYNEAIIEEREQAIQDIQQQIGEVHEVF

SEQ ID NO: 27085 - DNA, 671 bp, Zea mays subsp. mays
  misc_feature (1)..(671): Ceres Seq. ID no. 14305267
acgttgcttgctcccaagatcaagcgcctcccgcctccagcactctaactcaggggacacgatcgccatggccgccacatcgaccgccgccgccgtgctgtccccgccgtccgtggccgggctccgcctggcgccgtctcccggccgggcgcgcgtgtcgttccgcgcggcgccggcgccggcgcggcggtccgtggcggcgcgcgcggagctgagctcggcgctggtgatcagcctgagcacgggcgtgtcgctcttcctgggccgcttcgtcttcttcaacttccagcgggagaacgtggcgaagcaggtgcccgcgcagaacggcaagacgcacttcgacgccggcgacgagcgcgccaaggagttcgcggccctgctcaagtccaacgaccccgtgggcttcaacctcgtcgacgtcctcgcctggggctcgctcggccacatcgtcgcctactacatcctcgccacctccagcaacggatacgaccccaacttcttctgagcggtcgtcgaggatgtattctacagacagccgtgtgcgtgcgtgtgtgcttgtcatgtatccgatcaaagtttggttaatttggacaagtagtgcaactgcagaataattggtatttgtatagtgcaccatgccaacatgaatttgatctgtctctgtcttcact

SEQ ID NO: 27086 - protein, 167 aa, Zea mays subsp. mays
  misc_feature (1)..(167): Ceres Seq. ID no. 14305268
RCLLPRSSASRLQHSNSGDTIAMAATSTAAAVLSPPSVAGLRLAPSPGRARVSFRAAPAPARRSVAARAELSSALVISLSTGVSLFLGRFVFFNFQRENVAKQVPAQNGKTHFDAGDERAKEFAALLKSNDPVGFNLVDVLAWGSLGHIVAYYILATSSNGYDPNFF

SEQ ID NO: 27087 - protein, 145 aa, Zea mays subsp. mays
  misc_feature (1)..(145): Ceres Seq. ID no. 14305269
MAATSTAAAVLSPPSVAGLRLAPSPGRARVSFRAAPAPARRSVAARAELSSALVISLSTGVSLFLGRFVFFNFQRENVAKQVPAQNGKTHFDAGDERAKEFAALLKSNDPVGFNLVDVLAWGSLGHIVAYYILATSSNGYDPNFF

SEQ ID NO: 27088 - DNA, 1105 bp, Zea mays subsp. mays
  misc_feature (1)..(1105): Ceres Seq. ID no. 14305301
acaagctcgcttttttaaaatctgtccctgcaattctctcctctgttcccactcattaagataccaccgcctcccgccgcccgccgcccgccgccgacgagcaccgcagcctgacacagagccgcgggcgagccatcgcgtgcggcctcgcccgggatggcgaccatggagagcctgatcgggctggtgaaccggatccagcgcgcgtgcaccgtcctcggcgaccacggcggcggcggcggtgagggctccctctgggaggcgctcccctccgtcgctgtcgttggcgggcagagttccgggaagtcgtcggtgcttgagagcatagtagggagggacttcctgccccgtggatctggtatcgtcacgaggcggcctttagtgctgcagctccacaagacagatggtgggcacgagtatgctgagtttctccacgccccgcggaagcggttcaccgactttgctgctgtgaggaaagagattgctgatgaaacagaccgcattactgggaaaactaaagctatttcaaatgttcccatccatttgagtatatattcgccacatgttgttaacttgacacttattgatcttcctggactgacaaaggtcgctgtagaggggcaagcagaatctattgttcaagatattgaaaacatggttcgatcttatgttgacaagccaaattgcatcatcttggctatctccccagctaaccaagatatagcaacgtcagatgctatcaagcttgccagggatgtcgatccttcaggtgacaggacatttggagtcttaacaaagcttgatttgatggacaagggtaccaatgccgttgatgtacttgaagggagacaatatcgcttacaacacccctgggttggaattgttaatcgctcacaagctgatatcaacaagaatgttgatatgctttcagcaagacgcaaagaaaaagagtactttgagagtagtcctgaatatggtcacttggcacataaaatgggtgcagagtatcttgccaagcttctgtcacagcatttagaggctgtgatcagggccaaaattccaagtattatagccttgattaacaaaacaattgatgaaatagaag

SEQ ID NO: 27089 - protein, 316 aa, Zea mays subsp. mays
  misc_feature (1)..(316): Ceres Seq. ID no. 14305302
MATMESLIGLVNRIQRACTVLGDHGGGGGEGSLWEALPSVAVVGGQSSGKSSVLESIVGRDFLPRGSGIVTRRPLVLQLHKTDGGHEYAEFLHAPRKRFTDFAAVRKEIADETDRITGKTKAISNVPIHLSIYSPHVVNLTLIDLPGLTKVAVEGQAESIVQDIENMVRSYVDKPNCIILAISPANQDIATSDAIKLARDVDPSGDRTFGVLTKLDLMDKGTNAVDVLEGRQYRLQHPWVGIVNRSQADINKNVDMLSARRKEKEYFESSPEYGHLAHKMGAEYLAKLLSQHLEAVIRAKIPSIIALINKTIDEIE

SEQ ID NO: 27090 - protein, 313 aa, Zea mays subsp. mays
  misc_feature (1)..(313): Ceres Seq. ID no. 14305303
MESLIGLVNRIQRACTVLGDHGGGGGEGSLWEALPSVAVVGGQSSGKSSVLESIVGRDFLPRGSGIVTRRPLVLQLHKTDGGHEYAEFLHAPRKRFTDFAAVRKEIADETDRITGKTKAISNVPIHLSIYSPHVVNLTLIDLPGLTKVAVEGQAESIVQDIENMVRSYVDKPNCIILAISPANQDIATSDAIKLARDVDPSGDRTFGVLTKLDLMDKGTNAVDVLEGRQYRLQHPWVGIVNRSQADINKNVDMLSARRKEKEYFESSPEYGHLAHKMGAEYLAKLLSQHLEAVIRAKIPSIIALINKTIDEIE

SEQ ID NO: 27091 - DNA, 801 bp, Zea mays subsp. mays
  misc_feature (1)..(801): Ceres Seq. ID no. 14305346
aaggtcgccgacttcggcctctccaagctagtgtccgacagcgagaggggccacgtcagcacgcaagtgaaaggaacactgggctatctggaccctgagtactacatgtcccagcagctgaccgagaagagcgacgtctacagcttcggcgtggtcatgctggagctgatcgtcgcgaagcagccgatcgagaagggcaagtacatcgtccgcgaggcgaagagggtgttcgacgccgacgacgccgagttctgcgggctcaaggacatggtagacgcaaggatcatgagcaccaataaccacctcgcggcgttcggcaagttcgtccagctggccctcaggtgcgtcgacgaggtggccacagcccggccgtccatgagcgaggtcgtcaaggagatcgagatgatgctgcagagcgaggggctcagcagcgcctccacgtctgcctcgacgtccgcgaccgagttcgacgttacgaagggggctcctcgccacccgtacaacgatcctcccctccctaaaaaggacaaggacgtgagcaccgactccttcgagtacagcggaggatattctttccaatcaaaggtcgaaccgaagtagctgatttctggattgaggctatcttcttcgttcggccttttcctttcccaacaattggcttgacgaaatgaagagagatatgggtaacctttttattgcattgagcttaatacttgtgggagactagtgaatttgtatggttaataggagacgcatcaagatcaaactcgtctgcctctaaagtgctgctaactgttgttt

SEQ ID NO: 27092 - protein, 199 aa, Zea mays subsp. mays
  misc_feature (1)..(199): Ceres Seq. ID no. 14305347
KVADFGLSKLVSDSERGHVSTQVKGTLGYLDPEYYMSQQLTEKSDVYSFGVVMLELIVAKQPIEKGKYIVREAKRVFDADDAEFCGLKDMVDARIMSTNNHLAAFGKFVQLALRCVDEVATARPSMSEVVKEIEMMLQSEGLSSASTSASTSATEFDVTKGAPRHPYNDPPLPKKDKDVSTDSFEYSGGYSFQSKVEPK

SEQ ID NO: 27093 - protein, 164 aa, Zea mays subsp. mays
  misc_feature (1)..(164): Ceres Seq. ID no. 14305348
MSQQLTEKSDVYSFGVVMLELIVAKQPIEKGKYIVREAKRVFDADDAEFCGLKDMVDARIMSTNNHLAAFGKFVQLALRCVDEVATARPSMSEVVKEIEMMLQSEGLSSASTSASTSATEFDVTKGAPRHPYNDPPLPKKDKDVSTDSFEYSGGYSFQSKVEPK

SEQ ID NO: 27094 - protein, 147 aa, Zea mays subsp. mays
  misc_feature (1)..(147): Ceres Seq. ID no. 14305349
MLELIVAKQPIEKGKYIVREAKRVFDADDAEFCGLKDMVDARIMSTNNHLAAFGKFVQLALRCVDEVATARPSMSEVVKEIEMMLQSEGLSSASTSASTSATEFDVTKGAPRHPYNDPPLPKKDKDVSTDSFEYSGGYSFQSKVEPK

SEQ ID NO: 27095 - DNA, 1079 bp, Zea mays subsp. mays
  misc_feature (1)..(1079): Ceres Seq. ID no. 14305350
ctatttgcggaaaggaacttctgttagtgctggccaaacatcaagttcatcaaatggaacaactgcaggagaaaggcctctcctacgtgagaaattgtcaaagggaaaggatggctttgttgctgctgatttcacagctacagaagctcattgtgctgtaccctcgactccaatactttggttccagcaggcagatgagtgcatgcacctatgcatttatcagcacaaaagtctcactatcttactgctggttcctgcttcctcagtgataaatggagaagagggcattactcatgtgaagaaggcgatccttgaaaatgcatcacagaagattgtcactgttgagcagaaattgacacggggatggggaggagaaaatgcgtatcatgttagtggatatcgttatttgcttgttgatccggagagaagagtatcaagagcctccccacctgggaaagtcaccaccctagcaaaggattctctacttgccctcaacatgctaagacaagaagtagatctagagaagtcaagatacaagagaggtgacccttgtcgtgataaggatttcgaagtatgtatcagaacaaaaaacaatgcgtgggttattgctaaaatcagtcaaggaagggagctttacatggctctagagaagggtggtgaaacgcttctatatgcatccacagctgtagagaaattcagcaacaggtactgtgagggagtattctctacagattagaagcaccagagggagatcttagcttttccatacattacctattatgtacatcctgttttttccccagctgtatcgttgccccccattgttgagagactcggaccactctttgcgaagggaataaggagttcgtatcagttgtacagctgctctgctaccgtgtgctatctgcaaaagaatagcctagtctgggaataacgcagagcgggatagagtttgtttgttcacgggtcttatgtccttccttaacgcagagcattgtgcgtgttttcattttgctgtaacagccggcgatttacctgcagactgggaaagtaacttagcgtttcatttggtattctgc

SEQ ID NO: 27096 - protein, 244 aa, Zea mays subsp. mays
  misc_feature (1)..(244): Ceres Seq. ID no. 14305351
YLRKGTSVSAGQTSSSSNGTTAGERPLLREKLSKGKDGFVAADFTATEAHCAVPSTPILWFQQADECMHLCIYQHKSLTILLLVPASSVINGEEGITHVKKAILENASQKIVTVEQKLTRGWGGENAYHVSGYRYLLVDPERRVSRASPPGKVTTLAKDSLLALNMLRQEVDLEKSRYKRGDPCRDKDFEVCIRTKNNAWVIAKISQGRELYMALEKGGETLLYASTAVEKFSNRYCEGVFSTD

SEQ ID NO: 27097 - protein, 177 aa, Zea mays subsp. mays
  misc_feature (1)..(177): Ceres Seq. ID no. 14305352
MHLCIYQHKSLTILLLVPASSVINGEEGITHVKKAILENASQKIVTVEQKLTRGWGGENAYHVSGYRYLLVDPERRVSRASPPGKVTTLAKDSLLALNMLRQEVDLEKSRYKRGDPCRDKDFEVCIRTKNNAWVIAKISQGRELYMALEKGGETLLYASTAVEKFSNRYCEGVFSTD

SEQ ID NO: 27098 - DNA, 659 bp, Zea mays subsp. mays; identical to SEQ ID NO: 1379
  misc_feature (1)..(659): Ceres Seq. ID no. 14305425

SEQ ID NO: 27099 - protein, 188 aa, Zea mays subsp. mays; identical to SEQ ID NO: 1380
  misc_feature (1)..(188): Ceres Seq. ID no. 14305426

SEQ ID NO: 27100 - protein, 185 aa, Zea mays subsp. mays; identical to SEQ ID NO: 1381
  misc_feature (1)..(185): Ceres Seq. ID no. 14305427

SEQ ID NO: 27101 - protein, 162 aa, Zea mays subsp. mays; identical to SEQ ID NO: 1382
  misc_feature (1)..(162): Ceres Seq. ID no. 14305428

SEQ ID NO: 27102 - DNA, 1017 bp, Zea mays subsp. mays
  misc_feature (1)..(1017): Ceres Seq. ID no. 14305607
aaaggaactgttgggatgacttacactcaagaggatatgccatggacaatcaaaggcatcacacctgatattattgtgaatccacatgctattccatcccgtatgactattgggcagctgattgagtgtatcatgggtaaagttgcggctcagatggggaaggaaggagatgccactccattcacggatgtgactgtggataacattagcaaagctcttcataaatgtaattatcaaatgcgtggatttgagaccatgtacaatggtcacaccggaagaaaactgacagcaatgattttcctgggacccacgtattaccaaagactcaagcacatggtggatgacaagatacattccagaggacgtggtcctgttcagatactcacccgacaaccagcagaggggcgatctcgtgatggtggtctccgctttggagaaatggaaagggattgtatgattgcacatggagcagctttcttcctgaaggaaaggctgtttgaccagagtgacgcatacagagtccatgtatgtgagaaatgtggtctcatcgcaattgctaatctaaagaaaaactcgtttgaatgtaggggctgcaagaacaagactgacattgtccaagtacacataccctatgcttgtaagcttctgttccaggagcttatggcaatggccattgctcccagaatgcttacccatgatatgaagacagggaaggatcagaagaagcgctgaacttgtatcacatgagatgtaactggaactttgctccattgctatatttctcgcgtgcacacggtagtacgctgttaaggaacattgtggtcacttgttttccgacttcgactctggtttgtcgtgaacgatggacaggccattatcgtatcttgatgggctatcagcccaatctgtgttagtgctgttagatgatctgtgctagcagatcgttgagttaattttgtacattataggaatgtgctgcaatgtattaatctacgaatacaaagactttggcgcgct

SEQ ID NO: 27103 - protein, 243 aa, Zea mays subsp. mays
  misc_feature (1)..(243): Ceres Seq. ID no. 14305608
KGTVGMTYTQEDMPWTIKGITPDIIVNPHAIPSRMTIGQLIECIMGKVAAQMGKEGDATPFTDVTVDNISKALHKCNYQMRGFETMYNGHTGRKLTAMIFLGPTYYQRLKHMVDDKIHSRGRGPVQILTRQPAEGRSRDGGLRFGEMERDCMIAHGAAFFLKERLFDQSDAYRVHVCEKCGLIAIANLKKNSFECRGCKNKTDIVQVHIPYACKLLFQELMAMAIAPRMLTHDMKTGKDQKKR

SEQ ID NO: 27104 - protein, 238 aa, Zea mays subsp. mays
  misc_feature (1)..(238): Ceres Seq. ID no. 14305609
MTYTQEDMPWTIKGITPDIIVNPHAIPSRMTIGQLIECIMGKVAAQMGKEGDATPFTDVTVDNISKALHKCNYQMRGFETMYNGHTGRKLTAMIFLGPTYYQRLKHMVDDKIHSRGRGPVQILTRQPAEGRSRDGGLRFGEMERDCMIAHGAAFFLKERLFDQSDAYRVHVCEKCGLIAIANLKKNSFECRGCKNKTDIVQVHIPYACKLLFQELMAMAIAPRMLTHDMKTGKDQKKR

SEQ ID NO: 27105 - protein, 231 aa, Zea mays subsp. mays
  misc_feature (1)..(231): Ceres Seq. ID no. 14305610
MPWTIKGITPDIIVNPHAIPSRMTIGQLIECIMGKVAAQMGKEGDATPFTDVTVDNISKALHKCNYQMRGFETMYNGHTGRKLTAMIFLGPTYYQRLKHMVDDKIHSRGRGPVQILTRQPAEGRSRDGGLRFGEMERDCMIAHGAAFFLKERLFDQSDAYRVHVCEKCGLIAIANLKKNSFECRGCKNKTDIVQVHIPYACKLLFQELMAMAIAPRMLTHDMKTGKDQKKR

SEQ ID NO: 27106 - DNA, 1119 bp, Zea mays subsp. mays
  misc_feature (1)..(1119): Ceres Seq. ID no. 14305693
attgttattggcaaagtctcagaatctggagaagaccacagtattaagctgaagcatacagaaaagggaatggttcagaaagtattgctttcagcaaatgatgaagggaagaattttgctgtggttactctaagacaggttcggacaccttgccttggagataagttttccagcatgcatggccaaaaaggtgttgttggttttctagaatctcaagagaacttcccatttactcacgaaggtatagtcccggatattgtgataaatccacatgccttcccaacacgtcaaactcccggacagctgcttgaagctgctctggggaagggaatagcttgcaaaggtacaatgagatatgcaacaccattcaccacagcatcagttgacgttattgcagaacagttgcacagggctggttattcacgatggggatctgagaacgttctaaatgggcgaacaggtgaaagagtgcaatccttggttttcatgggccctaccttttaccagaggctgattcatatgtccgaagataaggtgaaattccgtaacactgggccggtgcaccccctcacgaggcagcctgttgccgacaggaaaaggtttggtggagttaagtttggagaaatggagcgtgactgcctcctcgcccatgggtcagctgccaacctgcatgaacgcctcttcctgcttagtgacttctcccagatgcacatctgccagacatgcgagcgcgtggctaatgttgtcatgaggtctgtccccggaggcaagaagatccgtggcccctactgcggcttctgcaagtcttcggagaacatagtgagaatcaatgtgccctatggcgcgaagctgctctaccaggaactcttcagcatggggatctgcctcaagtttgagacccaagtctgctagaacttgtagacctgcttgcatccagttattacatatgtacatacagctagcctatgaggatctccaagctggtgtgccggtgtgtgatgctggcatagtaaggatgggcgagctagaaaccctgttgtgtttatgtgctgttttctccctgctcatgtggtaaactatgctaaagtgaatgaacactcgtttcctgttccctctttg

SEQ ID NO: 27107 - protein, 303 aa, Zea mays subsp. mays
  misc_feature (1)..(303): Ceres Seq. ID no. 14305694
IVIGKVSESGEDHSIKLKHTEKGMVQKVLLSANDEGKNFAVVTLRQVRTPCLGDKFSSMHGQKGVVGFLESQENFPFTHEGIVPDIVINPHAFPTRQTPGQLLEAALGKGIACKGTMRYATPFTTASVDVIAEQLHRAGYSRWGSENVLNGRTGERVQSLVFMGPTFYQRLIHMSEDKVKFRNTGPVHPLTRQPVADRKRFGGVKFGEMERDCLLAHGSAANLHERLFLLSDFSQMHICQTCERVANVVMRSVPGGKKIRGPYCGFCKSSENIVRINVPYGAKLLYQELFSMGICLKFETQVC

SEQ ID NO: 27108 - protein, 280 aa, Zea mays subsp. mays
  misc_feature (1)..(280): Ceres Seq. ID no. 14305695
MVQKVLLSANDEGKNFAVVTLRQVRTPCLGDKFSSMHGQKGVVGFLESQENFPFTHEGIVPDIVINPHAFPTRQTPGQLLEAALGKGIACKGTMRYATPFTTASVDVIAEQLHRAGYSRWGSENVLNGRTGERVQSLVFMGPTFYQRLIHMSEDKVKFRNTGPVHPLTRQPVADRKRFGGVKFGEMERDCLLAHGSAANLHERLFLLSDFSQMHICQTCERVANVVMRSVPGGKKIRGPYCGFCKSSENIVRINVPYGAKLLYQELFSMGICLKFETQVC

SEQ ID NO: 27109 - protein, 245 aa, Zea mays subsp. mays
  misc_feature (1)..(245): Ceres Seq. ID no. 14305696
MHGQKGVVGFLESQENFPFTHEGIVPDIVINPHAFPTRQTPGQLLEAALGKGIACKGTMRYATPFTTASVDVIAEQLHRAGYSRWGSENVLNGRTGERVQSLVFMGPTFYQRLIHMSEDKVKFRNTGPVHPLTRQPVADRKRFGGVKFGEMERDCLLAHGSAANLHERLFLLSDFSQMHICQTCERVANVVMRSVPGGKKIRGPYCGFCKSSENIVRINVPYGAKLLYQELFSMGICLKFETQVC

SEQ ID NO: 27110 - DNA, 1127 bp, Zea mays subsp. mays
  misc_feature (1)..(1127): Ceres Seq. ID no. 14305770
gaaaaaccacgatcccaagtggtggctaggggagccgctctgggccaccgctgccgcccagggggtcctgcctgccacattcttctggccgggttcggaggttacgaagggttcctggaactgccccgacaagtactgccgccactacaatggctcggtgccgtttgaggagagggtcgacaccatccttggctattttgatctcccgcctaaccaaatgccacagttcctgacgctgtactttgaggatcctgatcaccaggggcaccaggtgggtcctgacgatccttcaatcaccgatgcggtcgtacatatcgatgagatgctcgggaggctcattgctggtttggaggctaggggaatgtttgaggatgtgaacattatattggtaggtgaccatggtatggttgggacctgcgataggaagcttgtgtttctcgaagagttggctccatggatcgagttgaagtcagattgggttctgtcaatgactccattgctggcaatcaggccgccagatggtgtgtcgccagctgaggttgtggccaagatgaatgaggggcttggatctgggaaggtgaagaatggggaatatttgaagatgtacttaaaagaggatttgcctactcgcctgcattattcagagagttacaggatcccgccaatcatcgggctggttggggaagggtataagatcgagatgaagcgctccaagagaaatgagtgtggaggagcccatgggtacgacaatgccttcttctcaatgaggaccatattcgccgcacatggacctcgttttcagggtggtagaactgtgccctcatttgagaatgtggagatatacaatgtcatggcttccattctcaatttgaagcctgctccaaacaatggttcagcttctttccctggcacgattctgttgccgaacaaatgatgttggattggttttgtaggagtaagggcacatggatgtatgatggtgttctcatttggttattgtattgtacctcttaaattagacttctgccacatcactgtatctgagcaaaaatgctgctagtagagagttgcttctctctagtgacaacatttggaaacatgttccacatcaaacgtttggctgctcg

SEQ ID NO: 27111 - protein, 310 aa, Zea mays subsp. mays
  misc_feature (1)..(310): Ceres Seq. ID no. 14305771
KNHDPKWWLGEPLWATAAAQGVLPATFFWPGSEVTKGSWNCPDKYCRHYNGSVPFEERVDTILGYFDLPPNQMPQFLTLYFEDPDHQGHQVGPDDPSITDAVVHIDEMLGRLIAGLEARGMFEDVNIILVGDHGMVGTCDRKLVFLEELAPWIELKSDWVLSMTPLLAIRPPDGVSPAEVVAKMNEGLGSGKVKNGEYLKMYLKEDLPTRLHYSESYRIPPIIGLVGEGYKIEMKRSKRNECGGAHGYDNAFFSMRTIFAAHGPRFQGGRTVPSFENVEIYNVMASILNLKPAPNNGSASFPGTILLPNK

SEQ ID NO: 27112 - protein, 238 aa, Zea mays subsp. mays
  misc_feature (1)..(238): Ceres Seq. ID no. 14305772
MPQFLTLYFEDPDHQGHQVGPDDPSITDAVVHIDEMLGRLIAGLEARGMFEDVNIILVGDHGMVGTCDRKLVFLEELAPWIELKSDWVLSMTPLLAIRPPDGVSPAEVVAKMNEGLGSGKVKNGEYLKMYLKEDLPTRLHYSESYRIPPIIGLVGEGYKIEMKRSKRNECGGAHGYDNAFFSMRTIFAAHGPRFQGGRTVPSFENVEIYNVMASILNLKPAPNNGSASFPGTILLPNK

SEQ ID NO: 27113 - protein, 203 aa, Zea mays subsp. mays
  misc_feature (1)..(203): Ceres Seq. ID no. 14305773
MLGRLIAGLEARGMFEDVNIILVGDHGMVGTCDRKLVFLEELAPWIELKSDWVLSMTPLLAIRPPDGVSPAEVVAKMNEGLGSGKVKNGEYLKMYLKEDLPTRLHYSESYRIPPIIGLVGEGYKIEMKRSKRNECGGAHGYDNAFFSMRTIFAAHGPRFQGGRTVPSFENVEIYNVMASILNLKPAPNNGSASFPGTILLPNK

SEQ ID NO: 27114 - DNA, 981 bp, Zea mays subsp. mays
  misc_feature (1)..(981): Ceres Seq. ID no. 14305860
aaaaaatagccttatagccacatcccggccagccgcagcaagtgcccagaaggccagaaccagaaccaggtagcccgtgcaacctcatatcatcccctgccacgcacctccgtccgccgcgccatggaatcgaggaggagggccgtgcccaccgtgacggcggttgcggtggcgacgctgctgctgctgctgatgtcgtcgggcgtgggcggcgacttcgcggcggaccgggcggagtgctcggagcagctggcggggctggcgacgtgcctgacgtacgtgcaggagcaggcgacggcgacggcgccgacgcccgactgctgcgcgggcctgaaggcggtgctgcagagcagccgcaagtgcctgtgcgtgctggtcaaggaccgggacgaccccaacctaggcctcaagctcaacgtcgacaaggcgctcggcctccccgccgtctgccacgcgcccgccaacatctccgactgccccaggctgctggacctgccggccggctccaaggacgcgcaggtgttcgagcagtacgcgaagcagcaggcggcggcggcggcgcagggcggcggcgcacccaccagtggacgcagcagcgcggcggcgagcacgaccgcgggcgcgcagaagagcggagcctcagccgccggtcggtggttgggagtggggagggtcggtggtgctggtggcggcgcacgcgcggtggcgccgctcgccgtgcctttcctgctcctgctcgggtagataataataataactttacgcgcgcggccaacggccggagtcccggcggtttggttggcgccgcgcgttgccgacttgtgtgcttcgggtgcgtgcgtgtgtggtggggtacttttcacactatattggaaaaagaagctattatatatctttgactgaaaaaaagtgtcgttgtataattatctttttttcgtgtccgtgtatgcaacccctcctctcatagacccatagcgccaa

SEQ ID NO: 27115 - protein, 206 aa, Zea mays subsp. mays
  misc_feature (1)..(206): Ceres Seq. ID no. 14305861
MESRRRAVPTVTAVAVATLLLLLMSSGVGGDFAADRAECSEQLAGLATCLTYVQEQATATAPTPDCCAGLKAVLQSSRKCLCVLVKDRDDPNLGLKLNVDKALGLPAVCHAPANISDCPRLLDLPAGSKDAQVFEQYAKQQAAAAAQGGGAPTSGRSSAAASTTAGAQKSGASAAGRWLGVGRVGGAGGGARAVAPLAVPFLLLLG

SEQ ID NO: 27116 - protein, 183 aa, Zea mays subsp. mays
  misc_feature (1)..(183): Ceres Seq. ID no. 14305862
MSSGVGGDFAADRAECSEQLAGLATCLTYVQEQATATAPTPDCCAGLKAVLQSSRKCLCVLVKDRDDPNLGLKLNVDKALGLPAVCHAPANISDCPRLLDLPAGSKDAQVFEQYAKQQAAAAAQGGGAPTSGRSSAAASTTAGAQKSGASAAGRWLGVGRVGGAGGGARAVAPLAVPFLLLLG

SEQ ID NO: 27117 - DNA, 642 bp, Zea mays subsp. mays; identical to SEQ ID NO: 1412
  misc_feature (1)..(642): Ceres Seq. ID no. 14306056

SEQ ID NO: 27118 - protein, 126 aa, Zea mays subsp. mays; identical to SEQ ID NO: 1413
  misc_feature (1)..(126): Ceres Seq. ID no. 14306057

SEQ ID NO: 27119 - protein, 96 aa, Zea mays subsp. mays; identical to SEQ ID NO: 1414
  misc_feature (1)..(96): Ceres Seq. ID no. 14306058

SEQ ID NO: 27120 - DNA, 1062 bp, Zea mays subsp. mays
  misc_feature (1)..(1062): Ceres Seq. ID no. 14306100
ataaacagagtgagagactggtagcagccgcatgtgctagagctagacagaagtcagtctccttcccctctctctagtgctcgccggctctttccgtcgccatggacgtcctcctctgctgctgcctgctgcttctcctggcctccgccgcgtccgccggcagcgagcggtgcgtgcggcaggggaaggcggcctactcttcctcgctctctccggcccctcacgatgagatgccgagacgcaaggctgtgcagcgccgggggagtgcgggtggtgctgaccgacttccacaggagcaaccgtacggacttcctgctcgccgggccggcgttcgcgggcctggccaagcccgggatggcccagcagttgaacaggcgagacgccctctccgtagagtacaaaaggattccctgcgagtacaaggagaagaacctgtcgatccgggtggaagaagcgggcgacaggagccggggcaagctggtggtgaagctgctgtaccagggcgggcagaccgacgtactggcggtggaggtggcccccgtggggtcgtcgtcggagtggcggttcatgacaagggcgtacgggccggtgtggagcacggaccgggcccccgccggcccgctgcagttccgcgcggtcgtcacgggcggctacgacggcaagtgggtgtgggccgagcaggaggtgctgccggccgactggcgccccggccaggtctacgacaccggcgtccgcatcgttgacgtcgcccgggacgcatcccgcggctgcaccgccgccgccatggacgactggaagtgaagtgaggatatggctgggtagattaaaaatacgtatgaatacatactaacacgtcgccacatcggtgctgcgacactctggtaagaagaggacagcatgcaatggctccaagaacagcatcccccccaagcgcgtccggctgtccagaggagaggaggaagaagattggagtagctagcagctagggtgtaattgtgtatgcaggatcttctatcaaggtcgatccgattagatgcaggcaaaaaaaaagagctgggatcc

SEQ ID NO: 27121 - protein, 213 aa, Zea mays subsp. mays
  misc_feature (1)..(213): Ceres Seq. ID no. 14306101
MDVLLCCCLLLLLASAASAGSERCVRQGKAAYSSSLSPAPHDEMPRRKAVQRRGSAGGADRLPQEQPYGLPARRAGVRGPGQARDGPAVEQARRPLRRVQKDSLRVQGEEPVDPGGRSGRQEPGQAGGEAAVPGRADRRTGGGGGPRGVVVGVAVHDKGVRAGVEHGPGPRRPAAVPRGRHGRLRRQVGVGRAGGAAGRLAPRPGLRHRRPHR

SEQ ID NO: 27122 - protein, 191 aa, Zea mays subsp. mays
  misc_feature (1)..(191): Ceres Seq. ID no. 14306102
MRCRDARLCSAGGVRVVLTDFHRSNRTDFLLAGPAFAGLAKPGMAQQLNRRDALSVEYKRIPCEYKEKNLSIRVEEAGDRSRGKLVVKLLYQGGQTDVLAVEVAPVGSSSEWRFMTRAYGPVWSTDRAPAGPLQFRAVVTGGYDGKWVWAEQEVLPADWRPGQVYDTGVRIVDVARDASRGCTAAAMDDWK

SEQ ID NO: 27123 - protein, 170 aa, Zea mays subsp. mays
  misc_feature (1)..(170): Ceres Seq. ID no. 14306103
MPRRKAVQRRGSAGGADRLPQEQPYGLPARRAGVRGPGQARDGPAVEQARRPLRRVQKDSLRVQGEEPVDPGGRSGRQEPGQAGGEAAVPGRADRRTGGGGGPRGVVVGVAVHDKGVRAGVEHGPGPRRPAAVPRGRHGRLRRQVGVGRAGGAAGRLAPRPGLRHRRPHR

SEQ ID NO: 27124 - DNA, 1114 bp, Zea mays subsp. mays
  misc_feature (1)..(1114): Ceres Seq. ID no. 14306124
aaaccggagcattccattgtaccccgcggtgacgcgtcccggccccggcggccggcgggtctgcctaccggtaccggccccgctcgctcgccgagtcaacggcttgactgcgcccgcccgccacgttcgtagtactatacaagtacatgcctttgccttccctttcctctcctctcctcctctcccacagtcccacccgtttcgcagtgcagaagccggcgaaacttccaagcccaaggaaggaaaaaaaaaactgtcacctttaactcgatcccctcttccccgcccgagtcagagcggcggcgccggagccggagccgacagcttccggcaagcgggggctacttggtgcggcgggctatttccgcggttttgtgccacagcgggactgaactgcccgcccaggctgccctatcagggtcaccaagattgaacaagactgaactgccgcgcttcaggatactgaactgccatctcagttaaatgatatactgcacaacagtgggcagcgatagtttgagacacattagcaatgagttgtttttctcaccttttcaagagaaaaagggggccacaacaacaagacgatccatctgacaattatttcactggttctgagaatataacaagattcagctacagggaactggttagagccacatcaaattttgaccaaggcaataagattggtgagggcggctatggacctgtctacaagggaacactcaaggatgggacacttattgccgtgaaggttctgtctttacattctagacaaggggcaaaggagtttcttaatgagcttcttgcaatctctgatgtaacacatgagaatcttgtcaaactctatggctgctgtgtagaaggaaaccacaggatccttatctacaattatcttgaaaataatagtcttgcacatacccttctagattcgcgacacagcaacatccagttcaactggagaactcgggtaaatatctgcatcggtgttgcccaaggattagctttcctccatggcagtgtcagccctcacattgttcaccgtgacatcaaggcgagcaatatacttcttgataaggatatgacgccaaaaatatctgattttggtctggca

SEQ ID NO: 27125 - protein, 194 aa, Zea mays subsp. mays
  misc_feature (1)..(194): Ceres Seq. ID no. 14306125
MSCFSHLFKRKRGPQQQDDPSDNYFTGSENITRFSYRELVRATSNFDQGNKIGEGGYGPVYKGTLKDGTLIAVKVLSLHSRQGAKEFLNELLAISDVTHENLVKLYGCCVEGNHRILIYNYLENNSLAHTLLDSRHSNIQFNWRTRVNICIGVAQGLAFLHGSVSPHIVHRDIKASNILLDKDMTPKISDFGLA

SEQ ID NO: 27126 - protein, 143 aa, Zea mays subsp. mays
  misc_feature (1)..(143): Ceres Seq. ID no. 14306126
NRSIPLYPAVTRPGPGGRRVCLPVPAPLARRVNGLTAPARHVRSTIQVHAFAFPFLSSPPLPQSHPFRSAEAGETSKPKEGKKKLSPLTRSPLPRPSQSGGAGAGADSFRQAGATWCGGLFPRFCATAGLNCPPRLPYQGHQD

SEQ ID NO: 27127 - DNA, 993 bp, Zea mays subsp. mays; identical to SEQ ID NO: 191
  misc_feature (1)..(993): Ceres Seq. ID no. 14306276

SEQ ID NO: 27128 - protein, 266 aa, Zea mays subsp. mays; identical to SEQ ID NO: 192
  misc_feature (1)..(266): Ceres Seq. ID no. 14306277

SEQ ID NO: 27129 - protein, 227 aa, Zea mays subsp. mays; identical to SEQ ID NO: 193
  misc_feature (1)..(227): Ceres Seq. ID no. 14306278

SEQ ID NO: 27130 - protein, 227 aa, Zea mays subsp. mays; identical to SEQ ID NO: 193
  misc_feature (1)..(227): Ceres Seq. ID no. 16625462

SEQ ID NO: 27131 - DNA, 1172 bp, Zea mays subsp. mays
  misc_feature (1)..(1172): Ceres Seq. ID no. 14309088
ctctctgttgcatttcccgtcctgtccttccacccggcggcttaaaccctagttctcactcccatcgccgcttcagctccgccgctgcagatggagttctggggtctcgaggtcaagcctggttccactgttaagtgtgagcctggatatggctttgtgctgcacctttcccaggctgctcttggggaatcgaagaagagtgataatgccttgatgtatgtcaaaattgatgatcagaaacttgccattggaaccctctctgttgacaagaacccacacatacaatttgatctgattttcgataaagagtttgagctgtcgcacacatcaaaaactaccagcgttttcttcactggctacaaggttgagcagccattcgaggaagatgaaatggatcttgattctgaagatgaagacgaggagctgaatgttccagtagtcaaggaaaatggcaaagctgatgagaagaaacagaaaagtcaagaaaaggcagttgctgcaccttcaaaatcaagtccggattccaagaagagcaaggatgacgacgattctgatgaggacgagactgatgattctgatgaggatgagacggacgattctgatgagggtttgtctcctgaagaaggcgatgatgattcaagtgatgaagatgataccagtgacgatgaggaggaagacactccaactcctaagaagcctgaggtaggcaagaagagagctgctgaaagttccgtgctgaaaactcctctatctgataagaaagcaaaggttgccacaccgtcatctcagaagacaggtggcaagaagggcgccgccgtccatgtggcaactccacacccagcaaaaggcaagaccattgtaaacaatgacaaatcggtcaagtctccaaaatctgcgccaaaatctggtgtcccttgcaaatcgtgcagcaagtcattcatcagtgagacggcacttcaggctcactcgaaggcgaagcatgggggcaagtgagtcgcaggtccaatagagtcaacaacaaatgcgaaacatgggagaggagggtaagcgagagtctcgaaagagtgtcggtggaagtaggcctaaccttattttgtttagagacgggctatgcgttcgatgtagcaaaacaaggctgtggtttgtgtacttcaatatttgggttgtgtgtt

SEQ ID NO: 27132 - protein, 300 aa, Zea mays subsp. mays
  misc_feature (1)..(300): Ceres Seq. ID no. 14309089
MEFWGLEVKPGSTVKCEPGYGFVLHLSQAALGESKKSDNALMYVKIDDQKLAIGTLSVDKNPHIQFDLIFDKEFELSHTSKTTSVFFTGYKVEQPFEEDEMDLDSEDEDEELNVPVVKENGKADEKKQKSQEKAVAAPSKSSPDSKKSKDDDDSDEDETDDSDEDETDDSDEGLSPEEGDDDSSDEDDTSDDEEEDTPTPKKPEVGKKRAAESSVLKTPLSDKKAKVATPSSQKTGGKKGAAVHVATPHPAKGKTIVNNDKSVKSPKSAPKSGVPCKSCSKSFISETALQAHSKAKHGGK

SEQ ID NO: 27133 - protein, 259 aa, Zea mays subsp. mays
  misc_feature (1)..(259): Ceres Seq. ID no. 14309090
MYVKIDDQKLAIGTLSVDKNPHIQFDLIFDKEFELSHTSKTTSVFFTGYKVEQPFEEDEMDLDSEDEDEELNVPVVKENGKADEKKQKSQEKAVAAPSKSSPDSKKSKDDDDSDEDETDDSDEDETDDSDEGLSPEEGDDDSSDEDDTSDDEEEDTPTPKKPEVGKKRAAESSVLKTPLSDKKAKVATPSSQKTGGKKGAAVHVATPHPAKGKTIVNNDKSVKSPKSAPKSGVPCKSCSKSFISETALQAHSKAKHGGK

SEQ ID NO: 27134 - protein, 200 aa, Zea mays subsp. mays
  misc_feature (1)..(200): Ceres Seq. ID no. 14309091
MDLDSEDEDEELNVPVVKENGKADEKKQKSQEKAVAAPSKSSPDSKKSKDDDDSDEDETDDSDEDETDDSDEGLSPEEGDDDSSDEDDTSDDEEEDTPTPKKPEVGKKRAAESSVLKTPLSDKKAKVATPSSQKTGGKKGAAVHVATPHPAKGKTIVNNDKSVKSPKSAPKSGVPCKSCSKSFISETALQAHSKAKHGGK

SEQ ID NO: 27135 - DNA, 1240 bp, Zea mays subsp. mays
  misc_feature (1)..(1240): Ceres Seq. ID no. 14309637
gcagcacacaacctaccacactcgcattgcattgcattgcattccttcagttcagtagtgtgctctgacagtgagatggcgagcgtgaaggttttcgggtcacccacctcggcggaggtcgcccgcgtgctcatgtgcctcttcgagaaggaggtggagttccagctgatccgcgtcgacgcctaccgcggcaccaagcgcatgccccagtacctcaagctgcagccgcaaggcgaggcgctcaccttcgaggacgagagcctcaccctctccgactccagggggatcctccgccacatctcccacaagtacgcgaagcagggcaacccgtacctgattggcacgggcgcgctggagcgggcgtccatcgagcagtggctgcagacggaggcgcagagcttcgacgcgcccagcgccgagatggtctacagcctcgccttcctgccgcccaccctgcccaggcagaacgacaacggcaacggcggcgcgttcaacgccagggaagccaccgtgggcagtaacgccgacgcgtccagcagcaagcgcggtgtggccgggtcacagccggcggcaagccagaccaaggtgagcgcgcagaaggaggaggagatgctgaagctgttcgagcagaggaagaaggacctggagaagctgctggacatctacgagcagcgcctggaggaggccacgttcctggccggcgacaacttcaccatcgccgacctgtcgcacctgccctacgcggaccacctcgtctccgacccgcgctcccgccgcatgttcgagtcccgcaagaacgtcagcaggtggtggcacgacgtctccggccgcgacacctggaagtacgtcaagaccctgcagcgcccgccgtccacgtccaccgacgccagcgccaagaacggccagctgggccagcagcagcacctgccgtcgtccaccgacggccacggcgtgaagagccaacggctggtccagaacgagcggcacttctagccgttgccgtcccttcccgccgacgaataaactacctgcgccgccgccaccgccgccgtccatcaacatggttcctgctgctgttcgtgtcgttttcatacgtcatacgtgtcttgctgcttttgaagctccgttcccgggtgcagggacctacgagtccattccgccgtttgctcattctgttcgtcgtgtaataaaatgaaaaccccaccccgttttgaatgaaattcaattctcagtgttgtgc

SEQ ID NO: 27136 - protein, 330 aa, Zea mays subsp. mays
  misc_feature (1)..(330): Ceres Seq. ID no. 14309638
AAHNLPHSHCIALHSFSSVVCSDSEMASVKVFGSPTSAEVARVLMCLFEKEVEFQLIRVDAYRGTKRMPQYLKLQPQGEALTFEDESLTLSDSRGILRHISHKYAKQGNPYLIGTGALERASIEQWLQTEAQSFDAPSAEMVYSLAFLPPTLPRQNDNGNGGAFNAREATVGSNADASSSKRGVAGSQPAASQTKVSAQKEEEMLKLFEQRKKDLEKLLDIYEQRLEEATFLAGDNFTIADLSHLPYADHLVSDPRSRRMFESRKNVSRWWHDVSGRDTWKYVKTLQRPPSTSTDASAKNGQLGQQQHLPSSTDGHGVKSQRLVQNERHF

SEQ ID NO: 27137 - protein, 305 aa, Zea mays subsp. mays
  misc_feature (1)..(305): Ceres Seq. ID no. 14309639
MASVKVFGSPTSAEVARVLMCLFEKEVEFQLIRVDAYRGTKRMPQYLKLQPQGEALTFEDESLTLSDSRGILRHISHKYAKQGNPYLIGTGALERASIEQWLQTEAQSFDAPSAEMVYSLAFLPPTLPRQNDNGNGGAFNAREATVGSNADASSSKRGVAGSQPAASQTKVSAQKEEEMLKLFEQRKKDLEKLLDIYEQRLEEATFLAGDNFTIADLSHLPYADHLVSDPRSRRMFESRKNVSRWWHDVSGRDTWKYVKTLQRPPSTSTDASAKNGQLGQQQHLPSSTDGHGVKSQRLVQNERHF

SEQ ID NO: 27138 - protein, 286 aa, Zea mays subsp. mays
  misc_feature (1)..(286): Ceres Seq. ID no. 14309640
MCLFEKEVEFQLIRVDAYRGTKRMPQYLKLQPQGEALTFEDESLTLSDSRGILRHISHKYAKQGNPYLIGTGALERASIEQWLQTEAQSFDAPSAEMVYSLAFLPPTLPRQNDNGNGGAFNAREATVGSNADASSSKRGVAGSQPAASQTKVSAQKEEEMLKLFEQRKKDLEKLLDIYEQRLEEATFLAGDNFTIADLSHLPYADHLVSDPRSRRMFESRKNVSRWWHDVSGRDTWKYVKTLQRPPSTSTDASAKNGQLGQQQHLPSSTDGHGVKSQRLVQNERHF

SEQ ID NO: 27139 - DNA, 950 bp, Zea mays subsp. mays
  misc_feature (1)..(950): Ceres Seq. ID no. 14312576
aaggcccagatcaaaagaaaagagcagcggagcggagcatgctcttcctccggtgccagcctcgcgtctcgtccccgtccgcatccgcgtccgcgccgccttttcgtccccgcgtcggcgtcgcggctccactgggcgtacgcgtcaccggcggaaggcgagggcaggcggtggtcgcgatggcgtccgccgacgcgcgcttggcggggattgcctcctccatccgcgtcatccccgacttccccaagccagggatcatgttccaggacatcacgacactgctgctcgaccccaaggcgttccgtgacaccatcgacgtcttcgttgagcggtacaaggaccaagggatcaccgtagttgctggtgtggaagctagagggttcatttttggtcctcctatcgctctagccatcagtgcgaaatttgtacctttgaggaagcctaagaagttgccaggcgaggtgatctccgaagaatattctctggaatacggaactgacaagatagagatgcatgttggagctgtacaggccaacgatcgggctcttgtagtcgatgatcttattgccaccggtggaacactctgtgcagctgtcaaacttattgaacgtgttggagcaaaggttgttgagtgtgcttgcgtcattgaattggcagaactgaagggccgagacaaacttggggacaggccagtttttgttcttgtcgaagcagatgcttgagcggaacttgggacttctcttctcagtgagttagagttggtgctgttgatgctacctctctgtcaacaacaaagtttcccatgttggctatattcttgctgacacgtaataaagtttcattccaaattgtgatcccctgaatgatttgtcaatgtagacatgattgctggtccttgtatactgtggcttattattcacatcaattaaggataatcctgattggagctc

SEQ ID NO: 27140 - protein, 239 aa, Zea mays subsp. mays
  misc_feature (1)..(239): Ceres Seq. ID no. 14312577
GPDQKKRAAERSMLFLRCQPRVSSPSASASAPPFRPRVGVAAPLGVRVTGGRRGQAVVAMASADARLAGIASSIRVIPDFPKPGIMFQDITTLLLDPKAFRDTIDVFVERYKDQGITVVAGVEARGFIFGPPIALAISAKFVPLRKPKKLPGEVISEEYSLEYGTDKIEMHVGAVQANDRALVVDDLIATGGTLCAAVKLIERVGAKVVECACVIELAELKGRDKLGDRPVFVLVEADA

SEQ ID NO: 27141 - protein, 227 aa, Zea mays subsp. mays
  misc_feature (1)..(227): Ceres Seq. ID no. 14312578
MLFLRCQPRVSSPSASASAPPFRPRVGVAAPLGVRVTGGRRGQAVVAMASADARLAGIASSIRVIPDFPKPGIMFQDITTLLLDPKAFRDTIDVFVERYKDQGITVVAGVEARGFIFGPPIALAISAKFVPLRKPKKLPGEVISEEYSLEYGTDKIEMHVGAVQANDRALVVDDLIATGGTLCAAVKLIERVGAKVVECACVIELAELKGRDKLGDRPVFVLVEADA

SEQ ID NO: 27142 - protein, 180 aa, Zea mays subsp. mays
  misc_feature (1)..(180): Ceres Seq. ID no. 14312579
MASADARLAGIASSIRVIPDFPKPGIMFQDITTLLLDPKAFRDTIDVFVERYKDQGITVVAGVEARGFIFGPPIALAISAKFVPLRKPKKLPGEVISEEYSLEYGTDKIEMHVGAVQANDRALVVDDLIATGGTLCAAVKLIERVGAKVVECACVIELAELKGRDKLGDRPVFVLVEADA

SEQ ID NO: 27143 - DNA, 763 bp, Zea mays subsp. mays
  misc_feature (1)..(763): Ceres Seq. ID no. 15169969
atcacaagcgcttagtgatcagttaatactaagggcaggcacacctctgcttcgcgctagtgatcaagcaagtgctttctgtactctgcagcaatggcaggcaaggcctcggtcgcgctgttcctcgccgtgaacctggtggtgttcgccatggccagcgcctgcggtggcaactgccccacgccgaccccgtccaccccgtcgacgccgaccccgacgccggcctcgttcggcaagtgcccccgcgacgcgctcaagctgggcgtgtgcgccaacgtgctgggactgatcaaggccaaggtgggcgtgccgcccacggagccatgctgcccgctgctgaagggactcgtcgacctcgaggccgccgtgtgcctctgcaccgccatcaagggcgaggtcctcggaatcaagctcaacctgcccgtcgacctcagcctcatcctcaaccactgcggcaagaccgtgcccaccggattcaaatgcctctaagctagccgcgagcatgcggatatatatgtgttcttttggttgccattcgcctgcagacttcttgtcgtttgctacttattaagcgagtgctagctctgcatgcatgactacgtcctttgcatgttgatgagcaactttcgatacttttgggtgtttgttttatgtaagtgcttcgtcctttacatcgacagtgtcccagaactatttgtactgttattcttttatttgtacccagcaatctgctcgatgaaataaagcttattatatttattgg

SEQ ID NO: 27144 - protein, 131 aa, Zea mays subsp. mays
  misc_feature (1)..(131): Ceres Seq. ID no. 15169970
MAGKASVALFLAVNLVVFAMASACGGNCPTPTPSTPSTPTPTPASFGKCPRDALKLGVCANVLGLIKAKVGVPPTEPCCPLLKGLVDLEAAVCLCTAIKGEVLGIKLNLPVDLSLILNHCGKTVPTGFKCL

SEQ ID NO: 27145 - protein, 112 aa, Zea mays subsp. mays
  misc_feature (1)..(112): Ceres Seq. ID no. 15169971
MASACGGNCPTPTPSTPSTPTPTPASFGKCPRDALKLGVCANVLGLIKAKVGVPPTEPCCPLLKGLVDLEAAVCLCTAIKGEVLGIKLNLPVDLSLILNHCGKTVPTGFKCL

SEQ ID NO: 27146 - DNA, 1213 bp, Zea mays subsp. mays
  misc_feature (1)..(1213): Ceres Seq. ID no. 15175531
aaccaaccaaaatcgtggctgcggctgtggacaatcggcagcttgcgagtagctccggtacggaggggatcatggaggaggggcggcaactggaagcggcggcgttcggttttccggcgccggtgcagccgggggccacgcgcgtggggtggatcggcatcggcgtcatgggcggcgccatggccaagcgcctcctcgcggcagggtacgcggtcaccgcgtacgctcgcacgccgtccagggcggagagcctcgtcgcggcgggcgcgagcctcgcggactcgccggccgccgtggccgccgcgtccgacgtggtgttcaccatggtcgggaaccccggcgacgtccgcgcggtggtcctggacccggccgccggggccctcgcgggcctccgccgcggcggcgtgctggtggactgcacgagctcctccccgtccctcgcgcgcgaggtcgccgcggccgcggccgcgggcgggctgccacgccgtcgacgcgccggtctccggaggcgacgtgggcgcgcgggacggcacgctggccgtcttcgccggcggcgacgaggccgtcgtcgcctggctcgcgccgctcttcgccagcctcggcagggcgacccgcatgggcgcgccgggcagcggccagagcagcaagatcgccaaccaggtcgcggtggccggcgcggtggtgggcctcggcgaggccgtgtccttcgcccgcgcggcggggctcgacgcgccgctgttcctcggcgcggtgtccaggggcgcggcctggtcgcgcgtcatggacgtcttcggcggccgcttgctccgccgcgagttcgcgtccgggggcagcgtacggtacatcgtcaaggacctcggcatggcgctggaggtcggagacggcggggaggaggaggtcaacgtgctgcctggagcggcgctgtaccggcagatgttctcggccatggtggccaatggcgacgcggacctgagcttgcagggactgatcaccgttatcgagcgcctgaacggcattgcaaagtagcgaaggctgcagcaggcaaggtgctgcttttttgttgatggagactgcaggaaaggtgttcgccggaatgcaacactggacccgaagacgcctgagcttgtgacatggacttgttttttgtattcaaaacactgtttcgagcttgatttgcgtttgtaatttcgcccctaaataaaactttgcttcc

SEQ ID NO: 27147 - protein, 353 aa, Zea mays subsp. mays
  misc_feature (1)..(353): Ceres Seq. ID no. 15175532
PTKIVAAAVDNRQLASSSGTEGIMEEGRQLEAAAFGFPAPVQPGATRVGWIGIGVMGGAMAKRLLAAGYAVTAYARTPSRAESLVAAGASLADSPAAVAAASDVVFTMVGNPGDVRAVVLDPAAGALAGLRRGGVLVDCTSSSPSLAREVAAAAAAGGLPRRRRAGLRRRRGRAGRHAGRLRRRRRGRRRLARAALRQPRQGDPHGRAGQRPEQQDRQPGRGGRRGGGPRRGRVLRPRGGARRAAVPRRGVQGRGLVARHGRLRRPLAPPRVRVRGQRTVHRQGPRHGAGGRRRRGGGGQRAAWSGAVPADVLGHGGQWRRGPELAGTDHRYRAPERHCKVAKAAAGKVLLFC

SEQ ID NO: 27148 - protein, 341 aa, Zea mays subsp. mays
  misc_feature (1)..(341): Ceres Seq. ID no. 15175533
NQPKSWLRLWTIGSLRVAPVRRGSWRRGGNWKRRRSVFRRRCSRGPRAWGGSASASWAAPWPSASSRQGTRSPRTLARRPGRRASSRRARASRTRRPPWPPRPTWCSPWSGTPATSARWSWTRPPGPSRASAAAACWWTARAPPRPSRARSPRPRPRAGCHAVDAPVSGGDVGARDGTLAVFAGGDEAVVAWLAPLFASLGRATRMGAPGSGQSSKIANQVAVAGAVVGLGEAVSFARAAGLDAPLFLGAVSRGAAWSRVMDVFGGRLLRREFASGGSVRYIVKDLGMALEVGDGGEEEVNVLPGAALYRQMFSAMVANGDADLSLQGLITVIERLNGIAK

SEQ ID NO: 27149 - protein, 330 aa, Zea mays subsp. mays
  misc_feature (1)..(330): Ceres Seq. ID no. 15175534
MEEGRQLEAAAFGFPAPVQPGATRVGWIGIGVMGGAMAKRLLAAGYAVTAYARTPSRAESLVAAGASLADSPAAVAAASDVVFTMVGNPGDVRAVVLDPAAGALAGLRRGGVLVDCTSSSPSLAREVAAAAAAGGLPRRRRAGLRRRRGRAGRHAGRLRRRRRGRRRLARAALRQPRQGDPHGRAGQRPEQQDRQPGRGGRRGGGPRRGRVLRPRGGARRAAVPRRGVQGRGLVARHGRLRRPLAPPRVRVRGQRTVHRQGPRHGAGGRRRRGGGGQRAAWSGAVPADVLGHGGQWRRGPELAGTDHRYRAPERHCKVAKAAAGKVLLFC

SEQ ID NO: 27150 - DNA, 1781 bp, Zea mays subsp. mays
  misc_feature (1)..(1781): Ceres Seq. ID no. 15175813
acaacactcgtttgcctctcatctcgcttcgcttccattccatcgcgccagtcgccagactcacctgggagagtggggggaaatatcaattagaaacaacgaggaattagcaaagaaagaagaataactcccataagaaaaatcgccaaatacgccattcatcttcttcgcccgggtttcagaacgtacggcagtttagccaggatggtggcgatcgagaaccagagccaggccgcggtggcggcggaggcggtggcggcgccggcgtcgcggatccccagggaggcgcggcgcctgctgcacgagctggcggcggcgtgggcggacgtggccgactgccgcgcgctggaggtcgtgccgctcaagggggccatgaccaacgaggtctaccaggcgcgctggctcactgcaggccctgccggccagaaggaggagcccagggcggagagggaggtgaggaaggtgctcgtgcggatttacggcgacggcgtcgacctcttcttcgaccgcgaggacgaggtgcgcaccttcgagtgcatgtcacgccatggccagggtccccgcctcctcggccgctttccgaacggccgcgtcgaggagttcatccacgcaaggacattgtcagctgccgaccttcgcgatcctgaaatttcagctctggtggcttccaagctgagggagttccacaaccttgacatgcctggtcccaaatctgtgctcatttgggacagacttaggaactggctcagaactgccaagagcttgtgtccacctgaagaagccaaggaatttcggttggacagtctggagaaccagattactgcattggagaacgagtgttcaggtgattaccagtggattggtttctgtcacaatgatcttcagtatggcaatatcatgattgatgaagagaccaacgtgctgaccatcattgattatgagtatgcaagcttcaacccagttgcatatgacattgctaaccatttctgtgagatggcagcagactatcattcatcaaagcctcatatactggactacagcagatatccagatgttgatgagcagaagcgttttgttaagacctacctgaacatttctggtgaggaacctgatgcggaagttgtggagaacctgctccaaagcattgagaagcacacgctcgccagccatctagtatggggcctctggggaataatttcggaccatgttaacgacattgacttcgactacaaggagtatgcgaggcagagattcgagcagtactggcacaagtctgcgatcttaacatcttgaacatgtgtataaacacccgtacgtggtctcaggaactccctgagggcctgtggctgcacacacgaaattgtgcagtgccactgacacatagataagctgtgaaagaagaaatactgacgacgacgacgaataatcccgttttgggctcgggaggttatttctccgcaactcgatgagcttcaggcttcagcttcaggaaggaaggaaggagctatggggatttggctgcccgcttatgctgtaccaatgcaattaaaagataaagatccggtccggtgttgcgtgtgctatgtttagttttggctagcaccgccgagagccgtggtcctgttgtggtgtttctagtttctgtatgcttgatgttgttagtgtgctggataatttggttttgtgcttggggagtccttagctttgggacaacgcatacattgtatactgggtagatgtataaacataaaacagctatgggaatttggttctctaccttg

SEQ ID NO: 27151 - protein, 362 aa, Zea mays subsp. mays
  misc_feature (1)..(362): Ceres Seq. ID no. 15175814
MVAIENQSQAAVAAEAVAAPASRIPREARRLLHELAAAWADVADCRALEVVPLKGAMTNEVYQARWLTAGPAGQKEEPRAEREVRKVLVRIYGDGVDLFFDREDEVRTFECMSRHGQGPRLLGRFPNGRVEEFIHARTLSAADLRDPEISALVASKLREFHNLDMPGPKSVLIWDRLRNWLRTAKSLCPPEEAKEFRLDSLENQITALENECSGDYQWIGFCHNDLQYGNIMIDEETNVLTIIDYEYASFNPVAYDIANHFCEMAADYHSSKPHILDYSRYPDVDEQKRFVKTYLNISGEEPDAEVVENLLQSIEKHTLASHLVWGLWGIISDHVNDIDFDYKEYARQRFEQYWHKSAILTS

SEQ ID NO: 27152 - protein, 306 aa, Zea mays subsp. mays; identical to SEQ ID NO: 25024
  misc_feature (1)..(306): Ceres Seq. ID no. 15175815

SEQ ID NO: 27153 - protein, 251 aa, Zea mays subsp. mays
  misc_feature (1)..(251): Ceres Seq. ID no. 15175816
MSRHGQGPRLLGRFPNGRVEEFIHARTLSAADLRDPEISALVASKLREFHNLDMPGPKSVLIWDRLRNWLRTAKSLCPPEEAKEFRLDSLENQITALENECSGDYQWIGFCHNDLQYGNIMIDEETNVLTIIDYEYASFNPVAYDIANHFCEMAADYHSSKPHILDYSRYPDVDEQKRFVKTYLNISGEEPDAEVVENLLQSIEKHTLASHLVWGLWGIISDHVNDIDFDYKEYARQRFEQYWHKSAILTS

SEQ ID NO: 27154 - DNA, 2478 bp, Zea mays subsp. mays
  misc_feature (1)..(2478): Ceres Seq. ID no. 15177678
aaaacttgccctcttctctgcttgaaccgcggagcaagaccgctcttgttctcttctctgcttgaactgcggagaaagaccgaatccgaagggacgttgggactttctggctgggaagactacataccatttctctaattcgggcgtggtttgtgctgggagggaaggaatccatggggctgcagctcgatccgcgctgagagttgaaggaaccggccttgttgtgtgctccacccaatcgaggaaaaggggcaaggattgctgctttgttgtctttggatccgttacgccattggggattcaaccatcagcagggcgaagtgacggttctgcaccacttttccccttatcctaattcgattttatttgaacactggatgtgattataatctcggttgctgttctgtgcggctctatctgagggtttcctccgtcctggatcgggaaggaaggcgcccttggatttccgtctccatggcgcccgccttgtaacccacggagtctaacttttaaatttagtgtaaatattagtggtagcagctgttaaggaagccccggtctccttagtagccaccgtgtgaatatgtcgtcagctggtgtgatcgtcttggggccagtcccaaaagaccctgctttcctgcctatctgcttcaacggcagccggtcgccacactgctcgtctgggtcacagctgcaggattccattcttattttccttgctgtgcctggtatgtcacccatgcccatgagcgtgctggaatctgagtccattgcctccgtgaagctgcgcatccagcggttcaaaggctttgtggcgacgaagcagcggcttgtgctggatgggcatgaactggcaagaaataactgcccagtcaaggattatgggctggctgagggaaatgttcttcatcttgttattcgactgtctgatctccgtgtgatcaatattgagactgcaactggaaagaagtttcagtttcaggtggatcagagccgcaatgttaagtttcttaagaacaagcttgcagcagagggtgatgaggatattggtaatcttcaggatcacaagcttgaatatgatggcgaggagcttgaggaccaccagctgatagctgatattagcaagagggatgatgctgtaattcatttgttcatcctcaaaccagcaaaagtactgacacagcaagttgatagagatactttggttacagttctcaatccacaggagaaaggcaacctgcaaaatgaacctcgctcaatgaactccacaaaatcagttgaggttaggcctgctcctgttgaaccaatagttagccaaaatgtgaagctgtcacctgaattgattaagatgataaatttaaccacagttggactggagaaagggcacctgcctgtgatgtcagctgaaggttcaggaggtgtatatttcatgcgagatgcaacaggtcagaagaatattgctgtgtttaagcctattgatgaggaacccatggccaaaaacaacccaaggggtcttcctttgtccactgatggcgaggggatgaagaggggaacaattgtagggggaggtgcattcagggaggttgcagcttatattctcgaccatccagttagtgatagtaaatctggtcacagttttgggttttctggtgtgcctcccaccacattggtccgaacctcgcatagggggaagaacttcaagattggttcactgcagatgttcatggacaacaatggaagcactgaagatatgggtcctcgaccttttcctgtcaaggaggttcataaaatagcagtactagatattaggttagctaatgctgatcgtcatgctgggaatattctagtgtgcaaggagagagaaggtggcaactacaagctgattccaattgatcatggttactgcttgccagagaagtttgaagattgtacatttgagtggctctactggccccaagcccgtgagccattcaatgatgaaaccattgaatacatcaaatcactcgatgctgaagaagacatcaagcttctcaagatccatgggtgggagctgcctccacggtgtgctcgtgtcctgcgcatcagcacaatgcttttgaagaaaggtgcatctcgtggcttcacgccctatgacatagggcgcatactatgcagggaaactgtgaatagggactctgagattgaggtcatcattcaggaagcagaggatgctgttctcccatggtccagtgaaaacatgttcttagaaactttatctgaaatcatggaccgtcacctccacaaggaatgagtttagaaattcagaataacttatctagttgctccagctgtatccggtttgttgtaagtattgtagacaaggggtgtcaagggactaatgatttcatttgtttgtatcctctcaaatgatttcacttggttgtaattgctcgagtactttgcttatgcacattttgtgaataatatatttgtttggct

SEQ ID NO: 27155 - protein, 568 aa, Zea mays subsp. mays
  misc_feature (1)..(568): Ceres Seq. ID no. 15177679
MSSAGVIVLGPVPKDPAFLPICFNGSRSPHCSSGSQLQDSILIFLAVPGMSPMPMSVLESESIASVKLRIQRFKGFVATKQRLVLDGHELARNNCPVKDYGLAEGNVLHLVIRLSDLRVINIETATGKKFQFQVDQSRNVKFLKNKLAAEGDEDIGNLQDHKLEYDGEELEDHQLIADISKRDDAVIHLFILKPAKVLTQQVDRDTLVTVLNPQEKGNLQNEPRSMNSTKSVEVRPAPVEPIVSQNVKLSPELIKMINLTTVGLEKGHLPVMSAEGSGGVYFMRDATGQKNIAVFKPIDEEPMAKNNPRGLPLSTDGEGMKRGTIVGGGAFREVAAYILDHPVSDSKSGHSFGFSGVPPTTLVRTSHRGKNFKIGSLQMFMDNNGSTEDMGPRPFPVKEVHKIAVLDIRLANADRHAGNILVCKEREGGNYKLIPIDHGYCLPEKFEDCTFEWLYWPQAREPFNDETIEYIKSLDAEEDIKLLKIHGWELPPRCARVLRISTMLLKKGASRGFTPYDIGRILCRETVNRDSEIEVIIQEAEDAVLPWSSENMFLETLSEIMDRHLHKE

SEQ ID NO: 27156 - protein, 519 aa, Zea mays subsp. mays
  misc_feature (1)..(519): Ceres Seq. ID no. 15177680
MSPMPMSVLESESIASVKLRIQRFKGFVATKQRLVLDGHELARNNCPVKDYGLAEGNVLHLVIRLSDLRVINIETATGKKFQFQVDQSRNVKFLKNKLAAEGDEDIGNLQDHKLEYDGEELEDHQLIADISKRDDAVIHLFILKPAKVLTQQVDRDTLVTVLNPQEKGNLQNEPRSMNSTKSVEVRPAPVEPIVSQNVKLSPELIKMINLTTVGLEKGHLPVMSAEGSGGVYFMRDATGQKNIAVFKPIDEEPMAKNNPRGLPLSTDGEGMKRGTIVGGGAFREVAAYILDHPVSDSKSGHSFGFSGVPPTTLVRTSHRGKNFKIGSLQMFMDNNGSTEDMGPRPFPVKEVHKIAVLDIRLANADRHAGNILVCKEREGGNYKLIPIDHGYCLPEKFEDCTFEWLYWPQAREPFNDETIEYIKSLDAEEDIKLLKIHGWELPPRCARVLRISTMLLKKGASRGFTPYDIGRILCRETVNRDSEIEVIIQEAEDAVLPWSSENMFLETLSEIMDRHLHKE

SEQ ID NO: 27157 - protein, 516 aa, Zea mays subsp. mays
  misc_feature (1)..(516): Ceres Seq. ID no. 15177681
MPMSVLESESIASVKLRIQRFKGFVATKQRLVLDGHELARNNCPVKDYGLAEGNVLHLVIRLSDLRVINIETATGKKFQFQVDQSRNVKFLKNKLAAEGDEDIGNLQDHKLEYDGEELEDHQLIADISKRDDAVIHLFILKPAKVLTQQVDRDTLVTVLNPQEKGNLQNEPRSMNSTKSVEVRPAPVEPIVSQNVKLSPELIKMINLTTVGLEKGHLPVMSAEGSGGVYFMRDATGQKNIAVFKPIDEEPMAKNNPRGLPLSTDGEGMKRGTIVGGGAFREVAAYILDHPVSDSKSGHSFGFSGVPPTTLVRTSHRGKNFKIGSLQMFMDNNGSTEDMGPRPFPVKEVHKIAVLDIRLANADRHAGNILVCKEREGGNYKLIPIDHGYCLPEKFEDCTFEWLYWPQAREPFNDETIEYIKSLDAEEDIKLLKIHGWELPPRCARVLRISTMLLKKGASRGFTPYDIGRILCRETVNRDSEIEVIIQEAEDAVLPWSSENMFLETLSEIMDRHLHKE

SEQ ID NO: 27158 - DNA, 1501 bp, Zea mays subsp. mays; identical to SEQ ID NO: 262
  misc_feature (1)..(1501): Ceres Seq. ID no. 15177738

SEQ ID NO: 27159 - protein, 314 aa, Zea mays subsp. mays; identical to SEQ ID NO: 263
  misc_feature (1)..(314): Ceres Seq. ID no. 15177739

SEQ ID NO: 27160 - protein, 310 aa, Zea mays subsp. mays; identical to SEQ ID NO: 264
  misc_feature (1)..(310): Ceres Seq. ID no. 15177740

SEQ ID NO: 27161 - protein, 224 aa, Zea mays subsp. mays; identical to SEQ ID NO: 265
  misc_feature (1)..(224): Ceres Seq. ID no. 15177741

SEQ ID NO: 27162 - protein, 314 aa, Zea mays subsp. mays; identical to SEQ ID NO: 263
  misc_feature (1)..(314): Ceres Seq. ID no. 16612107

SEQ ID NO: 27163 - DNA, 2153 bp, Zea mays subsp. mays
  misc_feature (1)..(2153): Ceres Seq. ID no. 15178310
gtccttcttccttctctcacacactccactccacgtccccctccttcaaatcctttcaacacccaagcacaaggagagagaagccgccgccgccgccatggacaatattgaggtgaggaggaggaagaagaaagggagaagcagcggacgccgccaggggggacgggtacaggcggtcctgcgcgccggcctcgtcgccatggccttcgccctcctctgcctctgctcctccacgccctccgccattgccctcaccccagacggcgaggcgttgctggagctcaagctggccttcaacgccaccgtgcagcggctcaccagctggcgtcccagcgaccccaacccctgcggctgggagggcatctcctgctccgtccctgacctcagggtccaatccataaacctcccattcatgcagctcgggggcatcatttcgcccagcatcgggaggctcgacaagctgcagagactagctctgcaccagaacagcttgcacggcccaatccctgcagagatcaagaactgcaccgagctcagggcaatttacctgagagccaactacctgcaaggaggcatcccttcagagattggcgagctcgtgcacctcaccatcttggacctgtcaagcaatctgctgaggggcacaataccggcctcgatcggaagcctcactcacctgcgctttctgaacctgtctactaacttcttctccggagagatcccaaatgctggtgtcctcggaaccttcaaaagcagctcgttcgttggaaatctggagctctgtggcctgtccatccagaaagcttgccgtggaaccctcggctttcctgctgtgttgccacattccgatccgctctcttcggctggtgtttctccaatcaataacaacaagacgtcacactttctcaatggcgtcgtgatcggctcgatgtcaaccttggctcttgccttggtagccgtacttgggttcctatggatctgcttgctgtccattaagagtagcattggtggaaactatgtaaagatggacaaacagactgttcctgatggtgcaaagcttgtgacataccagtggaaccttccatattcatcaagcgagattattagaaggttggagctgcttgatgaagaggacgtggtcggttgtgggggctttggcacggtgtacaggatggtgatggatgatggcacgtcgtttgccgtcaagaggattgacctcagccgcgaaagtcgcgacaggaccttcgagaaggagcttgagattctgggcagcatcaggcacataaaccttgtcaatctgcgaggctactgccggctccccacagcgaagctactcgtatatgatttcgttgagctgggcagcttggattgctaccttcatggagatgaacaagaggagcagccattgaactggaacgcgcggatgaaaatcgcgcttggctcggctcgaggcctggcatatctgcaccacgattgctcgcccgggatcgtgcatagggacatcaaagccagtaacatcctgctggatagaagcttggagcctcgtgtctccgattttggcctcgcgaggctgcttgtagacagtgctgcccacgttaccaccgtcgtcgcgggcacctttggatacctagcaccagagtacttgcaaaacgggcatgctactgagaaatcagacgtgtatagctttggagtgcttatgctggagctagtgaccggaaagaggccgaccgattcttgcttcatcaagaagggactgaacattgttggctggctcaacaccctaactggggagcaccggctggaggatatcatcgatgagcgatgcggcgatgtggaggtggaagccgtggaagccatcctggacatcgcagccatgtgcaccgacgcagacccggggcagcggccatcgatgagcgctgtcctcaagatgctggaggaggagatcttgtccccctgcatgagcgagctgtgctacgagcagcacctggagctctgagctgaggaggaagatggtgctggctgcgtgcgtgaagcgtcatggatgagactgaagttttgtactgtagatacaacgatgatgagtgtaggtgatgtactgatgttttgtgtgctcttagggccaatgaagaacagtaagcagcagttcgtgagtg

SEQ ID NO: 27164 - protein, 664 aa, Zea mays subsp. mays
  misc_feature (1)..(664): Ceres Seq. ID no. 15178311
SFFLLSHTPLHVPLLQILSTPKHKEREAAAAAMDNIEVRRRKKKGRSSGRRQGGRVQAVLRAGLVAMAFALLCLCSSTPSAIALTPDGEALLELKLAFNATVQRLTSWRPSDPNPCGWEGISCSVPDLRVQSINLPFMQLGGIISPSIGRLDKLQRLALHQNSLHGPIPAEIKNCTELRAIYLRANYLQGGIPSEIGELVHLTILDLSSNLLRGTIPASIGSLTHLRFLNLSTNFFSGEIPNAGVLGTFKSSSFVGNLELCGLSIQKACRGTLGFPAVLPHSDPLSSAGVSPINNNKTSHFLNGVVIGSMSTLALALVAVLGFLWICLLSIKSSIGGNYVKMDKQTVPDGAKLVTYQWNLPYSSSEIIRRLELLDEEDVVGCGGFGTVYRMVMDDGTSFAVKRIDLSRESRDRTFEKELEILGSIRHINLVNLRGYCRLPTAKLLVYDFVELGSLDCYLHGDEQEEQPLNWNARMKIALGSARGLAYLHHDCSPGIVHRDIKASNILLDRSLEPRVSDFGLARLLVDSAAHVTTVVAGTFGYLAPEYLQNGHATEKSDVYSFGVLMLELVTGKRPTDSCFIKKGLNIVGWLNTLTGEHRLEDIIDERCGDVEVEAVEAILDIAAMCTDADPGQRPSMSAVLKMLEEEILSPCMSELCYEQHLEL

SEQ ID NO: 27165 - protein, 632 aa, Zea mays subsp. mays
  misc_feature (1)..(632): Ceres Seq. ID no. 15178312
MDNIEVRRRKKKGRSSGRRQGGRVQAVLRAGLVAMAFALLCLCSSTPSAIALTPDGEALLELKLAFNATVQRLTSWRPSDPNPCGWEGISCSVPDLRVQSINLPFMQLGGIISPSIGRLDKLQRLALHQNSLHGPIPAEIKNCTELRAIYLRANYLQGGIPSEIGELVHLTILDLSSNLLRGTIPASIGSLTHLRFLNLSTNFFSGEIPNAGVLGTFKSSSFVGNLELCGLSIQKACRGTLGFPAVLPHSDPLSSAGVSPINNNKTSHFLNGVVIGSMSTLALALVAVLGFLWICLLSIKSSIGGNYVKMDKQTVPDGAKLVTYQWNLPYSSSEIIRRLELLDEEDVVGCGGFGTVYRMVMDDGTSFAVKRIDLSRESRDRTFEKELEILGSIRHINLVNLRGYCRLPTAKLLVYDFVELGSLDCYLHGDEQEEQPLNWNARMKIALGSARGLAYLHHDCSPGIVHRDIKASNILLDRSLEPRVSDFGLARLLVDSAAHVTTVVAGTFGYLAPEYLQNGHATEKSDVYSFGVLMLELVTGKRPTDSCFIKKGLNIVGWLNTLTGEHRLEDIIDERCGDVEVEAVEAILDIAAMCTDADPGQRPSMSAVLKMLEEEILSPCMSELCYEQHLEL

SEQ ID NO: 27166 - protein, 598 aa, Zea mays subsp. mays
  misc_feature (1)..(598): Ceres Seq. ID no. 15178313
MAFALLCLCSSTPSAIALTPDGEALLELKLAFNATVQRLTSWRPSDPNPCGWEGISCSVPDLRVQSINLPFMQLGGIISPSIGRLDKLQRLALHQNSLHGPIPAEIKNCTELRAIYLRANYLQGGIPSEIGELVHLTILDLSSNLLRGTIPASIGSLTHLRFLNLSTNFFSGEIPNAGVLGTFKSSSFVGNLELCGLSIQKACRGTLGFPAVLPHSDPLSSAGVSPINNNKTSHFLNGVVIGSMSTLALALVAVLGFLWICLLSIKSSIGGNYVKMDKQTVPDGAKLVTYQWNLPYSSSEIIRRLELLDEEDVVGCGGFGTVYRMVMDDGTSFAVKRIDLSRESRDRTFEKELEILGSIRHINLVNLRGYCRLPTAKLLVYDFVELGSLDCYLHGDEQEEQPLNWNARMKIALGSARGLAYLHHDCSPGIVHRDIKASNILLDRSLEPRVSDFGLARLLVDSAAHVTTVVAGTFGYLAPEYLQNGHATEKSDVYSFGVLMLELVTGKRPTDSCFIKKGLNIVGWLNTLTGEHRLEDIIDERCGDVEVEAVEAILDIAAMCTDADPGQRPSMSAVLKMLEEEILSPCMSELCYEQHLEL

SEQ ID NO: 27167 - DNA, 1445 bp, Zea mays subsp. mays
  misc_feature (1)..(1445): Ceres Seq. ID no. 15178640
agagcagcagctaaagaagcaaagcaagtgtctgctcactcagtcctgcgcaagagctcgctctcggagaaaaaaacgcgggaggcgataatggagggaggtgccggtgcgagcgagaaagggaaggtgctggtcacgggggcgtcgggcttcgtcggctcctggctcgtcatgaagctcctccaggccggctacaccgtccgggcgaccgtgcgcgatcccgcgaacgttgggaagacgaagccattgatggaccttcccggagcaacggagcgcctgtccatatggaaagccgacctggcggaggaaggcagcttccacgacgccatcaggggctgcaccggcgtcttccacgtcgccacgcccatggacttcctgtccaaagaccctgagaatgaggtaatcaagccgacggtggaagggatgataagcatcatgcgggcatgcaaggaggccggcaccgtgcggcgcatcgtcttcacttcctccgccgggacggtcaacctggaggagcggcagaggcccgtctacgacgaggaaagctggaccgacgtcgacttctgccgtcgcgtcaagatgaccggatggatgtacttcgtgtctaaaaccctggcggagaaggcggccctggcgtacgcggcggagcacggcctggacctggtcaccatcatcccgacgctcgtggtcggcccgttcatcagcgcgtccatgccgcccagcctcatcaccgcgctggcgctcatcacggggaacgcgccccactactcgatcctcaagcaggtgcagctcatccacctcgacgacctctgcgacgccgagatcttcctcttcgagaacccggccgcggccgggcgctacgtctgctcctcgcacgacgtcaccatccacggcctcgccgccatgctcagggataggtaccccgagtacgacgtcccgcagaggttccccgggatccaggacgacctccagccggtgcgcttctcgtccaagaagctccaggacctcgggttcaccttcaggtacaagacgctggaggacatgttcgacgccgccatccggacttgccaggagaagggcctcatccccctcgccactgccgccggaggggacggctttgcctcggtgcgcgcacccggcgagacggaggcgacgattggcgcttaagcaacaatcacccggctctccccgtcgatgatgctatcagctatctatctcttcgactccgctgccaatacggaacttatttccatgttcaacgaattgttttatcccctggattacgtattgtttttatgttttatacccaaacaacgaatgtttctcagtattttactacagctagcccctatagtagagattctattatatgaataagctatctgtagaggctctggtgcaatatatatttcgagttatttggattactagcaaaaaaaaaaaaaaaa

SEQ ID NO: 27168 - protein, 387 aa, Zea mays subsp. mays
  misc_feature (1)..(387): Ceres Seq. ID no. 15178641
RAAAKEAKQVSAHSVLRKSSLSEKKTREAIMEGGAGASEKGKVLVTGASGFVGSWLVMKLLQAGYTVRATVRDPANVGKTKPLMDLPGATERLSIWKADLAEEGSFHDAIRGCTGVFHVATPMDFLSKDPENEVIKPTVEGMISIMRACKEAGTVRRIVFTSSAGTVNLEERQRPVYDEESWTDVDFCRRVKMTGWMYFVSKTLAEKAALAYAAEHGLDLVTIIPTLVVGPFISASMPPSLITALALITGNAPHYSILKQVQLIHLDDLCDAEIFLFENPAAAGRYVCSSHDVTIHGLAAMLRDRYPEYDVPQRFPGIQDDLQPVRFSSKKLQDLGFTFRYKTLEDMFDAAIRTCQEKGLIPLATAAGGDGFASVRAPGETEATIGA

SEQ ID NO: 27169 - protein, 357 aa, Zea mays subsp. mays
  misc_feature (1)..(357): Ceres Seq. ID no. 15178642
MEGGAGASEKGKVLVTGASGFVGSWLVMKLLQAGYTVRATVRDPANVGKTKPLMDLPGATERLSIWKADLAEEGSFHDAIRGCTGVFHVATPMDFLSKDPENEVIKPTVEGMISIMRACKEAGTVRRIVFTSSAGTVNLEERQRPVYDEESWTDVDFCRRVKMTGWMYFVSKTLAEKAALAYAAEHGLDLVTIIPTLVVGPFISASMPPSLITALALITGNAPHYSILKQVQLIHLDDLCDAEIFLFENPAAAGRYVCSSHDVTIHGLAAMLRDRYPEYDVPQRFPGIQDDLQPVRFSSKKLQDLGFTFRYKTLEDMFDAAIRTCQEKGLIPLATAAGGDGFASVRAPGETEATIGA

SEQ ID NO: 27170 - protein, 330 aa, Zea mays subsp. mays
  misc_feature (1)..(330): Ceres Seq. ID no. 15178643
MKLLQAGYTVRATVRDPANVGKTKPLMDLPGATERLSIWKADLAEEGSFHDAIRGCTGVFHVATPMDFLSKDPENEVIKPTVEGMISIMRACKEAGTVRRIVFTSSAGTVNLEERQRPVYDEESWTDVDFCRRVKMTGWMYFVSKTLAEKAALAYAAEHGLDLVTIIPTLVVGPFISASMPPSLITALALITGNAPHYSILKQVQLIHLDDLCDAEIFLFENPAAAGRYVCSSHDVTIHGLAAMLRDRYPEYDVPQRFPGIQDDLQPVRFSSKKLQDLGFTFRYKTLEDMFDAAIRTCQEKGLIPLATAAGGDGFASVRAPGETEATIGA

SEQ ID NO: 27171 - DNA, 1192 bp, Zea mays subsp. mays
  misc_feature (1)..(1192): Ceres Seq. ID no. 15178969
attccattccattccacacaaggctaggcacaagcgaaccaaacccatggcgtccgacggcagcggcgtggtgacggtgtacggcagcaacggcgcggagctgctggagccgtccaagcagcccaagtcggcgactttctccgtcaaggtggggctggcgcagatgctccggggcggggtcatcatggacgtggtgaccccggagcaggcgcgcctcgcggaggaggccggcgcgtgcgccgtgatggcgctggagcgggtccccgccgacatccgcgcgcagggcggcgtggcgcgcatgtcggacccgggcctcatccgcgacatcaagcgcgccgtcaccatcccggtcatggccaaggcccgcatcgggcacttcgtggaggcccagatcctggaggccgtgggcgtcgactacgtggacgagagcgaggtgctgacccccgccgacgacgcgcaccacatcaacaagcacaacttccgcgtccccttcgtctgcggctgccgcgacctcggcgaggcgctccgcagggtgcgcgagggcgccgccatgatccgcaccaagggggaggccggcacgggcaacgtcgtcgaggccgtgcgccacgtgcgctccgtcatgggcgacgtccgcgcgctccgcagcatggacgacgacgaggtcttcgcctacgccaagcgcatcgccgcgccctacgacctcgtcatgcagaccaagcagctgggccgcctccccgtcgtgcagttcgccgcggggggtgtcgccacgcccgccgacgccgcgctcatgatgcagctcggatgcgacggcgtcttcgtcggctcgggcatcttcaagagcggcgaccccgcgcgccgcgcccgcgccatcgtccaggcagtcacccactacagcgaccccaccatcctggccgacgtcagcacggggctcggggaggccatggtcggcatcaacctcaacgaccccaaggtggaacgatacgccgccagatccgagtgaaccctttctttccgtagtcatctccatccatctgccttggattgcatttccgtcgtctcatgtctctcaatcagtaataatggaatgaatgaaatggtaagaaacaaagctatggtactatgcagaacctctttcattttgtgctactgtactaagttagcctagtcccccccaccctggattatcatgttg

SEQ ID NO: 27172 - protein, 332 aa, Zea mays subsp. mays
  misc_feature (1)..(332): Ceres Seq. ID no. 15178970
FHSIPHKARHKRTKPMASDGSGVVTVYGSNGAELLEPSKQPKSATFSVKVGLAQMLRGGVIMDVVTPEQARLAEEAGACAVMALERVPADIRAQGGVARMSDPGLIRDIKRAVTIPVMAKARIGHFVEAQILEAVGVDYVDESEVLTPADDAHHINKHNFRVPFVCGCRDLGEALRRVREGAAMIRTKGEAGTGNVVEAVRHVRSVMGDVRALRSMDDDEVFAYAKRIAAPYDLVMQTKQLGRLPVVQFAAGGVATPADAALMMQLGCDGVFVGSGIFKSGDPARRARAIVQAVTHYSDPTILADVSTGLGEAMVGINLNDPKVERYAARSE

SEQ ID NO: 27173 - protein, 317 aa, Zea mays subsp. mays
  misc_feature (1)..(317): Ceres Seq. ID no. 15178971
MASDGSGVVTVYGSNGAELLEPSKQPKSATFSVKVGLAQMLRGGVIMDVVTPEQARLAEEAGACAVMALERVPADIRAQGGVARMSDPGLIRDIKRAVTIPVMAKARIGHFVEAQILEAVGVDYVDESEVLTPADDAHHINKHNFRVPFVCGCRDLGEALRRVREGAAMIRTKGEAGTGNVVEAVRHVRSVMGDVRALRSMDDDEVFAYAKRIAAPYDLVMQTKQLGRLPVVQFAAGGVATPADAALMMQLGCDGVFVGSGIFKSGDPARRARAIVQAVTHYSDPTILADVSTGLGEAMVGINLNDPKVERYAARSE

SEQ ID NO: 27174 - protein, 278 aa, Zea mays subsp. mays
  misc_feature (1)..(278): Ceres Seq. ID no. 15178972
MLRGGVIMDVVTPEQARLAEEAGACAVMALERVPADIRAQGGVARMSDPGLIRDIKRAVTIPVMAKARIGHFVEAQILEAVGVDYVDESEVLTPADDAHHINKHNFRVPFVCGCRDLGEALRRVREGAAMIRTKGEAGTGNVVEAVRHVRSVMGDVRALRSMDDDEVFAYAKRIAAPYDLVMQTKQLGRLPVVQFAAGGVATPADAALMMQLGCDGVFVGSGIFKSGDPARRARAIVQAVTHYSDPTILADVSTGLGEAMVGINLNDPKVERYAARSE

SEQ ID NO: 27175 - DNA, 1320 bp, Zea mays subsp. mays
  misc_feature (1)..(1320): Ceres Seq. ID no. 15179110
agccagctactccatctcccacccaacctccttggcaactggcattgccacccccacagtagagacagacagccacgcgcgcgaggcgctccactcaagctcaggccactctacctcgctctcggccatggcgtcaggggaagcagagccgctgcagtacacgaccaccgcgctgcgggtgtccatccactgcgagggctgcaggaagaaggtcaagaaggtgctccacagcatcgaaggcgtgtacaaggtgacggtggacgcggcgcagcacaaggtgaccgtcacaggcagcgtggaagcggccgcgctcgtccggcggctgcacaaggccggcaagcaggcggcgccgtggccttcgccggcgccggcaaacgtcgaggccaacaaggccgcgcctgctgcacccggggagggcggcgccaaggaggccgcggacacgaaggcggctgaggccgacgccaaggagaagaaaccggccaaggacaagggctcgggcaagaatgccggaacgggcgaggccgccgacgcgaaacccggcaaggacgtggccagcagcgacgccgccgaggtgatcgcggggcccaaggaggcggaaaaggcctcctcccctgagcctgtggccgcgaagccagacgccgccgaggagcccaaggacggcggcgagggcggcaggaagaagggcaagaagagtaagaagaacaagcccaaggacggcggcgagggggatgtcccggccccggccgcaaccccggcggcacctcccgagaagaaggcgccgcagcagccctcggctgtgccagcgccggcgcctggtcccgagcgcccgcacggcggcggcggcgcgttcccgtgctacgctgcgcagccggtgcttagctacaacgtggcgcacccgagctccagcgtgtcgtactgcgcgcccacggcagccgtgcccatgcccccgccgccgccgcagatggtgtcgtactggtacccgccatacccggccatggtgccggtgccggcggagtttgtgtacggcccgccgggcggcgtgcggtcgttcccgccgcacgagtcgtacaacaacatgttcaacgaggacaacgccaactcgtgcagcctcatgtgatgtcacgacgcgccggcgtggtgtccccgggccgtctacggtggctctcgtgaaccacaagcctccccgatggtgtctcgtgccgtcaaattaggcggacagcgctccagattttaattttttttactgtaccctcggctataaattgctcctcggcgcatcgtgtaatcagatggtggtggtattcttccacttgcaagctg

SEQ ID NO: 27176 - protein, 371 aa, Zea mays subsp. mays
  misc_feature (1)..(371): Ceres Seq. ID no. 15179111
ASYSISHPTSLATGIATPTVETDSHAREALHSSSGHSTSLSAMASGEAEPLQYTTTALRVSIHCEGCRKKVKKVLHSIEGVYKVTVDAAQHKVTVTGSVEAAALVRRLHKAGKQAAPWPSPAPANVEANKAAPAAPGEGGAKEAADTKAAEADAKEKKPAKDKGSGKNAGTGEAADAKPGKDVASSDAAEVIAGPKEAEKASSPEPVAAKPDAAEEPKDGGEGGRKKGKKSKKNKPKDGGEGDVPAPAATPAAPPEKKAPQQPSAVPAPAPGPERPHGGGGAFPCYAAQPVLSYNVAHPSSSVSYCAPTAAVPMPPPPPQMVSYWYPPYPAMVPVPAEFVYGPPGGVRSFPPHESYNNMFNEDNANSCSLM

SEQ ID NO: 27177 - protein, 329 aa, Zea mays subsp. mays
  misc_feature (1)..(329): Ceres Seq. ID no. 15179112
MASGEAEPLQYTTTALRVSIHCEGCRKKVKKVLHSIEGVYKVTVDAAQHKVTVTGSVEAAALVRRLHKAGKQAAPWPSPAPANVEANKAAPAAPGEGGAKEAADTKAAEADAKEKKPAKDKGSGKNAGTGEAADAKPGKDVASSDAAEVIAGPKEAEKASSPEPVAAKPDAAEEPKDGGEGGRKKGKKSKKNKPKDGGEGDVPAPAATPAAPPEKKAPQQPSAVPAPAPGPERPHGGGGAFPCYAAQPVLSYNVAHPSSSVSYCAPTAAVPMPPPPPQMVSYWYPPYPAMVPVPAEFVYGPPGGVRSFPPHESYNNMFNEDNANSCSLM

SEQ ID NO: 27178 - DNA, 1957 bp, Zea mays subsp. mays; identical to SEQ ID NO: 1801
  misc_feature (1)..(1957): Ceres Seq. ID no. 15179123

SEQ ID NO: 27179 - protein, 516 aa, Zea mays subsp. mays; identical to SEQ ID NO: 1802
  misc_feature (1)..(516): Ceres Seq. ID no. 15179124

SEQ ID NO: 27180 - protein, 418 aa, Zea mays subsp. mays; identical to SEQ ID NO: 1803
  misc_feature (1)..(418): Ceres Seq. ID no. 15179125

SEQ ID NO: 27181 - protein, 377 aa, Zea mays subsp. mays; identical to SEQ ID NO: 1804
  misc_feature (1)..(377): Ceres Seq. ID no. 15179126

SEQ ID NO: 27182 - DNA, 1973 bp, Zea mays subsp. mays
  misc_feature (1)..(1973): Ceres Seq. ID no. 15179312
agcatcgattaccatttccatgtcttgtgcatcttcggattctacccttcccatgctgtgtgtggcctccattcaaatcttttttcaaattggcaaaaaaaaaacactatttatgttgaaacgccttccaaattattaagggcaggcagaccttacttgttttatggctagaaataatgagggtcatctccagctgccagagatggatcatattcaacccaagaacaccccgcacaatgaaccactgcctctaggccagaagcttatgctgcatcatggaagtgatgcaccccttagaattggtcattcaagtcatgagaatatgagacttagatcaaatgatcttccacctttaagtcacactgtgcaaactcaaggttatagagttgggaacccaggagcctcgcatactccttttgttcattgtcatgctggaagttccagtagtcatttaccagaacctgctgtgaattatccacataggtcggaggaaggctttgctccagtgggttcccatatggacaacagaagggctgcaacgaagcgaaaagatcctattgtgcaccctgctgggatcagtgctactggttattatgttggaagttcttccaatactcagctatctaactctgtacagccaaatactgctccactttctgagcccttacttcgtcaaatacctttaagcattgaccgaagtggttgggatggcctacacttaattcatcaagaaggatttcagaggaatgtgagagcatgccagcgccacagtcataatatttcattacagcccagatcagcttcaacctacccactaaacagtgttcatgtgccgtcatttggttcaactacaagtgcttccttaagtatgtcagtggaaaggaaccaagcatctgtttctgtgcaaacaagaaatgtaccatcaggtgcaccaggtatcactagcaggtccctgacaaggagggcttactatcctgtggttggaagtagcaactcaagcgttgatgccgttccaactatccgtggatcatctggcgcagcaatatttgctaatggtggctatgctcttaatgctgatgctggaactgtttctatctaccctaatccagctcctgctacttcatctggctctataaccatgcccatgcccatgctccatcagatggtcattcagagccatccacctgctacctctgcagcaacctctacatccatgtggatcgctcaaccactacctgccagaactgctgcggcttctagacatgcaagacgcgtatcagcagggcttgccaacaatggaaggtacagaagggctaggagctcttactacagccttcatccactgatgatggtagaggcagaggcggttcatgatggaccagttggtcttttacgaatcaagagcagcagccgctgacccccacagggacatgagactggacatcgacaacatgagctacgaggacctgttggctttgggagaatctatgggcaatgtcaacacaggcttggccgatgagaaaatttcgaagtgcgtgaaagaagtggtctgctgcagttccgaccagacgcaaaccgatcaagatgaccaggatgacggaagctgcgtcatctgcctggagggttacagagacaaggatatgctggggatactgaaatgcaggcacgacttccacgccggctgcatcaagaagtggctgcagacgaagaactcgtgcccggtgtgcaaagccgccgccgcctaggacgacaccagaggagcgagcaactattttgtgctcctcctcgatctattcatttttttaggctcaggtcgaattatatatgtcgttccattcttttgattccagccagtcgtgtaaataaatgccgtgtgttggttattttagttatcacttgggttacattagcccaaattctcctgttgcattgtaaacaatccagtggtgaaggcaattgatcaagtgcgttgc

SEQ ID NO: 27183 - protein, 417 aa, Zea mays subsp. mays
  misc_feature (1)..(417): Ceres Seq. ID no. 15179313
MARNNEGHLQLPEMDHIQPKNTPHNEPLPLGQKLMLHHGSDAPLRIGHSSHENMRLRSNDLPPLSHTVQTQGYRVGNPGASHTPFVHCHAGSSSSHLPEPAVNYPHRSEEGFAPVGSHMDNRRAATKRKDPIVHPAGISATGYYVGSSSNTQLSNSVQPNTAPLSEPLLRQIPLSIDRSGWDGLHLIHQEGFQRNVRACQRHSHNISLQPRSASTYPLNSVHVPSFGSTTSASLSMSVERNQASVSVQTRNVPSGAPGITSRSLTRRAYYPVVGSSNSSVDAVPTIRGSSGAAIFANGGYALNADAGTVSIYPNPAPATSSGSITMPMPMLHQMVIQSHPPATSAATSTSMWIAQPLPARTAAASRHARRVSAGLANNGRYRRARSSYYSLHPLMMVEAEAVHDGPVGLLRIKSSSR

SEQ ID NO: 27184 - protein, 404 aa, Zea mays subsp. mays
  misc_feature (1)..(404): Ceres Seq. ID no. 15179314
MDHIQPKNTPHNEPLPLGQKLMLHHGSDAPLRIGHSSHENMRLRSNDLPPLSHTVQTQGYRVGNPGASHTPFVHCHAGSSSSHLPEPAVNYPHRSEEGFAPVGSHMDNRRAATKRKDPIVHPAGISATGYYVGSSSNTQLSNSVQPNTAPLSEPLLRQIPLSIDRSGWDGLHLIHQEGFQRNVRACQRHSHNISLQPRSASTYPLNSVHVPSFGSTTSASLSMSVERNQASVSVQTRNVPSGAPGITSRSLTRRAYYPVVGSSNSSVDAVPTIRGSSGAAIFANGGYALNADAGTVSIYPNPAPATSSGSITMPMPMLHQMVIQSHPPATSAATSTSMWIAQPLPARTAAASRHARRVSAGLANNGRYRRARSSYYSLHPLMMVEAEAVHDGPVGLLRIKSSSR

SEQ ID NO: 27185 - protein, 383 aa, Zea mays subsp. mays
  misc_feature (1)..(383): Ceres Seq. ID no. 15179315
MLHHGSDAPLRIGHSSHENMRLRSNDLPPLSHTVQTQGYRVGNPGASHTPFVHCHAGSSSSHLPEPAVNYPHRSEEGFAPVGSHMDNRRAATKRKDPIVHPAGISATGYYVGSSSNTQLSNSVQPNTAPLSEPLLRQIPLSIDRSGWDGLHLIHQEGFQRNVRACQRHSHNISLQPRSASTYPLNSVHVPSFGSTTSASLSMSVERNQASVSVQTRNVPSGAPGITSRSLTRRAYYPVVGSSNSSVDAVPTIRGSSGAAIFANGGYALNADAGTVSIYPNPAPATSSGSITMPMPMLHQMVIQSHPPATSAATSTSMWIAQPLPARTAAASRHARRVSAGLANNGRYRRARSSYYSLHPLMMVEAEAVHDGPVGLLRIKSSSR

SEQ ID NO: 27186 - DNA, 2171 bp, Zea mays subsp. mays
  misc_feature (1)..(2171): Ceres Seq. ID no. 15179408
ataaataccactcctgcgattccaccttgcagttggaccggccgttgttgctttgcttcttcgcaaaaaaaaaacaaaaaaacaaaataggcctgtcttgctccgatcaggcgtgttcttaggcttcgctgcccctaccgcgtcttcgccgggatcggtccatggccggcgccgagcgcgcggaggcggtcgcgctggaacaagggctcctcgatccggaggaatccaaccaagtagtatacactggagatggatcagtcgacttttctggaaatcctgttgtcaaggaaagaacgggtagatggaaggcatgtccattcatattaggtaatgaatgctgtgaacgactggcctactatggcatctccacaaaccttgttacttacttgacaaaaaaactgcatgctggcaatgcctctgctgctagcagtgtgactacatggtcgggaacttgctacctaactccacttattggagcaatcctggctgatgcatactgggggaggtactggacaatcgcaacattttccacagtatacttcatcgggatgacactgctgactctttcagcatcagttcctatgctcatgcctccatcttgtgaaggatccttttgcccagcagcaagcccttttcagtatactgtcttttttcttggtctttatctgattgccctgggtactggtggaattaagccgtgtgtctcatcctttggagcggatcaatttgatgatacagatccagctgagcgaatccagaagggctctttcttcaattggttttatttttcaataaacattggtgctctcatatcaagcagctttctggtttgggtgcaagacaatgtaggatggggactggggtttggcattccgactgtattcatggggctggcaatcataagcttcttctctggtacatcactttataggttccaaaaaccaggaggtagtccaattacacgagtatgtcaggtgattgttgcctctttgcgcaagtggaatgtgcctgtcccagaggatagctctctcttgtatgagctacctaatggggtatcaacaattgaggggagtcggcaaatagagcacacagatgaactcagatgtttagataaggctgctacagttaccgaagttgatgtgaaaacggctgacttcaacaacccatggcggatatgcactgtcacccaggtggaagaactgaagatactagtaaggatgttccctgtctgggcaacaacaatagtgttttctgctgtatatgctcagatgtcaacaatgtttgtggaacaagggatggtgcttgacccatccttgggctctttcaagatccctccagcttcactatctactttcgacaccctaagtgtcatcatatgtgtcccgatgtatgattacatcgtggttccgatagccaggagattcactggcaacgagaggggctttacagagttgcagaggatgggtattggcctggtaatttccatcatggctatgtcagtcgccgcagtcctcgaaatcaagcggctagcagttgccagggaagcacacctggtggatcagaatgtcccggtcccactgagcatattctggcaaatccctcagtatttcctgattggtctagcggagattttcacattcattggggcgctcgagttcttctatgaccagtcaccagacgccatgaggagcctctgcagcgcgcttaatcttctcactactgcgtttgggaactatctcagcacgttcattttgacaatggttgcgtactttactacgaggggaggtaaccctgggtggattcctgacaacttgaacgaaggccatcttgattacttcttcttgctcatcgctggcatcagttttctgaacctgattgtttatgtcctctgtgctggcaaatacaagagcaagaaggcagcttgagttgtgaaggccaggggctggatggcgtgctgcgcgccatgttatggtggacacttcagttcaaaatctgtatatatgtttcccgcattaaccaccctagctgaagcaaccatctgcaattgttgcaaagtttatattcttcattgtgctggactaagttgattatacattcgtgcttctactttgtgtatgtatatatctgacctaaagttgctgaacatagacaatttcacttgccaaaaaaat

SEQ ID NO: 27187 - protein, 587 aa, Zea mays subsp. mays
  misc_feature (1)..(587): Ceres Seq. ID no. 15179409
MAGAERAEAVALEQGLLDPEESNQVVYTGDGSVDFSGNPVVKERTGRWKACPFILGNECCERLAYYGISTNLVTYLTKKLHAGNASAASSVTTWSGTCYLTPLIGAILADAYWGRYWTIATFSTVYFIGMTLLTLSASVPMLMPPSCEGSFCPAASPFQYTVFFLGLYLIALGTGGIKPCVSSFGADQFDDTDPAERIQKGSFFNWFYFSINIGALISSSFLVWVQDNVGWGLGFGIPTVFMGLAIISFFSGTSLYRFQKPGGSPITRVCQVIVASLRKWNVPVPEDSSLLYELPNGVSTIEGSRQIEHTDELRCLDKAATVTEVDVKTADFNNPWRICTVTQVEELKILVRMFPVWATTIVFSAVYAQMSTMFVEQGMVLDPSLGSFKIPPASLSTFDTLSVIICVPMYDYIVVPIARRFTGNERGFTELQRMGIGLVISIMAMSVAAVLEIKRLAVAREAHLVDQNVPVPLSIFWQIPQYFLIGLAEIFTFIGALEFFYDQSPDAMRSLCSALNLLTTAFGNYLSTFILTMVAYFTTRGGNPGWIPDNLNEGHLDYFFLLIAGISFLNLIVYVLCAGKYKSKKAA

SEQ ID NO: 27188 - protein, 458 aa, Zea mays subsp. mays
  misc_feature (1)..(458): Ceres Seq. ID no. 15179410
MTLLTLSASVPMLMPPSCEGSFCPAASPFQYTVFFLGLYLIALGTGGIKPCVSSFGADQFDDTDPAERIQKGSFFNWFYFSINIGALISSSFLVWVQDNVGWGLGFGIPTVFMGLAIISFFSGTSLYRFQKPGGSPITRVCQVIVASLRKWNVPVPEDSSLLYELPNGVSTIEGSRQIEHTDELRCLDKAATVTEVDVKTADFNNPWRICTVTQVEELKILVRMFPVWATTIVFSAVYAQMSTMFVEQGMVLDPSLGSFKIPPASLSTFDTLSVIICVPMYDYIVVPIARRFTGNERGFTELQRMGIGLVISIMAMSVAAVLEIKRLAVAREAHLVDQNVPVPLSIFWQIPQYFLIGLAEIFTFIGALEFFYDQSPDAMRSLCSALNLLTTAFGNYLSTFILTMVAYFTTRGGNPGWIPDNLNEGHLDYFFLLIAGISFLNLIVYVLCAGKYKSKKAA

SEQ ID NO: 27189 - protein, 447 aa, Zea mays subsp. mays
  misc_feature (1)..(447): Ceres Seq. ID no. 15179411
MLMPPSCEGSFCPAASPFQYTVFFLGLYLIALGTGGIKPCVSSFGADQFDDTDPAERIQKGSFFNWFYFSINIGALISSSFLVWVQDNVGWGLGFGIPTVFMGLAIISFFSGTSLYRFQKPGGSPITRVCQVIVASLRKWNVPVPEDSSLLYELPNGVSTIEGSRQIEHTDELRCLDKAATVTEVDVKTADFNNPWRICTVTQVEELKILVRMFPVWATTIVFSAVYAQMSTMFVEQGMVLDPSLGSFKIPPASLSTFDTLSVIICVPMYDYIVVPIARRFTGNERGFTELQRMGIGLVISIMAMSVAAVLEIKRLAVAREAHLVDQNVPVPLSIFWQIPQYFLIGLAEIFTFIGALEFFYDQSPDAMRSLCSALNLLTTAFGNYLSTFILTMVAYFTTRGGNPGWIPDNLNEGHLDYFFLLIAGISFLNLIVYVLCAGKYKSKKAA

SEQ ID NO: 27190 - DNA, 2191 bp, Zea mays subsp. mays; identical to SEQ ID NO: 1846
  misc_feature (1)..(2191): Ceres Seq. ID no. 15179424

SEQ ID NO: 27191 - protein, 637 aa, Zea mays subsp. mays; identical to SEQ ID NO: 1847
  misc_feature (1)..(637): Ceres Seq. ID no. 15179425

SEQ ID NO: 27192 - protein, 611 aa, Zea mays subsp. mays; identical to SEQ ID NO: 1848
  misc_feature (1)..(611): Ceres Seq. ID no. 15179426

SEQ ID NO: 27193 - protein, 575 aa, Zea mays subsp. mays; identical to SEQ ID NO: 1849
  misc_feature (1)..(575): Ceres Seq. ID no. 15179427

SEQ ID NO: 27194 - DNA, 2368 bp, Zea mays subsp. mays
  misc_feature (1)..(2368): Ceres Seq. ID no. 15179435
atcttcgccgccgctaaacgttccccccacgccccaacctatccacgcgaaaccttctttcccccgggagacgattcgtcagggagaggaaagaggcaagaggggccatggacgctgccaagttggtgacgccggtcgctgtgtctcacattctggcgcacccgtcggcgggctccgacggcgcagtgaccgatctcgtcgttcaggtcctcgacctgaagtccgtcggcacgggcagccggttcagtttcacagcaactgacgggaaggataagatcaaggcgatgcttcccaccaacttcgggtcggaggtccgctctggcaacctgaagaacctcggcctcatccgcatcatcgactacacttgcaacgtcgtcaaaggcaaagatgacaaagtcttggttgtcatcaaatgcgagcttgtgtgccaagcgcttgacgccgagatcaacggcgaggccaaaaaagaggagcctccaattgtgctgaagcctaaggacgaatggatgggcgtgacatccccactcgctatgaagcccaagcaggaggtgaagtctgcgtcccagatcgtgaatgagcagcgtggaaatactgctcctgtcaagcccctttccatgacaaagagggtccatcctttgatcactctgaacccctaccagggtaactgggtcattaaggtgcgggtcacgagcaaaggcaacctgagaacctacaggaatgctcgcggagaaggctgtgtcttcaatgtagagctcaccgatgaggatggcacccagatccaagccaccatgtttaatgacgctgcaaagaagttctatccgatttttgagctgggaaaggtctattatgtctcaaaaggatctcttagaattgctaacaagcagttcaagactgtccaaaatgactacgagatgtcactaaacgagaatgctattgttgaagaagcagagggggagacttgcattccgcaagtgcaatacaaccttgtcaagattgatcaactaggatcatatgtcggtggcagggaacttgtagatattattggtgtggttcagagcgtatctcccacactcagtgtcaggagaaagattgacaacgagacaataccgaagcgtgacattgttgtggcggatgactctggcaaaactgttagtatctctctttggaatgatcttactactacgactgggcaagagcttttggacatggctgacagttcgcctgttgttgcgataaagagcctaaaagtgtctgacttccaaggcgtgtctctttctactgtaggcaaaagtactcttgcgattaatcctgatctacacgaggctcagaatcttaagtcatggtatgactctgaaggcaaagatacttcgctggcaccaattggtgcagaaatgggtgccgcacgggccggtggcttcaagtccacgtattctgatagagtttttctgtctcacattactagtgatcctgccatgggccaggaaaagcctgttttcttcagtttgtatgccaccataagccacatcaagcctgaccagaacatgtggtaccgtgcttgcaagacctgcaacaagaaggtgactgaaacttttggatctggatactggtgtgagggatgccaaaagaatgactcggaatgctcactgagatacatcatggtcatcaaggtttccgatcctactggcgaagcatgggtctctgtgttcaacgagcatgcagagaagatcattggctgcagcgccgacgagcttgatcggatcaggaaagaggagggggacgacagttatgttctgaagctcaaggaagccacctgggttcctcacctgttccgcgtcagcgtcacacagcatgaatacaataacgagaaaaggcagagaatcactgtgaggagtgaagcgccggtcgagcacgcagctgaatccaagtacctgcttgaacagatagcgaagcttactgcttgctagtagaagatgcaacctttctggtggttcgttaagggctgccctccgagatgtttcctctgggttttagcacttctgtaagatatatgtagaggtttggttaccttgatgtcaagcaacagatgctaggacagttcaagcatgatgcatgaagcctttgccgaattgcagtttcagttccctcattccgtgccaatgcaactttgttgagcaaatagcgagaattattaggactaattgatggtgtcaggtcattgcggccctaagctttagctctgtatcagcagtcagatgtattaaccattccctgctctaatagtcatctatcagcagtcagatgtatttaaccattccctgcttaatagctctctaccaggagtcggaagtttttaaccattccctgctcc

SEQ ID NO: 27195 - protein, 618 aa, Zea mays subsp. mays
  misc_feature (1)..(618): Ceres Seq. ID no. 15179436
MDAAKLVTPVAVSHILAHPSAGSDGAVTDLVVQVLDLKSVGTGSRFSFTATDGKDKIKAMLPTNFGSEVRSGNLKNLGLIRIIDYTCNVVKGKDDKVLVVIKCELVCQALDAEINGEAKKEEPPIVLKPKDEWMGVTSPLAMKPKQEVKSASQIVNEQRGNTAPVKPLSMTKRVHPLITLNPYQGNWVIKVRVTSKGNLRTYRNARGEGCVFNVELTDEDGTQIQATMFNDAAKKFYPIFELGKVYYVSKGSLRIANKQFKTVQNDYEMSLNENAIVEEAEGETCIPQVQYNLVKIDQLGSYVGGRELVDIIGVVQSVSPTLSVRRKIDNETIPKRDIVVADDSGKTVSISLWNDLTTTTGQELLDMADSSPVVAIKSLKVSDFQGVSLSTVGKSTLAINPDLHEAQNLKSWYDSEGKDTSLAPIGAEMGAARAGGFKSTYSDRVFLSHITSDPAMGQEKPVFFSLYATISHIKPDQNMWYRACKTCNKKVTETFGSGYWCEGCQKNDSECSLRYIMVIKVSDPTGEAWVSVFNEHAEKIIGCSADELDRIRKEEGDDSYVLKLKEATWVPHLFRVSVTQHEYNNEKRQRITVRSEAPVEHAAESKYLLEQIAKLTAC

SEQ ID NO: 27196 - protein, 559 aa, Zea mays subsp. mays
  misc_feature (1)..(559): Ceres Seq. ID no. 15179437
MLPTNFGSEVRSGNLKNLGLIRIIDYTCNVVKGKDDKVLVVIKCELVCQALDAEINGEAKKEEPPIVLKPKDEWMGVTSPLAMKPKQEVKSASQIVNEQRGNTAPVKPLSMTKRVHPLITLNPYQGNWVIKVRVTSKGNLRTYRNARGEGCVFNVELTDEDGTQIQATMFNDAAKKFYPIFELGKVYYVSKGSLRIANKQFKTVQNDYEMSLNENAIVEEAEGETCIPQVQYNLVKIDQLGSYVGGRELVDIIGVVQSVSPTLSVRRKIDNETIPKRDIVVADDSGKTVSISLWNDLTTTTGQELLDMADSSPVVAIKSLKVSDFQGVSLSTVGKSTLAINPDLHEAQNLKSWYDSEGKDTSLAPIGAEMGAARAGGFKSTYSDRVFLSHITSDPAMGQEKPVFFSLYATISHIKPDQNMWYRACKTCNKKVTETFGSGYWCEGCQKNDSECSLRYIMVIKVSDPTGEAWVSVFNEHAEKIIGCSADELDRIRKEEGDDSYVLKLKEATWVPHLFRVSVTQHEYNNEKRQRITVRSEAPVEHAAESKYLLEQIAKLTAC

SEQ ID NO: 27197 - protein, 485 aa, Zea mays subsp. mays
  misc_feature (1)..(485): Ceres Seq. ID no. 15179438
MGVTSPLAMKPKQEVKSASQIVNEQRGNTAPVKPLSMTKRVHPLITLNPYQGNWVIKVRVTSKGNLRTYRNARGEGCVFNVELTDEDGTQIQATMFNDAAKKFYPIFELGKVYYVSKGSLRIANKQFKTVQNDYEMSLNENAIVEEAEGETCIPQVQYNLVKIDQLGSYVGGRELVDIIGVVQSVSPTLSVRRKIDNETIPKRDIVVADDSGKTVSISLWNDLTTTTGQELLDMADSSPVVAIKSLKVSDFQGVSLSTVGKSTLAINPDLHEAQNLKSWYDSEGKDTSLAPIGAEMGAARAGGFKSTYSDRVFLSHITSDPAMGQEKPVFFSLYATISHIKPDQNMWYRACKTCNKKVTETFGSGYWCEGCQKNDSECSLRYIMVIKVSDPTGEAWVSVFNEHAEKIIGCSADELDRIRKEEGDDSYVLKLKEATWVPHLFRVSVTQHEYNNEKRQRITVRSEAPVEHAAESKYLLEQIAKLTAC

SEQ ID NO: 27198 - DNA, 916 bp, Zea mays subsp. mays; identical to SEQ ID NO: 1870
  misc_feature (1)..(916): Ceres Seq. ID no. 15179538

SEQ ID NO: 27199 - protein, 277 aa, Zea mays subsp. mays; identical to SEQ ID NO: 1871
  misc_feature (1)..(277): Ceres Seq. ID no. 15179539

SEQ ID NO: 27200 - protein, 241 aa, Zea mays subsp. mays; identical to SEQ ID NO: 1872
  misc_feature (1)..(241): Ceres Seq. ID no. 15179540

SEQ ID NO: 27201 - protein, 222 aa, Zea mays subsp. mays; identical to SEQ ID NO: 1873
  misc_feature (1)..(222): Ceres Seq. ID no. 15179541

SEQ ID NO: 27202 - DNA, 1295 bp, Zea mays subsp. mays
  misc_feature (1)..(1295): Ceres Seq. ID no. 15179550
acaatattattggactattcctaacacaacggaggccataggatgggatggtcatctataaatacgtagcccggcgcagccttctttggagcagggagaagaacacagggcacacgcacggcacgcagatacatatagagagaggttagctatagcttgcacatctatttaactaactaactaactggctagctagctcgatcggcagagcaaagcgaaagcagcaagaagcaaagcaatggagaaccctgcgagtgtgctagttctaccagcgcagttcaccaaactcaccttccgaaacctgtacatccgccgggccgggccgggcagcagggagataaccgaggagggcaggtgcgacctggacaagagatacgtgagtgacttccccgtctacgacggccgcggccccgacgccagccttgtggcccgcgtgcaggggatcaccagcgaaatcgggaacgcgcaccaactgttcgtcgttgttttcgacaccgacaggctcaagggctccacgctcgtcaccaatggcgtgataacggccgggtctgacgagtgggcgatctacggcggaaccggggtgtttgccatggcgaggggcgtcataaggagaaggtatctcgccgacagggccggcgggaacactgatgagctcaacatggatgtcttctgccggccgtttggctcacagtcagagctgcaagataaggtgcaggggcagggctctagcgtcaccaagattggactatggggtggaccgggagggtcggcacaggacatcacggcggagcggccgccgcagcgtctgcacagcgtcaccgttcgtgctggcgtcgccgtcgactccatcgagttcacctatactgacagcgcttggcagaggcgcgccgctgggcgatggggtggactcgggggcaatgttcgaacgatcgaccttggcgacgccgaggatgtcagggaagtctcgggaacatacggcgcatttgaaggtgccactacgctgacctcgctcaggctcgtcaccagcagcagaacctggggcccctggggtgtcgagaacgggacgcgtttctccgtcacggcgcccatcggcagcagcatcgtgggattctatgcgcgggcgggaaccaggctcgtcgatgctatcggtgtttacttgcgtcagatttaattcgaataatagcaggggagctactgctagctacgtacctgctccatcctccattatcctttatttcaattcgctcatcatcgtcgtgtgtaaattaaataaataaagctcttgtgcccatatt

SEQ ID NO: 27203 - protein, 310 aa, Zea mays subsp. mays
  misc_feature (1)..(310): Ceres Seq. ID no. 15179551
MENPASVLVLPAQFTKLTFRNLYIRRAGPGSREITEEGRCDLDKRYVSDFPVYDGRGPDASLVARVQGITSEIGNAHQLFVVVFDTDRLKGSTLVTNGVITAGSDEWAIYGGTGVFAMARGVIRRRYLADRAGGNTDELNMDVFCRPFGSQSELQDKVQGQGSSVTKIGLWGGPGGSAQDITAERPPQRLHSVTVRAGVAVDSIEFTYTDSAWQRRAAGRWGGLGGNVRTIDLGDAEDVREVSGTYGAFEGATTLTSLRLVTSSRTWGPWGVENGTRFSVTAPIGSSIVGFYARAGTRLVDAIGVYLRQI

SEQ ID NO: 27204 - protein, 193 aa, Zea mays subsp. mays
  misc_feature (1)..(193): Ceres Seq. ID no. 15179552
MARGVIRRRYLADRAGGNTDELNMDVFCRPFGSQSELQDKVQGQGSSVTKIGLWGGPGGSAQDITAERPPQRLHSVTVRAGVAVDSIEFTYTDSAWQRRAAGRWGGLGGNVRTIDLGDAEDVREVSGTYGAFEGATTLTSLRLVTSSRTWGPWGVENGTRFSVTAPIGSSIVGFYARAGTRLVDAIGVYLRQI

SEQ ID NO: 27205 - protein, 170 aa, Zea mays subsp. mays
  misc_feature (1)..(170): Ceres Seq. ID no. 15179553
MDVFCRPFGSQSELQDKVQGQGSSVTKIGLWGGPGGSAQDITAERPPQRLHSVTVRAGVAVDSIEFTYTDSAWQRRAAGRWGGLGGNVRTIDLGDAEDVREVSGTYGAFEGATTLTSLRLVTSSRTWGPWGVENGTRFSVTAPIGSSIVGFYARAGTRLVDAIGVYLRQI

SEQ ID NO: 27206 - DNA, 1314 bp, Zea mays subsp. mays
  misc_feature (1)..(1314): Ceres Seq. ID no. 15179566
agaatacacaggctttcctatacttggagttgaatggcagaaaatggagaacccggatctccgcaaagcaatgggaatgaaaccagatcaaaagggtgttcgtgttagaagggtggagcccactgctccagaatctggatgcctacgaccatctgatattattcttagtttcgatggtgttgacattgctaatgatggaacagttcctttcaggcatggtgagcgcattggtttcagttatctggtttctcagaaatatactggagagaaagctcttgttaaagttctgcgtgattcaaaagttcatgaatttaaaataaggttagcaactcacaagcggcttgttgcggctcatgtgaagggcaggccaccgtcgtattacatagttgctggctttgtttttgcagctatctctgttccatatcttcgatctgagtatggaaaagattatgaatatgatgcacctgtcaagttgttggtgaaacatttacatgcgatggcggaatcacctgatgaacagcttgtggtggtatcacaggtgcttgtatcagatatcaatataggttatgaagaaatagtcaatactcaggtacttgctttcaatggccagcctgtaaaaaatttaaagaacttggcgaccatggtggaaaattgcaaggatgaatttttgaagtttgatctggagtatgaccagattgttgtcctcgagacgaaaactgcaaaggctgctacccaggacattctgacgacgcactgtataccttctgcaatgtcggatgaccttaaggcctagtggaaggaagggagcataacgcagccctgggccagggccatcaggtgggccaatagtttgggccgcattttcggctgaattgattagcgaagcgtacgatccgtgatgaagaggaaccccaatgtttatctgtttgagttaaatatcttttgaggggttgtggatgtgagagtgctggctggtgtctaaagctccgccattatagaaggtttgagggactgtcactgtcagataacaataaactggagttgttacaggcggagtcatcgtgaaaacgatagtgtctagtaagaagctgagtttgttttttctttacatgatttcattacaactacaccaaattattgacggggaaaggaatcataattggtccgtgatttcattacatccttggtgtctcaagcttgttccgcatagtacctgctatttgtcaacgatactttcacttctgcttgtaaagtatttgcatcttgtttctggacaagtggtacttaaaagatatttaagcgccgtgaaccaac

SEQ ID NO: 27207 - protein, 263 aa, Zea mays subsp. mays
  misc_feature (1)..(263): Ceres Seq. ID no. 15179567
EYTGFPILGVEWQKMENPDLRKAMGMKPDQKGVRVRRVEPTAPESGCLRPSDIILSFDGVDIANDGTVPFRHGERIGFSYLVSQKYTGEKALVKVLRDSKVHEFKIRLATHKRLVAAHVKGRPPSYYIVAGFVFAAISVPYLRSEYGKDYEYDAPVKLLVKHLHAMAESPDEQLVVVSQVLVSDINIGYEEIVNTQVLAFNGQPVKNLKNLATMVENCKDEFLKFDLEYDQIVVLETKTAKAATQDILTTHCIPSAMSDDLKA

SEQ ID NO: 27208 - protein, 249 aa, Zea mays subsp. mays
  misc_feature (1)..(249): Ceres Seq. ID no. 15179568
MENPDLRKAMGMKPDQKGVRVRRVEPTAPESGCLRPSDIILSFDGVDIANDGTVPFRHGERIGFSYLVSQKYTGEKALVKVLRDSKVHEFKIRLATHKRLVAAHVKGRPPSYYIVAGFVFAAISVPYLRSEYGKDYEYDAPVKLLVKHLHAMAESPDEQLVVVSQVLVSDINIGYEEIVNTQVLAFNGQPVKNLKNLATMVENCKDEFLKFDLEYDQIVVLETKTAKAATQDILTTHCIPSAMSDDLKA

SEQ ID NO: 27209 - protein, 240 aa, Zea mays subsp. mays
  misc_feature (1)..(240): Ceres Seq. ID no. 15179569
MGMKPDQKGVRVRRVEPTAPESGCLRPSDIILSFDGVDIANDGTVPFRHGERIGFSYLVSQKYTGEKALVKVLRDSKVHEFKIRLATHKRLVAAHVKGRPPSYYIVAGFVFAAISVPYLRSEYGKDYEYDAPVKLLVKHLHAMAESPDEQLVVVSQVLVSDINIGYEEIVNTQVLAFNGQPVKNLKNLATMVENCKDEFLKFDLEYDQIVVLETKTAKAATQDILTTHCIPSAMSDDLKA

SEQ ID NO: 27210 - DNA, 1384 bp, Zea mays subsp. mays
  misc_feature (1)..(1384): Ceres Seq. ID no. 15180114
caaagatgtctctgtaaacaaaccagataaccttgcttcagcatcaaacaacattcatcccaagcttgtgatcctccacatgaacatggccctctatgtatatgatgatataatgaggatgactgaaaatttgagcgaaaaatacattattggttatggagcctcaagtacagtctacagatgcgacctgaagaactgcaagccaattgcgattaaaaagctgtatgctcactaccctcagagcttgaaggaattcgagactgaacttgagactgttggaagcatcaaacaccggaatcttgtaagccttcaggggtactccctgtcaccatctgggaatctcctcttctatgattacatggaaaatggcagcctctgggacattttacatgcagcttcatcgaagaaaaagaaactcgattgggaggctcgtctcaagattgctctcggtgctgctcaaggcctggcttatcttcaccatgagtgcagtccacgaataatccacagggatgtgaaatcaaagaatatcctcctagacaaagactacgaggctcatcttgctgactttggtattgccaagagtttgtgtgtgtcgaagacgcacacatcaacgtacgtgatgggcaccattggctacattgaccctgagtatgcacggacatcccggatcaacgagaaatcggatgtgtacagctacggcattgtcttgctggagttgcttaccggcaaaaagcctgtcgacgacgagtgcaaccttcaccacttgatcctatccaaagccgcagagaacacggtcatggagacggtcgaccaggacatcaccgacacgtgcaaggacctcggcgaggtcaagaaggtgttccagctggcgctcctttgcagcaagaggcagccgtcggatcgaccgaccatgcacgaggtcgcgcgcgtcctggacagcctcgtctgcccagcaggcccgccgccgaagcaggcgcaggcacaggcacaggcacaggcgtcggataagccgtccaccacggcgccgagctatgtcagcgagtacgtcggcctacgaggcggcggcggcggcagcgccctctcctgcaccaactcgtcgagcgcgtccgacgccgagctcttcatgaagtttggcgaggtgatctcgcggagcacggaatagtccaatagatcgacgatcattttgtgttacagtttacaataggtgtctggccggcgccctgtgatgtgactcgctgtaaatatgccgctgccttctcgttgggactccactaggcactagtagctatttttctccgttatgcacgtctctctctctctttttttgctgggaaactcgaactgtaactaaaggaacggatttatgtgcaggctgtgtttactc

SEQ ID NO: 27211 - protein, 386 aa, Zea mays subsp. mays
  misc_feature (1)..(386): Ceres Seq. ID no. 15180115
KDVSVNKPDNLASASNNIHPKLVILHMNMALYVYDDIMRMTENLSEKYIIGYGASSTVYRCDLKNCKPIAIKKLYAHYPQSLKEFETELETVGSIKHRNLVSLQGYSLSPSGNLLFYDYMENGSLWDILHAASSKKKKLDWEARLKIALGAAQGLAYLHHECSPRIIHRDVKSKNILLDKDYEAHLADFGIAKSLCVSKTHTSTYVMGTIGYIDPEYARTSRINEKSDVYSYGIVLLELLTGKKPVDDECNLHHLILSKAAENTVMETVDQDITDTCKDLGEVKKVFQLALLCSKRQPSDRPTMHEVARVLDSLVCPAGPPPKQAQAQAQAQASDKPSTTAPSYVSEYVGLRGGGGGSALSCTNSSSASDAELFMKFGEVISRSTE

SEQ ID NO: 27212 - protein, 360 aa, Zea mays subsp. mays
  misc_feature (1)..(360): Ceres Seq. ID no. 15180116
MNMALYVYDDIMRMTENLSEKYIIGYGASSTVYRCDLKNCKPIAIKKLYAHYPQSLKEFETELETVGSIKHRNLVSLQGYSLSPSGNLLFYDYMENGSLWDILHAASSKKKKLDWEARLKIALGAAQGLAYLHHECSPRIIHRDVKSKNILLDKDYEAHLADFGIAKSLCVSKTHTSTYVMGTIGYIDPEYARTSRINEKSDVYSYGIVLLELLTGKKPVDDECNLHHLILSKAAENTVMETVDQDITDTCKDLGEVKKVFQLALLCSKRQPSDRPTMHEVARVLDSLVCPAGPPPKQAQAQAQAQASDKPSTTAPSYVSEYVGLRGGGGGSALSCTNSSSASDAELFMKFGEVISRSTE

SEQ ID NO: 27213 - protein, 358 aa, Zea mays subsp. mays
  misc_feature (1)..(358): Ceres Seq. ID no. 15180117
MALYVYDDIMRMTENLSEKYIIGYGASSTVYRCDLKNCKPIAIKKLYAHYPQSLKEFETELETVGSIKHRNLVSLQGYSLSPSGNLLFYDYMENGSLWDILHAASSKKKKLDWEARLKIALGAAQGLAYLHHECSPRIIHRDVKSKNILLDKDYEAHLADFGIAKSLCVSKTHTSTYVMGTIGYIDPEYARTSRINEKSDVYSYGIVLLELLTGKKPVDDECNLHHLILSKAAENTVMETVDQDITDTCKDLGEVKKVFQLALLCSKRQPSDRPTMHEVARVLDSLVCPAGPPPKQAQAQAQAQASDKPSTTAPSYVSEYVGLRGGGGGSALSCTNSSSASDAELFMKFGEVISRSTE

SEQ ID NO: 27214 - DNA, 1263 bp, Zea mays subsp. mays
  misc_feature (1)..(1263): Ceres Seq. ID no. 15180126
cagctgctcctggccgtcgacaccagcaactacgcctcgtggatcccttgcgccggctgcgcgggctgccccacgtcgtccgcggcgcccttcgacccggccgcgtccgcctcgtaccgcacggtgccctgcgggtcgccgctgtgcgcgcaggcacccaacgcggcgtccccgcccggcggcaaggcctgcggcttcagcctcacctacgccgactcctcgctgcaggccgcgctgtcgcaggactccctcgccgtcgcaggcaacgccgtgaaggcctacaccttcgggtgcctgcagagggccactggcacggctgcgccgccgcaggggctgctgggtctcggccgcggcccgctgtcgttcctttcgcagaccaaggacatgtacgaggccaccttctcgtactgtctccccagcttcaagtcgctcaacttctctggaacgctccggctcgggcgcaacggccagccgcagcgcatcaagacgacgccgctgctggccaacccgcaccggtcgtcgctctactacgtgaacatgaccggcgtccgcgtgggcaggaaggtggtgcccatcccggcgttcgacccggcgacgggcgcgggcaccgtgctggactctggcaccatgttcacccggctggtggcgccggcgtacgtggccgtgcgggacgaggtccggcgccgcgtcggcgcgcccgtatcctcgctgggagggttcgacacgtgcttcaacaccaccgccgtcgcgtggccgcccatgacgctgctgttcgacggcatgcaggtgacgttgccggaggagaacgtggtcatccacagcacgtacgcgaccatcagctgcctggccatggccgcggcgcccgacggcgtcaacaccgtgctcaacgtcatcccagcatgcagcagcagaaccaccgtgtgctcttcgacgtgcccaacggacgcgtcggcttcgcgcgcgagcgctgcactgccgcttgatcagcttgctcgcgcgcctgcgcgcgggctcggattcgggttatatttagttaaacctacgttctacggttgtggacgtcatgcactgctgtcggagtgggtgattaataatttaactttccttttctttttaatctcgttgctcttcagatttaccatatgtgtttcacattcaccgcgttatgtggtttaggggctgaatgattggggtctaaataatgtactgcatattccagttttggattaagcacggtcgtcgtttaggcttgatatgcctaac

SEQ ID NO: 27215 - protein, 391 aa, Zea mays subsp. mays
  misc_feature (1)..(391): Ceres Seq. ID no. 15180127
QLLLAVDTSNYASWIPCAGCAGCPTSSAAPFDPAASASYRTVPCGSPLCAQAPNAASPPGGKACGFSLTYADSSLQAALSQDSLAVAGNAVKAYTFGCLQRATGTAAPPQGLLGLGRGPLSFLSQTKDMYEATFSYCLPSFKSLNFSGTLRLGRNGQPQRIKTTPLLANPHRSSLYYVNMTGVRVGRKVVPIPAFDPATGAGTVLDSGTMFTRLVAPAYVAVRDEVRRRVGAPVSSLGGFDTCFNTTAVAWPPMTLLFDGMQVTLPEENVVIHSTYATISCLAMAAAPDGVNTVLNVIPACSSRTTVCSSTCPTDASASRASAALPLDQLARAPARGLGFGLYLVKPTFYGCGRHALLSEWVINNLTFLFFLISLLFRFTICVSHSPRYVV

SEQ ID NO: 27216 - protein, 326 aa, Zea mays subsp. mays
  misc_feature (1)..(326): Ceres Seq. ID no. 15180128
AAPGRRHQQLRLVDPLRRLRGLPHVVRGALRPGRVRLVPHGALRVAAVRAGTQRGVPARRQGLRLQPHLRRLLAAGRAVAGLPRRRRQRREGLHLRVPAEGHWHGCAAAGAAGSRPRPAVVPFADQGHVRGHLLVLSPQLQVAQLLWNAPARAQRPAAAHQDDAAAGQPAPVVALLREHDRRPRGQEGGAHPGVRPGDGRGHRAGLWHHVHPAGGAGVRGRAGRGPAPRRRARILAGRVRHVLQHHRRRVAAHDAAVRRHAGDVAGGERGHPQHVRDHQLPGHGRGARRRQHRAQRHPSMQQQNHRVLFDVPNGRVGFARERCTAA

SEQ ID NO: 27217 - protein, 263 aa, Zea mays subsp. mays
  misc_feature (1)..(263): Ceres Seq. ID no. 15180129
MYEATFSYCLPSFKSLNFSGTLRLGRNGQPQRIKTTPLLANPHRSSLYYVNMTGVRVGRKVVPIPAFDPATGAGTVLDSGTMFTRLVAPAYVAVRDEVRRRVGAPVSSLGGFDTCFNTTAVAWPPMTLLFDGMQVTLPEENVVIHSTYATISCLAMAAAPDGVNTVLNVIPACSSRTTVCSSTCPTDASASRASAALPLDQLARAPARGLGFGLYLVKPTFYGCGRHALLSEWVINNLTFLFFLISLLFRFTICVSHSPRYVV

SEQ ID NO: 27218 - DNA, 1491 bp, Zea mays subsp. mays
  misc_feature (1)..(1491): Ceres Seq. ID no. 15180137
gcacgttgtcctgctccctagcgccggcatgggccacctggtcccgttcgcccgcctggcggtggcgctgtcggagggacacggctgcaacgtgtccgtggccgcggtgcagcccaccgtgtcgtcggcggagtccaggctcctcgacgcgctcttcgtcgccgcggccccggccgtccgccggctcgacttccgcctggcgccgttcgacgagtccgagttcccgggcgccgaccctttcttcctccgcttcgaggccacgcgccggtccgcgccgctgctcggcccgctcctcgacgccgccgaggcgtccgcgctcgtcacggacatcgttctggcgtccgtcgccctgcccgtcgccagggagcggggcgtcccgtgctacgtcctcttcacgtcctctgccgcgatgctctccctatgcgcctatttccccgcctacctcgacgcccacgccgccgccggcagcgtgggcgtgggcgtcggcaatgtcgacatccccggcgtgttccggatcccaaagtcatccgtcccgcaggcgctgcacgaccccgaccatctcttcacccaacagttcgtcgccaacggtcgctgcctcgtggcctgtgacggcatccttgtcaacacgttcgacgcctttgagccggacgccgttacggccctgcgccaaggctccattactgtctccggcggcttcccgcctgtgttctccgtggggcccatgcttccggtgagatttcaggcggaggagacggcggattacatgagatggctcagcgcgcagccgccacggtctgtggtgtacgtcagcttcggcagccgtaaggccataccgagggaccagctccgggagctcgcagccgggctcgaggccagcggcaaacggttcctgtgggtggtgaagagcaccatcgtggaccgggacgacaccgccgacctcggcggcctgcttggtgacgggttcctcgagcgagtgcaggggcgcgcgttcgttaccatggggtgggtggagcaagaggagatcctgcagcacggttccgtcggcctattcatcagtcactgcgggtggaactcgttgacggaggcagcggcgttcggtgtgccggtgctagcgtggccgaggttcggcgaccagcgcgtcaacgccgcactggtggcgcgcagcgggctgggcgcgtgggaggaggggtggacctgggatggagaggaagggctgacgactcgaaaggaggtggctaagaagataaaaggcatgatggggtatgatgcggtggcggaaaaggcagcgaaggtcggcgacgccgccgccgcggcaatagccaagtgcggcacgagctaccagagcttagaggaattcgttcagcggtgtcgggacgcggagcgtaagtaggctcgactgatttctgcgagcctgtaacagatacttggttcctgtgacgctgactgtagatcattttcggttgctagagttattttcgccggcctcttcct

SEQ ID NO: 27219 - protein, 462 aa, Zea mays subsp. mays
  misc_feature (1)..(462): Ceres Seq. ID no. 15180138
HVVLLPSAGMGHLVPFARLAVALSEGHGCNVSVAAVQPTVSSAESRLLDALFVAAAPAVRRLDFRLAPFDESEFPGADPFFLRFEATRRSAPLLGPLLDAAEASALVTDIVLASVALPVARERGVPCYVLFTSSAAMLSLCAYFPAYLDAHAAAGSVGVGVGNVDIPGVFRIPKSSVPQALHDPDHLFTQQFVANGRCLVACDGILVNTFDAFEPDAVTALRQGSITVSGGFPPVFSVGPMLPVRFQAEETADYMRWLSAQPPRSVVYVSFGSRKAIPRDQLRELAAGLEASGKRFLWVVKSTIVDRDDTADLGGLLGDGFLERVQGRAFVTMGWVEQEEILQHGSVGLFISHCGWNSLTEAAAFGVPVLAWPRFGDQRVNAALVARSGLGAWEEGWTWDGEEGLTTRKEVAKKIKGMMGYDAVAEKAAKVGDAAAAAIAKCGTSYQSLEEFVQRCRDAERK

SEQ ID NO: 27220 - protein, 453 aa, Zea mays subsp. mays
  misc_feature (1)..(453): Ceres Seq. ID no. 15180139
MGHLVPFARLAVALSEGHGCNVSVAAVQPTVSSAESRLLDALFVAAAPAVRRLDFRLAPFDESEFPGADPFFLRFEATRRSAPLLGPLLDAAEASALVTDIVLASVALPVARERGVPCYVLFTSSAAMLSLCAYFPAYLDAHAAAGSVGVGVGNVDIPGVFRIPKSSVPQALHDPDHLFTQQFVANGRCLVACDGILVNTFDAFEPDAVTALRQGSITVSGGFPPVFSVGPMLPVRFQAEETADYMRWLSAQPPRSVVYVSFGSRKAIPRDQLRELAAGLEASGKRFLWVVKSTIVDRDDTADLGGLLGDGFLERVQGRAFVTMGWVEQEEILQHGSVGLFISHCGWNSLTEAAAFGVPVLAWPRFGDQRVNAALVARSGLGAWEEGWTWDGEEGLTTRKEVAKKIKGMMGYDAVAEKAAKVGDAAAAAIAKCGTSYQSLEEFVQRCRDAERK

SEQ ID NO: 27221 - protein, 326 aa, Zea mays subsp. mays
  misc_feature (1)..(326): Ceres Seq. ID no. 15180140
MLSLCAYFPAYLDAHAAAGSVGVGVGNVDIPGVFRIPKSSVPQALHDPDHLFTQQFVANGRCLVACDGILVNTFDAFEPDAVTALRQGSITVSGGFPPVFSVGPMLPVRFQAEETADYMRWLSAQPPRSVVYVSFGSRKAIPRDQLRELAAGLEASGKRFLWVVKSTIVDRDDTADLGGLLGDGFLERVQGRAFVTMGWVEQEEILQHGSVGLFISHCGWNSLTEAAAFGVPVLAWPRFGDQRVNAALVARSGLGAWEEGWTWDGEEGLTTRKEVAKKIKGMMGYDAVAEKAAKVGDAAAAAIAKCGTSYQSLEEFVQRCRDAERK

SEQ ID NO: 27222 - DNA, 2788 bp, Zea mays subsp. mays; identical to SEQ ID NO: 350
  misc_feature (1)..(2788): Ceres Seq. ID no. 15180188

SEQ ID NO: 27223 - protein, 657 aa, Zea mays subsp. mays; identical to SEQ ID NO: 351
  misc_feature (1)..(657): Ceres Seq. ID no. 15180189

SEQ ID NO: 27224 - protein, 629 aa, Zea mays subsp. mays; identical to SEQ ID NO: 352
  misc_feature (1)..(629): Ceres Seq. ID no. 15180190

SEQ ID NO: 27225 - protein, 604 aa, Zea mays subsp. mays; identical to SEQ ID NO: 353
  misc_feature (1)..(604): Ceres Seq. ID no. 15180191

SEQ ID NO: 27226 - DNA, 1083 bp, Zea mays subsp. mays; identical to SEQ ID NO: 365
  misc_feature (1)..(1083): Ceres Seq. ID no. 15180294

SEQ ID NO: 27227 - protein, 319 aa, Zea mays subsp. mays; identical to SEQ ID NO: 366
  misc_feature (1)..(319): Ceres Seq. ID no. 15180295

SEQ ID NO: 27228 - protein, 295 aa, Zea mays subsp. mays; identical to SEQ ID NO: 367
  misc_feature (1)..(295): Ceres Seq. ID no. 15180296

SEQ ID NO: 27229 - protein, 252 aa, Zea mays subsp. mays; identical to SEQ ID NO: 368
  misc_feature (1)..(252): Ceres Seq. ID no. 15180297

SEQ ID NO: 27230 - DNA, 1649 bp, Zea mays subsp. mays
  misc_feature (1)..(1649): Ceres Seq. ID no. 15180302
tagttcatttatgatttcctgcgagcacaaagctagcgaagataccaaacaatggggagcacgagcgccacaggcaccacgtcgtcttcctcatcggctgcccacgggggcggtgccgcacacgtactgctcctgccgtacccgggcgcgcagggccatacaaacccgctgctccagttcggccgctgcctcgcctaccacggcctccgccccacgctcgtcacctcgcggtacgtgctctccaccaccccgcctcccggggagcccttcagggtggccgccatttccgatggcttcgacgacggcggggcggccgcgtgccccgacctcgacgtgtactggcgccagctcgaggccgtcggctcggagacgctggcggagctgatccgctccgaggccgccgatgggcggcctgtgcgcgtgctggtttacgacccgcacctgccgtgggcgcgacgggtggcacaggcggccgggctggcggcagcggcgttcctatcgcagccatgcgccgtcgacgtcgtctacggggaggtgtgtgcaggacggctgccactgccggtggtggacgggatagagctgtttgcacgcgggctgctgggtgtcgagctcggtcccgacgacgttccgccgttcgcagcaaagccagactggtgccctgtgttccttcgggcatcattgcggcaatttgaggggctggaggacgccgacgacgtgctcgtcaactcattccacgagatcgaacccaaggaggcagattatatggccctaacatggcatgcaaagacaataggcccaactttgccatcattttatcttgatgatgaccgtttgcccttgaacaagacttacggtttcaacctcttcaacagcagcgagtcatgtctggcttggcttgacaaacagcttccgtgttctgttgttcttgtatcctatggtactgtctctgattatgatgaagcacagttagaggagcttggcaatggattgtacaattctggcaaaccattcatttgggttgtgaggtcaaacgaagaacacaagttgtccaatgaacttcgtgacaagtgcaaggaacgtggccttattgtttcttggtgcccccagctggaagttctagcacataaagctacaggttgtttcttcacacattgcggatggaactcgacattggaagcaattgttaatggtgtgccaatggtggcaataccacactgggcagaccagccgaccatatcaaaatatatggagagcatgttgggcttgggtgtccgagtgcgcaaggatgagaaaggcttggtaacgagggacgaggtggaaaggtgcatcaaggatgtcatggatggtgatagtaaggataagtataggaagagtgccactatgtggatgcaaaaggccaaggcagctatgcagaatggagggagctcggccaagaatattacagaattcgccgcgaagtattctttaagttaatttttcaaatatttcgtaaaaaaagttaattttcaaagatataatgatagtgttataattacttcctataccttcatggattgtatgccttcctgcatgttatatttttgtctcgggattgtgcgtattacgttttgacttgatgatgtacatgctacagcagcaacctccacgtc

SEQ ID NO: 27231 - protein, 473 aa, Zea mays subsp. mays
  misc_feature (1)..(473): Ceres Seq. ID no. 15180303
MGSTSATGTTSSSSSAAHGGGAAHVLLLPYPGAQGHTNPLLQFGRCLAYHGLRPTLVTSRYVLSTTPPPGEPFRVAAISDGFDDGGAAACPDLDVYWRQLEAVGSETLAELIRSEAADGRPVRVLVYDPHLPWARRVAQAAGLAAAAFLSQPCAVDVVYGEVCAGRLPLPVVDGIELFARGLLGVELGPDDVPPFAAKPDWCPVFLRASLRQFEGLEDADDVLVNSFHEIEPKEADYMALTWHAKTIGPTLPSFYLDDDRLPLNKTYGFNLFNSSESCLAWLDKQLPCSVVLVSYGTVSDYDEAQLEELGNGLYNSGKPFIWVVRSNEEHKLSNELRDKCKERGLIVSWCPQLEVLAHKATGCFFTHCGWNSTLEAIVNGVPMVAIPHWADQPTISKYMESMLGLGVRVRKDEKGLVTRDEVERCIKDVMDGDSKDKYRKSATMWMQKAKAAMQNGGSSAKNITEFAAKYSLS

SEQ ID NO: 27232 - protein, 236 aa, Zea mays subsp. mays
  misc_feature (1)..(236): Ceres Seq. ID no. 15180304
MALTWHAKTIGPTLPSFYLDDDRLPLNKTYGFNLFNSSESCLAWLDKQLPCSVVLVSYGTVSDYDEAQLEELGNGLYNSGKPFIWVVRSNEEHKLSNELRDKCKERGLIVSWCPQLEVLAHKATGCFFTHCGWNSTLEAIVNGVPMVAIPHWADQPTISKYMESMLGLGVRVRKDEKGLVTRDEVERCIKDVMDGDSKDKYRKSATMWMQKAKAAMQNGGSSAKNITEFAAKYSLS

SEQ ID NO: 27233 - DNA, 2689 bp, Zea mays subsp. mays; identical to SEQ ID NO: 1991
  misc_feature (1)..(2689): Ceres Seq. ID no. 15180386

SEQ ID NO: 27234 - protein, 625 aa, Zea mays subsp. mays; identical to SEQ ID NO: 1992
  misc_feature (1)..(625): Ceres Seq. ID no. 15180387

SEQ ID NO: 27235 - protein, 624 aa, Zea mays subsp. mays; identical to SEQ ID NO: 1993
  misc_feature (1)..(624): Ceres Seq. ID no. 15180388

SEQ ID NO: 27236 - protein, 565 aa, Zea mays subsp. mays; identical to SEQ ID NO: 1994
  misc_feature (1)..(565): Ceres Seq. ID no. 15180389

SEQ ID NO: 27237 - DNA, 1606 bp, Zea mays subsp. mays; identical to SEQ ID NO: 1999
  misc_feature (1)..(1606): Ceres Seq. ID no. 15180463

SEQ ID NO: 27238 - protein, 449 aa, Zea mays subsp. mays; identical to SEQ ID NO: 2000
  misc_feature (1)..(449): Ceres Seq. ID no. 15180464

SEQ ID NO: 27239 - protein, 384 aa, Zea mays subsp. mays; identical to SEQ ID NO: 2001
  misc_feature (1)..(384): Ceres Seq. ID no. 15180465

SEQ ID NO: 27240 - protein, 317 aa, Zea mays subsp. mays; identical to SEQ ID NO: 2002
  misc_feature (1)..(317): Ceres Seq. ID no. 15180466

SEQ ID NO: 27241 - DNA, 1342 bp, Zea mays subsp. mays
  misc_feature (1)..(1342): Ceres Seq. ID no. 15180493
gtccttgccatggccatccccaccgcccccgccctcctcttcccctccgttctccctaactcattcccccgccggacaccctggcgacacctcgtccggcggaaaccgcgtcacctccgcgcgggccgcccacgcctgcaggcgccggcgccggctcctcccccggtggcggaggtcgcggcggagcgggacgacacgcctccgctcaggctgctcgagccgccgcaggaggacgaccccttcccgcccgagatggagcccgcggaccctgatttctaccggataggatatgcgcggatgatgcgcgcctatgggatcgagttcctcgaaggccccgacgggatgggcgtctacgcttcccgggacgtggagccacttcgcagagctagagtgattatggagattccgttggagctgatgctgactataactcaaaagaaaccttggatgtttttccctgacattattccactaggccatcctatatttgatgttatcgagtcaacagatccagagacagattgggatctaagattagcatgtcttcttctatatgcatttgatatagaagacaacttttggcagttatattctgattttttgccaagtgctgatgaatgcactagtttgctgctggcaccaaaggaagatctaatggaactagaagatgaagatcttgcttcacaaatgttaaaacaccaggaacgagcaattgacttttggcaaaagcattgggacaaaccaattcctctaaagctgaaacgccttgcacgtgaccatgagagatttctctgggcactgagtatagtacagtctcgttctgtcaacttgaagttgagaatgggagccttcatccaagatgcaaatgtgctagctccttatgctgatatgttgaaccactcacccaatgctaattgcttcctgcattggcgttttaaagatcgtatgcttgaagttatgattaaggctggacaagctatcaagaaaggagacgagatgacgatagattatatgagtggcgtcaacagcaaatttgtggaaagatatgggttctcatcaccaacgaatccttgggagctcataaatttctcgagtcctgcaacaattcacatggattccttcttatcggtcttcaatatcgctggcttgcatgatgagctgtaccacaattctgcattgacctcagtagtagaaaccgactttgtggacggagcagtcgtagcagcagccagagcattgccgacatggtcagatggtgatgttcctgcaattcctagtgtggagagaaaatctgctcaggcactgcaagaggagtgccgccaaatgttggattcattcccaa

SEQ ID NO: 27242 - protein, 447 aa, Zea mays subsp. mays
  misc_feature (1)..(447): Ceres Seq. ID no. 15180494
VLAMAIPTAPALLFPSVLPNSFPRRTPWRHLVRRKPRHLRAGRPRLQAPAPAPPPVAEVAAERDDTPPLRLLEPPQEDDPFPPEMEPADPDFYRIGYARMMRAYGIEFLEGPDGMGVYASRDVEPLRRARVIMEIPLELMLTITQKKPWMFFPDIIPLGHPIFDVIESTDPETDWDLRLACLLLYAFDIEDNFWQLYSDFLPSADECTSLLLAPKEDLMELEDEDLASQMLKHQERAIDFWQKHWDKPIPLKLKRLARDHERFLWALSIVQSRSVNLKLRMGAFIQDANVLAPYADMLNHSPNANCFLHWRFKDRMLEVMIKAGQAIKKGDEMTIDYMSGVNSKFVERYGFSSPTNPWELINFSSPATIHMDSFLSVFNIAGLHDELYHNSALTSVVETDFVDGAVVAAARALPTWSDGDVPAIPSVERKSAQALQEECRQMLDSFP

SEQ ID NO: 27243 - protein, 444 aa, Zea mays subsp. mays
  misc_feature (1)..(444): Ceres Seq. ID no. 15180495
MAIPTAPALLFPSVLPNSFPRRTPWRHLVRRKPRHLRAGRPRLQAPAPAPPPVAEVAAERDDTPPLRLLEPPQEDDPFPPEMEPADPDFYRIGYARMMRAYGIEFLEGPDGMGVYASRDVEPLRRARVIMEIPLELMLTITQKKPWMFFPDIIPLGHPIFDVIESTDPETDWDLRLACLLLYAFDIEDNFWQLYSDFLPSADECTSLLLAPKEDLMELEDEDLASQMLKHQERAIDFWQKHWDKPIPLKLKRLARDHERFLWALSIVQSRSVNLKLRMGAFIQDANVLAPYADMLNHSPNANCFLHWRFKDRMLEVMIKAGQAIKKGDEMTIDYMSGVNSKFVERYGFSSPTNPWELINFSSPATIHMDSFLSVFNIAGLHDELYHNSALTSVVETDFVDGAVVAAARALPTWSDGDVPAIPSVERKSAQALQEECRQMLDSFP

SEQ ID NO: 27244 - protein, 363 aa, Zea mays subsp. mays
  misc_feature (1)..(363): Ceres Seq. ID no. 15180496
MEPADPDFYRIGYARMMRAYGIEFLEGPDGMGVYASRDVEPLRRARVIMEIPLELMLTITQKKPWMFFPDIIPLGHPIFDVIESTDPETDWDLRLACLLLYAFDIEDNFWQLYSDFLPSADECTSLLLAPKEDLMELEDEDLASQMLKHQERAIDFWQKHWDKPIPLKLKRLARDHERFLWALSIVQSRSVNLKLRMGAFIQDANVLAPYADMLNHSPNANCFLHWRFKDRMLEVMIKAGQAIKKGDEMTIDYMSGVNSKFVERYGFSSPTNPWELINFSSPATIHMDSFLSVFNIAGLHDELYHNSALTSVVETDFVDGAVVAAARALPTWSDGDVPAIPSVERKSAQALQEECRQMLDSFP

SEQ ID NO: 27245 - DNA, 1428 bp, Zea mays subsp. mays
  misc_feature (1)..(1428): Ceres Seq. ID no. 15180566
atcctaccaggcaccactcgcatcgtgtgctcagtcagatccccgtcccgcatttcctaaggccaggttagttggcattgaagacgatgactgcttctgcagctgctggtgtgcagatggtggctgcacgcccttgcatttcggcctcgccaggaattcttaccgcacgggtagcagtttctaggactgattgcatgctcagtaccactgctacattccccaaaatcagctgctcctggcctctaaggtttaagcgcaatgatgttgttgtaagagcaatatcggaagagtgtggcccgcaggggcttcccattgatctcagaggtaaaagggcattcattgctggagttgctgatgataatggctatggatgggcaattgcgaaggcacttgctgcggctggtgctgaaattcttgtgggtacatgggtgccggcacttaacatatttgagacaagtctgaggcgtggaaagtttgatgaatcacggaagctgccagatggatctcttatggatattgttaaagtctatccacttgatgctgtctacgattcccctgatgatgttcctgaagatgtcaaatcgaacaaaagatatgcaggggcatcaaactggacagtaaaggaagttgttgaatcagtgaggaatgattttggcagcattgacatactagtgcattctcttgctaatggcccagaggtaacgaagcctttgttggaaacctcaagaagaggctatcttgcggcaatttctgcatccagttactcctatgtttcattgcttcagcacttccttcctataatgaatcccggtggtgctagcatctctctaacatacattgcatctgaaagggcgattcctgggtatggtggtgggatgagttctgctaaagcagctcttgagagtgatacacgggtgcttgcattcgaagctgggcgaaaaggcaaaatcagagttaacaccatatcagcaggccctcttgggagccgagctgctaaggcaattggatttattgagaagatgatagagtactcatatgttaatgcaccattgcagaaggagctgttggctgatgaggtggggaacacagctgcattcctggtttcttcattggcttctgccatcaccggctcgactgtttatgttgacaatgggctcaatacaatggggcttgcaattgacagccctaccataacgtcatagatgtggttgtggtagatagacgacctttcctgctgcattgcggtatcatccttgaataaagatcatagttagttattagtatgagaggtaagggcaggaaagggggaaaattatgaactggtcttttgcgctttctttgctggagaggaacattagagcgatttccagaatgatgggatgctattatgtgatttcatatgattcagaagcagtacaataactccct

SEQ ID NO: 27246 - protein, 371 aa, Zea mays subsp. mays
  misc_feature (1)..(371): Ceres Seq. ID no. 15180567
MTASAAAGVQMVAARPCISASPGILTARVAVSRTDCMLSTTATFPKISCSWPLRFKRNDVVVRAISEECGPQGLPIDLRGKRAFIAGVADDNGYGWAIAKALAAAGAEILVGTWVPALNIFETSLRRGKFDESRKLPDGSLMDIVKVYPLDAVYDSPDDVPEDVKSNKRYAGASNWTVKEVVESVRNDFGSIDILVHSLANGPEVTKPLLETSRRGYLAAISASSYSYVSLLQHFLPIMNPGGASISLTYIASERAIPGYGGGMSSAKAALESDTRVLAFEAGRKGKIRVNTISAGPLGSRAAKAIGFIEKMIEYSYVNAPLQKELLADEVGNTAAFLVSSLASAITGSTVYVDNGLNTMGLAIDSPTITS

SEQ ID NO: 27247 - protein, 361 aa, Zea mays subsp. mays
  misc_feature (1)..(361): Ceres Seq. ID no. 15180568
MVAARPCISASPGILTARVAVSRTDCMLSTTATFPKISCSWPLRFKRNDVVVRAISEECGPQGLPIDLRGKRAFIAGVADDNGYGWAIAKALAAAGAEILVGTWVPALNIFETSLRRGKFDESRKLPDGSLMDIVKVYPLDAVYDSPDDVPEDVKSNKRYAGASNWTVKEVVESVRNDFGSIDILVHSLANGPEVTKPLLETSRRGYLAAISASSYSYVSLLQHFLPIMNPGGASISLTYIASERAIPGYGGGMSSAKAALESDTRVLAFEAGRKGKIRVNTISAGPLGSRAAKAIGFIEKMIEYSYVNAPLQKELLADEVGNTAAFLVSSLASAITGSTVYVDNGLNTMGLAIDSPTITS

SEQ ID NO: 27248 - protein, 335 aa, Zea mays subsp. mays
  misc_feature (1)..(335): Ceres Seq. ID no. 15180569
MLSTTATFPKISCSWPLRFKRNDVVVRAISEECGPQGLPIDLRGKRAFIAGVADDNGYGWAIAKALAAAGAEILVGTWVPALNIFETSLRRGKFDESRKLPDGSLMDIVKVYPLDAVYDSPDDVPEDVKSNKRYAGASNWTVKEVVESVRNDFGSIDILVHSLANGPEVTKPLLETSRRGYLAAISASSYSYVSLLQHFLPIMNPGGASISLTYIASERAIPGYGGGMSSAKAALESDTRVLAFEAGRKGKIRVNTISAGPLGSRAAKAIGFIEKMIEYSYVNAPLQKELLADEVGNTAAFLVSSLASAITGSTVYVDNGLNTMGLAIDSPTITS

SEQ ID NO: 27249 - DNA, 474 bp, Zea mays subsp. mays
  misc_feature (1)..(474): Ceres Seq. ID no. 15180595
gtgtggtctcgcccctgaggttcctgatcgcaccatctccctccggcgacagtccgccgccccgccccgcgcgctcgacgaggccgctccgggtggtgaagagggtgctgctgcagtgtctcccctctcgctatgagtagtgctgtgaaggaccagctacagcagatgtcgacgacgtgcgattctctcctgttggagctcaacgtgatttgggatgaggtcggtgagcccgacatggcgagggaccggatgctgctggagctcgagcaggagtgcctcgacgtctacaagagaaaggtcgaccaggccaatcgatgcagggcccagttgcggcaggccattgcggaggcagaggccgagctcgctggcatatgctcggccatgggcgagccaccgatacatgttagacagtcaaatcagaagttacaaggtttaagggaagtattgaatgcgattgtcccatacttggaggag

SEQ ID NO: 27250 - protein, 114 aa, Zea mays subsp. mays
  misc_feature (1)..(114): Ceres Seq. ID no. 15180596
MSSAVKDQLQQMSTTCDSLLLELNVIWDEVGEPDMARDRMLLELEQECLDVYKRKVDQANRCRAQLRQAIAEAEAELAGICSAMGEPPIHVRQSNQKLQGLREVLNAIVPYLEE

SEQ ID NO: 27251 - protein, 103 aa, Zea mays subsp. mays
  misc_feature (1)..(103): Ceres Seq. ID no. 15180597
MSTTCDSLLLELNVIWDEVGEPDMARDRMLLELEQECLDVYKRKVDQANRCRAQLRQAIAEAEAELAGICSAMGEPPIHVRQSNQKLQGLREVLNAIVPYLEE

SEQ ID NO: 27252 - protein, 80 aa, Zea mays subsp. mays
  misc_feature (1)..(80): Ceres Seq. ID no. 15180598
MARDRMLLELEQECLDVYKRKVDQANRCRAQLRQAIAEAEAELAGICSAMGEPPIHVRQSNQKLQGLREVLNAIVPYLEE

SEQ ID NO: 27253 - DNA, 958 bp, Zea mays subsp. mays
  misc_feature (1)..(958): Ceres Seq. ID no. 15180611
atcccgcacatgcacgtgatgcatgtattgttaagagccaccttctatgcttctttgtaccatttggatgcggttcagtggtgcatattgtttgagctgtttctgttttgaactactgatacgctgtgaactttaatgttcgtggttctcagataaactagaaaacctatgctaacgaaacatctagcacatcttggatcagccctgcgatctcaaatggttaatgtatttccggcagctagaaacaccccaaactctgttctctgatttaacaaaaaaaaaccagttacccaccacccagcatgagcggacatgtgcatttgttggcatttgagctctcgtccaatgattgttgcgcaggtgacggagaacgggaagcaggagcggcatctagtggcgacggtggggaagtacagcgtggtgtggaacttcctgcaggtgaagaacagccaccacgagtgctaccagtaccaggaggggctgaagagctgctattgctacaaggtgatccccaaggacgagtccatcgtggccagccgcttcatgcacgacaagtactcggtcagcgactccccggaggctccactggtggtggccacgcccatgaaggtcacctccttcagcatatccagcaggcactaactagcctccttgctccgccccgcaacttcgctgccggccgacgcgttccccttggctcctcggcctccggtgatctggtaacattttgttaagcaattgtttgtgcgacggttgcctgttccattgccttctaagttggttcaaattaattagtgatttgctgtgttgagtcgatacgcaacgttgaagaggggatggtagtgtctgttgggttagctacatattgctgaacaatctgatttagctgtgaggaagtggctaatggttgtaagaaagctgaaagttgtttgattaaaataattgttaactaaaaaag

SEQ ID NO: 27254 - protein, 143 aa, Zea mays subsp. mays
  misc_feature (1)..(143): Ceres Seq. ID no. 15180612
MSGHVHLLAFELSSNDCCAGDGEREAGAASSGDGGEVQRGVELPAGEEQPPRVLPVPGGAEELLLLQGDPQGRVHRGQPLHARQVLGQRLPGGSTGGGHAHEGHLLQHIQQALTSLLAPPRNFAAGRRVPLGSSASGDLVTFC

SEQ ID NO: 27255 - protein, 109 aa, Zea mays subsp. mays
  misc_feature (1)..(109): Ceres Seq. ID no. 15180613
MCICWHLSSRPMIVAQVTENGKQERHLVATVGKYSVVWNFLQVKNSHHECYQYQEGLKSCYCYKVIPKDESIVASRFMHDKYSVSDSPEAPLVVATPMKVTSFSISSRH

SEQ ID NO: 27256 - protein, 98 aa, Zea mays subsp. mays
  misc_feature (1)..(98): Ceres Seq. ID no. 15180614
MIVAQVTENGKQERHLVATVGKYSVVWNFLQVKNSHHECYQYQEGLKSCYCYKVIPKDESIVASRFMHDKYSVSDSPEAPLVVATPMKVTSFSISSRH

SEQ ID NO: 27257 - DNA, 1205 bp, Zea mays subsp. mays; identical to SEQ ID NO: 2053
  misc_feature (1)..(1205): Ceres Seq. ID no. 15180619

SEQ ID NO: 27258 - protein, 359 aa, Zea mays subsp. mays; identical to SEQ ID NO: 2054
  misc_feature (1)..(359): Ceres Seq. ID no. 15180620

SEQ ID NO: 27259 - protein, 332 aa, Zea mays subsp. mays; identical to SEQ ID NO: 2055
  misc_feature (1)..(332): Ceres Seq. ID no. 15180621

SEQ ID NO: 27260 - protein, 227 aa, Zea mays subsp. mays; identical to SEQ ID NO: 2056
  misc_feature (1)..(227): Ceres Seq. ID no. 15180622

SEQ ID NO: 27261 - DNA, 1315 bp, Zea mays subsp. mays
  misc_feature (1)..(1315): Ceres Seq. ID no. 15180636
catcctcgccgacttcctcggccgcgggatcttcaacgtggacggggacgcctggctgttccagcgcaagctcgcggcggccgagctggtgtcgccggcgctgcgcgccttcgcggtgcgcgtggtggcgtccgagctgcggggccggctcatccccctgctccgctctgctgcctgtgcctccggccgcgagggtggaggaggaggaggaggaggaggcagggtcctggacctgcaggacgtgttccgccgcttcgccttcgactgcatctgcaagatctccttcggcctcgaccctggctgcctgcagctgtcgatgccggtgtcgtcgttcgaggacgccttcgacacggcctccacgctctccgccaggcgcgccaccgcgcccatgcacgtcgtctggaagctgaagcgcctgctcaacttgggggacgagaggaggctccgggacgcggtgcacctcgtggacgcgctcgccgcggaggtgatccggcagcggcgcaagctcgggggcgccgccagctcgggcagcgacctcctgtcgcgcttcatggggtccatcgacgacgactagtacctccgcgacatcggggtcagcttcatgctggacggccgcgacaccgtggcctcggcgctgaccgccttcttcctgctcctctccgaccacccggaggtcgcggccgccatccgggacgaggccgcccgcgtcgccggcgacgacgacgacgacgacgggcggctcacggcctccgccttcggcaagctcaagggcatgcagtacgtgcacgcggcgctgtacgagagcatgcggctgttcccgccggtgcagttcgactccaagttcgcggcgggcgacgacacgctcccggacggcacggcggtggcgaagggcacgcgggtgacctaccacgcctacgccatggggcggatggagtccgtgtggggccccgactgcggcgagttccggcccgagcggtggctccgggacgggcgcttcgtgcccgagagcccgtacaggtaccccgtgttccaggccggcgcgcgcgtgtgcgtgggcaaggagctggccctgatggagatgaaggccgtgatcgtggccgtggtccggggcttcgacatcgaggcggtcggacggagctcccgccggcccaggttcgcgccggggctgaccgccacgttcgcgggcggcctgccggtgcgggtgcgccggcgagcacgtgcgagcgggcacaagcgcacaacccgccaatgtgatgaaacggaataaaaagaagaaaaaaaatactgctgctggtgtcatccaggattcgtcctc

SEQ ID NO: 27262 - protein, 417 aa, Zea mays subsp. mays
  misc_feature (1)..(417): Ceres Seq. ID no. 15180637
HPRRLPRPRDLQRGRGRLAVPAQARGGRAGVAGAARLRGARGGVRAAGPAHPPAPLCCLCLRPRGWRRRRRRRQGPGPAGRVPPLRLRLHLQDLLRPRPWLPAAVDAGVVVRGRLRHGLHALRQARHRAHARRLEAEAPAQLGGREEAPGRGAPRGRARRGGDPAAAQARGRRQLGQRPPVALHGVHRRRLVPPRHRGQLHAGRPRHRGLGADRLLPAPLRPPGGRGRHPGRGRPRRRRRRRRRRAAHGLRLRQAQGHAVRARGAVREHAAVPAGAVRLQVRGGRRHAPGRHGGGEGHAGDLPRLRHGADGVRVGPRLRRVPARAVAPGRALRAREPVQVPRVPGRRARVRGQGAGPDGDEGRDRGRGPGLRHRGGRTELPPAQVRAGADRHVRGRPAGAGAPASTCERAQAHNPPM

SEQ ID NO: 27263 - protein, 221 aa, Zea mays subsp. mays
  misc_feature (1)..(221): Ceres Seq. ID no. 15180638
MLDGRDTVASALTAFFLLLSDHPEVAAAIRDEAARVAGDDDDDDGRLTASAFGKLKGMQYVHAALYESMRLFPPVQFDSKFAAGDDTLPDGTAVAKGTRVTYHAYAMGRMESVWGPDCGEFRPERWLRDGRFVPESPYRYPVFQAGARVCVGKELALMEMKAVIVAVVRGFDIEAVGRSSRRPRFAPGLTATFAGGLPVRVRRRARASGHKRTTRQCDETE

SEQ ID NO: 27264 - DNA, 1339 bp, Zea mays subsp. mays
  misc_feature (1)..(1339): Ceres Seq. ID no. 15180690
atacgctgctcaaagtttaaatcggtcaagtggaaaccacacaccaggccgcccctctgttcctcgccgagatggccccgccgcggtggcgcggctccctgaccgcgggctaccagttcttcctcgcgctcggggtgctgatcgccaacctcgtgaactacgcgacggcgcacgcctcctgggggtggcgcgtctcgctgggcctggcgggcgcgccggccgtcgccatcttcgtcggcgcgctcttcctcaccgacacccccagcagcctcgtgatgcgggggcgcgccgacggggcccgggcggcgctgctccgggtgcgcgggcccgacgccgacgtggaggccgagctcagggacatcgccaaggccgtggaggccgcgcgccgcggcgaggacggcgcgttccgccggatggccacgcggcgcgagtaccgcccgcacctggtgctcgccgtggccgtgcccatgttcttccagctcacgggcgtcatcgtgctcgccttcttcgcgccgctcgtgttccggaccgtcggcttcgggagcagcgccgcgctcatgggcgccgtcgtactcggcgccgtcaacctgggctccctcgtgctctccaccttcgtcatcgaccggtacggacggaaggtgctcttcatggccggcggcgtacagatggtcgtctgccaggtcgcgattgcttggatcatgggggcgaagatcggcaagggcggcgaggcggcaatggcgcacccgtacgccgtggcggtgctggtgttcacctgcctgcacaccgccgggttcgggtggtcgtggggcccgctggggtgggtgatcccgagcgagatattcccggtggacatccggtcggcagggcaggccatgaacgtctccatcggcctctgtctcaccttcgtgcagacgcagtcgttcctcgccatgctctgccgcttcaagtacgccaccttcgcctactacgccgcctgggtcgccgtcatgaccgtcttcatcgcgctcttcctgccggagaccaagggcatcccgctcgagtccatgggcaccatctgggtgaaacactggtattggaagaggttcgtccacgacagaaagcagagcaacgtggcactgacctaaggacgaacctgtgtgaaatgtggacctgtaagatttttgtgactgacatgccaacgtgtatttatatactcgtcgttgagatttgtgaatttgtggttatgaaagcactcattttctaatatttactatgtactcttttaaagagcgaaggtttgtttctctccgcttctcactccagacaccagtggatcgttatcctatagactttatttcgg

SEQ ID NO: 27265 - protein, 413 aa, Zea mays subsp. mays
  misc_feature (1)..(413): Ceres Seq. ID no. 15180691
YAAQSLNRSSGNHTPGRPSVPRRDGPAAVARLPDRGLPVLPRARGADRQPRELRDGARLLGVARLAGPGGRAGRRHLRRRALPHRHPQQPRDAGARRRGPGGAAPGARARRRRGGRAQGHRQGRGGRAPRRGRRVPPDGHAARVPPAPGARRGRAHVLPAHGRHRARLLRAARVPDRRLREQRRAHGRRRTRRRQPGLPRALHLRHRPVRTEGALHGRRRTDGRLPGRDCLDHGGEDRQGRRGGNGAPVRRGGAGVHLPAHRRVRVVVGPAGVGDPERDIPGGHPVGRAGHERLHRPLSHLRADAVVPRHALPLQVRHLRLLRRLGRRHDRLHRALPAGDQGHPARVHGHHLGETLVLEEVRPRQKAEQRGTDLRTNLCEMWTCKIFVTDMPTCIYILVVEICEFVVMKALIF

SEQ ID NO: 27266 - protein, 350 aa, Zea mays subsp. mays
  misc_feature (1)..(350): Ceres Seq. ID no. 15180692
MAPPRWRGSLTAGYQFFLALGVLIANLVNYATAHASWGWRVSLGLAGAPAVAIFVGALFLTDTPSSLVMRGRADGARAALLRVRGPDADVEAELRDIAKAVEAARRGEDGAFRRMATRREYRPHLVLAVAVPMFFQLTGVIVLAFFAPLVFRTVGFGSSAALMGAVVLGAVNLGSLVLSTFVIDRYGRKVLFMAGGVQMVVCQVAIAWIMGAKIGKGGEAAMAHPYAVAVLVFTCLHTAGFGWSWGPLGWVIPSEIFPVDIRSAGQAMNVSIGLCLTFVQTQSFLAMLCRFKYATFAYYAAWVAVMTVFIALFLPETKGIPLESMGTIWVKHWYWKRFVHDRKQSNVALT

SEQ ID NO: 27267 - protein, 282 aa, Zea mays subsp. mays
  misc_feature (1)..(282): Ceres Seq. ID no. 15180693
MRGRADGARAALLRVRGPDADVEAELRDIAKAVEAARRGEDGAFRRMATRREYRPHLVLAVAVPMFFQLTGVIVLAFFAPLVFRTVGFGSSAALMGAVVLGAVNLGSLVLSTFVIDRYGRKVLFMAGGVQMVVCQVAIAWIMGAKIGKGGEAAMAHPYAVAVLVFTCLHTAGFGWSWGPLGWVIPSEIFPVDIRSAGQAMNVSIGLCLTFVQTQSFLAMLCRFKYATFAYYAAWVAVMTVFIALFLPETKGIPLESMGTIWVKHWYWKRFVHDRKQSNVALT

SEQ ID NO: 27268 - DNA, 1485 bp, Zea mays subsp. mays
  misc_feature (1)..(1485): Ceres Seq. ID no. 15180769
atctcggttttattcaaatgctcaacacgcttgtttcccgcaggagcgtggtcagatcctccacaggttcgcggacctgatcgacgagcacgtggaggagctggcggcgctggacacggtggacgccggcaagctgttcgccgtgggcaaggcgcgggacatcccgggcgccgcgcacctgctgcgctactacgccggcgccgccgacaaggtgcacggcgcgacgctcaagatggcgcagcggatgcacgggtacacgctcaaggagcccgtgggcgtggtgggccacatcgtgccctggaactaccccaccaccatgttcttcttcaaggtagggcccgcgctcgccgcaggctgcgccgtcgtcgtcaagcccgccgagcagacgccgctgtccgcgctcttctacgcgcacctcgccagggaggccggcgtccccgccggcgtgctcaacgtcgtgccgggattcgggcccacggccggggccgccgtcgccgcccacatggacgtcgacaaggtcagcttcaccgggtccacggaggtcggccgcctcgtcatgagggccgcggccgagagcaacctcaagcccgtgtcgctcgagctgggcggcaagtctcccgtcatcgtcttcgatgacgccgacctcgacatggccgtcaacctcgtcaacttcgccacctacaccaacaagggcgagatctgtgtggccggcacgcgcatctacgtgcaggaagggatctacgacgagttcgtgaagaaggccgccgagctcgccagcaagtccgtggtcggagacccgttcaacccgagtgtcagccaaggcccccaggttgacaaggaccagtacgagaaggtcctcaggtacattgacatcggaaagcgcgaaggcgccacgctggtcaccggagggaagccctgcggcgacaataagggctactacatcgagcccaccatcttcacggacgtcaaggacgacatgacgatcgcacaggatgaaatctttgggccggtgatggctctcatgaaattcaagaccgtggaggaggtgatccagaaagcgaacaacacccggtacggcctggccgccggcatcgtgaccaagaacatcgacgtcgccaacaccgtgtcgcggtccatccgcgccggcgccatctggatcaactgctacttcgcgttcgacccggacgcgccgttcggcgggtacaagatgagcgggttcggcaaggacatgggcatggacgcgctcgacaagtacctgcagaccaagaccgtggtcactccgctgtacaacactccatggctctgaccgaccgacctcatccctgtccgatgaacagttcaacatcacaaaacaagaagaaacatgtcttgtaagatactccaaaggatcggttgcctgcagtagctgtactcttacacctgcatggattgatgatgtcgtagtgcaatgtaacattcagaacaataaagacatgtttcggactg

SEQ ID NO: 27269 - protein, 434 aa, Zea mays subsp. mays
  misc_feature (1)..(434): Ceres Seq. ID no. 15180770
SRFYSNAQHACFPQERGQILHRFADLIDEHVEELAALDTVDAGKLFAVGKARDIPGAAHLLRYYAGAADKVHGATLKMAQRMHGYTLKEPVGVVGHIVPWNYPTTMFFFKVGPALAAGCAVVVKPAEQTPLSALFYAHLAREAGVPAGVLNVVPGFGPTAGAAVAAHMDVDKVSFTGSTEVGRLVMRAAAESNLKPVSLELGGKSPVIVFDDADLDMAVNLVNFATYTNKGEICVAGTRIYVQEGIYDEFVKKAAELASKSVVGDPFNPSVSQGPQVDKDQYEKVLRYIDIGKREGATLVTGGKPCGDNKGYYIEPTIFTDVKDDMTIAQDEIFGPVMALMKFKTVEEVIQKANNTRYGLAAGIVTKNIDVANTVSRSIRAGAIWINCYFAFDPDAPFGGYKMSGFGKDMGMDALDKYLQTKTVVTPLYNTPWL

SEQ ID NO: 27270 - protein, 357 aa, Zea mays subsp. mays
  misc_feature (1)..(357): Ceres Seq. ID no. 15180771
MAQRMHGYTLKEPVGVVGHIVPWNYPTTMFFFKVGPALAAGCAVVVKPAEQTPLSALFYAHLAREAGVPAGVLNVVPGFGPTAGAAVAAHMDVDKVSFTGSTEVGRLVMRAAAESNLKPVSLELGGKSPVIVFDDADLDMAVNLVNFATYTNKGEICVAGTRIYVQEGIYDEFVKKAAELASKSVVGDPFNPSVSQGPQVDKDQYEKVLRYIDIGKREGATLVTGGKPCGDNKGYYIEPTIFTDVKDDMTIAQDEIFGPVMALMKFKTVEEVIQKANNTRYGLAAGIVTKNIDVANTVSRSIRAGAIWINCYFAFDPDAPFGGYKMSGFGKDMGMDALDKYLQTKTVVTPLYNTPWL

SEQ ID NO: 27271 - protein, 353 aa, Zea mays subsp. mays
  misc_feature (1)..(353): Ceres Seq. ID no. 15180772
MHGYTLKEPVGVVGHIVPWNYPTTMFFFKVGPALAAGCAVVVKPAEQTPLSALFYAHLAREAGVPAGVLNVVPGFGPTAGAAVAAHMDVDKVSFTGSTEVGRLVMRAAAESNLKPVSLELGGKSPVIVFDDADLDMAVNLVNFATYTNKGEICVAGTRIYVQEGIYDEFVKKAAELASKSVVGDPFNPSVSQGPQVDKDQYEKVLRYIDIGKREGATLVTGGKPCGDNKGYYIEPTIFTDVKDDMTIAQDEIFGPVMALMKFKTVEEVIQKANNTRYGLAAGIVTKNIDVANTVSRSIRAGAIWINCYFAFDPDAPFGGYKMSGFGKDMGMDALDKYLQTKTVVTPLYNTPWL

SEQ ID NO: 27272 - DNA, 1453 bp, Zea mays subsp. mays
  misc_feature (1)..(1453): Ceres Seq. ID no. 15180813
tagaacatcctaatcgaaaacacatggtaaatacatggggatattctacaatcaacttttttgcacccatgagtcgttatgctagtgcgggtggtggacctgtggctgcttccaaagagttcaaacagatggtgaaggcatttcataatgctggaattgaggtcttgcagagtacctctttacttgctgctacatgttctaagttccaagtccatggagagacttatatgatggagcctcatcaatttctggatgaatttatgagaaaaacaaattgttgtccttgtaggtctattacatattagatctcaacaacagtgcacagctgctgaacttctcgggttgcgggaatacactaaactgcaaccatcctgttgtcaaggagcatgtactcgacagtttgagacattggaaattgccaaaggctctgtattgtctagatgtaagatcattgctgaaccttgggactgtggtggcctttatctagtagggaggttccctaattgggacaggtgggctgaatggaatgggaagtacagagatgatattcgaagatttattaagggagatcctggtatgaagggggtgtttgcaactcgtgtttctggttctgcagatctctaccaggcagcatctgtatagcaagcagtggcgagggatgaaaacggtcggaaacggtatttattcggtgaacaatcggaagccttaccatagtgtgaactttgtaattgctcatgatggatttactttatgcgaccttgtttcgtataactccaagcacaatgatgcaaatggagaaggtggtcgtgatgggtgcaatgacaactacagctggaactgtggcattgaaggaggaacaaatgatttgaatgtgttaagtcttcgttctaggcaaatgaagaacttccatgtggcattaatgatttcccagggcactccaatgatgctgatgggagatgaatatggtcacacgcgttatggaaacaacaatagctatggacatgatactcacataaataattttcagtggggccagttggaagaaagaaaggatggccatttcaggtttttctcagagatgatcaagtttcgtcataaccatcctatactgagacgagacaggtttctcaacaaagtggataccaacctggaatcaccaaaggatattgtcccagaaggggtgccattcacaggttcagggtacaggattgctccttactctttttttgaagattcagtaggggaagcccctactgagattttattgaaaatgaaaaatgaaaaggttacaacttagcctggttacaaaagataatctgaaagatctaattaaacagttacaagcattggagtaagtaaaacaactcttatgtctgtcacaaactcagccaattcgggatggaagtgtcaaaattcccacgcgctctgtggatgatcaaccgaagctccttac

SEQ ID NO: 27273 - protein, 212 aa, Zea mays subsp. mays
  misc_feature (1)..(212): Ceres Seq. ID no. 15180814
MKTVGNGIYSVNNRKPYHSVNFVIAHDGFTLCDLVSYNSKHNDANGEGGRDGCNDNYSWNCGIEGGTNDLNVLSLRSRQMKNFHVALMISQGTPMMLMGDEYGHTRYGNNNSYGHDTHINNFQWGQLEERKDGHFRFFSEMIKFRHNHPILRRDRFLNKVDTNLESPKDIVPEGVPFTGSGYRIAPYSFFEDSVGEAPTEILLKMKNEKVTT

SEQ ID NO: 27274 - protein, 133 aa, Zea mays subsp. mays
  misc_feature (1)..(133): Ceres Seq. ID no. 15180815
MKNFHVALMISQGTPMMLMGDEYGHTRYGNNNSYGHDTHINNFQWGQLEERKDGHFRFFSEMIKFRHNHPILRRDRFLNKVDTNLESPKDIVPEGVPFTGSGYRIAPYSFFEDSVGEAPTEILLKMKNEKVTT

SEQ ID NO: 27275 - protein, 125 aa, Zea mays subsp. mays
  misc_feature (1)..(125): Ceres Seq. ID no. 15180816
MISQGTPMMLMGDEYGHTRYGNNNSYGHDTHINNFQWGQLEERKDGHFRFFSEMIKFRHNHPILRRDRFLNKVDTNLESPKDIVPEGVPFTGSGYRIAPYSFFEDSVGEAPTEILLKMKNEKVTT

SEQ ID NO: 27276 - DNA, 1355 bp, Zea mays subsp. mays
  misc_feature (1)..(1355): Ceres Seq. ID no. 15180828
gatagttacgcgaccaactggttcacaacattgcgcaaaacaaagcagagcatagcatcacagttcacagcagcgcgcggaggcaaggcgcacaacagcgtgcggtggcgcggcgtgcagagcagccgcgcgagcgaagctagtagcgccgcacggaatcgcagagaaggaagtggggagggttaccggcgtcgacgagcgagcaggctctaggtgcgatttactcgtgcagaagctccgacaactatttctgaattacctggactggtttgtgacgatatctctggagggcaagaaaacattccgattcctgccactaacttggttatgatccacctgttcctccatctggtttcacatacttgaagtctctaaaaattccaaaggacatcaagatcccatctagtattattggctgtgattgtgaaggagattgtgctagcaacaaaaattgttcatgtgctcagcgcaatggttctgatctgccttatgtatcatataagaacattggcaggttggtggagcccaaagcagttgtatttgaatgcggggctaactgcagctgcaaccatgattgtgtaaacagaacatctcaacagggttgcagtatcacttagaggtatttaagacagcttcaaaaggttggggagtcaggacttgggacactatcctccctggggctcccatctgtgagtacacgggggtgttgaggaggactgaagatctggatggttcacagaacaaccattgttttgacattgattgtcttcaaaccatgaaaggtttggatggaagggagaaaagagctggatctgaaatgcacctgcctaatctttatccagagaatgactcagatgcaccacctgcacctgagtactgcatagacggcagttccattggcaattttgcaagatttataaatcatagttgccaacctaaccttttcgtccagtgcgtcatgagctcacacaacgatgttaaactagcaaaagtgatgctttttgctgctgacacaatacttcctcttcaggagctatcctatgactacggttatcgcttggacagtgttgttgggcctgatggtaaaattgtgaagctgccatgccactgtggtgctccagattgccggaagcgcctctactagacctgcagtgtgtttccattttgattttgcaggaaacaacctatattgtaggaaagcattcatgttatttatgtagttggcatgctctgatatatagcgaaagaggagcaacttaatctccttttagagcattcttattttgtgataattggaggacatgctggtcatggtagcatattttgcaggaaatcaattaactgatatgtctggg

SEQ ID NO: 27277 - protein, 122 aa, Zea mays subsp. mays; identical to SEQ ID NO: 26728
  misc_feature (1)..(122): Ceres Seq. ID no. 15180829

SEQ ID NO: 27278 - protein, 108 aa, Zea mays subsp. mays
  misc_feature (1)..(108): Ceres Seq. ID no. 15180830
MHLPNLYPENDSDAPPAPEYCIDGSSIGNFARFINHSCQPNLFVQCVMSSHNDVKLAKVMLFAADTILPLQELSYDYGYRLDSVVGPDGKIVKLPCHCGAPDCRKRLY

SEQ ID NO: 27279 - protein, 70 aa, Zea mays subsp. mays
  misc_feature (1)..(70): Ceres Seq. ID no. 15180831
DSYATNWFTTLRKTKQSIASQFTAARGGKAHNSVRWRGVQSSRASEASSAARNRREGSGEGYRRRRASRL

SEQ ID NO: 27280 - DNA, 808 bp, Arabidopsis thaliana
  misc_feature (1)..(808): Ceres Seq. ID no. 4904750
aactcgacacatcgagtcaactcgctaccagcactgatcggtttcccaattccgtccaccgtaactgccgtatccagccgttaacggccggctccgaagaagagtcctccgatcataaacggcgcgtttctcgggatccgaaagcgtgcaatacgctgcgtggatcttcatgaaatcgtccgccgacgagttatcccgactatttctcgctacatcgggatgacagatcctggctagtcgccggtaagctgatttgatctcttgactcgtcgagccgacgggaatttcaaggatctcgtagagagacgcggttgctgaaaatcgctgcgggatttggcgtaatctcggtagatcttcggcgcaggtgtaggacgcggtggttgtagaaagcgacggcgagatccgggaaatgcgtgacggtggtgaagtagaagagaacgacggagaagaagaagaagaagaagagagaaatggagtagcgaagaaggttggggaagaagaaagcatcgtgaaacgacggcgtttttgtttgtcttttggtttaagttccgatttgggttttgtgatgcagtgtgatttgagatgagaaattagaaaggtttatttataggggaagaagtgattagtacgtataacgtttagttagcttttaaataattgaagattaggcagattaatgtatcttgtccggttaagcaaaatcgaaccgggttgggtcagtgtgttttcggatcttgagaaagctgagtcagactaaaaggcttatccacagttgtaaataatgggagaagtgagataagattcaacg

SEQ ID NO: 27281 - protein, 58 aa, Arabidopsis thaliana
  misc_feature (1)..(58): Ceres Seq. ID no. 4904751
MRDGGEVEENDGEEEEEEERNGVAKKVGEEESIVKRRRFCLSFGLSSDLGFVMQCDLR

SEQ ID NO: 27282 - protein, 56 aa, Arabidopsis thaliana
  misc_feature (1)..(56): Ceres Seq. ID no. 4904752
LDTSSQLATSTDRFPNSVHRNCRIQPLTAGSEEESSDHKRRVSRDPKACNTLRGSS

SEQ ID NO: 27283 - DNA, 664 bp, Arabidopsis thaliana
  misc_feature (1)..(664): Ceres Seq. ID no. 4906357
ccaacactcgtaagtagtcctccttcatcattcatgcatatgtatatcagagtgaccattcacggctattaatgggtttcttaattgatcatatatgtgtgtatatatatatatagttattgtagcaactactacggccagtttgcggagcctaccgagatttgcgactggtgccgcagcgacgaccggaagctgagcaacgttgctagacatggcggttcttcttcaaagaagccttcttcttcggttaaatatgaaaatgacttctcaaacagatcggaatattcgcccggccaccggatcaagcataacaataaccgtcacgatcaagtagccaagggcgttgctggagatggaggcggagttacgtcgcctaagacggccacacgaaggtacaagcttctcaaagatgtcatgtgttagttccacctaaacgagaggtattagaagacttactataatcatactactctttcgagactgtgtgattaaattatgtataattagactacggagagagcaaattaaaaaagaaaacgtcgttgtttgttttcatccttttttcctttttactttgtgtttatatatatgaaatgaatgtgtgtttggcgtgagcttgtgttttcttaatcaccatataagctattaataactgcaatttgcg

SEQ ID NO: 27284 - protein, 40 aa, Arabidopsis thaliana
  misc_feature (1)..(40): Ceres Seq. ID no. 4906358
MAVLLQRSLLLRLNMKMTSQTDRNIRPATGSSITITVTIK

SEQ ID NO: 27285 - protein, 33 aa, Arabidopsis thaliana
  misc_feature (1)..(33): Ceres Seq. ID no. 4906359
MCVYIYIVIVATTTASLRSLPRFATGAAATTGS

SEQ ID NO: 27286 - DNA, 722 bp, Arabidopsis thaliana
  misc_feature (1)..(722): Ceres Seq. ID no. 4914446
attcaaaagtgtataatttggaaactggaatattctttcatgggaagtctggccgaagaaggcggcgacctccttcttcctcgtggcggtgtctccggtggtgccaaaaccggggaaggactttgcagcggtgataaaggcgttgtaagtgtagaaacctctagcaggacaagcggcatcattcctatgcttaagcatatcatcgaactgagaacttgaaatgatgcccgaaagatcgccggtgggtccaggaggagtaccaccgggagtgcactggctttggcagccaggctgcttacagtatggttcggtgttaccgcaccagccgaactcgctgcagcatagaccgttggggcagagtgctcctccagcttggcgaccacattgctcggccgaggataatgataggagaagtgaaaagatgagaaagagaaaaagattagtcttcattttgttcaatgttctatggttttctttttgtggaggcatgaaagatatatatagatccaattaatgaatgttttatcacatcaaattctatctttttccatagtttattgtttgttatgtctatggagtgtggctatggggaacaaacagtatttggtaggtttgtttttgattatatttattttccttccgtcattgttgctaggttagatattgatttgtttttttgggggattatcatgttaattccaagtaatgagaactttctatgt

SEQ ID NO: 27287 - protein, 97 aa, Arabidopsis thaliana
  misc_feature (1)..(97): Ceres Seq. ID no. 4914447
MMPERSPVGPGGVPPGVHWLWQPGCLQYGSVLPHQPNSLQHRPLGQSAPPAWRPHCSAEDNDRRSEKMRKRKRLVFILFNVLWFSFCGGMKDIYRSN

SEQ ID NO: 27288 - protein, 96 aa, Arabidopsis thaliana
  misc_feature (1)..(96): Ceres Seq. ID no. 4914448
MPERSPVGPGGVPPGVHWLWQPGCLQYGSVLPHQPNSLQHRPLGQSAPPAWRPHCSAEDNDRRSEKMRKRKRLVFILFNVLWFSFCGGMKDIYRSN

SEQ ID NO: 27289 - protein, 72 aa, Arabidopsis thaliana
  misc_feature (1)..(72): Ceres Seq. ID no. 4914449
IQKCIIWKLEYSFMGSLAEEGGDLLLPRGGVSGGAKTGEGLCSGDKGVVSVETSSRTSGIIPMLKHIIELRT

SEQ ID NO: 27290 - protein, 59 aa, Arabidopsis thaliana
  misc_feature (1)..(59): Ceres Seq. ID no. 4914450
MGSLAEEGGDLLLPRGGVSGGAKTGEGLCSGDKGVVSVETSSRTSGIIPMLKHIIELRT

SEQ ID NO: 27291 - DNA, 1520 bp, Arabidopsis thaliana
  misc_feature (1)..(1520): Ceres Seq. ID no. 4944075
ataaggaaatcagggtttttctcttctttttttttttgtttaaaccaatctggttttacttttcaagtttggatataaacccaaatcgaatcgagaaaccataccaaaccactcagagattccgttatccatatttcccctgtttttccattaaggtaggattaatccatcaaataaaacattttgaaaatgtgctatgaatacatcaaatgagaggtttggttcatgttttattaatcaatccgaataacattacatatttgtctatattattgactcaaatatattttttcgtaatcctagagataagcttggtttacttgcaaatttcaagaggagcaccacacaaacacttgttgtgaaaataggaataagaatcaaatgtctgaagtttccctccagttgggatgtgtccacacagtttgttgtagctaacattgaagaactgaagaggagcttcagtccactgcaccggaatattcccagtgatcccattgtggttcaagtccaagataccaagtgttttagggatatcaacctttgagatatcgaactggaacatgtttcttgataagtcaatagaccaggttgttttgttggaaccaaacaacatcgaagcatcaccttggagcttgttgcgggataaatcgatccggttaaagtcgatgttgcctaatgatttgggtattggaccggagagctggttatgtgataggcgaaggtcagggactgttcctggaaacgacccaaatgactctggtatggaacctacaacataaagatcgttgtttagacaagacactgaatgatgtaataaaggaaaagatcgttctttacctgtaagtttgttcctgctaagttcaagagccaagattttaggtaacgtagagagagaacttggaatggaaccagagagatcattgaaggaaagttctaagaactcgagattcttgagctgacttataaagtcaggaattggacctgtcagattcgtccagctgagcctgagcattcggaggttcttgagtttggcgatggtgggttggattgtaccggtgaggttagagagtttgcggaagacaagggtctcaagatacggcaagtcaccgacttcagccgggatctgaccggagatctggccggagaatatggttaaggcggtaacacggtggttaacggtggcgtcgccgcactcaaggcagtaccaggagcaacagtcggtttgagggtcccatgaagcgaggtgataagggttgtttagagatttcttgatcttgaggagggtgtttttgtcattttggttacagagatctttagacaaacaggtcgtgaggaatgtgaacaagaacaagagacacaatgtcgctgtcttatccatggtgttggttttgaattttgatggaaagtgttagtgatacatatacatactatatagtgagtgatatagacttagagagacggattcgatttgatctctgtttccacatggaccgtaataatagtcaatacatatcatatag

SEQ ID NO: 27292 - protein, 72 aa, Arabidopsis thaliana
  misc_feature (1)..(72): Ceres Seq. ID no. 4944076
MFLDKSIDQVVLLEPNNIEASPWSLLRDKSIRLKSMLPNDLGIGPESWLCDRRRSGTVPGNDPNDSGMEPTT

SEQ ID NO: 27293 - protein, 65 aa, Arabidopsis thaliana
  misc_feature (1)..(65): Ceres Seq. ID no. 4944077
KEIRVFLFFFFLFKPIWFYFSSLDINPNRIEKPYQTTQRFRYPYFPCFSIKVGLIHQIKHFENVL

SEQ ID NO: 27294 - protein, 55 aa, Arabidopsis thaliana
  misc_feature (1)..(55): Ceres Seq. ID no. 4944078
MIWVLDRRAGYVIGEGQGLFLETTQMTLVWNLQHKDRCLDKTLNDVIKEKIVLYL

SEQ ID NO: 27295 - DNA, 673 bp, Arabidopsis thaliana
  misc_feature (1)..(673): Ceres Seq. ID no. 4975571
aatgatgggcgactgtgaatcatatagggtgaccattgccagcgtttgagctcgtcgtgtgccgtcgacgttcccagcggaagaagcacatctgatggtccaagagatactcctgccatcaacgaaaaccggtgagaagaaaccaaaggtggtgttggtgctagtccagatctagagctttttgataagttgatgaagtcttgctctgatgtttgagaagaggagctgttggactgttgtgaattttcttgttttgggttcgaagacagagatgcatccaagatctgagtcagatcggagccaatagagcatcgatatactcttccgtcacaaagaaaactttcagtgaagaagctcacataaaaaaggagatttagatattttgagagatttgagataacggaggaagattcaatgaagataaagcttatatagaacacatgaaggttgatgggagttgataagtcccgacgccggcaatcggaaccacccccggcgtcagagagcatggttgtcgagagtgtctcgatttcggtgcctaggagctttttaagtcaccaagactagaaaaaaaaattcacatgttatttttgtacaaatactaaaatgtaatactagttgaactttacatatatgtttatgaaggcaaatcttaacaaactcaaagatttgt

SEQ ID NO: 27296 - protein, 38 aa, Arabidopsis thaliana
  misc_feature (1)..(38): Ceres Seq. ID no. 4975572
MGVDKSRRRQSEPPPASESMVVESVSISVPRSFLSHQD

SEQ ID NO: 27297 - protein, 32 aa, Arabidopsis thaliana
  misc_feature (1)..(32): Ceres Seq. ID no. 4975573
MFEKRSCWTVVNFLVLGSKTEMHPRSESDRSQ

SEQ ID NO: 27298 - DNA, 976 bp, Arabidopsis thaliana
  misc_feature (1)..(976): Ceres Seq. ID no. 13610689
atgttcttaacccaaagaaacttttcattgagaccttctcttgttcatgactttcttcaacagactctcacgaccaggaaaaggactttgaatctttggctcaactttcccaaaacacccttctgctcacttctattcactgtcttgccatcatctctcccaagactctgtctcatcctttctctcctctgttttctcctccatccattctcatcttcctcttcttccttcttcttaatctctcttcttcttaccatttctcctctctcttcttcttcttcgttcgccttccttaacctaggaatccgaccacctttgcttgtccctaaaagctcaaaattgattttgctccaaccaatcttatcttcattatcccaaccaaatctctcactaatctccaacaacatcgaaacagagtttacctcttctctactcttccttacagaagttaaagctctcatgctctcatcacttccatggaggattttctctgcaaattcccactcagttctatctttataaacatcgtcttcgagcacttcatcagcaagctttgcccaatactcaaaaactcctgcacgaagattctttgagacccatttaagataagaagaaggcaaagtaccaagcattttgcccttgtgtttgccgaagtctatgattgtgtctctggcggctagggtttcgatgatttgaagttttttgattaagggtttagactgattggtggagaagataccattagatgaagaaagatttcttcttggtctgaaagatgatgatgatgagattctgaagatggtttttgttgttactgcagcagagtgaggactgtggaacaagaccaccgagaaactcattgttgtgtccccaaaatattgtctattttttcttgaatcctataaaatacatttagggggtgttattcgttaatggattttaatagaattgaaattcaacactaatttactgttat

SEQ ID NO: 27299 - protein, 173 aa, Arabidopsis thaliana
  misc_feature (1)..(173): Ceres Seq. ID no. 13610690
MFLTQRNFSLRPSLVHDFLQQTLTTRKRTLNLWLNFPKTPFCSLLFTVLPSSLPRLCLILSLLCFLLHPFSSSSSSFFLISLLLTISPLSSSSSFAFLNLGIRPPLLVPKSSKLILLQPILSSLSQPNLSLISNNIETEFTSSLLFLTEVKALMLSSLPWRIFSANSHSVLSL

SEQ ID NO: 27300 - DNA, 663 bp, Arabidopsis thaliana; identical to SEQ ID NO: 2320
  misc_feature (1)..(663): Ceres Seq. ID no. 13648081

SEQ ID NO: 27301 - protein, 53 aa, Arabidopsis thaliana; identical to SEQ ID NO: 2321
  misc_feature (1)..(53): Ceres Seq. ID no. 13648082

SEQ ID NO: 27302 - protein, 49 aa, Arabidopsis thaliana; identical to SEQ ID NO: 2322
  misc_feature (1)..(49): Ceres Seq. ID no. 13648083

SEQ ID NO: 27303 - protein, 47 aa, Arabidopsis thaliana; identical to SEQ ID NO: 2323
  misc_feature (1)..(47): Ceres Seq. ID no. 13648084

SEQ ID NO: 27304 - DNA, 1446 bp, Arabidopsis thaliana
  misc_feature (1)..(1446): Ceres Seq. ID no. 13650727
gtggcatcttaatcaaattcttcttcgccttcactttcaattgtctctccaatatcctcaccagatctgaaaccggcaccggcgacgtgtttccgaggttaaacactctcaattgcgccggacctctcttcttccctccactccctgtactcttctccgccgtatctagcgccgctaaacatcccttcactatatcgtctatgtaagtgaaatccctagccaccgttccgtgattcgccgattcgaatatcgaaatcgatttgccttttagaatatctttagtgaagaagaaatacgccatgtctggtcttccccaaggtccatacacggtgaaaaatcttaatccggttagagataatccatagatgtggttgtaggtatgtgcgatctcttcgccggcttttttagtggcggcgtataaactcgccggttgatctgttttatctttctccgagaacggaactttggtgttgagtccgtagacggagctagacgaagcccagactatagcaggttgtggattcacagatttgcagatctcgaggagattgacgaatccggcgatgttgctatgaacgtacgagctagggttttccattgcgtaccgtacaccagcttgagctgctaaatgcataacgtgtgtgaaggagacgatcttgaatagcttacggagtaattcgacgtcgtttatgtctccttctacgatgaagatcccacttctctcgagtaaagctcgtcttgctcgtttcagagatggatcgtagtaatcgttgaagttgtcgaggccgattacgccgtctccgcggcgttttaatgcggcggagacgtgtgttccgacgaaaccagctgctccggttactaaaactgtgattccgttgtttgttgaggttcggattcgagctgaggatctgagacgtttttcccaagctggtcctccgtaggtgttggttcggagtgaacggcgagatggatcggacggtgaagaagggttaatggacggtggagatcggaggaagagtagagagatgagacagaggaggaagaaggagaaaaatgcaaactttgtgagagaagattggaatctgagacgatgcaagtaggaagatttctccatcttgaatttgcctgggcttgaagaacatggggattgaagattttagagatccaaatcatagggaaaatatgaagaagaagaagaagaagaagaagaagaagaagaagaagaagaagaagaagagagtcaaaaaaattactgtaaaaatttgttgactcttctaaagatttgttgtcgagtcttgaaatttgattggtgagatactaatactccaagattttcgggaagccactcgtcccaaaagttttgaatttgaaccaaagttttaaacttttgttaatagatttgttgcggatagttgctaaatacaaaaatggactctaaatttgaat

SEQ ID NO: 27305 - protein, 67 aa, Arabidopsis thaliana
  misc_feature (1)..(67): Ceres Seq. ID no. 13650728
GILIKFFFAFTFNCLSNILTRSETGTGDVFPRLNTLNCAGPLFFPPLPVLFSAVSSAAKHPFTISSM

SEQ ID NO: 27306 - protein, 42 aa, Arabidopsis thaliana
  misc_feature (1)..(42): Ceres Seq. ID no. 13650729
MGIEDFRDPNHRENMKKKKKKKKKKKKKKKKKRVKKITVKIC

SEQ ID NO: 27307 - protein, 35 aa, Arabidopsis thaliana
  misc_feature (1)..(35): Ceres Seq. ID no. 13650730
MDGGDRRKSREMRQRRKKEKNANFVREDWNLRRCK

SEQ ID NO: 27308 - DNA, 430 bp, Arabidopsis thaliana
  misc_feature (1)..(430): Ceres Seq. ID no. 13593557
aaataatttacaaacagaattttagaccatttgagaaatttctacaaaatcaatcgagaaaagcaaattacatgaatcattgtcaaacagtacaataatgatcactacaagggagcttataaaagaagagcgaggaggaaagaggaagcagcaccaatatggaaggagcctgggaacataatagttgaggctgcagaggatgttgttgtgttgcgaggccctctgtatttcacccttttcttcatcaccactgcgagatttcttgagccatgctcaccctcagctgaacacaaaagaaaggcctgagagaagaagaagaggaatacgatggagaagaggagtatgcgtctggctttgatcatctcacccatctttggtttttgcgttttgcttaattctgatggatgtgagtattacatatataaagatt

SEQ ID NO: 27309 - protein, 52 aa, Arabidopsis thaliana
  misc_feature (1)..(52): Ceres Seq. ID no. 13593558
MLLCCEALCISPFSSSPLRDFLSHAHPQLNTKERPERRRRGIRWRRGVCVWL

SEQ ID NO: 27310 - protein, 34 aa, Arabidopsis thaliana
  misc_feature (1)..(34): Ceres Seq. ID no. 13593559
MEKRSMRLALIISPIFGFCVLLNSDGCEYYIYKD

SEQ ID NO: 27311 - protein, 31 aa, Arabidopsis thaliana
  misc_feature (1)..(31): Ceres Seq. ID no. 13593560
IIYKQNFRPFEKFLQNQSRKANYMNHCQTVQ

SEQ ID NO: 27312 - DNA, 819 bp, Arabidopsis thaliana
  misc_feature (1)..(819): Ceres Seq. ID no. 13646089
aactttttaggtaaatatataaatttataacctgaggattccaagagaggcttgaaagagaccagcaaagaaggtagaagagaaggctagctgtagaaagagaacaggatcgtctacgggagatacttgttgccttagcattgatcctaagattaacgacgctatggagactggtcccactgctagatctcttgagcttcccaagaccgcataaaccaacggtggcacgaagctcgagtctacacatacatcaacacacgtgtttatgtaacggtctttaatgtttcatgtatattctattcaattttactttcagattcttacatagaccaacgattggtggcaaatttgctagcttcgcgtaactaatcccctgtttttatgaaaaccaagaagacgaagattataatcaagaattgcataaaatggtggtcgttattgatcggaacgtgaaaatgggtcgtcgtcggatttttgatacgtacgtacctgaggaatagctaaactagcgatggtaagacctgaaacgacgtcggatttgagtaggctgaagctgtactcaggacaccattggaggattggaaaaatgtattgagcggcgcgtatgagcttggtacggtttggttgtcctctgaactgtcttaagggatcgtccgggaagaaagtctccttcagttttgtctttagctttgccaccgtgctcttatgcggcggagcaaccaccttgtgcacctccattaattggttttcctaagaatttttgtcaccaatgtgtgatgtttcctctcttggctctttgctgataatttaaacatgagt

SEQ ID NO: 27313 - protein, 49 aa, Arabidopsis thaliana
  misc_feature (1)..(49): Ceres Seq. ID no. 15219033
MSLVRFGCPLNCLKGSSGKKVSFSFVFSFATVLLCGGATTLCTSINWFS

SEQ ID NO: 27314 - DNA, 1244 bp, Arabidopsis thaliana
  misc_feature (1)..(1244): Ceres Seq. ID no. 13647121
gagaaacaacaatcaaaatacaattatacaatattaaacatttaacaaaataaaaaaatacaacttaaaactttaaaatttgagttataaaatttcgtctcgcggtgaattatacatttaaatcaaacaatagcataaatttattaaatcatcctacaaaatattcagttattttttaattaatgaaaatataagcccgcggtataccgcaggttaatatctagataaaaaaaataatcaaatttcaattctataaacatactaaataatatatctaaatatacaaaatataaaaaataacaaataattataagactgtgaattatatattacgaaagtaattactgtcaacactaaaataaaatatagacccgcggtataccgcgggttaaaatctagtatatactaaaactgttggtttttttttaatatataaattaacaaaatttatatatgctgcaaaacgagacctggttatatttggttatgagttgaaatagcaagttacctgagcaccaaggagtttcatggaaagtacattaaaggattgtttctctatatcagcagctcccatgaaaacagtacactccaaggagagctttgcacatgcagccgctgtggcgactccatgttgtccggctccagtggccgccaccacacggctgcaaccaagccgccgggaaatcatggcctgagcgagagcattattgattttgtgagacccacagtggctaagatcttcccgtttcaagtatatctctggtccaccttcgatggttggaactatgttcttgtagtgttcggttagacgttcggcgaagtagagaggcgtttctcttcctacgtagtctcttaacgctgtggtaagctcctcctgaaattcgtgatcgcacctaacaaagttaaattcgtcttcaagttctatcaggcgagacatcaatgtctccggtacaaatttcccaccgaacctcccgaatttaccgttaccgtcaccacgaagaaactgcctcttgtcggttcttgttgggaccgaatccaacgatggaccactattactgctgagtgcattgatttcacggtggtggcgttttgtggaaacgccgcaaacaatcaagtgtgtcatacggtggtttcttgccggaaccctaagaagtggctgccctcgtacctggattttactggacaacattttctctctcttttctttcttccagaatacttgttatatctatttgagattttct

SEQ ID NO: 27315 - protein, 59 aa, Arabidopsis thaliana
  misc_feature (1)..(59): Ceres Seq. ID no. 13647122
MLSGSSGRHHTAATKPPGNHGLSESIIDFVRPTVAKIFPFQVYLWSTFDGWNYVLVVFG

SEQ ID NO: 27316 - protein, 55 aa, Arabidopsis thaliana
  misc_feature (1)..(55): Ceres Seq. ID no. 13647123
MESTLKDCFSISAAPMKTVHSKESFAHAAAVATPCCPAPVAATTRLQPSRREIMA

SEQ ID NO: 27317 - protein, 40 aa, Arabidopsis thaliana
  misc_feature (1)..(40): Ceres Seq. ID no. 13647124
MKTVHSKESFAHAAAVATPCCPAPVAATTRLQPSRREIMA

SEQ ID NO: 27318 - DNA, 594 bp, Arabidopsis thaliana
  misc_feature (1)..(594): Ceres Seq. ID no. 13647621
ggggaaataatggcgtagctctactagctcaagtttgagctctcccataatgagtacatcaagcttgtcctccatctcctgcctcctctggagatctctctcatgatgacttcgaaggtatgagaaactacagagataatgttaaactgcaacaaggttttagaacaccgggcagcccttagcgacgatccctttctctgttgggcaatttgccaaagggcaatggtctgtgttctcattcccccaccaatctggtaagcttatgttattgttctgtaacgcaaagtagatcaacactcccataaccgcagtgcctgcatcaagagctgcagagaggatgtagttatgccttgcccaccatcccttgtacctcctgaagatatagtagttgaacacgatcccaacagcgaaccacgaccagtaatgcacagccttggccattggcatcacattagcccctgagaagatcaagggaatatgaatctgatgtatccacttcttctccgggaatttccttgcaaagaaccagaccgggacaggagcaaggaagccaatgaggaagaaccagttcatcccggggtatatacctttact

SEQ ID NO: 27319 - protein, 39 aa, Arabidopsis thaliana
  misc_feature (1)..(39): Ceres Seq. ID no. 13647622
MLNCNKVLEHRAALSDDPFLCWAICQRAMVCVLIPPPIW

SEQ ID NO: 27320 - protein, 38 aa, Arabidopsis thaliana
  misc_feature (1)..(38): Ceres Seq. ID no. 13647623
MPCPPSLVPPEDIVVEHDPNSEPRPVMHSLGHWHHISP

SEQ ID NO: 27321 - protein, 39 aa, Arabidopsis thaliana
  misc_feature (1)..(39): Ceres Seq. ID no. 13647624
MNLMYPLLLREFPCKEPDRDRSKEANEEEPVHPGVYTFT

SEQ ID NO: 27322 - DNA, 970 bp, Arabidopsis thaliana
  misc_feature (1)..(970): Ceres Seq. ID no. 13647831
gtaccgggccccccctcgagtttttttttttttttttttgtttttttttttttttttttttttcaccaaaaatgtatgcatctaaataacataaaaataatgttacaaaattctgaggtatcaaaggaactaagttactcgaacacaattcctctcttcttctattgaagtgtgatttcatatatgaccccttccaagtttcctacggtacaccgagtcccagaaacttcattcatcagcatcccgtgctgagcgccttctctcaagattgcagaatccatctgtctagcccgtgatacgtatgctagtatgaatttgcagtttccttgtcccctgatccgcagaagctgctcaacactgtcaaatagcaatggcacacttgattgctgaaagcagatatcagctccaagaataagatcaaagccatcattgtgtttctttaaaatttgaccaagctgatcactatttccccattcaagctttgcagcctctaattcagctgagggtttgggaccacttgaatgtccatgaaggtcaatgtttttcttcagtatcttgagcacttcatcgttgtggtcagtaaaaataactttacggcaaaatttgctacataggactccagttataccaacgccagatcccaactccaaaactgaacatccctggagaatgtcagcattttctgagagataaccattcataagcatcgcaccaggccaaaccagctgccctgttaaatcaaaatcagttgaagctgattggagacagtagagctcaagaacatgagacccaaacgtaaacttcgtcaactgataatcatcgttgatgaagaaagactccaagcagactatctcttcttcttcttcttcaacaattgcttctctacctttatcactttcactgcccatctttgactctttgttactttgttagagaggtgcgcttgttgatcaactgcggcggttccgtc

SEQ ID NO: 27323 - protein, 55 aa, Arabidopsis thaliana
  misc_feature (1)..(55): Ceres Seq. ID no. 13647832
VPGPPSSFFFFFFVFFFFFFFHQKCMHLNNIKIMLQNSEVSKELSYSNTIPLFFY

SEQ ID NO: 27324 - protein, 51 aa, Arabidopsis thaliana
  misc_feature (1)..(51): Ceres Seq. ID no. 13647833
MFFFSILSTSSLWSVKITLRQNLLHRTPVIPTPDPNSKTEHPWRMSAFSER

SEQ ID NO: 27325 - protein, 43 aa, Arabidopsis thaliana
  misc_feature (1)..(43): Ceres Seq. ID no. 13647834
MRPKRKLRQLIIIVDEERLQADYLFFFFFNNCFSTFITFTAHL

SEQ ID NO: 27326 - DNA, 1254 bp, Arabidopsis thaliana
  misc_feature (1)..(1254): Ceres Seq. ID no. 13648040
aaatcgactccggcaatatcacacactccctctccgatacagatttccggcaattacctggccctgagccataaatggcgtctcgagtgtttccctcgagctcgtgtggccattaccgtagaataagcttgctggaatctgatgttgaagaagagccgctaagtattgtttgaaaccatcgagcagaagctttaggtatccttgtgagattgttcttgtagtcaacatagtagatcccaaaccggaccgtgtatcctgagttccattcccaattgtctagcaatgaccacacaaaatatcctcttacgtcgcattcatcattcctgcaaagtgaatgcgggaacatttcaaactcaagaatctttgtgaatctctgcaaagtgaagaactttaccttatggcagctgataagtttgagaggtgggtttccatatatgtctttaacatacactgccagtttcctgattccccatgggacaatgtgtagccagcttgaccctgcctgtttcaagtatggtaagcagcagcatgagacaacagaatgttatgagctacaatatacggttcgaccgatgacttccccttcttacagaaccaatgtcccagaagtgagcaccttcctggagcttgtatccctgtgtcatagccttggatcgataccccatgaggctcattgaaagtgatccagtacttcactctatctccaaatgctttgaaacagtttggagaagatgaagaagaagaagaatgtcacctggtaagctgaagaagctgttccgaatacaaacccatctggaaaatttgctcggctgatagattctgaagaaacatgatcaagaggtacgaagaagacgacgaagaacggaaacagaactaagacgagtctcatcaaagattccatttttgggtcgcgtgaatagagaaagtgagagagagagagagataaagggatggaattttatggtgaatgaaagatttggaggcaagaaaatggagttttggtgtgtgtgtgtttttaatttgtaaagttgaagaagaaagaggaagagtgcaaaacaaaagctcacgtcttttgaaggcttttctttggttttgacatttgttctctctacttttactgcacacgtttcttatacttgtgccaaaaactttttaaagttgtttactctcccttaagataaaaaaaagtttgttactgagtgacaaaaaaaaaaaagaaaaaaaaaaaaaaaaaaactcgagggggggcccggt

SEQ ID NO: 27327 - protein, 80 aa, Arabidopsis thaliana
  misc_feature (1)..(80): Ceres Seq. ID no. 13648041
MSLTYTASFLIPHGTMCSQLDPACFKYGKQQHETTECYELQYTVRPMTSPSYRTNVPEVSTFLELVSLCHSLGSIPHEAH

SEQ ID NO: 27328 - protein, 65 aa, Arabidopsis thaliana
  misc_feature (1)..(65): Ceres Seq. ID no. 13648042
MCSQLDPACFKYGKQQHETTECYELQYTVRPMTSPSYRTNVPEVSTFLELVSLCHSLGSIPHEAH

SEQ ID NO: 27329 - protein, 50 aa, Arabidopsis thaliana
  misc_feature (1)..(50): Ceres Seq. ID no. 13648043
MREHFKLKNLCESLQSEELYLMAADKFERWVSIYVFNIHCQFPDSPWDNV

SEQ ID NO: 27330 - DNA, 910 bp, Arabidopsis thaliana
  misc_feature (1)..(910): Ceres Seq. ID no. 13648101
cccccagtggtaattctgttgaagctgatgcaccaccatcaccaatcttgtctttatttatcttgaatcgatgatttttagctagcctacgcgccctacatctttcgagtttcttaagaaagctctctccaaaattctgaagcacttgacccaaaggcagtagctcatcatcctcatcattattatcataatgatcaattgtgttacttgcatcaaacgtttcagttgattctgaagaatccagaaaaaactttgaaatagatttcaaccaccagtcacgatatctttcagtaacagaagtcgtagcgacacgagaaggtatgtaaagcattaaaccatcaagagacttattgtaaccatcccatgcttctttttctgtgaagctgctatgatcagtaaccaaaccaggaagatcttgagccagcccgaactgcattgccactcggtttggatagtaatcctccacaatatcaaccccaacaagctgagaaactctcatacatcgagcaaaggaaacgaatccatcatcaagattgtcatcaacagtcatccacatagcttcttcagggtaaaaccgaggagggttccaaatctgtaaaggtttagtgtaaggacgccaatcaaaatcaacaagattcaatctcacattcttagatgtttgtgagtgccaccgagatatcctaggttcaccttttggtatcactctagcttttggactggtactcttgaatctctcccatgcccagagttggactaacttaaacagtgatttcagagtgacatttggagtggacttttctctagcagaagcttgaatttgacccaaatctctgtatagtctagctagaacagcaggagcaaaagcaatcctttcgcctctagctaaacgaacagccataaggagaacttt

SEQ ID NO: 27331 - protein, 69 aa, Arabidopsis thaliana
  misc_feature (1)..(69): Ceres Seq. ID no. 13648102
MISNQTRKILSQPELHCHSVWIVILHNINPNKLRNSHTSSKGNESIIKIVINSHPHSFFRVKPRRVPNL

SEQ ID NO: 27332 - DNA, 512 bp, Arabidopsis thaliana
  misc_feature (1)..(512): Ceres Seq. ID no. 13648511
gcaccaggtccccccccccccccccgaagtaggcgagctttttactaaaaacgctcctcgtcacggaaatcgagacactctcaccattcatgccttctgacgccggtggagcttccgttcgccagcgtctggatctatcaactctattcagcctctctttgttctgtataagcttggtctcgtttgattcttcttccatgatttcaattctctccaaacatccaaattccctttcccatgtgttcttcttccctgagggttttctttggctccgatctgtctcagaccttggatccatctctgtccctgaaaccaaaatcagaagatccacaacagttcagcggctctttacctcaaacatcagagagtatctcttggaccatcagatgtgcattttccggtgagaacgtcgacggcacacgacgagctcaaaagctgggctggtggtctccctctacgcctcaccgccgaccatcactccaatctttcagaacttcaaccctagggtttgg

SEQ ID NO: 27333 - protein, 104 aa, Arabidopsis thaliana
  misc_feature (1)..(104): Ceres Seq. ID no. 13648512
MPSDAGGASVRQRLDLSTLFSLSLFCISLVSFDSSSMISILSKHPNSLSHVFFFPEGFLWLRSVSDLGSISVPETKIRRSTTVQRLFTSNIREYLLDHQMCIFR

SEQ ID NO: 27334 - protein, 91 aa, Arabidopsis thaliana
  misc_feature (1)..(91): Ceres Seq. ID no. 13648513
MCSSSLRVFFGSDLSQTLDPSLSLKPKSEDPQQFSGSLPQTSESISWTIRCAFSGENVDGTRRAQKLGWWSPSTPHRRPSLQSFRTSTLGF

SEQ ID NO: 27335 - protein, 68 aa, Arabidopsis thaliana
  misc_feature (1)..(68): Ceres Seq. ID no. 13648514
MISILSKHPNSLSHVFFFPEGFLWLRSVSDLGSISVPETKIRRSTTVQRLFTSNIREYLLDHQMCIFR

SEQ ID NO: 27336 - DNA, 852 bp, Arabidopsis thaliana
  misc_feature (1)..(852): Ceres Seq. ID no. 13648571
tctgttgtggctgctcgaatggctccgcgatgtatctcgccacgtgtgctattaagttcccgtgagacgaattcactcctttgcttcgtcccgtcgtccccgaggagtaaagcaacatcgccgtgtcgtctttatgaacttggtttctgactgcttgtccacttggttctttcttcatcatttcagttagattcccaaccactttgagtcctctcggaacgcgtagagtgtcttctacgcgctcgaggacgatggagataccggaactggcgattttgggagccagttccggtgttgtgaaggcgagttttggattgctatccgcgatttgtcttaagatttcactagcggtgttgagaggattagcggtagttaagacagcgccaagagacatcacggagaggcagacaatggggatggagatggtgttgggagagaggactaggaccacgtcacctctccgtattcccacgtcgtggaggagacagtcggcgacacgatccacggccctccataaatcggagaagcttatgcggtggtccgtggctgcgtctatgaaggcggttttgccacggtacgtttgggaggagatgaatgttgtgatgtcgagtgattcttttgaaggaagtgccaaatggtttgcgtttactgtaaaatgtggagtgtgatgtgcagaaaccgttccttggatcgatcagagatgatgatctttgagaattcgccattattctttggttggattagattgatgcaagctctcatatagttgcacttatcttatggaaatatcagcatcttaataaggcatatgctaaacgttcactgaaactatctaaatatctttcactactt

SEQ ID NO: 27337 - protein, 138 aa, Arabidopsis thaliana
  misc_feature (1)..(138): Ceres Seq. ID no. 13648572
MEIPELAILGASSGVVKASFGLLSAICLKISLAVLRGLAVVKTAPRDITERQTMGMEMVLGERTRTTSPLRIPTSWRRQSATRSTALHKSEKLMRWSVAASMKAVLPRYVWEEMNVVMSSDSFEGSAKWFAFTVKCGV

SEQ ID NO: 27338 - protein, 85 aa, Arabidopsis thaliana
  misc_feature (1)..(85): Ceres Seq. ID no. 13648573
MGMEMVLGERTRTTSPLRIPTSWRRQSATRSTALHKSEKLMRWSVAASMKAVLPRYVWEEMNVVMSSDSFEGSAKWFAFTVKCGV

SEQ ID NO: 27339 - protein, 83 aa, Arabidopsis thaliana
  misc_feature (1)..(83): Ceres Seq. ID no. 13648574
MEMVLGERTRTTSPLRIPTSWRRQSATRSTALHKSEKLMRWSVAASMKAVLPRYVWEEMNVVMSSDSFEGSAKWFAFTVKCGV

SEQ ID NO: 27340 - DNA, 2077 bp, Arabidopsis thaliana
  misc_feature (1)..(2077): Ceres Seq. ID no. 14310053
acttcggatggccgcgaggtattgcatgagcgcggggtcctttgctgcgtaatctttttcgacctggccggcaactatcttggagtctgttttgatgatacaggtggtgactccgagggcccttagcttgcggaggccgaggatgactgcttcatattctgctatattgtttgtgcatctgtcggattccagagcgaagctgaggcgtgctgcatatctgtgcttgaccccggctggtgaggtgatgattgcagcggcgcctgcccccgcatggcaccatgcgccgtcgcaatggatagtccaaaccttttctgtggacgggtctggttgtgttattggcccagtccaatcgatgacgaagtctgccaggacttgtgacttgatggttgtcctgggctcgaagctgatgtggtagccggatagttcggctgcccacttggcaatcctcaccgatgcctctaggtttctgaataattcgccgagtcccctgtctgaggtgactcggaccttgaatgcttcaaagtagtggcgcagtttgcgcgaagacataacgactgcgtaagcaatcttctccagctctgtcatgttgcacttggacggtgtcagtacctcggagacatagtagacagggcattgcctgaccacgccctcaactgtctgctcctgcactagtgccgcgctgacagcgtgcggcgaagccgcgacgtagagcaatagggggagcgaggagtcggggcttgtgaggatggccagctccgacaggtactgttttagtgaggcgaaggccgctgcctgctccggtttccaggcgaagtcctttgcaccgcggagtgttttgaggaaggggagacttcgctcggcggacctggagatgaatctgttgagagcggccaatctgcctgtcagtcgctggacgtccctgacggactgcggaggcgacatgtctacgatggcctggatcttggttgggttggcctcgatgccgcggcgtgataccaggtagcccaatattttgccctgacgaacgccgaagacgcacttttccgggtttaggcggagtcgtgcgtctcgcatgttcgcgaatgtctcggcgaggtcggtgaggtggtcctccttgttcttgctggcgacgacgatgtcgtccacatatgtaaatatatttctgccaacctgcccttcgagtactgttttggtgagtctggagaaggtggacccggcgttcttgagtccctccggcattctgatgaagcaatatgtgccgaagggtgttataaagctggtgctagccttgtcttccttcttcatgtatatctggtggtaaccggagaagtagtcgaggagtgacatgacctcgcatccggccgcgctatcgactattttgtcgatccacggcaacgggaaattgtcctttgggcaggccttattgagactggtgaagtctatgcacattcgccatttcccgctttttttctgcaccattacaacattggagagccaggtggggtaagctattggcttgatgaatttagcctctaggaggcggtgcacctccgccttggcagcctctgtcttttcgtcggacattttgcgaagcctctgcctttttggtcgcaccgaagggtcaattcccaagctgtgctcaattatggatcgactgactccgaccaggtcgagggcggaccaggcgaagacatctatattcttggacaggcagcagaggagtctctcttcttcatgcgaggtgaggtcttcgctgatagtgactgtctgcttgggcgtggcctgatcgagggggacagtcttggtcccgtcttggctctgcagctgtgccttgtcgtgctgtttatcggttgggctcgcgggcgctgggacctcgcgctggtctgaccgggcacgaagtcccgctctatgttgcgcgccgtctgctggttgccgtagaccgtgatggcgcctagcggacctggtatcttcatacataggtacagtccgtggatggcggcttcgaacttattgatggagccccgacccatgatggcgttgtatggatataccatatccacaatatcaaaagtcactt

SEQ ID NO: 27341 - protein, 106 aa, Arabidopsis thaliana
  misc_feature (1)..(106): Ceres Seq. ID no. 14310054
MIQVVTPRALSLRRPRMTASYSAILFVHLSDSRAKLRRAAYLCLTPAGEVMIAAAPAPAWHHAPSQWIVQTFSVDGSGCVIGPVQSMTKSARTCDLMVVLGSKLMW

SEQ ID NO: 27342 - protein, 90 aa, Arabidopsis thaliana
  misc_feature (1)..(90): Ceres Seq. ID no. 14310055
MTASYSAILFVHLSDSRAKLRRAAYLCLTPAGEVMIAAAPAPAWHHAPSQWIVQTFSVDGSGCVIGPVQSMTKSARTCDLMVVLGSKLMW

SEQ ID NO: 27343 - protein, 88 aa, Arabidopsis thaliana
  misc_feature (1)..(88): Ceres Seq. ID no. 14310056
MNLASRRRCTSALAASVFSSDILRSLCLFGRTEGSIPKLCSIMDRLTPTRSRADQAKTSIFLDRQQRSLSSSCEVRSSLIVTVCLGVA

SEQ ID NO: 27344 - DNA, 1132 bp, Arabidopsis thaliana
  misc_feature (1)..(1132): Ceres Seq. ID no. 15225940
gcagtttgagccgtttatagaaaagtcagaagctcttcatttctcagtggatcccgttggtaccgacgtcatgtaaaacatttcaactctacattgggttgcagtgcattatgaacaaagttttctctatgaatccgaaaacgtgagttattgagtttaaagaaagcaaaatacattgattatttgcaaataatagctgtttcctaacaagacaagccaacaaaagaaagattttaagctcccactttccagagacgttccttaacaccgagcttgcagcaaacatagacatcatgtgacgcttgtactatctgatcatgagagaggctacgagcaccccaattactcatacataactccttatctttcgtcactccttcatgccccaaatacaccttcacaatcgtctcaaacgagctactcaagagcaacggatggagatagtgccttatgtggacaagtctccagatatccaactgatggtggaatctctcgagcttgtcgttgtcttggctgttccatacgccgacaaaagtgattgtctgatcttccaagaaacttctaaggacgtcggggacgtacttacagtgagacaactgaatgatgagacagcgagtaccaacacatagttggagaatatccggtggaggatcggaaccacggggtgtccattgaacgccaagtccgacaactagaggtgtgataagcgaagacggctgacgaagcggatactgtggatccattggcgtatcactgagggagtatgagtgactgtgacgatcaaacgttctccaaagaagtcgacgtggtgttcttcgggtagagatgttgtggtgggtaaaaaagctcagcccgacctgaacccaaaataaacccgcccaccaaaaacccaactttagaaaacttagatgggtttttgatatagtgggtaaagcccgaaaaaacctgattgttccgagactacccgtgggtacccaacttagttttatcattttttagagtttatgtttaactgttaatatactattatatgtatgttatatctatattttgcttataaatatattttaaattatatttattttctgtattacatatatatttgatggaaaaaaggttaaattgcattacc

SEQ ID NO: 27345 - protein, 82 aa, Arabidopsis thaliana
  misc_feature (1)..(82): Ceres Seq. ID no. 15225941
MPQIHLHNRLKRATQEQRMEIVPYVDKSPDIQLMVESLELVVVLAVPYADKSDCLIFQETSKDVGDVLTVRQLNDETASTNT

SEQ ID NO: 27346 - protein, 64 aa, Arabidopsis thaliana
  misc_feature (1)..(64): Ceres Seq. ID no. 15225942
MEIVPYVDKSPDIQLMVESLELVVVLAVPYADKSDCLIFQETSKDVGDVLTVRQLNDETASTNT

SEQ ID NO: 27347 - protein, 49 aa, Arabidopsis thaliana
  misc_feature (1)..(49): Ceres Seq. ID no. 15225943
MVESLELVVVLAVPYADKSDCLIFQETSKDVGDVLTVRQLNDETASTNT

SEQ ID NO: 27348 - DNA, 1400 bp, Arabidopsis thaliana
  misc_feature (1)..(1400): Ceres Seq. ID no. 5671021
gtggcatcttaatcaaattcttcttcgccttcactttcaattgtctctccaatatcctcaccagatctgaaaccggcaccggcgacgtgtttccgaggttaaacactctcaattgcgccggacctctcttcttccctccactccctgtactcttctccgccgtatctagcgccgctaaacatcccttcactatatcgtctatgtaagtgaaatccctagccaccgttccgtgattcgccgattcgaatatcgaaatcgatttgccttttagaatatctttagtgaagaagaaatacgccatgtctggtcttccccaaggtccatacacggtgaaaaatcttaatccggttagagataatccatagatgtggttgtaggtatgtgcgatctcttcgccggcttttttagtggcggcgtataaactcgccggttgatctgttttatctttctccgagaacggaactttggtgttgagtccgtagacggagctagacgaagcccagactatagcaggttgtggattcacagatttgcagatctcgaggagattgacgaatccggcgatgttgctatgaacgtacgagctagggttttccattgcgtaccgtacaccagcttgagctgctaaatgcataacgtgtgtgaaggagacgatcttgaatagcttacggagtaattcgacgtcgtttatgtctccttctacgatgaagatcccacttctctcgagtaaagctcgtcttgctcgtttcagagatggatcgtagtaatcgttgaagttgtcgaggccgattacgccgtctccgcggcgttttaatgcggcggagacgtgtgttccgacgaaaccagctgctccggttactaaaactgtgattccgttgtttgttgaggttcggattcgagctgaggatctgagacgtttttcccaagctggtcctccgtaggtgttggttcggagtgaacggcgagatggatcggacggtgaagaagggttaatggacggtggagatcggaggaagagtagagagatgagacagaggaggaagaaggagaaaaatgcaaactttgtgagagaagattggaatctgagacgatgcaagtaggaagatttctccatcttgaatttgcctgggcttgaagaacatggggattgaagattttagagatccaaatcatagggaaaatatgaagaagagagtcaaaaaaattactgtaaaaatttgttgactcttctaaagatttgttgtcgagtcttgaaatttgattggtgagatactaatactccaagattttcgggaagccactcgtcccaaaagttttgaatttgaaccaaagttttaaacttttgttaatagatttgttttgcggatagttgctaaatacaaaaatggactctaaatttg

SEQ ID NO: 27349 - protein, 67 aa, Arabidopsis thaliana; identical to SEQ ID NO: 27305
  misc_feature (1)..(67): Ceres Seq. ID no. 5671022

SEQ ID NO: 27350 - protein, 35 aa, Arabidopsis thaliana; identical to SEQ ID NO: 27307
  misc_feature (1)..(35): Ceres Seq. ID no. 5671023

SEQ ID NO: 27351 - DNA, 476 bp, Arabidopsis thaliana
  misc_feature (1)..(476): Ceres Seq. ID no. 5675962
aatttcaatcaaacatatatatgcatatgataatcttgatttgtgatttctcgtatgttttttagcctttttaaaaccaacattaagcgccaagaaccctttgagactcgccggtgcatcgggaggaagagtcacttgctttgagaggaactggttgaggagagatttgaacgtggtaggatttgggctgatcggatggctagctccgtcgagcattccagcgataaatgggaagagcctgacgggtctcttcttcgatagcatcggaactgagctcgctcacttcccgactcctccagctctcacttcacagttctggttgtggttggttacgtggcacttaggcctcttcctctgcctcactttcggacaaatcggattcaagggcaggactgaggattacttctaaggataactattcttgttttcgtttgtactatatgctctctcttggttatgtgtaatattatcaatca

SEQ ID NO: 27352 - DNA, 524 bp, Arabidopsis thaliana
  misc_feature (1)..(524): Ceres Seq. ID no. 5677702
atttatctgcagttgctggttattgtttgcatgtattcaataatgtttatctggttcactgaaactgtttttttttttggcagtcattgttttacaacgcgcaaacacaactcctttcaagacctgcagttgtggagaaaatagtcgaacttggaacagtctcgttggggaactcatatcaatcggttcttaaatccggcttcagcgacaaaaaatcggatcgtgcaaccagagtttccttcaagtatagcgcttcaagaggggtttatggtacaccaaccttctacgttaacgggtttgtattgtctgatgctgcttccccttcaaattttggaggatggaagaaaatcattgatcctctggttcaagcacatgagatggaagataacttcattcccttcctttgaagattttaagtgcttttgctgtgtcaattgtcatggtataatactatctgtaatgtatagactttctcaaaacctgtatgttgctcattgtaaatttgtaataaaggaaagtgatcc

SEQ ID NO: 27353 - protein, 85 aa, Arabidopsis thaliana
  misc_feature (1)..(85): Ceres Seq. ID no. 5677703
MVHQPSTLTGLYCLMLLPLQILEDGRKSLILWFKHMRWKITSFPSFEDFKCFCCVNCHGIILSVMYRLSQNLYVAHCKFVIKESD

SEQ ID NO: 27354 - protein, 71 aa, Arabidopsis thaliana
  misc_feature (1)..(71): Ceres Seq. ID no. 5677704
MLLPLQILEDGRKSLILWFKHMRWKITSFPSFEDFKCFCCVNCHGIILSVMYRLSQNLYVAHCKFVIKESD

SEQ ID NO: 27355 - protein, 50 aa, Arabidopsis thaliana
  misc_feature (1)..(50): Ceres Seq. ID no. 5677705
MRWKITSFPSFEDFKCFCCVNCHGIILSVMYRLSQNLYVAHCKFVIKESD

SEQ ID NO: 27356 - DNA, 1678 bp, Arabidopsis thaliana
  misc_feature (1)..(1678): Ceres Seq. ID no. 5678455
atcttagattcaagagatattcttagtgacgtcttgaataaactttagaagagcaacgtgcgaagatccaccgtccattaaagctacgtgactcttctcgctcatctccttcactctactcctcacgtcactatcctgctccatcaaacaccggatccctctctctatctcctctgccgtcatcaactcatcatccgccgccatgaaatctcctcggaaactatttcggacctccaccgctagccctagctcctcaaccatctcgaacgcgttaacttgttgctctgcgtaaagcggccacgtagccatcggaactccgaaccatagactctctagcgtcgagttccatccacaatgcgacacgaaccctccgatcgcaggatttgctagaatggcgctttgtggagcccaacctacaatctttcctatctctgccgtccgttccaagaatccttccgggagaatttcctcaagattcgtaaattcttcgggaggtcctatcgatccttttggttgagcacgacgaagagaccagacaaagcggtgaccacttcgctcaagcgcgattgcgatttctttagcttggccctcacggaaacctcccatgcttccgaaacagaggaaaacaacggatttacgtggctgctcgtctagccaccgtaggatctccgattgcttatcgtcagatgaatttggaccgttgattttaagattcataaccggtccaactgtgtacaccgtaggcagaggactatctacgccggagaaaaacttcatagcttgaggctcaagctcagcgaatgtatttaccaaaatacctttagtttctcggaatcttctggtttgtctaaacataaccggtaaccactccttggttaatagaaccgaggggaaacacttaaccggtaaaggacgagtcaaacaaggaacttccagctcagtagtgtccgagtccttgaggtcactaacgtcatagttcttaacgtcgtaaaggtattcaacatgaacttgcaatccaagaaacgttgcgttggatgtgtaaaacatgtaactgggaacaccaaactcattagcgacatcaatcatcatcatgcaaaacatatccaccacgaatccagcaagacgcgacggcgaatctggtggacccgggtcagtaagtttttccaccgtggctttgacctgcggcttgaagttatcaatgtagtcgaaaaaatgtggtttggtgtcatcggagtctggtttatcagggacggagagaacgttgtagctaagacgttcttcagaatcagaggagagagaagcgatgtaagaagaagagttactgctactaaatccatgcatctgagggatgatgatgatggtgatggagagatggtcgtcacggtcaacatgaagcttagctacctccactaatggccggagatgtccgtcaccaggtgatggttgaagatgtttcggtgaagagataagattcgtctttagcatacatgacatgtggtacttggacatctactgatgttagtttaacttttgtcacaggccatacaatcttgatcttcagacttcaacgttagtacgttacgttagtatttttttcttttaattgtcagctatatactgcactatcatacaattaaaggtaaccgacgtttaattcattgagattttgttggcatgt

SEQ ID NO: 27357 - protein, 136 aa, Arabidopsis thaliana
  misc_feature (1)..(136): Ceres Seq. ID no. 5678456
MNLQSKKRCVGCVKHVTGNTKLISDINHHHAKHIHHESSKTRRRIWWTRVSKFFHRGFDLRLEVINVVEKMWFGVIGVWFIRDGENVVAKTFFRIRGERSDVRRRVTATKSMHLRDDDDGDGEMVVTVNMKLSYLH

SEQ ID NO: 27358 - DNA, 1627 bp, Arabidopsis thaliana
  misc_feature (1)..(1627): Ceres Seq. ID no. 6432518
aaacaaaaaaaaaaacagagagagagatacttacggcttgggggataccgaggatggcgaagagagttaaagcaccagctgtgacgttaccaggtggacctgttttagcgccgccgtgatctcgtcggtgattctcagcttgtttcgtaaccacaaccgtcatggccaagcaaatggcgaggatgaagttaacaataccccaaagccttttagctcctcccaatttccgaccaatccattcaacaccaagagacatgaaaccaagaacaatagcgttaagcataagccccaaagcaccagctctgactccgtcgttgtaaagcttcttagaggctgcggttgcggttgcgtctgagtttcctccgtacacctcacggcccatccaatcagtgtcgaagagaaggaaagggaaccaagcgatccagtttagtgcagtgactataagaagcatccacatgggtctttttagttccttgaaagctccgaagatttctccgaaaaacggaacgttggaggcttttccatcggctgttggctctggcgtccatggcttctccttcacgtaacagagagatacgaaagtgactatgaggagaagcgttatggataggaaaaaacacgttttgaggtttgcgcagtagagatcgcatgactcagtcatcgtgaaaggcacaactttgtagagatttctgtaagatcccgcagcgtaacccaaaacgtttccaaccgccatgaaaaacgagaaaaacgcgtttgcggttcgcgttttcttagcgttccctgctgataaatcagccaagaaagctctgcagggtccttgtaaggtgttgttagccacgtcaagaatccaaaacccgagagcgaatatcgctatggctcgcgttttcggcggtttgtcaagctgatcgcccatgctgtgacctatatcggcagcgtaaccgataaggaaaacagcaacggtgactaaaccagctccagcgacgatgaagggacgacgacggccgaatcttgaggtgcaacggtcactgtggtaaccgacgataggctgaacaagcataccggagattggaccacagagccaaatcagagaagcccatttatgtgggattccgagtagctgcacgtaaggagtcaacagagataactgtaaagcccaaccgaactgtacaccggcggcaatggaagacaccgatatgatcttacgaagccgttccggctgatctaactcacccgtctgcgtttccaacgcagacgcaccatttgcagctttctccattggatggctgaccatatttgacaaaccaagaaagtaagaaaaaaaagaaatttctttgagagggtttttggtggttgttgcggtggttgtagtggtggaggaagaggaagagtggagaggtatttataggaagagaaggataggattatccgaagaggagacagtgaagttaagagagccttgaggcatagaaaagagaaaacagagctgtgtctatagcgtagggtatcttcgtgacacgtgtctgtcgtatattatttttttctgttttgtatttaattattttcttcttttttagcgtaatatattattttctgtttttggaacttaaatcttttagattttaccttc

SEQ ID NO: 27359 - protein, 57 aa, Arabidopsis thaliana
  misc_feature (1)..(57): Ceres Seq. ID no. 6432519
MKNEKNAFAVRVFLAFPADKSAKKALQGPCKVLLATSRIQNPRANIAMARVFGGLSS

SEQ ID NO: 27360 - protein, 52 aa, Arabidopsis thaliana
  misc_feature (1)..(52): Ceres Seq. ID no. 6432520
MAKQMARMKLTIPQSLLAPPNFRPIHSTPRDMKPRTIALSISPKAPALTPSL

SEQ ID NO: 27361 - protein, 48 aa, Arabidopsis thaliana
  misc_feature (1)..(48): Ceres Seq. ID no. 6432521
MARMKLTIPQSLLAPPNFRPIHSTPRDMKPRTIALSISPKAPALTPSL

SEQ ID NO: 27362 - DNA, 725 bp, Arabidopsis thaliana
  misc_feature (1)..(725): Ceres Seq. ID no. 12325825
attcaaaagtgtataatttggaaactggaatattctttcatgggaagtctggccgaagaaggcggcgacctccttcttcctcgtggcggtgtctccggtggtgccaaaaccggggaaggactttgcagcggtgataaaggcgttgtaagtgtagaaacctctagcgggacaagcggcatcattcctatgcttaagcatatcatcgaactgagaacttgaaatgatgcccgaaagatcgccggtgggtccaggaggagtaccaccgggagtgcactggctttggcagccaggctgcttacagtatggttcggtgttaccgcaccagccgaactcgctgcagcatagaccgttggggcagagtgctcctccagcttggcgaccacattgctcggccgaggataatgataggagaagtgaaaagatgagaaagagaaaaagattagtcttcattttgttcaatgttctatggttttctttttgtggaggcatgaaagatatatatagatccaattaatgaatgttttatcacatcaaattctatctttttccatagtttattgtttgttatgtctatggagtgtggctatggggaacaaacagtatttggtaggtttgtttttgattatatttattttccttccgtcattgttgctaggttagatattgatttgtttttttgggggattatcatgttaataattccaagtaatgagaactttctatgt

SEQ ID NO: 27363 - protein, 97 aa, Arabidopsis thaliana; identical to SEQ ID NO: 27287
  misc_feature (1)..(97): Ceres Seq. ID no. 12325826

SEQ ID NO: 27364 - protein, 96 aa, Arabidopsis thaliana; identical to SEQ ID NO: 27288
  misc_feature (1)..(96): Ceres Seq. ID no. 12325827

SEQ ID NO: 27365 - protein, 72 aa, Arabidopsis thaliana
  misc_feature (1)..(72): Ceres Seq. ID no. 12325828
IQKCIIWKLEYSFMGSLAEEGGDLLLPRGGVSGGAKTGEGLCSGDKGVVSVETSSGTSGIIPMLKHIIELRT

SEQ ID NO: 27366 - protein, 59 aa, Arabidopsis thaliana
  misc_feature (1)..(59): Ceres Seq. ID no. 12325829
MGSLAEEGGDLLLPRGGVSGGAKTGEGLCSGDKGVVSVETSSGTSGIIPMLKHIIELRT

SEQ ID NO: 27367 - DNA, 782 bp, Arabidopsis thaliana
  misc_feature (1)..(782): Ceres Seq. ID no. 12326622
aatccattctcatcttcctcttcttccttcttcttaatctctcttcttcttaccatttctcctctctcttcttcttcttcgttcgtcttccttaacctaggaatccgaccacctttgcttgtccctaaaagctcaaaattgattttgctccaaccaatcttatcttcattatcccaaccaaatctctcactaatctccaacaacatcgaaacagagtttacctcttctctactcttccttacagaagttaaagctctcatgctctcatcacttccatggaggattttctctgcaaattcccactcagttctatctttataaacatcgtcttcgagcacttcatcagcaagctttgcccaatactcagaatctcctgcacgaagattctttgagacccatttaagataagaagaaggcaaagtaccaagcattttgcccttgtgtttgccgaagtctatgattgtgtctctggcggctagggtttcgatgatttgaagttttttgattaagggtttagattgattggtggagaagataccattagatgaagaaagatttcttcttggtctgaaagatgatgatgatgatgagattctgaagatggtttttgttgttactgcagcagagtgaggactgtggaacaagaccaccgagaaactcattgttgtgtccccaaaatattgtctattttttcttgaatcctataaaatacatttagggggtgttattcgttaatagattttaatagaattgaaatccaacacactaattcactgttatcc

SEQ ID NO: 27368 - protein, 106 aa, Arabidopsis thaliana
  misc_feature (1)..(106): Ceres Seq. ID no. 12326623
NPFSSSSSSFFLISLLLTISPLSSSSSFVFLNLGIRPPLLVPKSSKLILLQPILSSLSQPNLSLISNNIETEFTSSLLFLTEVKALMLSSLPWRIFSANSHSVLSL

SEQ ID NO: 27369 - DNA, 1401 bp, Arabidopsis thaliana
  misc_feature (1)..(1401): Ceres Seq. ID no. 12335078
gtggcatcttaatcaaattcttcttcgccttcactttcaattgtctctccaatatcctcaccagatctgaaaccggcaccggcgacgtgtttccgaggttaaacactctcaattgcgccggacctctcttcttccctccactccctgtactcttctccgccgtatctagcgccgctaaacatcccttcactatatcgtctatgtaagtgaaatccctagccaccgttccgtgattcgccgattcgaatatcgaaatcgatttgccttttagaatatctttagtgaagaagaaatacgccatgtctggtcttccccaaggtccatacacggtgaaaaatcttaatccggttagagataatccatagatgtggttgtaggtatgtgcgatctcttcgccggcttttttagtggcggcgtataaactcgccggttgatctgttttatctttctccgagaacggaactttggtgttgagtccgtagacggagctagacgaagcccagactatagcaggttgtggattcacagatttgcagatctcgaggagattgacgaatccggcgatgatgctatgaacgtacgagctagggttttccattgcgtaccgtacaccagcttgagctgctaaatgcataacgtgtgtgaaggagacgatcttgaatagcttacggagtaattcgacgtcgtttatgtctccttctacgatgaagatcccacttctctcgagtaaagcttgtcttgctcgtttcagagatggatcgtagtaatcgttgaagttgtcgaggccgattacgccgtctccgcggcgttttaatgcggcggagacgtgtgttcggacgaaaccagctgctccggttactaaaactgtgattccgttgtttgttgaggttcggattcgagctgaggatctgagacgtttttcccaagctggtcctccgtaggtgttggttcggagtgaacggcgagatggatcggacggtgaagaagggttaatggacggtggagatcggaggaaagagtagagagatgagacagaggaggaagaaggagaaaaatgcaaactttgtgagagaagattggaatctgagacgatgcaagtaggaagatttctccatcttgaatttgcctgggcttgaagaacatggggattgaagattttagagatccaaatcatagggaaaatatgaagaagagagtcaaaaaaattactgtaaaaattggttgactcttctaaagatttgttgtcgagtcttgaaatttgattggtgagatactaatactccaagattttcgggaagccactcgtcccaaaagttttgaatttgaaccaaagttttaaacttttgttaatagatttgttttgcggatagttgctaaatacaaaaatggactctaaatttg

SEQ ID NO: 27370 - protein, 67 aa, Arabidopsis thaliana; identical to SEQ ID NO: 27305
  misc_feature (1)..(67): Ceres Seq. ID no. 12335079

SEQ ID NO: 27371 - DNA, 809 bp, Arabidopsis thaliana
  misc_feature (1)..(809): Ceres Seq. ID no. 12339176
aactcgacacatcgagtcaactcgctaccagcactgatcggtttcccaattccgtccaccgtaactgccgtatccagccgttaacggccgactccgaagaagagtcctccgatcataaacggcgcgtttctcgggatccgaaagcgtgcaatacgctgcgtggatcttcatgaaatcgtccgccgacgagttatcccgactatttctcgctacatcgggatgacagatcctggctagtcgccggtaagctgatttgatctcttgactcgtcgagccgacgggaatttcaaggatctcgtagagagacgccggttgctgaaaatcgctgcgggatttggcgtaatctcggtagatcttcggcgcaggtgtaggacgcggtggttgtagaaagcgacggcgagatccgggaaatgcgtgacggtggtgaagtagaagagaacgacggagaagaagaagaagaagaagagagaaatggagtagcgaagaaggttggggaagaagaaagcatcgtgaaacgacggcgtttttgtttgtcttttggtttaagttccgatttgggttttgtgatgcagtgtgatttgagatgagaaattagaagggtttatttataggggaagaagtgattagtacgtataacgtttagttagcttttaaataattgaagattaggcagattaatgtatcttgtccggttaagcaaaatcgaaccgggttgggtcagtgtgttttcggatcttgagaaagctgagtcagactaaaaggcttatccacagttgtaaataatgggagaagtgagataagattcaacg

SEQ ID NO: 27372 - protein, 58 aa, Arabidopsis thaliana; identical to SEQ ID NO: 27281
  misc_feature (1)..(58): Ceres Seq. ID no. 12339177

SEQ ID NO: 27373 - protein, 56 aa, Arabidopsis thaliana
  misc_feature (1)..(56): Ceres Seq. ID no. 12339178
LDTSSQLATSTDRFPNSVHRNCRIQPLTADSEEESSDHKRRVSRDPKACNTLRGSS

SEQ ID NO: 27374 - DNA, 1676 bp, Arabidopsis thaliana
  misc_feature (1)..(1676): Ceres Seq. ID no. 12357570
atcttagattcaagagatattcttagtgacgtcttgaataaactttagaagagcaacgtgcgaagatccaccgtccattaaagctaagtgactcttctcgctcatctccttcactctactcctcacgtcactatcctgctccatcaaacaccggatccctctctctatctcctctgcccatcaactcatcatccgccgccatgaaatctcctcggaaactatttcggacctccaccgctagccctagctcctcaaccatctcgaacgcgttaacttgttgctctgcgtaaagcggccacgtagccatcggaactccgaaccatagactctctagcgtcgagttccatccacaatgcgacacgaaccctccgatcgcaggatttgctagaatggcgctttgtggagcccaacctacaatctttcctatctctgccgtccgttccaagaatccttccgggagaatttcctcaagattcgtaaattcttcgggaggtcccatcgatccttttggttgagcacgacgaagagaccagacaaagcggtgaccacttcgctcaagcgcgattgcgatttctttagcttggccctcacggaaacctcccatgcttccgaaacagaggaaaacaacggatttacgtggctgctcgtctagccaccgtaggatctccgattgcttatcgtcagatgaatttggaccgttgattttaagattcataaccggtccaactgtgtacaccgtaggcagaggactatctacgccggagaaaaacttcatagcttgaggctcaagctcagcgaatgtatttaccaaaatacctttagtttctcggaatcttctggtttgtctaaacataaccggtaaccactccttggttaatagaaccgaggggaaacacttaaccggtaaaggacgagtcaaacaaggaacttccagctcagtagtgtccgagtccttgaggtcactaacgtcatagttcttaacgtcgtaaaggtattcaacatgaacttgcaatccaagaaacgttgcgttggatgtgtaaaacatgtaactgggaacaccaaactcattagcgacatcaatcatcatcatgcaaaacatatccaccacgaatccagcaagacgcgacggcgaatctggtggacccgggtcagtaagtttttccaccgtggctttgacctgcggcttgaagttatcaatgtagtcgaaaaaatgtggtttggtgtcatcggagtctggtttatcagggacggagagaacgttgtagctaagacgttcttcagaatcagaggagagagaagcgatgtaagaagaagagttactgctactaaatccatgcatctgagggatgatgatgatggtgatggagagatggtcgtcacggtcaacaagaagcttagctacctccactaatggccggagatgtccgtcaccaggtgatggttgaagatgtttcggtgaagagataagattcgtctttagcatacatgacatgtggtacttggacatctactgatgttagtttaacttttgtcacaggccatacaatcttgatcttcagacttcaacgttagtacgttacgttagtatttttttcttttaattgtcagctatatactgcactatcatacaattaaaggtaaccgacgtttaattcattgagattttgttggcatgt

SEQ ID NO: 27375 - protein, 136 aa, Arabidopsis thaliana
  misc_feature (1)..(136): Ceres Seq. ID no. 12357571
MNLQSKKRCVGCVKHVTGNTKLISDINHHHAKHIHHESSKTRRRIWWTRVSKFFHRGFDLRLEVINVVEKMWFGVIGVWFIRDGENVVAKTFFRIRGERSDVRRRVTATKSMHLRDDDDGDGEMVVTVNKKLSYLH

SEQ ID NO: 27376 - DNA, 789 bp, Arabidopsis thaliana
  misc_feature (1)..(789): Ceres Seq. ID no. 12369935
attgcttgcttgttattatgcatccaaaccttaaaaacttgtctcctcagattcaccatcctacaaaacttatcaatctcttcttcatctttcttctgcatcctccaccctaatctctctgcaaattccttcatcttctccttttgttcttcattgatctttgtcctcactctcttcttcttcctcatcatcatcatcatcaaacttttcccatcaacgttttggttacgatgactcagaatcttcttcatatcctcgcttgaagatgaagtcctccgtccaatctcacccgttggatgcattacacgtggcttgtacgagctgttactgctgtaaaacgccggagttatcatcagctgataatcttgtttactgttcatgtgtccgtacacttctttccggtggaagctccggtgacagttacaggcggcgcattttaaagcaccgagtgtaccttcttctccgccggccatgaactcgcagcatccgtccaccacgtgtcctccggttgaggccgcgtggttcttctgacattcccggtacttagctccttggtcgacacgtgtctttggtttttggttttctttcttgatcgggaataaagccatggatggatctgattcgggtttggcttctggttccggatccgtatgtggctttacttctgttgagattattgttgtggttgtaattgcattgcattttcctccaagctccattgtgaatctgacccaaaacaacaaaactttgttaaatattaatacgtataaatcattcaataatgcatgc

SEQ ID NO: 27377 - protein, 77 aa, Arabidopsis thaliana
  misc_feature (1)..(77): Ceres Seq. ID no. 12369936
IACLLLCIQTLKTCLLRFTILQNLSISSSSFFCILHPNLSANSFIFSFCSSLIFVLTLFFFLIIIIIKLFPSTFWLR

SEQ ID NO: 27378 - protein, 69 aa, Arabidopsis thaliana
  misc_feature (1)..(69): Ceres Seq. ID no. 12369937
MKSSVQSHPLDALHVACTSCYCCKTPELSSADNLVYCSCVRTLLSGGSSGDSYRRRILKHRVYLLLRRP

SEQ ID NO: 27379 - protein, 61 aa, Arabidopsis thaliana
  misc_feature (1)..(61): Ceres Seq. ID no. 12369938
MDGSDSGLASGSGSVCGFTSVEIIVVVVIALHFPPSSIVNLTQNNKTLLNINTYKSFNNAC

SEQ ID NO: 27380 - DNA, 679 bp, Arabidopsis thaliana
  misc_feature (1)..(679): Ceres Seq. ID no. 12384513
agaaatgatgggcgactgtgaatcatatagggtgaccatttgccagcgtttgaactcgtcgtgtgtcgtcgacgttcccagccgaagaagcacaactgatggtccaagagatactcctgccatcaacgaaaaccggtgagaagaaaccaaaggtggtgttggtgctagtccagatctagagctttttgataagttgatgaagtcttgctctgatgtttgagaagaggagctgttggactgttgtgaattttcttgttttgggttcgaagacagagatgcatccaagatctgagtcagatcggagccaatagagcatcgatatactcttccgtcacaaagaaaactttcagtgaagaagctcacataaaaaaggagatttagatattttgagagatttgagataacggaggaagattcaatgaagataaagcttatatagaacacatgaaggttgatgggagttgataagtcccgacgctggcgatcggaaccaccaccggcgtcagagagtatggttgtcgagagtgtctcgattttggtgcctaggagcttttttagtcacgaatagactagacaaaaaattccccatgttaattttgtacaaatactaaaatgtaatactagttgaactttacatatatgtttatgaaggcaaatcttaacaaactcaaagatttgt

SEQ ID NO: 27381 - protein, 45 aa, Arabidopsis thaliana
  misc_feature (1)..(45): Ceres Seq. ID no. 12384514
EMMGDCESYRVTICQRLNSSCVVDVPSRRSTTDGPRDTPAINENR

SEQ ID NO: 27382 - protein, 44 aa, Arabidopsis thaliana
  misc_feature (1)..(44): Ceres Seq. ID no. 12384515
MMGDCESYRVTICQRLNSSCVVDVPSRRSTTDGPRDTPAINENR

SEQ ID NO: 27383 - protein, 43 aa, Arabidopsis thaliana
  misc_feature (1)..(43): Ceres Seq. ID no. 12384516
MGDCESYRVTICQRLNSSCVVDVPSRRSTTDGPRDTPAINENR

SEQ ID NO: 27384 - DNA, 1528 bp, Arabidopsis thaliana
  misc_feature (1)..(1528): Ceres Seq. ID no. 12385074
ataaggaaattagggtttttctcttcttttcttttttgtttaaaccaatctggttttacttttcaagtttggatataaacccaaatcgaatcgagaaaccataccaaaccactcagagattccgttatccatatttcccctgtttttccattaaggtaggattaatccatcaaataaaacattttgaaaatgtgctatgaatacatcaaatgagaggtttggttcatgttttattaatcaatccgaataacattacatatttgtctatattattgactcaaatatattttttcgtaatcctagagataagcttggtttacttgcaaatttcaagaggagcaccacacaaacacttgttgtgaaaataggaataagaatcaaatgtctgaagtttccctccagttgggatgtgtccacacagtttgttgtagctaacattgaagaactgaagaggagcttcagtccactgcaccggaatattcccagtgatcccattgtggttcaagtccaagataccaagtgttttagggatatcaacctttgagatatcgaactggaacatgtttcttgataagtcaatagaccaggttgttttgttggaaccaaacaacatcgaagcatcaccttggagcttgttgcgggataaatcgatccggttaaagtcgatgttgcctaatgatttgggtattggaccggagagctggttatgtgataggcgaaggtcagggactgttcctggaaacgacccaaatgactctggtatggaacctacaacataaagatcgttgtttagacaagacactgaatgatgtaataaaggaaaagatcgttctttacctgtaagtttgttcctgctaagttcaagagccaagattttaggtaacgtagagagagaacttggaatggaaccagagagatcattgaaggaaagttctaagaactcgagattcttgagctgacttataaagtcaggaattggacctgtcagattcgtccagctgagcctgagcattcggaggttcttgagtttggcgatggtgggttggattgtaccggtgaggttagagagtttgcggaagacaagggtctcaagatacggcaagtcaccgacttcagccgggatctgaccggagatctggccggagaatatggttaaggcggtaacacggtggttaacggtggcgtcgccgcactcaaggcagtaccaggagcaacagtcggtttgagggtcccatgaagcgaggtgataagggttgtttagagatttcttgatcttgaggagggtgtttttgtcattttggttacagagatctttagacaaacaggtcgtgaggaatgtgaacaagaacaagagagtggaaagtaatgtcgctgtcttatccatggtgttggttttgaattttgatggaaagtgttagtgatacatatacatactatatagtgagtgatatagacttagagagacggattcgatttgatctctgtttccacatggaccgtaataatagtcaatacatatcatatagcc

SEQ ID NO: 27385 - protein, 72 aa, Arabidopsis thaliana; identical to SEQ ID NO: 27292
  misc_feature (1)..(72): Ceres Seq. ID no. 12385075

SEQ ID NO: 27386 - protein, 65 aa, Arabidopsis thaliana
  misc_feature (1)..(65): Ceres Seq. ID no. 12385076
KEIRVFLFFSFLFKPIWFYFSSLDINPNRIEKPYQTTQRFRYPYFPCFSIKVGLIHQIKHFENVL

SEQ ID NO: 27387 - protein, 55 aa, Arabidopsis thaliana; identical to SEQ ID NO: 27294
  misc_feature (1)..(55): Ceres Seq. ID no. 12385077

SEQ ID NO: 27388 - DNA, 695 bp, Arabidopsis thaliana
  misc_feature (1)..(695): Ceres Seq. ID no. 12580203
acataagtctctctcttacattttgaaaccctaatttccaccatcaccgccaacgccaactccacccgtcattacaccaccaacaccaactccacccgtcattacaccaccaacaccaacaccacccgtcgtgacacctccaacaccaacaccacccgtagtaacaccaccaacaccaactcctcctacgcctattccagagacttgcccaattgacacgctgaagctaggcgcttgtgtggacgttcttggaggtttgattcacatcggacttggaaaaagccacgccaaggcagaatgttgtccggttttaggaggtttacttgacctagacgcagccgtttgtctatgtaccaccattaagctcaaacttctcaacatcgaccttgttctccccattgctcttgagcttcttctcgactgtggaaaaactccaccatctgacttcaaatgtcccgcttaatcgatgtagaacgttgagagtctctggacgactccaaaagtttcgtttcttcaagaaatttgttagtttcatgatctatttggtaatgggaggttaatctgcatatgtgcgacctttagttacatgtttcatttgatacaataaaaggcgttgtaatttgggtttgagatctcaatttctttgggttttcttgttatgttgtacttttaagaagaagaaaaaaaaaactgtt

SEQ ID NO: 27389 - DNA, 818 bp, Arabidopsis thaliana
  misc_feature (1)..(818): Ceres Seq. ID no. 13500182
gaaaaagtgtgtgtcagagaataatgattcgagcggttctcctgttccttgtcttcgtcgttgagacgagagtacaagcgcagctagtgccgccggtgaggcaagatggtttcgtttaaccaccgggtcatcgtttcgacccggatactatactaattgaggcgtattttgacccggtttgcccggacagtagagactcttggccgccactgaagcaagctcttcatcactatggatctcgcgttgcccttctcctccatctccttcctttaccctaccatgacaatgcctatgtaacatcacgggccttacacattgtgaataccgtacacgccaatgctaccttcagtttgctggaagggttcttcaagcatcagtcattgttttacaacgcgcaaacacaactcctttcaagacctgcagttgtggagaaaatagtcgaacttggaacagtctcgttggggaactcatatcaatcggttcttaaatccggcttcagcgacaaaaaatcggatcgtgcaaccagagtttccttcaagtatagcgcttcaagaggggtttatggtacaccaaccttctacgttaacgggtttgtattgtctgatgctgcttccccttcaaattttggaggatggaagaaaatcattgatcctctggttcaagcacatgagatggaagataacttcattcccttcctttgaagattttaagtgcttttgctgtgtcaattgtcatggtataatactatctgtaatgtatagactttctcaaaacctgtatgttgctcattgtaaatttgtaataaaggaaagtgatcc

SEQ ID NO: 27390 - protein, 85 aa, Arabidopsis thaliana; identical to SEQ ID NO: 27353
  misc_feature (1)..(85): Ceres Seq. ID no. 13500183

SEQ ID NO: 27391 - protein, 71 aa, Arabidopsis thaliana; identical to SEQ ID NO: 27354
  misc_feature (1)..(71): Ceres Seq. ID no. 13500184

SEQ ID NO: 27392 - protein, 50 aa, Arabidopsis thaliana; identical to SEQ ID NO: 27355
  misc_feature (1)..(50): Ceres Seq. ID no. 13500185

SEQ ID NO: 27393 - DNA, 457 bp, Arabidopsis thaliana
  misc_feature (1)..(457): Ceres Seq. ID no. 13503849
actgaaattttttcaacttccagagagagaacgtagcaaaacagggcttaccggagcagaacggaaaaacccatttcgaagctggagatgatcgtgctaaggagtacgtcagtctcttgaaatcgaacgatccaattggattcaacattgttgatgttcttgcttggggttctattggacacatcgttgcttactacatcttggctacttccagcaatggatacgacccaagcttctttggatgattcgtttcaatgtcaatctctcgtatatgtatatgtatatgtttgacttgtgttgcaagctatctaatctgttctctatctctgtttcttcttctgttgttgttgttgttgtctaagacttgtccctctttttgcaaatgttttatttctccatttacaaatattggtttgcagagttttataagaagaacataatagtatatacactatgc

SEQ ID NO: 27394 - protein, 61 aa, Arabidopsis thaliana
  misc_feature (1)..(61): Ceres Seq. ID no. 13503850
MSISRICICICLTCVASYLICSLSLFLLLLLLLLSKTCPSFCKCFISPFTNIGLQSFIRRT

SEQ ID NO: 27395 - protein, 45 aa, Arabidopsis thaliana
  misc_feature (1)..(45): Ceres Seq. ID no. 13503851
MFLLGVLLDTSLLTTSWLLPAMDTTQASLDDSFQCQSLVYVYVYV

SEQ ID NO: 27396 - protein, 39 aa, Arabidopsis thaliana
  misc_feature (1)..(39): Ceres Seq. ID no. 13503852
MIRFNVNLSYMYMYMFDLCCKLSNLFSISVSSSVVVVVV

SEQ ID NO: 27397 - DNA, 471 bp, Arabidopsis thaliana
  misc_feature (1)..(471): Ceres Seq. ID no. 1810029
atggaggagactatactggtcggtgatgacctaatgacgggtcctccatctcctgttatccctcctgaaattgcttcacatgtgcttgaaggtgttgatttgtgcgatgggattttgaggaatctattcctgtgtatgtctatgtatcctcggtttggtttgcaaatcaatgatattgaaccattttgccaagatgagcttgcattgtatcgacaatgtgctgaaaagagggacaaaatattgagagttagacttcaagagagcgaacacaagttaggattgtctatgcccattgaactcgctaaggaaaggattacgcagcttgaagctgaagccacatcttttgagagaaaaagactggagtcactgaagcagggaatggagaacaggaacaaggttgaacatgaacataaccaacaccatgatcagtccccaaaaccttctgctccaaaaagatggttcttttggtga

SEQ ID NO: 27398 - protein, 156 aa, Arabidopsis thaliana
  misc_feature (1)..(156): Ceres Seq. ID no. 1810030
MEETILVGDDLMTGPPSPVIPPEIASHVLEGVDLCDGILRNLFLCMSMYPRFGLQINDIEPFCQDELALYRQCAEKRDKILRVRLQESEHKLGLSMPIELAKERITQLEAEATSFERKRLESLKQGMENRNKVEHEHNQHHDQSPKPSAPKRWFFW

SEQ ID NO: 27399 - protein, 145 aa, Arabidopsis thaliana
  misc_feature (1)..(145): Ceres Seq. ID no. 1810031
MTGPPSPVIPPEIASHVLEGVDLCDGILRNLFLCMSMYPRFGLQINDIEPFCQDELALYRQCAEKRDKILRVRLQESEHKLGLSMPIELAKERITQLEAEATSFERKRLESLKQGMENRNKVEHEHNQHHDQSPKPSAPKRWFFW

SEQ ID NO: 27400 - protein, 111 aa, Arabidopsis thaliana
  misc_feature (1)..(111): Ceres Seq. ID no. 1810032
MSMYPRFGLQINDIEPFCQDELALYRQCAEKRDKILRVRLQESEHKLGLSMPIELAKERITQLEAEATSFERKRLESLKQGMENRNKVEHEHNQHHDQSPKPSAPKRWFFW

SEQ ID NO: 27401 - DNA, 1389 bp, Arabidopsis thaliana
  misc_feature (1)..(1389): Ceres Seq. ID no. 1814012
atgcctgtggtgagaacgagagcgaaatgttcgattcccgtcacaaaccctaatccaacagtcggaggaggaaactcaaacgtctcgatctacgagaaatgcagagaagacaggatcaaggagaatcttcagaggatgaagaatctcggaatcatggatctctctctcaaactcaaatccgagatccgacccgccaaaaggcgttacggtaactctaatgccaatccgggtcgagaaacatctcctattcagctttccgtctcctctagacgatcctcaagggtttttagagaaatcatttcgctgttttataatcagattgaagcaggagccgccagtttctcggagatcctcgaggtaatctcttcattgaagaacgctacaccagtttcctacgcagaggaacctgaactgaagaagggtaaagtgtctaaagaagagattgttttgtgggtaggagaaggcgtaaggccagagatttacactgaggagcatgagaaactgttaggtaacacagaacgaacttgggagctttttgttgatggttgtgacaaaaatgggaaacggatttatgaccctgttagaggaaagtgttgccaccagtgcaggattgaggctaatgtgtttaatggttactgtggattttacaggcagaagacgctaggttatcatacccaatgcagccagtgtaaccattctgttcgaggtcaattctgtggagattgtttatacatgagatatggagaacatgttcttgaagctctggaaaatccggactggatttgtccagtctgtcgcgatatctgcaactgcagtttctgtcgtacaaaaaaagggtggctcccaactggtgcagcttacaggaagattcaaaagttaatggctttccctttgaatttcttttgttctcagatacataaactcgggtataagtctgttgcacattatctgattcaaaccaaccaacagtcagaaacaagtgaggatgatgaaactgatgctcctgcagatagtcaagcttcagaaggagatcatctccttctcataactgatgggattcaggacaatcaaattgacgaaaatctcgatgatgatgatggctcaaacaagaatccggattcagctagaaagtcattatgcttcttgtcgtctgggaacaaccaaacttcagtgactgatggtgatctcaagccattagatgtgaaagaggtggatccagcaactcctgtgatcatcgatcttgaggctcagtgcagtgaaactgagaggatggctaactctgcaaacaaagagaaccgagaaacaagaagcaagcgaaagatgtctgctgaaccaaacccaaatagtattggtggaagactgagacagcgtcgtaagattcaagcttga

SEQ ID NO: 27402 - protein, 462 aa, Arabidopsis thaliana
  misc_feature (1)..(462): Ceres Seq. ID no. 1814013
MPVVRTRAKCSIPVTNPNPTVGGGNSNVSIYEKCREDRIKENLQRMKNLGIMDLSLKLKSEIRPAKRRYGNSNANPGRETSPIQLSVSSRRSSRVFREIISLFYNQIEAGAASFSEILEVISSLKNATPVSYAEEPELKKGKVSKEEIVLWVGEGVRPEIYTEEHEKLLGNTERTWELFVDGCDKNGKRIYDPVRGKCCHQCRIEANVFNGYCGFYRQKTLGYHTQCSQCNHSVRGQFCGDCLYMRYGEHVLEALENPDWICPVCRDICNCSFCRTKKGWLPTGAAYRKIQKLMAFPLNFFCSQIHKLGYKSVAHYLIQTNQQSETSEDDETDAPADSQASEGDHLLLITDGIQDNQIDENLDDDDGSNKNPDSARKSLCFLSSGNNQTSVTDGDLKPLDVKEVDPATPVIIDLEAQCSETERMANSANKENRETRSKRKMSAEPNPNSIGGRLRQRRKIQA

SEQ ID NO: 27403 - protein, 417 aa, Arabidopsis thaliana
  misc_feature (1)..(417): Ceres Seq. ID no. 1814014
MKNLGIMDLSLKLKSEIRPAKRRYGNSNANPGRETSPIQLSVSSRRSSRVFREIISLFYNQIEAGAASFSEILEVISSLKNATPVSYAEEPELKKGKVSKEEIVLWVGEGVRPEIYTEEHEKLLGNTERTWELFVDGCDKNGKRIYDPVRGKCCHQCRIEANVFNGYCGFYRQKTLGYHTQCSQCNHSVRGQFCGDCLYMRYGEHVLEALENPDWICPVCRDICNCSFCRTKKGWLPTGAAYRKIQKLMAFPLNFFCSQIHKLGYKSVAHYLIQTNQQSETSEDDETDAPADSQASEGDHLLLITDGIQDNQIDENLDDDDGSNKNPDSARKSLCFLSSGNNQTSVTDGDLKPLDVKEVDPATPVIIDLEAQCSETERMANSANKENRETRSKRKMSAEPNPNSIGGRLRQRRKIQA

SEQ ID NO: 27404 - protein, 411 aa, Arabidopsis thaliana
  misc_feature (1)..(411): Ceres Seq. ID no. 1814015
MDLSLKLKSEIRPAKRRYGNSNANPGRETSPIQLSVSSRRSSRVFREIISLFYNQIEAGAASFSEILEVISSLKNATPVSYAEEPELKKGKVSKEEIVLWVGEGVRPEIYTEEHEKLLGNTERTWELFVDGCDKNGKRIYDPVRGKCCHQCRIEANVFNGYCGFYRQKTLGYHTQCSQCNHSVRGQFCGDCLYMRYGEHVLEALENPDWICPVCRDICNCSFCRTKKGWLPTGAAYRKIQKLMAFPLNFFCSQIHKLGYKSVAHYLIQTNQQSETSEDDETDAPADSQASEGDHLLLITDGIQDNQIDENLDDDDGSNKNPDSARKSLCFLSSGNNQTSVTDGDLKPLDVKEVDPATPVIIDLEAQCSETERMANSANKENRETRSKRKMSAEPNPNSIGGRLRQRRKIQA

SEQ ID NO: 27405 - DNA, 1218 bp, Arabidopsis thaliana
  misc_feature (1)..(1218): Ceres Seq. ID no. 1814205
atgcagaaacggagaacggtgaaggaatctacgaagataagaaatggtaaaggtatggattccggcgaaaagaagagatctgagaagagattgatgaagttcgaggagttacctaggtatttgaaagataacgagttcatacacaatcattatcgatgtgagtggtcaatcaaagaaactttcctcagcgctttctcatggcacaatgagactctcaacatctggacgcatttgtgtggatttgcgatatttacttggatgatggttgtgagttcaatggagacgacggagcttggcctcgccggctttgttagccttctctccgggaaaattaaacaaatttcaatctttttgggggatttgtgggtcctaatgacagagcaacaattcgctggccatggccgtcaatggcaatgtcaaaagatgtttacttctccagcgatcaaactctgcatcacttccatgtcacacctcttcgcctgtcactccagacggttcaacctcttcttctggcgtctagactacgctggaatctccctcatgatcgtctgttcattcttcgcacctatctactatgcattctcatgccacacttactggcgactcttctacctctcatcgatctcaatcctcggtctcctcgccatcttcactctcctctctccatcactctcagctccacgtttcagatctttcagagcagctctgttcctaacaatgggattttctggcgtaataccagccacacatgtgctttaccttcataaggatcacccaaacgtgcttatagctctcgtatatgaacttgcgatggctgtgttgtatgcaacaggagcagcgttttatgttacccgcatacctgaaagatggaagcctggggcttttgatattgcaggacatagccatcagatattccatgtgtttgtagtcttaggagctcttgctcatagtgttgccagtcttcttatcatggattttcgacgggcttctccttcttcatcgatgaatcccaaactcagaacagcgatcgcagatcgagcgacgattgtgttggggactttgattcgcaagatgggtcgttcttcgtttgatttctctgaaaagtctctccttttcgacattatcgtgacgccattagcaaagcttcggagtttgttgtcgttaggacagaatgagacgaagctactgtgttgtaagctaaagactgagggtgcttag

SEQ ID NO: 27406 - protein, 405 aa, Arabidopsis thaliana
  misc_feature (1)..(405): Ceres Seq. ID no. 1814206
MQKRRTVKESTKIRNGKGMDSGEKKRSEKRLMKFEELPRYLKDNEFIHNHYRCEWSIKETFLSAFSWHNETLNIWTHLCGFAIFTWMMVVSSMETTELGLAGFVSLLSGKIKQISIFLGDLWVLMTEQQFAGHGRQWQCQKMFTSPAIKLCITSMSHLFACHSRRFNLFFWRLDYAGISLMIVCSFFAPIYYAFSCHTYWRLFYLSSISILGLLAIFTLLSPSLSAPRFRSFRAALFLTMGFSGVIPATHVLYLHKDHPNVLIALVYELAMAVLYATGAAFYVTRIPERWKPGAFDIAGHSHQIFHVFVVLGALAHSVASLLIMDFRRASPSSSMNPKLRTAIADRATIVLGTLIRKMGRSSFDFSEKSLLFDIIVTPLAKLRSLLSLGQNETKLLCCKLKTEGA

SEQ ID NO: 27407 - protein, 387 aa, Arabidopsis thaliana
  misc_feature (1)..(387): Ceres Seq. ID no. 1814207
MDSGEKKRSEKRLMKFEELPRYLKDNEFIHNHYRCEWSIKETFLSAFSWHNETLNIWTHLCGFAIFTWMMVVSSMETTELGLAGFVSLLSGKIKQISIFLGDLWVLMTEQQFAGHGRQWQCQKMFTSPAIKLCITSMSHLFACHSRRFNLFFWRLDYAGISLMIVCSFFAPIYYAFSCHTYWRLFYLSSISILGLLAIFTLLSPSLSAPRFRSFRAALFLTMGFSGVIPATHVLYLHKDHPNVLIALVYELAMAVLYATGAAFYVTRIPERWKPGAFDIAGHSHQIFHVFVVLGALAHSVASLLIMDFRRASPSSSMNPKLRTAIADRATIVLGTLIRKMGRSSFDFSEKSLLFDIIVTPLAKLRSLLSLGQNETKLLCCKLKTEGA

SEQ ID NO: 27408 - protein, 374 aa, Arabidopsis thaliana
  misc_feature (1)..(374): Ceres Seq. ID no. 1814208
MKFEELPRYLKDNEFIHNHYRCEWSIKETFLSAFSWHNETLNIWTHLCGFAIFTWMMVVSSMETTELGLAGFVSLLSGKIKQISIFLGDLWVLMTEQQFAGHGRQWQCQKMFTSPAIKLCITSMSHLFACHSRRFNLFFWRLDYAGISLMIVCSFFAPIYYAFSCHTYWRLFYLSSISILGLLAIFTLLSPSLSAPRFRSFRAALFLTMGFSGVIPATHVLYLHKDHPNVLIALVYELAMAVLYATGAAFYVTRIPERWKPGAFDIAGHSHQIFHVFVVLGALAHSVASLLIMDFRRASPSSSMNPKLRTAIADRATIVLGTLIRKMGRSSFDFSEKSLLFDIIVTPLAKLRSLLSLGQNETKLLCCKLKTEGA

SEQ ID NO: 27409 - DNA, 2829 bp, Arabidopsis thaliana
  misc_feature (1)..(2829): Ceres Seq. ID no. 1814302
atgtcaatgtcattttccggcgggactcacaacgatcgttggggctccgatttagcttccgccggagaattcacccaaagctttccatccttaccagcaacatactcaccctcaccctcctcctcctcctcctccggcgaagagctcctagaagtaacaatcgaattcccaagcggcgtaataataaacatcgactccgttaccggaaccggcaccgatatttcaggtaccgatctagagatcacctcttgctcggattccggttcaggatcaaggtcgcttagcttaggatggagcgcgtcgtcggagagactgacggcggggacgaactcaaagcagcagatccagaagatctcacggcgtggttacggttattcgtctcggtctgcaccggaaccggtggttccacacagaggcgaaattaccgattcggttaatctccctcgagctttatctcagcgaccaactagacctaatcgggatggatcgggtacagagagagcgattcatggtttgaaattcataagcagcaaagaaaatggaatcgttgattggaacgatgttcaaaacaatttcgctcatctttctaaagatggttatcttttcaaaagtgattttgctcattgcataggtttggagaatgaaaattccaaagagtttgcagacgagttgttcgacgcattgtgtaggagaagaagaataatggttgataagatcaatcttcaagaattatacgagttttggtaccaaattacagacgaaagcttcgattctcgtcttcaaatcttcttcaacatgtattgttatcaattatcatcaaatcttgttaaacatattgatcaacatattattatactaagtgcatcggcaaataatctatcgaggttgcgagaacgagcagaggaatatgccgcactgatcatggaagaacttgcaccagatggactctattctcagtacatagagttaaaggacctagagatactgctactagagaaggacatatctcatagttacagcctaccgttcagccagacgagccgagccttaagccagaacctaaaggatagaagatggagaatgagcagaaacttgctttactctttgcaagataattggaagaggatttgggttttgacattgtggtttgtgatcatggcctggttatttatgtggaaatgctatcagtacaaacacaaagacgcattccatgtaatgggttactgccttgtcatggcaaaaggcgcagctgagacactgaaattcaacatggctcttattcttttgccggtctgtagaaataccatcacctatctcagatccaccgctttgtcccactcagtgcctttcgatgactgcattaattttcacaagacgatctctgtagcaatcattagtgcaatgcttcttcatgcaaccagccacctcgcctgtgacttcccaaggattctagcatctactgatacagattacaaaagatacttggttaagtactttggtgtgaccagacccacatactttggtttggtgaatactcctgtgggaatcactggaattataatggttgcttttatgttaattgcattcacattagccagtagaagatgcaggcggaacttaactaagttgccgaagccatttgacaaactaaccggatataatgccttctggtattcacatcacttacttctaactgtttacgtccttttagtcatccacggtgtttccctctatctcgagcataaatggtaccgcaaaacggtatggatgtatcttgctgtaccagttttactctatgttggtgagaggatctttagatttttccgttccaggctttacacagtcgaaatctgtaaggttgtaatttatcccggaaacgttgttgtgctacgcatgtctaagcctacatcatttgattacaagagtggacaatatgtatttgttcagtgtccatcagtatcaaaatttgagtggcatccattttctattacttcttcccctggagatgattatctcagcattcacattcgtcagcgcggtgattggacagaagggattaagaaggcattctcagtggtatgtcatgcccctgaagctggaaaaagcggacttctcagagcagatgtaccaaaccaaagaagttttccagagctgttgatagatggaccttatggcgctccagcgcaagaccattggaagtatgatgtggtattactggttggccttggaatcggcgcaacacctttcgttagcattttgagagatctactcaataacattattaagcaacaggaacaagctgaatgcatctcaggtagttgtagtaacagcaacatctcgtcggatcacagtttcagttgcttaaactcagaagctgcgagtcggattccgcaaactcaacggaagacgctgaataccaagaatgcttacttttactgggtaacacgagaacaaggctcgttcgattggttcaaagaaatcatgaacgagattgctgattcagatagaaagggtgttattgagatgcacaactacttgactagcgtctacgaagaaggagatactcgatccaatcttctcactatgatccaaacgttaaaccatgccaaaaatggcgtcgacattttttcaggaaccaaggtaaggacacattttgggaggccaaaatggaagaaagttttatcaaagattagcaccaaacataggaacgcaagaattggagtgttctattgtggagttccaagtttggggaaggaactttcaacactctgccatgaatttaaccagacgggaattaccaggttcgatttccacaaagaacagttctaa

SEQ ID NO: 27410 - protein, 942 aa, Arabidopsis thaliana
  misc_feature (1)..(942): Ceres Seq. ID no. 1814303
MSMSFSGGTHNDRWGSDLASAGEFTQSFPSLPATYSPSPSSSSSSGEELLEVTIEFPSGVIINIDSVTGTGTDISGTDLEITSCSDSGSGSRSLSLGWSASSERLTAGTNSKQQIQKISRRGYGYSSRSAPEPVVPHRGEITDSVNLPRALSQRPTRPNRDGSGTERAIHGLKFISSKENGIVDWNDVQNNFAHLSKDGYLFKSDFAHCIGLENENSKEFADELFDALCRRRRIMVDKINLQELYEFWYQITDESFDSRLQIFFNMYCYQLSSNLVKHIDQHIIILSASANNLSRLRERAEEYAALIMEELAPDGLYSQYIELKDLEILLLEKDISHSYSLPFSQTSRALSQNLKDRRWRMSRNLLYSLQDNWKRIWVLTLWFVIMAWLFMWKCYQYKHKDAFHVMGYCLVMAKGAAETLKFNMALILLPVCRNTITYLRSTALSHSVPFDDCINFHKTISVAIISAMLLHATSHLACDFPRILASTDTDYKRYLVKYFGVTRPTYFGLVNTPVGITGIIMVAFMLIAFTLASRRCRRNLTKLPKPFDKLTGYNAFWYSHHLLLTVYVLLVIHGVSLYLEHKWYRKTVWMYLAVPVLLYVGERIFRFFRSRLYTVEICKVVIYPGNVVVLRMSKPTSFDYKSGQYVFVQCPSVSKFEWHPFSITSSPGDDYLSIHIRQRGDWTEGIKKAFSVVCHAPEAGKSGLLRADVPNQRSFPELLIDGPYGAPAQDHWKYDVVLLVGLGIGATPFVSILRDLLNNIIKQQEQAECISGSCSNSNISSDHSFSCLNSEAASRIPQTQRKTLNTKNAYFYWVTREQGSFDWFKEIMNEIADSDRKGVIEMHNYLTSVYEEGDTRSNLLTMIQTLNHAKNGVDIFSGTKVRTHFGRPKWKKVLSKISTKHRNARIGVFYCGVPSLGKELSTLCHEFNQTGITRFDFHKEQF

SEQ ID NO: 27411 - protein, 940 aa, Arabidopsis thaliana
  misc_feature (1)..(940): Ceres Seq. ID no. 1814304
MSFSGGTHNDRWGSDLASAGEFTQSFPSLPATYSPSPSSSSSSGEELLEVTIEFPSGVIINIDSVTGTGTDISGTDLEITSCSDSGSGSRSLSLGWSASSERLTAGTNSKQQIQKISRRGYGYSSRSAPEPVVPHRGEITDSVNLPRALSQRPTRPNRDGSGTERAIHGLKFISSKENGIVDWNDVQNNFAHLSKDGYLFKSDFAHCIGLENENSKEFADELFDALCRRRRIMVDKINLQELYEFWYQITDESFDSRLQIFFNMYCYQLSSNLVKHIDQHIIILSASANNLSRLRERAEEYAALIMEELAPDGLYSQYIELKDLEILLLEKDISHSYSLPFSQTSRALSQNLKDRRWRMSRNLLYSLQDNWKRIWVLTLWFVIMAWLFMWKCYQYKHKDAFHVMGYCLVMAKGAAETLKFNMALILLPVCRNTITYLRSTALSHSVPFDDCINFHKTISVAIISAMLLHATSHLACDFPRILASTDTDYKRYLVKYFGVTRPTYFGLVNTPVGITGIIMVAFMLIAFTLASRRCRRNLTKLPKPFDKLTGYNAFWYSHHLLLTVYVLLVIHGVSLYLEHKWYRKTVWMYLAVPVLLYVGERIFRFFRSRLYTVEICKVVIYPGNVVVLRMSKPTSFDYKSGQYVFVQCPSVSKFEWHPFSITSSPGDDYLSIHIRQRGDWTEGIKKAFSVVCHAPEAGKSGLLRADVPNQRSFPELLIDGPYGAPAQDHWKYDVVLLVGLGIGATPFVSILRDLLNNIIKQQEQAECISGSCSNSNISSDHSFSCLNSEAASRIPQTQRKTLNTKNAYFYWVTREQGSFDWFKEIMNEIADSDRKGVIEMHNYLTSVYEEGDTRSNLLTMIQTLNHAKNGVDIFSGTKVRTHFGRPKWKKVLSKISTKHRNARIGVFYCGVPSLGKELSTLCHEFNQTGITRFDFHKEQF

SEQ ID NO: 27412 - protein, 708 aa, Arabidopsis thaliana
  misc_feature (1)..(708): Ceres Seq. ID no. 1814305
MVDKINLQELYEFWYQITDESFDSRLQIFFNMYCYQLSSNLVKHIDQHIIILSASANNLSRLRERAEEYAALIMEELAPDGLYSQYIELKDLEILLLEKDISHSYSLPFSQTSRALSQNLKDRRWRMSRNLLYSLQDNWKRIWVLTLWFVIMAWLFMWKCYQYKHKDAFHVMGYCLVMAKGAAETLKFNMALILLPVCRNTITYLRSTALSHSVPFDDCINFHKTISVAIISAMLLHATSHLACDFPRILASTDTDYKRYLVKYFGVTRPTYFGLVNTPVGITGIIMVAFMLIAFTLASRRCRRNLTKLPKPFDKLTGYNAFWYSHHLLLTVYVLLVIHGVSLYLEHKWYRKTVWMYLAVPVLLYVGERIFRFFRSRLYTVEICKVVIYPGNVVVLRMSKPTSFDYKSGQYVFVQCPSVSKFEWHPFSITSSPGDDYLSIHIRQRGDWTEGIKKAFSVVCHAPEAGKSGLLRADVPNQRSFPELLIDGPYGAPAQDHWKYDVVLLVGLGIGATPFVSILRDLLNNIIKQQEQAECISGSCSNSNISSDHSFSCLNSEAASRIPQTQRKTLNTKNAYFYWVTREQGSFDWFKEIMNEIADSDRKGVIEMHNYLTSVYEEGDTRSNLLTMIQTLNHAKNGVDIFSGTKVRTHFGRPKWKKVLSKISTKHRNARIGVFYCGVPSLGKELSTLCHEFNQTGITRFDFHKEQF

SEQ ID NO: 27413 - DNA, 2757 bp, Arabidopsis thaliana
  misc_feature (1)..(2757): Ceres Seq. ID no. 1814371
atggcgattaattcaagtcaccatttttgcccaatgacgacgacgacgactacttcggcgaagtttgtcgattctctgggaagttctttctgcaagttccatggtacaagttcatcaatttcactcaggtcctatagattcggtagtagcagtagtagtagcagtaggaatgagaattggaatagaacacagaagcagaatcagtttagaccttcaaaggtagtgttgaatcgtcgaaaagacgagagattttcggatttaggggttataagtggtgagaacagtagtcgaagtggtgatgttggtggtggtagtgggagtagtagtacaatggagaagattgtagagaagttaaaaaagtatggatttgtggatgaagatcagtttcaggataaggaagttgaacaagagagaagaattgagaagagttcggtggaggaaaggttctatgtggaagaaagaagaggtggattctcggaggaatcaccatttggtgtatatggagggaatgatgaagttaagtttccttgggaaaaggtgagttctatggagaagaaggagttggtaaatggagagtggacagctaagaaggagagtagatactcgctggcggagatgactctttcggaatttgaattgaatcggttgaggaatgtgatgtttcgaacaaagagtaagatgagagttacgggtgcaggtgttactcaggctgtggttgatgcaatccaggagaagtggaaggggtcagagattgtgagacttaagattgaaggatcaagtgcactcaacatgagaaggatgcatgagatattagagagaaaaactggtggtttggtgatttggaggtcagggacttccatcgccttgtacaattacaaaggtggcagcaacagggatggatcagggaacatgaacaagcaagtatacagaagagcagagagattgccatcttctttacctacaagtacagtggatcaaagtgttcaactagtgaatcttcctcagctagagaaggagccaactgttgtgggaaataaagacaggacatctccacaagaagtagaatatgaagatgaaataaatgaactgttagagggtcttggtcctcggtacacggactggcagggaggttatccgttacctgttgatgctgatttgcttccagggattgttcctggttacgaacctccttttagggcacttccttatggagtgagatcaactctgggaacaaaggaggcaacctctttaagaagaattgctacagttcttcctccccactttgctttaggtcgaagtagacagctgcaagggttggcaacagccatggttaagttatggcaaaagagtttgattgccaaggttgcccttaaacgtggtgtacaactgacgaccagtgagagaatggctgaagacatcaaggtaataaggtttcacagccgagtaacatttaattgtttttatataaatgtagatatcattagaataaatgataagagattgacgggaggtatgctgctttcgaggaacaaagattttttggttttctacagaggaaagagttttttgtcactagaagtaggtgaagcattgatggagaaggagatgcttgtaaggactttgcaagacgaagaggaacaagcacgtctaagagcatcatcggctctggttgtcccaagtataaaggctaatcaacaacttgcaaggactttgcaagacaaagaggaacaggcacgtccatcagctctggttttaccaagtactaaagctaatcaaaaccttgtttctgccggtactcttggagaaactcttgatgcaactggtaaatggggaaaaaatctggataacgatgatcatgtggaggaaatgaaacaagaggttgagaaagtgagatctgcaaaacttgtcaggaagttggaaaggaaacttgctttcgctgagaaaaagctgctgaaagctgaacgggctttagctaaggtggaggaatctctgaagccagcagagcagagaacagaccttgagggcataacagaagaagagagatttatgttccaaaagctcggattgaagatgaaagctttcttacttcttggtcgaagaggggtgtttgatgggactgtagagaacatgcacttgcactggaaatatcgggagctgatcaagattcttgtaaaggctaaaactttagagggtgcacagaaagtggcaatggcccttgaagccgagagtggaggtatcctggtttctgttgacaaaatttccaaaggctatgccgtaatcgtgtatagaggaaaagattataaacgtcctaccacactgaggcctaaaaacctcttgacaaagaggaaagctttggctcgttctcttgagcttcaaaaacgcgaggctcttattaaacacattgaggcgatacagacgagatcagagcagctgagagctgaaattgaacaagtggaacttgtaaaagacaagggagatgaaacattatacgacaagcttgacatggcttattcttctgacgaggaaacagaagaaacagatggagaggaagatgacgtgtatttagatacatacgaagacgagggagaagatgatgaagaaggtgggattcaggccaacggttcactatctgaaacagatgttgaatttggttcagatgaatcagacacagattttggcgataattctgcatcctctacaacaccagaaacaacctttgtagaactgcagaatgaggaacttgatgtacaaccataa

SEQ ID NO: 27414 - protein, 918 aa, Arabidopsis thaliana
  misc_feature (1)..(918): Ceres Seq. ID no. 1814372
MAINSSHHFCPMTTTTTTSAKFVDSLGSSFCKFHGTSSSISLRSYRFGSSSSSSSRNENWNRTQKQNQFRPSKVVLNRRKDERFSDLGVISGENSSRSGDVGGGSGSSSTMEKIVEKLKKYGFVDEDQFQDKEVEQERRIEKSSVEERFYVEERRGGFSEESPFGVYGGNDEVKFPWEKVSSMEKKELVNGEWTAKKESRYSLAEMTLSEFELNRLRNVMFRTKSKMRVTGAGVTQAVVDAIQEKWKGSEIVRLKIEGSSALNMRRMHEILERKTGGLVIWRSGTSIALYNYKGGSNRDGSGNMNKQVYRRAERLPSSLPTSTVDQSVQLVNLPQLEKEPTVVGNKDRTSPQEVEYEDEINELLEGLGPRYTDWQGGYPLPVDADLLPGIVPGYEPPFRALPYGVRSTLGTKEATSLRRIATVLPPHFALGRSRQLQGLATAMVKLWQKSLIAKVALKRGVQLTTSERMAEDIKVIRFHSRVTFNCFYINVDIIRINDKRLTGGMLLSRNKDFLVFYRGKSFLSLEVGEALMEKEMLVRTLQDEEEQARLRASSALVVPSIKANQQLARTLQDKEEQARPSALVLPSTKANQNLVSAGTLGETLDATGKWGKNLDNDDHVEEMKQEVEKVRSAKLVRKLERKLAFAEKKLLKAERALAKVEESLKPAEQRTDLEGITEEERFMFQKLGLKMKAFLLLGRRGVFDGTVENMHLHWKYRELIKILVKAKTLEGAQKVAMALEAESGGILVSVDKISKGYAVIVYRGKDYKRPTTLRPKNLLTKRKALARSLELQKREALIKHIEAIQTRSEQLRAEIEQVELVKDKGDETLYDKLDMAYSSDEETEETDGEEDDVYLDTYEDEGEDDEEGGIQANGSLSETDVEFGSDESDTDFGDNSASSTTPETTFVELQNEELDVQP

SEQ ID NO: 27415 - protein, 907 aa, Arabidopsis thaliana
  misc_feature (1)..(907): Ceres Seq. ID no. 1814373
MTTTTTTSAKFVDSLGSSFCKFHGTSSSISLRSYRFGSSSSSSSRNENWNRTQKQNQFRPSKVVLNRRKDERFSDLGVISGENSSRSGDVGGGSGSSSTMEKIVEKLKKYGFVDEDQFQDKEVEQERRIEKSSVEERFYVEERRGGFSEESPFGVYGGNDEVKFPWEKVSSMEKKELVNGEWTAKKESRYSLAEMTLSEFELNRLRNVMFRTKSKMRVTGAGVTQAVVDAIQEKWKGSEIVRLKIEGSSALNMRRMHEILERKTGGLVIWRSGTSIALYNYKGGSNRDGSGNMNKQVYRRAERLPSSLPTSTVDQSVQLVNLPQLEKEPTVVGNKDRTSPQEVEYEDEINELLEGLGPRYTDWQGGYPLPVDADLLPGIVPGYEPPFRALPYGVRSTLGTKEATSLRRIATVLPPHFALGRSRQLQGLATAMVKLWQKSLIAKVALKRGVQLTTSERMAEDIKVIRFHSRVTFNCFYINVDIIRINDKRLTGGMLLSRNKDFLVFYRGKSFLSLEVGEALMEKEMLVRTLQDEEEQARLRASSALVVPSIKANQQLARTLQDKEEQARPSALVLPSTKANQNLVSAGTLGETLDATGKWGKNLDNDDHVEEMKQEVEKVRSAKLVRKLERKLAFAEKKLLKAERALAKVEESLKPAEQRTDLEGITEEERFMFQKLGLKMKAFLLLGRRGVFDGTVENMHLHWKYRELIKILVKAKTLEGAQKVAMALEAESGGILVSVDKISKGYAVIVYRGKDYKRPTTLRPKNLLTKRKALARSLELQKREALIKHIEAIQTRSEQLRAEIEQVELVKDKGDETLYDKLDMAYSSDEETEETDGEEDDVYLDTYEDEGEDDEEGGIQANGSLSETDVEFGSDESDTDFGDNSASSTTPETTFVELQNEELDVQP

SEQ ID NO: 27416 - protein, 808 aa, Arabidopsis thaliana
  misc_feature (1)..(808): Ceres Seq. ID no. 1814374
MEKIVEKLKKYGFVDEDQFQDKEVEQERRIEKSSVEERFYVEERRGGFSEESPFGVYGGNDEVKFPWEKVSSMEKKELVNGEWTAKKESRYSLAEMTLSEFELNRLRNVMFRTKSKMRVTGAGVTQAVVDAIQEKWKGSEIVRLKIEGSSALNMRRMHEILERKTGGLVIWRSGTSIALYNYKGGSNRDGSGNMNKQVYRRAERLPSSLPTSTVDQSVQLVNLPQLEKEPTVVGNKDRTSPQEVEYEDEINELLEGLGPRYTDWQGGYPLPVDADLLPGIVPGYEPPFRALPYGVRSTLGTKEATSLRRIATVLPPHFALGRSRQLQGLATAMVKLWQKSLIAKVALKRGVQLTTSERMAEDIKVIRFHSRVTFNCFYINVDIIRINDKRLTGGMLLSRNKDFLVFYRGKSFLSLEVGEALMEKEMLVRTLQDEEEQARLRASSALVVPSIKANQQLARTLQDKEEQARPSALVLPSTKANQNLVSAGTLGETLDATGKWGKNLDNDDHVEEMKQEVEKVRSAKLVRKLERKLAFAEKKLLKAERALAKVEESLKPAEQRTDLEGITEEERFMFQKLGLKMKAFLLLGRRGVFDGTVENMHLHWKYRELIKILVKAKTLEGAQKVAMALEAESGGILVSVDKISKGYAVIVYRGKDYKRPTTLRPKNLLTKRKALARSLELQKREALIKHIEAIQTRSEQLRAEIEQVELVKDKGDETLYDKLDMAYSSDEETEETDGEEDDVYLDTYEDEGEDDEEGGIQANGSLSETDVEFGSDESDTDFGDNSASSTTPETTFVELQNEELDVQP

SEQ ID NO: 27417 - DNA, 1764 bp, Arabidopsis thaliana
  misc_feature (1)..(1764): Ceres Seq. ID no. 1814512
atgtactcaaaactcgaccatccggaatcagcccgactcgttctccgactcactcctgcacgaaacgtcgtctcttggacttcacttatctccggacttgctcagaacggtcatttctccaccgctttggttgaattcttcgagatgcgacgagaagctgtggcttctctgcgtttacccgttactgggaagcagattcatgcgcttgctgtgaagtgtggtaggatacttgatgtgtttgttgggtgtagtgcttttgatatgtattgcaaaactaggcttagagatgatgcacggaagttgttcgatgaaattcctgagaggaaccttgaaacttggaatgcttttatatctaactctgtgactgatggaaggcctagggaagctattgaagcgtttattgagtttagaaggattgatgggcacccgaattcgataactttttgtgctttccttaatgcttgttcggattggttacacttgaatctaggaatgcagttacacgggcttgtgttacgaagtgggtttgatacagacgtctctatacgtagcagtgagattatctttactgaaatgggaactaaaaatgctgtttcttggtgttcattggttgctgcatatgtgcagaatcatgaggatgagaaggcgtctgtattatatttacgctcaaggaaggatattgttgagacctctgattttatgatatcaagtgttctgagtgcgtgtgctggtatggctggtcttgagttgggaagatcgatacatgctcacgctgtgaaggcgtgtgttgaaaggactatatttgttggaagtgccctcgttgacatgtatggaaaatgtggatgtatagaagattcagaacaagcgtttgatgagatgcctgagaagaacttagtgactcggaattcattgatcggaggatatgctcatcagggtcaggttgatatggcattggctttatttgaagaaatggcaccacgtggatgtggggctgtggaaaatggtatgaagatatttgattcgatgaggagtacttatggcattgagccaggggctgagcattattcatgcatcgtggacatgctagggcgagcgggaatggtagaacgggcttatgaattcataaagaaaatgccaattcaaccgacaatttcggtttggggtgctcttcagaatgcttgtaggatgcatggtaagccacagctgggattactagcagctgagaaccttttcaaactcgaccctaaggattcaggcaaccacgttctgctttccaatacgtttgcagcggctgggaggtgggcggaagccaacaccgtaagagaggagctgaaaggcgtagggatcaagaaaggagccggatacagttggatcacagtgaagaaccaagtccatgcctttcaagccaaggacagatcccacatactgaacaaagaaattcaaacaacgctggccaagctaaggaacgaaatggaagctgcagggtacaaacccgacctgaaactctcgctttacgatctggaggaagaagaaaaagcagcagaagtctcgcaccacagtgagaaactggctctagcatttggattgttatctttaccactcagtgtcccaatcagaatcaccaagaaccttagaatctgcggagattgccacagcttcttcaagtttgtctctgggagtgttaaacgagagatcattgtgagagacaataaccggtttcatcggtttaaagatgggatatgttcttgtaaggattattggtaa

SEQ ID NO: 27418 - protein, 587 aa, Arabidopsis thaliana
  misc_feature (1)..(587): Ceres Seq. ID no. 1814513
MYSKLDHPESARLVLRLTPARNVVSWTSLISGLAQNGHFSTALVEFFEMRREAVASLRLPVTGKQIHALAVKCGRILDVFVGCSAFDMYCKTRLRDDARKLFDEIPERNLETWNAFISNSVTDGRPREAIEAFIEFRRIDGHPNSITFCAFLNACSDWLHLNLGMQLHGLVLRSGFDTDVSIRSSEIIFTEMGTKNAVSWCSLVAAYVQNHEDEKASVLYLRSRKDIVETSDFMISSVLSACAGMAGLELGRSIHAHAVKACVERTIFVGSALVDMYGKCGCIEDSEQAFDEMPEKNLVTRNSLIGGYAHQGQVDMALALFEEMAPRGCGAVENGMKIFDSMRSTYGIEPGAEHYSCIVDMLGRAGMVERAYEFIKKMPIQPTISVWGALQNACRMHGKPQLGLLAAENLFKLDPKDSGNHVLLSNTFAAAGRWAEANTVREELKGVGIKKGAGYSWITVKNQVHAFQAKDRSHILNKEIQTTLAKLRNEMEAAGYKPDLKLSLYDLEEEEKAAEVSHHSEKLALAFGLLSLPLSVPIRITKNLRICGDCHSFFKFVSGSVKREIIVRDNNRFHRFKDGICSCKDYW

SEQ ID NO: 27419 - protein, 539 aa, Arabidopsis thaliana
  misc_feature (1)..(539): Ceres Seq. ID no. 1814514
MRREAVASLRLPVTGKQIHALAVKCGRILDVFVGCSAFDMYCKTRLRDDARKLFDEIPERNLETWNAFISNSVTDGRPREAIEAFIEFRRIDGHPNSITFCAFLNACSDWLHLNLGMQLHGLVLRSGFDTDVSIRSSEIIFTEMGTKNAVSWCSLVAAYVQNHEDEKASVLYLRSRKDIVETSDFMISSVLSACAGMAGLELGRSIHAHAVKACVERTIFVGSALVDMYGKCGCIEDSEQAFDEMPEKNLVTRNSLIGGYAHQGQVDMALALFEEMAPRGCGAVENGMKIFDSMRSTYGIEPGAEHYSCIVDMLGRAGMVERAYEFIKKMPIQPTISVWGALQNACRMHGKPQLGLLAAENLFKLDPKDSGNHVLLSNTFAAAGRWAEANTVREELKGVGIKKGAGYSWITVKNQVHAFQAKDRSHILNKEIQTTLAKLRNEMEAAGYKPDLKLSLYDLEEEEKAAEVSHHSEKLALAFGLLSLPLSVPIRITKNLRICGDCHSFFKFVSGSVKREIIVRDNNRFHRFKDGICSCKDYW

SEQ ID NO: 27420 - protein, 500 aa, Arabidopsis thaliana
  misc_feature (1)..(500): Ceres Seq. ID no. 1814515
MYCKTRLRDDARKLFDEIPERNLETWNAFISNSVTDGRPREAIEAFIEFRRIDGHPNSITFCAFLNACSDWLHLNLGMQLHGLVLRSGFDTDVSIRSSEIIFTEMGTKNAVSWCSLVAAYVQNHEDEKASVLYLRSRKDIVETSDFMISSVLSACAGMAGLELGRSIHAHAVKACVERTIFVGSALVDMYGKCGCIEDSEQAFDEMPEKNLVTRNSLIGGYAHQGQVDMALALFEEMAPRGCGAVENGMKIFDSMRSTYGIEPGAEHYSCIVDMLGRAGMVERAYEFIKKMPIQPTISVWGALQNACRMHGKPQLGLLAAENLFKLDPKDSGNHVLLSNTFAAAGRWAEANTVREELKGVGIKKGAGYSWITVKNQVHAFQAKDRSHILNKEIQTTLAKLRNEMEAAGYKPDLKLSLYDLEEEEKAAEVSHHSEKLALAFGLLSLPLSVPIRITKNLRICGDCHSFFKFVSGSVKREIIVRDNNRFHRFKDGICSCKDYW

SEQ ID NO: 27421 - DNA, 1023 bp, Arabidopsis thaliana
  misc_feature (1)..(1023): Ceres Seq. ID no. 1814805
atgtcgttgcttgtatttctttgccaaattatagtattatcggtcttgttcttctccgaggtgtgccttgccggtaaaaaaattccagcaaattttgtgttcggagattcattggtggatgccggaaacaacaactacttagccacattgtcaaaggctaattatgttcctaatgggatcgattttggatcacctactggtcgattcactaacggaagaacaatcgtcgatatcgtatatcaagcattaggttccgacgagttaactccaccatacttagcaccaacaacaagcggatctctcattctcaatggcgttaattatgcttcgggcggaagtggaattctcaattccaccggaaaattatttagattgtaccaattgggtgcgaggaaaatcgtggtgattaatattggtcccatcggttgtataccattcgagagagagtctgatccagccgctggaaataactgtttggccgaacctaatgaggtattatttctgaaattttacactcgagtgtgtgttgaattcgaacttcatttccacaagtttctctacaatagactcatttcagaccccatcggttgtataccgttcgagagagagtctgacccaatggctggatatgaatgttctgtcgaacctaatgaagtggctcaaatgtataatctcaagctgaaaatactcgtcgaggagttaaacaataatctacaaggttcaagattcgtctacggtgacgtttttcgcattgtttatgatattatacaaaattattcatcttacggttttgagagtgagaagattccttgttgttcgttagttgggaaagtaggtgggctgattccatgcggcccgccttcaaaagtatgtatggaccgttccaaatatgtattttgggatccttaccatcctaccgaagctgctaacatcatcattgctaggcgtctactctccggcgacacctccgatatttatccgatcaatctccggcaactcgctaacctcaagatatatgcatga

SEQ ID NO: 27422 - protein, 340 aa, Arabidopsis thaliana
  misc_feature (1)..(340): Ceres Seq. ID no. 1814806
MSLLVFLCQIIVLSVLFFSEVCLAGKKIPANFVFGDSLVDAGNNNYLATLSKANYVPNGIDFGSPTGRFTNGRTIVDIVYQALGSDELTPPYLAPTTSGSLILNGVNYASGGSGILNSTGKLFRLYQLGARKIVVINIGPIGCIPFERESDPAAGNNCLAEPNEVLFLKFYTRVCVEFELHFHKFLYNRLISDPIGCIPFERESDPMAGYECSVEPNEVAQMYNLKLKILVEELNNNLQGSRFVYGDVFRIVYDIIQNYSSYGFESEKIPCCSLVGKVGGLIPCGPPSKVCMDRSKYVFWDPYHPTEAANIIIARRLLSGDTSDIYPINLRQLANLKIYA

SEQ ID NO: 27423 - DNA, 1224 bp, Arabidopsis thaliana
  misc_feature (1)..(1224): Ceres Seq. ID no. 1815028
atggtggtgatgatgaaggcaactcgagggacgagagatccagatctacttgggctaatgttcgtacatcatcaattcctcttctgcgttatcagttttttttatttattgttgagagattttgaatttctgttgaacgattcttcttctggaatctggacatggtcgcaggtggtttccgaaacccaggctcttccttacctgcaaaaagcctttaatattcagcattttgatttccccacgcaggaggaccaggaagagaatacatatgcggctaaagtgagcgagaaacaagacttctcgaaggagcaatggcaagattacaaacgcccagcaagtgaacaacactactcagacgaagttgaaacttatggaaacctagaaccctcacaactagagctctcaggtctctcagaagcttgcaacaaactgtgggagctcgatttaaaccgccttgttcctggaaggattatcaaatcgactgcggagatgggaaaagggtccatgagagagctgatatggctgaaggactactgttctcttggattctgttcattgcttgacaactacaaccccaacgaaggttacaaagaagtggtcacagaagaagagaggcaagagcaagcggctttcattgaagaaattagcagaacctctgtgatcaagtaccttcacaggtaccttgtgctcaaggacgtcgctcctggaagctacttagagttcaagagaatgttgacaagtctctggttcgatctgtatggccgcggaggtacatctggctcatcttctgcgtttgagcatgtctttgtaggtgagatcaaacaatctggtgggaacaagtctctggattccataactggcttcagtacttcaaaaccggtgactgaccgagaaaccacacttttgcttcgtatgcagcctgattcagagactcagctgctaacaatccaattcgagtggaacggtgttctaaaatcagtctcaagtactctagttggagtaagtccagagttcgagttggctctatacaccatgtgtttcttcatgggcacagaagataaccacattcagttgggtccatacaatgtcaatgtcaaatgttaccgacttggcaacaaccgtatcgcgctcagctttccccattgcagaatcttgaaacctctcttgatggctctggtcacaaaatatctgccccttgcgcagtactgtattgaattattgtga

SEQ ID NO: 27424 - protein, 407 aa, Arabidopsis thaliana
  misc_feature (1)..(407): Ceres Seq. ID no. 1815029
MVVMMKATRGTRDPDLLGLMFVHHQFLFCVISFFYLLLRDFEFLLNDSSSGIWTWSQVVSETQALPYLQKAFNIQHFDFPTQEDQEENTYAAKVSEKQDFSKEQWQDYKRPASEQHYSDEVETYGNLEPSQLELSGLSEACNKLWELDLNRLVPGRIIKSTAEMGKGSMRELIWLKDYCSLGFCSLLDNYNPNEGYKEVVTEEERQEQAAFIEEISRTSVIKYLHRYLVLKDVAPGSYLEFKRMLTSLWFDLYGRGGTSGSSSAFEHVFVGEIKQSGGNKSLDSITGFSTSKPVTDRETTLLLRMQPDSETQLLTIQFEWNGVLKSVSSTLVGVSPEFELALYTMCFFMGTEDNHIQLGPYNVNVKCYRLGNNRIALSFPHCRILKPLLMALVTKYLPLAQYCIELL

SEQ ID NO: 27425 - protein, 404 aa, Arabidopsis thaliana
  misc_feature (1)..(404): Ceres Seq. ID no. 1815030
MMKATRGTRDPDLLGLMFVHHQFLFCVISFFYLLLRDFEFLLNDSSSGIWTWSQVVSETQALPYLQKAFNIQHFDFPTQEDQEENTYAAKVSEKQDFSKEQWQDYKRPASEQHYSDEVETYGNLEPSQLELSGLSEACNKLWELDLNRLVPGRIIKSTAEMGKGSMRELIWLKDYCSLGFCSLLDNYNPNEGYKEVVTEEERQEQAAFIEEISRTSVIKYLHRYLVLKDVAPGSYLEFKRMLTSLWFDLYGRGGTSGSSSAFEHVFVGEIKQSGGNKSLDSITGFSTSKPVTDRETTLLLRMQPDSETQLLTIQFEWNGVLKSVSSTLVGVSPEFELALYTMCFFMGTEDNHIQLGPYNVNVKCYRLGNNRIALSFPHCRILKPLLMALVTKYLPLAQYCIELL

SEQ ID NO: 27426 - protein, 403 aa, Arabidopsis thaliana
  misc_feature (1)..(403): Ceres Seq. ID no. 1815031
MKATRGTRDPDLLGLMFVHHQFLFCVISFFYLLLRDFEFLLNDSSSGIWTWSQVVSETQALPYLQKAFNIQHFDFPTQEDQEENTYAAKVSEKQDFSKEQWQDYKRPASEQHYSDEVETYGNLEPSQLELSGLSEACNKLWELDLNRLVPGRIIKSTAEMGKGSMRELIWLKDYCSLGFCSLLDNYNPNEGYKEVVTEEERQEQAAFIEEISRTSVIKYLHRYLVLKDVAPGSYLEFKRMLTSLWFDLYGRGGTSGSSSAFEHVFVGEIKQSGGNKSLDSITGFSTSKPVTDRETTLLLRMQPDSETQLLTIQFEWNGVLKSVSSTLVGVSPEFELALYTMCFFMGTEDNHIQLGPYNVNVKCYRLGNNRIALSFPHCRILKPLLMALVTKYLPLAQYCIELL

SEQ ID NO: 27427 - DNA, 1116 bp, Arabidopsis thaliana
  misc_feature (1)..(1116): Ceres Seq. ID no. 1815137
atggagaaagagaaaaaaaacataagaggaagagagttcttgcaaaagtcagctccagaattaacgacgagaaagacaactttgtcgttcaatctcccaacaccaagatctctgccatctccaacgagtatcaaagacttgtacacagacagagaacaaaatcaaaatcaaaacctgagggttttttctttcaaggaactgagtgacgccacttgtgagtttagcaggaagctaaagatcggagaaggtggctttggtagtgtctataaagccaccattaacaatcccaccgtaggagattctcattcttctccacttaccgtagccgttaagaaactcaatagacaaagtctacagggtcacaagcaatggctagcagaggttcactttttgggagtggtgaatcaccctaacgttgtgaggctcttagggtattgctcagaggacagagagagacttttggtttacgagttgatgtctaatcgcagcttggaggatcatctcttcactctaagaaccttaacgttgtcgtggaaacaaaggctcgagatcatgcttggtgcagctcaaggattggcttatttgcacgaaatccaggtaatatacagagacttcaaatcatcaaatgtgctattaaatgaagaattccatccgaaattatccgattttggtctcgctagagaaggtcccgaaggagacaatactcacgttacaaccgcaagagttggaacagacggctatgccgctcccgagtatgtaataaccggtcacctcaagacacattgcgatgtatatagctttggagttgttttgtacgaaattatcactggtcgtcgcacattggaacgaatgaaacctttagctgaacaaaagcttctagaatgggtcaaaaaatatcctattaatagcaaaagattcaaaatgatcgttgactccaagctatgcaataagtatccaattgctatggtcaggagagtggctaaattggctgatcattgtgtgaacaagatcgataaagaaagacctaccatggcctttgtcgtcgaaagtcttacgaatatcattgaggaatcaaattctgaagatatgggaagttctgttggcattagaggctag

SEQ ID NO: 27428 - protein, 371 aa, Arabidopsis thaliana
  misc_feature (1)..(371): Ceres Seq. ID no. 1815138
MEKEKKNIRGREFLQKSAPELTTRKTTLSFNLPTPRSLPSPTSIKDLYTDREQNQNQNLRVFSFKELSDATCEFSRKLKIGEGGFGSVYKATINNPTVGDSHSSPLTVAVKKLNRQSLQGHKQWLAEVHFLGVVNHPNVVRLLGYCSEDRERLLVYELMSNRSLEDHLFTLRTLTLSWKQRLEIMLGAAQGLAYLHEIQVIYRDFKSSNVLLNEEFHPKLSDFGLAREGPEGDNTHVTTARVGTDGYAAPEYVITGHLKTHCDVYSFGVVLYEIITGRRTLERMKPLAEQKLLEWVKKYPINSKRFKMIVDSKLCNKYPIAMVRRVAKLADHCVNKIDKERPTMAFVVESLTNIIEESNSEDMGSSVGIRG

SEQ ID NO: 27429 - protein, 213 aa, Arabidopsis thaliana
  misc_feature (1)..(213): Ceres Seq. ID no. 1815139
MSNRSLEDHLFTLRTLTLSWKQRLEIMLGAAQGLAYLHEIQVIYRDFKSSNVLLNEEFHPKLSDFGLAREGPEGDNTHVTTARVGTDGYAAPEYVITGHLKTHCDVYSFGVVLYEIITGRRTLERMKPLAEQKLLEWVKKYPINSKRFKMIVDSKLCNKYPIAMVRRVAKLADHCVNKIDKERPTMAFVVESLTNIIEESNSEDMGSSVGIRG

SEQ ID NO: 27430 - protein, 187 aa, Arabidopsis thaliana
  misc_feature (1)..(187): Ceres Seq. ID no. 1815140
MLGAAQGLAYLHEIQVIYRDFKSSNVLLNEEFHPKLSDFGLAREGPEGDNTHVTTARVGTDGYAAPEYVITGHLKTHCDVYSFGVVLYEIITGRRTLERMKPLAEQKLLEWVKKYPINSKRFKMIVDSKLCNKYPIAMVRRVAKLADHCVNKIDKERPTMAFVVESLTNIIEESNSEDMGSSVGIRG

SEQ ID NO: 27431 - DNA, 1095 bp, Arabidopsis thaliana
  misc_feature (1)..(1095): Ceres Seq. ID no. 1815216
atggcggatgttaaggactcagtgattaccaagtacggaatcgtagggattggtatgatgggaagagaacatctcatcaatcttcaccatctccgtgaccaaggcctcgccgtcgtttgcatcgccgatcctcaccctccttcacagctcctggccattgaactcgctcaatcttttggatgggagcttaaggttttctcaggacacgaggagttgctcaagagtgagctgtgtgacgttattgttgtctcttctccaaatatgactcatcatcagattcttatggacattatcaattattcaaaaccgcatcatgttcttgttgagaagcctttatgcaccacagttgcagattgcaaacaggttttggaggctgcaaagaaaaggtcagatatggtggtgcaagttgggttggagtacagatacatgccgccagttgctaagctaatagaacaagtaaaaggcagagactttggtaatgtcaagatggtagcaatccgagaacatagattccctttcttggttaaggtaggcttaaacaagatgggactatggaccttagtggagaaatgctgccacttctttgatctaatgaggctctttgccggtgcaaatcctgtctgtgtgatggcttctggaggcatggatgtgaaccacaaggatgaagtttatggtggaaaggtgcctgatataattgataacgcatatgttattattgagtttgacaatggatgtcgtgggatgctcgatctttgcatgtttgctgaaggaagcaaaaacgagcaagaaatttctgttactggtgacattggaaagggggaggcacttgttccagagggtatagttcgatctggcagtcgtattggaggaagagaacacgttcaaacaataaaagcagaagatgaaagaataaaatatgaagggttgcatcacgggtcaagttacttggaacacctcaccttcttatcagcaatcagaggtgaaggaatagcagctgttgatttggaagacggattgatggctgttgccatgggagttgctgcacagctctccattcaggagcgccgctatgtaaccattgacgaggtcttgtga

SEQ ID NO: 27432 - protein, 364 aa, Arabidopsis thaliana
  misc_feature (1)..(364): Ceres Seq. ID no. 1815217
MADVKDSVITKYGIVGIGMMGREHLINLHHLRDQGLAVVCIADPHPPSQLLAIELAQSFGWELKVFSGHEELLKSELCDVIVVSSPNMTHHQILMDIINYSKPHHVLVEKPLCTTVADCKQVLEAAKKRSDMVVQVGLEYRYMPPVAKLIEQVKGRDFGNVKMVAIREHRFPFLVKVGLNKMGLWTLVEKCCHFFDLMRLFAGANPVCVMASGGMDVNHKDEVYGGKVPDIIDNAYVIIEFDNGCRGMLDLCMFAEGSKNEQEISVTGDIGKGEALVPEGIVRSGSRIGGREHVQTIKAEDERIKYEGLHHGSSYLEHLTFLSAIRGEGIAAVDLEDGLMAVAMGVAAQLSIQERRYVTIDEVL

SEQ ID NO: 27433 - protein, 346 aa, Arabidopsis thaliana
  misc_feature (1)..(346): Ceres Seq. ID no. 1815218
MMGREHLINLHHLRDQGLAVVCIADPHPPSQLLAIELAQSFGWELKVFSGHEELLKSELCDVIVVSSPNMTHHQILMDIINYSKPHHVLVEKPLCTTVADCKQVLEAAKKRSDMVVQVGLEYRYMPPVAKLIEQVKGRDFGNVKMVAIREHRFPFLVKVGLNKMGLWTLVEKCCHFFDLMRLFAGANPVCVMASGGMDVNHKDEVYGGKVPDIIDNAYVIIEFDNGCRGMLDLCMFAEGSKNEQEISVTGDIGKGEALVPEGIVRSGSRIGGREHVQTIKAEDERIKYEGLHHGSSYLEHLTFLSAIRGEGIAAVDLEDGLMAVAMGVAAQLSIQERRYVTIDEVL

SEQ ID NO: 27434 - protein, 345 aa, Arabidopsis thaliana
  misc_feature (1)..(345): Ceres Seq. ID no. 1815219
MGREHLINLHHLRDQGLAVVCIADPHPPSQLLAIELAQSFGWELKVFSGHEELLKSELCDVIVVSSPNMTHHQILMDIINYSKPHHVLVEKPLCTTVADCKQVLEAAKKRSDMVVQVGLEYRYMPPVAKLIEQVKGRDFGNVKMVAIREHRFPFLVKVGLNKMGLWTLVEKCCHFFDLMRLFAGANPVCVMASGGMDVNHKDEVYGGKVPDIIDNAYVIIEFDNGCRGMLDLCMFAEGSKNEQEISVTGDIGKGEALVPEGIVRSGSRIGGREHVQTIKAEDERIKYEGLHHGSSYLEHLTFLSAIRGEGIAAVDLEDGLMAVAMGVAAQLSIQERRYVTIDEVL

SEQ ID NO: 27435 - DNA, 951 bp, Arabidopsis thaliana
  misc_feature (1)..(951): Ceres Seq. ID no. 1815443
atgtcttcttcgtctcctcctttctgttccggtggaagtcggaaggagctccgagataaagaaattacgagtaagagtgatgatacacaggcgagttatgttttaggatctaaatttgtggacccgacacgtgttcttcaactttcatggctaccaaggaatgtatgttttactgcttcaaattttaggggtctgaagcaatttggtatgtatagggtctttctataccgcgggttcttgtcggaggaagagtgtgatcatctgatatctctgagaaaggagactacagaggtttactcagtggatgctgatggaaagacgcaacttgatccagtagttgctgggattgaagaaaaagtttctgcgtggactttcctcccaggaggtctcttttcttgtggccaaactgctggcttatgtttctctcttgacgcacatttttcagaaaatggcggctctatcaaggtaagaagttacacttctgagaagtcaggaaagaagttggattattttggagaggaacctagctccgtattgcatgaatctttgctggcaaccgtcgttctctacctctcaaacacaactcaaggaggagagcttctcttcccaaattcagagatgaaacccaaaaacagttgcttggagggcggtaacattttaagaccagtaaaaggaaacgcaattctgttcttcaccaggctcttgaatgcatctttggatgggaaaagcactcatttgaggtgccctgtggtgaaaggagaactgttagtggcaacaaaactgatctatgcgaagaaacaagcaagaattgaggagagtggggaatgcagtgatgaagacgaaaactgtggacgatgggctaagcttggggagtgcaagaaaaaccctgtctatatgattggctctcctgattactacggtacctgcagaaagagttgtaacgcttgttga

SEQ ID NO: 27436 - protein, 316 aa, Arabidopsis thaliana
  misc_feature (1)..(316): Ceres Seq. ID no. 1815444
MSSSSPPFCSGGSRKELRDKEITSKSDDTQASYVLGSKFVDPTRVLQLSWLPRNVCFTASNFRGLKQFGMYRVFLYRGFLSEEECDHLISLRKETTEVYSVDADGKTQLDPVVAGIEEKVSAWTFLPGGLFSCGQTAGLCFSLDAHFSENGGSIKVRSYTSEKSGKKLDYFGEEPSSVLHESLLATVVLYLSNTTQGGELLFPNSEMKPKNSCLEGGNILRPVKGNAILFFTRLLNASLDGKSTHLRCPVVKGELLVATKLIYAKKQARIEESGECSDEDENCGRWAKLGECKKNPVYMIGSPDYYGTCRKSCNAC

SEQ ID NO: 27437 - protein, 247 aa, Arabidopsis thaliana
  misc_feature (1)..(247): Ceres Seq. ID no. 1815445
MYRVFLYRGFLSEEECDHLISLRKETTEVYSVDADGKTQLDPVVAGIEEKVSAWTFLPGGLFSCGQTAGLCFSLDAHFSENGGSIKVRSYTSEKSGKKLDYFGEEPSSVLHESLLATVVLYLSNTTQGGELLFPNSEMKPKNSCLEGGNILRPVKGNAILFFTRLLNASLDGKSTHLRCPVVKGELLVATKLIYAKKQARIEESGECSDEDENCGRWAKLGECKKNPVYMIGSPDYYGTCRKSCNAC

SEQ ID NO: 27438 - DNA, 1683 bp, Arabidopsis thaliana
  misc_feature (1)..(1683): Ceres Seq. ID no. 1815696
atggctgagaccaaacctgaaatagagatgtcggaggaagagaggaagatagtgaagataagctcgctgaagaagaaagcgataaatgcatccaacagattcaagaactccttcaagaaaaaaggtcggagaagcagcagcagagtcatgtccgttccgattgaggacgacattgacgcagaagatcttcaagctcttgatgcttttcgtcaagctcttatccttgacgagcttttgccatccaaactcgatgatctccacatgatgcttcgatttttgagagcaagaaagtttgacattgagaaagctaagcaaatgtggagtgacatgatccaatggaggaaagatttcggcgctgacacaatcattgaggattttgatttcgaagaaattgatgaagtgatgaagcactaccctcaaggctatcatggagttgacaaggaaggcagaccagtttacattgagagactaggtcaaatcgatgctaacaagctactccaagtgacaacaatggaccggtacgtgaaatatcatgtcaaagagttcgagaagactttcaaggtcaagttcccttcttgttctgtagcagcaaataaacacattgatcagagcacaacaattcttgacgtgcaaggcgtgggtcttaagaacttcagcaaatctgcaagagagcttcttcaaaggctttgcaagattgacaatgaaaattaccctgagactttgaaccggatgtttatcatcaatgctggttctggattccggctcttgtggagcacagttaagtcgtttcttgatcccaagaccacagcaaagattcatgttcttgggaacaaatatcatagcaaattgctcgaggtcatcgatgctagtgaattgcctgagttctttggaggtgcttgcacttgtgaagacaaaggaggttgtatgcgctctgacaaaggtccatggaatgatcctgaagttctcaagatcgctataaaccgtgaagctaagtgttcaccgatttcagaagatgaacacaagcatgtagaccaaggaagatcaacttcaggtttcgaaagtcttgagagaatcaagaagaaaaccgatgaagataatgtgtatgagaagcaaattgcaaccattgacaagtcaatggatatggcatggcttgccaaaactcagaaagctgaaaactttccaatctctaaaggtataactaaactcatgaaaggggcacccaagaaaggagatggattacttgtgggaggggtcatggcctttgtgatgggaatagttgcaatggttaggctatcaaaagacgttccacgcaaactcaccgaggctgctttatatggaaactcagtctgttatgaggaatctacaaagtctaagcagaatcaaggtcaattcgcagcaccagtctcgagctctgaatatatgttgatggtgaaacgtatggctgagctggaagataagtgcatgttccttgacttgaaacctgctcatgtcgaatctgagaaagaagagaaacttcaggccgcgcttaatcgcgttcaagtgcttgagcaagagttgactgagaccaagaaggctttggaagaagcacttgtgagccagaaggagattttggcatacatcgagaaaaagaagaagaagaagaagctggtaagaacaaaacattcacacacatcggttatttaa

SEQ ID NO: 27439 - protein, 560 aa, Arabidopsis thaliana
  misc_feature (1)..(560): Ceres Seq. ID no. 1815697
MAETKPEIEMSEEERKIVKISSLKKKAINASNRFKNSFKKKGRRSSSRVMSVPIEDDIDAEDLQALDAFRQALILDELLPSKLDDLHMMLRFLRARKFDIEKAKQMWSDMIQWRKDFGADTIIEDFDFEEIDEVMKHYPQGYHGVDKEGRPVYIERLGQIDANKLLQVTTMDRYVKYHVKEFEKTFKVKFPSCSVAANKHIDQSTTILDVQGVGLKNFSKSARELLQRLCKIDNENYPETLNRMFIINAGSGFRLLWSTVKSFLDPKTTAKIHVLGNKYHSKLLEVIDASELPEFFGGACTCEDKGGCMRSDKGPWNDPEVLKIAINREAKCSPISEDEHKHVDQGRSTSGFESLERIKKKTDEDNVYEKQIATIDKSMDMAWLAKTQKAENFPISKGITKLMKGAPKKGDGLLVGGVMAFVMGIVAMVRLSKDVPRKLTEAALYGNSVCYEESTKSKQNQGQFAAPVSSSEYMLMVKRMAELEDKCMFLDLKPAHVESEKEEKLQAALNRVQVLEQELTETKKALEEALVSQKEILAYIEKKKKKKKLVRTKHSHTSVI

SEQ ID NO: 27440 - protein, 551 aa, Arabidopsis thaliana
  misc_feature (1)..(551): Ceres Seq. ID no. 1815698
MSEEERKIVKISSLKKKAINASNRFKNSFKKKGRRSSSRVMSVPIEDDIDAEDLQALDAFRQALILDELLPSKLDDLHMMLRFLRARKFDIEKAKQMWSDMIQWRKDFGADTIIEDFDFEEIDEVMKHYPQGYHGVDKEGRPVYIERLGQIDANKLLQVTTMDRYVKYHVKEFEKTFKVKFPSCSVAANKHIDQSTTILDVQGVGLKNFSKSARELLQRLCKIDNENYPETLNRMFIINAGSGFRLLWSTVKSFLDPKTTAKIHVLGNKYHSKLLEVIDASELPEFFGGACTCEDKGGCMRSDKGPWNDPEVLKIAINREAKCSPISEDEHKHVDQGRSTSGFESLERIKKKTDEDNVYEKQIATIDKSMDMAWLAKTQKAENFPISKGITKLMKGAPKKGDGLLVGGVMAFVMGIVAMVRLSKDVPRKLTEAALYGNSVCYEESTKSKQNQGQFAAPVSSSEYMLMVKRMAELEDKCMFLDLKPAHVESEKEEKLQAALNRVQVLEQELTETKKALEEALVSQKEILAYIEKKKKKKKLVRTKHSHTSVI

SEQ ID NO: 27441 - protein, 511 aa, Arabidopsis thaliana
  misc_feature (1)..(511): Ceres Seq. ID no. 1815699
MSVPIEDDIDAEDLQALDAFRQALILDELLPSKLDDLHMMLRFLRARKFDIEKAKQMWSDMIQWRKDFGADTIIEDFDFEEIDEVMKHYPQGYHGVDKEGRPVYIERLGQIDANKLLQVTTMDRYVKYHVKEFEKTFKVKFPSCSVAANKHIDQSTTILDVQGVGLKNFSKSARELLQRLCKIDNENYPETLNRMFIINAGSGFRLLWSTVKSFLDPKTTAKIHVLGNKYHSKLLEVIDASELPEFFGGACTCEDKGGCMRSDKGPWNDPEVLKIAINREAKCSPISEDEHKHVDQGRSTSGFESLERIKKKTDEDNVYEKQIATIDKSMDMAWLAKTQKAENFPISKGITKLMKGAPKKGDGLLVGGVMAFVMGIVAMVRLSKDVPRKLTEAALYGNSVCYEESTKSKQNQGQFAAPVSSSEYMLMVKRMAELEDKCMFLDLKPAHVESEKEEKLQAALNRVQVLEQELTETKKALEEALVSQKEILAYIEKKKKKKKLVRTKHSHTSVI

SEQ ID NO: 27442 - DNA, 2025 bp, Arabidopsis thaliana
  misc_feature (1)..(2025): Ceres Seq. ID no. 1815726
atggcggactcaccggtggattcatctcctgcccctgaaacctcaaatgggacaccaccgtcaaacggaacatcgccgtctaatgagtcatcgccgccaacaccaccttcttcaccaccaccatcatcaatatctgctcctccgccagatatctccgcttctttttcaccgccgcctgcaccaccaacgcaagaaacgtcacctcctacatctccgtcctcatcgccgcctgttgtagctaatccgtcaccgcagactccagagaatccttctccacctgcacctgaaggctcaactcctgtaacgccacctgcaccaccacaaacaccgtcgaaccaatcaccggaaagaccaactcctccttctcctggtgccaatgatgaccgaaacagaaccaatggcggaaacaacaacagagacggctccacaccatcaccaccgtcgtcagggaacagaacttccggtgacggtggctcaccttcaccacctcggtcgataagccctcctcagaatagtggagattcagactcatcatcggggcttttgcttctacttgcagtgtgtatttgcatctgttgcaacaggaagaagaagaagaaatctcctcaggtcaaccacatgcactactacaataacaatccttatggaggagcaccctcaggtaatggtggttattacaagggaacacctcaagatcatgtggtgaatatggctggtcaaggaggtgggaattggggtccacagcaacctgtgtctggtcctcacagtgatgcttccaacttaaccggtcgaactgctataccgtcacctcaagctgcaactcttggtcacaaccaaagcactttcacatacgatgaactgtccattgcaacagaaggtttcgctcagtcaaatttgctaggacaaggaggatttgggtatgttcataaaggagttctgcctagtggcaaagaagttgcagtgaagagtcttaaacttggaagtggacaaggggaacgcgagtttcaagcagaggttgatatcattagccgtgtccatcatcgtcatctcgtttctcttgttggatattgcatctctggtggtcaaagacttttggtttatgagtttatacctaacaacactcttgaatttcatcttcatggaaagggtcgtccggttttggattggcctacaagagtgaagattgcattgggatcagctagaggccttgcatatttgcatgaagactgtaagaaaatctttatctcacatatttgcatcagtcaccctcgcattatccacagagatatcaaagctgcaaacattcttcttgatttcagttttgagaccaaggtggcagattttggattggctaagctatctcaagacaactatactcatgtctccactcgcgtcatgggaacttttggatacttagctccagagtatgcatcaagcggaaagttatccgacaaatctgatgttttctcatttggagtaatgcttcttgagctcataaccggaagacctcctctggatctaactggagaaatggaagatagcttggtagattgggcaaggcctttgtgtttgaaagcagctcaagatggagattacaaccaattggctgatccacgtctagagctaaactacagtcatcaagagatggttcaaatggcttcttgtgcagctgcagcaatcagacattcagcaagaagacggcctaagatgagccaggttcaaaaactcataccacttgttggttctattattgtacgagcactagaaggagatatgtcaatggatgatctaagtgagggaacaagaccaggacaaagcacgtacttgagccccgggagcgtgagctcagagtatgacgcaagctcgtacacggcagacatgaaaaagttcaagaaactggcgttagagaataaagaatatcaaagcagtgaatatggtggaacaagtgagtatggcttaaacccttctgcttcaagtagtgaagaaatgaatagaggctcaatgaaacgcaatcctcagctttga

SEQ ID NO: 27443 - protein, 674 aa, Arabidopsis thaliana
  misc_feature (1)..(674): Ceres Seq. ID no. 1815727
MADSPVDSSPAPETSNGTPPSNGTSPSNESSPPTPPSSPPPSSISAPPPDISASFSPPPAPPTQETSPPTSPSSSPPVVANPSPQTPENPSPPAPEGSTPVTPPAPPQTPSNQSPERPTPPSPGANDDRNRTNGGNNNRDGSTPSPPSSGNRTSGDGGSPSPPRSISPPQNSGDSDSSSGLLLLLAVCICICCNRKKKKKSPQVNHMHYYNNNPYGGAPSGNGGYYKGTPQDHVVNMAGQGGGNWGPQQPVSGPHSDASNLTGRTAIPSPQAATLGHNQSTFTYDELSIATEGFAQSNLLGQGGFGYVHKGVLPSGKEVAVKSLKLGSGQGEREFQAEVDIISRVHHRHLVSLVGYCISGGQRLLVYEFIPNNTLEFHLHGKGRPVLDWPTRVKIALGSARGLAYLHEDCKKIFISHICISHPRIIHRDIKAANILLDFSFETKVADFGLAKLSQDNYTHVSTRVMGTFGYLAPEYASSGKLSDKSDVFSFGVMLLELITGRPPLDLTGEMEDSLVDWARPLCLKAAQDGDYNQLADPRLELNYSHQEMVQMASCAAAAIRHSARRRPKMSQVQKLIPLVGSIIVRALEGDMSMDDLSEGTRPGQSTYLSPGSVSSEYDASSYTADMKKFKKLALENKEYQSSEYGGTSEYGLNPSASSSEEMNRGSMKRNPQL

SEQ ID NO: 27444 - protein, 468 aa, Arabidopsis thaliana
  misc_feature (1)..(468): Ceres Seq. ID no. 1815728
MHYYNNNPYGGAPSGNGGYYKGTPQDHVVNMAGQGGGNWGPQQPVSGPHSDASNLTGRTAIPSPQAATLGHNQSTFTYDELSIATEGFAQSNLLGQGGFGYVHKGVLPSGKEVAVKSLKLGSGQGEREFQAEVDIISRVHHRHLVSLVGYCISGGQRLLVYEFIPNNTLEFHLHGKGRPVLDWPTRVKIALGSARGLAYLHEDCKKIFISHICISHPRIIHRDIKAANILLDFSFETKVADFGLAKLSQDNYTHVSTRVMGTFGYLAPEYASSGKLSDKSDVFSFGVMLLELITGRPPLDLTGEMEDSLVDWARPLCLKAAQDGDYNQLADPRLELNYSHQEMVQMASCAAAAIRHSARRRPKMSQVQKLIPLVGSIIVRALEGDMSMDDLSEGTRPGQSTYLSPGSVSSEYDASSYTADMKKFKKLALENKEYQSSEYGGTSEYGLNPSASSSEEMNRGSMKRNPQL

SEQ ID NO: 27445 - protein, 438 aa, Arabidopsis thaliana
  misc_feature (1)..(438): Ceres Seq. ID no. 1815729
MAGQGGGNWGPQQPVSGPHSDASNLTGRTAIPSPQAATLGHNQSTFTYDELSIATEGFAQSNLLGQGGFGYVHKGVLPSGKEVAVKSLKLGSGQGEREFQAEVDIISRVHHRHLVSLVGYCISGGQRLLVYEFIPNNTLEFHLHGKGRPVLDWPTRVKIALGSARGLAYLHEDCKKIFISHICISHPRIIHRDIKAANILLDFSFETKVADFGLAKLSQDNYTHVSTRVMGTFGYLAPEYASSGKLSDKSDVFSFGVMLLELITGRPPLDLTGEMEDSLVDWARPLCLKAAQDGDYNQLADPRLELNYSHQEMVQMASCAAAAIRHSARRRPKMSQVQKLIPLVGSIIVRALEGDMSMDDLSEGTRPGQSTYLSPGSVSSEYDASSYTADMKKFKKLALENKEYQSSEYGGTSEYGLNPSASSSEEMNRGSMKRNPQL

SEQ ID NO: 27446 - DNA, 1158 bp, Arabidopsis thaliana
  misc_feature (1)..(1158): Ceres Seq. ID no. 1815740
atggagaaaagagtagagaagagaaggatagtgttggttccacttccattactaggacatttcactccgatgatgcaactcggccaagcccttatcttgaagggattctcaattatagttcctcagggagaattcaatcgagtaaactcttcgcagaagttccctgctgaggagttgaagcttcccaatttcatcttcagtactcaaactgctacacataaagtttgctgcaatgttttaagcaaacttaatgccaagaagtacttgatcgacatggaagagcatgacgtgcaaaacaaggtagtggaaaatatgcatccattaagatacaaagacttaccaactgcaacatttggagaactagaaccttttttggagctctgtagagatgtagtcaacaaaagaacagcctctgctgttatcatcaacaccgtgacctgtctagagagctcgtctctcacaaggctgcaacaagaactccaaattccggtgtatccattaggccctcttcacattacagattcatcgacaggatttactgtgctgcaagaggataggagctgcgttgaatggctgaacaagcagaaaccaaggtctgtcatatacataagtttaggaagcatggttctcatggaaaccaaggagatgttagagatggcttggggaatgttgaatagcaaccaacctttcttatgggtcatccgacctggatctgtctcaggctccgaggggatagagtcattgccagaggaagtcagtaagatggttttagagaaaggatacattgtgaaatgggcaccacaaatagaagtactaggacatccctcagtgggaggcttttggagccactgtggatggaactcaacactcgagagcattgtggaaggagttccaatgatttgcaggccttatcaaggcgagcagatgttaaatgcaatatatctagagagtgtatggagaatagggattcaggtaggaggtgaactggaaagaggagccgtcgagagagctgtgaagaggttgattgtggataaagaaggtgcaagcatgagggagagaacccttgttttaaaagagaagctcaaagcctctattagaggtggaggctcctcatgcaatgcattagatgagcttgtcaagcacttgaagacagagtga

SEQ ID NO: 27447 - protein, 385 aa, Arabidopsis thaliana
  misc_feature (1)..(385): Ceres Seq. ID no. 1815741
MEKRVEKRRIVLVPLPLLGHFTPMMQLGQALILKGFSIIVPQGEFNRVNSSQKFPAEELKLPNFIFSTQTATHKVCCNVLSKLNAKKYLIDMEEHDVQNKVVENMHPLRYKDLPTATFGELEPFLELCRDVVNKRTASAVIINTVTCLESSSLTRLQQELQIPVYPLGPLHITDSSTGFTVLQEDRSCVEWLNKQKPRSVIYISLGSMVLMETKEMLEMAWGMLNSNQPFLWVIRPGSVSGSEGIESLPEEVSKMVLEKGYIVKWAPQIEVLGHPSVGGFWSHCGWNSTLESIVEGVPMICRPYQGEQMLNAIYLESVWRIGIQVGGELERGAVERAVKRLIVDKEGASMRERTLVLKEKLKASIRGGGSSCNALDELVKHLKTE

SEQ ID NO: 27448 - protein, 362 aa, Arabidopsis thaliana
  misc_feature (1)..(362): Ceres Seq. ID no. 1815742
MMQLGQALILKGFSIIVPQGEFNRVNSSQKFPAEELKLPNFIFSTQTATHKVCCNVLSKLNAKKYLIDMEEHDVQNKVVENMHPLRYKDLPTATFGELEPFLELCRDVVNKRTASAVIINTVTCLESSSLTRLQQELQIPVYPLGPLHITDSSTGFTVLQEDRSCVEWLNKQKPRSVIYISLGSMVLMETKEMLEMAWGMLNSNQPFLWVIRPGSVSGSEGIESLPEEVSKMVLEKGYIVKWAPQIEVLGHPSVGGFWSHCGWNSTLESIVEGVPMICRPYQGEQMLNAIYLESVWRIGIQVGGELERGAVERAVKRLIVDKEGASMRERTLVLKEKLKASIRGGGSSCNALDELVKHLKTE

SEQ ID NO: 27449 - protein, 361 aa, Arabidopsis thaliana
  misc_feature (1)..(361): Ceres Seq. ID no. 1815743
MQLGQALILKGFSIIVPQGEFNRVNSSQKFPAEELKLPNFIFSTQTATHKVCCNVLSKLNAKKYLIDMEEHDVQNKVVENMHPLRYKDLPTATFGELEPFLELCRDVVNKRTASAVIINTVTCLESSSLTRLQQELQIPVYPLGPLHITDSSTGFTVLQEDRSCVEWLNKQKPRSVIYISLGSMVLMETKEMLEMAWGMLNSNQPFLWVIRPGSVSGSEGIESLPEEVSKMVLEKGYIVKWAPQIEVLGHPSVGGFWSHCGWNSTLESIVEGVPMICRPYQGEQMLNAIYLESVWRIGIQVGGELERGAVERAVKRLIVDKEGASMRERTLVLKEKLKASIRGGGSSCNALDELVKHLKTE

SEQ ID NO: 27450 - DNA, 1974 bp, Arabidopsis thaliana
  misc_feature (1)..(1974): Ceres Seq. ID no. 1815764
atgtttctgtctcaccctcctcaagtaatacaaccaacttatcatacagttaacttcttacctcgctctcctctgaagccaccgtcgtgttccgttgctttaaacaatccttcaatttcctccggcgccggagctaaaatctctaataatcagctaattcaatcattgtgcaaagagggtaaacttaaacaagcgattcgcgtcttgtctcaggaatctagcccaagtcaacagacttacgagcttctgattctctgctgcggtcatcggagctctctttctgatgctctacgtgttcatcgacatattctggataatgggtctgatcaagatccttttttggctacgaagcttattggtatgtactcggatttgggttctgtggattatgcacggaaggtgttcgataaaacgcgtaagagaactatatatgtctggaacgctttgtttcgagcccttacgttagcaggtcatggagaagaagtgttgggtttgtattggaagatgaataggattggagttgagtcagataggttcacatacacttatgttctcaaggcttgtgttgcatcggaatgcacggtgaatcatctgatgaaagggaaagagattcatgcacatcttactcgacgaggttacagttctcatgtttacattatgactacgttggtggacatgtatgctagatttggctgtgtggattatgccagctatgtgtttgggggaatgccggtgaggaacgttgtttcttggagcgctatgatcgcctgctatgcaaagaacgggaaagcttttgaagctctgaggactttccgtgaaatgatgagagaaaccaaagattcatctccgaattctgtgactatggttagtgtgcttcaagcttgtgcttcgcttgcggctttagagcaagggaaattgattcatgggtacatactcagacgggggcttgactccatattgccagtgatcagtgctcttgtgacgatgtatggtagatgcggtaagcttgaagtgggacaaagagtatttgatcgaatgcatgaccgggatgttgtgtcctggaattccttgatatcaagctatggcgttcacgggtatggaaaaaaagcaattcagatatttgaagagatgctcgccaacggggcttccccaactcccgtaacatttgtcagcgttttgggagcttgcagccacgagggtcttgttgaagaaggaaagagactgtttgaaacaatgtggagagaccatgggataaaaccacaaatcgaacattatgcttgtatggttgatctgttaggtcgggcgaataggttagacgaggcagcaaagatggtacaagacatgaggactgaaccagggcctaaggtttggggttcccttcttggttcttgtagaattcacggtaatgttgagcttgcagagcgggcgagtagaaggctctttgcgcttgaaccaaaaaatgcagggaactatgtgttgttggcagacatttacgcggaagctcagatgtgggatgaggttaagagagtgaagaagcttctagaacacaggggactgcagaagctgcctggtcgatgctggatggaagtgaggaggaaaatgtactcgtttgtctcggttgatgagtttaaccctcttatggaacagattcatgctttcttggttaagttagccgaagatatgaaggagaaagggtacataccacagaccaaaggagttctgtatgagcttgaaacagaagaaaaagagaggatagtgttgggacacagtgagaaacttgcgttggcgtttgggctgataaatacatcgaaaggagaaccaatcagaatcacgaagaacttgcgtttgtgcgaggactgtcacttgtttacaaagttcatctcgaagtttatggagaaagagattctagtcagagatgtgaaccggtttcatcgattcaagaatggagtgtgttcttgtggagattactggtaa

SEQ ID NO: 27451 - protein, 657 aa, Arabidopsis thaliana
  misc_feature (1)..(657): Ceres Seq. ID no. 1815765
MFLSHPPQVIQPTYHTVNFLPRSPLKPPSCSVALNNPSISSGAGAKISNNQLIQSLCKEGKLKQAIRVLSQESSPSQQTYELLILCCGHRSSLSDALRVHRHILDNGSDQDPFLATKLIGMYSDLGSVDYARKVFDKTRKRTIYVWNALFRALTLAGHGEEVLGLYWKMNRIGVESDRFTYTYVLKACVASECTVNHLMKGKEIHAHLTRRGYSSHVYIMTTLVDMYARFGCVDYASYVFGGMPVRNVVSWSAMIACYAKNGKAFEALRTFREMMRETKDSSPNSVTMVSVLQACASLAALEQGKLIHGYILRRGLDSILPVISALVTMYGRCGKLEVGQRVFDRMHDRDVVSWNSLISSYGVHGYGKKAIQIFEEMLANGASPTPVTFVSVLGACSHEGLVEEGKRLFETMWRDHGIKPQIEHYACMVDLLGRANRLDEAAKMVQDMRTEPGPKVWGSLLGSCRIHGNVELAERASRRLFALEPKNAGNYVLLADIYAEAQMWDEVKRVKKLLEHRGLQKLPGRCWMEVRRKMYSFVSVDEFNPLMEQIHAFLVKLAEDMKEKGYIPQTKGVLYELETEEKERIVLGHSEKLALAFGLINTSKGEPIRITKNLRLCEDCHLFTKFISKFMEKEILVRDVNRFHRFKNGVCSCGDYW

SEQ ID NO: 27452 - protein, 537 aa, Arabidopsis thaliana
  misc_feature (1)..(537): Ceres Seq. ID no. 1815766
MYSDLGSVDYARKVFDKTRKRTIYVWNALFRALTLAGHGEEVLGLYWKMNRIGVESDRFTYTYVLKACVASECTVNHLMKGKEIHAHLTRRGYSSHVYIMTTLVDMYARFGCVDYASYVFGGMPVRNVVSWSAMIACYAKNGKAFEALRTFREMMRETKDSSPNSVTMVSVLQACASLAALEQGKLIHGYILRRGLDSILPVISALVTMYGRCGKLEVGQRVFDRMHDRDVVSWNSLISSYGVHGYGKKAIQIFEEMLANGASPTPVTFVSVLGACSHEGLVEEGKRLFETMWRDHGIKPQIEHYACMVDLLGRANRLDEAAKMVQDMRTEPGPKVWGSLLGSCRIHGNVELAERASRRLFALEPKNAGNYVLLADIYAEAQMWDEVKRVKKLLEHRGLQKLPGRCWMEVRRKMYSFVSVDEFNPLMEQIHAFLVKLAEDMKEKGYIPQTKGVLYELETEEKERIVLGHSEKLALAFGLINTSKGEPIRITKNLRLCEDCHLFTKFISKFMEKEILVRDVNRFHRFKNGVCSCGDYW

SEQ ID NO: 27453 - protein, 489 aa, Arabidopsis thaliana
  misc_feature (1)..(489): Ceres Seq. ID no. 1815767
MNRIGVESDRFTYTYVLKACVASECTVNHLMKGKEIHAHLTRRGYSSHVYIMTTLVDMYARFGCVDYASYVFGGMPVRNVVSWSAMIACYAKNGKAFEALRTFREMMRETKDSSPNSVTMVSVLQACASLAALEQGKLIHGYILRRGLDSILPVISALVTMYGRCGKLEVGQRVFDRMHDRDVVSWNSLISSYGVHGYGKKAIQIFEEMLANGASPTPVTFVSVLGACSHEGLVEEGKRLFETMWRDHGIKPQIEHYACMVDLLGRANRLDEAAKMVQDMRTEPGPKVWGSLLGSCRIHGNVELAERASRRLFALEPKNAGNYVLLADIYAEAQMWDEVKRVKKLLEHRGLQKLPGRCWMEVRRKMYSFVSVDEFNPLMEQIHAFLVKLAEDMKEKGYIPQTKGVLYELETEEKERIVLGHSEKLALAFGLINTSKGEPIRITKNLRLCEDCHLFTKFISKFMEKEILVRDVNRFHRFKNGVCSCGDYW

SEQ ID NO: 27454 - DNA, 1428 bp, Arabidopsis thaliana
  misc_feature (1)..(1428): Ceres Seq. ID no. 1815803
atggatggagaggttacttcttggattaggagagcaaatttctctcatactgtttgttatcgtatgattacgccgagtttagaatctatgccttttactgtaaaccaagagaagatgcagaggaatccagttactaataagaagagatctgtttctccgttgcctcatatggctctttctgatgcttttatcgaagcaaagtctgatattaagaggttttctactccacatcctagaagagtggaaccagagaagggaatgaaggccaagtcgtcgtcccgcaaagattcttctgagaaaaaatcagttaatctacggtccctgtctcactcgggtcctattagggatcttagtacgcagaaagttaaagagaggggaaagagcaagatagataagaagtcttcaaagtctgttgactatagaggttctaaagtaagttctgcaggagtgcttgaagaatgcctcattgatgtgtctaagttgtcttatggggataggtttgctcacgggaaatatagccagatttatcatggtgaatatgaaggcaaagctgttgctctgaagattatcacagcgcctgaggatagtgacgacatattcttgggagctcgtttagaaaaagagtttatcgtggaagccactcttttatctcgactaagccatccaaatgtcgttaagtttgttggagtgaatactggaaactgtatcatcacagagtatgtacctcgagggtctttaagatcatatctgcacaagctcgagcagaaatcccttcctttggaacagctaatcgattttggtctggatattgctaaaggaatggaatatattcactcaagagagatagttcatcaggatctgaagccagaaaacgtgttgatcgacaatgactttcacttgaagattgctgactttggcatagcgtgcgaggaggagtactgtgatgttttgggggataacataggaacttataggtggatggcacctgaagttttaaaacggataccacatggacggaagtgcgatgtttatagttttggacttcttttatgggaaatggtagctggagcacttccatatgaggagatgaaatttgctgaacaaattgcctacgcagttatatacaagaaaattaggccagttataccgacggattgtccagcggccatgaaagagctgatcgagcgatgttggtcatcgcaaacagacaagagaccggaattctggcagattgtcaaagtgttggaacatttcaagaagtctctaacaagcgaaggaaaacttaatcttttacctagccagatctgtccagaactaaagaaatgtcctaaattctggattcatatattcggatcattccaccaccacagcagcggtggcggcagcagcagcaacaactcagccttacctaagcctaaattcgcttga

SEQ ID NO: 27455 - protein, 475 aa, Arabidopsis thaliana
  misc_feature (1)..(475): Ceres Seq. ID no. 1815804
MDGEVTSWIRRANFSHTVCYRMITPSLESMPFTVNQEKMQRNPVTNKKRSVSPLPHMALSDAFIEAKSDIKRFSTPHPRRVEPEKGMKAKSSSRKDSSEKKSVNLRSLSHSGPIRDLSTQKVKERGKSKIDKKSSKSVDYRGSKVSSAGVLEECLIDVSKLSYGDRFAHGKYSQIYHGEYEGKAVALKIITAPEDSDDIFLGARLEKEFIVEATLLSRLSHPNVVKFVGVNTGNCIITEYVPRGSLRSYLHKLEQKSLPLEQLIDFGLDIAKGMEYIHSREIVHQDLKPENVLIDNDFHLKIADFGIACEEEYCDVLGDNIGTYRWMAPEVLKRIPHGRKCDVYSFGLLLWEMVAGALPYEEMKFAEQIAYAVIYKKIRPVIPTDCPAAMKELIERCWSSQTDKRPEFWQIVKVLEHFKKSLTSEGKLNLLPSQICPELKKCPKFWIHIFGSFHHHSSGGGSSSNNSALPKPKFA

SEQ ID NO: 27456 - protein, 454 aa, Arabidopsis thaliana
  misc_feature (1)..(454): Ceres Seq. ID no. 1815805
MITPSLESMPFTVNQEKMQRNPVTNKKRSVSPLPHMALSDAFIEAKSDIKRFSTPHPRRVEPEKGMKAKSSSRKDSSEKKSVNLRSLSHSGPIRDLSTQKVKERGKSKIDKKSSKSVDYRGSKVSSAGVLEECLIDVSKLSYGDRFAHGKYSQIYHGEYEGKAVALKIITAPEDSDDIFLGARLEKEFIVEATLLSRLSHPNVVKFVGVNTGNCIITEYVPRGSLRSYLHKLEQKSLPLEQLIDFGLDIAKGMEYIHSREIVHQDLKPENVLIDNDFHLKIADFGIACEEEYCDVLGDNIGTYRWMAPEVLKRIPHGRKCDVYSFGLLLWEMVAGALPYEEMKFAEQIAYAVIYKKIRPVIPTDCPAAMKELIERCWSSQTDKRPEFWQIVKVLEHFKKSLTSEGKLNLLPSQICPELKKCPKFWIHIFGSFHHHSSGGGSSSNNSALPKPKFA

SEQ ID NO: 27457 - protein, 446 aa, Arabidopsis thaliana
  misc_feature (1)..(446): Ceres Seq. ID no. 1815806
MPFTVNQEKMQRNPVTNKKRSVSPLPHMALSDAFIEAKSDIKRFSTPHPRRVEPEKGMKAKSSSRKDSSEKKSVNLRSLSHSGPIRDLSTQKVKERGKSKIDKKSSKSVDYRGSKVSSAGVLEECLIDVSKLSYGDRFAHGKYSQIYHGEYEGKAVALKIITAPEDSDDIFLGARLEKEFIVEATLLSRLSHPNVVKFVGVNTGNCIITEYVPRGSLRSYLHKLEQKSLPLEQLIDFGLDIAKGMEYIHSREIVHQDLKPENVLIDNDFHLKIADFGIACEEEYCDVLGDNIGTYRWMAPEVLKRIPHGRKCDVYSFGLLLWEMVAGALPYEEMKFAEQIAYAVIYKKIRPVIPTDCPAAMKELIERCWSSQTDKRPEFWQIVKVLEHFKKSLTSEGKLNLLPSQICPELKKCPKFWIHIFGSFHHHSSGGGSSSNNSALPKPKFA

SEQ ID NO: 27458 - DNA, 1626 bp, Arabidopsis thaliana
  misc_feature (1)..(1626): Ceres Seq. ID no. 1816083
atgttacattgtcattataaccgcagaaaagatggaactccgttcaatacatcgattataacaccaccgcctccgcctgtggttgatcctcctcccgctactcaccgtgctcctcctgttccccgtatccctcctgtttctggtgttcccccagcaccttttgctccttttgctccactgcaaccacaacaacatccaccaccatcaccacctctggtctggtcaccaccttcttctgataatggaggaggagatccctggaactctgtgtcagggcaacctaccttgcaaatatcacctccttcaggttcaggatcaggaaaattctggtccactcaaagaatcattctagtagtttcttcagtggccataattgttcttgtatccggtttgtgtgttacactttggagatgttgcagaagtaaaatatataaccgatattacagtggagctcgtaaagatttacaacgaccatacttcaataagcctccatctcaaccaacccccactatgggaaaagtttctcgggagcctatggttaagcctttcgatggatatggagctggagacaggaaatatgggtatccaatgccacagcgggctgaagagagccggagagcaatgcctcctacttcatattataataaggatgttaatacacctcaaaagccgctgcaacaaccaccgaggcagttccagtccaatgatactgcttcaaagagagcggctcatttccccccgggcttgaattcctcatcttctgctactgttttcaccattgcttcacttcagcaatacacaaataatttctcagaagagaatataatcggggaagggtcgattggtaatgtctacagagctgagcttcgtcatggaaagtttcttgcggtgaagaagctgagcaataccatcaacagaacacagagtgacggcgaattcctcaatctagtctccaatgtgttgaagcttaaacgcggtcatatattggagcttcttggttactgtaacgagtttggtcaaaggttacttgtgtatgagtactgtcctaatggatcacttcaagatgcactacatttggatcgcaagttgcacaagaagctcacttggaatgtacgtataaatattgcattaggagcttcaaaggcattgcagtttcttcatgaggtatgtcaaccgccggttgttcaccagaatttcaagtcttccaaggttcttcttgatggaaagctctcagtacgtgttgcagacagcggtttggcttatatgttaccaccacgcccaacgagtcagatggcgggttatgccgctcctgaggttgagtatggaagctacacttgtcagagcgacgtatttagccttggggttgtaatgttagaactgctcactggacgcagaccatttgacaggacaaggccgaggggacatcaaacactagctcagtgggcgattcctcggcttcatgacatcgatgcgttgacaagaatggttgatccgtcattacacggagcgtatccaatgaaatcattgtcacgttttgcagatatcatatcacgttcactgcagatggaaccaggatttagaccgccgatatcagaaatagtccaagatcttcaacatatgatctaa

SEQ ID NO: 27459 - protein, 541 aa, Arabidopsis thaliana
  misc_feature (1)..(541): Ceres Seq. ID no. 1816084
MLHCHYNRRKDGTPFNTSIITPPPPPVVDPPPATHRAPPVPRIPPVSGVPPAPFAPFAPLQPQQHPPPSPPLVWSPPSSDNGGGDPWNSVSGQPTLQISPPSGSGSGKFWSTQRIILVVSSVAIIVLVSGLCVTLWRCCRSKIYNRYYSGARKDLQRPYFNKPPSQPTPTMGKVSREPMVKPFDGYGAGDRKYGYPMPQRAEESRRAMPPTSYYNKDVNTPQKPLQQPPRQFQSNDTASKRAAHFPPGLNSSSSATVFTIASLQQYTNNFSEENIIGEGSIGNVYRAELRHGKFLAVKKLSNTINRTQSDGEFLNLVSNVLKLKRGHILELLGYCNEFGQRLLVYEYCPNGSLQDALHLDRKLHKKLTWNVRINIALGASKALQFLHEVCQPPVVHQNFKSSKVLLDGKLSVRVADSGLAYMLPPRPTSQMAGYAAPEVEYGSYTCQSDVFSLGVVMLELLTGRRPFDRTRPRGHQTLAQWAIPRLHDIDALTRMVDPSLHGAYPMKSLSRFADIISRSLQMEPGFRPPISEIVQDLQHMI

SEQ ID NO: 27460 - protein, 371 aa, Arabidopsis thaliana
  misc_feature (1)..(371): Ceres Seq. ID no. 1816085
MGKVSREPMVKPFDGYGAGDRKYGYPMPQRAEESRRAMPPTSYYNKDVNTPQKPLQQPPRQFQSNDTASKRAAHFPPGLNSSSSATVFTIASLQQYTNNFSEENIIGEGSIGNVYRAELRHGKFLAVKKLSNTINRTQSDGEFLNLVSNVLKLKRGHILELLGYCNEFGQRLLVYEYCPNGSLQDALHLDRKLHKKLTWNVRINIALGASKALQFLHEVCQPPVVHQNFKSSKVLLDGKLSVRVADSGLAYMLPPRPTSQMAGYAAPEVEYGSYTCQSDVFSLGVVMLELLTGRRPFDRTRPRGHQTLAQWAIPRLHDIDALTRMVDPSLHGAYPMKSLSRFADIISRSLQMEPGFRPPISEIVQDLQHMI

SEQ ID NO: 27461 - protein, 363 aa, Arabidopsis thaliana
  misc_feature (1)..(363): Ceres Seq. ID no. 1816086
MVKPFDGYGAGDRKYGYPMPQRAEESRRAMPPTSYYNKDVNTPQKPLQQPPRQFQSNDTASKRAAHFPPGLNSSSSATVFTIASLQQYTNNFSEENIIGEGSIGNVYRAELRHGKFLAVKKLSNTINRTQSDGEFLNLVSNVLKLKRGHILELLGYCNEFGQRLLVYEYCPNGSLQDALHLDRKLHKKLTWNVRINIALGASKALQFLHEVCQPPVVHQNFKSSKVLLDGKLSVRVADSGLAYMLPPRPTSQMAGYAAPEVEYGSYTCQSDVFSLGVVMLELLTGRRPFDRTRPRGHQTLAQWAIPRLHDIDALTRMVDPSLHGAYPMKSLSRFADIISRSLQMEPGFRPPISEIVQDLQHMI

SEQ ID NO: 27462 - DNA, 3108 bp, Arabidopsis thaliana
  misc_feature (1)..(3108): Ceres Seq. ID no. 1816771
atggttcgtcattctcggagggagtcctttttcgacatggttggctttgaggtttgtcctgataccgatcttctttggccattcgggaagcttgatggtcttgatcgggatgaaatccgtgaaaccgcgtatgagatctttttcgccgcatgtcgatcatcacctggatttggaggtagaaatgctctcacattctactccaagcacaatgctggtgaccatcaaggggatggaataggaggaggaggaggatctggatcatctaacggctctggattcgggtctttaggaagaaaagaagtgttgacaacaccaacaagccgagtaaaacgggcgctagggttaaagatgcttaaacgatctccttctaggcgaatgtcgacagtagggacagttgtaggggccgtctcagctccttcatccccaggtaataatggaagcataggaagtggttcaggacactttagccctggggctgggttttttacagtcccgcctgctcggcctcgacgaccgttaacctctgcagaaatcatgaggcagcaaatgaaggtgacagaacagagtgacactcggctacggaaaaccctaatgaggacgcttgttggccaaaccggtaggcgagcagagacaataatccttccgttagagcttctccgtcacgtgaaaccatcggagtttggtgatgtacatgagtatcaaatttggcaaagacggcaactcaaagtccttgaagctggtcttctcattcacccatcaatccctctagagaagaccaacaactttgcaatgcgtctccgagaaatcatccgccagagtgagacaaaagccatcgacactagcaaaaactcagacataatgccgacattatgtaaccttgtcgcctccttgtcatggcgcaacgctactccaacaaccgatatatgccattgggctgatggatacccacttaacatccatctctatgtggcgcttttgcagtcgatatttgacatacgtgatgagaccttggttcttgatgaaatcgatgagcttttagaactgatgaagaagacatggataatgttggggatcacacgagctatacataacttgtgtttcacttgggttctgtttcatcagtacattgtgacatcacagatggagccagacttgcttggtgcctctcacgccatgttggctgaagttgccaatgacgccaagaagtctgatcgcgaggctctttacgtgaagctcttgacctcgacattggcctctatgcaaggatggactgaaaaaaggttgttgagctatcatgattattttcaacgagggaacgtgggattgatcgagaatcttctgccattagcgttgtcttcttctaagatcttgggggaggacgtgacaatctctcaaatgaatggtctagagaaaggtgatgtgaaattggtggattcttcaggggatcgcgtcgattactatataagagcatctattaaaaacgccttctcaaaggtaatagaaaacatgaaggccgaaatcgaagaaacagaggaaggagaagaagaagcggcaactatgttgcttcggctagctaaggagacagaggatcttgctttgcgcgagagcgagtgttttagcccgatacttaagagatggcacttggttgcagctggagtcgcctcggtttcgcttcaccaatgttatggttccatcttgatgcagtacttagctggtcgatcgacaatcactaaagagactgttgaagttctgcaaactgcggggaagctcgaaaaggttcttgtgcagatggtggcagagaattcagatgaatgtgaagatggcggtaaaggccttgttagagagatggttccgtatgaagtcgattcgattatcttacgactactaaggcaatggattgaagagaagttacaaacagttcaagaatgtttgagcagagcaaaagaagctgaaacatggaacccgaaatcaaaatcagaaccctatgcacaatctgctggagagttgatgaagctagcgaatgatgcaatcgaggagttctttgagatccctattgggattacagaggatcttgttcatgatcttgctgaaggattagaaaaactcttccaagaatacaccacattcgtagcatcttgtggttcaaaacagagttacattcctacgcttcctccacttacaagatgtaaccgagactcaaagttcgtgaagctttggaagaaagccacgccatgtgctgcctcgggagaagaacttaaccaaatgggtgaagccccaggtggcaaccacccgcgtccttccactagccgaggaacccaacgcctctacattcgtctcaacactttacatttcctaagctcacaacttcactctctcaacaaatccctctcactcaacccgagggtcctccccgcgacgcgaaaacgctgccgcgaacggaccaaatcatcgtcttatttcgaattcactcaagcaggaatcgaatctgcatgccaacatgtctctgaggttgcagcttaccggttaatcttcctagactcatactctgtattctacgaaagcctataccccggagatgtcgcgaacgggaggatcaaacccgcgttgcgaatcttgaaacagaacttaacgttaatgaccgcgattcttgcggacaaagcgcaagcattggcgatgaaagaagtcatgaaggcttcattcgaagtcgttttgacggttcttctcgcgggaggacattcccgagttttctgtcgaacagatcacgatttgatcgaggaagatttcgagagtttgaagaaggtttattgcacttgcggcgaaggactaatcccagaggaagtggtggatagagaggcagagacagttgaaggagtgattcagcttatgggccaaccaacagaacaacttatggaagactttagcatcgtgacatgcgagtcaagcggaatgggtttggttgggacaggacaaaaacttccaatgcctccaacgactggacgatggaacaggtcggatccaaacacgattttgcgagttctttgctatagagacgatcgtgtggctaatcagtttttgaaaaaatcgtttcaattgggtaaacgaagatga

SEQ ID NO: 27463 - protein, 1035 aa, Arabidopsis thaliana
  misc_feature (1)..(1035): Ceres Seq. ID no. 1816772
MVRHSRRESFFDMVGFEVCPDTDLLWPFGKLDGLDRDEIRETAYEIFFAACRSSPGFGGRNALTFYSKHNAGDHQGDGIGGGGGSGSSNGSGFGSLGRKEVLTTPTSRVKRALGLKMLKRSPSRRMSTVGTVVGAVSAPSSPGNNGSIGSGSGHFSPGAGFFTVPPARPRRPLTSAEIMRQQMKVTEQSDTRLRKTLMRTLVGQTGRRAETIILPLELLRHVKPSEFGDVHEYQIWQRRQLKVLEAGLLIHPSIPLEKTNNFAMRLREIIRQSETKAIDTSKNSDIMPTLCNLVASLSWRNATPTTDICHWADGYPLNIHLYVALLQSIFDIRDETLVLDEIDELLELMKKTWIMLGITRAIHNLCFTWVLFHQYIVTSQMEPDLLGASHAMLAEVANDAKKSDREALYVKLLTSTLASMQGWTEKRLLSYHDYFQRGNVGLIENLLPLALSSSKILGEDVTISQMNGLEKGDVKLVDSSGDRVDYYIRASIKNAFSKVIENMKAEIEETEEGEEEAATMLLRLAKETEDLALRESECFSPILKRWHLVAAGVASVSLHQCYGSILMQYLAGRSTITKETVEVLQTAGKLEKVLVQMVAENSDECEDGGKGLVREMVPYEVDSIILRLLRQWIEEKLQTVQECLSRAKEAETWNPKSKSEPYAQSAGELMKLANDAIEEFFEIPIGITEDLVHDLAEGLEKLFQEYTTFVASCGSKQSYIPTLPPLTRCNRDSKFVKLWKKATPCAASGEELNQMGEAPGGNHPRPSTSRGTQRLYIRLNTLHFLSSQLHSLNKSLSLNPRVLPATRKRCRERTKSSSYFEFTQAGIESACQHVSEVAAYRLIFLDSYSVFYESLYPGDVANGRIKPALRILKQNLTLMTAILADKAQALAMKEVMKASFEVVLTVLLAGGHSRVFCRTDHDLIEEDFESLKKVYCTCGEGLIPEEVVDREAETVEGVIQLMGQPTEQLMEDFSIVTCESSGMGLVGTGQKLPMPPTTGRWNRSDPNTILRVLCYRDDRVANQFLKKSFQLGKRR

SEQ ID NO: 27464 - protein, 1023 aa, Arabidopsis thaliana
  misc_feature (1)..(1023): Ceres Seq. ID no. 1816773
MVGFEVCPDTDLLWPFGKLDGLDRDEIRETAYEIFFAACRSSPGFGGRNALTFYSKHNAGDHQGDGIGGGGGSGSSNGSGFGSLGRKEVLTTPTSRVKRALGLKMLKRSPSRRMSTVGTVVGAVSAPSSPGNNGSIGSGSGHFSPGAGFFTVPPARPRRPLTSAEIMRQQMKVTEQSDTRLRKTLMRTLVGQTGRRAETIILPLELLRHVKPSEFGDVHEYQIWQRRQLKVLEAGLLIHPSIPLEKTNNFAMRLREIIRQSETKAIDTSKNSDIMPTLCNLVASLSWRNATPTTDICHWADGYPLNIHLYVALLQSIFDIRDETLVLDEIDELLELMKKTWIMLGITRAIHNLCFTWVLFHQYIVTSQMEPDLLGASHAMLAEVANDAKKSDREALYVKLLTSTLASMQGWTEKRLLSYHDYFQRGNVGLIENLLPLALSSSKILGEDVTISQMNGLEKGDVKLVDSSGDRVDYYIRASIKNAFSKVIENMKAEIEETEEGEEEAATMLLRLAKETEDLALRESECFSPILKRWHLVAAGVASVSLHQCYGSILMQYLAGRSTITKETVEVLQTAGKLEKVLVQMVAENSDECEDGGKGLVREMVPYEVDSIILRLLRQWIEEKLQTVQECLSRAKEAETWNPKSKSEPYAQSAGELMKLANDAIEEFFEIPIGITEDLVHDLAEGLEKLFQEYTTFVASCGSKQSYIPTLPPLTRCNRDSKFVKLWKKATPCAASGEELNQMGEAPGGNHPRPSTSRGTQRLYIRLNTLHFLSSQLHSLNKSLSLNPRVLPATRKRCRERTKSSSYFEFTQAGIESACQHVSEVAAYRLIFLDSYSVFYESLYPGDVANGRIKPALRILKQNLTLMTAILADKAQALAMKEVMKASFEVVLTVLLAGGHSRVFCRTDHDLIEEDFESLKKVYCTCGEGLIPEEVVDREAETVEGVIQLMGQPTEQLMEDFSIVTCESSGMGLVGTGQKLPMPPTTGRWNRSDPNTILRVLCYRDDRVANQFLKKSFQLGKRR

SEQ ID NO: 27465 - protein, 919 aa, Arabidopsis thaliana
  misc_feature (1)..(919): Ceres Seq. ID no. 1816774
MLKRSPSRRMSTVGTVVGAVSAPSSPGNNGSIGSGSGHFSPGAGFFTVPPARPRRPLTSAEIMRQQMKVTEQSDTRLRKTLMRTLVGQTGRRAETIILPLELLRHVKPSEFGDVHEYQIWQRRQLKVLEAGLLIHPSIPLEKTNNFAMRLREIIRQSETKAIDTSKNSDIMPTLCNLVASLSWRNATPTTDICHWADGYPLNIHLYVALLQSIFDIRDETLVLDEIDELLELMKKTWIMLGITRAIHNLCFTWVLFHQYIVTSQMEPDLLGASHAMLAEVANDAKKSDREALYVKLLTSTLASMQGWTEKRLLSYHDYFQRGNVGLIENLLPLALSSSKILGEDVTISQMNGLEKGDVKLVDSSGDRVDYYIRASIKNAFSKVIENMKAEIEETEEGEEEAATMLLRLAKETEDLALRESECFSPILKRWHLVAAGVASVSLHQCYGSILMQYLAGRSTITKETVEVLQTAGKLEKVLVQMVAENSDECEDGGKGLVREMVPYEVDSIILRLLRQWIEEKLQTVQECLSRAKEAETWNPKSKSEPYAQSAGELMKLANDAIEEFFEIPIGITEDLVHDLAEGLEKLFQEYTTFVASCGSKQSYIPTLPPLTRCNRDSKFVKLWKKATPCAASGEELNQMGEAPGGNHPRPSTSRGTQRLYIRLNTLHFLSSQLHSLNKSLSLNPRVLPATRKRCRERTKSSSYFEFTQAGIESACQHVSEVAAYRLIFLDSYSVFYESLYPGDVANGRIKPALRILKQNLTLMTAILADKAQALAMKEVMKASFEVVLTVLLAGGHSRVFCRTDHDLIEEDFESLKKVYCTCGEGLIPEEVVDREAETVEGVIQLMGQPTEQLMEDFSIVTCESSGMGLVGTGQKLPMPPTTGRWNRSDPNTILRVLCYRDDRVANQFLKKSFQLGKRR

SEQ ID NO: 27466 - DNA, 2031 bp, Arabidopsis thaliana
  misc_feature (1)..(2031): Ceres Seq. ID no. 1816918
atgtataaaccaaactcttcacctactctttatattatacgtttaaaatctctgcaatatatcttgaatttttttttgttatatgtagcaatgtcaaggagctttacgatagaaaacaaatgccaatacaccatatggcctgcaacctacggctataggagatcactagaaacaaccggttttgttcttgagaaaggagagacgcgtaccatcaaagcgccgtcatcatggataggtcgtttctggggtaggacactctgctccaccaactcaacagggggtttctcatgtgccacgggagactgcacctccggaaaaatcaagtgcctcggtatccccatagatccaacaacagtggtcgagtttaacctcgcttcttacggtgtcgactattatgtcgtcaacgtcttcaatggttacaacctccctttgcttgtgacccccgagaacaaaaactgcagaagcattgaatgcgttattgacatgaacgagacatgtccctcggagctaatggtgaacagtagtggccttggatcgcaccatccaatagcctgcatgaccacttgtcagagataccagttgccagagctttgctgtatcggactctcttctggggtggtcgtaccaccgggaatatgcaagcggacgatctactcgcggacattcaataacgtgtgcccaagcgcttatagttacgcctacgacgttgataacagcagtttcacttgtccaaacttctccaactttgtcatcacgttttgtccgtctagctcaacggtcccagaggcaggaaacatcaatagctcaacggtcccagaggcaggaaacatcaaaactggaacagaagcaaaaggagtttcatcagtattggctacaatgatcattattgtgattgtgggaaaggttagagcaaataatatgagaaagagtgatttgaatgagaagaacatggaagcagtggtaatgttgaaacgatttagttatgtacaagtcaagaagatgacaaaatcatttgagaatgttcttgggaaagggggatttggaactgtctataaagggaagttacctgatggcagccgagatgttgcagtgaagatcttgaaggagtcaaacgaggatggagaagacttcatcaatgaaatagctagcatgagtaggacatctcatgctaatatcgtttctctacttggattctgttatgaagggaggaagaaagctataatttacgagttgatgccgaatggatccctcgacaagttcatctccaagaatatgtcggcgaagatggaatggaaaacgttatacaacattgcggtaggtgtgtctcatggcctagaatacttgcatagccattgtgtatcaaggattgtacatttcgatataaagccacagaacatactcatagatggagacttatgccctaagatttcggatttcggtcttgctaagctttgcaaaaataatgaaagcatcatttcaatgctacatgcaagaggcaccatagggtacattgctccagaagtgttctcccagaattttggaggagtttctcataagtctgatgtgtatagttatggaatggtggttcttgagatgattggagcaaggaacataggaagagctcaaaatgctggatccagtaatacttcaatgtactttccagattggatttataaagatcttgagaaaggagaaatcatgagttttttggcagatcaaataaccgaagaagaagatgagaagatagtaaagaaaatggtattggtgggtctgtggtgtattcagaccaatccatatgatcgtccaccaatgagcaaagttgttgaaatgttagagggaagtctagaggctctccagattccacctaagcctcttttatgtttacccgcaataacagctccaataacagttgatgaagacattcaagagacttcaagcttcttgaaaccaagtcaagatacttcatattattccgaacaaatagttcaagatattgtagaagagaatcaagatagctcaagatcttcctaa

SEQ ID NO: 27467 - protein, 676 aa, Arabidopsis thaliana
  misc_feature (1)..(676): Ceres Seq. ID no. 1816919
MYKPNSSPTLYIIRLKSLQYILNFFLLYVAMSRSFTIENKCQYTIWPATYGYRRSLETTGFVLEKGETRTIKAPSSWIGRFWGRTLCSTNSTGGFSCATGDCTSGKIKCLGIPIDPTTVVEFNLASYGVDYYVVNVFNGYNLPLLVTPENKNCRSIECVIDMNETCPSELMVNSSGLGSHHPIACMTTCQRYQLPELCCIGLSSGVVVPPGICKRTIYSRTFNNVCPSAYSYAYDVDNSSFTCPNFSNFVITFCPSSSTVPEAGNINSSTVPEAGNIKTGTEAKGVSSVLATMIIIVIVGKVRANNMRKSDLNEKNMEAVVMLKRFSYVQVKKMTKSFENVLGKGGFGTVYKGKLPDGSRDVAVKILKESNEDGEDFINEIASMSRTSHANIVSLLGFCYEGRKKAIIYELMPNGSLDKFISKNMSAKMEWKTLYNIAVGVSHGLEYLHSHCVSRIVHFDIKPQNILIDGDLCPKISDFGLAKLCKNNESIISMLHARGTIGYIAPEVFSQNFGGVSHKSDVYSYGMVVLEMIGARNIGRAQNAGSSNTSMYFPDWIYKDLEKGEIMSFLADQITEEEDEKIVKKMVLVGLWCIQTNPYDRPPMSKVVEMLEGSLEALQIPPKPLLCLPAITAPITVDEDIQETSSFLKPSQDTSYYSEQIVQDIVEENQDSSRSS

SEQ ID NO: 27468 - protein, 646 aa, Arabidopsis thaliana
  misc_feature (1)..(646): Ceres Seq. ID no. 1816920
MSRSFTIENKCQYTIWPATYGYRRSLETTGFVLEKGETRTIKAPSSWIGRFWGRTLCSTNSTGGFSCATGDCTSGKIKCLGIPIDPTTVVEFNLASYGVDYYVVNVFNGYNLPLLVTPENKNCRSIECVIDMNETCPSELMVNSSGLGSHHPIACMTTCQRYQLPELCCIGLSSGVVVPPGICKRTIYSRTFNNVCPSAYSYAYDVDNSSFTCPNFSNFVITFCPSSSTVPEAGNINSSTVPEAGNIKTGTEAKGVSSVLATMIIIVIVGKVRANNMRKSDLNEKNMEAVVMLKRFSYVQVKKMTKSFENVLGKGGFGTVYKGKLPDGSRDVAVKILKESNEDGEDFINEIASMSRTSHANIVSLLGFCYEGRKKAIIYELMPNGSLDKFISKNMSAKMEWKTLYNIAVGVSHGLEYLHSHCVSRIVHFDIKPQNILIDGDLCPKISDFGLAKLCKNNESIISMLHARGTIGYIAPEVFSQNFGGVSHKSDVYSYGMVVLEMIGARNIGRAQNAGSSNTSMYFPDWIYKDLEKGEIMSFLADQITEEEDEKIVKKMVLVGLWCIQTNPYDRPPMSKVVEMLEGSLEALQIPPKPLLCLPAITAPITVDEDIQETSSFLKPSQDTSYYSEQIVQDIVEENQDSSRSS

SEQ ID NO: 27469 - protein, 515 aa, Arabidopsis thaliana
  misc_feature (1)..(515): Ceres Seq. ID no. 1816921
MNETCPSELMVNSSGLGSHHPIACMTTCQRYQLPELCCIGLSSGVVVPPGICKRTIYSRTFNNVCPSAYSYAYDVDNSSFTCPNFSNFVITFCPSSSTVPEAGNINSSTVPEAGNIKTGTEAKGVSSVLATMIIIVIVGKVRANNMRKSDLNEKNMEAVVMLKRFSYVQVKKMTKSFENVLGKGGFGTVYKGKLPDGSRDVAVKILKESNEDGEDFINEIASMSRTSHANIVSLLGFCYEGRKKAIIYELMPNGSLDKFISKNMSAKMEWKTLYNIAVGVSHGLEYLHSHCVSRIVHFDIKPQNILIDGDLCPKISDFGLAKLCKNNESIISMLHARGTIGYIAPEVFSQNFGGVSHKSDVYSYGMVVLEMIGARNIGRAQNAGSSNTSMYFPDWIYKDLEKGEIMSFLADQITEEEDEKIVKKMVLVGLWCIQTNPYDRPPMSKVVEMLEGSLEALQIPPKPLLCLPAITAPITVDEDIQETSSFLKPSQDTSYYSEQIVQDIVEENQDSSRSS

SEQ ID NO: 27470 - DNA, 525 bp, Arabidopsis thaliana
  misc_feature (1)..(525): Ceres Seq. ID no. 1817049
atggatgtttcaggaagcttgaattgcgttgttgtggcggtagatggaagcgaggtgagtatggaagctctgaggtgggctctagacaacctcaagctctcttcgtcttcttccgattcatcattcgtcgtgctccacgtccagccgtcgccttctgtagccgccggcgtgagtcccggcaccatacctttcggtggtcccagtggtcttgaggttcctgctttcactgctgcaatcgagcaacaccagaagcggatcaccgacaccatcctcgaacacgctagtcaaatttgtgctgaaaaatctgtgagtagagtgaatgtgaaaacacaagtggttattggggatcccaagtataaaatctgcgaagctgtagagaatttgcatgctgatcttcttgtcatgggctcccgggcttatggccgcattaagagaatgtttctgggaagtgtaagcaactactgcaccaaccacgcccattgtcctgttgtgataatcaaaccaaaagaggattcttctgcataa

SEQ ID NO: 27471 - protein, 174 aa, Arabidopsis thaliana
  misc_feature (1)..(174): Ceres Seq. ID no. 1817050
MDVSGSLNCVVVAVDGSEVSMEALRWALDNLKLSSSSSDSSFVVLHVQPSPSVAAGVSPGTIPFGGPSGLEVPAFTAAIEQHQKRITDTILEHASQICAEKSVSRVNVKTQVVIGDPKYKICEAVENLHADLLVMGSRAYGRIKRMFLGSVSNYCTNHAHCPVVIIKPKEDSSA

SEQ ID NO: 27472 - protein, 154 aa, Arabidopsis thaliana
  misc_feature (1)..(154): Ceres Seq. ID no. 1817051
MEALRWALDNLKLSSSSSDSSFVVLHVQPSPSVAAGVSPGTIPFGGPSGLEVPAFTAAIEQHQKRITDTILEHASQICAEKSVSRVNVKTQVVIGDPKYKICEAVENLHADLLVMGSRAYGRIKRMFLGSVSNYCTNHAHCPVVIIKPKEDSSA

SEQ ID NO: 27473 - DNA, 1569 bp, Arabidopsis thaliana
  misc_feature (1)..(1569): Ceres Seq. ID no. 1817349
atgtcttatcctctctccacaagctcccgttggatcgtcgacgagaacggtctacgggtaaagctcgtgtgtgcgaactggccatcacacctccagcccgttgtagcggaagggctgagcaaacaaccagtggacgcagtggccaagaagatagtggaaatgggtttcaattgtgttaggttaacttggccgttggatttgatgactaatgagacattggctaataatgtcacagtaagacaatcttttcaaagccttggtcttaatgatgacattgttggcttccaaactaacaacccctccattattgatctccccctcattgaagcttacaagacggtagttactacattaggaaacaacgatgtgatggtgatattagacaaccacctaactaaaccagggtggtgctgcgccaacgacgatggtaacggtttcttcggtgaccagttcttcgatcctaccgtatgggttgccgctttaaagaaaatggctgcgaccttcaacggtgtctctaatgttgttggcatgagtctaaggaatgaacttagagggcctaaacaaaacgttaacgattggttcaagtatatgcaacaaggagcggaagcagttcattcagcaaacaacaaggtacttgtaatcctctccggtctcagcttcgacgctgatctctcctttgttaggtctcgacccgtaaagctatccttcaccggaaaactcgtcttcgagctccattggtattctttcagtgacggaaactcgtgggctgccaataaccctaacgatatatgtggtcgagttctaaaccggattggaaacggtggcggttatctccttaaccaaggctttccgttgttcctaagcgaattcggtatagatgaaagaggagtaaacaccaatgataaccggtattttgggtgtttaaccggttgggccgcggaaaatgacgttgattggtcgctatgggctcttactggaagctattacttaagacaaggcaaagtcggtatgaatgagtattacggtgtgttggattcggattggataagtgttcggaattcgagtttcttgcaaaagatctcttttcttcaatctccgcttcaaggaccgggccctcgaactgatgcttacaatctggtttttcatcccttaaccggactctgcatagtacgatctcttgatgacccaaaaatgcttactcttggtccatgcaatagctccgaaccatggagctatactaagaaagccttaagaatcaaagaccagcaattgtgtttacagagcaacggaccaaaaaacccggttacgatgactcggactagttgttcgacatccggatcaaaatggcagaccatctcggcctcaaggatgcacttggcttcgacaacaagtaacaagacttctctttgccttgacgtggacacagcgaacaatgtcgtggctaatgcttgcaagtgtctgagcaaagacaaatcgtgtgagccaatgagccaatggtttaagattatcaaagccacaaggccattgaagagctcgagattgtataaagagatctcgtctatgctgtaa

SEQ ID NO: 27474 - protein, 522 aa, Arabidopsis thaliana
  misc_feature (1)..(522): Ceres Seq. ID no. 1817350
MSYPLSTSSRWIVDENGLRVKLVCANWPSHLQPVVAEGLSKQPVDAVAKKIVEMGFNCVRLTWPLDLMTNETLANNVTVRQSFQSLGLNDDIVGFQTNNPSIIDLPLIEAYKTVVTTLGNNDVMVILDNHLTKPGWCCANDDGNGFFGDQFFDPTVWVAALKKMAATFNGVSNVVGMSLRNELRGPKQNVNDWFKYMQQGAEAVHSANNKVLVILSGLSFDADLSFVRSRPVKLSFTGKLVFELHWYSFSDGNSWAANNPNDICGRVLNRIGNGGGYLLNQGFPLFLSEFGIDERGVNTNDNRYFGCLTGWAAENDVDWSLWALTGSYYLRQGKVGMNEYYGVLDSDWISVRNSSFLQKISFLQSPLQGPGPRTDAYNLVFHPLTGLCIVRSLDDPKMLTLGPCNSSEPWSYTKKALRIKDQQLCLQSNGPKNPVTMTRTSCSTSGSKWQTISASRMHLASTTSNKTSLCLDVDTANNVVANACKCLSKDKSCEPMSQWFKIIKATRPLKSSRLYKEISSML

SEQ ID NO: 27475 - protein, 469 aa, Arabidopsis thaliana
  misc_feature (1)..(469): Ceres Seq. ID no. 1817351
MGFNCVRLTWPLDLMTNETLANNVTVRQSFQSLGLNDDIVGFQTNNPSIIDLPLIEAYKTVVTTLGNNDVMVILDNHLTKPGWCCANDDGNGFFGDQFFDPTVWVAALKKMAATFNGVSNVVGMSLRNELRGPKQNVNDWFKYMQQGAEAVHSANNKVLVILSGLSFDADLSFVRSRPVKLSFTGKLVFELHWYSFSDGNSWAANNPNDICGRVLNRIGNGGGYLLNQGFPLFLSEFGIDERGVNTNDNRYFGCLTGWAAENDVDWSLWALTGSYYLRQGKVGMNEYYGVLDSDWISVRNSSFLQKISFLQSPLQGPGPRTDAYNLVFHPLTGLCIVRSLDDPKMLTLGPCNSSEPWSYTKKALRIKDQQLCLQSNGPKNPVTMTRTSCSTSGSKWQTISASRMHLASTTSNKTSLCLDVDTANNVVANACKCLSKDKSCEPMSQWFKIIKATRPLKSSRLYKEISSML

SEQ ID NO: 27476 - protein, 455 aa, Arabidopsis thaliana
  misc_feature (1)..(455): Ceres Seq. ID no. 1817352
MTNETLANNVTVRQSFQSLGLNDDIVGFQTNNPSIIDLPLIEAYKTVVTTLGNNDVMVILDNHLTKPGWCCANDDGNGFFGDQFFDPTVWVAALKKMAATFNGVSNVVGMSLRNELRGPKQNVNDWFKYMQQGAEAVHSANNKVLVILSGLSFDADLSFVRSRPVKLSFTGKLVFELHWYSFSDGNSWAANNPNDICGRVLNRIGNGGGYLLNQGFPLFLSEFGIDERGVNTNDNRYFGCLTGWAAENDVDWSLWALTGSYYLRQGKVGMNEYYGVLDSDWISVRNSSFLQKISFLQSPLQGPGPRTDAYNLVFHPLTGLCIVRSLDDPKMLTLGPCNSSEPWSYTKKALRIKDQQLCLQSNGPKNPVTMTRTSCSTSGSKWQTISASRMHLASTTSNKTSLCLDVDTANNVVANACKCLSKDKSCEPMSQWFKIIKATRPLKSSRLYKEISSML

SEQ ID NO: 27477 - DNA, 1005 bp, Arabidopsis thaliana
  misc_feature (1)..(1005): Ceres Seq. ID no. 1817433
atgggttgcgtctcatctaacctcctaaaccacgacgaagacttctctcaaatcggcggtggaagctccgccttcggtcaccacatcgtcaaactaacctccaccacttatggtcttctcacactcgatcctcctcctcctccttctcctcctatgacgccgccggagaaattcacagtcgatacaaaatctaagtcaatatggtctgagccaagggtgataaagtcggaaccggagattattaactcttgggagttaatgtctggtctcgacggagagagtttccgattcacgccacttcctaagactccggtgaagtataaagtgtttggtggagagaacaaagagaattcagatcctagtcggagaaaccctagaaaaaacttgaacgacgaggttttgaaaccgctagatctgaacagagaggattcggattctaattcgagaagccctagaaaatcgtttaaaccgttagatttgaaattggatgagaaatttgagaggatttgtccaccaggaggagagaatcgtgtggtgatgtacacgacgtcgttgcgaggtgttcgtcaaacgtttgaggcgtgtaacgctgtgagagcggcggtggagagttttggtgttgtggtttgcgagagagatgtgtcgatggatagaaggtttagagaagagcttgtgagtctaatggcgaagagagttggggatgagggagtggctgcattgccgcctcgggtttttgtgaagggaaggtacattggtggaggagaggaagtgttgagactagttgaggaaggttctttcggagagctgatcagcgggattccgagaaagaaagcgggaggatgcgagagcggcgcgtgtgatggttgcggcggtttgtttttcttgccgtgttttcggtgtaatggaagctgtaagatggtgaaaggatggggtagtgcttcggtggttgtgagatgtaatgagtgtaatgagaatggtcttgttccatgtcctatttgcagttga

SEQ ID NO: 27478 - protein, 334 aa, Arabidopsis thaliana
  misc_feature (1)..(334): Ceres Seq. ID no. 1817434
MGCVSSNLLNHDEDFSQIGGGSSAFGHHIVKLTSTTYGLLTLDPPPPPSPPMTPPEKFTVDTKSKSIWSEPRVIKSEPEIINSWELMSGLDGESFRFTPLPKTPVKYKVFGGENKENSDPSRRNPRKNLNDEVLKPLDLNREDSDSNSRSPRKSFKPLDLKLDEKFERICPPGGENRVVMYTTSLRGVRQTFEACNAVRAAVESFGVVVCERDVSMDRRFREELVSLMAKRVGDEGVAALPPRVFVKGRYIGGGEEVLRLVEEGSFGELISGIPRKKAGGCESGACDGCGGLFFLPCFRCNGSCKMVKGWGSASVVVRCNECNENGLVPCPICS

SEQ ID NO: 27479 - protein, 283 aa, Arabidopsis thaliana
  misc_feature (1)..(283): Ceres Seq. ID no. 1817435
MTPPEKFTVDTKSKSIWSEPRVIKSEPEIINSWELMSGLDGESFRFTPLPKTPVKYKVFGGENKENSDPSRRNPRKNLNDEVLKPLDLNREDSDSNSRSPRKSFKPLDLKLDEKFERICPPGGENRVVMYTTSLRGVRQTFEACNAVRAAVESFGVVVCERDVSMDRRFREELVSLMAKRVGDEGVAALPPRVFVKGRYIGGGEEVLRLVEEGSFGELISGIPRKKAGGCESGACDGCGGLFFLPCFRCNGSCKMVKGWGSASVVVRCNECNENGLVPCPICS

SEQ ID NO: 27480 - protein, 248 aa, Arabidopsis thaliana
  misc_feature (1)..(248): Ceres Seq. ID no. 1817436
MSGLDGESFRFTPLPKTPVKYKVFGGENKENSDPSRRNPRKNLNDEVLKPLDLNREDSDSNSRSPRKSFKPLDLKLDEKFERICPPGGENRVVMYTTSLRGVRQTFEACNAVRAAVESFGVVVCERDVSMDRRFREELVSLMAKRVGDEGVAALPPRVFVKGRYIGGGEEVLRLVEEGSFGELISGIPRKKAGGCESGACDGCGGLFFLPCFRCNGSCKMVKGWGSASVVVRCNECNENGLVPCPICS

SEQ ID NO: 27481 - DNA, 858 bp, Arabidopsis thaliana
  misc_feature (1)..(858): Ceres Seq. ID no. 1817754
atgggtgtatttcctgcgtttggagcatggatcaatcagaattctcaacagcctcttgaggaagatcccaagagctctgagcatgttgaatctaagtcggcatcagagatggataatggtcctgctaagatgaaaaaatactatgacgaagatgagtgggagaggcaagataaactttggacagctgcagagaagaagcatccatggaaagatgcccctcctaaggttaaggtgacaacaaaaaagggtatatgccatatgcacatagaattgacattggggttgcctcctgatggagtcttcgaacttttcactaatccacataacggaccaaacaccgaaccacttctgaaaagcaaatcaagaaaggttttgaaggacgatggaccgaggcagatcgcgaaggtgaagaaagctgtggcctggaacttcagtgggaggtctattgctatccccataagtctaattgtcgatgaaaacagaagagatcttacagcgaaatataaaaaagagaaaatgatgttcatgaaagtattcgagggtagctataaagtggagcctgtatacgtagattcagtacgcttatgcaagaacaagaagccgaagagtgtagatgaatacaagaaatgtagtggcggacaaggaaagattgcatcgaaagtgacaatggaccaatattttcagccatatcctccttttaatctaccgccattttcttggttcattcgtgatatcaccatcaagaataccaagagtgtgctagagagacttcaaagttggagtttcagtattcgaaatccgggtgtaatcatgtcaaccaacaaacatggaaaaacagaagtttctcctaaacagtaa

SEQ ID NO: 27482 - protein, 285 aa, Arabidopsis thaliana
  misc_feature (1)..(285): Ceres Seq. ID no. 1817755
MGVFPAFGAWINQNSQQPLEEDPKSSEHVESKSASEMDNGPAKMKKYYDEDEWERQDKLWTAAEKKHPWKDAPPKVKVTTKKGICHMHIELTLGLPPDGVFELFTNPHNGPNTEPLLKSKSRKVLKDDGPRQIAKVKKAVAWNFSGRSIAIPISLIVDENRRDLTAKYKKEKMMFMKVFEGSYKVEPVYVDSVRLCKNKKPKSVDEYKKCSGGQGKIASKVTMDQYFQPYPPFNLPPFSWFIRDITIKNTKSVLERLQSWSFSIRNPGVIMSTNKHGKTEVSPKQ

SEQ ID NO: 27483 - protein, 249 aa, Arabidopsis thaliana
  misc_feature (1)..(249): Ceres Seq. ID no. 1817756
MDNGPAKMKKYYDEDEWERQDKLWTAAEKKHPWKDAPPKVKVTTKKGICHMHIELTLGLPPDGVFELFTNPHNGPNTEPLLKSKSRKVLKDDGPRQIAKVKKAVAWNFSGRSIAIPISLIVDENRRDLTAKYKKEKMMFMKVFEGSYKVEPVYVDSVRLCKNKKPKSVDEYKKCSGGQGKIASKVTMDQYFQPYPPFNLPPFSWFIRDITIKNTKSVLERLQSWSFSIRNPGVIMSTNKHGKTEVSPKQ

SEQ ID NO: 27484 - protein, 242 aa, Arabidopsis thaliana
  misc_feature (1)..(242): Ceres Seq. ID no. 1817757
MKKYYDEDEWERQDKLWTAAEKKHPWKDAPPKVKVTTKKGICHMHIELTLGLPPDGVFELFTNPHNGPNTEPLLKSKSRKVLKDDGPRQIAKVKKAVAWNFSGRSIAIPISLIVDENRRDLTAKYKKEKMMFMKVFEGSYKVEPVYVDSVRLCKNKKPKSVDEYKKCSGGQGKIASKVTMDQYFQPYPPFNLPPFSWFIRDITIKNTKSVLERLQSWSFSIRNPGVIMSTNKHGKTEVSPKQ

SEQ ID NO: 27485 - DNA, 1038 bp, Arabidopsis thaliana
  misc_feature (1)..(1038): Ceres Seq. ID no. 1817809
atggaaacaagcgacagaattagccctggtggtggtataggagcagaagttccatcagcgtatcatatggctccgagaccttcagatagccctgctaaccagtttatggggttgtctctccctcccatggaagccccaatgccttcttcaggggaagcctcagggaagaagaggagaggcagacctcgtaaatatgaagctaatggtgctcctttgccttcttcatcagttcctcttgtgaagaaacgagtaagaggcaagctcaatggttttgatatgaagaagatgcataagaccattgggttccattcttctggtgaaaggtttggtgttggtggtggtgttggtggtggtgttggatcaaatttcacgccgcatgtaatcacagtgaacactggtgaggtatgtatattagaagaaaaaggccctaaactttcacttgggaggagatttgatattactatgagaatcatctccttttcacaacaaggaccacgagctatttgtatcttatcagcaaatggagtgatatcaaacgttactcttcgccaacccgattcttgcggtggtactctcacctacgagggtcggtttgagatactgtctctgtctggttcattcatggaaacagagaatcaaggttcaaaaggtcggtctggtggcatgagtgtatctttggccggtcctgatggtcgtgttgtcggtggcggtgtcgctggcctgctcattgccgccactcctattcaggtgactcatgaatctaacaacaacgtttacgttgttgttggcagttttataacgagtgatcaacaagatcatcagaaaccgaggaagcaaagagtcgagcatgcccctgcagcagtcatgtcagtgcctcctcctccttctcctcctcctccggcggcttctgttttctcaccgacaaacccggacagagagcagccgccatcttcattcggtatctccagctggaccaacggacaggacatgccgagaaactcagccactgacatcaacatatctttaccagtcgactga

SEQ ID NO: 27486 - protein, 345 aa, Arabidopsis thaliana
  misc_feature (1)..(345): Ceres Seq. ID no. 1817810
METSDRISPGGGIGAEVPSAYHMAPRPSDSPANQFMGLSLPPMEAPMPSSGEASGKKRRGRPRKYEANGAPLPSSSVPLVKKRVRGKLNGFDMKKMHKTIGFHSSGERFGVGGGVGGGVGSNFTPHVITVNTGEVCILEEKGPKLSLGRRFDITMRIISFSQQGPRAICILSANGVISNVTLRQPDSCGGTLTYEGRFEILSLSGSFMETENQGSKGRSGGMSVSLAGPDGRVVGGGVAGLLIAATPIQVTHESNNNVYVVVGSFITSDQQDHQKPRKQRVEHAPAAVMSVPPPPSPPPPAASVFSPTNPDREQPPSSFGISSWTNGQDMPRNSATDINISLPVD

SEQ ID NO: 27487 - protein, 323 aa, Arabidopsis thaliana
  misc_feature (1)..(323): Ceres Seq. ID no. 1817811
MAPRPSDSPANQFMGLSLPPMEAPMPSSGEASGKKRRGRPRKYEANGAPLPSSSVPLVKKRVRGKLNGFDMKKMHKTIGFHSSGERFGVGGGVGGGVGSNFTPHVITVNTGEVCILEEKGPKLSLGRRFDITMRIISFSQQGPRAICILSANGVISNVTLRQPDSCGGTLTYEGRFEILSLSGSFMETENQGSKGRSGGMSVSLAGPDGRVVGGGVAGLLIAATPIQVTHESNNNVYVVVGSFITSDQQDHQKPRKQRVEHAPAAVMSVPPPPSPPPPAASVFSPTNPDREQPPSSFGISSWTNGQDMPRNSATDINISLPVD

SEQ ID NO: 27488 - protein, 310 aa, Arabidopsis thaliana
  misc_feature (1)..(310): Ceres Seq. ID no. 1817812
MGLSLPPMEAPMPSSGEASGKKRRGRPRKYEANGAPLPSSSVPLVKKRVRGKLNGFDMKKMHKTIGFHSSGERFGVGGGVGGGVGSNFTPHVITVNTGEVCILEEKGPKLSLGRRFDITMRIISFSQQGPRAICILSANGVISNVTLRQPDSCGGTLTYEGRFEILSLSGSFMETENQGSKGRSGGMSVSLAGPDGRVVGGGVAGLLIAATPIQVTHESNNNVYVVVGSFITSDQQDHQKPRKQRVEHAPAAVMSVPPPPSPPPPAASVFSPTNPDREQPPSSFGISSWTNGQDMPRNSATDINISLPVD

SEQ ID NO: 27489 - DNA, 1263 bp, Arabidopsis thaliana
  misc_feature (1)..(1263): Ceres Seq. ID no. 1817993
atgatgaagctttgtccttgtttcatcaacccgcatcagcttggacctaattcgcctagagattcatttgacgaaggtcttacagcttatagaggccatagccgtaaactttttgcactgttcacatttcgctcacatcggaaaggaagctgcaggcagaagtatataacggaagagataaagaagtatgggaacgtgaagaactgcggtcgaatcttcaaattcaaggagctaatagctgcaaccgacaatttcagcatggattgtatgattggtgaaggcggttttggaagagtctacaaagggtttctcaccagcctcaatcaggtggtggctgtaaagaggcttgataggaatgggttgcaaggaacaagagagttctttgcagaagtaatggtattgagtctggctcaacatccaaaccttgtcaatctcattggctattgcgtcgaagacgagcaacgagtcctcgtttatgaattcatgcctaacggatctttggaagatcatttgttcgacttaccagaagggtcaccaagtctagactggttcaccagaatgcggatagtgcacggagcagcgaaagggctcgagtacttgcacgactacgcagatcctcctgtgatctaccgcgatttcaaagcttcaaacatattgttacaatctgacttcaactcaaagctatcggatttcgggttagctagacttggaccaactgaaggcaaagatcatgtgtccacaagagtcatgggaacatacggatactgtgcccctgaatatgcgatgaccggtcaactcactgctaaatccgatgtctacagtttcggtgttgtccttcttgagatcatttccggaagacgagctattgatggcgatagaccaactgaagaacaaaacttgatctcttgggtatttcatcaagcaagagtcttgttaacatatttgtgttgttgcttgagaagaaagaaaccgatgaaagtctttttttttttggtttggcaggcggaaccgttgttgaaagatagaaggatgtttgcgcagattgtggatccaaatctagatgggaactacccagtaaaagggttgcatcaagctctagcgattgcagcgatgtgtttgcaagaagaagcagagactaggccattgatgggagatgtggtcacagcacttgagttcttggctaagcctatagaggtggttgataacactaacactactcctgcctctcctactcagacatcatcatctgattcatcaaactaa

SEQ ID NO: 27490 - protein, 420 aa, Arabidopsis thaliana
  misc_feature (1)..(420): Ceres Seq. ID no. 1817994
MMKLCPCFINPHQLGPNSPRDSFDEGLTAYRGHSRKLFALFTFRSHRKGSCRQKYITEEIKKYGNVKNCGRIFKFKELIAATDNFSMDCMIGEGGFGRVYKGFLTSLNQVVAVKRLDRNGLQGTREFFAEVMVLSLAQHPNLVNLIGYCVEDEQRVLVYEFMPNGSLEDHLFDLPEGSPSLDWFTRMRIVHGAAKGLEYLHDYADPPVIYRDFKASNILLQSDFNSKLSDFGLARLGPTEGKDHVSTRVMGTYGYCAPEYAMTGQLTAKSDVYSFGVVLLEIISGRRAIDGDRPTEEQNLISWVFHQARVLLTYLCCCLRRKKPMKVFFFLVWQAEPLLKDRRMFAQIVDPNLDGNYPVKGLHQALAIAAMCLQEEAETRPLMGDVVTALEFLAKPIEVVDNTNTTPASPTQTSSSDSSN

SEQ ID NO: 27491 - protein, 419 aa, Arabidopsis thaliana
  misc_feature (1)..(419): Ceres Seq. ID no. 1817995
MKLCPCFINPHQLGPNSPRDSFDEGLTAYRGHSRKLFALFTFRSHRKGSCRQKYITEEIKKYGNVKNCGRIFKFKELIAATDNFSMDCMIGEGGFGRVYKGFLTSLNQVVAVKRLDRNGLQGTREFFAEVMVLSLAQHPNLVNLIGYCVEDEQRVLVYEFMPNGSLEDHLFDLPEGSPSLDWFTRMRIVHGAAKGLEYLHDYADPPVIYRDFKASNILLQSDFNSKLSDFGLARLGPTEGKDHVSTRVMGTYGYCAPEYAMTGQLTAKSDVYSFGVVLLEIISGRRAIDGDRPTEEQNLISWVFHQARVLLTYLCCCLRRKKPMKVFFFLVWQAEPLLKDRRMFAQIVDPNLDGNYPVKGLHQALAIAAMCLQEEAETRPLMGDVVTALEFLAKPIEVVDNTNTTPASPTQTSSSDSSN

SEQ ID NO: 27492 - protein, 334 aa, Arabidopsis thaliana
  misc_feature (1)..(334): Ceres Seq. ID no. 1817996
MDCMIGEGGFGRVYKGFLTSLNQVVAVKRLDRNGLQGTREFFAEVMVLSLAQHPNLVNLIGYCVEDEQRVLVYEFMPNGSLEDHLFDLPEGSPSLDWFTRMRIVHGAAKGLEYLHDYADPPVIYRDFKASNILLQSDFNSKLSDFGLARLGPTEGKDHVSTRVMGTYGYCAPEYAMTGQLTAKSDVYSFGVVLLEIISGRRAIDGDRPTEEQNLISWVFHQARVLLTYLCCCLRRKKPMKVFFFLVWQAEPLLKDRRMFAQIVDPNLDGNYPVKGLHQALAIAAMCLQEEAETRPLMGDVVTALEFLAKPIEVVDNTNTTPASPTQTSSSDSSN

SEQ ID NO: 27493 - DNA, 1872 bp, Arabidopsis thaliana
  misc_feature (1)..(1872): Ceres Seq. ID no. 1818292
atggtttcttttttacctaatctgtttcgtctgtgtgttttgatctttacaaaagcagatcagtgccggcggcgatattgtccgaggataaaacatgtttgctctttccaaggttttgcggagagtctccgcctaggagcttgcaatgctgtctactctaagctagatataccattgggagaaagaaacattgctattgaatcaaacgctttgattcatgataaacacgaagctttgcctagattttatgagctctcttggtcttcctctaccggaagacgttcactttcctcggacgctggagctaaaactaccggagatgacgatgacctcgaagacaagaatgtagaccttgcaactccagacgagactagtagtgatagtgaagatggtgaggagttttccggtgatgaaggggatattgaaggagcagagctggaactacatgtcccggaaagcaagagaccatcggagatgtttaaggccattgtttctgtctcaggtctgtctgtagggagtgctcttgataagtgggttgaacaaggaaaggataccaaccgtaaagagtttgaaagtgcgatgctacaactccgtaaacgtcggatgtttgggagagcattgcagatgacagaatggttagacgaaaataagcagtttgaaatggaggagagagattatgcttgtcggcttgatctgatttccaaggtacgtggctggtacaagggagaagcttatatcaaaacaatcccggaatctttcagaggggaattggtctaccgaaccctcctggcgaatcatgtggcaactagcaatgtgagaacagctgaagcagttttcaacaaaatgaaggacttgggattccctctgtcaacattcacctgtaatcagatgcttattctttacaaaagggtcgacaagaagaaaatagccgatgtgttattgctgttggagaaggaaaatctgaagccgaatcttaacacatacaaaatcctgattgataccaaaggatcatcaaatgacataactgggatggaacaaattgtggagacaatgaaaagtgaaggtgttgagcttgaccttcgtgcacgagctctcattgcaagacactatgcatcagctgggcttaaagagaaggctgagaaagtgctgaaagagatggaaggtgaaagcttggaggaaaatcggcatatgtgcaaggatttgctttccgtctatggctatctccagagggaggatgaagtgcgcagagtttggaagatctgtgaagaaaacccccgttataacgaggtccttgctgcaatcttggcttttggaaagatcgataaagtcaaagatgcagaggcggtttttgagaaggtgttgaagatgtcccatagagtttcttctaatgtttactccgttctcttgagggtttacgtggatcacaagatggtctcagagggtaaggatcttgttaagcagatgtcagacagcgggtgcaatattggggccttaacatgggatgcagtgatcaagctctatgtggaagccggggaagtagaaaaggctgagtcttcactgagcaaggcaatacagtcgaaacagattaaaccgttgatgagctccttcatgtacttaatgcacgagtatgtgagaaggggtgatgttcataacacagagaaaatcttccagaggatgaagcaagctggctatcaatctcgcttctgggcgtaccaaacccttatccaagcttatgtcaatgccaaagctccagcttatggaatgaaggaaagaatgaaagctgataacatcttcccaaataaaagattagctgctcaactcgctaaagccgatcccttcaagaagacccctctctcggatctccttgattga

SEQ ID NO: 27494 - protein, 623 aa, Arabidopsis thaliana
  misc_feature (1)..(623): Ceres Seq. ID no. 1818293
MVSFLPNLFRLCVLIFTKADQCRRRYCPRIKHVCSFQGFAESLRLGACNAVYSKLDIPLGERNIAIESNALIHDKHEALPRFYELSWSSSTGRRSLSSDAGAKTTGDDDDLEDKNVDLATPDETSSDSEDGEEFSGDEGDIEGAELELHVPESKRPSEMFKAIVSVSGLSVGSALDKWVEQGKDTNRKEFESAMLQLRKRRMFGRALQMTEWLDENKQFEMEERDYACRLDLISKVRGWYKGEAYIKTIPESFRGELVYRTLLANHVATSNVRTAEAVFNKMKDLGFPLSTFTCNQMLILYKRVDKKKIADVLLLLEKENLKPNLNTYKILIDTKGSSNDITGMEQIVETMKSEGVELDLRARALIARHYASAGLKEKAEKVLKEMEGESLEENRHMCKDLLSVYGYLQREDEVRRVWKICEENPRYNEVLAAILAFGKIDKVKDAEAVFEKVLKMSHRVSSNVYSVLLRVYVDHKMVSEGKDLVKQMSDSGCNIGALTWDAVIKLYVEAGEVEKAESSLSKAIQSKQIKPLMSSFMYLMHEYVRRGDVHNTEKIFQRMKQAGYQSRFWAYQTLIQAYVNAKAPAYGMKERMKADNIFPNKRLAAQLAKADPFKKTPLSDLLD

SEQ ID NO: 27495 - protein, 465 aa, Arabidopsis thaliana
  misc_feature (1)..(465): Ceres Seq. ID no. 1818294
MFKAIVSVSGLSVGSALDKWVEQGKDTNRKEFESAMLQLRKRRMFGRALQMTEWLDENKQFEMEERDYACRLDLISKVRGWYKGEAYIKTIPESFRGELVYRTLLANHVATSNVRTAEAVFNKMKDLGFPLSTFTCNQMLILYKRVDKKKIADVLLLLEKENLKPNLNTYKILIDTKGSSNDITGMEQIVETMKSEGVELDLRARALIARHYASAGLKEKAEKVLKEMEGESLEENRHMCKDLLSVYGYLQREDEVRRVWKICEENPRYNEVLAAILAFGKIDKVKDAEAVFEKVLKMSHRVSSNVYSVLLRVYVDHKMVSEGKDLVKQMSDSGCNIGALTWDAVIKLYVEAGEVEKAESSLSKAIQSKQIKPLMSSFMYLMHEYVRRGDVHNTEKIFQRMKQAGYQSRFWAYQTLIQAYVNAKAPAYGMKERMKADNIFPNKRLAAQLAKADPFKKTPLSDLLD

SEQ ID NO: 27496 - protein, 430 aa, Arabidopsis thaliana
  misc_feature (1)..(430): Ceres Seq. ID no. 1818295
MLQLRKRRMFGRALQMTEWLDENKQFEMEERDYACRLDLISKVRGWYKGEAYIKTIPESFRGELVYRTLLANHVATSNVRTAEAVFNKMKDLGFPLSTFTCNQMLILYKRVDKKKIADVLLLLEKENLKPNLNTYKILIDTKGSSNDITGMEQIVETMKSEGVELDLRARALIARHYASAGLKEKAEKVLKEMEGESLEENRHMCKDLLSVYGYLQREDEVRRVWKICEENPRYNEVLAAILAFGKIDKVKDAEAVFEKVLKMSHRVSSNVYSVLLRVYVDHKMVSEGKDLVKQMSDSGCNIGALTWDAVIKLYVEAGEVEKAESSLSKAIQSKQIKPLMSSFMYLMHEYVRRGDVHNTEKIFQRMKQAGYQSRFWAYQTLIQAYVNAKAPAYGMKERMKADNIFPNKRLAAQLAKADPFKKTPLSDLLD

SEQ ID NO: 27497 - DNA, 2853 bp, Arabidopsis thaliana
  misc_feature (1)..(2853): Ceres Seq. ID no. 1818328
atgagcacccagaagcaagtggtgactattcgggacctggtagatgaagccaagaaacgaattgtaatcgtggtcatatgcgtcgtcggactttcctacctcatgtccctgacaagttcatcggttttggttaaccttactcctgctgtgttattgatcatcctttttcgttattacactctcgatagtgaaatgaaaagaaaagctgcagcttacaccaacaagccatcgtcgtctctgaatgcaccaactctaaacaaaacacctgaactccctaaagcagctccacggtctgactggagaagcaaagtgaactctcaagtcgttgaggatgcaattgatcactttactcgtcacctcatttctgaatgggttctggatctttggtactctcgaattacaccggataagcaaggtcctgaagaactggtgtttattattaacgatgttcttggggaactttcacggcggtttagaaatgtaaatcttattgatctattgacaagggatttgattgatattatatgtcgccgtgtggagcttttccgcgagtgtcaagcaaagattgagagacaacaaaggagaagcctcagttttgaagacagagactcagaactaagacgtgtgatggccagtgaagataaattgcaccctgctttgttctctcctgaatccgagcataaggttctgcaacatatagtgaacagtctcattttagtaacatttaggccagaggatctgcactgtgcttttttccactataccgtgagggagctttttgcttgctgtgtgatccgaccagtcctaaacctagccaatcctcggttcataaatgagaggattgaagctgctgtaatgtcaaggataaagactactatcagatctagtgctgcagaagaggcttctcagtctgaagatctctcaaatgtttctcctgatcatttttctagatatatggacccctctgtcacaggtgttgagcttgtgcagttgaaaaatgaacagcaaaaaaattctaaaaagaaaagcgctacagataaacagcatgtaaaagagctctctaaagatccattgctttctatggacactcgatcttcccgatcgtggaactctttcccctcaacatccaaaataggtgatggtagtaaagatcctcaaggacatcgaggaggagagggttggggtgacgtgttagacatgatgtcacaaaggaaaactgagacccttgctcctgagcatcttgaaagcgtgtgggcaaaaggaagaaactataaaaagaaggaaggtgggaaagttgatgagcgcgtgcccccgagatggtctagcaaggctggtgactgcaatgaaaacactgtgaatgcaagagagtccagtcagcgtaaagttgtaaatacagacagtcatttatcaagttattcctctgctgaagaggatgaggagcaaacaaagagtagtcattcttatacatccgaggatgaggaaacggtaacaggtctaaacagtcctgggactcgtgtctgggatggtcgaacgaagaaaaatcttggtgtttcacggatacaccatccacttgaaaattcaggccgttctttaaaaaagaccagtaaagggcatgaacgttatcagcaagtacccggtcatcaatctggcaggaagagatccagaatttctggtcatattatagacgatgatgatagtgatgattctgaagatggttctttgactagatcatacagtggaatgtctgcaacgtcatctacatcatacgtttcagcggcagaaagtgaccttcccaatgcccctaaaagttctttgttggttgattcctttgcgaagttgagatgtgaggttctgggtgccaatattgtgaagggtagttctaagatgtttgctgtgtattcagttgcagtcacagatgaaagtaatcatagctggtctatcaaaagaagatttcgacattttgaggagcttcaccgacggctaaaagtgtttcctgagtacaaacttcatttaccgccaaagcatttcctatcaacaggcgtggacatacctgttatccaagagcgatgtgtactacttgacgagtatatcaagctacaacgaatttcaggatcaattgaagtttgggacttcctcagtgtggattctcagacttatgcgttctcaagttccttctcaatcattgagacgctaacagttaaacctgtcaataagacatctactgtcgctacaaatatagcaagtatgactcaggcagcaccaggtccgcttcctcggagggaaaatctgagttctgagaatgggatatcgggtcaaaatatgaggaataacgttatggtggatgatgtaaagtcaaaagtgaaaaatcttggaaatgatcatgtgaagacacctgatgtagatgtgagaaaccgcaaagagaatggcgggctaaaagtgggtactcaacatgccgatgatgtggcctgcgctggcctgcccaccgagtgggttcctccaaagctaacattacccttgctagacttagtagatgttgtctttcaactccaggagggtgggtggatcaggcggaaagctttttgggttgccaaacagatacttcaacttgggatgggggacgcattggacgattgggtacttgaaaaaatttgtcttttgcggcggggaactgtagttgcttctggaattcaacgggttgaacagatactatggccggatggtgtattcatgacaaagcatccaaaaaggcagcaacaatccagcatttctgaagaggagcagaaacaagaagcagagagacgagcaaagtttgttcatgagctgatgatcggtaatgagcgtcctgttatctga

SEQ ID NO: 27498 - protein, 950 aa, Arabidopsis thaliana
  misc_feature (1)..(950): Ceres Seq. ID no. 1818329
MSTQKQVVTIRDLVDEAKKRIVIVVICVVGLSYLMSLTSSSVLVNLTPAVLLIILFRYYTLDSEMKRKAAAYTNKPSSSLNAPTLNKTPELPKAAPRSDWRSKVNSQVVEDAIDHFTRHLISEWVLDLWYSRITPDKQGPEELVFIINDVLGELSRRFRNVNLIDLLTRDLIDIICRRVELFRECQAKIERQQRRSLSFEDRDSELRRVMASEDKLHPALFSPESEHKVLQHIVNSLILVTFRPEDLHCAFFHYTVRELFACCVIRPVLNLANPRFINERIEAAVMSRIKTTIRSSAAEEASQSEDLSNVSPDHFSRYMDPSVTGVELVQLKNEQQKNSKKKSATDKQHVKELSKDPLLSMDTRSSRSWNSFPSTSKIGDGSKDPQGHRGGEGWGDVLDMMSQRKTETLAPEHLESVWAKGRNYKKKEGGKVDERVPPRWSSKAGDCNENTVNARESSQRKVVNTDSHLSSYSSAEEDEEQTKSSHSYTSEDEETVTGLNSPGTRVWDGRTKKNLGVSRIHHPLENSGRSLKKTSKGHERYQQVPGHQSGRKRSRISGHIIDDDDSDDSEDGSLTRSYSGMSATSSTSYVSAAESDLPNAPKSSLLVDSFAKLRCEVLGANIVKGSSKMFAVYSVAVTDESNHSWSIKRRFRHFEELHRRLKVFPEYKLHLPPKHFLSTGVDIPVIQERCVLLDEYIKLQRISGSIEVWDFLSVDSQTYAFSSSFSIIETLTVKPVNKTSTVATNIASMTQAAPGPLPRRENLSSENGISGQNMRNNVMVDDVKSKVKNLGNDHVKTPDVDVRNRKENGGLKVGTQHADDVACAGLPTEWVPPKLTLPLLDLVDVVFQLQEGGWIRRKAFWVAKQILQLGMGDALDDWVLEKICLLRRGTVVASGIQRVEQILWPDGVFMTKHPKRQQQSSISEEEQKQEAERRAKFVHELMIGNERPVI

SEQ ID NO: 27499 - protein, 916 aa, Arabidopsis thaliana
  misc_feature (1)..(916): Ceres Seq. ID no. 1818330
MSLTSSSVLVNLTPAVLLIILFRYYTLDSEMKRKAAAYTNKPSSSLNAPTLNKTPELPKAAPRSDWRSKVNSQVVEDAIDHFTRHLISEWVLDLWYSRITPDKQGPEELVFIINDVLGELSRRFRNVNLIDLLTRDLIDIICRRVELFRECQAKIERQQRRSLSFEDRDSELRRVMASEDKLHPALFSPESEHKVLQHIVNSLILVTFRPEDLHCAFFHYTVRELFACCVIRPVLNLANPRFINERIEAAVMSRIKTTIRSSAAEEASQSEDLSNVSPDHFSRYMDPSVTGVELVQLKNEQQKNSKKKSATDKQHVKELSKDPLLSMDTRSSRSWNSFPSTSKIGDGSKDPQGHRGGEGWGDVLDMMSQRKTETLAPEHLESVWAKGRNYKKKEGGKVDERVPPRWSSKAGDCNENTVNARESSQRKVVNTDSHLSSYSSAEEDEEQTKSSHSYTSEDEETVTGLNSPGTRVWDGRTKKNLGVSRIHHPLENSGRSLKKTSKGHERYQQVPGHQSGRKRSRISGHIIDDDDSDDSEDGSLTRSYSGMSATSSTSYVSAAESDLPNAPKSSLLVDSFAKLRCEVLGANIVKGSSKMFAVYSVAVTDESNHSWSIKRRFRHFEELHRRLKVFPEYKLHLPPKHFLSTGVDIPVIQERCVLLDEYIKLQRISGSIEVWDFLSVDSQTYAFSSSFSIIETLTVKPVNKTSTVATNIASMTQAAPGPLPRRENLSSENGISGQNMRNNVMVDDVKSKVKNLGNDHVKTPDVDVRNRKENGGLKVGTQHADDVACAGLPTEWVPPKLTLPLLDLVDVVFQLQEGGWIRRKAFWVAKQILQLGMGDALDDWVLEKICLLRRGTVVASGIQRVEQILWPDGVFMTKHPKRQQQSSISEEEQKQEAERRAKFVHELMIGNERPVI

SEQ ID NO: 27500 - protein, 886 aa, Arabidopsis thaliana
  misc_feature (1)..(886): Ceres Seq. ID no. 1818331
MKRKAAAYTNKPSSSLNAPTLNKTPELPKAAPRSDWRSKVNSQVVEDAIDHFTRHLISEWVLDLWYSRITPDKQGPEELVFIINDVLGELSRRFRNVNLIDLLTRDLIDIICRRVELFRECQAKIERQQRRSLSFEDRDSELRRVMASEDKLHPALFSPESEHKVLQHIVNSLILVTFRPEDLHCAFFHYTVRELFACCVIRPVLNLANPRFINERIEAAVMSRIKTTIRSSAAEEASQSEDLSNVSPDHFSRYMDPSVTGVELVQLKNEQQKNSKKKSATDKQHVKELSKDPLLSMDTRSSRSWNSFPSTSKIGDGSKDPQGHRGGEGWGDVLDMMSQRKTETLAPEHLESVWAKGRNYKKKEGGKVDERVPPRWSSKAGDCNENTVNARESSQRKVVNTDSHLSSYSSAEEDEEQTKSSHSYTSEDEETVTGLNSPGTRVWDGRTKKNLGVSRIHHPLENSGRSLKKTSKGHERYQQVPGHQSGRKRSRISGHIIDDDDSDDSEDGSLTRSYSGMSATSSTSYVSAAESDLPNAPKSSLLVDSFAKLRCEVLGANIVKGSSKMFAVYSVAVTDESNHSWSIKRRFRHFEELHRRLKVFPEYKLHLPPKHFLSTGVDIPVIQERCVLLDEYIKLQRISGSIEVWDFLSVDSQTYAFSSSFSIIETLTVKPVNKTSTVATNIASMTQAAPGPLPRRENLSSENGISGQNMRNNVMVDDVKSKVKNLGNDHVKTPDVDVRNRKENGGLKVGTQHADDVACAGLPTEWVPPKLTLPLLDLVDVVFQLQEGGWIRRKAFWVAKQILQLGMGDALDDWVLEKICLLRRGTVVASGIQRVEQILWPDGVFMTKHPKRQQQSSISEEEQKQEAERRAKFVHELMIGNERPVI

SEQ ID NO: 27501 - DNA, 777 bp, Arabidopsis thaliana
  misc_feature (1)..(777): Ceres Seq. ID no. 1818332
atggctgcttccgatgattcctctcactatttcaccgagtttaccttgtctgagattgtagacatggagaatctgtataaggagctcggtgaccaatctctccacaaagatttctgtcaaactgttgcctctacttttagttgttctgtgaatcggaatggcaaatcctctataacctggaaacaggtacagatttggttccaggagaagctgaagcatcaaagccaaccaaaatccaaaactttgccatctccccctttgcagattcatgacttatctaatcccagttcttatgcttcaaatgcctcaaatgctacctttgttgggaattctacctttgttcaaacacgaaaaggcaaggcctctgatttagctgatctggcttttgaggctaaatcagcgcgggactacgcgtggtatgacgtgtcttcgttccttacttatagagttcttcgcactggtgaactggaagtgcgtgtacggttttctgggttcgacaaccgacacgatgagtgggtaaacgtcaaaacatcagtgcgtgagcggtctattcctgtagaaccatcagagtgtgggagagtgaacgttggagacctgcttctatgtttccaagaaagagaggatcaagcactctactgtgatggtcatgttttgaatatcaagagagggattcatgatcacgcgagatgtaactgcgtgtttcttgttcgctacgagcttgacaatacagaggaatcgctgggactagaaagaatttgccgccgccctgaagagtaa

SEQ ID NO: 27502 - protein, 258 aa, Arabidopsis thaliana
  misc_feature (1)..(258): Ceres Seq. ID no. 1818333
MAASDDSSHYFTEFTLSEIVDMENLYKELGDQSLHKDFCQTVASTFSCSVNRNGKSSITWKQVQIWFQEKLKHQSQPKSKTLPSPPLQIHDLSNPSSYASNASNATFVGNSTFVQTRKGKASDLADLAFEAKSARDYAWYDVSSFLTYRVLRTGELEVRVRFSGFDNRHDEWVNVKTSVRERSIPVEPSECGRVNVGDLLLCFQEREDQALYCDGHVLNIKRGIHDHARCNCVFLVRYELDNTEESLGLERICRRPEE

SEQ ID NO: 27503 - protein, 237 aa, Arabidopsis thaliana
  misc_feature (1)..(237): Ceres Seq. ID no. 1818334
MENLYKELGDQSLHKDFCQTVASTFSCSVNRNGKSSITWKQVQIWFQEKLKHQSQPKSKTLPSPPLQIHDLSNPSSYASNASNATFVGNSTFVQTRKGKASDLADLAFEAKSARDYAWYDVSSFLTYRVLRTGELEVRVRFSGFDNRHDEWVNVKTSVRERSIPVEPSECGRVNVGDLLLCFQEREDQALYCDGHVLNIKRGIHDHARCNCVFLVRYELDNTEESLGLERICRRPEE

SEQ ID NO: 27504 - DNA, 1353 bp, Arabidopsis thaliana
  misc_feature (1)..(1353): Ceres Seq. ID no. 1818450
atgtctatattcaatcctgattcaatcaacaacgagctatcgaaaccaacatcgatctttggtctaaagctttgggtcgtcatcggaattttactaggatctcttatagtcatcgctctcttctttctctccctctgtttaacctctcgccggagaaaccgtaagccacgtcacgccgatttcgcatccgcagccgtagcaacgccgccgatttcaaaggagattcaggagatcgttagacctcctgcgcaagaccattgccatccgacgcagcccgttgcggcggagattcaagtggatatagggaagaccgagcaccgtgttgtgttctcggatcgagtctcgagtggtgaaagcagaggaacggttagtgaaacggcgtcgtattcagggagtggttgtgttggacctgaggtttcgcatcttggttggggaagatggtatactcttagagagcttgaagcagctactaatggattgtgtgaagagaatgtgatcggagaaggaggttatgggattgtttatagtgggattttaactgatggaactaaagtcgctgtcaagaatctgcttaacaacaggggtcaagctgagaaggagtttagagtggaagtggaagctatcgggcgtgtaaggcataagaatctcgttaggctattaggatactgcgtcgaaggagcatacaggatgctcgtgtatgactacgtcgataatggcaacttggagcaatggattcatggggatgttggtgataaaagtccgttgacttgggatattcgtatgaacataatactttgcatggcgaaaggattggcctatctgcatgagggtcttgaaccgaaagtcgttcatcgggacataaaatctagtaatattttgcttgatcgtcaatggaatgctaaggtatcagattttggacttgctaagctcttgttctccgagagcagctacgtgacaacccgagtaatgggaacttttggatatgttgcgcctgagtatgcttgcaccggaatgttgacagaaaagagtgatatctatagttttgggatattaatcatggagataatcaccggaagaaatcctgtcgattatagtcgacctcaaggagaggtgaatttggttgagtggctgaaaacaatggttggaaaccgaaggtctgaggaagtagtcgatccaaaaatacccgaaccgcccacttcaaaagctcttaaacgcgtgttgctcgtcgcgctgcgttgtgtggatccggacgcgaataagagacctaaaatgggtcatattatacacatgcttgaagctgaagacttgttctatcgtgacgtaagtcttataatcgtattaatgaacatttga

SEQ ID NO: 27505 - protein, 450 aa, Arabidopsis thaliana
  misc_feature (1)..(450): Ceres Seq. ID no. 1818451
MSIFNPDSINNELSKPTSIFGLKLWVVIGILLGSLIVIALFFLSLCLTSRRRNRKPRHADFASAAVATPPISKEIQEIVRPPAQDHCHPTQPVAAEIQVDIGKTEHRVVFSDRVSSGESRGTVSETASYSGSGCVGPEVSHLGWGRWYTLRELEAATNGLCEENVIGEGGYGIVYSGILTDGTKVAVKNLLNNRGQAEKEFRVEVEAIGRVRHKNLVRLLGYCVEGAYRMLVYDYVDNGNLEQWIHGDVGDKSPLTWDIRMNIILCMAKGLAYLHEGLEPKVVHRDIKSSNILLDRQWNAKVSDFGLAKLLFSESSYVTTRVMGTFGYVAPEYACTGMLTEKSDIYSFGILIMEIITGRNPVDYSRPQGEVNLVEWLKTMVGNRRSEEVVDPKIPEPPTSKALKRVLLVALRCVDPDANKRPKMGHIIHMLEAEDLFYRDVSLIIVLMNI

SEQ ID NO: 27506 - DNA, 2481 bp, Arabidopsis thaliana
  misc_feature (1)..(2481): Ceres Seq. ID no. 1818829
atggaggaaattgaagaaggaagcagcaacaacagcataagacgtgttggtaccggaagtagtgaccggagatgggttgatggaagcgaggtagactctgaaacgccgctgttttcagaaatcagagatagagactatagttttgggaatttgaggagaagattaatgaaaaaacccaaaagagctgattctcttgatgttgaagctatggaaattgcaggttctcatggtcacaatctcaaggatttgtcacttttgactacacttggaatagcgtttcagacgttaggtgttgtgtatggtgatatgggaacaagtcctttgtatgtgttcagtgatgtgtttagtaaagttcctataagatcagaagttgatgttcttggagctttgtctctcgttatctacactattgctgtgattcctttggcaaagtatgtatttgtagtccttaaagctaacgacaatggcgaaggtaatgcttccgcaccgatgtgtttagtaaagtatgcaaaggtgaataagctgccaaatcaacaacctgcggatgagcagatctcgagttttaggcttaaactcccaactcctgagctggaaagagctctggggattaaagaagctttggagacaaaagggtatttgaaaactcttcttttgcttttagtcctaatgggaacttccatgattattggcgatggaattctaacaccagctatgtcagtgatgtctgcaatgagtggtctacaaggtgaagttaaaggatttggaacaaatgcattggttatgtcttcgattgtgattctcgtggctttgttcagcatacaacggtttgggacgggtaaagttggttttctatttgctccagttctggcgctctggttcttctctcttggtgctattggaatctataatctgttgaagtatgacttcactgtcataagagcactaaacccgttttatatcgttttgttcttcaacaagaatagcaaacaggcttggtctgctcttggtggatgtgtcttatgcataacaggagctgaagcaatgtttgcagatttaggacatttctcagttcgttctatacagatggcatttacttgcgtggtgttcccatgccttctcttagcttacatgggtcaagctgcttatctaacaaagcatcccgaggcctcagctcgcatattctatgattcagttccaaagagtttgttctggccggtgtttgtgattgcaacattagctgctatgatagctagccaagccatgatctccgcgactttctcatgcgtcaaacaagccatggctctcggttgctttccaaggctgaagataatccacacttctaagaaacggataggtcaaatctatataccagttatcaactggttcttgatgatcatgtgcattcttgtcgtctccatcttcagaagcacaacccacattgccaatgcttacggcatagcagaggtaggtgtaatgatggttagcacagttttggtaactctagtgatgcttcttatttggcaaaccaatatatttctcgccctttgctttccccttatatttggatcagtggagaccatttacttgctagctgttctcaccaagatattggaaggcggttgggttccgctagtattcgccactttcttcctcactgtaatgtacatttggaactacggaagtgtactcaagtaccaaagcgaggtcagggaaagaatctccatggattttatgcgtgagctcggttcaactcttgggaccattcgaatccctgggattggactcctttataacgagcttgtccaaggtataccttccatttttggacagttcttgctcactcttcctgcgattcactcaacaatcatctttgtctgcatcaaatatgttcctgtcccggttgttcctcaagaagagaggttcctcttcagacgggtttgtcctaaggactaccatatgttcaggtgcattgcgaggtatggttacaaagatgtcagaaaagaagattctagagtctttgaacagcttcttattgaaagtctagagaagttcttgagatgtgaagcattagaggatgctctagagagcactctgaatgattttgatcccgatagagtttccgttgcaagtgatacttacacggacgacctcatggctcctctcatccaccgtgcaaagcgttctgagccagagcaagagttggattcagaggttttgccatcttcaagcgtagggtcgtctatggaggaagatccagctctggaatatgaacttgcggctttgagagaagccacagactcggggctaacgtatttactggctcatggagatgtaagggcgaagaagaattcgattttcgtgaagaagcttgtgattaattacttctatgcgtttctaaggagaaattgcagagctggagctgcgaatctcactgttcctcatatgaacatcttgcaagctgggatgacttatatggtctag

SEQ ID NO: 27507 - protein, 826 aa, Arabidopsis thaliana
  misc_feature (1)..(826): Ceres Seq. ID no. 1818830
MEEIEEGSSNNSIRRVGTGSSDRRWVDGSEVDSETPLFSEIRDRDYSFGNLRRRLMKKPKRADSLDVEAMEIAGSHGHNLKDLSLLTTLGIAFQTLGVVYGDMGTSPLYVFSDVFSKVPIRSEVDVLGALSLVIYTIAVIPLAKYVFVVLKANDNGEGNASAPMCLVKYAKVNKLPNQQPADEQISSFRLKLPTPELERALGIKEALETKGYLKTLLLLLVLMGTSMIIGDGILTPAMSVMSAMSGLQGEVKGFGTNALVMSSIVILVALFSIQRFGTGKVGFLFAPVLALWFFSLGAIGIYNLLKYDFTVIRALNPFYIVLFFNKNSKQAWSALGGCVLCITGAEAMFADLGHFSVRSIQMAFTCVVFPCLLLAYMGQAAYLTKHPEASARIFYDSVPKSLFWPVFVIATLAAMIASQAMISATFSCVKQAMALGCFPRLKIIHTSKKRIGQIYIPVINWFLMIMCILVVSIFRSTTHIANAYGIAEVGVMMVSTVLVTLVMLLIWQTNIFLALCFPLIFGSVETIYLLAVLTKILEGGWVPLVFATFFLTVMYIWNYGSVLKYQSEVRERISMDFMRELGSTLGTIRIPGIGLLYNELVQGIPSIFGQFLLTLPAIHSTIIFVCIKYVPVPVVPQEERFLFRRVCPKDYHMFRCIARYGYKDVRKEDSRVFEQLLIESLEKFLRCEALEDALESTLNDFDPDRVSVASDTYTDDLMAPLIHRAKRSEPEQELDSEVLPSSSVGSSMEEDPALEYELAALREATDSGLTYLLAHGDVRAKKNSIFVKKLVINYFYAFLRRNCRAGAANLTVPHMNILQAGMTYMV

SEQ ID NO: 27508 - protein, 771 aa, Arabidopsis thaliana
  misc_feature (1)..(771): Ceres Seq. ID no. 1818831
MKKPKRADSLDVEAMEIAGSHGHNLKDLSLLTTLGIAFQTLGVVYGDMGTSPLYVFSDVFSKVPIRSEVDVLGALSLVIYTIAVIPLAKYVFVVLKANDNGEGNASAPMCLVKYAKVNKLPNQQPADEQISSFRLKLPTPELERALGIKEALETKGYLKTLLLLLVLMGTSMIIGDGILTPAMSVMSAMSGLQGEVKGFGTNALVMSSIVILVALFSIQRFGTGKVGFLFAPVLALWFFSLGAIGIYNLLKYDFTVIRALNPFYIVLFFNKNSKQAWSALGGCVLCITGAEAMFADLGHFSVRSIQMAFTCVVFPCLLLAYMGQAAYLTKHPEASARIFYDSVPKSLFWPVFVIATLAAMIASQAMISATFSCVKQAMALGCFPRLKIIHTSKKRIGQIYIPVINWFLMIMCILVVSIFRSTTHIANAYGIAEVGVMMVSTVLVTLVMLLIWQTNIFLALCFPLIFGSVETIYLLAVLTKILEGGWVPLVFATFFLTVMYIWNYGSVLKYQSEVRERISMDFMRELGSTLGTIRIPGIGLLYNELVQGIPSIFGQFLLTLPAIHSTIIFVCIKYVPVPVVPQEERFLFRRVCPKDYHMFRCIARYGYKDVRKEDSRVFEQLLIESLEKFLRCEALEDALESTLNDFDPDRVSVASDTYTDDLMAPLIHRAKRSEPEQELDSEVLPSSSVGSSMEEDPALEYELAALREATDSGLTYLLAHGDVRAKKNSIFVKKLVINYFYAFLRRNCRAGAANLTVPHMNILQAGMTYMV

SEQ ID NO: 27509 - protein, 757 aa, Arabidopsis thaliana
  misc_feature (1)..(757): Ceres Seq. ID no. 1818832
MEIAGSHGHNLKDLSLLTTLGIAFQTLGVVYGDMGTSPLYVFSDVFSKVPIRSEVDVLGALSLVIYTIAVIPLAKYVFVVLKANDNGEGNASAPMCLVKYAKVNKLPNQQPADEQISSFRLKLPTPELERALGIKEALETKGYLKTLLLLLVLMGTSMIIGDGILTPAMSVMSAMSGLQGEVKGFGTNALVMSSIVILVALFSIQRFGTGKVGFLFAPVLALWFFSLGAIGIYNLLKYDFTVIRALNPFYIVLFFNKNSKQAWSALGGCVLCITGAEAMFADLGHFSVRSIQMAFTCVVFPCLLLAYMGQAAYLTKHPEASARIFYDSVPKSLFWPVFVIATLAAMIASQAMISATFSCVKQAMALGCFPRLKIIHTSKKRIGQIYIPVINWFLMIMCILVVSIFRSTTHIANAYGIAEVGVMMVSTVLVTLVMLLIWQTNIFLALCFPLIFGSVETIYLLAVLTKILEGGWVPLVFATFFLTVMYIWNYGSVLKYQSEVRERISMDFMRELGSTLGTIRIPGIGLLYNELVQGIPSIFGQFLLTLPAIHSTIIFVCIKYVPVPVVPQEERFLFRRVCPKDYHMFRCIARYGYKDVRKEDSRVFEQLLIESLEKFLRCEALEDALESTLNDFDPDRVSVASDTYTDDLMAPLIHRAKRSEPEQELDSEVLPSSSVGSSMEEDPALEYELAALREATDSGLTYLLAHGDVRAKKNSIFVKKLVINYFYAFLRRNCRAGAANLTVPHMNILQAGMTYMV

SEQ ID NO: 27510 - DNA, 7608 bp, Arabidopsis thaliana
  misc_feature (1)..(7608): Ceres Seq. ID no. 1819120
atggtggtggacggagggaatagagatgttgaggtaggaaaaattccagtgatggctttcagaccatcccacgaagctaagcttagagaattgttgcataatatttgcttacatgagattaagctatgctctgatgctgcaaaagaatttgttaagttactgaagggagaaaccggtggcgatttgttgcgtctttatttccagagctcaccaaactttgctgagcttcttgaggcatggaagcttcgacatgaaaaacaaggattgtcctatatattctcgcttatccagacgattttgagtcatccagagggaaaagatagatcaactgatattggaagagctattgaccagtttggtaggttacttgttgaagaaaaattggatgatatttacaaagaattgaacagcaaagagggaaaacaacagtctgctgcactttcattgttagcttcgattgttagacgtggtccaggaatggcatcagagatagctaagaagtttgattttaagggttttgcaaaactagcagagtataatacgcaagggactgaaaaggttaagaaacactcaacaaggaaggcatttgttggatttgcaatatcattccttgaagttgggaagcctggattgttaagctcagtgttaaataagaaggaaatgtactcgaaagtcctgccaggccttgggaaagatgatgatgacactgtggcttctgtcttgtctacgttaaaggataagatccttgttgaagaatcattaatttctcctggtctaaggagtgttctttttggaattgtgacgctaaagcatctagccagcatttcagcaagagaggatgctgggattgtgaatgagttggcccatgatgttcttgttaaagtttgcacagacccctctaatggattgatgccagatgcaaagagaaagttgagaggcaattctgacagactactaatgctcatgaaggggttgagagcagcagaaattggttatcacagggatttgcttctagccattgttaggggtagaccgtcgttagcttcagatttcttggacgagtttccatacaatgtggaagatttttcatcaccatcctggttagtcttcttcagagtacgaaagtgtatctatctttattttactgcgtctaccgtccaatttctgctgttttgtcattctaatcaacgtgctacacctccttctggtggctcagatgttcagactatcatgaaatgcatatgcccccgaccatttagccggtcactgatcactaaagggatgctacattctgattttcttgtgaaacatgggaccttgagatttctcttggagacgctgaggctgttggattcgtttcttactgcttggaacctttgttcatctcatagatgctcggttgagcaaattcagatttctcttgagcggaacgtcatgggtgaagtgagcagtttttttccagattcccaggtgttattgattgtactgaagtctctggacggttctagtggaactcaaaagctgtcattgaagagagaagcagagttggatagtggattagtaggaagaaaaaaacgcattaagcgatcggagaaggatgttttggaagaagaggctgttgatattgtcattggtggggtaggttctgataaagatatctttttggctgaggataatatggatgctcatatgacagatcaggaagatgctgaaaaagaatatcttgggattgtttcagatatttggatttcagagctttgttctaaccctattgattcggtcgaagaagcagagatgtgttttcacataaagcttctggattccctcaagatttatgtgcgtgctgtacctaatgagcttgaaggatcgtttgatatcttcatgaaatttctgagcaattctttcggtatgccagttgaactgcagagggctctcttgtctttgctaagtgagtacatcagttggacgccaaagtctcaaagtgacagaggtcctacaagaattccaccacttatgcacaagcatttgcgtgtgttcattaatttgttacttttttcaccacacaacggggtgaaggatctagcgtacaatttagcagtggcagctatgaacagtactggtgcatttgaaaacaacccaagtgaaattggtgcatggttcttgtttctaccatgttttgaaaagattaaattacctcttgagcttcaggaggctgtacagagcatgtcatcagttgtcgtgtcctttttatgtgatgcagtttcgactgttggaaataatttattcaagcactgggacattgtcagaagtagcttgtcccatttaaaaggtgtatcaattggttttagccccctaattatttgtctactacagaagtgtgtgaggctactaaattctgaatctaaaacgtctttaccagagaagtcagcaatatctctgtacgtctgcagcacactgaaatatcttttgcaaactcaggtagattccaaattactctcatgtttgatccagtcagttttatctgaggtggttgatgaatcgaaggattctttatgcgaatggaggccattgagaatgttactttgtttctcacaatccctgtcaaacgaaaaacctatcatcttgcattccagaaggacaacgggtctacctgctgacagttcttttgcagagactcttgatgagatcaaaagactagttagaagcatttctccggatgaaattgcaggaatagttaaagcgttttcttctgcattgatatgtgcaacacctgaatcgatcttgcaaaattttgcttctgtgatggatgtttcttgggccttttatggaacaccattctcatttttacagtccatcacctttctagaggaaaatttccttggaaacctttcaaagctatcgcctgacttgtttgcttcaggttcagaatttactgggtcagggaatctgtgtgaaggaacagtagatagtgagattgatttttctggccactcatccgtaactgaagaaatcagaagtaagatggacaatcgtgatatggaatcttcagccttctctatattcttaaagcaggctccttttcctgtattacttaacgcaattatgagcatggatatatcttgcttaccagagtttccaagaatatcagagctattgctgctaaaagtttcacagcctaaaagtggtagtattgactccaatattcaattaatactgttctggctctttcaaatacgatcatcttacaaggttcaaccagctccagtacttcatcaactctctgagatctgcttacgtctcatgaagaacttgttctctcaaatatcagaaccggagcttgtttctggaccctcttcaaataagttgcctgcttcttttgcaaagtggaagcatcaagtggccgagacagttctttgccacccagttgtgatggcactgttagagagtcccttggattgtggcacattacctccagtgcagaatgttgagattttttcagaaacatcgctgacaatgggcaggctagtatttagtgaaatagatcaacacatccttaatctattggtttctacttgtgaacactttttgtttgatgagaaaccccccaatctgtggaaagaggacctcaggaaaaataagtcaattatagcgtttaaggacttggttgaaaggcttctcttggaatttagggtcaagtttgagctttgtgttggttctcaaagttacgtttctcttctccaaccagcacaattgattcatgctttgttgagatttatatcaccttttaaactttttaatattgctcattccatgttgagtaaaattgatgaggaaggattaacaagcccaaattcaagtattattctcagtttgggattgggtattgcaggtggagcttttgaaatgcttgtattatattcacaccagccgactgctaagagaggggtatatgatttgctgtgggaattagaagaaaagaattatgccagtaacatcattgagaaagtatatagcatggcatgcaagttttctacctctcttgatttggattcagcagatatttgtttgcttaaagtttgtggtggtattttcaggggaaaacataatcaaaattatgctgttgacccgttggtcttgaaaatttcactgattgttggaagaacccctgaagacttgattatccattgcattaaccgggcaagcataaccagagccaagatattattctaccttgtggagtccagtcccttgcatctgttagtctttggacactttttctttagtatgctaagtaagaaacaggatgactctgctcttacagatgatcagtttatcatgcttctgcctgctgtgctatcgtatctgacatcagttattgcaaaactcgagaagccttgtaatagatgtttggatataacttcagtttattcaaatatactaataaatggttttcttcagtggccgaggtttttggctaggtgcatctttgaagagaagcatgaagagattcttctgtcaacgactgaggatatggaaactatgtttaatgcgagtcttattgggaaggcagtacgtatgtttcaataccacttttccttgactgaaagtccaactaaagaagatgatctctttaaggtatttaattccatgtttcctctcagtagtactggcaaggagatgttggattacgagataaaggaagtggacgttcagtcagtagaccaaatattaaatgttgctatccgtgtggttgcaaaagtaacagtttcaaggatttgtttgtttcctgaggatagcagtatgtgtcatctcaaacgtgcagcaggtacttgtgtgaaggaaagttcttcaaaaattggatgcaatagagcaattttatcaaagccgttgctagatgctttagttaatagttggcaatgtgttgtcaagaaatctgatggatcttttaaagggaattatgaaggaaaacaagacagatgttggtccttgtgcaaaagtcttgaaaacttcattttgagaagtattctacagtttttggaaagcatgtgtgaggagcttgttcaattggattctcttcccttcctggacagattgatgaaatcagttcttctctatagatttgaggactcgaagacactgaagatactgagagaaattttctccttattgtctagagggaagtactcatatgcaccatatatccaacgcttaatatatcactctcggtttacaccaactatcagttctctctccatatcatcctcaaatactggtgaattattcaggcctgtctccagcatcctaaatcatcttatcatcttaagtccggattctgtcagagttaaaaggtgttgtcttgaagcacctaagtatgcaaagcagttagaaattgtcaaaattctcagagtgctgctctccaattgtggaaaagattcaggaatgaaagagctgctttcagatctacactttcttcttttgtgttcttatggtgcaactctgagagaaatcgacttggagatctacaagctgatgcatgatatcaagttgattgaggccgaacagacactgaatgtttctgaaacagattatttgtggggtaaagctgccttgaaaataagagagggactctctcaggatgcatctgatgtttgtcaagttgatttagtggaagatgtccggcagggtcttattaaagagaatctttgtgttgatcccaaaatctgtgctctaactgttttgttttttccttatcaacgtactacagagaaatcggagaatttttacctatatgatgatccaataaatgaggtacccgtctttagttttaattttcaactcattgtcctgggttacattgaacctgtggaattcgccagcttaggcttgcttgcagttgcatttgtgagcatgtcttcagcagatcttgggatgagaaaattgggctatgaaactcttcaaatatttctggatgcccttgagaattgtaggaagaacaagcatgtaacagggcttaggcttctgctaatgtatgtacaaaatggagttgaggaaccatggcaaagaatcccaactgtttctgctatttttgctgctgagacatctatgatattgttggatccttctcacgaacattatgttcccataaataaacttttgaagagctcatctacactgaaactgaggggaataccattgtttcatgattttttctggagcagcgctgttaactttagatcgcagaggttttgggaactacgcctagtgtatctgggcttgaaatcagatgatgatgttcaaatttacattaaaaactcaatccttgagacagtgattagtttttcctcatctcctcttgctgatgatgaaactaaaagactaatccttcaggttgtgaggaagtcagtcaaattccataagatagcccgacatctagttgaaaactgtggtctgttttcatggtgttcgtcgtttatttcaaattttactacaaagccgattggagacaaagatctgcacttggtagttgtcttggagatcataactgatgttctcgcctccagaaacattacagagtggttgcaacgatttggcctcgaagggctaatggaaatctcatcgcgtttatacaaacttttaggtggtggcttggtatcagtacaagaaaatggtacttcagttgatttgattttgcagatactatctgctactctaaagatttcacagaaacgaaacatgtaccagccacatttcaccatcacaatcgagggaatattccaactctttgagggtgttgctaattttggttctcctcaagtcgaagctagtgcagagagtgggcttattactatattaatgagcaccccgccagttgacatattatgcatggacgtggacaagctgagaaggtttcttttgtggggaacctccacagcattaaagagtgactttaaaaagggatctaaacctagtgagtctcatgaagatacaaaaatactcattgaaggaccacaagaggagactatggtagcaaagtttctacgctggctgtcggcttcagttattcttgggaagtcttattctaaagccagtgattcggacccaacattcttaagtaaaacaaaaccagaaactttgctgacatcgttagaatactttaagaaaaggaatctcgaagacagcatgcaaaattcagagcacataataggggaagtaattgtgcacctccaacagttcctgagtacaaactacatgtttcttcttccctctgttgtatttgcactttctctcatgcttcttcacaatgacctcgggactggagagtctgatggcgattacaagctcatcaaatctctgtgttctaaaattagtagtcctcctgaggctattccgggctggagatggtcatattatcaagcgtggagggatctgtcatcggaacaagccacagatctggataagatcaatgaactccatgcgtgccaacaccttttgctgatattctctgctatgcttggagaaacgccacaggaatctcaacaggtgttgcttcgtaaaagttttgacatgtctcatgtattcgaatgggaaagaagtttagttgagacctag

SEQ ID NO: 27511 - protein, 2535 aa, Arabidopsis thaliana
  misc_feature (1)..(2535): Ceres Seq. ID no. 1819121
MVVDGGNRDVEVGKIPVMAFRPSHEAKLRELLHNICLHEIKLCSDAAKEFVKLLKGETGGDLLRLYFQSSPNFAELLEAWKLRHEKQGLSYIFSLIQTILSHPEGKDRSTDIGRAIDQFGRLLVEEKLDDIYKELNSKEGKQQSAALSLLASIVRRGPGMASEIAKKFDFKGFAKLAEYNTQGTEKVKKHSTRKAFVGFAISFLEVGKPGLLSSVLNKKEMYSKVLPGLGKDDDDTVASVLSTLKDKILVEESLISPGLRSVLFGIVTLKHLASISAREDAGIVNELAHDVLVKVCTDPSNGLMPDAKRKLRGNSDRLLMLMKGLRAAEIGYHRDLLLAIVRGRPSLASDFLDEFPYNVEDFSSPSWLVFFRVRKCIYLYFTASTVQFLLFCHSNQRATPPSGGSDVQTIMKCICPRPFSRSLITKGMLHSDFLVKHGTLRFLLETLRLLDSFLTAWNLCSSHRCSVEQIQISLERNVMGEVSSFFPDSQVLLIVLKSLDGSSGTQKLSLKREAELDSGLVGRKKRIKRSEKDVLEEEAVDIVIGGVGSDKDIFLAEDNMDAHMTDQEDAEKEYLGIVSDIWISELCSNPIDSVEEAEMCFHIKLLDSLKIYVRAVPNELEGSFDIFMKFLSNSFGMPVELQRALLSLLSEYISWTPKSQSDRGPTRIPPLMHKHLRVFINLLLFSPHNGVKDLAYNLAVAAMNSTGAFENNPSEIGAWFLFLPCFEKIKLPLELQEAVQSMSSVVVSFLCDAVSTVGNNLFKHWDIVRSSLSHLKGVSIGFSPLIICLLQKCVRLLNSESKTSLPEKSAISLYVCSTLKYLLQTQVDSKLLSCLIQSVLSEVVDESKDSLCEWRPLRMLLCFSQSLSNEKPIILHSRRTTGLPADSSFAETLDEIKRLVRSISPDEIAGIVKAFSSALICATPESILQNFASVMDVSWAFYGTPFSFLQSITFLEENFLGNLSKLSPDLFASGSEFTGSGNLCEGTVDSEIDFSGHSSVTEEIRSKMDNRDMESSAFSIFLKQAPFPVLLNAIMSMDISCLPEFPRISELLLLKVSQPKSGSIDSNIQLILFWLFQIRSSYKVQPAPVLHQLSEICLRLMKNLFSQISEPELVSGPSSNKLPASFAKWKHQVAETVLCHPVVMALLESPLDCGTLPPVQNVEIFSETSLTMGRLVFSEIDQHILNLLVSTCEHFLFDEKPPNLWKEDLRKNKSIIAFKDLVERLLLEFRVKFELCVGSQSYVSLLQPAQLIHALLRFISPFKLFNIAHSMLSKIDEEGLTSPNSSIILSLGLGIAGGAFEMLVLYSHQPTAKRGVYDLLWELEEKNYASNIIEKVYSMACKFSTSLDLDSADICLLKVCGGIFRGKHNQNYAVDPLVLKISLIVGRTPEDLIIHCINRASITRAKILFYLVESSPLHLLVFGHFFFSMLSKKQDDSALTDDQFIMLLPAVLSYLTSVIAKLEKPCNRCLDITSVYSNILINGFLQWPRFLARCIFEEKHEEILLSTTEDMETMFNASLIGKAVRMFQYHFSLTESPTKEDDLFKVFNSMFPLSSTGKEMLDYEIKEVDVQSVDQILNVAIRVVAKVTVSRICLFPEDSSMCHLKRAAGTCVKESSSKIGCNRAILSKPLLDALVNSWQCVVKKSDGSFKGNYEGKQDRCWSLCKSLENFILRSILQFLESMCEELVQLDSLPFLDRLMKSVLLYRFEDSKTLKILREIFSLLSRGKYSYAPYIQRLIYHSRFTPTISSLSISSSNTGELFRPVSSILNHLIILSPDSVRVKRCCLEAPKYAKQLEIVKILRVLLSNCGKDSGMKELLSDLHFLLLCSYGATLREIDLEIYKLMHDIKLIEAEQTLNVSETDYLWGKAALKIREGLSQDASDVCQVDLVEDVRQGLIKENLCVDPKICALTVLFFPYQRTTEKSENFYLYDDPINEVPVFSFNFQLIVLGYIEPVEFASLGLLAVAFVSMSSADLGMRKLGYETLQIFLDALENCRKNKHVTGLRLLLMYVQNGVEEPWQRIPTVSAIFAAETSMILLDPSHEHYVPINKLLKSSSTLKLRGIPLFHDFFWSSAVNFRSQRFWELRLVYLGLKSDDDVQIYIKNSILETVISFSSSPLADDETKRLILQVVRKSVKFHKIARHLVENCGLFSWCSSFISNFTTKPIGDKDLHLVVVLEIITDVLASRNITEWLQRFGLEGLMEISSRLYKLLGGGLVSVQENGTSVDLILQILSATLKISQKRNMYQPHFTITIEGIFQLFEGVANFGSPQVEASAESGLITILMSTPPVDILCMDVDKLRRFLLWGTSTALKSDFKKGSKPSESHEDTKILIEGPQEETMVAKFLRWLSASVILGKSYSKASDSDPTFLSKTKPETLLTSLEYFKKRNLEDSMQNSEHIIGEVIVHLQQFLSTNYMFLLPSVVFALSLMLLHNDLGTGESDGDYKLIKSLCSKISSPPEAIPGWRWSYYQAWRDLSSEQATDLDKINELHACQHLLLIFSAMLGETPQESQQVLLRKSFDMSHVFEWERSLVET

SEQ ID NO: 27512 - protein, 2518 aa, Arabidopsis thaliana
  misc_feature (1)..(2518): Ceres Seq. ID no. 1819122
MAFRPSHEAKLRELLHNICLHEIKLCSDAAKEFVKLLKGETGGDLLRLYFQSSPNFAELLEAWKLRHEKQGLSYIFSLIQTILSHPEGKDRSTDIGRAIDQFGRLLVEEKLDDIYKELNSKEGKQQSAALSLLASIVRRGPGMASEIAKKFDFKGFAKLAEYNTQGTEKVKKHSTRKAFVGFAISFLEVGKPGLLSSVLNKKEMYSKVLPGLGKDDDDTVASVLSTLKDKILVEESLISPGLRSVLFGIVTLKHLASISAREDAGIVNELAHDVLVKVCTDPSNGLMPDAKRKLRGNSDRLLMLMKGLRAAEIGYHRDLLLAIVRGRPSLASDFLDEFPYNVEDFSSPSWLVFFRVRKCIYLYFTASTVQFLLFCHSNQRATPPSGGSDVQTIMKCICPRPFSRSLITKGMLHSDFLVKHGTLRFLLETLRLLDSFLTAWNLCSSHRCSVEQIQISLERNVMGEVSSFFPDSQVLLIVLKSLDGSSGTQKLSLKREAELDSGLVGRKKRIKRSEKDVLEEEAVDIVIGGVGSDKDIFLAEDNMDAHMTDQEDAEKEYLGIVSDIWISELCSNPIDSVEEAEMCFHIKLLDSLKIYVRAVPNELEGSFDIFMKFLSNSFGMPVELQRALLSLLSEYISWTPKSQSDRGPTRIPPLMHKHLRVFINLLLFSPHNGVKDLAYNLAVAAMNSTGAFENNPSEIGAWFLFLPCFEKIKLPLELQEAVQSMSSVVVSFLCDAVSTVGNNLFKHWDIVRSSLSHLKGVSIGFSPLIICLLQKCVRLLNSESKTSLPEKSAISLYVCSTLKYLLQTQVDSKLLSCLIQSVLSEVVDESKDSLCEWRPLRMLLCFSQSLSNEKPIILHSRRTTGLPADSSFAETLDEIKRLVRSISPDEIAGIVKAFSSALICATPESILQNFASVMDVSWAFYGTPFSFLQSITFLEENFLGNLSKLSPDLFASGSEFTGSGNLCEGTVDSEIDFSGHSSVTEEIRSKMDNRDMESSAFSIFLKQAPFPVLLNAIMSMDISCLPEFPRISELLLLKVSQPKSGSIDSNIQLILFWLFQIRSSYKVQPAPVLHQLSEICLRLMKNLFSQISEPELVSGPSSNKLPASFAKWKHQVAETVLCHPVVMALLESPLDCGTLPPVQNVEIFSETSLTMGRLVFSEIDQHILNLLVSTCEHFLFDEKPPNLWKEDLRKNKSIIAFKDLVERLLLEFRVKFELCVGSQSYVSLLQPAQLIHALLRFISPFKLFNIAHSMLSKIDEEGLTSPNSSIILSLGLGIAGGAFEMLVLYSHQPTAKRGVYDLLWELEEKNYASNIIEKVYSMACKFSTSLDLDSADICLLKVCGGIFRGKHNQNYAVDPLVLKISLIVGRTPEDLIIHCINRASITRAKILFYLVESSPLHLLVFGHFFFSMLSKKQDDSALTDDQFIMLLPAVLSYLTSVIAKLEKPCNRCLDITSVYSNILINGFLQWPRFLARCIFEEKHEEILLSTTEDMETMFNASLIGKAVRMFQYHFSLTESPTKEDDLFKVFNSMFPLSSTGKEMLDYEIKEVDVQSVDQILNVAIRVVAKVTVSRICLFPEDSSMCHLKRAAGTCVKESSSKIGCNRAILSKPLLDALVNSWQCVVKKSDGSFKGNYEGKQDRCWSLCKSLENFILRSILQFLESMCEELVQLDSLPFLDRLMKSVLLYRFEDSKTLKILREIFSLLSRGKYSYAPYIQRLIYHSRFTPTISSLSISSSNTGELFRPVSSILNHLIILSPDSVRVKRCCLEAPKYAKQLEIVKILRVLLSNCGKDSGMKELLSDLHFLLLCSYGATLREIDLEIYKLMHDIKLIEAEQTLNVSETDYLWGKAALKIREGLSQDASDVCQVDLVEDVRQGLIKENLCVDPKICALTVLFFPYQRTTEKSENFYLYDDPINEVPVFSFNFQLIVLGYIEPVEFASLGLLAVAFVSMSSADLGMRKLGYETLQIFLDALENCRKNKHVTGLRLLLMYVQNGVEEPWQRIPTVSAIFAAETSMILLDPSHEHYVPINKLLKSSSTLKLRGIPLFHDFFWSSAVNFRSQRFWELRLVYLGLKSDDDVQIYIKNSILETVISFSSSPLADDETKRLILQVVRKSVKFHKIARHLVENCGLFSWCSSFISNFTTKPIGDKDLHLVVVLEIITDVLASRNITEWLQRFGLEGLMEISSRLYKLLGGGLVSVQENGTSVDLILQILSATLKISQKRNMYQPHFTITIEGIFQLFEGVANFGSPQVEASAESGLITILMSTPPVDILCMDVDKLRRFLLWGTSTALKSDFKKGSKPSESHEDTKILIEGPQEETMVAKFLRWLSASVILGKSYSKASDSDPTFLSKTKPETLLTSLEYFKKRNLEDSMQNSEHIIGEVIVHLQQFLSTNYMFLLPSVVFALSLMLLHNDLGTGESDGDYKLIKSLCSKISSPPEAIPGWRWSYYQAWRDLSSEQATDLDKINELHACQHLLLIFSAMLGETPQESQQVLLRKSFDMSHVFEWERSLVET

SEQ ID NO: 27513 - protein, 2376 aa, Arabidopsis thaliana
  misc_feature (1)..(2376): Ceres Seq. ID no. 1819123
MASEIAKKFDFKGFAKLAEYNTQGTEKVKKHSTRKAFVGFAISFLEVGKPGLLSSVLNKKEMYSKVLPGLGKDDDDTVASVLSTLKDKILVEESLISPGLRSVLFGIVTLKHLASISAREDAGIVNELAHDVLVKVCTDPSNGLMPDAKRKLRGNSDRLLMLMKGLRAAEIGYHRDLLLAIVRGRPSLASDFLDEFPYNVEDFSSPSWLVFFRVRKCIYLYFTASTVQFLLFCHSNQRATPPSGGSDVQTIMKCICPRPFSRSLITKGMLHSDFLVKHGTLRFLLETLRLLDSFLTAWNLCSSHRCSVEQIQISLERNVMGEVSSFFPDSQVLLIVLKSLDGSSGTQKLSLKREAELDSGLVGRKKRIKRSEKDVLEEEAVDIVIGGVGSDKDIFLAEDNMDAHMTDQEDAEKEYLGIVSDIWISELCSNPIDSVEEAEMCFHIKLLDSLKIYVRAVPNELEGSFDIFMKFLSNSFGMPVELQRALLSLLSEYISWTPKSQSDRGPTRIPPLMHKHLRVFINLLLFSPHNGVKDLAYNLAVAAMNSTGAFENNPSEIGAWFLFLPCFEKIKLPLELQEAVQSMSSVVVSFLCDAVSTVGNNLFKHWDIVRSSLSHLKGVSIGFSPLIICLLQKCVRLLNSESKTSLPEKSAISLYVCSTLKYLLQTQVDSKLLSCLIQSVLSEVVDESKDSLCEWRPLRMLLCFSQSLSNEKPIILHSRRTTGLPADSSFAETLDEIKRLVRSISPDEIAGIVKAFSSALICATPESILQNFASVMDVSWAFYGTPFSFLQSITFLEENFLGNLSKLSPDLFASGSEFTGSGNLCEGTVDSEIDFSGHSSVTEEIRSKMDNRDMESSAFSIFLKQAPFPVLLNAIMSMDISCLPEFPRISELLLLKVSQPKSGSIDSNIQLILFWLFQIRSSYKVQPAPVLHQLSEICLRLMKNLFSQISEPELVSGPSSNKLPASFAKWKHQVAETVLCHPVVMALLESPLDCGTLPPVQNVEIFSETSLTMGRLVFSEIDQHILNLLVSTCEHFLFDEKPPNLWKEDLRKNKSIIAFKDLVERLLLEFRVKFELCVGSQSYVSLLQPAQLIHALLRFISPFKLFNIAHSMLSKIDEEGLTSPNSSIILSLGLGIAGGAFEMLVLYSHQPTAKRGVYDLLWELEEKNYASNIIEKVYSMACKFSTSLDLDSADICLLKVCGGIFRGKHNQNYAVDPLVLKISLIVGRTPEDLIIHCINRASITRAKILFYLVESSPLHLLVFGHFFFSMLSKKQDDSALTDDQFIMLLPAVLSYLTSVIAKLEKPCNRCLDITSVYSNILINGFLQWPRFLARCIFEEKHEEILLSTTEDMETMFNASLIGKAVRMFQYHFSLTESPTKEDDLFKVFNSMFPLSSTGKEMLDYEIKEVDVQSVDQILNVAIRVVAKVTVSRICLFPEDSSMCHLKRAAGTCVKESSSKIGCNRAILSKPLLDALVNSWQCVVKKSDGSFKGNYEGKQDRCWSLCKSLENFILRSILQFLESMCEELVQLDSLPFLDRLMKSVLLYRFEDSKTLKILREIFSLLSRGKYSYAPYIQRLIYHSRFTPTISSLSISSSNTGELFRPVSSILNHLIILSPDSVRVKRCCLEAPKYAKQLEIVKILRVLLSNCGKDSGMKELLSDLHFLLLCSYGATLREIDLEIYKLMHDIKLIEAEQTLNVSETDYLWGKAALKIREGLSQDASDVCQVDLVEDVRQGLIKENLCVDPKICALTVLFFPYQRTTEKSENFYLYDDPINEVPVFSFNFQLIVLGYIEPVEFASLGLLAVAFVSMSSADLGMRKLGYETLQIFLDALENCRKNKHVTGLRLLLMYVQNGVEEPWQRIPTVSAIFAAETSMILLDPSHEHYVPINKLLKSSSTLKLRGIPLFHDFFWSSAVNFRSQRFWELRLVYLGLKSDDDVQIYIKNSILETVISFSSSPLADDETKRLILQVVRKSVKFHKIARHLVENCGLFSWCSSFISNFTTKPIGDKDLHLVVVLEIITDVLASRNITEWLQRFGLEGLMEISSRLYKLLGGGLVSVQENGTSVDLILQILSATLKISQKRNMYQPHFTITIEGIFQLFEGVANFGSPQVEASAESGLITILMSTPPVDILCMDVDKLRRFLLWGTSTALKSDFKKGSKPSESHEDTKILIEGPQEETMVAKFLRWLSASVILGKSYSKASDSDPTFLSKTKPETLLTSLEYFKKRNLEDSMQNSEHIIGEVIVHLQQFLSTNYMFLLPSVVFALSLMLLHNDLGTGESDGDYKLIKSLCSKISSPPEAIPGWRWSYYQAWRDLSSEQATDLDKINELHACQHLLLIFSAMLGETPQESQQVLLRKSFDMSHVFEWERSLVET

SEQ ID NO: 27514 - DNA, 1317 bp, Arabidopsis thaliana
  misc_feature (1)..(1317): Ceres Seq. ID no. 1819204
atgaatactaataaccagagagataaccattatcccaacattcctaattcaccaagggattacaattatactcctagctctccaacagctcgcattcgacaccgcaggcgatcaagcgaggtgaacagaagcaatgtaagcagagtaagcaatttgttacttggtgataagaacaagtacagatcaatgtggataaggacatgctcatctctctggatgctcggtggagttgtgtttataatctacatgggtcatctctacatttgggctatggttgtggttatacagatattcatggccaaagagctcttctttcttcgcagaagagctcatgaagaacgtcgcttacccggtttctggctcttgaattggcacttcttcttcacggctatgttgtttgtctatggacgcatcattcaacagcagctagtcaacacggtttcttcagatagattcatatacaagcttgtgagtggtcttatcaagtaccagatggttatttgctacttcttgtacatcgcaggtctcatatggtttatccttacattgaagaataagatgtataagtatcagtttgggcaatacgcttggacacatatgatccttatcgttgtctttactcaatcttctttcaccgtcgccaatatttttgaagggatcttctggtttcttctaccagcagcactgattgctatgaacgatgtagcagcttacttcttcggtttctatttcgggaaaactccgctcatcaagttgtctccaaagaaaacatgggaaggtttcatcggagcatcagttgcaactataatctctgcatttatttttgctaatgtcttaggccagttccaatggcttacatgtccaaggaaggatttttcaactggttggcttcattgtgatccaggccctctcttcaggccagagtattacccatttccctcttggattactccattttctccatggaaagggatctcgaccctgcctgtccaatggcatgctttttctctcggtctattcgcatccattatggcgccttttggtggcttcttcgcaagcggtttcaaaagagctttcaagatcaaggatttcggagacagcataccaggacatggaggatttactgacagaatggattgccaaatggttatggcggttttcgcatacatctacatccaatctttcattgttaatcgggactacagtgtcgagatgatcctagaccagatatcgaggagcctgggacacgaggagcagaaaatgctttatgaaaagctcggagacattcttcaacataagttgcaagggaggttttaa

SEQ ID NO: 27515 - protein, 438 aa, Arabidopsis thaliana
  misc_feature (1)..(438): Ceres Seq. ID no. 1819205
MNTNNQRDNHYPNIPNSPRDYNYTPSSPTARIRHRRRSSEVNRSNVSRVSNLLLGDKNKYRSMWIRTCSSLWMLGGVVFIIYMGHLYIWAMVVVIQIFMAKELFFLRRRAHEERRLPGFWLLNWHFFFTAMLFVYGRIIQQQLVNTVSSDRFIYKLVSGLIKYQMVICYFLYIAGLIWFILTLKNKMYKYQFGQYAWTHMILIVVFTQSSFTVANIFEGIFWFLLPAALIAMNDVAAYFFGFYFGKTPLIKLSPKKTWEGFIGASVATIISAFIFANVLGQFQWLTCPRKDFSTGWLHCDPGPLFRPEYYPFPSWITPFSPWKGISTLPVQWHAFSLGLFASIMAPFGGFFASGFKRAFKIKDFGDSIPGHGGFTDRMDCQMVMAVFAYIYIQSFIVNRDYSVEMILDQISRSLGHEEQKMLYEKLGDILQHKLQGRF

SEQ ID NO: 27516 - protein, 376 aa, Arabidopsis thaliana
  misc_feature (1)..(376): Ceres Seq. ID no. 1819206
MWIRTCSSLWMLGGVVFIIYMGHLYIWAMVVVIQIFMAKELFFLRRRAHEERRLPGFWLLNWHFFFTAMLFVYGRIIQQQLVNTVSSDRFIYKLVSGLIKYQMVICYFLYIAGLIWFILTLKNKMYKYQFGQYAWTHMILIVVFTQSSFTVANIFEGIFWFLLPAALIAMNDVAAYFFGFYFGKTPLIKLSPKKTWEGFIGASVATIISAFIFANVLGQFQWLTCPRKDFSTGWLHCDPGPLFRPEYYPFPSWITPFSPWKGISTLPVQWHAFSLGLFASIMAPFGGFFASGFKRAFKIKDFGDSIPGHGGFTDRMDCQMVMAVFAYIYIQSFIVNRDYSVEMILDQISRSLGHEEQKMLYEKLGDILQHKLQGRF

SEQ ID NO: 27517 - protein, 366 aa, Arabidopsis thaliana
  misc_feature (1)..(366): Ceres Seq. ID no. 1819207
MLGGVVFIIYMGHLYIWAMVVVIQIFMAKELFFLRRRAHEERRLPGFWLLNWHFFFTAMLFVYGRIIQQQLVNTVSSDRFIYKLVSGLIKYQMVICYFLYIAGLIWFILTLKNKMYKYQFGQYAWTHMILIVVFTQSSFTVANIFEGIFWFLLPAALIAMNDVAAYFFGFYFGKTPLIKLSPKKTWEGFIGASVATIISAFIFANVLGQFQWLTCPRKDFSTGWLHCDPGPLFRPEYYPFPSWITPFSPWKGISTLPVQWHAFSLGLFASIMAPFGGFFASGFKRAFKIKDFGDSIPGHGGFTDRMDCQMVMAVFAYIYIQSFIVNRDYSVEMILDQISRSLGHEEQKMLYEKLGDILQHKLQGRF

SEQ ID NO: 27518 - DNA, 1140 bp, Arabidopsis thaliana
  misc_feature (1)..(1140): Ceres Seq. ID no. 1819289
atgggaaagattcttcatcttcttcttcttcttcttaaggtctctgttcttgaattcatcattagtgtttctgcttttacttcacctgcttcacagccttctctttctcctgtttacacttccatggcttccttttctccagggatccacatgggcaaaggccaagaacacaagttagatgcacacaagaaacttctaatcgctctcataatcacctcatcttctctaggactaatacttgtatcttgtttatgcttttgggtttattggtctaagaaatctcccaaaaacaccaagaactcaggtaataatcatcttaacattaagaatgagaacaaatctgcaaaactttacatttgtaacaagattctgtatcagtttcttcattgtgatctctctgttttgatatctaaatggtttcatgcggaagaaggtgagagtaggatttcattatccaagaagggctttgtgcagtccttcgattacaagacactagagaaagcaacaggcggtttcaaagacggtaatcttataggacgaggcgggttcggagatgtttacaaggcctgtttaggcaacaacactctagcagcagtcaaaaagatcgaaaacgttagtcaagaagcaaaacgagaatttcaggtaccaaaacaaaacacaactgttgagtatctccacgagcgttgtcgtcctccggttatccacagagatcttaaatcgtcaaatattctccttgattcttccttcaacgccaagatttcggattttggtcttgcggtaatggtgggggctcacggcaaaaacaacattaaactatcaggaacacttggttatgttgctccagaatatctcctagatggaaaattgacggataagagtgatgtttatgcgtttggtgtggttttacttgaactcttgttaggaagacggccggttgagaaattgagttcggttcagtgtcaatctcttgtcacttggatagcattggttaatgagtgtaccgtttcgaaaaatttgcaggcaatgccccaacttacggatagatcaaagcttccgaaaatcgtggatccggttatcaaagatacaatggatcataagcacttataccaggtttgcgtcatcttttgtctttgtgtttag

SEQ ID NO: 27519 - protein, 379 aa, Arabidopsis thaliana
  misc_feature (1)..(379): Ceres Seq. ID no. 1819290
MGKILHLLLLLLKVSVLEFIISVSAFTSPASQPSLSPVYTSMASFSPGIHMGKGQEHKLDAHKKLLIALIITSSSLGLILVSCLCFWVYWSKKSPKNTKNSGNNHLNIKNENKSAKLYICNKILYQFLHCDLSVLISKWFHAEEGESRISLSKKGFVQSFDYKTLEKATGGFKDGNLIGRGGFGDVYKACLGNNTLAAVKKIENVSQEAKREFQVPKQNTTVEYLHERCRPPVIHRDLKSSNILLDSSFNAKISDFGLAVMVGAHGKNNIKLSGTLGYVAPEYLLDGKLTDKSDVYAFGVVLLELLLGRRPVEKLSSVQCQSLVTWIALVNECTVSKNLQAMPQLTDRSKLPKIVDPVIKDTMDHKHLYQVCVIFCLCV

SEQ ID NO: 27520 - protein, 338 aa, Arabidopsis thaliana
  misc_feature (1)..(338): Ceres Seq. ID no. 1819291
MASFSPGIHMGKGQEHKLDAHKKLLIALIITSSSLGLILVSCLCFWVYWSKKSPKNTKNSGNNHLNIKNENKSAKLYICNKILYQFLHCDLSVLISKWFHAEEGESRISLSKKGFVQSFDYKTLEKATGGFKDGNLIGRGGFGDVYKACLGNNTLAAVKKIENVSQEAKREFQVPKQNTTVEYLHERCRPPVIHRDLKSSNILLDSSFNAKISDFGLAVMVGAHGKNNIKLSGTLGYVAPEYLLDGKLTDKSDVYAFGVVLLELLLGRRPVEKLSSVQCQSLVTWIALVNECTVSKNLQAMPQLTDRSKLPKIVDPVIKDTMDHKHLYQVCVIFCLCV

SEQ ID NO: 27521 - protein, 329 aa, Arabidopsis thaliana
  misc_feature (1)..(329): Ceres Seq. ID no. 1819292
MGKGQEHKLDAHKKLLIALIITSSSLGLILVSCLCFWVYWSKKSPKNTKNSGNNHLNIKNENKSAKLYICNKILYQFLHCDLSVLISKWFHAEEGESRISLSKKGFVQSFDYKTLEKATGGFKDGNLIGRGGFGDVYKACLGNNTLAAVKKIENVSQEAKREFQVPKQNTTVEYLHERCRPPVIHRDLKSSNILLDSSFNAKISDFGLAVMVGAHGKNNIKLSGTLGYVAPEYLLDGKLTDKSDVYAFGVVLLELLLGRRPVEKLSSVQCQSLVTWIALVNECTVSKNLQAMPQLTDRSKLPKIVDPVIKDTMDHKHLYQVCVIFCLCV

SEQ ID NO: 27522 - DNA, 2028 bp, Arabidopsis thaliana
  misc_feature (1)..(2028): Ceres Seq. ID no. 1819293
atggaagtgactcgtggtttctcttttttggacaagtttcttcgaaagcgtcttcactgtggatgcattgcttctagatttatgatggagcttctagagaatggtggtgttacctgtataagttgcgccaagaaatccggactaatttctatgaatgtgagccatgaatctaacggtaaggacttcccctcatttgcttcagcagagcatgtaggcagtgttcttgagaggacaaatctcaagcacttgcttcactttcaaagaatcgaccccactcattcttctcttcaaatgaaacaagaagaatcgctgcttccttccagcctagatgctcttagacacaaaactgaaaggaaagaattgtctgcacagccaaacttgagcatttcacttggacctacgcttatgacaagcccatttcatgatgctgctgttgatgacagaagtaagactaattcgattttccaactggcccctcggtccaggcagctgcttccaaaacctgcaaattcagctcccattgctgctggcatggagcctagtgggagcctggtgtcacagattcatgtcgctcggcctcctccagaaggtcgcgggaagacccaattgcttccccgttactggcctaggattactgaccaagagctgctgcaattatctggacagtatcctcatctgtatgagtccttgactgtttattttcctagctcaaattccaaaattataccactctttgaaaaagttctgagtgcgagcgatgcgggtcgtattggtcgactggttcttccgaaagcatgtgcagaggcatatttcccccctatatctctacccgagggtctcccgttaaagatacaagacataaaagggaaagaatgggtgttccagttcaggttttggcctaataataacagcaggatgtacgttttggagggtgtgactccttgcatacagtccatgcagttgcaagctggtgacactgtaacattcagccgtacagaacctgaaggaaaactcgtaatgggataccgtaaagcgacgaactctacagcgacacagatgttcaagggaagcagtgaacccaatctgaacatgttttccaacagcttgaatccgggatgtggtgacatcaattggtctaaactagagaagtctgaggacatggcaaaggataacttatttcttcagtcgtccttaacttctgctaggaaacgggttcggaacattgggactaagagcaagcgtctgctcattgatagcgtagatgttctggaactgaaaataacttgggaggaggcacaggagctgttgcggcctccccaatccaccaaacccagcatctttacgctggaaaatcaagattttgaagaatatgacaaacttccttctttacataacgaaactttcgtctcaacagagttcaaaaggaggagactggcatcatcaaacgaaaagctaaaccagtcgcaggatgcatctgctctgaatagtttaggaaatgcaggcatcaccacaaccggtgaacagggggaaatcacggttgcagccacgaccaagcatccaagacaccgggcagggtgttcgtgcatcgtctgcagccaaccaccgagcggaaaaggcaaacacaagccgtcatgcacttgcactgtgtgcgaggcagtgaagagacgattcaggacgctcatgctgcggaagcggaacaaaggagaggcaggacaggcaagccagcaggcgcagtcacagtcagagtgcagggacgagacagaagtggagagcattccagcggttgaactagccgcaggggaaaacatcgacttgaactcagacccgggggcttcccgagtaagcatgatgaggcttctccaagctgcagcgtttcctctggaagcatatctgaaacaaaaggctatttccaatacagcaggagaacagcaaagcagtgatatggtcagcacagaacacggttcgtcctcagccgcacaagaaactgagaaagacacaacaaatggagctcatgatcctgtgaactaa

SEQ ID NO: 27523 - protein, 675 aa, Arabidopsis thaliana
  misc_feature (1)..(675): Ceres Seq. ID no. 1819294
MEVTRGFSFLDKFLRKRLHCGCIASRFMMELLENGGVTCISCAKKSGLISMNVSHESNGKDFPSFASAEHVGSVLERTNLKHLLHFQRIDPTHSSLQMKQEESLLPSSLDALRHKTERKELSAQPNLSISLGPTLMTSPFHDAAVDDRSKTNSIFQLAPRSRQLLPKPANSAPIAAGMEPSGSLVSQIHVARPPPEGRGKTQLLPRYWPRITDQELLQLSGQYPHLYESLTVYFPSSNSKIIPLFEKVLSASDAGRIGRLVLPKACAEAYFPPISLPEGLPLKIQDIKGKEWVFQFRFWPNNNSRMYVLEGVTPCIQSMQLQAGDTVTFSRTEPEGKLVMGYRKATNSTATQMFKGSSEPNLNMFSNSLNPGCGDINWSKLEKSEDMAKDNLFLQSSLTSARKRVRNIGTKSKRLLIDSVDVLELKITWEEAQELLRPPQSTKPSIFTLENQDFEEYDKLPSLHNETFVSTEFKRRRLASSNEKLNQSQDASALNSLGNAGITTTGEQGEITVAATTKHPRHRAGCSCIVCSQPPSGKGKHKPSCTCTVCEAVKRRFRTLMLRKRNKGEAGQASQQAQSQSECRDETEVESIPAVELAAGENIDLNSDPGASRVSMMRLLQAAAFPLEAYLKQKAISNTAGEQQSSDMVSTEHGSSSAAQETEKDTTNGAHDPVN

SEQ ID NO: 27524 - protein, 648 aa, Arabidopsis thaliana
  misc_feature (1)..(648): Ceres Seq. ID no. 1819295
MMELLENGGVTCISCAKKSGLISMNVSHESNGKDFPSFASAEHVGSVLERTNLKHLLHFQRIDPTHSSLQMKQEESLLPSSLDALRHKTERKELSAQPNLSISLGPTLMTSPFHDAAVDDRSKTNSIFQLAPRSRQLLPKPANSAPIAAGMEPSGSLVSQIHVARPPPEGRGKTQLLPRYWPRITDQELLQLSGQYPHLYESLTVYFPSSNSKIIPLFEKVLSASDAGRIGRLVLPKACAEAYFPPISLPEGLPLKIQDIKGKEWVFQFRFWPNNNSRMYVLEGVTPCIQSMQLQAGDTVTFSRTEPEGKLVMGYRKATNSTATQMFKGSSEPNLNMFSNSLNPGCGDINWSKLEKSEDMAKDNLFLQSSLTSARKRVRNIGTKSKRLLIDSVDVLELKITWEEAQELLRPPQSTKPSIFTLENQDFEEYDKLPSLHNETFVSTEFKRRRLASSNEKLNQSQDASALNSLGNAGITTTGEQGEITVAATTKHPRHRAGCSCIVCSQPPSGKGKHKPSCTCTVCEAVKRRFRTLMLRKRNKGEAGQASQQAQSQSECRDETEVESIPAVELAAGENIDLNSDPGASRVSMMRLLQAAAFPLEAYLKQKAISNTAGEQQSSDMVSTEHGSSSAAQETEKDTTNGAHDPVN

SEQ ID NO: 27525 - protein, 647 aa, Arabidopsis thaliana
  misc_feature (1)..(647): Ceres Seq. ID no. 1819296
MELLENGGVTCISCAKKSGLISMNVSHESNGKDFPSFASAEHVGSVLERTNLKHLLHFQRIDPTHSSLQMKQEESLLPSSLDALRHKTERKELSAQPNLSISLGPTLMTSPFHDAAVDDRSKTNSIFQLAPRSRQLLPKPANSAPIAAGMEPSGSLVSQIHVARPPPEGRGKTQLLPRYWPRITDQELLQLSGQYPHLYESLTVYFPSSNSKIIPLFEKVLSASDAGRIGRLVLPKACAEAYFPPISLPEGLPLKIQDIKGKEWVFQFRFWPNNNSRMYVLEGVTPCIQSMQLQAGDTVTFSRTEPEGKLVMGYRKATNSTATQMFKGSSEPNLNMFSNSLNPGCGDINWSKLEKSEDMAKDNLFLQSSLTSARKRVRNIGTKSKRLLIDSVDVLELKITWEEAQELLRPPQSTKPSIFTLENQDFEEYDKLPSLHNETFVSTEFKRRRLASSNEKLNQSQDASALNSLGNAGITTTGEQGEITVAATTKHPRHRAGCSCIVCSQPPSGKGKHKPSCTCTVCEAVKRRFRTLMLRKRNKGEAGQASQQAQSQSECRDETEVESIPAVELAAGENIDLNSDPGASRVSMMRLLQAAAFPLEAYLKQKAISNTAGEQQSSDMVSTEHGSSSAAQETEKDTTNGAHDPVN

SEQ ID NO: 27526 - DNA, 693 bp, Arabidopsis thaliana
  misc_feature (1)..(693): Ceres Seq. ID no. 1819360
atggctttctcttacgcatcattctctacacccttcaatggtttcgctgcaaatccgtctccgattacttccgcttttctcggcccatcattgagattctccaccagaacatcaaaaactcggaatccgagtaatggggtttcagtgaaatcgtcaaatagtcataggtttctagtcaaatctaaaaatttcagtgtctatgcaagggctgcagcagagaagtctgttcacgatttcactgtaaaggacatcgatggtaatgatgtttctctggacaaattcaaaggaaaacctttgttgatcgttaacgttgcgtcaagatgtggtttgacatcatcaaattactcagagctttctcaactgtacgaaaaatacaagaaccaaggatttgagattcttgctttcccttgcaatcaatttggaggtcaagaacccggttcaaaccctgagatcaagcaatttgcttgcacccggttcaaagcagagttccctatattcgacaaggttgatgtgaatggaccaagcacagctccaatctacaagttcttgaaatccaatgctggtggtttccttggtgatatcatcaaatggaactttgagaaattcttggttgataaaaagggcaaagttgtcgagagataccctcccacaacttctcctttccaaatcgaggtaccaaattcaaaactctaa

SEQ ID NO: 27527 - protein, 230 aa, Arabidopsis thaliana
  misc_feature (1)..(230): Ceres Seq. ID no. 1819361
MAFSYASFSTPFNGFAANPSPITSAFLGPSLRFSTRTSKTRNPSNGVSVKSSNSHRFLVKSKNFSVYARAAAEKSVHDFTVKDIDGNDVSLDKFKGKPLLIVNVASRCGLTSSNYSELSQLYEKYKNQGFEILAFPCNQFGGQEPGSNPEIKQFACTRFKAEFPIFDKVDVNGPSTAPIYKFLKSNAGGFLGDIIKWNFEKFLVDKKGKVVERYPPTTSPFQIEVPNSKL

SEQ ID NO: 27528 - DNA, 2445 bp, Arabidopsis thaliana
  misc_feature (1)..(2445): Ceres Seq. ID no. 1819549
atgagtagatcaccagacaagcttgctcttcctcctcctcctcctcctcccccatctcgtaccgtcgttgtggctctaagtgggagcagtaaaagcaaatatgtagttacatgggcgatcgaaaaatttgctactgaaggaaatgttggcttcaagctgcttcacatccatccaatgattacttctgtacctacaccaagtaaagttccaactatgcctttagaagttcttgtgatcgaatcagataatgtggcagccgcaatagctgaagaagtgactcgggattcaatagacagaattgtcattggaggctcatcccgtagttttttctcaaggaaagctgatatttgctcggtgatatcagctttgatgccaaacttttgtacagtctatgttgtttcaaaaggtaaattgtcatgcgtccgaccatcagactcagacggaaatgctactataagagaagatggtagtgagagaacaaattcttcaagcggttcttctggtcccacctcagaaatggtgtgtatatctaattctgttaccccattttctcttctagattcatcagatgtaatgtcaagtgcgcatgactctcaatctcgtcctctatcccttccggtcaggagaatgcaacatttccctgcaattgcaggacaggcatcagttccaatggaaacgagttctgttggctcggatgaaaccaggtgcatgtctttggatgcagaggaagctagagatgtttcaagtatcaatagaagcagcacagatactacatcacgttggactcctcggcgtagagattatgaggagagaaaagaagctatgagttcttcttcgagcaaccgtgaatacgggaattttggtactaggtttagttggagtggcatgggtgtcgatactacacactctcgggcttctcaacaagcttccaacatgtctgatgctctaagtgaacaatcctatacagacaaccaggtaaacctaaactttgaggttgagaagttgagagctgagcttagacacgttcaagaaatgtatgctgtggctcaaaccgaaacctttgatgcttctcgaaagcttggtgaacttaaccaacgtcggttagaagaagccataaagcttgaagagctaaagctgaaggagtatgaagctcgagagttagcagaaaaggaaaagcagaattttgagaaggcaaggagagatgcagagagcatgagagaaagagcagagagagaaattgcgcagagaagagaagccgaaaggaaatccgcacgtgatactaaagagaaagagaagctcgagggcactctcgggtctcctcagctgcaatatcagcactttgcttgggaagaaattatggctgccacttcatcattctcagaagaactgaagatcggaatgggagcttacggagctgtttacaagtgtaatctgcatcatacaactgcagttgtcaaagttttgcagtcagctgaaaatcaactttccaaacaattccaacaagagctcgaaatcttgagcaagattaggcatccacatttggttctccttctaggagcgtgcccggagcaaggtgctttagtttatgagtacatggaaaacggtagcttggaggacagacttttccaggtcaacaacagtccgccactcccgtggtttgagcggtttaggattgcttgggaagttgcagcggctcttgtcttcctccacaaatcaaagcctaaaccaatcattcaccgtgatcttaaacctgcaaacatcttacttgatcacaactttgtcagcaaagttggagacgtgggactctcaacgatggttcaagtcgatcctctatcaactaaattcactatatacaaacaaacaagccccgtgggaacgttatgctatattgatccggaatatcagcgcactggaaggatatcatcgaaatcagatatctactcctttggaatgattcttcttcagcttctcacagcaaaacctgctattgcattgacacatttcgttgagagcgcaatggatagtaatgatgagttccttaagatcttagatcagaaagccggtaactggccgattgaagaaacccgggaattggccgcattagctttgtgttgtacagagctacgcgggaaagatagacctgatttgaaagatcagattcttccagcgctcgaaaacctaaagaaagtagctgaaaaggcaaggaactcattttccggcgtatcgacacagcctcccactcatttcatctgcccattacttaaggacgtgatgaacgagccgtgcgttgcagcagacggatacacatacgaccgtcatgcgatagaggagtggcttaaggagcacaacacatcgccgatgacggattcaccgttgcatagcaagaaccttttacccaattatactctttacacagccatcatggaatggaggtctacacgatag

SEQ ID NO: 27529 - protein, 814 aa, Arabidopsis thaliana
  misc_feature (1)..(814): Ceres Seq. ID no. 1819550
MSRSPDKLALPPPPPPPPSRTVVVALSGSSKSKYVVTWAIEKFATEGNVGFKLLHIHPMITSVPTPSKVPTMPLEVLVIESDNVAAAIAEEVTRDSIDRIVIGGSSRSFFSRKADICSVISALMPNFCTVYVVSKGKLSCVRPSDSDGNATIREDGSERTNSSSGSSGPTSEMVCISNSVTPFSLLDSSDVMSSAHDSQSRPLSLPVRRMQHFPAIAGQASVPMETSSVGSDETRCMSLDAEEARDVSSINRSSTDTTSRWTPRRRDYEERKEAMSSSSSNREYGNFGTRFSWSGMGVDTTHSRASQQASNMSDALSEQSYTDNQVNLNFEVEKLRAELRHVQEMYAVAQTETFDASRKLGELNQRRLEEAIKLEELKLKEYEARELAEKEKQNFEKARRDAESMRERAEREIAQRREAERKSARDTKEKEKLEGTLGSPQLQYQHFAWEEIMAATSSFSEELKIGMGAYGAVYKCNLHHTTAVVKVLQSAENQLSKQFQQELEILSKIRHPHLVLLLGACPEQGALVYEYMENGSLEDRLFQVNNSPPLPWFERFRIAWEVAAALVFLHKSKPKPIIHRDLKPANILLDHNFVSKVGDVGLSTMVQVDPLSTKFTIYKQTSPVGTLCYIDPEYQRTGRISSKSDIYSFGMILLQLLTAKPAIALTHFVESAMDSNDEFLKILDQKAGNWPIEETRELAALALCCTELRGKDRPDLKDQILPALENLKKVAEKARNSFSGVSTQPPTHFICPLLKDVMNEPCVAADGYTYDRHAIEEWLKEHNTSPMTDSPLHSKNLLPNYTLYTAIMEWRSTR

SEQ ID NO: 27530 - protein, 756 aa, Arabidopsis thaliana
  misc_feature (1)..(756): Ceres Seq. ID no. 1819551
MITSVPTPSKVPTMPLEVLVIESDNVAAAIAEEVTRDSIDRIVIGGSSRSFFSRKADICSVISALMPNFCTVYVVSKGKLSCVRPSDSDGNATIREDGSERTNSSSGSSGPTSEMVCISNSVTPFSLLDSSDVMSSAHDSQSRPLSLPVRRMQHFPAIAGQASVPMETSSVGSDETRCMSLDAEEARDVSSINRSSTDTTSRWTPRRRDYEERKEAMSSSSSNREYGNFGTRFSWSGMGVDTTHSRASQQASNMSDALSEQSYTDNQVNLNFEVEKLRAELRHVQEMYAVAQTETFDASRKLGELNQRRLEEAIKLEELKLKEYEARELAEKEKQNFEKARRDAESMRERAEREIAQRREAERKSARDTKEKEKLEGTLGSPQLQYQHFAWEEIMAATSSFSEELKIGMGAYGAVYKCNLHHTTAVVKVLQSAENQLSKQFQQELEILSKIRHPHLVLLLGACPEQGALVYEYMENGSLEDRLFQVNNSPPLPWFERFRIAWEVAAALVFLHKSKPKPIIHRDLKPANILLDHNFVSKVGDVGLSTMVQVDPLSTKFTIYKQTSPVGTLCYIDPEYQRTGRISSKSDIYSFGMILLQLLTAKPAIALTHFVESAMDSNDEFLKILDQKAGNWPIEETRELAALALCCTELRGKDRPDLKDQILPALENLKKVAEKARNSFSGVSTQPPTHFICPLLKDVMNEPCVAADGYTYDRHAIEEWLKEHNTSPMTDSPLHSKNLLPNYTLYTAIMEWRSTR

SEQ ID NO: 27531 - protein, 743 aa, Arabidopsis thaliana
  misc_feature (1)..(743): Ceres Seq. ID no. 1819552
MPLEVLVIESDNVAAAIAEEVTRDSIDRIVIGGSSRSFFSRKADICSVISALMPNFCTVYVVSKGKLSCVRPSDSDGNATIREDGSERTNSSSGSSGPTSEMVCISNSVTPFSLLDSSDVMSSAHDSQSRPLSLPVRRMQHFPAIAGQASVPMETSSVGSDETRCMSLDAEEARDVSSINRSSTDTTSRWTPRRRDYEERKEAMSSSSSNREYGNFGTRFSWSGMGVDTTHSRASQQASNMSDALSEQSYTDNQVNLNFEVEKLRAELRHVQEMYAVAQTETFDASRKLGELNQRRLEEAIKLEELKLKEYEARELAEKEKQNFEKARRDAESMRERAEREIAQRREAERKSARDTKEKEKLEGTLGSPQLQYQHFAWEEIMAATSSFSEELKIGMGAYGAVYKCNLHHTTAVVKVLQSAENQLSKQFQQELEILSKIRHPHLVLLLGACPEQGALVYEYMENGSLEDRLFQVNNSPPLPWFERFRIAWEVAAALVFLHKSKPKPIIHRDLKPANILLDHNFVSKVGDVGLSTMVQVDPLSTKFTIYKQTSPVGTLCYIDPEYQRTGRISSKSDIYSFGMILLQLLTAKPAIALTHFVESAMDSNDEFLKILDQKAGNWPIEETRELAALALCCTELRGKDRPDLKDQILPALENLKKVAEKARNSFSGVSTQPPTHFICPLLKDVMNEPCVAADGYTYDRHAIEEWLKEHNTSPMTDSPLHSKNLLPNYTLYTAIMEWRSTR

SEQ ID NO: 27532 - DNA, 2592 bp, Arabidopsis thaliana
  misc_feature (1)..(2592): Ceres Seq. ID no. 1819565
atgcagagagtgagctttgaagtaaaggacacagaggcggagaagagcagcagcgagatactgagcggatctttgccgtcgacctaccgaaatccggcgatggaaaacgttggaaacgcggtggatgatggatcgagcgtgaagaacaatccgaaacttgatatgcagaaacagaacggtttggtgaagtggttcaagaagtgcttgacaatggtatctggagagagtaaggcacctcgattggaccggtcgaagtcaacggccggtcaggccttgaaagggctcaagatcatcagtaagaccgacggtaacgctgcctggaccgtcgtggagaagcggtacttgaagatcacggccaatactgatggattgctgcttcggtcgaaattcggtgaatgcatagggatgaactcaaaagaatttgccttggaattgtttgacgccttagctagaaaaagtcacttgaaaggggatgtgattactgagaccgagttgaagaaattttgggaacaaataaatgataaaagctttgattcaaggcttatcacgttctttgacttgatggataaagactcggatggtagacttacggaagacgaagttagagagatcatcaagcttagttcttctgccaatcatctgtcatgcatccaaaacaaggcagatgaatatgcagcaatgataatggaagagcttgaccctgatcatatgggatacatcatgatggagagtctaaagaaattgcttctgcaagcggaaacaaaatctgtaagcacagatattaatagtgaagaaagaaaggagctgagcgacatgctaactgagagtctcaagcctacacgtgaccctaaccatttgaggagatggtattgtcaactaagattctttgtattggatagttggcaaagagtttgggtgatagcgttatggctcacgattatggccatcctcttcgcgtacaagtatattcaatacaagaatagagcagtgtatgaagtgttggggccttgtgtgtgcttggctaaaggtgcagcagagacgctgaagctaaacatggccctaattctgttacctgtttgcagaaataccatcacatggcttagaaataagactaggttgggtgtttttgttccttttgatgacaacctcaattttcacaaggttatagcggtgggaattgcgataggagtagccatacactctgtgtcccacttggcgtgtgattttccactgctaatcgcggcaactccagcggaatacatgcctctcggaaaattcttcggagaggagcaaccaaagagatacttgcattttgtgaagtcaacagaaggaataacagggcttgtaatggttttcttgatggttattgcttttacactggctatgccttggtttagacgggggaagctagagaaaaagctaccagggccactaaagaaacttgcgagcttcaatgccttctggtacactcaccatttgttcgttatagtctacattctccttgtccttcacggatactacatatatctcaacaaggaatggtacaagaaaacgacgtggatgtacttggcagtaccagtagctctttatgcatacgagagattgatacgagcattcaggtccagcatcaggacagtaaaagtccttaagatggcagcttatcctggaaaagtattgactttgcagatgtcaaagcctacaaacttcaaatacatgagcggccaatacatgtttgtaaattgtccagcagtttcaccgtttgagtggcatccattttcaataacttctacaccacaagacgactatctgagcgttcatataaaagcattgggagattggacagaggctatccaaggagttttctcagagagtcgggaaaagatagttgagaagcatcatgttatatttcaggtgtctaagccacctccggtcggagacatgttgaatggtgcaaatagtccccgtttccccaaaattatgattgatggtccgtacggcgcaccagctcaagactacaagaagtacgaggtggtcctgctgataggtcttggcattggagccaccccgatgatcagcattatcaaggacattattaacaatacggagaccaaggaacaactcagccaaatggagaagggatcgccacaagagcaacaaggtaataaagaaactttcaagactcgaagggcttacttctactgggtaacaaaggagcagggcacatttgattggttcaagaacatcatgaacgagatcgcagaacgggacaaaagtaaagtcatagaactacacaatcattgcactagtgtctacgaagaaggagacgttcgttccgcgctcatacggatgcttcagtctcttaattatgccaagaatggtttagacattgttgctgggacaagggtcatgtcccatttcgcccgacctaattggaaaaacgtctacaaacagatagccatggatcaccctggcgctaatgttggagtgttctattgtggagcaccggtattgacgaaggagttaaggcaattagctttggaattcacacacaagaccagtactagattctctttccacaaagagaacttctaa

SEQ ID NO: 27533 - protein, 863 aa, Arabidopsis thaliana
  misc_feature (1)..(863): Ceres Seq. ID no. 1819566
MQRVSFEVKDTEAEKSSSEILSGSLPSTYRNPAMENVGNAVDDGSSVKNNPKLDMQKQNGLVKWFKKCLTMVSGESKAPRLDRSKSTAGQALKGLKIISKTDGNAAWTVVEKRYLKITANTDGLLLRSKFGECIGMNSKEFALELFDALARKSHLKGDVITETELKKFWEQINDKSFDSRLITFFDLMDKDSDGRLTEDEVREIIKLSSSANHLSCIQNKADEYAAMIMEELDPDHMGYIMMESLKKLLLQAETKSVSTDINSEERKELSDMLTESLKPTRDPNHLRRWYCQLRFFVLDSWQRVWVIALWLTIMAILFAYKYIQYKNRAVYEVLGPCVCLAKGAAETLKLNMALILLPVCRNTITWLRNKTRLGVFVPFDDNLNFHKVIAVGIAIGVAIHSVSHLACDFPLLIAATPAEYMPLGKFFGEEQPKRYLHFVKSTEGITGLVMVFLMVIAFTLAMPWFRRGKLEKKLPGPLKKLASFNAFWYTHHLFVIVYILLVLHGYYIYLNKEWYKKTTWMYLAVPVALYAYERLIRAFRSSIRTVKVLKMAAYPGKVLTLQMSKPTNFKYMSGQYMFVNCPAVSPFEWHPFSITSTPQDDYLSVHIKALGDWTEAIQGVFSESREKIVEKHHVIFQVSKPPPVGDMLNGANSPRFPKIMIDGPYGAPAQDYKKYEVVLLIGLGIGATPMISIIKDIINNTETKEQLSQMEKGSPQEQQGNKETFKTRRAYFYWVTKEQGTFDWFKNIMNEIAERDKSKVIELHNHCTSVYEEGDVRSALIRMLQSLNYAKNGLDIVAGTRVMSHFARPNWKNVYKQIAMDHPGANVGVFYCGAPVLTKELRQLALEFTHKTSTRFSFHKENF

SEQ ID NO: 27534 - protein, 830 aa, Arabidopsis thaliana
  misc_feature (1)..(830): Ceres Seq. ID no. 1819567
MENVGNAVDDGSSVKNNPKLDMQKQNGLVKWFKKCLTMVSGESKAPRLDRSKSTAGQALKGLKIISKTDGNAAWTVVEKRYLKITANTDGLLLRSKFGECIGMNSKEFALELFDALARKSHLKGDVITETELKKFWEQINDKSFDSRLITFFDLMDKDSDGRLTEDEVREIIKLSSSANHLSCIQNKADEYAAMIMEELDPDHMGYIMMESLKKLLLQAETKSVSTDINSEERKELSDMLTESLKPTRDPNHLRRWYCQLRFFVLDSWQRVWVIALWLTIMAILFAYKYIQYKNRAVYEVLGPCVCLAKGAAETLKLNMALILLPVCRNTITWLRNKTRLGVFVPFDDNLNFHKVIAVGIAIGVAIHSVSHLACDFPLLIAATPAEYMPLGKFFGEEQPKRYLHFVKSTEGITGLVMVFLMVIAFTLAMPWFRRGKLEKKLPGPLKKLASFNAFWYTHHLFVIVYILLVLHGYYIYLNKEWYKKTTWMYLAVPVALYAYERLIRAFRSSIRTVKVLKMAAYPGKVLTLQMSKPTNFKYMSGQYMFVNCPAVSPFEWHPFSITSTPQDDYLSVHIKALGDWTEAIQGVFSESREKIVEKHHVIFQVSKPPPVGDMLNGANSPRFPKIMIDGPYGAPAQDYKKYEVVLLIGLGIGATPMISIIKDIINNTETKEQLSQMEKGSPQEQQGNKETFKTRRAYFYWVTKEQGTFDWFKNIMNEIAERDKSKVIELHNHCTSVYEEGDVRSALIRMLQSLNYAKNGLDIVAGTRVMSHFARPNWKNVYKQIAMDHPGANVGVFYCGAPVLTKELRQLALEFTHKTSTRFSFHKENF

SEQ ID NO: 27535 - protein, 809 aa, Arabidopsis thaliana
  misc_feature (1)..(809): Ceres Seq. ID no. 1819568
MQKQNGLVKWFKKCLTMVSGESKAPRLDRSKSTAGQALKGLKIISKTDGNAAWTVVEKRYLKITANTDGLLLRSKFGECIGMNSKEFALELFDALARKSHLKGDVITETELKKFWEQINDKSFDSRLITFFDLMDKDSDGRLTEDEVREIIKLSSSANHLSCIQNKADEYAAMIMEELDPDHMGYIMMESLKKLLLQAETKSVSTDINSEERKELSDMLTESLKPTRDPNHLRRWYCQLRFFVLDSWQRVWVIALWLTIMAILFAYKYIQYKNRAVYEVLGPCVCLAKGAAETLKLNMALILLPVCRNTITWLRNKTRLGVFVPFDDNLNFHKVIAVGIAIGVAIHSVSHLACDFPLLIAATPAEYMPLGKFFGEEQPKRYLHFVKSTEGITGLVMVFLMVIAFTLAMPWFRRGKLEKKLPGPLKKLASFNAFWYTHHLFVIVYILLVLHGYYIYLNKEWYKKTTWMYLAVPVALYAYERLIRAFRSSIRTVKVLKMAAYPGKVLTLQMSKPTNFKYMSGQYMFVNCPAVSPFEWHPFSITSTPQDDYLSVHIKALGDWTEAIQGVFSESREKIVEKHHVIFQVSKPPPVGDMLNGANSPRFPKIMIDGPYGAPAQDYKKYEVVLLIGLGIGATPMISIIKDIINNTETKEQLSQMEKGSPQEQQGNKETFKTRRAYFYWVTKEQGTFDWFKNIMNEIAERDKSKVIELHNHCTSVYEEGDVRSALIRMLQSLNYAKNGLDIVAGTRVMSHFARPNWKNVYKQIAMDHPGANVGVFYCGAPVLTKELRQLALEFTHKTSTRFSFHKENF

SEQ ID NO: 27536 - DNA, 1161 bp, Arabidopsis thaliana
  misc_feature (1)..(1161): Ceres Seq. ID no. 1819837
atggcttccttcaaccactttgtgttactgcttctgttaataatcactcttattctatccgctgaagcaactaaggaacgccgagcaataccatcaaaggcagaaaggaatgaaatgaagagacaactcaaagctatcaacaagcctgcaatcaagagtttcaagactgaacatggtgatatattcgattgtatcgatattcacaaacaactagcatttgatcatcacctactaaaaaaccactctgttcagctaaggccaacaacagtacctgaatatatcactggaaacaacatttcagagagttttagtcttttgcaagaaggtataagctgtccagatggcacagtaattgtaaaaaggactacaatgcaagatcttatgcatgcacaacgtttgaaatccatgggattcgagggcccgagaccttttctcacagagacaaacaacatgaattttaatggaaaattctacgatgcaagagctgattatggaccgaacccttttgctggagttgcaggaaacattaacatatggaaaccaaaaatcttgcaagatcaagttagtattggatacatggcagttagtggggggcctattgaagaagatttcgccagcatttcagttggatggattttacatggaagcagtactggcggctgctacggcatgtcatgtcctggatttgtgcaagttagcaagactataccagttggtgccgttcttcaaccattttccatctataatggtcgacaatatgaattgcgtttaggcttgtttcaggatagtggcacgggaaattggtggtttgtatttaaagaggagattattggatactggccagcatcattgttcaagtcctggatggaatctaacagcgcaaattatgcatcttggggagggcaagtgtatagccctatcagagagaagagtccacctatgggaagtggtcattggcctagtgagggctttcataaagctgcttttattagtggcctcaaactcttcgatggtcacgggaaagtttataatccaggacgcgggacagtgaaggtacatgagagcagaccaatctgttacaaagccagatatgttcatgatgttgataaaccttggttaaaatctgtttactttggaggtcctggagggtgcatagggtaa

SEQ ID NO: 27537 - protein, 386 aa, Arabidopsis thaliana
  misc_feature (1)..(386): Ceres Seq. ID no. 1819838
MASFNHFVLLLLLIITLILSAEATKERRAIPSKAERNEMKRQLKAINKPAIKSFKTEHGDIFDCIDIHKQLAFDHHLLKNHSVQLRPTTVPEYITGNNISESFSLLQEGISCPDGTVIVKRTTMQDLMHAQRLKSMGFEGPRPFLTETNNMNFNGKFYDARADYGPNPFAGVAGNINIWKPKILQDQVSIGYMAVSGGPIEEDFASISVGWILHGSSTGGCYGMSCPGFVQVSKTIPVGAVLQPFSIYNGRQYELRLGLFQDSGTGNWWFVFKEEIIGYWPASLFKSWMESNSANYASWGGQVYSPIREKSPPMGSGHWPSEGFHKAAFISGLKLFDGHGKVYNPGRGTVKVHESRPICYKARYVHDVDKPWLKSVYFGGPGGCIG

SEQ ID NO: 27538 - protein, 348 aa, Arabidopsis thaliana
  misc_feature (1)..(348): Ceres Seq. ID no. 1819839
MKRQLKAINKPAIKSFKTEHGDIFDCIDIHKQLAFDHHLLKNHSVQLRPTTVPEYITGNNISESFSLLQEGISCPDGTVIVKRTTMQDLMHAQRLKSMGFEGPRPFLTETNNMNFNGKFYDARADYGPNPFAGVAGNINIWKPKILQDQVSIGYMAVSGGPIEEDFASISVGWILHGSSTGGCYGMSCPGFVQVSKTIPVGAVLQPFSIYNGRQYELRLGLFQDSGTGNWWFVFKEEIIGYWPASLFKSWMESNSANYASWGGQVYSPIREKSPPMGSGHWPSEGFHKAAFISGLKLFDGHGKVYNPGRGTVKVHESRPICYKARYVHDVDKPWLKSVYFGGPGGCIG

SEQ ID NO: 27539 - protein, 263 aa, Arabidopsis thaliana
  misc_feature (1)..(263): Ceres Seq. ID no. 1819840
MQDLMHAQRLKSMGFEGPRPFLTETNNMNFNGKFYDARADYGPNPFAGVAGNINIWKPKILQDQVSIGYMAVSGGPIEEDFASISVGWILHGSSTGGCYGMSCPGFVQVSKTIPVGAVLQPFSIYNGRQYELRLGLFQDSGTGNWWFVFKEEIIGYWPASLFKSWMESNSANYASWGGQVYSPIREKSPPMGSGHWPSEGFHKAAFISGLKLFDGHGKVYNPGRGTVKVHESRPICYKARYVHDVDKPWLKSVYFGGPGGCIG

SEQ ID NO: 27540 - DNA, 1731 bp, Arabidopsis thaliana
  misc_feature (1)..(1731): Ceres Seq. ID no. 1820081
atggatcaaaaagttagacagtttgaggtttgcactcaagacggtagcgttgatcgtcacggcaatccagctatccgagctaataccggcaaatggctcactgctattctcattctaggagtgaatttggttctgtttctgactcgagtgatgggacaagacaatgcagaagcggctaataatgttagtaaatggacaggaactgtctatatcttctctttgcttggtgctttcctcagtgactcttattggggacgttacaagacttgtgctatctttcaagcaagtttcgttgcagggttgatgatgttatctttatctactggtgcgttattgcttgaaccaagtggttgtggagttgaagattcgccgtgtaagcctcattcgacgtttaagacggttctgttttatctgtcggtgtatctaatcgcgttagggtatggtggttatcagccgaacatagctacttttggagctgatcagtttgatgcggaggattccgttgaaggacactcgaaaatcgcgtttttcagttacttttacttggctctgaatcttggatcgctcttctcaaatactgtcttgggttactttgaggatcaaggggaatggccgcttggattttgggcgtctgctggctctgcttttgcggggttagtgcttttcttgattggcacgccaaagtaccgacactttacgcctagagagagtccttggtctagattctgccaagtgttggttgctgcaacaagaaaggctaagattgatgtgcaccatgaagagttgaatctctatgattctgagactcaatacactggagataagaagattcttcataccaaaggcttcagattcttggatagagctgctattgttacacctgatgatgaggctgagaaagtagagagcggatcgaaatacgatccatggaggctctgctcggtgactcaagtcgaagaagtgaaatgtgtattaagactcttaccaatctggctctgcaccatcctctactctgtggttttcacccaaatggcttcactgttcgttgtgcaaggagcagcgatgaagacaaacatcaaaaacttccggattccagcttcaagcatgtctagtttcgacattctcagtgtcgccttcttcatcttcgcatacaggcggtttcttgatccactctttgcaagacttaacaaaacagaacgcaacaaaggtctcactgagcttcagaggatggggattgggcttgtgattgcgataatggcgatgatttccgcaggaatcgtagagatacacagactgaaaaataaggaaccggaaagtgctacttcgatctcaagctccagcactttgagcattttttggcaagtacctcagtacatgttgataggtgcatcagaagtgttcatgtacgttggtcaactcgagttcttcaacagccaagcaccaaccgggctaaagagctttgcaagcgcgctatgtatggcttcaatatctcttgggaactatgtaagcagtttgttagtttccattgtcatgaagatctctacaacagatgatgtgcatggctggattcctgaaaatctcaacaaaggacacttggagagattctacttccttttagctggtctaaccgctgctgatttcgtggtttacttgatttgtgccaaatggtacaagtatattaaatctgaagcaagtttctctgagtccgtaactgaagaggaggaagtctga

SEQ ID NO: 27541 - protein, 576 aa, Arabidopsis thaliana
  misc_feature (1)..(576): Ceres Seq. ID no. 1820082
MDQKVRQFEVCTQDGSVDRHGNPAIRANTGKWLTAILILGVNLVLFLTRVMGQDNAEAANNVSKWTGTVYIFSLLGAFLSDSYWGRYKTCAIFQASFVAGLMMLSLSTGALLLEPSGCGVEDSPCKPHSTFKTVLFYLSVYLIALGYGGYQPNIATFGADQFDAEDSVEGHSKIAFFSYFYLALNLGSLFSNTVLGYFEDQGEWPLGFWASAGSAFAGLVLFLIGTPKYRHFTPRESPWSRFCQVLVAATRKAKIDVHHEELNLYDSETQYTGDKKILHTKGFRFLDRAAIVTPDDEAEKVESGSKYDPWRLCSVTQVEEVKCVLRLLPIWLCTILYSVVFTQMASLFVVQGAAMKTNIKNFRIPASSMSSFDILSVAFFIFAYRRFLDPLFARLNKTERNKGLTELQRMGIGLVIAIMAMISAGIVEIHRLKNKEPESATSISSSSTLSIFWQVPQYMLIGASEVFMYVGQLEFFNSQAPTGLKSFASALCMASISLGNYVSSLLVSIVMKISTTDDVHGWIPENLNKGHLERFYFLLAGLTAADFVVYLICAKWYKYIKSEASFSESVTEEEEV

SEQ ID NO: 27542 - protein, 526 aa, Arabidopsis thaliana
  misc_feature (1)..(526): Ceres Seq. ID no. 1820083
MGQDNAEAANNVSKWTGTVYIFSLLGAFLSDSYWGRYKTCAIFQASFVAGLMMLSLSTGALLLEPSGCGVEDSPCKPHSTFKTVLFYLSVYLIALGYGGYQPNIATFGADQFDAEDSVEGHSKIAFFSYFYLALNLGSLFSNTVLGYFEDQGEWPLGFWASAGSAFAGLVLFLIGTPKYRHFTPRESPWSRFCQVLVAATRKAKIDVHHEELNLYDSETQYTGDKKILHTKGFRFLDRAAIVTPDDEAEKVESGSKYDPWRLCSVTQVEEVKCVLRLLPIWLCTILYSVVFTQMASLFVVQGAAMKTNIKNFRIPASSMSSFDILSVAFFIFAYRRFLDPLFARLNKTERNKGLTELQRMGIGLVIAIMAMISAGIVEIHRLKNKEPESATSISSSSTLSIFWQVPQYMLIGASEVFMYVGQLEFFNSQAPTGLKSFASALCMASISLGNYVSSLLVSIVMKISTTDDVHGWIPENLNKGHLERFYFLLAGLTAADFVVYLICAKWYKYIKSEASFSESVTEEEEV

SEQ ID NO: 27543 - protein, 475 aa, Arabidopsis thaliana
  misc_feature (1)..(475): Ceres Seq. ID no. 1820084
MMLSLSTGALLLEPSGCGVEDSPCKPHSTFKTVLFYLSVYLIALGYGGYQPNIATFGADQFDAEDSVEGHSKIAFFSYFYLALNLGSLFSNTVLGYFEDQGEWPLGFWASAGSAFAGLVLFLIGTPKYRHFTPRESPWSRFCQVLVAATRKAKIDVHHEELNLYDSETQYTGDKKILHTKGFRFLDRAAIVTPDDEAEKVESGSKYDPWRLCSVTQVEEVKCVLRLLPIWLCTILYSVVFTQMASLFVVQGAAMKTNIKNFRIPASSMSSFDILSVAFFIFAYRRFLDPLFARLNKTERNKGLTELQRMGIGLVIAIMAMISAGIVEIHRLKNKEPESATSISSSSTLSIFWQVPQYMLIGASEVFMYVGQLEFFNSQAPTGLKSFASALCMASISLGNYVSSLLVSIVMKISTTDDVHGWIPENLNKGHLERFYFLLAGLTAADFVVYLICAKWYKYIKSEASFSESVTEEEEV

SEQ ID NO: 27544 - DNA, 3723 bp, Arabidopsis thaliana
  misc_feature (1)..(3723): Ceres Seq. ID no. 1820394
atggcttctcaaatgccctttacaacaatatcaagaaagatatcatgtatgaagttgttgcctctttgccctcttcagttgtcaacaacgcaaacacctacaacaattcccatgtctctttccttctataagaatgaactttctgatgatacaccttgtcaaagtgggtacactgattacatatcttttcaagtccccgatgagaccttcccagagatttcaaactgtattggcatagctaagggttataagcagaattccaacaatgagaaaaatggttatacttctctggaagccgttttgttatctgtacctaatggctacacttgtgttgatttgtctctctacaaggataaagaactggttttattattgaataagacaaatacagattccgaaggctcgggagaagcatgcatgatggttgtacaaactggtgacctcgcattcatttccatttcaggatctagttctctaaaccagtgggagctagaggatttgaaggtattgctaatttcaagcattaacatcgacggctcgattgtgaacctggaaatggagaatgaaaaggttcgcaaagtaccacattctgtcattgctcctctagcagtaagcgcttcaagaggagtggcttgtgtttttgctgaaagaagacgagctttggtgtacatattggaagaagatgaagatgaagaaatctctgatgaaaactcaactaaggaagcaagacgaaattctctctctttctctaagctctacgccaccgtcacggaggttgtcttgttttgtctcatggagaatgatcaattcatgtgtccgactgatataatcaccggcatagtgtttattgatggtgaattggctatgttgactttgactgccgacggggagttacggtggacagagtatggactccggcagtatttgtcgatgaagaaggatgttcttggtttcatcgtcgaaggtaagcagattagagtaaaagccgtggttgagaaagaggcaggaggaatctgctgcggacaatttggtggagacttcgtgaggaaagatttcgtctttgagcctctcatcgatcaaaatggatggtgctataagcttcgtcaataccttgattctctcggtcggccaaagagattgcttgtgtttgtgaacccgtttggcgggaagaaatcggcgagagagatttttgttaaggaagtgaagcctttgtttgaagatgctgatgttcaacttgagattcaagaaactaagtatcagttgcatgcaaaggaatttgttaagtccatggatgtgtcaaaatatgatggtattgtttgtgtcagcggcgacggtatccttgttgaggttgtaaatggactgctcgaaagagcagactggagaaatgccttaaaattgcctattggaatggtccctgcaggaactggtaatggcatgataaagtcattgttggacacagttgggcttcgatgctgtgcaaatagtgctaccatttctattatccgaggtcataaacgttctgtagatgttgctacaattgcacaagggaataccaaattcttcagtgtcttgatgcttgcttggggtttaatagctgatatagacatcgagtcagagaagttcagatggatgggaagtgctcgtattgacttttatgtatgtttagttgacaaatttgacaattattgcattgcagttgttaaattgctggctcttcagaggataatatgtttaagacgatacaatggacgaattttatttctaccggctcctgggtttgaaggctatggacagccagccagttgcagtctataccaagagccacatgttagtgataaagaggtcgggtaccaaggacctgaaactaaatttgaagatctagaatggagggaaatgaaaggcccatttgttacgatatggcttcacaatgttccctggggttctgagaacactttgactgctcctgctgcaaagttttctgatggctacctggacttgattgtcttgaaaaactgccctaagcttgtcctgctctcacttatgagacagacgagtagtggaacacatgttgagtcaccatatatagtgtatataaagcttactgtcgaaaaggtgaaggcatttgtgctggagccgggtgcacttgtagacgaaccagacaaggaaggaatcatagattcagatggagaggttttggcaagaggaaaaagaacatataaatgtgatcaaaaggccttgatgtcttacgacaagcttcaagtaacagttgatcaagaaagattgttctgtaaattttgtataagccagagggagctagtacttgctaagctctcaccaacgacgaaactcgtctccctccatcttgctatggatcgtcagccggagagggagaatgatgaactaccatctccggcgataatttccgaccgagttctggtaaatggtgttgtcacgccgttaacgttgaccgccgagggagagctacgatcgacggaatctggacggcggaaatcgacgttggcaaaagaaatcctgagtttcgtcgtggaaggtaacaaggttagagtaaagaccttggttgagaaaggaggaggaatttgctgtagaggaagtgctggagattatgcgaggaacgatttcgttttcgagcctctctctgatgaatctagaaagctttggtccgataagttccatcaacacctcgtctctctcggtcggccaaagaaattgcttgtgtttgtgaatccgtttggcgggaagaaaacagcgagaaagatatttcaagaggaagtaaagccattgtttgaagatgcaaatattcaacttgagattcaagaaaccaagtatcagttgcatgcaaaggaaattgttaggtccatggatgtatcaaaatacgatggtattgtttgtgttagcggtgacggtatccttgttgaggttgtaaatggactgcttgaaagagaagactggaagactgccataaaattgccgatcggaatggtccctgcaggtcgtacacgttctctagatgtagcaactatctcacaagggactaccaaattcttcagtgtcttgatgcttgcttggggtttagtggctgatatagacatcgagtcagagaaattcagatggatgggtagtgctcgctttgatatctatgtatgtttagttgaacatttgaaaattttctgcaatgcatgttttaatatgcgttactcaactaagttactggtggaggttgaacaaaaaaaaaaaaaaaaagagattggtcttcagaggataatatgcttaagacaataccatggacgaattctatttgtgccagctcctgggttcgaaagctatgggcaacgagccagttgcagtatagataaagagccatctggtagtgataagacactcgtataccaaggacctgatagtaaacttgaaaatctggattggagagaaatgaaaggcccatttgtttcagtatggcttcataatgttccctggggtgctgagaacactttggctgctcctgacgctaaggtgaaggcattcgtactggagccaggtgcacgcatagacgaaccagacaaggaaggaatcatagattcagatggagaagttttggcaagaggaagaaaatcgtacaaatgtgatcaaaaggctttgatgtcttacgacaagcttcaaataagtgttgatcaaggtttagccactctcttctctcctgaataa

SEQ ID NO: 27545 - protein, 1240 aa, Arabidopsis thaliana
  misc_feature (1)..(1240): Ceres Seq. ID no. 1820395
MASQMPFTTISRKISCMKLLPLCPLQLSTTQTPTTIPMSLSFYKNELSDDTPCQSGYTDYISFQVPDETFPEISNCIGIAKGYKQNSNNEKNGYTSLEAVLLSVPNGYTCVDLSLYKDKELVLLLNKTNTDSEGSGEACMMVVQTGDLAFISISGSSSLNQWELEDLKVLLISSINIDGSIVNLEMENEKVRKVPHSVIAPLAVSASRGVACVFAERRRALVYILEEDEDEEISDENSTKEARRNSLSFSKLYATVTEVVLFCLMENDQFMCPTDIITGIVFIDGELAMLTLTADGELRWTEYGLRQYLSMKKDVLGFIVEGKQIRVKAVVEKEAGGICCGQFGGDFVRKDFVFEPLIDQNGWCYKLRQYLDSLGRPKRLLVFVNPFGGKKSAREIFVKEVKPLFEDADVQLEIQETKYQLHAKEFVKSMDVSKYDGIVCVSGDGILVEVVNGLLERADWRNALKLPIGMVPAGTGNGMIKSLLDTVGLRCCANSATISIIRGHKRSVDVATIAQGNTKFFSVLMLAWGLIADIDIESEKFRWMGSARIDFYVCLVDKFDNYCIAVVKLLALQRIICLRRYNGRILFLPAPGFEGYGQPASCSLYQEPHVSDKEVGYQGPETKFEDLEWREMKGPFVTIWLHNVPWGSENTLTAPAAKFSDGYLDLIVLKNCPKLVLLSLMRQTSSGTHVESPYIVYIKLTVEKVKAFVLEPGALVDEPDKEGIIDSDGEVLARGKRTYKCDQKALMSYDKLQVTVDQERLFCKFCISQRELVLAKLSPTTKLVSLHLAMDRQPERENDELPSPAIISDRVLVNGVVTPLTLTAEGELRSTESGRRKSTLAKEILSFVVEGNKVRVKTLVEKGGGICCRGSAGDYARNDFVFEPLSDESRKLWSDKFHQHLVSLGRPKKLLVFVNPFGGKKTARKIFQEEVKPLFEDANIQLEIQETKYQLHAKEIVRSMDVSKYDGIVCVSGDGILVEVVNGLLEREDWKTAIKLPIGMVPAGRTRSLDVATISQGTTKFFSVLMLAWGLVADIDIESEKFRWMGSARFDIYVCLVEHLKIFCNACFNMRYSTKLLVEVEQKKKKKEIGLQRIICLRQYHGRILFVPAPGFESYGQRASCSIDKEPSGSDKTLVYQGPDSKLENLDWREMKGPFVSVWLHNVPWGAENTLAAPDAKVKAFVLEPGARIDEPDKEGIIDSDGEVLARGRKSYKCDQKALMSYDKLQISVDQGLATLFSPE

SEQ ID NO: 27546 - protein, 1236 aa, Arabidopsis thaliana
  misc_feature (1)..(1236): Ceres Seq. ID no. 1820396
MPFTTISRKISCMKLLPLCPLQLSTTQTPTTIPMSLSFYKNELSDDTPCQSGYTDYISFQVPDETFPEISNCIGIAKGYKQNSNNEKNGYTSLEAVLLSVPNGYTCVDLSLYKDKELVLLLNKTNTDSEGSGEACMMVVQTGDLAFISISGSSSLNQWELEDLKVLLISSINIDGSIVNLEMENEKVRKVPHSVIAPLAVSASRGVACVFAERRRALVYILEEDEDEEISDENSTKEARRNSLSFSKLYATVTEVVLFCLMENDQFMCPTDIITGIVFIDGELAMLTLTADGELRWTEYGLRQYLSMKKDVLGFIVEGKQIRVKAVVEKEAGGICCGQFGGDFVRKDFVFEPLIDQNGWCYKLRQYLDSLGRPKRLLVFVNPFGGKKSAREIFVKEVKPLFEDADVQLEIQETKYQLHAKEFVKSMDVSKYDGIVCVSGDGILVEVVNGLLERADWRNALKLPIGMVPAGTGNGMIKSLLDTVGLRCCANSATISIIRGHKRSVDVATIAQGNTKFFSVLMLAWGLIADIDIESEKFRWMGSARIDFYVCLVDKFDNYCIAVVKLLALQRIICLRRYNGRILFLPAPGFEGYGQPASCSLYQEPHVSDKEVGYQGPETKFEDLEWREMKGPFVTIWLHNVPWGSENTLTAPAAKFSDGYLDLIVLKNCPKLVLLSLMRQTSSGTHVESPYIVYIKLTVEKVKAFVLEPGALVDEPDKEGIIDSDGEVLARGKRTYKCDQKALMSYDKLQVTVDQERLFCKFCISQRELVLAKLSPTTKLVSLHLAMDRQPERENDELPSPAIISDRVLVNGVVTPLTLTAEGELRSTESGRRKSTLAKEILSFVVEGNKVRVKTLVEKGGGICCRGSAGDYARNDFVFEPLSDESRKLWSDKFHQHLVSLGRPKKLLVFVNPFGGKKTARKIFQEEVKPLFEDANIQLEIQETKYQLHAKEIVRSMDVSKYDGIVCVSGDGILVEVVNGLLEREDWKTAIKLPIGMVPAGRTRSLDVATISQGTTKFFSVLMLAWGLVADIDIESEKFRWMGSARFDIYVCLVEHLKIFCNACFNMRYSTKLLVEVEQKKKKKEIGLQRIICLRQYHGRILFVPAPGFESYGQRASCSIDKEPSGSDKTLVYQGPDSKLENLDWREMKGPFVSVWLHNVPWGAENTLAAPDAKVKAFVLEPGARIDEPDKEGIIDSDGEVLARGRKSYKCDQKALMSYDKLQISVDQGLATLFSPE

SEQ ID NO: 27547 - protein, 1224 aa, Arabidopsis thaliana
  misc_feature (1)..(1224): Ceres Seq. ID no. 1820397
MKLLPLCPLQLSTTQTPTTIPMSLSFYKNELSDDTPCQSGYTDYISFQVPDETFPEISNCIGIAKGYKQNSNNEKNGYTSLEAVLLSVPNGYTCVDLSLYKDKELVLLLNKTNTDSEGSGEACMMVVQTGDLAFISISGSSSLNQWELEDLKVLLISSINIDGSIVNLEMENEKVRKVPHSVIAPLAVSASRGVACVFAERRRALVYILEEDEDEEISDENSTKEARRNSLSFSKLYATVTEVVLFCLMENDQFMCPTDIITGIVFIDGELAMLTLTADGELRWTEYGLRQYLSMKKDVLGFIVEGKQIRVKAVVEKEAGGICCGQFGGDFVRKDFVFEPLIDQNGWCYKLRQYLDSLGRPKRLLVFVNPFGGKKSAREIFVKEVKPLFEDADVQLEIQETKYQLHAKEFVKSMDVSKYDGIVCVSGDGILVEVVNGLLERADWRNALKLPIGMVPAGTGNGMIKSLLDTVGLRCCANSATISIIRGHKRSVDVATIAQGNTKFFSVLMLAWGLIADIDIESEKFRWMGSARIDFYVCLVDKFDNYCIAVVKLLALQRIICLRRYNGRILFLPAPGFEGYGQPASCSLYQEPHVSDKEVGYQGPETKFEDLEWREMKGPFVTIWLHNVPWGSENTLTAPAAKFSDGYLDLIVLKNCPKLVLLSLMRQTSSGTHVESPYIVYIKLTVEKVKAFVLEPGALVDEPDKEGIIDSDGEVLARGKRTYKCDQKALMSYDKLQVTVDQERLFCKFCISQRELVLAKLSPTTKLVSLHLAMDRQPERENDELPSPAIISDRVLVNGVVTPLTLTAEGELRSTESGRRKSTLAKEILSFVVEGNKVRVKTLVEKGGGICCRGSAGDYARNDFVFEPLSDESRKLWSDKFHQHLVSLGRPKKLLVFVNPFGGKKTARKIFQEEVKPLFEDANIQLEIQETKYQLHAKEIVRSMDVSKYDGIVCVSGDGILVEVVNGLLEREDWKTAIKLPIGMVPAGRTRSLDVATISQGTTKFFSVLMLAWGLVADIDIESEKFRWMGSARFDIYVCLVEHLKIFCNACFNMRYSTKLLVEVEQKKKKKEIGLQRIICLRQYHGRILFVPAPGFESYGQRASCSIDKEPSGSDKTLVYQGPDSKLENLDWREMKGPFVSVWLHNVPWGAENTLAAPDAKVKAFVLEPGARIDEPDKEGIIDSDGEVLARGRKSYKCDQKALMSYDKLQISVDQGLATLFSPE

SEQ ID NO: 27548 - DNA, 648 bp, Arabidopsis thaliana
  misc_feature (1)..(648): Ceres Seq. ID no. 1820406
atggaagaagaaactctacaagtcttcttcttctctcatcctctcttctccattttcataactctctacagtctaatcctcatctatttccccaatgatttgcttcgaatctttctctcccctgttcttctcatctccggagctctccttctctctcttctccgtctcggatcgacccgagaacctaacacccaacccgataaaagctacgaggagtctgaagaacctaaggtttttctggttcgtgaatccgatttgatgggtggttttgtggaatggaacttgagagcaccattggaagtgattcacgaagcttacgaagatgaagaagaggaagaagaagaagaagatccgacccggtttagaaaaatggagagattcccatcgttgtcactctgttacccagaatcagattcggaatcggattctgcttcctcgtcagaattcaatttcccggaaatcggtgactggaactcgccggaaaatatgggattcagatgggaagaagacgagggtggaataggatgtgaaggtttgattgagataaagctcgatcattatagccataataggaagatgatgagtaaaacagagattgattttcatgcagaggaagatggtttgatcgagatcgatctttttccatga

SEQ ID NO: 27549 - protein, 215 aa, Arabidopsis thaliana
  misc_feature (1)..(215): Ceres Seq. ID no. 1820407
MEEETLQVFFFSHPLFSIFITLYSLILIYFPNDLLRIFLSPVLLISGALLLSLLRLGSTREPNTQPDKSYEESEEPKVFLVRESDLMGGFVEWNLRAPLEVIHEAYEDEEEEEEEEDPTRFRKMERFPSLSLCYPESDSESDSASSSEFNFPEIGDWNSPENMGFRWEEDEGGIGCEGLIEIKLDHYSHNRKMMSKTEIDFHAEEDGLIEIDLFP

SEQ ID NO: 27550 - protein, 129 aa, Arabidopsis thaliana
  misc_feature (1)..(129): Ceres Seq. ID no. 1820408
MGGFVEWNLRAPLEVIHEAYEDEEEEEEEEDPTRFRKMERFPSLSLCYPESDSESDSASSSEFNFPEIGDWNSPENMGFRWEEDEGGIGCEGLIEIKLDHYSHNRKMMSKTEIDFHAEEDGLIEIDLFP

SEQ ID NO: 27551 - DNA, 2148 bp, Arabidopsis thaliana
  misc_feature (1)..(2148): Ceres Seq. ID no. 1820476
atgaagagcacgaacgacgaatctccttccttgggatacgacttcgccggagttagcatcaaggacggaaaatctaagccgccggcgccggtaatatgttacgatggcttgttcggagggagagacgtgattagaatcgtgctattggtcacgaccgtgacactttcttgtctattattctacaaatctgcaaacaatccactcaatatggtgttttctccatggaagaccgattgttatgcttccaaacttacaaacgagtcttcctcaaaaacggaaccaaagaaggagccggtttcagaactagagagagtattgatgaatgcggctatggaagataacacggtgatcataacggcgttaaaccaagcatgggccgaaccaaactctacattcgatgtgtttcgagagagttttaaagtcggaatagaaacggagaggttattgaagcatgtgatcgcggtttgcttggatatcaaggcatatgatcagtgcctaaaggttcatcctcattgctatttgatcaacgccacagattcagaccaactctcaggtccgaatcggtttatgacgcctggttacttgaaacttatttggcggcgaatggatcttcttaggcaagttattggtttagggtacaacttcatattcacggatgcagatatattatggcttcgagacccatttcctcgtttttttccggatgctgattttcaaataacatgcgatgattacaatggaagaccatcggacaaaaagaatcacgtgaactccggatttacatacgtcaaggcaaacaacaaaacttcaaaattttacaaatattggattagatcgagtcggaaatttcctggaaaacacgatcaagatgtgttcaacttcataaaaaacgatcttcacgtcgagaaacttgggataaagatgaggtttttcgataccgtttactttggagggttttgtcagccgagccgagacatcaatgtggtcaacacaatgcatgctaattgttgtattggcttggacaacaaagtgaataatcttaaggcagctctcgaagattggaaacgatatgtgtcactaaacacgaccgtgtccgagactaaatggaatattccgcctagttttcttgattatggatctgcgatcggacaaaaagaagtaaagaaaatcctggttttggttctaggtttagctgcttgtcttcttctttacaaaacagcttatcctcttcatcaagagctcgatgttaacaatctcagctctcgtcctttgctcgatcacacctcttcgtcttctccactaacaagatcaaaatcgatcagttttagggaagttctggagaatgcatcaacagagaatcgaacagttattgtaacaacgttgaaccaagcatgggcagagccaaactctctgttcgatctatttcttgagagttttcgtatcggacaaggaacaaagaagttacttcaacatgtggttgtggtttgcttggattccaaggcatttgctcgctgctcacaacttcaccctaattgctactatttgaaaaccacagggactgatttctccggcgagaaactctttgctactcctgattacctcaaaatgatgtggcgaagaatcgagcttctcacacaagtgctagaaatgggatacaacttcatcttcacggatgcggatataatgtggcttcgagatccatttcctcggctgtatcctgatggagattttcaaatggcatgtgatcgattcttcggtgatcctcatgactcagacaattgggtaaacggaggattcacttacgtgaaatcaaaccacagaagcatcgagttctacaaattttggtacaattctcgtcttgattatccgaagatgcatgaccaagatgtgttcaaccaaatcaaacacaaggctttagtctcagagattggaatccaaatgagattctttgatacggtttactttggtgggttttgtcaaacgagcagagacataaacttggtgtgtaccatgcatgctaattgttgtgtaggattagcgaagaagcttcatgatcttaatcttgttcttgatgactggagaaactatttgtctttgtctgaaccagttaaaaacacaacttggagtgttcctatgaagtgtacatga

SEQ ID NO: 27552 - protein, 715 aa, Arabidopsis thaliana
  misc_feature (1)..(715): Ceres Seq. ID no. 1820477
MKSTNDESPSLGYDFAGVSIKDGKSKPPAPVICYDGLFGGRDVIRIVLLVTTVTLSCLLFYKSANNPLNMVFSPWKTDCYASKLTNESSSKTEPKKEPVSELERVLMNAAMEDNTVIITALNQAWAEPNSTFDVFRESFKVGIETERLLKHVIAVCLDIKAYDQCLKVHPHCYLINATDSDQLSGPNRFMTPGYLKLIWRRMDLLRQVIGLGYNFIFTDADILWLRDPFPRFFPDADFQITCDDYNGRPSDKKNHVNSGFTYVKANNKTSKFYKYWIRSSRKFPGKHDQDVFNFIKNDLHVEKLGIKMRFFDTVYFGGFCQPSRDINVVNTMHANCCIGLDNKVNNLKAALEDWKRYVSLNTTVSETKWNIPPSFLDYGSAIGQKEVKKILVLVLGLAACLLLYKTAYPLHQELDVNNLSSRPLLDHTSSSSPLTRSKSISFREVLENASTENRTVIVTTLNQAWAEPNSLFDLFLESFRIGQGTKKLLQHVVVVCLDSKAFARCSQLHPNCYYLKTTGTDFSGEKLFATPDYLKMMWRRIELLTQVLEMGYNFIFTDADIMWLRDPFPRLYPDGDFQMACDRFFGDPHDSDNWVNGGFTYVKSNHRSIEFYKFWYNSRLDYPKMHDQDVFNQIKHKALVSEIGIQMRFFDTVYFGGFCQTSRDINLVCTMHANCCVGLAKKLHDLNLVLDDWRNYLSLSEPVKNTTWSVPMKCT

SEQ ID NO: 27553 - protein, 646 aa, Arabidopsis thaliana
  misc_feature (1)..(646): Ceres Seq. ID no. 1820478
MVFSPWKTDCYASKLTNESSSKTEPKKEPVSELERVLMNAAMEDNTVIITALNQAWAEPNSTFDVFRESFKVGIETERLLKHVIAVCLDIKAYDQCLKVHPHCYLINATDSDQLSGPNRFMTPGYLKLIWRRMDLLRQVIGLGYNFIFTDADILWLRDPFPRFFPDADFQITCDDYNGRPSDKKNHVNSGFTYVKANNKTSKFYKYWIRSSRKFPGKHDQDVFNFIKNDLHVEKLGIKMRFFDTVYFGGFCQPSRDINVVNTMHANCCIGLDNKVNNLKAALEDWKRYVSLNTTVSETKWNIPPSFLDYGSAIGQKEVKKILVLVLGLAACLLLYKTAYPLHQELDVNNLSSRPLLDHTSSSSPLTRSKSISFREVLENASTENRTVIVTTLNQAWAEPNSLFDLFLESFRIGQGTKKLLQHVVVVCLDSKAFARCSQLHPNCYYLKTTGTDFSGEKLFATPDYLKMMWRRIELLTQVLEMGYNFIFTDADIMWLRDPFPRLYPDGDFQMACDRFFGDPHDSDNWVNGGFTYVKSNHRSIEFYKFWYNSRLDYPKMHDQDVFNQIKHKALVSEIGIQMRFFDTVYFGGFCQTSRDINLVCTMHANCCVGLAKKLHDLNLVLDDWRNYLSLSEPVKNTTWSVPMKCT

SEQ ID NO: 27554 - protein, 609 aa, Arabidopsis thaliana
  misc_feature (1)..(609): Ceres Seq. ID no. 1820479
MNAAMEDNTVIITALNQAWAEPNSTFDVFRESFKVGIETERLLKHVIAVCLDIKAYDQCLKVHPHCYLINATDSDQLSGPNRFMTPGYLKLIWRRMDLLRQVIGLGYNFIFTDADILWLRDPFPRFFPDADFQITCDDYNGRPSDKKNHVNSGFTYVKANNKTSKFYKYWIRSSRKFPGKHDQDVFNFIKNDLHVEKLGIKMRFFDTVYFGGFCQPSRDINVVNTMHANCCIGLDNKVNNLKAALEDWKRYVSLNTTVSETKWNIPPSFLDYGSAIGQKEVKKILVLVLGLAACLLLYKTAYPLHQELDVNNLSSRPLLDHTSSSSPLTRSKSISFREVLENASTENRTVIVTTLNQAWAEPNSLFDLFLESFRIGQGTKKLLQHVVVVCLDSKAFARCSQLHPNCYYLKTTGTDFSGEKLFATPDYLKMMWRRIELLTQVLEMGYNFIFTDADIMWLRDPFPRLYPDGDFQMACDRFFGDPHDSDNWVNGGFTYVKSNHRSIEFYKFWYNSRLDYPKMHDQDVFNQIKHKALVSEIGIQMRFFDTVYFGGFCQTSRDINLVCTMHANCCVGLAKKLHDLNLVLDDWRNYLSLSEPVKNTTWSVPMKCT

SEQ ID NO: 27555 - DNA, 921 bp, Arabidopsis thaliana
  misc_feature (1)..(921): Ceres Seq. ID no. 1820484
atggatcttgccccagaggagcttcaatttctcaacaaaagaggaattctacgtgaatcaacatcaatcccacaatattctctaaaaaccttttacctcataaccctaaccctaattttccctctctccttcgcaatcctagcccattctctcttcacacaaccaatcttagctcagatcgatacatacccacaagccgatcaatctcaactccaacatgaatggaccgtcctcctcgttttccaattctgctacatcatcttcctcttcgccttctctcttctctccacagccgccgttgtcttcaccgtcgcttctctttacaccggaaagcctgtttctttctcctccacaatgtcagcgatacctctcgtcctcaaaagattgttcataacattcctctgggtctctcttttgatgcttgcgtacaacaccgtgttcttgatcttcttggtcacgttaatcgtagctgttgatttacagaacgtggttttagctgtgttttcgttggtagtgatctttgttctgtttcttgtagttcatgtttatatgacagctttgtggcatttagctagtgtagtctctgttcttgaaccgatttacggtttggctgcgatgaagaagagttatgagttgcttaaagggaagactcttatggcttgttcgatggttttcatctatcttgttcattgtggattcattgctggagtttttggagcagtggtggttcgtggtggtgatgattacggaattttcgctagaatcgtcgctggtggattcttgagtgtgttttactatgtttgcaagagttttcatcatcaggagattgataaatccgctttgcacgatcatctcggtgggtatctcggtgaatatgtgcctcttaagagcaacattcaaatggagaactttgaagtttga

SEQ ID NO: 27556 - protein, 306 aa, Arabidopsis thaliana
  misc_feature (1)..(306): Ceres Seq. ID no. 1820485
MDLAPEELQFLNKRGILRESTSIPQYSLKTFYLITLTLIFPLSFAILAHSLFTQPILAQIDTYPQADQSQLQHEWTVLLVFQFCYIIFLFAFSLLSTAAVVFTVASLYTGKPVSFSSTMSAIPLVLKRLFITFLWVSLLMLAYNTVFLIFLVTLIVAVDLQNVVLAVFSLVVIFVLFLVVHVYMTALWHLASVVSVLEPIYGLAAMKKSYELLKGKTLMACSMVFIYLVHCGFIAGVFGAVVVRGGDDYGIFARIVAGGFLSVFYYVCKSFHHQEIDKSALHDHLGGYLGEYVPLKSNIQMENFEV

SEQ ID NO: 27557 - protein, 188 aa, Arabidopsis thaliana
  misc_feature (1)..(188): Ceres Seq. ID no. 1820486
MSAIPLVLKRLFITFLWVSLLMLAYNTVFLIFLVTLIVAVDLQNVVLAVFSLVVIFVLFLVVHVYMTALWHLASVVSVLEPIYGLAAMKKSYELLKGKTLMACSMVFIYLVHCGFIAGVFGAVVVRGGDDYGIFARIVAGGFLSVFYYVCKSFHHQEIDKSALHDHLGGYLGEYVPLKSNIQMENFEV

SEQ ID NO: 27558 - protein, 167 aa, Arabidopsis thaliana
  misc_feature (1)..(167): Ceres Seq. ID no. 1820487
MLAYNTVFLIFLVTLIVAVDLQNVVLAVFSLVVIFVLFLVVHVYMTALWHLASVVSVLEPIYGLAAMKKSYELLKGKTLMACSMVFIYLVHCGFIAGVFGAVVVRGGDDYGIFARIVAGGFLSVFYYVCKSFHHQEIDKSALHDHLGGYLGEYVPLKSNIQMENFEV

SEQ ID NO: 27559 - DNA, 2679 bp, Arabidopsis thaliana
  misc_feature (1)..(2679): Ceres Seq. ID no. 1820499
atggccaaggccaagcaggttcgtttcatcagcatagattgtgggtcaccccctaatattaactatgtagacactgatactggtatcagttacacctgggatgcacctttcatcaacgctggagtaaatctgaacgtctctgaagaatacggttacccgaaaaacccggttttgcctttcccgcttgctgatgtaagatcttttcctcaaggaaacaggaactgttacaccttaaccccctccgatggaaaagggaatctttatctcatcagagcttcgtttatgtatggaaactacgatggtaaaaatgctttacctgagtttgatctctacgtaaacgtgaatttctggacctcggtgaaactcagaaatgcttctgagaacgtcatcaaggagatcctcagctttgcagagtcagatacaatatatgtttgccttgtgaacaaaggtaaaggaactccttttatttcagcgttggagcttcgaccaatgaacagctccatctatggaactgagtttggaagaaatgtctcattggtactctatcaaagatgggatacaggatatttgaatggaacaggacggtaccaaaaggatacatatgatcgtatttggtctccgtactctccagtgtcttggaatacaactatgactactgggtatatcgatatttttcagtctggttataggccaccagatgaagttattaagacagctgcttcgcctaaaagtgacgatgaaccattggaactgtcttggacatcaagcgatccagatactcggttttatgcgtacctttattttgcagaacttgaaaatctcaagaggaatgagagcagagaaatcaagatattctggaatgggtcgcctgtttcaggagcttttaacccctctcctgagtattcaatgacagtgtctaactcacgagctttcactggtaaagatcactggatttctgttcagaagaccgcagagtcaacgcgtccaccaatactcaatgctattgagattttttcagcacaatctctggatgaattttacaccagaattgacgatgttcaagccatagaaagcataaaatcaacgtataaagtgaataagatttggactggtgatccttgctctcccagactcttcccttgggaagttttgctgatgagcttgtttctgtattttgctgcgagaagaaatcttagttcaagtggattacatggaccaatagcgttcgcatttagaaatctctcccttcttgagtcattggatttatcaaacaacaacctcaaaggaattgtgccggaatttttggctgatctaaaatatctgaagtccctgaatttgaaaggaaataacttgactgggtttatcccaagatctcttaggaaaagagcaacggctaatggacttgcactcagtgtcgatgaacaaaacatttgtcactcacgttcatgtcgggacgggaacagaatcatggtgccaatagttgtatccacattagtgattattctcattgccgccttggctatcatatgcatcatgcgaagggaaagcaaaataatgtattcaggagcatattcaggaccacttctgccttcgggaaagagaaggttcacatatagtgaagtctctagtattacaaacaacttcaataaagtgattggtaaaggagggtttggtattgtgtaccttggttcccttgaagatggaactgaaattgctgtaaagatgatcaacgattcttcttttggaaaatctaaaggatcttcatcatcatcatcatcatcccaggtctccaaagaattccaagtcgaggcggagcttcttttgacagtccatcaccggaacttagcttcgtttgttggatactgcgatgatggtcgcagtatggctctcatctacgagtacatggccaatggcaacttgcaagattatctttcaagtgagaatgcagaggatcttagttgggaaaagagactccatatagccatagactctgcacaagggttggagtatcttcatcatggctgcaggccaccaatagtacacagagacgttaaaacagcaaacattcttttaaacgataacttggaagccaagatcgctgatttcgggctttctaaggtcttccctgaggatgatctcagccacgttgtgactgctgtcatgggcactcctggctatgtcgatcctgagtactacaacacgtttaagctaaacgagaagagcgacgtgtacagctttgggatcgtcctccttgaactcataaccggcaagagatccataatgaaaactgacgacggagaaaaaatgaacgttgttcactacgtcgagcctttcctcaaaatgggagacatagatggtgtcgtggatccacggcttcacggcgacttctcctcaaactcggcttggaaatttgtggaagtggcaatgtcttgcgtcagagacagaggaaccaacagaccaaacacaaaccagatcgtgtctgacttgaaacagtgcttagctgccgagctagctcgtgagccaaaaagcaatcatgagaagaaggaagtagtgaaagagaagtacacgaagaccaagtcgacggttcagaattatagcagcaatgaatataatagctcatctggatcggtttcactttcttttggagattactccacgtttggcccaatggcaaggtag

SEQ ID NO: 27560 - protein, 892 aa, Arabidopsis thaliana
  misc_feature (1)..(892): Ceres Seq. ID no. 1820500
MAKAKQVRFISIDCGSPPNINYVDTDTGISYTWDAPFINAGVNLNVSEEYGYPKNPVLPFPLADVRSFPQGNRNCYTLTPSDGKGNLYLIRASFMYGNYDGKNALPEFDLYVNVNFWTSVKLRNASENVIKEILSFAESDTIYVCLVNKGKGTPFISALELRPMNSSIYGTEFGRNVSLVLYQRWDTGYLNGTGRYQKDTYDRIWSPYSPVSWNTTMTTGYIDIFQSGYRPPDEVIKTAASPKSDDEPLELSWTSSDPDTRFYAYLYFAELENLKRNESREIKIFWNGSPVSGAFNPSPEYSMTVSNSRAFTGKDHWISVQKTAESTRPPILNAIEIFSAQSLDEFYTRIDDVQAIESIKSTYKVNKIWTGDPCSPRLFPWEVLLMSLFLYFAARRNLSSSGLHGPIAFAFRNLSLLESLDLSNNNLKGIVPEFLADLKYLKSLNLKGNNLTGFIPRSLRKRATANGLALSVDEQNICHSRSCRDGNRIMVPIVVSTLVIILIAALAIICIMRRESKIMYSGAYSGPLLPSGKRRFTYSEVSSITNNFNKVIGKGGFGIVYLGSLEDGTEIAVKMINDSSFGKSKGSSSSSSSSQVSKEFQVEAELLLTVHHRNLASFVGYCDDGRSMALIYEYMANGNLQDYLSSENAEDLSWEKRLHIAIDSAQGLEYLHHGCRPPIVHRDVKTANILLNDNLEAKIADFGLSKVFPEDDLSHVVTAVMGTPGYVDPEYYNTFKLNEKSDVYSFGIVLLELITGKRSIMKTDDGEKMNVVHYVEPFLKMGDIDGVVDPRLHGDFSSNSAWKFVEVAMSCVRDRGTNRPNTNQIVSDLKQCLAAELAREPKSNHEKKEVVKEKYTKTKSTVQNYSSNEYNSSSGSVSLSFGDYSTFGPMAR

SEQ ID NO: 27561 - protein, 798 aa, Arabidopsis thaliana
  misc_feature (1)..(798): Ceres Seq. ID no. 1820501
MYGNYDGKNALPEFDLYVNVNFWTSVKLRNASENVIKEILSFAESDTIYVCLVNKGKGTPFISALELRPMNSSIYGTEFGRNVSLVLYQRWDTGYLNGTGRYQKDTYDRIWSPYSPVSWNTTMTTGYIDIFQSGYRPPDEVIKTAASPKSDDEPLELSWTSSDPDTRFYAYLYFAELENLKRNESREIKIFWNGSPVSGAFNPSPEYSMTVSNSRAFTGKDHWISVQKTAESTRPPILNAIEIFSAQSLDEFYTRIDDVQAIESIKSTYKVNKIWTGDPCSPRLFPWEVLLMSLFLYFAARRNLSSSGLHGPIAFAFRNLSLLESLDLSNNNLKGIVPEFLADLKYLKSLNLKGNNLTGFIPRSLRKRATANGLALSVDEQNICHSRSCRDGNRIMVPIVVSTLVIILIAALAIICIMRRESKIMYSGAYSGPLLPSGKRRFTYSEVSSITNNFNKVIGKGGFGIVYLGSLEDGTEIAVKMINDSSFGKSKGSSSSSSSSQVSKEFQVEAELLLTVHHRNLASFVGYCDDGRSMALIYEYMANGNLQDYLSSENAEDLSWEKRLHIAIDSAQGLEYLHHGCRPPIVHRDVKTANILLNDNLEAKIADFGLSKVFPEDDLSHVVTAVMGTPGYVDPEYYNTFKLNEKSDVYSFGIVLLELITGKRSIMKTDDGEKMNVVHYVEPFLKMGDIDGVVDPRLHGDFSSNSAWKFVEVAMSCVRDRGTNRPNTNQIVSDLKQCLAAELAREPKSNHEKKEVVKEKYTKTKSTVQNYSSNEYNSSSGSVSLSFGDYSTFGPMAR

SEQ ID NO: 27562 - protein, 729 aa, Arabidopsis thaliana
  misc_feature (1)..(729): Ceres Seq. ID no. 1820502
MNSSIYGTEFGRNVSLVLYQRWDTGYLNGTGRYQKDTYDRIWSPYSPVSWNTTMTTGYIDIFQSGYRPPDEVIKTAASPKSDDEPLELSWTSSDPDTRFYAYLYFAELENLKRNESREIKIFWNGSPVSGAFNPSPEYSMTVSNSRAFTGKDHWISVQKTAESTRPPILNAIEIFSAQSLDEFYTRIDDVQAIESIKSTYKVNKIWTGDPCSPRLFPWEVLLMSLFLYFAARRNLSSSGLHGPIAFAFRNLSLLESLDLSNNNLKGIVPEFLADLKYLKSLNLKGNNLTGFIPRSLRKRATANGLALSVDEQNICHSRSCRDGNRIMVPIVVSTLVIILIAALAIICIMRRESKIMYSGAYSGPLLPSGKRRFTYSEVSSITNNFNKVIGKGGFGIVYLGSLEDGTEIAVKMINDSSFGKSKGSSSSSSSSQVSKEFQVEAELLLTVHHRNLASFVGYCDDGRSMALIYEYMANGNLQDYLSSENAEDLSWEKRLHIAIDSAQGLEYLHHGCRPPIVHRDVKTANILLNDNLEAKIADFGLSKVFPEDDLSHVVTAVMGTPGYVDPEYYNTFKLNEKSDVYSFGIVLLELITGKRSIMKTDDGEKMNVVHYVEPFLKMGDIDGVVDPRLHGDFSSNSAWKFVEVAMSCVRDRGTNRPNTNQIVSDLKQCLAAELAREPKSNHEKKEVVKEKYTKTKSTVQNYSSNEYNSSSGSVSLSFGDYSTFGPMAR

SEQ ID NO: 27563 - DNA, 1116 bp, Arabidopsis thaliana
  misc_feature (1)..(1116): Ceres Seq. ID no. 1820842
atgtctgtctctattccggtcttaatgaagagactttgtctgtataactctctctctctctttctttttcacctctttccctcaccctctctggctctctcattctctgttgagttgaacttactaaaagcacaaatggtttgggcaaatgctaagatgaggctagctttgtctcttgttacggttttcttcggcatctctcttgctaatcttgaagtcggattttactccaatacatgccctcaagccgagtcaatcgttaagagggttgtctcaggggctgctctttccgaccctaacctcccagccatacttctacggctccatttccatgattgctttgttgagggatgtgatggctcgatcctcgtgaacaacggagcaatctctgaaaagaatgcatttggacatgaaggcgttagaggatttgagatagtagaagccgtcaaagccgagcttgaagctgcatgccccggtgttgtctcctgctcagacattgttgccttggctgcacgtgatgccatatctttggcgaatggaccggcgtatgaggtgccaactgggcggagagatggtcgggtttcgaacatgtcattggctaaggacatgccggaggtgagtgactcgattgagatactaaaggctaagttcatgcagaaaggactcaacgccaaagacctcgtgcttctcagtgctgctcacactatcggaacaacggcctgcttcttcatgtccaaacggctctatgatttcttacctggtggccaacctgacccgactatcaatccaacattcctacccgaattaaccactcagtgcccacaaaatggtgacataaacgtccgtttaccaattgaccggttcagcgaacggctattcgacaagcagattctgcaaaacataaaggatggttttgctgtgcttcagaccgacgcaggtctttacgaggatgtaacgaccagacaggtcgtggattcctatcttgggatgctaaatccattctttgggccaacattcgagtctgatttcgttaaggcgatcgtaaagatggggaagattggtgtgaagactggtttcaaaggggagattcgacgggtttgctcggccttcaattga

SEQ ID NO: 27564 - protein, 371 aa, Arabidopsis thaliana
  misc_feature (1)..(371): Ceres Seq. ID no. 1820843
MSVSIPVLMKRLCLYNSLSLFLFHLFPSPSLALSFSVELNLLKAQMVWANAKMRLALSLVTVFFGISLANLEVGFYSNTCPQAESIVKRVVSGAALSDPNLPAILLRLHFHDCFVEGCDGSILVNNGAISEKNAFGHEGVRGFEIVEAVKAELEAACPGVVSCSDIVALAARDAISLANGPAYEVPTGRRDGRVSNMSLAKDMPEVSDSIEILKAKFMQKGLNAKDLVLLSAAHTIGTTACFFMSKRLYDFLPGGQPDPTINPTFLPELTTQCPQNGDINVRLPIDRFSERLFDKQILQNIKDGFAVLQTDAGLYEDVTTRQVVDSYLGMLNPFFGPTFESDFVKAIVKMGKIGVKTGFKGEIRRVCSAFN

SEQ ID NO: 27565 - protein, 363 aa, Arabidopsis thaliana
  misc_feature (1)..(363): Ceres Seq. ID no. 1820844
MKRLCLYNSLSLFLFHLFPSPSLALSFSVELNLLKAQMVWANAKMRLALSLVTVFFGISLANLEVGFYSNTCPQAESIVKRVVSGAALSDPNLPAILLRLHFHDCFVEGCDGSILVNNGAISEKNAFGHEGVRGFEIVEAVKAELEAACPGVVSCSDIVALAARDAISLANGPAYEVPTGRRDGRVSNMSLAKDMPEVSDSIEILKAKFMQKGLNAKDLVLLSAAHTIGTTACFFMSKRLYDFLPGGQPDPTINPTFLPELTTQCPQNGDINVRLPIDRFSERLFDKQILQNIKDGFAVLQTDAGLYEDVTTRQVVDSYLGMLNPFFGPTFESDFVKAIVKMGKIGVKTGFKGEIRRVCSAFN

SEQ ID NO: 27566 - protein, 326 aa, Arabidopsis thaliana
  misc_feature (1)..(326): Ceres Seq. ID no. 1820845
MVWANAKMRLALSLVTVFFGISLANLEVGFYSNTCPQAESIVKRVVSGAALSDPNLPAILLRLHFHDCFVEGCDGSILVNNGAISEKNAFGHEGVRGFEIVEAVKAELEAACPGVVSCSDIVALAARDAISLANGPAYEVPTGRRDGRVSNMSLAKDMPEVSDSIEILKAKFMQKGLNAKDLVLLSAAHTIGTTACFFMSKRLYDFLPGGQPDPTINPTFLPELTTQCPQNGDINVRLPIDRFSERLFDKQILQNIKDGFAVLQTDAGLYEDVTTRQVVDSYLGMLNPFFGPTFESDFVKAIVKMGKIGVKTGFKGEIRRVCSAFN

SEQ ID NO: 27567 - DNA, 1203 bp, Arabidopsis thaliana
  misc_feature (1)..(1203): Ceres Seq. ID no. 1820941
atgcattgcggatgtgtattcgcttcacaaactgtgtcatcacttctcccatttgaaattaaaacctatgcgtcaaagcttcgagcttcgtcagcccaattaccgagaacccagattcagataaacccttcagatgatctctctatctacggttcagataaatctccggcgaatagagtttcgttgccgtctcatgtaaattctatcaccagtactacaaacccttttgtcaaacactgcttgaagctccgccaaagttcctcgtatcgccacgctcatggctctgttcttgtcgtcggaactatccccatcaggtatgtatcagtgatcttgtactctttattttttttcattgctactgagagaattgtggaaagtagtttccttttttactgtgttcgattgatttcatgtgaaattgagtttcaaggagataactttaaaggcgttgttcacagggaagtatgtatgtttcaaacgaataagcaaggaatgaccactgaaattgagtgcctacttcttcatgaggaagctaagattccacaaggattagagagtctaagtatccgaattgttagagtaagttctttagtgatgaagaaactctctggagtgcaatctactgaatctgttgaagccattgccttgatgagaatccctagcagctttactgatcttaaagatgataaagacatcataacagactgcaacaaatggttcccttctgctcacagagttcttgttctggacagcatacaggatccagggaaccttggcacattagtcagatcagctatggcttttaattgggatggtgcatttctacttccgggttgttgcgatccgtacaacgacaaagctcttcgagcaagccgaggtgcttcgtttcagctacctatagtttccgggaattggaaccatcttaagcttctagaaaatgagttccagatgaagctattagctggtcatccagcaacgactactcagaaactgaaacctgtctccaaactttcggtagagtttgctcaatctttagcagagaagcctttatgcttgattttaggtagtgaagggaatggtttgtctgagcaggcacggaaagtatgcgtgctagtgagcattcccatggcaggtgactttgaatctcttaacgtctctgttgctggtggtattttcttgtacatgcttcaaaatcttgtttag

SEQ ID NO: 27568 - protein, 400 aa, Arabidopsis thaliana
  misc_feature (1)..(400): Ceres Seq. ID no. 1820942
MHCGCVFASQTVSSLLPFEIKTYASKLRASSAQLPRTQIQINPSDDLSIYGSDKSPANRVSLPSHVNSITSTTNPFVKHCLKLRQSSSYRHAHGSVLVVGTIPIRYVSVILYSLFFFIATERIVESSFLFYCVRLISCEIEFQGDNFKGVVHREVCMFQTNKQGMTTEIECLLLHEEAKIPQGLESLSIRIVRVSSLVMKKLSGVQSTESVEAIALMRIPSSFTDLKDDKDIITDCNKWFPSAHRVLVLDSIQDPGNLGTLVRSAMAFNWDGAFLLPGCCDPYNDKALRASRGASFQLPIVSGNWNHLKLLENEFQMKLLAGHPATTTQKLKPVSKLSVEFAQSLAEKPLCLILGSEGNGLSEQARKVCVLVSIPMAGDFESLNVSVAGGIFLYMLQNLV

SEQ ID NO: 27569 - protein, 244 aa, Arabidopsis thaliana
  misc_feature (1)..(244): Ceres Seq. ID no. 1820943
MFQTNKQGMTTEIECLLLHEEAKIPQGLESLSIRIVRVSSLVMKKLSGVQSTESVEAIALMRIPSSFTDLKDDKDIITDCNKWFPSAHRVLVLDSIQDPGNLGTLVRSAMAFNWDGAFLLPGCCDPYNDKALRASRGASFQLPIVSGNWNHLKLLENEFQMKLLAGHPATTTQKLKPVSKLSVEFAQSLAEKPLCLILGSEGNGLSEQARKVCVLVSIPMAGDFESLNVSVAGGIFLYMLQNLV

SEQ ID NO: 27570 - protein, 236 aa, Arabidopsis thaliana
  misc_feature (1)..(236): Ceres Seq. ID no. 1820944
MTTEIECLLLHEEAKIPQGLESLSIRIVRVSSLVMKKLSGVQSTESVEAIALMRIPSSFTDLKDDKDIITDCNKWFPSAHRVLVLDSIQDPGNLGTLVRSAMAFNWDGAFLLPGCCDPYNDKALRASRGASFQLPIVSGNWNHLKLLENEFQMKLLAGHPATTTQKLKPVSKLSVEFAQSLAEKPLCLILGSEGNGLSEQARKVCVLVSIPMAGDFESLNVSVAGGIFLYMLQNLV

SEQ ID NO: 27571 - DNA, 1680 bp, Arabidopsis thaliana
  misc_feature (1)..(1680): Ceres Seq. ID no. 1820945
atgtatttgccggagaaatcagttcttctggaattgatcagccgatgcagctctcttcgcgttttcaaacagatacagactcaattgattactcgtgatcttcttcgtgatgacttaatcatcaacaaagtcgtgacctttctgggcaaatccgcagattttgcatcttacagctctgtaattctccacagtatccgttctgtgttgagctctttctcatacaacacgcttttatcaagctatgcagtttgtgataaaccaagagtgacgatttttgcttacaaaacatttgtgagtaatgggttttcaccggacatgttcacgtttcctccagtttttaaggcttgtgggaagttttcagggatcagagaagggaaacagattcatggaattgttacgaagatgggtttttacgatgatatctatgtgcaaaactcgcttgttcatttttatggtgtgtgtggagaatcaaggaatgcatgtaaagtgttcggtgaaatgcctgtgagagatgttgtttcgtggactgggattataactggtttcacgaggactgggttgtataaggaagctttggatacgttttcaaagatggatgttgagcctaatttggctacgtatgtttgtgtattggtctcaagtgggcgggtagggtgtttaagtttagggaaaggaatccatgggttgatcttaaaaagggcatctttgatcagcttagagactggtaatgctcttatagatatgtatgtgaaatgtgagcaattgtctgatgcgatgagagtttttggtgagttggaaaagaaagataaagtttcttggaatagtatgattagtgggttggttcactgtgaaagatctaaggaggcgattgacttgttttctctgatgcaaacgtcttctggtataaagccagatgggcatatacttacaagtgttctctctgcgtgtgctagcttaggagctgtggatcacggaagatgggttcatgagtatattttaaccgctggaatcaaatgggatacgcatattggaactgccattgttgatatgtatgcaaaatgtggctacatcgaaacagctttggagattttcaacggaattagaagtaagaatgtgtttacttggaatgctctgttaggtggtttagctatccatgggcatggacttgaatcccttagatactttgaagaaatggttaagctaggttttaagccgaacctggtaacttttctcgcggctctaaatgcttgttgccacacaggtttagtcgatgaagggagaagatatttccataaaatgaaaagcagagaatacaatctatttcctaagctagaacattatggatgcatgattgatttgctttgtagagctggattgttagatgaagcattggaactcgtcaaagcaatgccggttaaaccggatgtacgtatatgtggagctattcttagtgcttgtaagaatagagggacattaatggagcttcctaaagagatattagatagttttttagatattgagtttgaagatagtggtgtttatgtgttgctgtctaatatttttgctgctaatagaagatgggatgatgttgcgagaatcaggaggttgatgaaggtaaaaggtatctcgaaggttccaggatcaagttatatagagaagtttatgactttagaccaatga

SEQ ID NO: 27572 - protein, 559 aa, Arabidopsis thaliana
  misc_feature (1)..(559): Ceres Seq. ID no. 1820946
MYLPEKSVLLELISRCSSLRVFKQIQTQLITRDLLRDDLIINKVVTFLGKSADFASYSSVILHSIRSVLSSFSYNTLLSSYAVCDKPRVTIFAYKTFVSNGFSPDMFTFPPVFKACGKFSGIREGKQIHGIVTKMGFYDDIYVQNSLVHFYGVCGESRNACKVFGEMPVRDVVSWTGIITGFTRTGLYKEALDTFSKMDVEPNLATYVCVLVSSGRVGCLSLGKGIHGLILKRASLISLETGNALIDMYVKCEQLSDAMRVFGELEKKDKVSWNSMISGLVHCERSKEAIDLFSLMQTSSGIKPDGHILTSVLSACASLGAVDHGRWVHEYILTAGIKWDTHIGTAIVDMYAKCGYIETALEIFNGIRSKNVFTWNALLGGLAIHGHGLESLRYFEEMVKLGFKPNLVTFLAALNACCHTGLVDEGRRYFHKMKSREYNLFPKLEHYGCMIDLLCRAGLLDEALELVKAMPVKPDVRICGAILSACKNRGTLMELPKEILDSFLDIEFEDSGVYVLLSNIFAANRRWDDVARIRRLMKVKGISKVPGSSYIEKFMTLDQ

SEQ ID NO: 27573 - protein, 454 aa, Arabidopsis thaliana
  misc_feature (1)..(454): Ceres Seq. ID no. 1820947
MFTFPPVFKACGKFSGIREGKQIHGIVTKMGFYDDIYVQNSLVHFYGVCGESRNACKVFGEMPVRDVVSWTGIITGFTRTGLYKEALDTFSKMDVEPNLATYVCVLVSSGRVGCLSLGKGIHGLILKRASLISLETGNALIDMYVKCEQLSDAMRVFGELEKKDKVSWNSMISGLVHCERSKEAIDLFSLMQTSSGIKPDGHILTSVLSACASLGAVDHGRWVHEYILTAGIKWDTHIGTAIVDMYAKCGYIETALEIFNGIRSKNVFTWNALLGGLAIHGHGLESLRYFEEMVKLGFKPNLVTFLAALNACCHTGLVDEGRRYFHKMKSREYNLFPKLEHYGCMIDLLCRAGLLDEALELVKAMPVKPDVRICGAILSACKNRGTLMELPKEILDSFLDIEFEDSGVYVLLSNIFAANRRWDDVARIRRLMKVKGISKVPGSSYIEKFMTLDQ

SEQ ID NO: 27574 - protein, 425 aa, Arabidopsis thaliana
  misc_feature (1)..(425): Ceres Seq. ID no. 1820948
MGFYDDIYVQNSLVHFYGVCGESRNACKVFGEMPVRDVVSWTGIITGFTRTGLYKEALDTFSKMDVEPNLATYVCVLVSSGRVGCLSLGKGIHGLILKRASLISLETGNALIDMYVKCEQLSDAMRVFGELEKKDKVSWNSMISGLVHCERSKEAIDLFSLMQTSSGIKPDGHILTSVLSACASLGAVDHGRWVHEYILTAGIKWDTHIGTAIVDMYAKCGYIETALEIFNGIRSKNVFTWNALLGGLAIHGHGLESLRYFEEMVKLGFKPNLVTFLAALNACCHTGLVDEGRRYFHKMKSREYNLFPKLEHYGCMIDLLCRAGLLDEALELVKAMPVKPDVRICGAILSACKNRGTLMELPKEILDSFLDIEFEDSGVYVLLSNIFAANRRWDDVARIRRLMKVKGISKVPGSSYIEKFMTLDQ

SEQ ID NO: 27575 - DNA, 1947 bp, Arabidopsis thaliana
  misc_feature (1)..(1947): Ceres Seq. ID no. 1821173
atgcctttactattcctctggtttttcctcacgagcactagtcttgtctctgcacttcaaactcttccatgcataaacacaacctactttatacctaattcgacttacgacacaaaccgtcgcgttattctctcattgcttccttctaatgtcacatcacactttggcttcttcaacggttcaataggtcaagctcctaacagagtatatgccgtaggcatgtgtcttccaggtactgaagaagagagttgcataggttgtctcttgtctgcttccaatacattattagaaacctgcctcaccgaagaaaatgctcttatctggatcgcaaacagaactatttgtatgatccgatactccgatacttcctttgttggttcgttcgagttagagccgcatcgtgaattcctcagtattcatggttacaaaacgaatgaaacagaattcaatacagtatggagtagattaactcaacgtatggtacaagaagcttcctcaagcacagatgcaacatggtctggtgctaagtactatacagctgatgtagccgccttgcctgattcgcagactctctatgcaatgatgcaatgcactcctgatttgtctccggctgagtgtaatctctgtttaacagaaagcgttgttaactatcagagttgttgccttggacgtcaaggcggctctatcgttaggctaagttgcgctttccgggcagagttatatccatttggtggagcttttactgttatgacagcaagacctttgtcacaacctccaccgtcattaatcaagaaaggtgaattctttgcaaaatttatgagtaattcacaagaacctcggaaagttttcaacggaaactattgctgcaattgttgttcccattatagtggtcgctatcatcttcttgctggtattacgactctacacttccaacaactcgattttaagacaattgaagttgcaactgaaaattttgcaaagactaacaagctaggtcaaggtggatttggagaagtttacaagggcacgttagttaatggaacagaagttgcagtgaagaggctatcgaaaacatccgaacaaggtgcacaagagttcaagaacgaggttgttcttgtcgccaaacttcagcataggaatcttgttaagcttcttgggtactgtctggaaccagaggagaaaatacttgtttacgagtttgtccccaacaagagcctagactacttcctttttgatcctacaaagcaagggcagttagactggacaaaacgatacaacattatcggaggaatcactcgaggaattctatatcttcatcaagattcacgactaacaatcatacaccgtgatctcaaagccagcaacattcttctagatgccgatatgatcccgaaaatcgctgattttggaatggcgaggatatctggaatagaccaaagtgtagctaacacaaaaaggatagctggaactttcggttacatgcctccagaatacgtgatccatggccagttctcgatgaaatctgatgtctatagcttcggtgttttgattcttgagattatatgtggcaagaagaatagaagcttttaccaagcagatactaaagctgaaaatttggtcacctatgtttggaggttgtggacaaacggatcaccattagagctcgtggatctaaccatatcagagaattgtcaaacagaagaagttataagatgcatccacatcgcactcctatgtgttcaagaagatcctaaagatcgtcccaacttgtcaacaatcatgatgatgctcactaacagttccctcattttatctgttcctcaaccacctggattctttgttccgcaaaacaaagaacgtgatagctttttgtcgagccaatttacaatgggatgtacttctcagactaaaaatgatgtaaccattacaaatctagatcctcgttga

SEQ ID NO: 27576 - protein, 648 aa, Arabidopsis thaliana
  misc_feature (1)..(648): Ceres Seq. ID no. 1821174
MPLLFLWFFLTSTSLVSALQTLPCINTTYFIPNSTYDTNRRVILSLLPSNVTSHFGFFNGSIGQAPNRVYAVGMCLPGTEEESCIGCLLSASNTLLETCLTEENALIWIANRTICMIRYSDTSFVGSFELEPHREFLSIHGYKTNETEFNTVWSRLTQRMVQEASSSTDATWSGAKYYTADVAALPDSQTLYAMMQCTPDLSPAECNLCLTESVVNYQSCCLGRQGGSIVRLSCAFRAELYPFGGAFTVMTARPLSQPPPSLIKKGEFFAKFMSNSQEPRKVFNGNYCCNCCSHYSGRYHLLAGITTLHFQQLDFKTIEVATENFAKTNKLGQGGFGEVYKGTLVNGTEVAVKRLSKTSEQGAQEFKNEVVLVAKLQHRNLVKLLGYCLEPEEKILVYEFVPNKSLDYFLFDPTKQGQLDWTKRYNIIGGITRGILYLHQDSRLTIIHRDLKASNILLDADMIPKIADFGMARISGIDQSVANTKRIAGTFGYMPPEYVIHGQFSMKSDVYSFGVLILEIICGKKNRSFYQADTKAENLVTYVWRLWTNGSPLELVDLTISENCQTEEVIRCIHIALLCVQEDPKDRPNLSTIMMMLTNSSLILSVPQPPGFFVPQNKERDSFLSSQFTMGCTSQTKNDVTITNLDPR

SEQ ID NO: 27577 - protein, 575 aa, Arabidopsis thaliana
  misc_feature (1)..(575): Ceres Seq. ID no. 1821175
MCLPGTEEESCIGCLLSASNTLLETCLTEENALIWIANRTICMIRYSDTSFVGSFELEPHREFLSIHGYKTNETEFNTVWSRLTQRMVQEASSSTDATWSGAKYYTADVAALPDSQTLYAMMQCTPDLSPAECNLCLTESVVNYQSCCLGRQGGSIVRLSCAFRAELYPFGGAFTVMTARPLSQPPPSLIKKGEFFAKFMSNSQEPRKVFNGNYCCNCCSHYSGRYHLLAGITTLHFQQLDFKTIEVATENFAKTNKLGQGGFGEVYKGTLVNGTEVAVKRLSKTSEQGAQEFKNEVVLVAKLQHRNLVKLLGYCLEPEEKILVYEFVPNKSLDYFLFDPTKQGQLDWTKRYNIIGGITRGILYLHQDSRLTIIHRDLKASNILLDADMIPKIADFGMARISGIDQSVANTKRIAGTFGYMPPEYVIHGQFSMKSDVYSFGVLILEIICGKKNRSFYQADTKAENLVTYVWRLWTNGSPLELVDLTISENCQTEEVIRCIHIALLCVQEDPKDRPNLSTIMMMLTNSSLILSVPQPPGFFVPQNKERDSFLSSQFTMGCTSQTKNDVTITNLDPR

SEQ ID NO: 27578 - protein, 533 aa, Arabidopsis thaliana
  misc_feature (1)..(533): Ceres Seq. ID no. 1821176
MIRYSDTSFVGSFELEPHREFLSIHGYKTNETEFNTVWSRLTQRMVQEASSSTDATWSGAKYYTADVAALPDSQTLYAMMQCTPDLSPAECNLCLTESVVNYQSCCLGRQGGSIVRLSCAFRAELYPFGGAFTVMTARPLSQPPPSLIKKGEFFAKFMSNSQEPRKVFNGNYCCNCCSHYSGRYHLLAGITTLHFQQLDFKTIEVATENFAKTNKLGQGGFGEVYKGTLVNGTEVAVKRLSKTSEQGAQEFKNEVVLVAKLQHRNLVKLLGYCLEPEEKILVYEFVPNKSLDYFLFDPTKQGQLDWTKRYNIIGGITRGILYLHQDSRLTIIHRDLKASNILLDADMIPKIADFGMARISGIDQSVANTKRIAGTFGYMPPEYVIHGQFSMKSDVYSFGVLILEIICGKKNRSFYQADTKAENLVTYVWRLWTNGSPLELVDLTISENCQTEEVIRCIHIALLCVQEDPKDRPNLSTIMMMLTNSSLILSVPQPPGFFVPQNKERDSFLSSQFTMGCTSQTKNDVTITNLDPR

SEQ ID NO: 27579 - DNA, 3723 bp, Arabidopsis thaliana
  misc_feature (1)..(3723): Ceres Seq. ID no. 1821185
atggtatctgatgcagatgcttccacatcttcatcttccattgatattatgccttctgctaatattcaaaatgatgtccctgaaccttctgttcacacatcgcataggagaacacgaaagcctgcttatcttcaagattactactgtcattcagtagcttctttaaccattcatgatatttcccagtttctctcttatgaaaaagtttctccactttaccattctttcttggtttgtattgccaaagctaaagaaccctcaacctacaatgaagcgaaagaatttcttgtgtggtgtggtgctatggatgatgaaattggtgcaatggagactactcacacttgggaaatctgtactctacctcccaataagaagcctattggttgcaaatgggtgtataagataaaatacaactcggatggcaccattgaacgttataaggcacggttggttgccaagggttacacacagcaggaaggtatcgattttattgagactttctctccagtctgcaaactcacatctgtcaagctcattcttgcgatctctgccatctataattttactcttcatcaactggacatttccaatgcgttccttaatggtgatttggatgaagagatctatatgaagcttcctcctggatatgctgctagacagggggactctctccctcccaatgctgtgtgttacctcaagaagtccatttatgggcttaaacaagcctccagacaatggtttttaaagttttctgttacactcattggttttggttttgtgcagtcccattctgaccatacctacttcttgaagatcactgctacacttttcttatgtgtcttagtgtatgttgacgacatcatcatttgcagtaacaatgatgcagctgttgatgagttgaagtcccagctgaaaagttgttttaaactcagggatcttggccctttgaaatactttcttggcttagaaattgctagatccgctgctggcattaacatttgtcaaagaaagtatgcattggatcttttggatgaaacaggtctcttgggttgtaagccgtctagtgttcctatggatcccagcgtcactttctctgctcattcaggtggtgactttgtggatgctaaagcttacagacgtctcattggtcgcctcatgtatcttcagattactcgtcttgacatcagctttgcagtcaacaagctcagtcaattctctgaagctcctcgccttgcacatcaacaggctgtcatgaagattctgcattacattaaaggcactgttggtcaaggtctgttttattcttctcaagctgaaatgcaacttcaagttttctctgatgcttcatttcagtcatgcaaggacactagacgctctacaaatggttattgtatgtttttgggaacttctctcatttcctggaaatccaagaagcagcaggtggtctccaagtcttctgctgaagctgagtatcgtgctctctcttttgctacagatgagatgatgtggttagctcaattcttcagggaactccagcttcctctctccaagcctacacttctcttctgtgacaacactgcagcaattcacatcgccaccaatgcagttttccacgagcgcaccaaacacatcgaaagtgactgccacagcgttcgtgagagatccgtttaccaagccactctatcctactcctttcaagcttatgatgagcaagatgggtttacagagtatctttctcccatcttgagggggactattatgtatatagtttcaatgtttggtttagctggtttagaggctctgatctgtttcattttccttttccttttctcattcctcactagcttcaaagcttctgctcaaaatcctttttacctaaatcatgattgtccaaataggacaacttactcaagtaacagcacttactccaccaatctcaaaacccttttgtcctcttttgcttcccgcaacgcctcttactccaccggattccaaaacatcagggcgggacaaacccccgacagggtcaccggacttttcctttgtcgcggagacctatccccggaagtttgcagtaactgcgttgccttctccgttaacgaatcgttaactcggtgtccaaatcagagagaagctgtgttctattacgaagagtgcatactcagatactctcacaagaattttctatcgacagttacatacgaaggagaacttatcatgaggaaccccaataatatttcttctattcaaaatcaaagagaccagtttatagatttggttcaatctaatatgaaccaagctgccaatgaagcagccaacagttctagaaaattctctacgataaagaccgaattgacctcactccagactttgtatgggcttgttcaatgcactcctgatctcgcaagacaagattgctttagctgtctgacaagttccatcaatagaatgatgccactttttagaattggagcaagacagttttggccaagttgtaattcaaggtacgagctttacgcgttctacaacgaaaccgccattggaacaccatcaccaccaccactgtttccggggtctacgcctccgttgacatccccttcaatacctgctttagttggttattgtttccttgcacagagaacaaagaagacttttgacacagcatctgcatcggaggtaggagatgatatggcaaccgcagactcactacagctcgactatagaacaatccaaactgcaacaaatgattttgcagagagtaataagattggtcgaggtggttttggtgaggtttacaagggtacattttcaaatgggaaagaagttgcggtgaagagattgtcgaaaaattcaagacaaggcgaagcggagttcaagaccgaggttgttgtagttgccaagcttcaacacagaaatttggttaggcttcttggattttcattacaaggagaggaaagaattttggtctacgagtatatgcctaacaaaagccttgattgcttactatttgaccctacaaagcaaactcagctggactggatgcagcgatacaatatcattggaggaattgctcgggggattctatatcttcatcaagattcacggctcacaatcatacaccgtgaccttaaagcaagtaacattctcctagatgcggatataaatccgaaaattgcagattttggaatggctaggatcttcggattggaccaaacccaggataacacaagccgaatagttggtacctacggttacatggctcccgagtatgcgatgcatggccaattctcaatgaaatctgatgtctatagcttcggagtgttagttcttgagattataagtggtaggaagaatagtagcttcgacgagtcagacggcgcacaagacttgctcacacatacttggaggctttggactaacagaacagcattagacctcgtggatccacttatagcaaataactgccagaatagcgaagtggttcgatgcatccatatcggtcttttatgtgttcaagaagatcctgcaaagcgtccgacaatatcaaccgttttcatgatgctcactagtaatactgtgaccttaccagtgcctcggcaaccagggtttttcattcaaagtagtcccgtaaaggacccgactgattcagatcagtctaccacgaccaagtctactccagcatctattgacgatgaattgatcactgatttatatccgcgctaa

SEQ ID NO: 27580 - protein, 1240 aa, Arabidopsis thaliana
  misc_feature (1)..(1240): Ceres Seq. ID no. 1821186
MVSDADASTSSSSIDIMPSANIQNDVPEPSVHTSHRRTRKPAYLQDYYCHSVASLTIHDISQFLSYEKVSPLYHSFLVCIAKAKEPSTYNEAKEFLVWCGAMDDEIGAMETTHTWEICTLPPNKKPIGCKWVYKIKYNSDGTIERYKARLVAKGYTQQEGIDFIETFSPVCKLTSVKLILAISAIYNFTLHQLDISNAFLNGDLDEEIYMKLPPGYAARQGDSLPPNAVCYLKKSIYGLKQASRQWFLKFSVTLIGFGFVQSHSDHTYFLKITATLFLCVLVYVDDIIICSNNDAAVDELKSQLKSCFKLRDLGPLKYFLGLEIARSAAGINICQRKYALDLLDETGLLGCKPSSVPMDPSVTFSAHSGGDFVDAKAYRRLIGRLMYLQITRLDISFAVNKLSQFSEAPRLAHQQAVMKILHYIKGTVGQGLFYSSQAEMQLQVFSDASFQSCKDTRRSTNGYCMFLGTSLISWKSKKQQVVSKSSAEAEYRALSFATDEMMWLAQFFRELQLPLSKPTLLFCDNTAAIHIATNAVFHERTKHIESDCHSVRERSVYQATLSYSFQAYDEQDGFTEYLSPILRGTIMYIVSMFGLAGLEALICFIFLFLFSFLTSFKASAQNPFYLNHDCPNRTTYSSNSTYSTNLKTLLSSFASRNASYSTGFQNIRAGQTPDRVTGLFLCRGDLSPEVCSNCVAFSVNESLTRCPNQREAVFYYEECILRYSHKNFLSTVTYEGELIMRNPNNISSIQNQRDQFIDLVQSNMNQAANEAANSSRKFSTIKTELTSLQTLYGLVQCTPDLARQDCFSCLTSSINRMMPLFRIGARQFWPSCNSRYELYAFYNETAIGTPSPPPLFPGSTPPLTSPSIPALVGYCFLAQRTKKTFDTASASEVGDDMATADSLQLDYRTIQTATNDFAESNKIGRGGFGEVYKGTFSNGKEVAVKRLSKNSRQGEAEFKTEVVVVAKLQHRNLVRLLGFSLQGEERILVYEYMPNKSLDCLLFDPTKQTQLDWMQRYNIIGGIARGILYLHQDSRLTIIHRDLKASNILLDADINPKIADFGMARIFGLDQTQDNTSRIVGTYGYMAPEYAMHGQFSMKSDVYSFGVLVLEIISGRKNSSFDESDGAQDLLTHTWRLWTNRTALDLVDPLIANNCQNSEVVRCIHIGLLCVQEDPAKRPTISTVFMMLTSNTVTLPVPRQPGFFIQSSPVKDPTDSDQSTTTKSTPASIDDELITDLYPR

SEQ ID NO: 27581 - protein, 1224 aa, Arabidopsis thaliana
  misc_feature (1)..(1224): Ceres Seq. ID no. 1821187
MPSANIQNDVPEPSVHTSHRRTRKPAYLQDYYCHSVASLTIHDISQFLSYEKVSPLYHSFLVCIAKAKEPSTYNEAKEFLVWCGAMDDEIGAMETTHTWEICTLPPNKKPIGCKWVYKIKYNSDGTIERYKARLVAKGYTQQEGIDFIETFSPVCKLTSVKLILAISAIYNFTLHQLDISNAFLNGDLDEEIYMKLPPGYAARQGDSLPPNAVCYLKKSIYGLKQASRQWFLKFSVTLIGFGFVQSHSDHTYFLKITATLFLCVLVYVDDIIICSNNDAAVDELKSQLKSCFKLRDLGPLKYFLGLEIARSAAGINICQRKYALDLLDETGLLGCKPSSVPMDPSVTFSAHSGGDFVDAKAYRRLIGRLMYLQITRLDISFAVNKLSQFSEAPRLAHQQAVMKILHYIKGTVGQGLFYSSQAEMQLQVFSDASFQSCKDTRRSTNGYCMFLGTSLISWKSKKQQVVSKSSAEAEYRALSFATDEMMWLAQFFRELQLPLSKPTLLFCDNTAAIHIATNAVFHERTKHIESDCHSVRERSVYQATLSYSFQAYDEQDGFTEYLSPILRGTIMYIVSMFGLAGLEALICFIFLFLFSFLTSFKASAQNPFYLNHDCPNRTTYSSNSTYSTNLKTLLSSFASRNASYSTGFQNIRAGQTPDRVTGLFLCRGDLSPEVCSNCVAFSVNESLTRCPNQREAVFYYEECILRYSHKNFLSTVTYEGELIMRNPNNISSIQNQRDQFIDLVQSNMNQAANEAANSSRKFSTIKTELTSLQTLYGLVQCTPDLARQDCFSCLTSSINRMMPLFRIGARQFWPSCNSRYELYAFYNETAIGTPSPPPLFPGSTPPLTSPSIPALVGYCFLAQRTKKTFDTASASEVGDDMATADSLQLDYRTIQTATNDFAESNKIGRGGFGEVYKGTFSNGKEVAVKRLSKNSRQGEAEFKTEVVVVAKLQHRNLVRLLGFSLQGEERILVYEYMPNKSLDCLLFDPTKQTQLDWMQRYNIIGGIARGILYLHQDSRLTIIHRDLKASNILLDADINPKIADFGMARIFGLDQTQDNTSRIVGTYGYMAPEYAMHGQFSMKSDVYSFGVLVLEIISGRKNSSFDESDGAQDLLTHTWRLWTNRTALDLVDPLIANNCQNSEVVRCIHIGLLCVQEDPAKRPTISTVFMMLTSNTVTLPVPRQPGFFIQSSPVKDPTDSDQSTTTKSTPASIDDELITDLYPR

SEQ ID NO: 27582 - protein, 1139 aa, Arabidopsis thaliana
  misc_feature (1)..(1139): Ceres Seq. ID no. 1821188
MDDEIGAMETTHTWEICTLPPNKKPIGCKWVYKIKYNSDGTIERYKARLVAKGYTQQEGIDFIETFSPVCKLTSVKLILAISAIYNFTLHQLDISNAFLNGDLDEEIYMKLPPGYAARQGDSLPPNAVCYLKKSIYGLKQASRQWFLKFSVTLIGFGFVQSHSDHTYFLKITATLFLCVLVYVDDIIICSNNDAAVDELKSQLKSCFKLRDLGPLKYFLGLEIARSAAGINICQRKYALDLLDETGLLGCKPSSVPMDPSVTFSAHSGGDFVDAKAYRRLIGRLMYLQITRLDISFAVNKLSQFSEAPRLAHQQAVMKILHYIKGTVGQGLFYSSQAEMQLQVFSDASFQSCKDTRRSTNGYCMFLGTSLISWKSKKQQVVSKSSAEAEYRALSFATDEMMWLAQFFRELQLPLSKPTLLFCDNTAAIHIATNAVFHERTKHIESDCHSVRERSVYQATLSYSFQAYDEQDGFTEYLSPILRGTIMYIVSMFGLAGLEALICFIFLFLFSFLTSFKASAQNPFYLNHDCPNRTTYSSNSTYSTNLKTLLSSFASRNASYSTGFQNIRAGQTPDRVTGLFLCRGDLSPEVCSNCVAFSVNESLTRCPNQREAVFYYEECILRYSHKNFLSTVTYEGELIMRNPNNISSIQNQRDQFIDLVQSNMNQAANEAANSSRKFSTIKTELTSLQTLYGLVQCTPDLARQDCFSCLTSSINRMMPLFRIGARQFWPSCNSRYELYAFYNETAIGTPSPPPLFPGSTPPLTSPSIPALVGYCFLAQRTKKTFDTASASEVGDDMATADSLQLDYRTIQTATNDFAESNKIGRGGFGEVYKGTFSNGKEVAVKRLSKNSRQGEAEFKTEVVVVAKLQHRNLVRLLGFSLQGEERILVYEYMPNKSLDCLLFDPTKQTQLDWMQRYNIIGGIARGILYLHQDSRLTIIHRDLKASNILLDADINPKIADFGMARIFGLDQTQDNTSRIVGTYGYMAPEYAMHGQFSMKSDVYSFGVLVLEIISGRKNSSFDESDGAQDLLTHTWRLWTNRTALDLVDPLIANNCQNSEVVRCIHIGLLCVQEDPAKRPTISTVFMMLTSNTVTLPVPRQPGFFIQSSPVKDPTDSDQSTTTKSTPASIDDELITDLYPR

SEQ ID NO: 27583 - DNA, 3438 bp, Arabidopsis thaliana
  misc_feature (1)..(3438): Ceres Seq. ID no. 1821282
atgatccccaacggagaattgagattacctgctctcaaggtccgtgaagaccgcgtgtcaccctcagctcctattccggtcaccagaaccctagtggctgatactgacgtcacttccgatgacgatatgagtacaaattccgaggatgtctctctcgattcgtctcccgagaacagtagagtgtccagtgccgttggtcgcagctacgggagaaattcttcttattatacttactccgaggtgagctcatcaagagagactttggtcggtgcgcgcgaacagacgggacctagatttgatggtgatacggaggaagatgaatccaccgattcagcttctagcacgcaattttctccgccgccggcagctgggaggattaacgacggcgtatctcaggagtttgatgagacgttttcttctgaagaagtaagcgatattcccagtgcccctccattttccggggcagcagaggaatctgaagaaattaaaccagcaacttcaagcgttcaagtttcagaagtcaaaacaggagattgtgtagaaagtagaaagactggccactttactagacctagtgcagcttctgagtcatctgggccacctgatcaacatccagctcggcttcctacttttcatgcaagttctcgtgggccatggcatgctgtggtttcctatgatgcatgtgtacgactttgtctgcatgcgtggtcaaccggttgcatggaggctcccatgtttttggaaaatgagtgtgctcttctacgagaagcatttgggttgcagcaactccttttgcaatcagaggaagagcttctggcaaagcgatcttcacaagctccgcacgaaggagttgcaccaaaacccaagaaaaacattggcaaaatgaaggtgcaagtacgacgtgttaaaacagttatggatggtccaaccggctgtagtatatcatctttgaaaccatcgttgataaagtttgagaaaatccggattcacttttccaatatgtcaacacgcttattttctggatggcgggctctaaggaagatccatgtccgtgtaccagccaatggttcttctcttcctcgtcaaagtctggcatatgttcatgccagtacacagtacttaaaacaagtttctggtctcctgaaaaccggtgtcacaagtctacgtaataattcaacatcttatgatattgtacaagaaacatactcgtgtaagttaagattgaaaagcttagctgaagataacgccattatgatgcaacccggatctggtgaaagccatgttttctttcctgatagtcatggagatgatctgattgttgagatcctggatccaatggggaaggattttgggcgtgtacttgtgcaactagctaatatttctgaagattcgtacgtttcaagtgattctaatgaagaaaccatacaggctgagaaacttcgctggtggtctgtttttcgtgagccagaacatcaacatgtgggaaaactccagctctatattgactattcagcaagttttgatgataacagccatttgaagtgtgcttctgttgcggaaacagtcgcatatgacctagtcctggaagtggccttgaaaatgcagcgatttcagcaaagaaacttgttgttatatggttcatggaaatggcttttggaagaatttgccacctactatgggatttcagatgtctacaccaagctcagatacttgtcctatgtaatggatgtcgctacaccgacttccgactgtctccatttggtacatgacttgttaacacctgtcatcatgaagggaaatggcaagagcgccttgagtcatcaagagaatcggatcttgaatgaaatcaaggaccagatcgagcagattctaaaactggtctttgagaattacaaatctcttgacgagtcgtcattttctggaatgattgatgtggtcaattctgcgtcaggtgttccagcgccagcactcattcctgctgtgaaattgtacacgcttctgcacgatgtcttatcacccgaggatcagactcatctttgtcattatttccaggcagcagcaaagaagagatctagaaggcacatgggtgagacagatgagtttgttgcaaacaacagcgagcccaatttttgggatatgtctgcaatgtcggctgcataccagaaaatgacaatggcctgcaagaatgtaaagaatgagatctatactgatattgagatccaaaatgaagatatacttcccagctttcttgaccttccaaacctgtcagcgtctatatatagcactgatctctgtaatagacttcgagcatttctcgttgcttgtccgccctctggcccttcaccaacagttgcagagctcgtgattgcaactgcagactttcaacgtgatctttccagctggaacattagtcctatccaaggcggtgttgatgcaaaagagttgtttcatctatatatcatgatttggattcaagataaacgcctttcattacttgagtcctgcaaacttgataaggtaaaatggtctggagtcaggacacagcattcaacaactccattcgttgatgaaatgtacaagaggctgaacgaaaccattcaagactatcaagttatcatttccagatggccagaatatatctttgttctggagagtgccattgctgatgttgaaaaggcaacagtggaagctctggagaagcagtatgcagatgtcttatcacctctcaaagaaaacttggctccaaaaaaactaagcttcaagtatgtccaaaaactgaccaaaagatctgtgattccatatgtagtcccggatgagctgggcattctattaaactccatgaagaggatgcttgatgttctacggcctaatatagaggctaaatttaaagcatggtcttcatgcattcctgatggtgggaatgcagctcctggtgatcgtctttctgaggtgacagtgatgctcagagccaagtttcgtagttaccttcaggctgtggtcgaaaaacttgtagaaaatagcaagctacaaaaaacgacaatgttgaagaagattcttcaggactctaaagaaagtgttggagaatcagacatcagaagcaaaatgaataacctcaaggagcagctcaccaacacagtgaatcatctacactcggtttgtgagacgcatgtcttcatcgcattgtctagaggatattgggatcgtatgggacagattgttttaagctttttggagaacaggaaagagaacagagcttggtacaagggttctagagttgctgtctcgatattagacgatacatttgcagcacagatgcaacagctgcttggcaactcgctaagagagcaagacctggagcctccgagatcgatcatggaggtccggtcgattctttgcaaggaccctgcagataataaagccaaatcgttctactactga

SEQ ID NO: 27584 - protein, 1145 aa, Arabidopsis thaliana
  misc_feature (1)..(1145): Ceres Seq. ID no. 1821283
MIPNGELRLPALKVREDRVSPSAPIPVTRTLVADTDVTSDDDMSTNSEDVSLDSSPENSRVSSAVGRSYGRNSSYYTYSEVSSSRETLVGAREQTGPRFDGDTEEDESTDSASSTQFSPPPAAGRINDGVSQEFDETFSSEEVSDIPSAPPFSGAAEESEEIKPATSSVQVSEVKTGDCVESRKTGHFTRPSAASESSGPPDQHPARLPTFHASSRGPWHAVVSYDACVRLCLHAWSTGCMEAPMFLENECALLREAFGLQQLLLQSEEELLAKRSSQAPHEGVAPKPKKNIGKMKVQVRRVKTVMDGPTGCSISSLKPSLIKFEKIRIHFSNMSTRLFSGWRALRKIHVRVPANGSSLPRQSLAYVHASTQYLKQVSGLLKTGVTSLRNNSTSYDIVQETYSCKLRLKSLAEDNAIMMQPGSGESHVFFPDSHGDDLIVEILDPMGKDFGRVLVQLANISEDSYVSSDSNEETIQAEKLRWWSVFREPEHQHVGKLQLYIDYSASFDDNSHLKCASVAETVAYDLVLEVALKMQRFQQRNLLLYGSWKWLLEEFATYYGISDVYTKLRYLSYVMDVATPTSDCLHLVHDLLTPVIMKGNGKSALSHQENRILNEIKDQIEQILKLVFENYKSLDESSFSGMIDVVNSASGVPAPALIPAVKLYTLLHDVLSPEDQTHLCHYFQAAAKKRSRRHMGETDEFVANNSEPNFWDMSAMSAAYQKMTMACKNVKNEIYTDIEIQNEDILPSFLDLPNLSASIYSTDLCNRLRAFLVACPPSGPSPTVAELVIATADFQRDLSSWNISPIQGGVDAKELFHLYIMIWIQDKRLSLLESCKLDKVKWSGVRTQHSTTPFVDEMYKRLNETIQDYQVIISRWPEYIFVLESAIADVEKATVEALEKQYADVLSPLKENLAPKKLSFKYVQKLTKRSVIPYVVPDELGILLNSMKRMLDVLRPNIEAKFKAWSSCIPDGGNAAPGDRLSEVTVMLRAKFRSYLQAVVEKLVENSKLQKTTMLKKILQDSKESVGESDIRSKMNNLKEQLTNTVNHLHSVCETHVFIALSRGYWDRMGQIVLSFLENRKENRAWYKGSRVAVSILDDTFAAQMQQLLGNSLREQDLEPPRSIMEVRSILCKDPADNKAKSFYY

SEQ ID NO: 27585 - protein, 1103 aa, Arabidopsis thaliana
  misc_feature (1)..(1103): Ceres Seq. ID no. 1821284
MSTNSEDVSLDSSPENSRVSSAVGRSYGRNSSYYTYSEVSSSRETLVGAREQTGPRFDGDTEEDESTDSASSTQFSPPPAAGRINDGVSQEFDETFSSEEVSDIPSAPPFSGAAEESEEIKPATSSVQVSEVKTGDCVESRKTGHFTRPSAASESSGPPDQHPARLPTFHASSRGPWHAVVSYDACVRLCLHAWSTGCMEAPMFLENECALLREAFGLQQLLLQSEEELLAKRSSQAPHEGVAPKPKKNIGKMKVQVRRVKTVMDGPTGCSISSLKPSLIKFEKIRIHFSNMSTRLFSGWRALRKIHVRVPANGSSLPRQSLAYVHASTQYLKQVSGLLKTGVTSLRNNSTSYDIVQETYSCKLRLKSLAEDNAIMMQPGSGESHVFFPDSHGDDLIVEILDPMGKDFGRVLVQLANISEDSYVSSDSNEETIQAEKLRWWSVFREPEHQHVGKLQLYIDYSASFDDNSHLKCASVAETVAYDLVLEVALKMQRFQQRNLLLYGSWKWLLEEFATYYGISDVYTKLRYLSYVMDVATPTSDCLHLVHDLLTPVIMKGNGKSALSHQENRILNEIKDQIEQILKLVFENYKSLDESSFSGMIDVVNSASGVPAPALIPAVKLYTLLHDVLSPEDQTHLCHYFQAAAKKRSRRHMGETDEFVANNSEPNFWDMSAMSAAYQKMTMACKNVKNEIYTDIEIQNEDILPSFLDLPNLSASIYSTDLCNRLRAFLVACPPSGPSPTVAELVIATADFQRDLSSWNISPIQGGVDAKELFHLYIMIWIQDKRLSLLESCKLDKVKWSGVRTQHSTTPFVDEMYKRLNETIQDYQVIISRWPEYIFVLESAIADVEKATVEALEKQYADVLSPLKENLAPKKLSFKYVQKLTKRSVIPYVVPDELGILLNSMKRMLDVLRPNIEAKFKAWSSCIPDGGNAAPGDRLSEVTVMLRAKFRSYLQAVVEKLVENSKLQKTTMLKKILQDSKESVGESDIRSKMNNLKEQLTNTVNHLHSVCETHVFIALSRGYWDRMGQIVLSFLENRKENRAWYKGSRVAVSILDDTFAAQMQQLLGNSLREQDLEPPRSIMEVRSILCKDPADNKAKSFYY

SEQ ID NO: 27586 - protein, 905 aa, Arabidopsis thaliana
  misc_feature (1)..(905): Ceres Seq. ID no. 1821285
MEAPMFLENECALLREAFGLQQLLLQSEEELLAKRSSQAPHEGVAPKPKKNIGKMKVQVRRVKTVMDGPTGCSISSLKPSLIKFEKIRIHFSNMSTRLFSGWRALRKIHVRVPANGSSLPRQSLAYVHASTQYLKQVSGLLKTGVTSLRNNSTSYDIVQETYSCKLRLKSLAEDNAIMMQPGSGESHVFFPDSHGDDLIVEILDPMGKDFGRVLVQLANISEDSYVSSDSNEETIQAEKLRWWSVFREPEHQHVGKLQLYIDYSASFDDNSHLKCASVAETVAYDLVLEVALKMQRFQQRNLLLYGSWKWLLEEFATYYGISDVYTKLRYLSYVMDVATPTSDCLHLVHDLLTPVIMKGNGKSALSHQENRILNEIKDQIEQILKLVFENYKSLDESSFSGMIDVVNSASGVPAPALIPAVKLYTLLHDVLSPEDQTHLCHYFQAAAKKRSRRHMGETDEFVANNSEPNFWDMSAMSAAYQKMTMACKNVKNEIYTDIEIQNEDILPSFLDLPNLSASIYSTDLCNRLRAFLVACPPSGPSPTVAELVIATADFQRDLSSWNISPIQGGVDAKELFHLYIMIWIQDKRLSLLESCKLDKVKWSGVRTQHSTTPFVDEMYKRLNETIQDYQVIISRWPEYIFVLESAIADVEKATVEALEKQYADVLSPLKENLAPKKLSFKYVQKLTKRSVIPYVVPDELGILLNSMKRMLDVLRPNIEAKFKAWSSCIPDGGNAAPGDRLSEVTVMLRAKFRSYLQAVVEKLVENSKLQKTTMLKKILQDSKESVGESDIRSKMNNLKEQLTNTVNHLHSVCETHVFIALSRGYWDRMGQIVLSFLENRKENRAWYKGSRVAVSILDDTFAAQMQQLLGNSLREQDLEPPRSIMEVRSILCKDPADNKAKSFYY

SEQ ID NO: 27587 - DNA, 1203 bp, Arabidopsis thaliana
  misc_feature (1)..(1203): Ceres Seq. ID no. 1821317
atggaggtctcttaccaaaaccccattgaagcagcgactattccagtgcaaatagccgtcgctgagccagtcgctacacccaatcctcctccttgcctccacgagaacaaattcctcgtatctgtggaggtctgcttaaagccttcaagcacggctcgtctagaggatgtccagagagctgtagaacggtttgtatcacattttctcatctattataatggactggttttgattcctgcagacgacttgttcctagttgataatgtgcaaaggatatgcatttgtgatacagatggacaacctgctagctttaacgaatggattctacccgcaaaggagtttgatggcttatgggaaagcctaatatatgaatctggacttaagcaaaggttactacgttatgctgcgagtgcattgctgttcacccagaagggtgttaacccaaatctcgtttcatggaacaggattattcttttgcacggaccaccagggactggcaaaacatccctttgcaaagcgttggctcaaaagctttcaatccggtgcaactccagatatccacattgccaattgattgaagtcaatgctcactctctatttagtaaatggttctctgaaagtggcaagctggttgccaagcttttccaaaaaatccaagagatggtggaggaagatggaaatctggtatttgttttgatcgatgaagtagaaagtcttgctgctgctcgaaaagctgcattgtctggctcagaaccgtcagattctatccgggttgtgaatgcactactcacccaaatggacaaattgaaatcagcaccgaatgtgataatccttacaacatcaaacataactactgctattgatgttgctttcgtggatcgagctgacataaaagcttatgttggccctccaactcttcatgttcgttatgaaatattaaggtcttgtgttgaggaattaataagtaaagggatcatatcaagtttccagtcagtgaaaataaaactgagaatactcttaaaaaaagcaagtatgaattgggatcaacttcttgatgtacagggtttaagtgggagatcattgaggaagcttccgtttttagcgcacgcagcacttgcagatccatatagccatgatccaagtaatttcttgtgtacaatgatagaaacagctaagagagagaagtctgaacaacctgaatga

SEQ ID NO: 27588 - protein, 400 aa, Arabidopsis thaliana
  misc_feature (1)..(400): Ceres Seq. ID no. 1821318
MEVSYQNPIEAATIPVQIAVAEPVATPNPPPCLHENKFLVSVEVCLKPSSTARLEDVQRAVERFVSHFLIYYNGLVLIPADDLFLVDNVQRICICDTDGQPASFNEWILPAKEFDGLWESLIYESGLKQRLLRYAASALLFTQKGVNPNLVSWNRIILLHGPPGTGKTSLCKALAQKLSIRCNSRYPHCQLIEVNAHSLFSKWFSESGKLVAKLFQKIQEMVEEDGNLVFVLIDEVESLAAARKAALSGSEPSDSIRVVNALLTQMDKLKSAPNVIILTTSNITTAIDVAFVDRADIKAYVGPPTLHVRYEILRSCVEELISKGIISSFQSVKIKLRILLKKASMNWDQLLDVQGLSGRSLRKLPFLAHAALADPYSHDPSNFLCTMIETAKREKSEQPE

SEQ ID NO: 27589 - DNA, 2487 bp, Arabidopsis thaliana
  misc_feature (1)..(2487): Ceres Seq. ID no. 1821391
atgggttgtacaagttctaagcttgacgatcttccggcggttgctctttgccgtgaacgctgtgctttcttagaagctgctattcatcaacgttacgctttagctgaatcacacgtggcttacactcattcgcttcgagaaatcggtcactctctccatcttttcatcaatcaccaccaccgtttcgtcgcttccggcggcgctaacgtcggtgattctcctcgacttaatcttcctcctcagagaaaaggtgaccttgacgacgaagcaacaaattccccaaaaaaacaaaagcttgcttcttctcaccacaaccacaaccacgctcactcgggttccggttctgattcgggtcatctcgaattcgattcagattccgacgaagatgaagaagacgacgacgacttggatttggattcgttgcatcaccactctcctccccaccaccatctcggcaatttccctattcccgaatcagcaccaatgggcggatacatggaacaacaaccgggttatataaacccgtacccgaatccagatatgatggggcatccttactctggaggaggaagttatatgcacatgaattacatgaagaacaaatccatgcctccttcagttgtctatgagcaaagaccaactagtcctcaacgagtctacataggcgaatcatcatcttcatatccatatcctcctcaaaattcatattttggatactcaaatccagtacccggacccggaccaggatactacggttcttcttctgcttctacaactgctgcagcaacaaaaccgccaccacctccaccgtcgccgcctaggtctaacggttgggattttttgaatccctttgatacttattatcctccgtatactccgagtcgagattcgagagagttaagagaagaagaaggtataccggatttagaagacgatgattcacattacgaagttgttaaagaagtttacggcaaaccaaaattcgccgccggtggtggtcaccaaccaaatcccgccgccgtacacatgatgagggaagagtccccgtctccgccgcttgataaatccggtgctagtactagcggtggaggtgatgtcggagatgcatctgcgtatcagtctagaccaagtgtgtcggtggagaaagaagggatggagtatgaagttcacgttgttgagaagaaggttgttgaagatgaggaacggcggagtaatgccacggcgacacgtggtggtggtggaggaggagggccacgtgcggtgcctgaagttgcgaaagagattgagaatcaattcgtgaaagctgcagagtcaggaagtgagattgctaagttacttgaagttgggaagcatccttatggtcgtaaacatggaacttcttcgtctgctgctgctgctgttgtgccacctacttatgcagatattgaagaagagcttgcttcgaggtcgaggaatctttcttcgacgttgcacaagctccatctttgggagaagaagctttatcatgaagtcaaggccgaggagaaactgcgtctagctcacgagaaaaagcttaggaagctaaagcgtttggatcaaagaggtgccgaggctatcaaagtagataaaacgcggaaattagtgagagatatgtccacaaaaatacggattgcgattcaggttgtcgacaaaatatccgtgacgattaataagataagagacgaagacctgtggccgcaactgaatgcattgattcaagggcttacaagaatgtggaaaacaatgcttgaatgtcatcaaagtcaatgtcaagctattagggaagcacaaggtttaggcccgataagagcaagcaagaaactaggcgatgaacatctagaagcgacgagtttgcttggacatgaacttattaattggatattgggattctctagctgggttagtgcgcagaagggttatgtaaaagagttgaataaatggctcatgaaatgtcttctgtatgaacctgaggaaacacctgatgggatagttcccttttcacctggtaggattggggctccacctatctttgtcatctgtaaccaatggtctcaagctctggataggatatctgagaaggaagttattgaggcaatgcgtagtttcactacaagtgtgcttcagctttgggaacaagatcggttagatacgatgatgacggggcatggtgattcagagaagaaagtcaggaacatggacagagaagaacagaggatacagagagagattcaagcattggaaaagaaaatgattcttgtggcaccgggtgatggtaacagtctttcgatatccggcaacgttgtttaccaaagcgatactagcagcgatagtttacaaggtagtttgcaacggatttttgaagctatggagagattcactgctgaatcgatgagagcttatgaggatctcttagagcgcaccaatgaagaaactgcaccacgggaacttgaggaagaagaggaggagtaa

SEQ ID NO: 27590 - protein, 828 aa, Arabidopsis thaliana
  misc_feature (1)..(828): Ceres Seq. ID no. 1821392
MGCTSSKLDDLPAVALCRERCAFLEAAIHQRYALAESHVAYTHSLREIGHSLHLFINHHHRFVASGGANVGDSPRLNLPPQRKGDLDDEATNSPKKQKLASSHHNHNHAHSGSGSDSGHLEFDSDSDEDEEDDDDLDLDSLHHHSPPHHHLGNFPIPESAPMGGYMEQQPGYINPYPNPDMMGHPYSGGGSYMHMNYMKNKSMPPSVVYEQRPTSPQRVYIGESSSSYPYPPQNSYFGYSNPVPGPGPGYYGSSSASTTAAATKPPPPPPSPPRSNGWDFLNPFDTYYPPYTPSRDSRELREEEGIPDLEDDDSHYEVVKEVYGKPKFAAGGGHQPNPAAVHMMREESPSPPLDKSGASTSGGGDVGDASAYQSRPSVSVEKEGMEYEVHVVEKKVVEDEERRSNATATRGGGGGGGPRAVPEVAKEIENQFVKAAESGSEIAKLLEVGKHPYGRKHGTSSSAAAAVVPPTYADIEEELASRSRNLSSTLHKLHLWEKKLYHEVKAEEKLRLAHEKKLRKLKRLDQRGAEAIKVDKTRKLVRDMSTKIRIAIQVVDKISVTINKIRDEDLWPQLNALIQGLTRMWKTMLECHQSQCQAIREAQGLGPIRASKKLGDEHLEATSLLGHELINWILGFSSWVSAQKGYVKELNKWLMKCLLYEPEETPDGIVPFSPGRIGAPPIFVICNQWSQALDRISEKEVIEAMRSFTTSVLQLWEQDRLDTMMTGHGDSEKKVRNMDREEQRIQREIQALEKKMILVAPGDGNSLSISGNVVYQSDTSSDSLQGSLQRIFEAMERFTAESMRAYEDLLERTNEETAPRELEEEEEE

SEQ ID NO: 27591 - protein, 667 aa, Arabidopsis thaliana
  misc_feature (1)..(667): Ceres Seq. ID no. 1821393
MGGYMEQQPGYINPYPNPDMMGHPYSGGGSYMHMNYMKNKSMPPSVVYEQRPTSPQRVYIGESSSSYPYPPQNSYFGYSNPVPGPGPGYYGSSSASTTAAATKPPPPPPSPPRSNGWDFLNPFDTYYPPYTPSRDSRELREEEGIPDLEDDDSHYEVVKEVYGKPKFAAGGGHQPNPAAVHMMREESPSPPLDKSGASTSGGGDVGDASAYQSRPSVSVEKEGMEYEVHVVEKKVVEDEERRSNATATRGGGGGGGPRAVPEVAKEIENQFVKAAESGSEIAKLLEVGKHPYGRKHGTSSSAAAAVVPPTYADIEEELASRSRNLSSTLHKLHLWEKKLYHEVKAEEKLRLAHEKKLRKLKRLDQRGAEAIKVDKTRKLVRDMSTKIRIAIQVVDKISVTINKIRDEDLWPQLNALIQGLTRMWKTMLECHQSQCQAIREAQGLGPIRASKKLGDEHLEATSLLGHELINWILGFSSWVSAQKGYVKELNKWLMKCLLYEPEETPDGIVPFSPGRIGAPPIFVICNQWSQALDRISEKEVIEAMRSFTTSVLQLWEQDRLDTMMTGHGDSEKKVRNMDREEQRIQREIQALEKKMILVAPGDGNSLSISGNVVYQSDTSSDSLQGSLQRIFEAMERFTAESMRAYEDLLERTNEETAPRELEEEEEE

SEQ ID NO: 27592 - protein, 663 aa, Arabidopsis thaliana
  misc_feature (1)..(663): Ceres Seq. ID no. 1821394
MEQQPGYINPYPNPDMMGHPYSGGGSYMHMNYMKNKSMPPSVVYEQRPTSPQRVYIGESSSSYPYPPQNSYFGYSNPVPGPGPGYYGSSSASTTAAATKPPPPPPSPPRSNGWDFLNPFDTYYPPYTPSRDSRELREEEGIPDLEDDDSHYEVVKEVYGKPKFAAGGGHQPNPAAVHMMREESPSPPLDKSGASTSGGGDVGDASAYQSRPSVSVEKEGMEYEVHVVEKKVVEDEERRSNATATRGGGGGGGPRAVPEVAKEIENQFVKAAESGSEIAKLLEVGKHPYGRKHGTSSSAAAAVVPPTYADIEEELASRSRNLSSTLHKLHLWEKKLYHEVKAEEKLRLAHEKKLRKLKRLDQRGAEAIKVDKTRKLVRDMSTKIRIAIQVVDKISVTINKIRDEDLWPQLNALIQGLTRMWKTMLECHQSQCQAIREAQGLGPIRASKKLGDEHLEATSLLGHELINWILGFSSWVSAQKGYVKELNKWLMKCLLYEPEETPDGIVPFSPGRIGAPPIFVICNQWSQALDRISEKEVIEAMRSFTTSVLQLWEQDRLDTMMTGHGDSEKKVRNMDREEQRIQREIQALEKKMILVAPGDGNSLSISGNVVYQSDTSSDSLQGSLQRIFEAMERFTAESMRAYEDLLERTNEETAPRELEEEEEE

SEQ ID NO: 27593 - DNA, 3096 bp, Arabidopsis thaliana
  misc_feature (1)..(3096): Ceres Seq. ID no. 1821395
atggaaggtggtcgtggtggtggagatggcaatttcttaccaaactctaactttggtgtattctctgactccgctatggatatggatttcatggatgaactcttgtttgatggatgttggcttgagacaactgatggtaagagcttgaagcagaccatgggacaacaagtatccgattctactaccatgaatgacaacaacaacaactcgtacctttacggttatcaatatgctgagaacctttcacaagatcatatctccaacgaagaaacagggagaaagtttcctccaataccaccgggctttctcaagatcgaggatctctccaatcaagtaccttttgaccagtctgcagttatgagttctgcacaagcagagaagtttctccttgaagaatctgagggaggaagaagatattggattgctccaagaacaagccaaggtccttcttcatcagtgaaagagagattagtacaagctatagagggtcttaacgaggaggtgcaagataaagacttcctcatacagatatggctaccaattcaacaagaaggcaagaactttctcacaacttcggagcagccacacttcttcaacccgaaatactcgagtcttaaaagatatagagatgtttcagtggcttataatttcctggctgatgaggattctaaagagtctgttggtctccccggtcgtgtttttcttaagaaactacctgagtggacacctgatgtgcggttctttagaagcgaagagtatccgcggatcaaagaagcagagcaatgtgatgttcgtggatcattagcccttcctgtgtttgaaagaggtagtggaacttgtttgggtgttgttgagattgttacaacaactcagaagatgaattacaggccagagcttgataatatctgtaaagctctcgagtctgttaatctaaggagttcaagaagcttgaatcccccaagcagagaggtgtgtaaaaatggtctcctaaatcaaacccttacttcatcaatacatagaaacaatgaattttggttgctaaatgtcatatgccctttttgtttcagtttctgcagagtatatgacctgcctctggctttaacgtgggcaccgtgtgctcggcaaggcaaagttggatcccgccattctgatgagaacttctctgagtgtgtttcaactgttgatgatgcttgcattgtccctgaccatcagagtcgtcattttctagaggcatgttctgaacaccatctgcttcaaggggaaggcattgtaggaaaagcattcaacgcaaccaaactgtttttcgtgcccgaagtaaccacttttagcaagaccaactaccctcttgcacaccatgctaagatctctggtctacatgctgctttagcagtcccattgaaaaacaaattcaatagttcggttgagtttgtgttggagtttttctttccaaaagcttgccttgacaccgaagcacaacaagatatgctcaagtctctgtctgcgacccttcagcaggatttcaggagcttaaatcttttcattgataaagagcttgagctagaagttgtatttcccgttagagaggaagttgtttttgcagagaacccacttatcaacgcaggaaccggagaggatatgaaaccattgcctttggaagaaatttctcaggaagattcttcatggatctcacacatgataaaggcaaatgagaaaggtaaaggcgtgtcactttcttgggagtaccaaaaagaagagccaaaagaagagtttatgcttacatctggatgggataacaatcagattggatcaggccacaataactttctttcagaagctgagcagtttcaaaaggtgacaaattcaggactcagaatcgacatggatccaagttttgaatcagcttcctttggtgttgggcagacattactaggcagtagaagaccaggtgagaagagaagaacaaaaacagaaaagacaattggtttagaagttcttcgacaatactttgcaggaagcctcaaagatgcagccaagagcattggtgaaagtgatgattcattcacgcagtttcattttcatgttgcagtttgtccaactaccttgaaaagaatatgcagacaacacgggataacacgatggccttcccggaagatcaagaaagtggggcattcattaaagaaactccaacttgttatagactctgttcaaggtgttcaaggttctattcaacttgattcattctatacaagtttcccagaattaagctccccacatatgtctggtactggcacttccttcaagaatccaaatgctcaaacggagaacggtgtttcagcacagggaactgctgcagctccaaagtcaccaccatcatcttcttgtagccacagctctggttcaagcacctgttgttcaactggagctaatcaaagtaccaatactgggactacctcaaatactgtaaccactctgatggctgaaaatgctagcgcgatcttgaagagagctcgtagcgaagtgagacttcataccatgaatcaggatgaaacaaagtccctctctagaaccctgagccacaaaacattcagtgagcatcctcttttcgaaaatccacctcggttaccggagaatagtagcaggaagttgaaagctggaggggcctcaaaagtgaaagccacatttggtgaagccaaacatgagattgctaggcgttttaacatagataatattgcaccctttgatcttaagtacctggatgatgacaaggaatgggttcttctgacatgtgaagcggatctcgaggaatgtatcgacatttatagatcatcacagagccgcacgatcaagataagtgttcatgaagcttctcaagtcaagctgggaggaatatgtgttcaagagagagaaccacctagtggagtgatcttccaagttcctaaccagagtatctctgttaaatcctcaaatcagtatttgttaaagaaacaagtaagcctgcagacaaaaggttctcgttttggtttgtttttgtttctttctgattcagtgagtgacacaaaggaagatattgatcctgaacctatcattgccacctaa

SEQ ID NO: 27594 - protein, 1031 aa, Arabidopsis thaliana
  misc_feature (1)..(1031): Ceres Seq. ID no. 1821396
MEGGRGGGDGNFLPNSNFGVFSDSAMDMDFMDELLFDGCWLETTDGKSLKQTMGQQVSDSTTMNDNNNNSYLYGYQYAENLSQDHISNEETGRKFPPIPPGFLKIEDLSNQVPFDQSAVMSSAQAEKFLLEESEGGRRYWIAPRTSQGPSSSVKERLVQAIEGLNEEVQDKDFLIQIWLPIQQEGKNFLTTSEQPHFFNPKYSSLKRYRDVSVAYNFLADEDSKESVGLPGRVFLKKLPEWTPDVRFFRSEEYPRIKEAEQCDVRGSLALPVFERGSGTCLGVVEIVTTTQKMNYRPELDNICKALESVNLRSSRSLNPPSREVCKNGLLNQTLTSSIHRNNEFWLLNVICPFCFSFCRVYDLPLALTWAPCARQGKVGSRHSDENFSECVSTVDDACIVPDHQSRHFLEACSEHHLLQGEGIVGKAFNATKLFFVPEVTTFSKTNYPLAHHAKISGLHAALAVPLKNKFNSSVEFVLEFFFPKACLDTEAQQDMLKSLSATLQQDFRSLNLFIDKELELEVVFPVREEVVFAENPLINAGTGEDMKPLPLEEISQEDSSWISHMIKANEKGKGVSLSWEYQKEEPKEEFMLTSGWDNNQIGSGHNNFLSEAEQFQKVTNSGLRIDMDPSFESASFGVGQTLLGSRRPGEKRRTKTEKTIGLEVLRQYFAGSLKDAAKSIGESDDSFTQFHFHVAVCPTTLKRICRQHGITRWPSRKIKKVGHSLKKLQLVIDSVQGVQGSIQLDSFYTSFPELSSPHMSGTGTSFKNPNAQTENGVSAQGTAAAPKSPPSSSCSHSSGSSTCCSTGANQSTNTGTTSNTVTTLMAENASAILKRARSEVRLHTMNQDETKSLSRTLSHKTFSEHPLFENPPRLPENSSRKLKAGGASKVKATFGEAKHEIARRFNIDNIAPFDLKYLDDDKEWVLLTCEADLEECIDIYRSSQSRTIKISVHEASQVKLGGICVQEREPPSGVIFQVPNQSISVKSSNQYLLKKQVSLQTKGSRFGLFLFLSDSVSDTKEDIDPEPIIAT

SEQ ID NO: 27595 - protein, 1006 aa, Arabidopsis thaliana
  misc_feature (1)..(1006): Ceres Seq. ID no. 1821397
MDMDFMDELLFDGCWLETTDGKSLKQTMGQQVSDSTTMNDNNNNSYLYGYQYAENLSQDHISNEETGRKFPPIPPGFLKIEDLSNQVPFDQSAVMSSAQAEKFLLEESEGGRRYWIAPRTSQGPSSSVKERLVQAIEGLNEEVQDKDFLIQIWLPIQQEGKNFLTTSEQPHFFNPKYSSLKRYRDVSVAYNFLADEDSKESVGLPGRVFLKKLPEWTPDVRFFRSEEYPRIKEAEQCDVRGSLALPVFERGSGTCLGVVEIVTTTQKMNYRPELDNICKALESVNLRSSRSLNPPSREVCKNGLLNQTLTSSIHRNNEFWLLNVICPFCFSFCRVYDLPLALTWAPCARQGKVGSRHSDENFSECVSTVDDACIVPDHQSRHFLEACSEHHLLQGEGIVGKAFNATKLFFVPEVTTFSKTNYPLAHHAKISGLHAALAVPLKNKFNSSVEFVLEFFFPKACLDTEAQQDMLKSLSATLQQDFRSLNLFIDKELELEVVFPVREEVVFAENPLINAGTGEDMKPLPLEEISQEDSSWISHMIKANEKGKGVSLSWEYQKEEPKEEFMLTSGWDNNQIGSGHNNFLSEAEQFQKVTNSGLRIDMDPSFESASFGVGQTLLGSRRPGEKRRTKTEKTIGLEVLRQYFAGSLKDAAKSIGESDDSFTQFHFHVAVCPTTLKRICRQHGITRWPSRKIKKVGHSLKKLQLVIDSVQGVQGSIQLDSFYTSFPELSSPHMSGTGTSFKNPNAQTENGVSAQGTAAAPKSPPSSSCSHSSGSSTCCSTGANQSTNTGTTSNTVTTLMAENASAILKRARSEVRLHTMNQDETKSLSRTLSHKTFSEHPLFENPPRLPENSSRKLKAGGASKVKATFGEAKHEIARRFNIDNIAPFDLKYLDDDKEWVLLTCEADLEECIDIYRSSQSRTIKISVHEASQVKLGGICVQEREPPSGVIFQVPNQSISVKSSNQYLLKKQVSLQTKGSRFGLFLFLSDSVSDTKEDIDPEPIIAT

SEQ ID NO: 27596 - protein, 1004 aa, Arabidopsis thaliana
  misc_feature (1)..(1004): Ceres Seq. ID no. 1821398
MDFMDELLFDGCWLETTDGKSLKQTMGQQVSDSTTMNDNNNNSYLYGYQYAENLSQDHISNEETGRKFPPIPPGFLKIEDLSNQVPFDQSAVMSSAQAEKFLLEESEGGRRYWIAPRTSQGPSSSVKERLVQAIEGLNEEVQDKDFLIQIWLPIQQEGKNFLTTSEQPHFFNPKYSSLKRYRDVSVAYNFLADEDSKESVGLPGRVFLKKLPEWTPDVRFFRSEEYPRIKEAEQCDVRGSLALPVFERGSGTCLGVVEIVTTTQKMNYRPELDNICKALESVNLRSSRSLNPPSREVCKNGLLNQTLTSSIHRNNEFWLLNVICPFCFSFCRVYDLPLALTWAPCARQGKVGSRHSDENFSECVSTVDDACIVPDHQSRHFLEACSEHHLLQGEGIVGKAFNATKLFFVPEVTTFSKTNYPLAHHAKISGLHAALAVPLKNKFNSSVEFVLEFFFPKACLDTEAQQDMLKSLSATLQQDFRSLNLFIDKELELEVVFPVREEVVFAENPLINAGTGEDMKPLPLEEISQEDSSWISHMIKANEKGKGVSLSWEYQKEEPKEEFMLTSGWDNNQIGSGHNNFLSEAEQFQKVTNSGLRIDMDPSFESASFGVGQTLLGSRRPGEKRRTKTEKTIGLEVLRQYFAGSLKDAAKSIGESDDSFTQFHFHVAVCPTTLKRICRQHGITRWPSRKIKKVGHSLKKLQLVIDSVQGVQGSIQLDSFYTSFPELSSPHMSGTGTSFKNPNAQTENGVSAQGTAAAPKSPPSSSCSHSSGSSTCCSTGANQSTNTGTTSNTVTTLMAENASAILKRARSEVRLHTMNQDETKSLSRTLSHKTFSEHPLFENPPRLPENSSRKLKAGGASKVKATFGEAKHEIARRFNIDNIAPFDLKYLDDDKEWVLLTCEADLEECIDIYRSSQSRTIKISVHEASQVKLGGICVQEREPPSGVIFQVPNQSISVKSSNQYLLKKQVSLQTKGSRFGLFLFLSDSVSDTKEDIDPEPIIAT

SEQ ID NO: 27597 - DNA, 5136 bp, Arabidopsis thaliana
  misc_feature (1)..(5136): Ceres Seq. ID no. 1821423
atgtcaacgtcacaaaccctcggcggcgccacacgttgtggccggatcataggtccatcattagacaagatcataaaaaacgctgcgtggcgtaaacacacgtaccttgtctcttcatgtaaatccgttctcgacaagctcgaatctcttcccgacgacttccacgatccttcctccgtcgtctctggcctcgccgcatcagatgcagattccgttctccaaccttttctcttatctctcgaaacagcttattcaaaagtcgtcgagccttctctagattgcgcttttaaactcttctctctctcaatcctccgcggtgagatccaatcatcaaaacaagattcaatcctcttcaaactcgtcaacgccgtctccaaagtcggtgctatagccgaagaaccgattcaactcgctgttcttagagttcttctcgctgccgttagatctccatgtatcttgatccgtggtgattgcttgttacacgttgtcaagacttgttataatatttaccttggtggcttgagcggcacgacacagatctgtgctaaatctgtcttagctcagatgatgcttgtgatcttcacaagatctgaagaagattcgcttgatgtttctgtcaaaacgatttacgtcaacgagttattaactttcacggacaagagtgttaatgaaggaagctctgtttatttctgtcaagggtttgtgaatgaagtcatggctgcaggacaaggaagtcctcttcctcctcctgatgtgattcagattctgttgcaaaatcccgagactgaaaccgttatgactccggattcaccgtctttccgaggatacgtggcaaacggagaaggtgattctgagaccggtgacatgagtaaggtgagacaagacgcttttcttctgttcaagaacttgtgtaaattgtccatgaggttttcgtccaaggagaacaatgatgatcagatcatggtgagaggtaagactctgtctttggagttgcttaaagtcattattgacaatggtggttctgtttggcggactaatgaaagcttcatcaatgccgttaagcaatacttatgcttatcactactaaagaacagtgcggtatcaatcatgtcaatatttcaattgcaatgtgctatcttcatgagcttgttatcaaagcttagatcagtcttgaaagcagaaatcggcattttctttccgatgattgttcttcgcgtgcttgagaatgttcttcaacctagttacttgcagaagatgactgttctcaacttgctagacaaaatgtcgcaagatccgcagttgatggtcgatatctttgtgaactatgactgcgatgtggagtcttcaaacatacttgaaaggattgtcaacggtcttctcaaaactgctctaggaccacccaccggatcatcaacaacgttgtctccagcgcaagatagtacattcaggaatgattctgtcaagtgtttggttaacttagccaaggcaatgggaaattggatggaccagcagttgaaagtgaacgagacggtctggcctaagggctcacaagtttatgcttctatggacagtaatgcaagccagattagtgagttagaaggaactatatctgactgtgattcacagccagatactagtaatccagaagcttatgatgcttctatgcttgagcaacgaagggcttacaaaattgaattgcaggtccagtatttacaaaaaggtatctctctgttcaataggaagccgtcgaaaggtgtcgaatttctcataagtaccaagaaaataggtagctcccctgaggaagttgcttcgtttctgatgaagaccgcagggctaaatggaactgtgattggtgattatcttggtgaaagagatgaacttccactaaaagttatgcatgcatatgttgattcgtttaactttgaaaagaaggattttgtcgaagcaatacggttctttctacgtgggtttaggctaccaggagaagcacagaagattgatcgaatcatggagaagtttgcagaacattactggaaatgcaaccctggttcttttactagtgcagacactgcttatgttcttgcatactctgtgataatgctcaacacagatgcacacaacaacatggttaaggataagatgacgaaagctgacttcgtccgcaacaatagggggatagacgatggaaaggacttgcctgaagagtatttaggttctctatatgatcgagttgtgaaagaagaaatcaggatgaactcggacactttagccccacaaaacaaacaggtgaatggcttgaataaactgttgggcctagacggaattctcaatctggtttcttggatgcaaccagatgagaaacctcatggtgccaatggacgtcttataagggatattcaggaacagttccaagctaagccagagaaatcagagtcagtttatcatactgttacagatatttcgatcttgagattcatactagaggtctcttggggaccgatgcttgctgcattcagtgtcactattgaccagagtgatgatagactagcaacttctctttgcttacaaggcttcagatatgcggttcatgtcactgcagttatgggaatgcaaactcaaagagatgcttttgtaacttccatggccaagttcactaatcttcattgtgctgcagatatgaagcagaaaaatgttgatgctgttaaagcgataataacaatagccatagaagacggtaaccatctacatggttcttgggaacatattttaacttgtctttcacgcattgaacatttgcaactccttggagaagtatcaccatcagagaaacgttacgtccctacaaaaaaagctgaggtagatgacaagaaagctttagggtttccaaatttaaagaaacgtggatcttttcagaatccatctgttatggctgttgttaggggaggttcttatgatagtacttcacttgtgaaaagtgttcccaaactagttactccggagcagatcaaaagtttcattgcaaatttgaatctacttgatcaaattggcaattttgagttgaaccatgtctatgctaatagccaaaggttgaacagtgaagctatagtttcttttgttaaagcgctatgtaaagtctccatgtcagaacttcagtcaccaacagatcctcgtgtctttagcctcacgaaactagtcgaaacagcgcattataacatgaaccggatccgattagtttggtcccgcatatggaatgttctttctgatttcttcgtatcagttggcttgtcagagaatctctctgttgcaatatttgtcatggactcgcttcgtcagctttccatgaaattcttggagcgtgaggagctagcaaactaccatttccaacatgagtttcttcgaccattcgtcgttgttatgcagaaaagcagttccgcggagattagagagctaatagtccgatgtgtttctcaaatggttcttagtcgagttagtaatgtgaaatctggttggaaaaatgtcttcacagtttttacaactgcagcgcttgatgagaggaagaacattgtactgttagctttcgagacaatcgagaaaattgtgcgggatcattttcattgcataatcgagacagagataacggtatacgcagactgcattagatgtctcatcaccttcacaaacagcaagtttgaaggtgacattggcttcaacaccatagaatttcttcgtttctgcgctttaaagcttgaagaaggaggacttgtcttgaatgagaaactcaagaacaatactatctcagcgttaaaggaagatttttctgatacacagagttttactgaccttgatgaacaagtatcctattggattcctctgcttacaggtttatgtaagcaagtctcggatccaagaccagcaattcgaaagcgttccatagaagtattgttccacattctgatggatcatggtcatctttttacaagacccttttggactggaatcttcagctctatcattctcccagttttcaacaacatacgaagtaaaaccgatatgctatttgaagaaagtgttgattcgccatcctcagcttctctagacaccgaagaaactacatgggacgttgagacatcaacacttgcattgcagcttctcgtcgatctactcgttaaatttttcagatccgtgagatctcagcttccaagcgttgtgtcaatcatcgtagggttcataaagagtccttttcaaggctctacaggctctggaatctctgttttgctacatctggctgatggattggctcgtagtgcctctgaagatgaatggagagagatattcttggctctcaaggaagcagcgtcgctgactttcgccggtttcatgaaagtcttgagaacaatggatgatatcgaagatgttgaaacactttctggtcaaagcgtaaacataggtgatcttgatgatgacagtcttcacatcatgtcgtatgttgtctccagaacaaagaaacacattgatgtcctgtctcaaatcgttgaggttgtgagtgatttatacagaagaaaccagttctcattgtccgcatcacacgtggatattctggcagacattttctcgtgcatcgcgtctcacgcacagcaactaaacaccgacacagtccttagaaggaagttcaagagagcatgctctgtccaaaacctaacagagcctcaactacttaacttcgagaacgaggcttacaaatcctacatgatgttcctccaagacatggttacttgcaatccaaacgtctccaaagaactagatctcgagtctcgtctagtcactgaatgcgcaaaaatcgtgaagatctaccttaaatgcacagatccacaacaacaagaacaacaacaaagaaaaccggtgctatgggttcttccgatggaatcagatcgtgtagaagaagcaacggcgagaacttcactgcttgtttcttcactcgaagccttgtgctcattagaagcagagtctctgaagaaacacgtgtccagcttcttccctttgttggtggatcttgtgaggactgagcattgctctccacaagttccgtacgtcctaagcaatgttttgaaatcgtgcattggtcctattttggcttag

SEQ ID NO: 27598 - protein, 1711 aa, Arabidopsis thaliana
  misc_feature (1)..(1711): Ceres Seq. ID no. 1821424
MSTSQTLGGATRCGRIIGPSLDKIIKNAAWRKHTYLVSSCKSVLDKLESLPDDFHDPSSVVSGLAASDADSVLQPFLLSLETAYSKVVEPSLDCAFKLFSLSILRGEIQSSKQDSILFKLVNAVSKVGAIAEEPIQLAVLRVLLAAVRSPCILIRGDCLLHVVKTCYNIYLGGLSGTTQICAKSVLAQMMLVIFTRSEEDSLDVSVKTIYVNELLTFTDKSVNEGSSVYFCQGFVNEVMAAGQGSPLPPPDVIQILLQNPETETVMTPDSPSFRGYVANGEGDSETGDMSKVRQDAFLLFKNLCKLSMRFSSKENNDDQIMVRGKTLSLELLKVIIDNGGSVWRTNESFINAVKQYLCLSLLKNSAVSIMSIFQLQCAIFMSLLSKLRSVLKAEIGIFFPMIVLRVLENVLQPSYLQKMTVLNLLDKMSQDPQLMVDIFVNYDCDVESSNILERIVNGLLKTALGPPTGSSTTLSPAQDSTFRNDSVKCLVNLAKAMGNWMDQQLKVNETVWPKGSQVYASMDSNASQISELEGTISDCDSQPDTSNPEAYDASMLEQRRAYKIELQVQYLQKGISLFNRKPSKGVEFLISTKKIGSSPEEVASFLMKTAGLNGTVIGDYLGERDELPLKVMHAYVDSFNFEKKDFVEAIRFFLRGFRLPGEAQKIDRIMEKFAEHYWKCNPGSFTSADTAYVLAYSVIMLNTDAHNNMVKDKMTKADFVRNNRGIDDGKDLPEEYLGSLYDRVVKEEIRMNSDTLAPQNKQVNGLNKLLGLDGILNLVSWMQPDEKPHGANGRLIRDIQEQFQAKPEKSESVYHTVTDISILRFILEVSWGPMLAAFSVTIDQSDDRLATSLCLQGFRYAVHVTAVMGMQTQRDAFVTSMAKFTNLHCAADMKQKNVDAVKAIITIAIEDGNHLHGSWEHILTCLSRIEHLQLLGEVSPSEKRYVPTKKAEVDDKKALGFPNLKKRGSFQNPSVMAVVRGGSYDSTSLVKSVPKLVTPEQIKSFIANLNLLDQIGNFELNHVYANSQRLNSEAIVSFVKALCKVSMSELQSPTDPRVFSLTKLVETAHYNMNRIRLVWSRIWNVLSDFFVSVGLSENLSVAIFVMDSLRQLSMKFLEREELANYHFQHEFLRPFVVVMQKSSSAEIRELIVRCVSQMVLSRVSNVKSGWKNVFTVFTTAALDERKNIVLLAFETIEKIVRDHFHCIIETEITVYADCIRCLITFTNSKFEGDIGFNTIEFLRFCALKLEEGGLVLNEKLKNNTISALKEDFSDTQSFTDLDEQVSYWIPLLTGLCKQVSDPRPAIRKRSIEVLFHILMDHGHLFTRPFWTGIFSSIILPVFNNIRSKTDMLFEESVDSPSSASLDTEETTWDVETSTLALQLLVDLLVKFFRSVRSQLPSVVSIIVGFIKSPFQGSTGSGISVLLHLADGLARSASEDEWREIFLALKEAASLTFAGFMKVLRTMDDIEDVETLSGQSVNIGDLDDDSLHIMSYVVSRTKKHIDVLSQIVEVVSDLYRRNQFSLSASHVDILADIFSCIASHAQQLNTDTVLRRKFKRACSVQNLTEPQLLNFENEAYKSYMMFLQDMVTCNPNVSKELDLESRLVTECAKIVKIYLKCTDPQQQEQQQRKPVLWVLPMESDRVEEATARTSLLVSSLEALCSLEAESLKKHVSSFFPLLVDLVRTEHCSPQVPYVLSNVLKSCIGPILA

SEQ ID NO: 27599 - protein, 1523 aa, Arabidopsis thaliana
  misc_feature (1)..(1523): Ceres Seq. ID no. 1821425
MMLVIFTRSEEDSLDVSVKTIYVNELLTFTDKSVNEGSSVYFCQGFVNEVMAAGQGSPLPPPDVIQILLQNPETETVMTPDSPSFRGYVANGEGDSETGDMSKVRQDAFLLFKNLCKLSMRFSSKENNDDQIMVRGKTLSLELLKVIIDNGGSVWRTNESFINAVKQYLCLSLLKNSAVSIMSIFQLQCAIFMSLLSKLRSVLKAEIGIFFPMIVLRVLENVLQPSYLQKMTVLNLLDKMSQDPQLMVDIFVNYDCDVESSNILERIVNGLLKTALGPPTGSSTTLSPAQDSTFRNDSVKCLVNLAKAMGNWMDQQLKVNETVWPKGSQVYASMDSNASQISELEGTISDCDSQPDTSNPEAYDASMLEQRRAYKIELQVQYLQKGISLFNRKPSKGVEFLISTKKIGSSPEEVASFLMKTAGLNGTVIGDYLGERDELPLKVMHAYVDSFNFEKKDFVEAIRFFLRGFRLPGEAQKIDRIMEKFAEHYWKCNPGSFTSADTAYVLAYSVIMLNTDAHNNMVKDKMTKADFVRNNRGIDDGKDLPEEYLGSLYDRVVKEEIRMNSDTLAPQNKQVNGLNKLLGLDGILNLVSWMQPDEKPHGANGRLIRDIQEQFQAKPEKSESVYHTVTDISILRFILEVSWGPMLAAFSVTIDQSDDRLATSLCLQGFRYAVHVTAVMGMQTQRDAFVTSMAKFTNLHCAADMKQKNVDAVKAIITIAIEDGNHLHGSWEHILTCLSRIEHLQLLGEVSPSEKRYVPTKKAEVDDKKALGFPNLKKRGSFQNPSVMAVVRGGSYDSTSLVKSVPKLVTPEQIKSFIANLNLLDQIGNFELNHVYANSQRLNSEAIVSFVKALCKVSMSELQSPTDPRVFSLTKLVETAHYNMNRIRLVWSRIWNVLSDFFVSVGLSENLSVAIFVMDSLRQLSMKFLEREELANYHFQHEFLRPFVVVMQKSSSAEIRELIVRCVSQMVLSRVSNVKSGWKNVFTVFTTAALDERKNIVLLAFETIEKIVRDHFHCIIETEITVYADCIRCLITFTNSKFEGDIGFNTIEFLRFCALKLEEGGLVLNEKLKNNTISALKEDFSDTQSFTDLDEQVSYWIPLLTGLCKQVSDPRPAIRKRSIEVLFHILMDHGHLFTRPFWTGIFSSIILPVFNNIRSKTDMLFEESVDSPSSASLDTEETTWDVETSTLALQLLVDLLVKFFRSVRSQLPSVVSIIVGFIKSPFQGSTGSGISVLLHLADGLARSASEDEWREIFLALKEAASLTFAGFMKVLRTMDDIEDVETLSGQSVNIGDLDDDSLHIMSYVVSRTKKHIDVLSQIVEVVSDLYRRNQFSLSASHVDILADIFSCIASHAQQLNTDTVLRRKFKRACSVQNLTEPQLLNFENEAYKSYMMFLQDMVTCNPNVSKELDLESRLVTECAKIVKIYLKCTDPQQQEQQQRKPVLWVLPMESDRVEEATARTSLLVSSLEALCSLEAESLKKHVSSFFPLLVDLVRTEHCSPQVPYVLSNVLKSCIGPILA

SEQ ID NO: 27600 - protein, 1522 aa, Arabidopsis thaliana
  misc_feature (1)..(1522): Ceres Seq. ID no. 1821426
MLVIFTRSEEDSLDVSVKTIYVNELLTFTDKSVNEGSSVYFCQGFVNEVMAAGQGSPLPPPDVIQILLQNPETETVMTPDSPSFRGYVANGEGDSETGDMSKVRQDAFLLFKNLCKLSMRFSSKENNDDQIMVRGKTLSLELLKVIIDNGGSVWRTNESFINAVKQYLCLSLLKNSAVSIMSIFQLQCAIFMSLLSKLRSVLKAEIGIFFPMIVLRVLENVLQPSYLQKMTVLNLLDKMSQDPQLMVDIFVNYDCDVESSNILERIVNGLLKTALGPPTGSSTTLSPAQDSTFRNDSVKCLVNLAKAMGNWMDQQLKVNETVWPKGSQVYASMDSNASQISELEGTISDCDSQPDTSNPEAYDASMLEQRRAYKIELQVQYLQKGISLFNRKPSKGVEFLISTKKIGSSPEEVASFLMKTAGLNGTVIGDYLGERDELPLKVMHAYVDSFNFEKKDFVEAIRFFLRGFRLPGEAQKIDRIMEKFAEHYWKCNPGSFTSADTAYVLAYSVIMLNTDAHNNMVKDKMTKADFVRNNRGIDDGKDLPEEYLGSLYDRVVKEEIRMNSDTLAPQNKQVNGLNKLLGLDGILNLVSWMQPDEKPHGANGRLIRDIQEQFQAKPEKSESVYHTVTDISILRFILEVSWGPMLAAFSVTIDQSDDRLATSLCLQGFRYAVHVTAVMGMQTQRDAFVTSMAKFTNLHCAADMKQKNVDAVKAIITIAIEDGNHLHGSWEHILTCLSRIEHLQLLGEVSPSEKRYVPTKKAEVDDKKALGFPNLKKRGSFQNPSVMAVVRGGSYDSTSLVKSVPKLVTPEQIKSFIANLNLLDQIGNFELNHVYANSQRLNSEAIVSFVKALCKVSMSELQSPTDPRVFSLTKLVETAHYNMNRIRLVWSRIWNVLSDFFVSVGLSENLSVAIFVMDSLRQLSMKFLEREELANYHFQHEFLRPFVVVMQKSSSAEIRELIVRCVSQMVLSRVSNVKSGWKNVFTVFTTAALDERKNIVLLAFETIEKIVRDHFHCIIETEITVYADCIRCLITFTNSKFEGDIGFNTIEFLRFCALKLEEGGLVLNEKLKNNTISALKEDFSDTQSFTDLDEQVSYWIPLLTGLCKQVSDPRPAIRKRSIEVLFHILMDHGHLFTRPFWTGIFSSIILPVFNNIRSKTDMLFEESVDSPSSASLDTEETTWDVETSTLALQLLVDLLVKFFRSVRSQLPSVVSIIVGFIKSPFQGSTGSGISVLLHLADGLARSASEDEWREIFLALKEAASLTFAGFMKVLRTMDDIEDVETLSGQSVNIGDLDDDSLHIMSYVVSRTKKHIDVLSQIVEVVSDLYRRNQFSLSASHVDILADIFSCIASHAQQLNTDTVLRRKFKRACSVQNLTEPQLLNFENEAYKSYMMFLQDMVTCNPNVSKELDLESRLVTECAKIVKIYLKCTDPQQQEQQQRKPVLWVLPMESDRVEEATARTSLLVSSLEALCSLEAESLKKHVSSFFPLLVDLVRTEHCSPQVPYVLSNVLKSCIGPILA

SEQ ID NO: 27601 - DNA, 813 bp, Arabidopsis thaliana
  misc_feature (1)..(813): Ceres Seq. ID no. 1821427
atggaacttaacagatctgaagcagacgaagcaaaggccgagaccactcccaccggtggagccaccagctcagccacagcctctggctcttcctccggacgtcgtccacgtggtcgtcctgcaggttccaaaaacaaacccaaacctccgacgattataactagagatagtcctaacgtccttagatcacacgttcttgaagtcacctccggttcggacatatccgaggcagtctccacctacgccactcgtcgcggctgcggcgtttgcattataagcggcacgggtgcggtcactaacgtcacgatacggcaacctgcggctccggctggtggaggtgtgattaccctgcatggtcggtttgacattttgtctttgaccggtactgcgcttccaccgcctgcaccaccgggagcaggaggtttgacggtgtatctagccggaggtcaaggacaagttgtaggagggaatgtggctggttcgttaattgcttcgggaccggtagtgttgatggctgcttcttttgcaaacgcagtttatgataggttaccgattgaagaggaagaaaccccaccgccgagaaccaccggggtgcagcagcagcagccggaggcgtctcagtcgtcggaggttacggggagtggggcccaggcgtgtgagtcaaacctccaaggtggaaatggtggaggaggtgttgctttctacaatcttggaatgaatatgaacaattttcaattctccgggggagatatttacggtatgagcggcggtagcggaggaggtggtggcggtgcgactagacccgcgttttag

SEQ ID NO: 27602 - protein, 270 aa, Arabidopsis thaliana
  misc_feature (1)..(270): Ceres Seq. ID no. 1821428
MELNRSEADEAKAETTPTGGATSSATASGSSSGRRPRGRPAGSKNKPKPPTIITRDSPNVLRSHVLEVTSGSDISEAVSTYATRRGCGVCIISGTGAVTNVTIRQPAAPAGGGVITLHGRFDILSLTGTALPPPAPPGAGGLTVYLAGGQGQVVGGNVAGSLIASGPVVLMAASFANAVYDRLPIEEEETPPPRTTGVQQQQPEASQSSEVTGSGAQACESNLQGGNGGGGVAFYNLGMNMNNFQFSGGDIYGMSGGSGGGGGGATRPAF

SEQ ID NO: 27603 - DNA, 1554 bp, Arabidopsis thaliana
  misc_feature (1)..(1554): Ceres Seq. ID no. 1821449
atgcctcctatggcgaaaaatgcagcagtcactgatgttgttcatctcgacagtgatagtgacagtgacaacggagtagtaggaggaagagaatcagcaagtacaatcgctggtgctgcgacaatggctcctcgagagaccttagaatgccggagcttttggaaggcgggagattactttgtgataccgaacgttgtgactcctactgctccagcaatcgctgagctacttgacaatgctgttgacgagatacaaaatggtgctacgtttgttaagattgataagatcaatattgtcaaagataattccccagctttagttttccaagatgatggtggtgggatggatcccgctgggctcagaaaatgcatgagcttaggctactcatcaaagaagtctaatacaacgattggacagtatggaaatggtttcaagacaagtaccatgagacttggagctgatgctatcgtttttagtcgctccactcgtggaggcacatctactcagagcgttggcattctgtcatacacattccttagaaaaactggtcaggatgatgtcactgttcctatgatccgatatgtaatgcagattgatattgatatatccaaggagcgaccacaaccaattatctatggatctccagaagattgggctgccaaccttgaaattctactcaaatggtctccgttttctacagaggacgaacttttgcagcagtctgttttgttaatttttttatttccatcttccacccaccagttcgaggacgttggaactcatggaacaaaagtaattatatacaacttgtggcttaatgatgaaggaatctatgagctgagttttgacgacgacgaggaggtaacacacacttttcctcaattgatatatactcgacgcgatatcttgccagaggatatccggctccgagatgagagtgtgaatgacggaaaacggttgcaccataaaatattggaactgagatctcatatttcataccacttacgttattctctgagggcttatgcttcaatgttatatctcaaaaagttcaaaaacttcaaaattataattcggggaatccctgtggagcagttcaacattgctgatggattcagatttcccgagattattaagtacaagccccatacagctacaacggaacaagcttccactgaaatcaaaattggatttgtaaaggaggcacctaagcttgcaatctgcggtttcaatgtgtatcacaaaaaccgtctcatccgggatactggaaacaacctcgatggcaagtcagcgggtgagatacgccaagagaacttacaactcttcatgaggtatatttataagaagagaaaaatacgtatcagtatatcatatctctgtggggatctgaatcaaatattattcttcaacaggtgcgaggaatatataaagaaagagaatgaaacagaacagacggtgaagagcttagaaaaagaactggaagaatttaaaagtaaatgtgcacaccttgctctgctcgtggatgctaagaagaaggagatgcaacaagcttag

SEQ ID NO: 27604 - protein, 517 aa, Arabidopsis thaliana
  misc_feature (1)..(517): Ceres Seq. ID no. 1821450
MPPMAKNAAVTDVVHLDSDSDSDNGVVGGRESASTIAGAATMAPRETLECRSFWKAGDYFVIPNVVTPTAPAIAELLDNAVDEIQNGATFVKIDKINIVKDNSPALVFQDDGGGMDPAGLRKCMSLGYSSKKSNTTIGQYGNGFKTSTMRLGADAIVFSRSTRGGTSTQSVGILSYTFLRKTGQDDVTVPMIRYVMQIDIDISKERPQPIIYGSPEDWAANLEILLKWSPFSTEDELLQQSVLLIFLFPSSTHQFEDVGTHGTKVIIYNLWLNDEGIYELSFDDDEEVTHTFPQLIYTRRDILPEDIRLRDESVNDGKRLHHKILELRSHISYHLRYSLRAYASMLYLKKFKNFKIIIRGIPVEQFNIADGFRFPEIIKYKPHTATTEQASTEIKIGFVKEAPKLAICGFNVYHKNRLIRDTGNNLDGKSAGEIRQENLQLFMRYIYKKRKIRISISYLCGDLNQILFFNRCEEYIKKENETEQTVKSLEKELEEFKSKCAHLALLVDAKKKEMQQA

SEQ ID NO: 27605 - protein, 514 aa, Arabidopsis thaliana
  misc_feature (1)..(514): Ceres Seq. ID no. 1821451
MAKNAAVTDVVHLDSDSDSDNGVVGGRESASTIAGAATMAPRETLECRSFWKAGDYFVIPNVVTPTAPAIAELLDNAVDEIQNGATFVKIDKINIVKDNSPALVFQDDGGGMDPAGLRKCMSLGYSSKKSNTTIGQYGNGFKTSTMRLGADAIVFSRSTRGGTSTQSVGILSYTFLRKTGQDDVTVPMIRYVMQIDIDISKERPQPIIYGSPEDWAANLEILLKWSPFSTEDELLQQSVLLIFLFPSSTHQFEDVGTHGTKVIIYNLWLNDEGIYELSFDDDEEVTHTFPQLIYTRRDILPEDIRLRDESVNDGKRLHHKILELRSHISYHLRYSLRAYASMLYLKKFKNFKIIIRGIPVEQFNIADGFRFPEIIKYKPHTATTEQASTEIKIGFVKEAPKLAICGFNVYHKNRLIRDTGNNLDGKSAGEIRQENLQLFMRYIYKKRKIRISISYLCGDLNQILFFNRCEEYIKKENETEQTVKSLEKELEEFKSKCAHLALLVDAKKKEMQQA

SEQ ID NO: 27606 - protein, 476 aa, Arabidopsis thaliana
  misc_feature (1)..(476): Ceres Seq. ID no. 1821452
MAPRETLECRSFWKAGDYFVIPNVVTPTAPAIAELLDNAVDEIQNGATFVKIDKINIVKDNSPALVFQDDGGGMDPAGLRKCMSLGYSSKKSNTTIGQYGNGFKTSTMRLGADAIVFSRSTRGGTSTQSVGILSYTFLRKTGQDDVTVPMIRYVMQIDIDISKERPQPIIYGSPEDWAANLEILLKWSPFSTEDELLQQSVLLIFLFPSSTHQFEDVGTHGTKVIIYNLWLNDEGIYELSFDDDEEVTHTFPQLIYTRRDILPEDIRLRDESVNDGKRLHHKILELRSHISYHLRYSLRAYASMLYLKKFKNFKIIIRGIPVEQFNIADGFRFPEIIKYKPHTATTEQASTEIKIGFVKEAPKLAICGFNVYHKNRLIRDTGNNLDGKSAGEIRQENLQLFMRYIYKKRKIRISISYLCGDLNQILFFNRCEEYIKKENETEQTVKSLEKELEEFKSKCAHLALLVDAKKKEMQQA

SEQ ID NO: 27607 - DNA, 1440 bp, Arabidopsis thaliana
  misc_feature (1)..(1440): Ceres Seq. ID no. 1821537
atgattccaggtttgctcgtggagattcatcgtgtttacgacttcataaccgagattctcgaggtcacaaacctaacctatccttgcacaggcccgtgtttcgcaaacctcgacatgttagtcacggttgatcctgctaatatccaccacatcatgagctcaaacttcgcaaactacccgaaaggacccgaattcaagaagctattcgacattttgggagatggcattttcaatgcagattcggagttgtggaaggatctgaggaaatcagctcaaagcatgatgatgaatcccgagtttcaaaagttttcattagctacaagcttgaaaaagctagagaaagggcttgtcccacttcttgaccatgttgctaaagagaagctcgctgtggatttacaagacatgttccaaagattcacgtttgacactacgtttgttttagcgaccggatatgatccaggttgtctctccgtcgaaatgccagaagtggagtttgcaagagctctagacgatgcagaggaagccattttcttcagacatgtcaaaccagagatcttttggaggctgcaaggcttgcttgggttaggagatgagaagaaaatgacgaaagctcgctcgactttagatcgtgtttgctccaagtacatagctataaagagagatgaggtaagccgtgggactaacaatgttgattctcattctaaagatttgctgacgtcttacatgaatctggatacgaccaagtacaagttgctgaatccaagtgatgaaagattcctcagagacacaatcttgaccttcatgttagcgggtcgagacacgacaggatctggactcacttggttcttctggcttctcattaagaacccagaggtcattgccaagattcgtcaagaaatcaacacagctctgtttcaaagaagcaaggttgatgatgatgcttctaacaataatgattctgattcattcagtccccaagagttaaagaagttggtgtatctacacggcgcaatatgtgaatccctcagactctatccacctgttccgtttcagcacaagtctcctactaaaccggacgttcttccaagcggacacaaagtcgacgccaactcgaagattttgttctgtctctactcattagggagaatgaagtcggtttggggagaagatgcattggaattcaaaccggagagatggatttctgagagtgggaattcggtacacgagccatcttataagttcttatcgtttaacgcgggtccaagaacttgtttggggaaagaagtggctatgatgcaaatgaagagtgtggctgtgaaaatcatacagaattatgagatgaagattgttgaagggcaacaaatcgagccagctccttctgttattctccacatgaagcatggtcttaaagtcactgttactaagagatgtttggtttga

SEQ ID NO: 27608 - protein, 479 aa, Arabidopsis thaliana
  misc_feature (1)..(479): Ceres Seq. ID no. 1821538
MIPGLLVEIHRVYDFITEILEVTNLTYPCTGPCFANLDMLVTVDPANIHHIMSSNFANYPKGPEFKKLFDILGDGIFNADSELWKDLRKSAQSMMMNPEFQKFSLATSLKKLEKGLVPLLDHVAKEKLAVDLQDMFQRFTFDTTFVLATGYDPGCLSVEMPEVEFARALDDAEEAIFFRHVKPEIFWRLQGLLGLGDEKKMTKARSTLDRVCSKYIAIKRDEVSRGTNNVDSHSKDLLTSYMNLDTTKYKLLNPSDERFLRDTILTFMLAGRDTTGSGLTWFFWLLIKNPEVIAKIRQEINTALFQRSKVDDDASNNNDSDSFSPQELKKLVYLHGAICESLRLYPPVPFQHKSPTKPDVLPSGHKVDANSKILFCLYSLGRMKSVWGEDALEFKPERWISESGNSVHEPSYKFLSFNAGPRTCLGKEVAMMQMKSVAVKIIQNYEMKIVEGQQIEPAPSVILHMKHGLKVTVTKRCLV

SEQ ID NO: 27609 - protein, 441 aa, Arabidopsis thaliana
  misc_feature (1)..(441): Ceres Seq. ID no. 1821539
MLVTVDPANIHHIMSSNFANYPKGPEFKKLFDILGDGIFNADSELWKDLRKSAQSMMMNPEFQKFSLATSLKKLEKGLVPLLDHVAKEKLAVDLQDMFQRFTFDTTFVLATGYDPGCLSVEMPEVEFARALDDAEEAIFFRHVKPEIFWRLQGLLGLGDEKKMTKARSTLDRVCSKYIAIKRDEVSRGTNNVDSHSKDLLTSYMNLDTTKYKLLNPSDERFLRDTILTFMLAGRDTTGSGLTWFFWLLIKNPEVIAKIRQEINTALFQRSKVDDDASNNNDSDSFSPQELKKLVYLHGAICESLRLYPPVPFQHKSPTKPDVLPSGHKVDANSKILFCLYSLGRMKSVWGEDALEFKPERWISESGNSVHEPSYKFLSFNAGPRTCLGKEVAMMQMKSVAVKIIQNYEMKIVEGQQIEPAPSVILHMKHGLKVTVTKRCLV

SEQ ID NO: 27610 - protein, 428 aa, Arabidopsis thaliana
  misc_feature (1)..(428): Ceres Seq. ID no. 1821540
MSSNFANYPKGPEFKKLFDILGDGIFNADSELWKDLRKSAQSMMMNPEFQKFSLATSLKKLEKGLVPLLDHVAKEKLAVDLQDMFQRFTFDTTFVLATGYDPGCLSVEMPEVEFARALDDAEEAIFFRHVKPEIFWRLQGLLGLGDEKKMTKARSTLDRVCSKYIAIKRDEVSRGTNNVDSHSKDLLTSYMNLDTTKYKLLNPSDERFLRDTILTFMLAGRDTTGSGLTWFFWLLIKNPEVIAKIRQEINTALFQRSKVDDDASNNNDSDSFSPQELKKLVYLHGAICESLRLYPPVPFQHKSPTKPDVLPSGHKVDANSKILFCLYSLGRMKSVWGEDALEFKPERWISESGNSVHEPSYKFLSFNAGPRTCLGKEVAMMQMKSVAVKIIQNYEMKIVEGQQIEPAPSVILHMKHGLKVTVTKRCLV

SEQ ID NO: 27611 - DNA, 1602 bp, Arabidopsis thaliana
  misc_feature (1)..(1602): Ceres Seq. ID no. 1821688
atggctggagtattagctggggattgttcattcggtgagagtggtgtttcatcttactccaggaattccaatgaaaagcaggacgaggttgcccgctggtattttggaagaaaagaaattgaagaaaattcaccttcaaggttggatagtattgacttaaagaaggaaacatacctccgcaagtcatactgtacatttttgcaggatttaggcatgagattaaaagtaacagtattaagattattactgagtcctttttccatgttgtcctccctcctcacccagacgattgctacagtctgcatgttccttgcgggaaaagtggaagaaactcctaggccgttaaaagatgttattgttgtctcctatgagataatacacaagaaggatcctactactgcacagaaaatcaagcaaaaggaagtatatgagcaacaaaaagagcttatactaaatggagaaaagattgtactttctacgctgggatttgacttcaatgtttatcatccttataagcctcttgtagaagcgataaagaaatttaaggtcgcacagaatgctctggcccaagttgcatggaattttgttaacgatggtctgcggacgtcactctgcctgcaatttaagcctcaccacattgcggcgggagcaatttttcttgctgcgaagttccttaaagtgaaattaccatcagatggagagaaggtctggtggcaagaatttgatgtcacacctcgacaactagaggatgttagcaaccaaatgcttgagctctatgagcaaaaccgtgttcctgcatctcaagtaagcgaagtcgaaagtagtgtaggtggaggatcagctcatcatgttgggtctaggccatcagcacgtctaactcatgaacattcaaattctgataatctcgggggctcgacaaaagctacacaaaaccggagcaatgataatgggagtggtgaggcaggtagtgtcatcaccgagcagaagggggaaagagatacagaaacgaaagatagcatgcatactgaaagtcatccagcccataagtctagatcgggagttgaggcacctggggaggataaaatagagaaagcaggtgcacattttccagaagatgataaatctagaattgttggtacagctgatgtcacggtcagccaatccccaaaagacataaaaatgtttagagataaggtgaaggccaaactagaggcgaagaaggtccaaggtgaaaagacgagaaagaaggatttggtggatgaggatgatttgatagaaagagaactggaagacgtggaattagctgttgaggatgacaaagatatacaaaacaaaagctccatgggtacagaacatggcgagattcttgatggaaacaacttggtggtcaataccgaggaaggtgaaatgatagatgatgtttcttcaacaatgcctagccggaagagaaaaatggaaagtccttgtgaaaaacagttaggagaaggaaagagacgacacgacaacagtgagaatgtggaagaaggtcagaagacaaacccaggaggaagtagtcatagttatggtgacagagagccaagaagacactcccaagagaggtag

SEQ ID NO: 27612 - protein, 533 aa, Arabidopsis thaliana
  misc_feature (1)..(533): Ceres Seq. ID no. 1821689
MAGVLAGDCSFGESGVSSYSRNSNEKQDEVARWYFGRKEIEENSPSRLDSIDLKKETYLRKSYCTFLQDLGMRLKVTVLRLLLSPFSMLSSLLTQTIATVCMFLAGKVEETPRPLKDVIVVSYEIIHKKDPTTAQKIKQKEVYEQQKELILNGEKIVLSTLGFDFNVYHPYKPLVEAIKKFKVAQNALAQVAWNFVNDGLRTSLCLQFKPHHIAAGAIFLAAKFLKVKLPSDGEKVWWQEFDVTPRQLEDVSNQMLELYEQNRVPASQVSEVESSVGGGSAHHVGSRPSARLTHEHSNSDNLGGSTKATQNRSNDNGSGEAGSVITEQKGERDTETKDSMHTESHPAHKSRSGVEAPGEDKIEKAGAHFPEDDKSRIVGTADVTVSQSPKDIKMFRDKVKAKLEAKKVQGEKTRKKDLVDEDDLIERELEDVELAVEDDKDIQNKSSMGTEHGEILDGNNLVVNTEEGEMIDDVSSTMPSRKRKMESPCEKQLGEGKRRHDNSENVEEGQKTNPGGSSHSYGDREPRRHSQER

SEQ ID NO: 27613 - protein, 462 aa, Arabidopsis thaliana
  misc_feature (1)..(462): Ceres Seq. ID no. 1821690
MRLKVTVLRLLLSPFSMLSSLLTQTIATVCMFLAGKVEETPRPLKDVIVVSYEIIHKKDPTTAQKIKQKEVYEQQKELILNGEKIVLSTLGFDFNVYHPYKPLVEAIKKFKVAQNALAQVAWNFVNDGLRTSLCLQFKPHHIAAGAIFLAAKFLKVKLPSDGEKVWWQEFDVTPRQLEDVSNQMLELYEQNRVPASQVSEVESSVGGGSAHHVGSRPSARLTHEHSNSDNLGGSTKATQNRSNDNGSGEAGSVITEQKGERDTETKDSMHTESHPAHKSRSGVEAPGEDKIEKAGAHFPEDDKSRIVGTADVTVSQSPKDIKMFRDKVKAKLEAKKVQGEKTRKKDLVDEDDLIERELEDVELAVEDDKDIQNKSSMGTEHGEILDGNNLVVNTEEGEMIDDVSSTMPSRKRKMESPCEKQLGEGKRRHDNSENVEEGQKTNPGGSSHSYGDREPRRHSQER

SEQ ID NO: 27614 - protein, 446 aa, Arabidopsis thaliana
  misc_feature (1)..(446): Ceres Seq. ID no. 1821691
MLSSLLTQTIATVCMFLAGKVEETPRPLKDVIVVSYEIIHKKDPTTAQKIKQKEVYEQQKELILNGEKIVLSTLGFDFNVYHPYKPLVEAIKKFKVAQNALAQVAWNFVNDGLRTSLCLQFKPHHIAAGAIFLAAKFLKVKLPSDGEKVWWQEFDVTPRQLEDVSNQMLELYEQNRVPASQVSEVESSVGGGSAHHVGSRPSARLTHEHSNSDNLGGSTKATQNRSNDNGSGEAGSVITEQKGERDTETKDSMHTESHPAHKSRSGVEAPGEDKIEKAGAHFPEDDKSRIVGTADVTVSQSPKDIKMFRDKVKAKLEAKKVQGEKTRKKDLVDEDDLIERELEDVELAVEDDKDIQNKSSMGTEHGEILDGNNLVVNTEEGEMIDDVSSTMPSRKRKMESPCEKQLGEGKRRHDNSENVEEGQKTNPGGSSHSYGDREPRRHSQER

SEQ ID NO: 27615 - DNA, 1260 bp, Arabidopsis thaliana
  misc_feature (1)..(1260): Ceres Seq. ID no. 1822185
atgaagaggaagaagaaagaggaggaggaggagaagttgatagtgactagagaattcgcgaagagatggcgagatctgagcggtcaaaaccattggaaagggatgttacagccgttggatcaagatctccgggaatatatcatacattatggtgagatggctcaggctggttacgatactttcaatatcaacaccgaatctcagttcgccggtgctagcatctactctagaaaagacttcttcgccaaggttggtttagagatagcacacccgtacacaaagtacaaagtgacgaagtttatatacgcgacatccgatatccacgtgcctgagtcattcttattgttcccaatttcacgtgagggatggtcaaaggaatcaaattggatgggttacgtggcggtaacagacgaccaaggcacggcacttcttggtcggagagatatcgtggtttcttggagaggctcagtgcaaccacttgaatgggtcgaagacttcgagtttggtttagtcaacgccataaaaatcttcggtgaaagaaacgatcaagtacaaattcatcaaggttggtattcaatctacatgtctcaagatgaacgatcaccttttactaagaccaatgctcgtgaccaggtattgcgagaggttggaagattgttggagaagtataaggacgaagaagttagtataactatatgtggtcatagtcttggagctgcactcgcgacgcttagtgccactgatattgtggctaatggttataaccgaccaaagagccgtcctgacaagtcttgtcctgttactgcctttgtctttgctagtcctcgtgttggggattcagactttaggaaactcttttccggattggaagatatccgagtgttacggacaaggaatctaccggacgtaattccgatctatccaccgataggttactccgaggtaggagatgagtttccaatagacacaagaaagtcaccatacatgaaatctcctggaaacctcgcaacctttcactgcttagagggttacttgcatggcgttgccgggactcaaggaacgaacaaagctgacttattcagactcgatgtggaaagagccatcggattggtcaataaatcagtggatgggttaaaagacgagtgtatggtcccagggaaatggagggttcttaaaaacaaaggtatggcccaacaagacgatggatcttgggagttagtggaccatgagattgatgataatgaagatttggatttctga

SEQ ID NO: 27616 - protein, 419 aa, Arabidopsis thaliana
  misc_feature (1)..(419): Ceres Seq. ID no. 1822186
MKRKKKEEEEEKLIVTREFAKRWRDLSGQNHWKGMLQPLDQDLREYIIHYGEMAQAGYDTFNINTESQFAGASIYSRKDFFAKVGLEIAHPYTKYKVTKFIYATSDIHVPESFLLFPISREGWSKESNWMGYVAVTDDQGTALLGRRDIVVSWRGSVQPLEWVEDFEFGLVNAIKIFGERNDQVQIHQGWYSIYMSQDERSPFTKTNARDQVLREVGRLLEKYKDEEVSITICGHSLGAALATLSATDIVANGYNRPKSRPDKSCPVTAFVFASPRVGDSDFRKLFSGLEDIRVLRTRNLPDVIPIYPPIGYSEVGDEFPIDTRKSPYMKSPGNLATFHCLEGYLHGVAGTQGTNKADLFRLDVERAIGLVNKSVDGLKDECMVPGKWRVLKNKGMAQQDDGSWELVDHEIDDNEDLDF

SEQ ID NO: 27617 - protein, 385 aa, Arabidopsis thaliana
  misc_feature (1)..(385): Ceres Seq. ID no. 1822187
MLQPLDQDLREYIIHYGEMAQAGYDTFNINTESQFAGASIYSRKDFFAKVGLEIAHPYTKYKVTKFIYATSDIHVPESFLLFPISREGWSKESNWMGYVAVTDDQGTALLGRRDIVVSWRGSVQPLEWVEDFEFGLVNAIKIFGERNDQVQIHQGWYSIYMSQDERSPFTKTNARDQVLREVGRLLEKYKDEEVSITICGHSLGAALATLSATDIVANGYNRPKSRPDKSCPVTAFVFASPRVGDSDFRKLFSGLEDIRVLRTRNLPDVIPIYPPIGYSEVGDEFPIDTRKSPYMKSPGNLATFHCLEGYLHGVAGTQGTNKADLFRLDVERAIGLVNKSVDGLKDECMVPGKWRVLKNKGMAQQDDGSWELVDHEIDDNEDLDF

SEQ ID NO: 27618 - protein, 367 aa, Arabidopsis thaliana
  misc_feature (1)..(367): Ceres Seq. ID no. 1822188
MAQAGYDTFNINTESQFAGASIYSRKDFFAKVGLEIAHPYTKYKVTKFIYATSDIHVPESFLLFPISREGWSKESNWMGYVAVTDDQGTALLGRRDIVVSWRGSVQPLEWVEDFEFGLVNAIKIFGERNDQVQIHQGWYSIYMSQDERSPFTKTNARDQVLREVGRLLEKYKDEEVSITICGHSLGAALATLSATDIVANGYNRPKSRPDKSCPVTAFVFASPRVGDSDFRKLFSGLEDIRVLRTRNLPDVIPIYPPIGYSEVGDEFPIDTRKSPYMKSPGNLATFHCLEGYLHGVAGTQGTNKADLFRLDVERAIGLVNKSVDGLKDECMVPGKWRVLKNKGMAQQDDGSWELVDHEIDDNEDLDF

SEQ ID NO: 27619 - DNA, 1170 bp, Arabidopsis thaliana
  misc_feature (1)..(1170): Ceres Seq. ID no. 1822330
atgtcactcctcaaaagtagaaatcgttcttcgaatataaatctgcagtttagatgtgtgattatatgtttgcgcattggcatcattcctagaaatgtgactgtagatgctgctgctgctgctattaattttaatgaacactctaatatgtacagtcagaacgggaagttcagctatggatatgcaagctctcccggtaaaagatcttctatggaggacttctatgaaactaggatcgacggcgttgaaggggaaatagttggtctatttggagtctttgatggacatggaggtgcacgtgcagctgaatatgtgaagcaaaatctcttcagtaacctgatcaggcatccaaagttcatctctgataccacagctgcaatagctgatgcatacaaccaaacagactcagagtttcttaaatcagaaaatagtcagaacagagatgctggttcaacggcgtcaacagccatcttagttggtgaccgtttacttgttgcaaatgtaggggactctagagctgtaatatgcagaggtggcaatgctattgctgtatcccgagatcacaagcctgatcaaagtgacgagcgccaaagaattgaggatgcaggaggatttgtcatgtgggctggaacatggagagttggaggagttcttgctgtttctcgtgcatttggcgataggttgttgaagcagtatgttgttgctgatccggagatacaggtattgactttttgccaaaatctcctcctatatattaaaaatgccactttgttattaacaattgaacataacctgcattggatttcaatagttagctacttgaatggcactttacaaaacttccttcgttcactcattagcataaatggaaaatttcaggaggaaaaagttgatagctctctcgagtttctcattcttgcaagtgatggtctctgggacgttgtatctaacgaggaagccgtaggcatgatcaaggcgatagaagatcccgaggaaggtgcaaagagactgatgatggaagcttaccaaagaggaagtgcagacaacataacttgtgtcgtcgtacgtttcttttcagaccaagcaggaggaataggttccagcagcaccaatatcccaatagatcatggtatcgtacctgaccgaatctccggtgactcatcaacctag

SEQ ID NO: 27620 - protein, 389 aa, Arabidopsis thaliana
  misc_feature (1)..(389): Ceres Seq. ID no. 1822331
MSLLKSRNRSSNINLQFRCVIICLRIGIIPRNVTVDAAAAAINFNEHSNMYSQNGKFSYGYASSPGKRSSMEDFYETRIDGVEGEIVGLFGVFDGHGGARAAEYVKQNLFSNLIRHPKFISDTTAAIADAYNQTDSEFLKSENSQNRDAGSTASTAILVGDRLLVANVGDSRAVICRGGNAIAVSRDHKPDQSDERQRIEDAGGFVMWAGTWRVGGVLAVSRAFGDRLLKQYVVADPEIQVLTFCQNLLLYIKNATLLLTIEHNLHWISIVSYLNGTLQNFLRSLISINGKFQEEKVDSSLEFLILASDGLWDVVSNEEAVGMIKAIEDPEEGAKRLMMEAYQRGSADNITCVVVRFFSDQAGGIGSSSTNIPIDHGIVPDRISGDSST

SEQ ID NO: 27621 - protein, 340 aa, Arabidopsis thaliana
  misc_feature (1)..(340): Ceres Seq. ID no. 1822332
MYSQNGKFSYGYASSPGKRSSMEDFYETRIDGVEGEIVGLFGVFDGHGGARAAEYVKQNLFSNLIRHPKFISDTTAAIADAYNQTDSEFLKSENSQNRDAGSTASTAILVGDRLLVANVGDSRAVICRGGNAIAVSRDHKPDQSDERQRIEDAGGFVMWAGTWRVGGVLAVSRAFGDRLLKQYVVADPEIQVLTFCQNLLLYIKNATLLLTIEHNLHWISIVSYLNGTLQNFLRSLISINGKFQEEKVDSSLEFLILASDGLWDVVSNEEAVGMIKAIEDPEEGAKRLMMEAYQRGSADNITCVVVRFFSDQAGGIGSSSTNIPIDHGIVPDRISGDSST

SEQ ID NO: 27622 - protein, 319 aa, Arabidopsis thaliana
  misc_feature (1)..(319): Ceres Seq. ID no. 1822333
MEDFYETRIDGVEGEIVGLFGVFDGHGGARAAEYVKQNLFSNLIRHPKFISDTTAAIADAYNQTDSEFLKSENSQNRDAGSTASTAILVGDRLLVANVGDSRAVICRGGNAIAVSRDHKPDQSDERQRIEDAGGFVMWAGTWRVGGVLAVSRAFGDRLLKQYVVADPEIQVLTFCQNLLLYIKNATLLLTIEHNLHWISIVSYLNGTLQNFLRSLISINGKFQEEKVDSSLEFLILASDGLWDVVSNEEAVGMIKAIEDPEEGAKRLMMEAYQRGSADNITCVVVRFFSDQAGGIGSSSTNIPIDHGIVPDRISGDSST

SEQ ID NO: 27623 - DNA, 882 bp, Arabidopsis thaliana
  misc_feature (1)..(882): Ceres Seq. ID no. 1822951
atggatccaccattcaacgaaatatacaataaccttttgtataatcagatcacaaagaaagataacgatgtttctgaaataccctttagcttctcagtcacagccgtcgtcgaggaggtggagcttcctgtgattgacgtcagccgtttgattgatggagccgaggaggagagagagaaatgtaaggaagcgattgcgagagcttcgagggagtggggattttttcaagtgataaaccatggaatatcaatggatgtgttggagaagatgagacaagagcaaattagggtctttagagagccttttgacaagaaaagtaactcaacaatggagaaatttgcttcggaatcagaggcattagcatatatgttggcagaggttcttgcagaaaaatctggacaaaattcaagtttcttcaaagaaaactgtgtgagaaatacatgttatctaaggatgaaccgatatccaccttgtcccaaaccatcggaggtgtacggattaatgccacacacggacagtgatttcctcacaatcttgtatcaagatcaagtcggaggactccaacttatcaaagacaatagatggatcgctgttaaacctaatcctaaagctctcattatcaatattggtgacttatttcaggcatggagcaatggcatgtacaaaagtgttgaacaccgtgtgatgacgaacccaaaggtggagagattctcaacggcttattttatgtgtccatcatacgacgccgttatagagtgttcaagtgatcgtcctgcttatagaaatttcagcttcagagaattcagacaacaagttcaagaagatgttaagaagtttggttttaaagttggccttcctaggttccttaatcacgtctactaa

SEQ ID NO: 27624 - protein, 293 aa, Arabidopsis thaliana
  misc_feature (1)..(293): Ceres Seq. ID no. 1822952
MDPPFNEIYNNLLYNQITKKDNDVSEIPFSFSVTAVVEEVELPVIDVSRLIDGAEEEREKCKEAIARASREWGFFQVINHGISMDVLEKMRQEQIRVFREPFDKKSNSTMEKFASESEALAYMLAEVLAEKSGQNSSFFKENCVRNTCYLRMNRYPPCPKPSEVYGLMPHTDSDFLTILYQDQVGGLQLIKDNRWIAVKPNPKALIINIGDLFQAWSNGMYKSVEHRVMTNPKVERFSTAYFMCPSYDAVIECSSDRPAYRNFSFREFRQQVQEDVKKFGFKVGLPRFLNHVY

SEQ ID NO: 27625 - protein, 210 aa, Arabidopsis thaliana
  misc_feature (1)..(210): Ceres Seq. ID no. 1822953
MDVLEKMRQEQIRVFREPFDKKSNSTMEKFASESEALAYMLAEVLAEKSGQNSSFFKENCVRNTCYLRMNRYPPCPKPSEVYGLMPHTDSDFLTILYQDQVGGLQLIKDNRWIAVKPNPKALIINIGDLFQAWSNGMYKSVEHRVMTNPKVERFSTAYFMCPSYDAVIECSSDRPAYRNFSFREFRQQVQEDVKKFGFKVGLPRFLNHVY

SEQ ID NO: 27626 - protein, 204 aa, Arabidopsis thaliana
  misc_feature (1)..(204): Ceres Seq. ID no. 1822954
MRQEQIRVFREPFDKKSNSTMEKFASESEALAYMLAEVLAEKSGQNSSFFKENCVRNTCYLRMNRYPPCPKPSEVYGLMPHTDSDFLTILYQDQVGGLQLIKDNRWIAVKPNPKALIINIGDLFQAWSNGMYKSVEHRVMTNPKVERFSTAYFMCPSYDAVIECSSDRPAYRNFSFREFRQQVQEDVKKFGFKVGLPRFLNHVY

SEQ ID NO: 27627 - DNA, 687 bp, Arabidopsis thaliana
  misc_feature (1)..(687): Ceres Seq. ID no. 1822975
atgatcagattcgcgagaccaaaacctataattgactcagtgagttacaatcttctccagaaatgttacgctagtggaacccccaaaggaaaatcgaagctgaagacaggccaatcattgaaacgcaacaaactcacaatcaaaaaaggcggtggaaacggcggtggcagaggtggtgatgaggtggataagggaaaaggaagaatctcagatcaatgcataaacgctccttgtcctgttcgttacctgagacctaaggaaagagagcgagaagcgagacgagagaagctagggctaatcagtaaagcgaggcaaaaagagattgattttcagaagaaaggtggatcctttacgatgggagttactactgcgccgatgaggattgggactccaggattggattacatttcgttagggatttttacggaagatgagttaccaaagtataaggttacagtggaggatgggattagacttgcgaaagagtatagtagagtgcttatgagagagcatagagcgagacgtgtagcggagattagtttgatgaagatgaggaacgctgcggttgaggcattgccggagaatttgaagaaggcggctttagtgcgtgatttgactccgtttccggtgagtcgaggtacggtacgcttactccacctattgaagggtatttggagaggattatga

SEQ ID NO: 27628 - protein, 228 aa, Arabidopsis thaliana
  misc_feature (1)..(228): Ceres Seq. ID no. 1822976
MIRFARPKPIIDSVSYNLLQKCYASGTPKGKSKLKTGQSLKRNKLTIKKGGGNGGGRGGDEVDKGKGRISDQCINAPCPVRYLRPKEREREARREKLGLISKARQKEIDFQKKGGSFTMGVTTAPMRIGTPGLDYISLGIFTEDELPKYKVTVEDGIRLAKEYSRVLMREHRARRVAEISLMKMRNAAVEALPENLKKAALVRDLTPFPVSRGTVRLLHLLKGIWRGL

SEQ ID NO: 27629 - DNA, 1293 bp, Arabidopsis thaliana
  misc_feature (1)..(1293): Ceres Seq. ID no. 1823154
atggctgtggctcgtataaagcttataaggaacaagagattagttgtggtgaagcaaatgaggcgtgacatcgctgttcttcttcaatccggtcaagatgccactgctcgaatcagagttgagcatgtgataagggaacagaacattcaggcagcaaacgaaatcattgagcttttctgtgaacttattgtttctcgtctcactatcatcactaagcaaaagcaatgtcctgtggatcttaaggaaggtattgctagtttgatttttgctgcgcctagatgctctgaaattcctgagcttggagatcttagagacatctttgcgaagaaatatgggaaagattttgtatctgctgctactgatttgcgtcctagctgcggtgttaaccggatgttgattgataagctttcggttagaaatcccggtggagaatacaaactgaaaatcatgaaggaaattgcaaaggaattccaggttgattgggatactacagagacagagcaagaacttctcaaacctcaagaagaaagcatagacgggccacgtaagtttgttagcgcttcaagcttaccagttaatcgtgcagctatcaacgagcctattgatcctaccaaagcagtgccaagatcgactagtagcatgagcatcaacacgcattatcatgacaccgagtcagcagcggaagcagctacagaattagccaaacaggcagttgcagcagcacaagtagcctccttattagctaccagaagagacagcagcaacaaggagttctctgtatcttctgatcattcaacacaccagaaggattcacagtacatggatcatcatcatcatcatccaggttcaagaagacaatcacgagactccgaaacaagttcctattacgcaaaacctggtgcagaaaacagaggaatgggtaggagacacagctacaacaatccgggtattaatgaatctgactacgaggaagagtataccaataccgaagcagaagcaaaagaaacaatgaggaggagacacagctacaaccctcgatcagttcctcctcctgcaacttctgagatcaagtttgatgagtcagactactacgaggaagagacagagccagatgaaccatcacagggtcgtgtttcttctctcccgccaaaccgagcaccgcctcaggctcctcagtccggtgagtccagacaggactcgagcggtcaccaggttcacccaaaactgcctgactatgatattttggctgcacgttttgaagcaatcagacacagtaaagggccattgatctga

SEQ ID NO: 27630 - protein, 430 aa, Arabidopsis thaliana
  misc_feature (1)..(430): Ceres Seq. ID no. 1823155
MAVARIKLIRNKRLVVVKQMRRDIAVLLQSGQDATARIRVEHVIREQNIQAANEIIELFCELIVSRLTIITKQKQCPVDLKEGIASLIFAAPRCSEIPELGDLRDIFAKKYGKDFVSAATDLRPSCGVNRMLIDKLSVRNPGGEYKLKIMKEIAKEFQVDWDTTETEQELLKPQEESIDGPRKFVSASSLPVNRAAINEPIDPTKAVPRSTSSMSINTHYHDTESAAEAATELAKQAVAAAQVASLLATRRDSSNKEFSVSSDHSTHQKDSQYMDHHHHHPGSRRQSRDSETSSYYAKPGAENRGMGRRHSYNNPGINESDYEEEYTNTEAEAKETMRRRHSYNPRSVPPPATSEIKFDESDYYEEETEPDEPSQGRVSSLPPNRAPPQAPQSGESRQDSSGHQVHPKLPDYDILAARFEAIRHSKGPLI

SEQ ID NO: 27631 - protein, 411 aa, Arabidopsis thaliana
  misc_feature (1)..(411): Ceres Seq. ID no. 1823156
MRRDIAVLLQSGQDATARIRVEHVIREQNIQAANEIIELFCELIVSRLTIITKQKQCPVDLKEGIASLIFAAPRCSEIPELGDLRDIFAKKYGKDFVSAATDLRPSCGVNRMLIDKLSVRNPGGEYKLKIMKEIAKEFQVDWDTTETEQELLKPQEESIDGPRKFVSASSLPVNRAAINEPIDPTKAVPRSTSSMSINTHYHDTESAAEAATELAKQAVAAAQVASLLATRRDSSNKEFSVSSDHSTHQKDSQYMDHHHHHPGSRRQSRDSETSSYYAKPGAENRGMGRRHSYNNPGINESDYEEEYTNTEAEAKETMRRRHSYNPRSVPPPATSEIKFDESDYYEEETEPDEPSQGRVSSLPPNRAPPQAPQSGESRQDSSGHQVHPKLPDYDILAARFEAIRHSKGPLI

SEQ ID NO: 27632 - protein, 300 aa, Arabidopsis thaliana
  misc_feature (1)..(300): Ceres Seq. ID no. 1823157
MLIDKLSVRNPGGEYKLKIMKEIAKEFQVDWDTTETEQELLKPQEESIDGPRKFVSASSLPVNRAAINEPIDPTKAVPRSTSSMSINTHYHDTESAAEAATELAKQAVAAAQVASLLATRRDSSNKEFSVSSDHSTHQKDSQYMDHHHHHPGSRRQSRDSETSSYYAKPGAENRGMGRRHSYNNPGINESDYEEEYTNTEAEAKETMRRRHSYNPRSVPPPATSEIKFDESDYYEEETEPDEPSQGRVSSLPPNRAPPQAPQSGESRQDSSGHQVHPKLPDYDILAARFEAIRHSKGPLI

SEQ ID NO: 27633 - DNA, 1545 bp, Arabidopsis thaliana
  misc_feature (1)..(1545): Ceres Seq. ID no. 1823437
atgcatctgattaatgcggtggcggcggcgaggattttatccggaatcggacaatctaacggtaataacggaggagaagcgattccgtttggatcgtttgagtggatcacttacgccggaatatcttgtttcctcgtactcttcgccgggattatgtctggtcttactttgggacttatgtctcttggtcttgtcgagcttgagattcttcaacgtagtggtactcctaatgagaagaaacaagccgctgcgatttttccggttgttcagaaacagcatcagcttttagtgacactgcttctgtgtaatgctatggctatggaggggcttcctatatatttggataagttattcaatgaatacgttgcgattattctttctgtcacattcgttcttgcttacggtgaggttattcctcaagcgatatgcactaggtatggactcgcggttggagcgaattttgtctggcttgtccgcattttaatgactctctgctatccgattgcctttcccattggcaaggtaaatatagtgtgtttggtcaagaatgttttggaatgtagtctgattttagatttggtgctgggacacaatgatgctttatttaggcgggctcagttgaaagctcttgtatccattcacagccaagaggctggtaagggaggtgagcttacacatgatgagacgacaatcattagtggagctcttgatttgactgagaagactgcacaagaagccatgacaccaattgagtctaccttctccttggatgtaaattcaaaattggattgggaagctatggggaagattctggcacgaggccatagccgcgttcctgtctactctgggaatccgaaaaacgttatcggacttctcttggtaatgttgctgactcttattttgcatgtttcaatggtggcttatcatgtttctgcaaactctaatcaagaaattgttctgttttctagggttccagctgatatgcctctctatgatatactgaatgagtttcaaaagggaagcagtcacatggctgcagttgtgaaggttaaggggaaaagcaaagtcccaccttcaactttgcttgaagaacacactgatgaaagcaatgactccgacttgactgcacctttgttactaaaacgagagggaaaccatgacaatgtcattgtcacaatcgacaaggctaatggacaatctttctttcaaaacaacgagagtggacctcacgggttttcacatacttcagaggctatcgaggatggtgaggtaattggtatcatcactttagaagatgtctttgaagaacttttgcaagaagagattgtggatgaaactgatgaatatgttgacgtacataaaaggattcgagtagcagcagcagcggctgcttcatcaatagcgagagctccttcaagccggaagttgcttgcgcaaaagggaactggaggacaaaataagcaagggcagacgaataaagttcctggtcaggaacaagataaaatgcttggaactattaccgagccgattcgaagaaacaactga

SEQ ID NO: 27634 - protein, 514 aa, Arabidopsis thaliana
  misc_feature (1)..(514): Ceres Seq. ID no. 1823438
MHLINAVAAARILSGIGQSNGNNGGEAIPFGSFEWITYAGISCFLVLFAGIMSGLTLGLMSLGLVELEILQRSGTPNEKKQAAAIFPVVQKQHQLLVTLLLCNAMAMEGLPIYLDKLFNEYVAIILSVTFVLAYGEVIPQAICTRYGLAVGANFVWLVRILMTLCYPIAFPIGKVNIVCLVKNVLECSLILDLVLGHNDALFRRAQLKALVSIHSQEAGKGGELTHDETTIISGALDLTEKTAQEAMTPIESTFSLDVNSKLDWEAMGKILARGHSRVPVYSGNPKNVIGLLLVMLLTLILHVSMVAYHVSANSNQEIVLFSRVPADMPLYDILNEFQKGSSHMAAVVKVKGKSKVPPSTLLEEHTDESNDSDLTAPLLLKREGNHDNVIVTIDKANGQSFFQNNESGPHGFSHTSEAIEDGEVIGIITLEDVFEELLQEEIVDETDEYVDVHKRIRVAAAAAASSIARAPSSRKLLAQKGTGGQNKQGQTNKVPGQEQDKMLGTITEPIRRNN

SEQ ID NO: 27635 - protein, 463 aa, Arabidopsis thaliana
  misc_feature (1)..(463): Ceres Seq. ID no. 1823439
MSGLTLGLMSLGLVELEILQRSGTPNEKKQAAAIFPVVQKQHQLLVTLLLCNAMAMEGLPIYLDKLFNEYVAIILSVTFVLAYGEVIPQAICTRYGLAVGANFVWLVRILMTLCYPIAFPIGKVNIVCLVKNVLECSLILDLVLGHNDALFRRAQLKALVSIHSQEAGKGGELTHDETTIISGALDLTEKTAQEAMTPIESTFSLDVNSKLDWEAMGKILARGHSRVPVYSGNPKNVIGLLLVMLLTLILHVSMVAYHVSANSNQEIVLFSRVPADMPLYDILNEFQKGSSHMAAVVKVKGKSKVPPSTLLEEHTDESNDSDLTAPLLLKREGNHDNVIVTIDKANGQSFFQNNESGPHGFSHTSEAIEDGEVIGIITLEDVFEELLQEEIVDETDEYVDVHKRIRVAAAAAASSIARAPSSRKLLAQKGTGGQNKQGQTNKVPGQEQDKMLGTITEPIRRNN

SEQ ID NO: 27636 - protein, 455 aa, Arabidopsis thaliana
  misc_feature (1)..(455): Ceres Seq. ID no. 1823440
MSLGLVELEILQRSGTPNEKKQAAAIFPVVQKQHQLLVTLLLCNAMAMEGLPIYLDKLFNEYVAIILSVTFVLAYGEVIPQAICTRYGLAVGANFVWLVRILMTLCYPIAFPIGKVNIVCLVKNVLECSLILDLVLGHNDALFRRAQLKALVSIHSQEAGKGGELTHDETTIISGALDLTEKTAQEAMTPIESTFSLDVNSKLDWEAMGKILARGHSRVPVYSGNPKNVIGLLLVMLLTLILHVSMVAYHVSANSNQEIVLFSRVPADMPLYDILNEFQKGSSHMAAVVKVKGKSKVPPSTLLEEHTDESNDSDLTAPLLLKREGNHDNVIVTIDKANGQSFFQNNESGPHGFSHTSEAIEDGEVIGIITLEDVFEELLQEEIVDETDEYVDVHKRIRVAAAAAASSIARAPSSRKLLAQKGTGGQNKQGQTNKVPGQEQDKMLGTITEPIRRNN

SEQ ID NO: 27637 - DNA, 1386 bp, Arabidopsis thaliana
  misc_feature (1)..(1386): Ceres Seq. ID no. 1823594
atgggtgaagaaaagaggagaatttcaggaagatcagtttcacttccatcgatagacatattactagacgagaaaccaggttggccatttcttaaaagagcaagtttagggacaccacaacaagttcacaaatggcacacacgaaaagtctcagtggtcaattgggtcatgagcttacctgaacggtttccaaatcatcaacagactctaaactatgagacaagcttgataaagaaacaaatcaaggacatattgagagacaataacaaatggttcaactacaatgttcttaggaaagcaacatcagatttctctcaagagaatgtgattgggaaaggaggatgcaacgaagtgtaccgagggattcttgaagatggaaaaggcattgcagtgaaaatcttgaagtcatcatctaaagaagcaatgacaaatttcgttcatgaaatcaacattatctcttctttgagtcaccaaaacatctcaccgttacttggtgtttgtgtccaagacaatgaactaatctccgtttacaatctttcaaacacaggaagtttagaagaaacccttcacggtaagcaaaagggaaagtatgtattatcatgggaagagagattcaagatagctatcgggttggcggaagcattagactatcttcataaccgatgttctaagccagtgattcatagagatgtcaaaacttctaacgtccttctatcacttgagctccaacctcagctgtcagattttggtctgtcgatgtggggaccgacaacatcttctcgatattcgatacaaggtgatgtggtgggaacatttggatatcttgcaccggagtacttcatgtatggaaaagtcagtgataaagttgatgtttacgcctttggagtggttctgcttgaactcatttctggaagaaatcctatttcacctcagaatcctagaggacaagagagtttgcataagcaacacttcgtgaaacctaagaaaagataccttggaatgcaggcaaagcctttgattgataccggaaatttaaaagtactgttggatccagacgttacagatatattcgacgagtctcagtttcaaagaatggtacttgctgcttcacattgcctcacaagatcagccacacatcgtcccaatataagacaaatactgaggctactaagagatgaaaacgaagccgggaaatggattatggaagaagaaggaaatgaagattgcttcgatgacgaggtttacccgaattccagcacagaattacacttaaaccttgcgatgcttgaggtggaagacgatgaaactgcatcaatcagcagcatggagagaagtaacaacagccttttttcttctacttgttcatctagggagcttcaaacataa

SEQ ID NO: 27638 - protein, 461 aa, Arabidopsis thaliana
  misc_feature (1)..(461): Ceres Seq. ID no. 1823595
MGEEKRRISGRSVSLPSIDILLDEKPGWPFLKRASLGTPQQVHKWHTRKVSVVNWVMSLPERFPNHQQTLNYETSLIKKQIKDILRDNNKWFNYNVLRKATSDFSQENVIGKGGCNEVYRGILEDGKGIAVKILKSSSKEAMTNFVHEINIISSLSHQNISPLLGVCVQDNELISVYNLSNTGSLEETLHGKQKGKYVLSWEERFKIAIGLAEALDYLHNRCSKPVIHRDVKTSNVLLSLELQPQLSDFGLSMWGPTTSSRYSIQGDVVGTFGYLAPEYFMYGKVSDKVDVYAFGVVLLELISGRNPISPQNPRGQESLHKQHFVKPKKRYLGMQAKPLIDTGNLKVLLDPDVTDIFDESQFQRMVLAASHCLTRSATHRPNIRQILRLLRDENEAGKWIMEEEGNEDCFDDEVYPNSSTELHLNLAMLEVEDDETASISSMERSNNSLFSSTCSSRELQT

SEQ ID NO: 27639 - protein, 405 aa, Arabidopsis thaliana
  misc_feature (1)..(405): Ceres Seq. ID no. 1823596
MSLPERFPNHQQTLNYETSLIKKQIKDILRDNNKWFNYNVLRKATSDFSQENVIGKGGCNEVYRGILEDGKGIAVKILKSSSKEAMTNFVHEINIISSLSHQNISPLLGVCVQDNELISVYNLSNTGSLEETLHGKQKGKYVLSWEERFKIAIGLAEALDYLHNRCSKPVIHRDVKTSNVLLSLELQPQLSDFGLSMWGPTTSSRYSIQGDVVGTFGYLAPEYFMYGKVSDKVDVYAFGVVLLELISGRNPISPQNPRGQESLHKQHFVKPKKRYLGMQAKPLIDTGNLKVLLDPDVTDIFDESQFQRMVLAASHCLTRSATHRPNIRQILRLLRDENEAGKWIMEEEGNEDCFDDEVYPNSSTELHLNLAMLEVEDDETASISSMERSNNSLFSSTCSSRELQT

SEQ ID NO: 27640 - protein, 320 aa, Arabidopsis thaliana
  misc_feature (1)..(320): Ceres Seq. ID no. 1823597
MTNFVHEINIISSLSHQNISPLLGVCVQDNELISVYNLSNTGSLEETLHGKQKGKYVLSWEERFKIAIGLAEALDYLHNRCSKPVIHRDVKTSNVLLSLELQPQLSDFGLSMWGPTTSSRYSIQGDVVGTFGYLAPEYFMYGKVSDKVDVYAFGVVLLELISGRNPISPQNPRGQESLHKQHFVKPKKRYLGMQAKPLIDTGNLKVLLDPDVTDIFDESQFQRMVLAASHCLTRSATHRPNIRQILRLLRDENEAGKWIMEEEGNEDCFDDEVYPNSSTELHLNLAMLEVEDDETASISSMERSNNSLFSSTCSSRELQT

SEQ ID NO: 27641 - DNA, 636 bp, Arabidopsis thaliana
  misc_feature (1)..(636): Ceres Seq. ID no. 1823640
atggcgaccaaagtttacatagtgtatgtgaaaattatcttctgtctgagtggtgccattgacaatttgaaattagctcaagagattaggaaaggtgctgcttctgttgatggtgttgaagccatactctggcaggtacccgaaacgctccaagaagatgtgctctctaaaatgagtgcaccaccaaagagtgatgctcctattatcaccccaaacgagctcgctgaggctgatggatttatcttcggcttcccaacgaggtttggtatgatggctgctcagttcaaggcatttttagatgcgaccggcggcctttggaggactcagcaactcgccggtaaaccagccggaatcttctacagcacagggtcccaaggtggtggtcaagaaaccaccgcattaactgccattactcagctggttcatcacgggatgatctttgtcccgattggctacacatttggtgccggaatgtttgagatggaaaatgtgaaaggtggaagcccgtacggggcgggaacatttgccggagatgggtcgagacagccaacggaactggagttggggcaagcatttcaccaagggaagtacattgccgccataagtaagaagctcaagggacctgctgctgcttag

SEQ ID NO: 27642 - protein, 211 aa, Arabidopsis thaliana
  misc_feature (1)..(211): Ceres Seq. ID no. 1823641
MATKVYIVYVKIIFCLSGAIDNLKLAQEIRKGAASVDGVEAILWQVPETLQEDVLSKMSAPPKSDAPIITPNELAEADGFIFGFPTRFGMMAAQFKAFLDATGGLWRTQQLAGKPAGIFYSTGSQGGGQETTALTAITQLVHHGMIFVPIGYTFGAGMFEMENVKGGSPYGAGTFAGDGSRQPTELELGQAFHQGKYIAAISKKLKGPAAA

SEQ ID NO: 27643 - protein, 154 aa, Arabidopsis thaliana
  misc_feature (1)..(154): Ceres Seq. ID no. 1823642
MSAPPKSDAPIITPNELAEADGFIFGFPTRFGMMAAQFKAFLDATGGLWRTQQLAGKPAGIFYSTGSQGGGQETTALTAITQLVHHGMIFVPIGYTFGAGMFEMENVKGGSPYGAGTFAGDGSRQPTELELGQAFHQGKYIAAISKKLKGPAAA

SEQ ID NO: 27644 - protein, 122 aa, Arabidopsis thaliana
  misc_feature (1)..(122): Ceres Seq. ID no. 1823643
MMAAQFKAFLDATGGLWRTQQLAGKPAGIFYSTGSQGGGQETTALTAITQLVHHGMIFVPIGYTFGAGMFEMENVKGGSPYGAGTFAGDGSRQPTELELGQAFHQGKYIAAISKKLKGPAAA

SEQ ID NO: 27645 - DNA, 2061 bp, Arabidopsis thaliana
  misc_feature (1)..(2061): Ceres Seq. ID no. 1823746
atggttatggacttgaagcttatagcagcaggattacgtcattgtgggaaagtacaagcctttaagcgtggagaatcaattcaagctcatgtaatcaagcaagggatctctcaaaatgtgtttatagcgaataacgtgatctcaatgtatgtggatttcaggttgttgagtgatgcacataaagtgttcgatgaaatgtctgagagaaatattgtaacttggacaacgatggtttctgggtatacgagtgatggaaaacccaataaagctattgagttatacagaagaatgttagactccgaagaagaagcggcgaacgagtttatgtattctgcggttttgaaagcttgtgggttagtgggtgatattcagctggggattttggtttatgaaagaattggtaaagagaatttgagaggtgatgttgttttgatgaatagtgttgttgatatgtatgttaagaatgggagacttatcgaagctaatagcagttttaaggagattttacggcctagttcgacttcgtggaacactcttatttctggttattgtaaagctggtttgatggatgaagcggttactttgttccatcgaatgccgcagccaaatgtcgtgtcttggaactgtttgatatcgggatttgtcgataagggtagtcctcgtgcgttggagtttttagttaggatgcagagagaaggacttgtgttagacggttttgctttaccatgtggtcttaaagcttgtagttttggtggcttattaacaatgggtaaacagctgcattgttgtgtcgtaaagtcgggtctagagtctagcccgttcgcaatatctgctcttattgatatgtactcgaactgtggctctctaatatatgcagctgatgtttttcatcaggaaaaactggccgttaatagtagtgtcgcggtttggaattctatgctctctggatttttgataaatgaggagaatgaagcagcattatggctgcttttgcagatatatcagtcagatttgtgttttgattcctacactctaagtggtgccttaaagatatgtatcaactatgtcaacttaagactcgggcttcaagtacatagtttagttgtagtaagtggttatgagttggattacatcgtaggaagtattcttgttgatttacatgcaaatgttgggaatatacaagatgcacataaactgtttcataggcttccaaataaagatatcatcgctttctctggcttgatacgaggctgtgtgaaatcagggttcaattctttagcattttatctgttcagggaattaatcaagttgggactcgatgctgaccagttcatcgtctcaaatattcttaaagtttgttcaagtttagcatctcttggatggggtaagcaaattcatgggttgtgtataaagaaaggttatgaatcagaacctgtcacagcgacagcactagtagatatgtatgtaaaatgtggtgagatagataatggtgtagtgttgtttgatggtatgttagaaagagatgttgtctcttggacagggataattgttggattcggacaaaacggacgagtcgaagaagcgtttcggtatttccacaagatgataaatattggaattgaaccaaataaggtaacttttttggggcttctttctgcttgccgacattctggactacttgaagaagcaagatcaaccctcgaaacgatgaaatctgaatatggtcttgaaccgtatctagagcattattattgtgtagttgatcttcttggtcaagccgggctgttccaagaggctaacgaattgataaataaaatgccgttggagcccgacaaaacaatatggacgtctctgctcactgcttgcggaactcacaagaatgccggactggttactgtaattgctgagaaattactcaaggggtttccggatgatccatcggtttatacatctctttcgaatgcttatgctacgttaggcatgtgggatcagttaagtaaagtgagagaagctgctaagaagctaggggcaaaagaatctggaatgagttggataatttag

SEQ ID NO: 27646 - protein, 686 aa, Arabidopsis thaliana
  misc_feature (1)..(686): Ceres Seq. ID no. 1823747
MVMDLKLIAAGLRHCGKVQAFKRGESIQAHVIKQGISQNVFIANNVISMYVDFRLLSDAHKVFDEMSERNIVTWTTMVSGYTSDGKPNKAIELYRRMLDSEEEAANEFMYSAVLKACGLVGDIQLGILVYERIGKENLRGDVVLMNSVVDMYVKNGRLIEANSSFKEILRPSSTSWNTLISGYCKAGLMDEAVTLFHRMPQPNVVSWNCLISGFVDKGSPRALEFLVRMQREGLVLDGFALPCGLKACSFGGLLTMGKQLHCCVVKSGLESSPFAISALIDMYSNCGSLIYAADVFHQEKLAVNSSVAVWNSMLSGFLINEENEAALWLLLQIYQSDLCFDSYTLSGALKICINYVNLRLGLQVHSLVVVSGYELDYIVGSILVDLHANVGNIQDAHKLFHRLPNKDIIAFSGLIRGCVKSGFNSLAFYLFRELIKLGLDADQFIVSNILKVCSSLASLGWGKQIHGLCIKKGYESEPVTATALVDMYVKCGEIDNGVVLFDGMLERDVVSWTGIIVGFGQNGRVEEAFRYFHKMINIGIEPNKVTFLGLLSACRHSGLLEEARSTLETMKSEYGLEPYLEHYYCVVDLLGQAGLFQEANELINKMPLEPDKTIWTSLLTACGTHKNAGLVTVIAEKLLKGFPDDPSVYTSLSNAYATLGMWDQLSKVREAAKKLGAKESGMSWII

SEQ ID NO: 27647 - protein, 684 aa, Arabidopsis thaliana
  misc_feature (1)..(684): Ceres Seq. ID no. 1823748
MDLKLIAAGLRHCGKVQAFKRGESIQAHVIKQGISQNVFIANNVISMYVDFRLLSDAHKVFDEMSERNIVTWTTMVSGYTSDGKPNKAIELYRRMLDSEEEAANEFMYSAVLKACGLVGDIQLGILVYERIGKENLRGDVVLMNSVVDMYVKNGRLIEANSSFKEILRPSSTSWNTLISGYCKAGLMDEAVTLFHRMPQPNVVSWNCLISGFVDKGSPRALEFLVRMQREGLVLDGFALPCGLKACSFGGLLTMGKQLHCCVVKSGLESSPFAISALIDMYSNCGSLIYAADVFHQEKLAVNSSVAVWNSMLSGFLINEENEAALWLLLQIYQSDLCFDSYTLSGALKICINYVNLRLGLQVHSLVVVSGYELDYIVGSILVDLHANVGNIQDAHKLFHRLPNKDIIAFSGLIRGCVKSGFNSLAFYLFRELIKLGLDADQFIVSNILKVCSSLASLGWGKQIHGLCIKKGYESEPVTATALVDMYVKCGEIDNGVVLFDGMLERDVVSWTGIIVGFGQNGRVEEAFRYFHKMINIGIEPNKVTFLGLLSACRHSGLLEEARSTLETMKSEYGLEPYLEHYYCVVDLLGQAGLFQEANELINKMPLEPDKTIWTSLLTACGTHKNAGLVTVIAEKLLKGFPDDPSVYTSLSNAYATLGMWDQLSKVREAAKKLGAKESGMSWII

SEQ ID NO: 27648 - protein, 638 aa, Arabidopsis thaliana
  misc_feature (1)..(638): Ceres Seq. ID no. 1823749
MYVDFRLLSDAHKVFDEMSERNIVTWTTMVSGYTSDGKPNKAIELYRRMLDSEEEAANEFMYSAVLKACGLVGDIQLGILVYERIGKENLRGDVVLMNSVVDMYVKNGRLIEANSSFKEILRPSSTSWNTLISGYCKAGLMDEAVTLFHRMPQPNVVSWNCLISGFVDKGSPRALEFLVRMQREGLVLDGFALPCGLKACSFGGLLTMGKQLHCCVVKSGLESSPFAISALIDMYSNCGSLIYAADVFHQEKLAVNSSVAVWNSMLSGFLINEENEAALWLLLQIYQSDLCFDSYTLSGALKICINYVNLRLGLQVHSLVVVSGYELDYIVGSILVDLHANVGNIQDAHKLFHRLPNKDIIAFSGLIRGCVKSGFNSLAFYLFRELIKLGLDADQFIVSNILKVCSSLASLGWGKQIHGLCIKKGYESEPVTATALVDMYVKCGEIDNGVVLFDGMLERDVVSWTGIIVGFGQNGRVEEAFRYFHKMINIGIEPNKVTFLGLLSACRHSGLLEEARSTLETMKSEYGLEPYLEHYYCVVDLLGQAGLFQEANELINKMPLEPDKTIWTSLLTACGTHKNAGLVTVIAEKLLKGFPDDPSVYTSLSNAYATLGMWDQLSKVREAAKKLGAKESGMSWII

SEQ ID NO: 27649 - DNA, 2493 bp, Arabidopsis thaliana
  misc_feature (1)..(2493): Ceres Seq. ID no. 1823758
atgcatcccttctgttgcgttacaactgtctccgatcactctccttcgatgcctccgttacctgaaccacaaccgcctctaccgaattacgccgccgattttggttcggcgagatccgaaccgattataactcgatctgcttctcaaagttataatcattcaggtcaattcaataacaatcttattcatagtctctcgtttaatcatcaccagagtgatgtaacggatcgattggggcaacgcgttttagctttgccggcggcggttagagaaccaccggttgatgttaagattaacgatatcgttgggaatggaattgctgggattttgtataagtgggtgaattatggtagaggatggagacctaggtggtttgttttgcaagatggtgttctttcttattataagattcatggacctgataagatctttgttagtcctgaaactgagaaaggatctaaagtcattggagatgagtctgctcgtatgatctctaggcataatcgccgtggcggtagcagtagtagttgccagcttcgtcgcaagccattcggagaagtccatctcaaggtttcttcagttagagagagtagatcagatgataagaggttttccatttttactggtaccaagaggcttcatttgcgtgcggagacgcgagaggaccgaacaacttgggttgaggctttacaagctgttaaagatatgtttccaaggatgtctaatagtgagttgatggctccgactaacaatttggctatgtcgacggagaagattaggttaaggttgattgaggaaggagtaagtgagttagctattcaggactgtgagcaaattatgaagtctgagttctcagcacttcagagccagctggtgcttcttaaacagaagcagtggcttctcattgatactcttaggcagttggagacagaaaaggtagatcttgagaacacagttgtagatgaaagtcaaagacaggctgataatggatgttccggtgaattaagacacgagaagttcagtgaaggcactgccactgagtctgatgatgataatgaacgaggtgatgccgccgaggaggaatttgatgaggaagaaaataccttttttgatacacgtgattttctttcttcaagttctttcaagagtagtggttctggttttcgtacatcatcattttcgtccgatgaagatggctttgagtctgaagatgatattgatccttccatcaagtctattggatgcaattatcctcgcgtcaaaaggaggaagaatttacctgatccggttgaaaaagagaaaagtgttagcctttggtcaatgatcaaagacaatatagggaaggatctcacaaaagtctgtcttcctgtttacttcaacgagccactttcttctttacagaaatgttttgaggatttggaatattcgtaccttcttgaccgagcatttgaatatggcaaaaggggaaatagcctcatgaggatacttaatgtagctgcttttgctgtatctgggtatgcatcaactgaaggaagaatttgcaaaccttttaatccattgttaggtgaaacatacgaggcagactatccagacaaaggccttcgatttttttcagaaaaggtcagtcatcatcctatggttgtcgcatgccattgtgatggcaccggatggaaattctggggagacagcaatcttaggagcaaattctggggtcgatctattcagcttgatcctgttggtgtattgactttgcaatttgatgatggagaaatccttcagtggagtaaggtgactacatcaatatacaatctcatacttggtaaactatactgtgatcactatggtactatgcgtattgagggtagtgcagaatactcatgtaaacttaaattcaaggagcagtccatcatagaccgaaatcctcatcaggttcatggtatagttcaaaacaagagtgggaagacagtggcaactatgtttgggaaatgggatgagagcatacactttgtgacgggtgattgttctggaaaagggaaattgagtgaagatatgtcaggagctcaacttctctggaaacggagcaaacctcctggaaacgcaacaaagtataatctaacacgttttgcaatcacattgaatgagcttacacctgggcttaaggagaggctgccaccaacggattcaaggctgcgaccggaccagaggtatctcgagaacggagagtttgaaatggccaacacagaaaagttgcggctggaacagcgacaacgtcagaatgaattagaactcacatgctataaactgggctgtgtgatgagacaggcgaggaagatgcaggagagaggatggaagccgaggtggttcatgaaggagaaaggaagcgagtcttaccgatacaaaggaggttactgggaagcccgagaggatggatcatgggtagactgtccagacatcttcggccacatcgattccgatcaacaaatgatagagtaa

SEQ ID NO: 27650 - protein, 830 aa, Arabidopsis thaliana
  misc_feature (1)..(830): Ceres Seq. ID no. 1823759
MHPFCCVTTVSDHSPSMPPLPEPQPPLPNYAADFGSARSEPIITRSASQSYNHSGQFNNNLIHSLSFNHHQSDVTDRLGQRVLALPAAVREPPVDVKINDIVGNGIAGILYKWVNYGRGWRPRWFVLQDGVLSYYKIHGPDKIFVSPETEKGSKVIGDESARMISRHNRRGGSSSSCQLRRKPFGEVHLKVSSVRESRSDDKRFSIFTGTKRLHLRAETREDRTTWVEALQAVKDMFPRMSNSELMAPTNNLAMSTEKIRLRLIEEGVSELAIQDCEQIMKSEFSALQSQLVLLKQKQWLLIDTLRQLETEKVDLENTVVDESQRQADNGCSGELRHEKFSEGTATESDDDNERGDAAEEEFDEEENTFFDTRDFLSSSSFKSSGSGFRTSSFSSDEDGFESEDDIDPSIKSIGCNYPRVKRRKNLPDPVEKEKSVSLWSMIKDNIGKDLTKVCLPVYFNEPLSSLQKCFEDLEYSYLLDRAFEYGKRGNSLMRILNVAAFAVSGYASTEGRICKPFNPLLGETYEADYPDKGLRFFSEKVSHHPMVVACHCDGTGWKFWGDSNLRSKFWGRSIQLDPVGVLTLQFDDGEILQWSKVTTSIYNLILGKLYCDHYGTMRIEGSAEYSCKLKFKEQSIIDRNPHQVHGIVQNKSGKTVATMFGKWDESIHFVTGDCSGKGKLSEDMSGAQLLWKRSKPPGNATKYNLTRFAITLNELTPGLKERLPPTDSRLRPDQRYLENGEFEMANTEKLRLEQRQRQNELELTCYKLGCVMRQARKMQERGWKPRWFMKEKGSESYRYKGGYWEAREDGSWVDCPDIFGHIDSDQQMIE

SEQ ID NO: 27651 - protein, 814 aa, Arabidopsis thaliana
  misc_feature (1)..(814): Ceres Seq. ID no. 1823760
MPPLPEPQPPLPNYAADFGSARSEPIITRSASQSYNHSGQFNNNLIHSLSFNHHQSDVTDRLGQRVLALPAAVREPPVDVKINDIVGNGIAGILYKWVNYGRGWRPRWFVLQDGVLSYYKIHGPDKIFVSPETEKGSKVIGDESARMISRHNRRGGSSSSCQLRRKPFGEVHLKVSSVRESRSDDKRFSIFTGTKRLHLRAETREDRTTWVEALQAVKDMFPRMSNSELMAPTNNLAMSTEKIRLRLIEEGVSELAIQDCEQIMKSEFSALQSQLVLLKQKQWLLIDTLRQLETEKVDLENTVVDESQRQADNGCSGELRHEKFSEGTATESDDDNERGDAAEEEFDEEENTFFDTRDFLSSSSFKSSGSGFRTSSFSSDEDGFESEDDIDPSIKSIGCNYPRVKRRKNLPDPVEKEKSVSLWSMIKDNIGKDLTKVCLPVYFNEPLSSLQKCFEDLEYSYLLDRAFEYGKRGNSLMRILNVAAFAVSGYASTEGRICKPFNPLLGETYEADYPDKGLRFFSEKVSHHPMVVACHCDGTGWKFWGDSNLRSKFWGRSIQLDPVGVLTLQFDDGEILQWSKVTTSIYNLILGKLYCDHYGTMRIEGSAEYSCKLKFKEQSIIDRNPHQVHGIVQNKSGKTVATMFGKWDESIHFVTGDCSGKGKLSEDMSGAQLLWKRSKPPGNATKYNLTRFAITLNELTPGLKERLPPTDSRLRPDQRYLENGEFEMANTEKLRLEQRQRQNELELTCYKLGCVMRQARKMQERGWKPRWFMKEKGSESYRYKGGYWEAREDGSWVDCPDIFGHIDSDQQMIE

SEQ ID NO: 27652 - protein, 668 aa, Arabidopsis thaliana
  misc_feature (1)..(668): Ceres Seq. ID no. 1823761
MISRHNRRGGSSSSCQLRRKPFGEVHLKVSSVRESRSDDKRFSIFTGTKRLHLRAETREDRTTWVEALQAVKDMFPRMSNSELMAPTNNLAMSTEKIRLRLIEEGVSELAIQDCEQIMKSEFSALQSQLVLLKQKQWLLIDTLRQLETEKVDLENTVVDESQRQADNGCSGELRHEKFSEGTATESDDDNERGDAAEEEFDEEENTFFDTRDFLSSSSFKSSGSGFRTSSFSSDEDGFESEDDIDPSIKSIGCNYPRVKRRKNLPDPVEKEKSVSLWSMIKDNIGKDLTKVCLPVYFNEPLSSLQKCFEDLEYSYLLDRAFEYGKRGNSLMRILNVAAFAVSGYASTEGRICKPFNPLLGETYEADYPDKGLRFFSEKVSHHPMVVACHCDGTGWKFWGDSNLRSKFWGRSIQLDPVGVLTLQFDDGEILQWSKVTTSIYNLILGKLYCDHYGTMRIEGSAEYSCKLKFKEQSIIDRNPHQVHGIVQNKSGKTVATMFGKWDESIHFVTGDCSGKGKLSEDMSGAQLLWKRSKPPGNATKYNLTRFAITLNELTPGLKERLPPTDSRLRPDQRYLENGEFEMANTEKLRLEQRQRQNELELTCYKLGCVMRQARKMQERGWKPRWFMKEKGSESYRYKGGYWEAREDGSWVDCPDIFGHIDSDQQMIE

SEQ ID NO: 27653 - DNA, 1005 bp, Arabidopsis thaliana
  misc_feature (1)..(1005): Ceres Seq. ID no. 1823895
atgatggatgagtttatggatcttagaccagtgaagtacacagagcacaagactgttatcagaaagtacactaaaaagtcgtctatggagaggaagaccagtgttcgtgactcggccaggttggttcgggtctcaatgacggatcgtgacgccactgattcatcaagcgacgaggaagagtttctgttccctcgaagacgtgtcaagagattgattaacgagatcagagtcgagcctagcagctcttccaccggcgacgtctctgcttctccgacgaaggaccggaaaagaatcaacgttgattctacggttcaaaagccctctgtttccggccaaaaccagaagaagtaccgcggcgtgagacagcgaccatggggaaaatgggcggcggagattcgtgatcctgagcaacgccggagaatctggctcggtacttttgcaacggcggaggaagctgccatcgtctacgacaacgcagcaatcaaacttcgtggccctgatgctcttaccaacttcaccgtacaaccagaaccagaaccggtacaagaacaagaacaagaaccggagagcaacatgtcggtttcgatatcagaatcaatggacgattctcaacatctatcatctccgacatcggttctcaactaccaaacatatgtctcggaggaaccaatcgatagtcttatcaaaccggttaaacaagagtttcttgaaccagaacaagagccaataagctggcatcttggagaaggtaatactaatactaatgatgattcatttccattggacattacatttctcgacaactatttcaatgaatcattaccagacatctccatcttcgatcaacctatgtctcctattcaaccaacagagaatgatttcttcaacgaccttatgttattcgatagcaacgcagaagaatactactcctccgagatcaaagagattggttcatcgttcaacgatcttgatgattctttgatatccgatctcttacttgtgtga

SEQ ID NO: 27654 - protein, 334 aa, Arabidopsis thaliana
  misc_feature (1)..(334): Ceres Seq. ID no. 1823896
MMDEFMDLRPVKYTEHKTVIRKYTKKSSMERKTSVRDSARLVRVSMTDRDATDSSSDEEEFLFPRRRVKRLINEIRVEPSSSSTGDVSASPTKDRKRINVDSTVQKPSVSGQNQKKYRGVRQRPWGKWAAEIRDPEQRRRIWLGTFATAEEAAIVYDNAAIKLRGPDALTNFTVQPEPEPVQEQEQEPESNMSVSISESMDDSQHLSSPTSVLNYQTYVSEEPIDSLIKPVKQEFLEPEQEPISWHLGEGNTNTNDDSFPLDITFLDNYFNESLPDISIFDQPMSPIQPTENDFFNDLMLFDSNAEEYYSSEIKEIGSSFNDLDDSLISDLLLV

SEQ ID NO: 27655 - protein, 333 aa, Arabidopsis thaliana
  misc_feature (1)..(333): Ceres Seq. ID no. 1823897
MDEFMDLRPVKYTEHKTVIRKYTKKSSMERKTSVRDSARLVRVSMTDRDATDSSSDEEEFLFPRRRVKRLINEIRVEPSSSSTGDVSASPTKDRKRINVDSTVQKPSVSGQNQKKYRGVRQRPWGKWAAEIRDPEQRRRIWLGTFATAEEAAIVYDNAAIKLRGPDALTNFTVQPEPEPVQEQEQEPESNMSVSISESMDDSQHLSSPTSVLNYQTYVSEEPIDSLIKPVKQEFLEPEQEPISWHLGEGNTNTNDDSFPLDITFLDNYFNESLPDISIFDQPMSPIQPTENDFFNDLMLFDSNAEEYYSSEIKEIGSSFNDLDDSLISDLLLV

SEQ ID NO: 27656 - protein, 329 aa, Arabidopsis thaliana
  misc_feature (1)..(329): Ceres Seq. ID no. 1823898
MDLRPVKYTEHKTVIRKYTKKSSMERKTSVRDSARLVRVSMTDRDATDSSSDEEEFLFPRRRVKRLINEIRVEPSSSSTGDVSASPTKDRKRINVDSTVQKPSVSGQNQKKYRGVRQRPWGKWAAEIRDPEQRRRIWLGTFATAEEAAIVYDNAAIKLRGPDALTNFTVQPEPEPVQEQEQEPESNMSVSISESMDDSQHLSSPTSVLNYQTYVSEEPIDSLIKPVKQEFLEPEQEPISWHLGEGNTNTNDDSFPLDITFLDNYFNESLPDISIFDQPMSPIQPTENDFFNDLMLFDSNAEEYYSSEIKEIGSSFNDLDDSLISDLLLV

SEQ ID NO: 27657 - DNA, 2220 bp, Arabidopsis thaliana
  misc_feature (1)..(2220): Ceres Seq. ID no. 1823915
atggctacttctcgtctagctaggtttgtatcagaggttgctccacctcaatttgtgacggttatgaggaggcatagagcagcgaagcagaagctagacacaatcaaagaagaagagaataaagaagattctttcaatggtgggatggtggtgatgatgaagacatctcatcaacatactctattgatcttcagatcgtgtcgagatttagctgctattgtggggtttagaatccttctctttaccggattctcagggttttacttggttttcttagcttttaagttcccacatttcattgagatggttgctatgttgagtggtgatactggtttagatggggcattaagtgatactagtttagatgttagtttaagcggatcgttacgtaatgacatgttgaataggaagctagaagatgaagatcatcaaagtgggccttctactactcagaaggtgtcaccagaagagaagattaatggatctaaacagattcagccacttctgtttcggtatggtcgaatatcaggagaggtcatgagacgtaggaataggactattcatatgtcaccttttgaaagaatggcagatgaggcttggatacttggatccaaggcttgggaagatgttgataagtttgaggttgataagatcaacgagagtgcttctatattcgaaggaaaggtggagtcatgtccttctcagatctcaatgaatggagatgacttgaataaagccaataggatcatgttgcttccctgtggtcttgctgcaggatcttctattacaattcttggaactccacagtatgctcataaagaatctgttcctcagcgttcgagattgacaagaagctatggaatggttttggtttcacaatttatggttgagttgcaagggctgaagacaggggacggtgaatacccccctaagattcttcatttgaaccctaggatcaaaggtgattggaatcaccgaccagtcattgaacacaatacatgttataggatgcagtggggggttgctcaaagatgtgatggtactccatccaagaaggacgcagacgtgcttgttgacggattccgaagatgtgaaaagtggacgcagaatgacataattgacatggtggactcaaaggaatcaaagacaacatcatggttcaaacggtttataggacgtgaacaaaaaccagaagtcacttggtcattcccttttgcggaaggcaaggtctttgtcctaactttgcgagctggaattgatggtttccatattaatgttggtggaagacatgtgtcttcattcccttatcgaccgggatttaccatagaagatgccacagggctggcagttacaggagatgttgatattcattctattcatgctacttctctttcaacatctcatccgagtttctcaccgcagaaagctatagagttttcttcagaatggaaagctcctccattacctggcactccttttcgccttttcatgggtgttctctctgcaactaaccatttttcagagcgcatggcagtgagaaagacatggatgcaacatccttctattaaatcttcagatgtagtagcccgattctttgttgcacttaatccaagaaaggaagttaatgcaatgctaaagaaggaggctgaatattttggagatattgtgattctgccctttatggatcgatatgagctagtggtccttaagacaattgccatttgtgaatttgggaatgtgacagcgccatatataatgaagtgtgacgatgataccttcatcagagtggaatcaattttgaaacaaatcgatggagtctctccagaaaaatcactttatatggggaatctaaatcttagacatcgtcctcttagaactggcaagtggacagttacatgggaggagtggccagaagctgtgtatcctccttatgccaatggacccggatacataatctcaagcaacattgctaaatatattgtttctcagaattcaagacataagcttaggctattcaagatggaagatgtgagcatgggattgtgggtggagcaattcaacgcctctatgcagcctgtcgaatactcacacagctggaaattttgccaatacggatgcacactgaactattacactgcacattatcaatctccgagtcaaatgatgtgcctgtgggataatttgttgaaaggtcgaccacaatgttgcaatttcagatga

SEQ ID NO: 27658 - protein, 739 aa, Arabidopsis thaliana
  misc_feature (1)..(739): Ceres Seq. ID no. 1823916
MATSRLARFVSEVAPPQFVTVMRRHRAAKQKLDTIKEEENKEDSFNGGMVVMMKTSHQHTLLIFRSCRDLAAIVGFRILLFTGFSGFYLVFLAFKFPHFIEMVAMLSGDTGLDGALSDTSLDVSLSGSLRNDMLNRKLEDEDHQSGPSTTQKVSPEEKINGSKQIQPLLFRYGRISGEVMRRRNRTIHMSPFERMADEAWILGSKAWEDVDKFEVDKINESASIFEGKVESCPSQISMNGDDLNKANRIMLLPCGLAAGSSITILGTPQYAHKESVPQRSRLTRSYGMVLVSQFMVELQGLKTGDGEYPPKILHLNPRIKGDWNHRPVIEHNTCYRMQWGVAQRCDGTPSKKDADVLVDGFRRCEKWTQNDIIDMVDSKESKTTSWFKRFIGREQKPEVTWSFPFAEGKVFVLTLRAGIDGFHINVGGRHVSSFPYRPGFTIEDATGLAVTGDVDIHSIHATSLSTSHPSFSPQKAIEFSSEWKAPPLPGTPFRLFMGVLSATNHFSERMAVRKTWMQHPSIKSSDVVARFFVALNPRKEVNAMLKKEAEYFGDIVILPFMDRYELVVLKTIAICEFGNVTAPYIMKCDDDTFIRVESILKQIDGVSPEKSLYMGNLNLRHRPLRTGKWTVTWEEWPEAVYPPYANGPGYIISSNIAKYIVSQNSRHKLRLFKMEDVSMGLWVEQFNASMQPVEYSHSWKFCQYGCTLNYYTAHYQSPSQMMCLWDNLLKGRPQCCNFR

SEQ ID NO: 27659 - protein, 718 aa, Arabidopsis thaliana
  misc_feature (1)..(718): Ceres Seq. ID no. 1823917
MRRHRAAKQKLDTIKEEENKEDSFNGGMVVMMKTSHQHTLLIFRSCRDLAAIVGFRILLFTGFSGFYLVFLAFKFPHFIEMVAMLSGDTGLDGALSDTSLDVSLSGSLRNDMLNRKLEDEDHQSGPSTTQKVSPEEKINGSKQIQPLLFRYGRISGEVMRRRNRTIHMSPFERMADEAWILGSKAWEDVDKFEVDKINESASIFEGKVESCPSQISMNGDDLNKANRIMLLPCGLAAGSSITILGTPQYAHKESVPQRSRLTRSYGMVLVSQFMVELQGLKTGDGEYPPKILHLNPRIKGDWNHRPVIEHNTCYRMQWGVAQRCDGTPSKKDADVLVDGFRRCEKWTQNDIIDMVDSKESKTTSWFKRFIGREQKPEVTWSFPFAEGKVFVLTLRAGIDGFHINVGGRHVSSFPYRPGFTIEDATGLAVTGDVDIHSIHATSLSTSHPSFSPQKAIEFSSEWKAPPLPGTPFRLFMGVLSATNHFSERMAVRKTWMQHPSIKSSDVVARFFVALNPRKEVNAMLKKEAEYFGDIVILPFMDRYELVVLKTIAICEFGNVTAPYIMKCDDDTFIRVESILKQIDGVSPEKSLYMGNLNLRHRPLRTGKWTVTWEEWPEAVYPPYANGPGYIISSNIAKYIVSQNSRHKLRLFKMEDVSMGLWVEQFNASMQPVEYSHSWKFCQYGCTLNYYTAHYQSPSQMMCLWDNLLKGRPQCCNFR

SEQ ID NO: 27660 - protein, 691 aa, Arabidopsis thaliana
  misc_feature (1)..(691): Ceres Seq. ID no. 1823918
MVVMMKTSHQHTLLIFRSCRDLAAIVGFRILLFTGFSGFYLVFLAFKFPHFIEMVAMLSGDTGLDGALSDTSLDVSLSGSLRNDMLNRKLEDEDHQSGPSTTQKVSPEEKINGSKQIQPLLFRYGRISGEVMRRRNRTIHMSPFERMADEAWILGSKAWEDVDKFEVDKINESASIFEGKVESCPSQISMNGDDLNKANRIMLLPCGLAAGSSITILGTPQYAHKESVPQRSRLTRSYGMVLVSQFMVELQGLKTGDGEYPPKILHLNPRIKGDWNHRPVIEHNTCYRMQWGVAQRCDGTPSKKDADVLVDGFRRCEKWTQNDIIDMVDSKESKTTSWFKRFIGREQKPEVTWSFPFAEGKVFVLTLRAGIDGFHINVGGRHVSSFPYRPGFTIEDATGLAVTGDVDIHSIHATSLSTSHPSFSPQKAIEFSSEWKAPPLPGTPFRLFMGVLSATNHFSERMAVRKTWMQHPSIKSSDVVARFFVALNPRKEVNAMLKKEAEYFGDIVILPFMDRYELVVLKTIAICEFGNVTAPYIMKCDDDTFIRVESILKQIDGVSPEKSLYMGNLNLRHRPLRTGKWTVTWEEWPEAVYPPYANGPGYIISSNIAKYIVSQNSRHKLRLFKMEDVSMGLWVEQFNASMQPVEYSHSWKFCQYGCTLNYYTAHYQSPSQMMCLWDNLLKGRPQCCNFR

SEQ ID NO: 27661 - DNA, 1491 bp, Arabidopsis thaliana
  misc_feature (1)..(1491): Ceres Seq. ID no. 1824171
atggaaagcgaagcagcagcgactgttcaagccaccaggccgagaagagcacctaggactccggtgacagccattttgacggataagagaagacggaaacctaagagcaacaacgagtctcagttaccatttttgctacagcagagtcaaaaggccaccgttgacgacacttactctcagtggaagactcttcttcccattctctatgattcgtttgttaatcataccctcgtctggccctctctctcttgcagatgggggccacagcttgagcaagcaggttctaagactcaacgtctctatctctcggaacaaacgaatggcagtgtgcctaatactttggtcatagccaattgcgaaactgttaataggcaggtaattagtttttctctaccaaagcttcttaatgaaaaggcacactctccatttgtgaagaagtacaagaccatcatccaccctggagaggtcaacagaattagggaactccctcaaaatagcaagattgtagctactcacaccgacagtcctgatattctcatttggaacactgagactcaaccagaccggtatgctgtgcttggagctccagattctcgtccagatttgttactaattgggcaccaggatgatgctgaatttgctcttgcaatgtgcccaaccgaaccttttgttctctctggaggcaaggacaagtccgttattttgtggaatatccaagaccatatcacaatggctggttcggattccaaatcccctggatccagcttcaagcagactggtgaaggtagtgataaaactggtggtccttctgttggccctcgaggcatatataatggccacaaagatactgttgaagacgtggcattctgtccatctagtgcacaagaattctgcagtgttggtgacgattcttgccttatgctatgggacgcaagaactggcactagtcctgccatgaaggttgagaaggcacatgatgctgatcttcactgtgtcgattggaatcctcatgacaataatctgatcctgactgggtcagcagataacactgtccgtgtgtttgaccgccgaaaccttacctcaaatggagttggttcacctgtttacaaatttgaaggccacagagctgctgttctttgtgttcagtggtctcctgataaatcatctgtttttgggagttctgcagaagatggtctcttgaacatatgggattgtgatagggttggcaagaagtctgagcgtgcaaccaaaactcctgatgggcttttcttccagcatgctggtcacagggacaaagtggtcgacttccactggagcctattgaacccttggactattgtcagtgtttctgataattgtgagagtatcggtggaggtggtacattgcagatatggcggatgagtgacttgatttacagaccggaagatgaagtcctgacagagctagagaaattcaagtcacatgttttcacatgtacctccaagtcttga

SEQ ID NO: 27662 - protein, 496 aa, Arabidopsis thaliana
  misc_feature (1)..(496): Ceres Seq. ID no. 1824172
MESEAAATVQATRPRRAPRTPVTAILTDKRRRKPKSNNESQLPFLLQQSQKATVDDTYSQWKTLLPILYDSFVNHTLVWPSLSCRWGPQLEQAGSKTQRLYLSEQTNGSVPNTLVIANCETVNRQVISFSLPKLLNEKAHSPFVKKYKTIIHPGEVNRIRELPQNSKIVATHTDSPDILIWNTETQPDRYAVLGAPDSRPDLLLIGHQDDAEFALAMCPTEPFVLSGGKDKSVILWNIQDHITMAGSDSKSPGSSFKQTGEGSDKTGGPSVGPRGIYNGHKDTVEDVAFCPSSAQEFCSVGDDSCLMLWDARTGTSPAMKVEKAHDADLHCVDWNPHDNNLILTGSADNTVRVFDRRNLTSNGVGSPVYKFEGHRAAVLCVQWSPDKSSVFGSSAEDGLLNIWDCDRVGKKSERATKTPDGLFFQHAGHRDKVVDFHWSLLNPWTIVSVSDNCESIGGGGTLQIWRMSDLIYRPEDEVLTELEKFKSHVFTCTSKS

SEQ ID NO: 27663 - protein, 280 aa, Arabidopsis thaliana
  misc_feature (1)..(280): Ceres Seq. ID no. 1824173
MCPTEPFVLSGGKDKSVILWNIQDHITMAGSDSKSPGSSFKQTGEGSDKTGGPSVGPRGIYNGHKDTVEDVAFCPSSAQEFCSVGDDSCLMLWDARTGTSPAMKVEKAHDADLHCVDWNPHDNNLILTGSADNTVRVFDRRNLTSNGVGSPVYKFEGHRAAVLCVQWSPDKSSVFGSSAEDGLLNIWDCDRVGKKSERATKTPDGLFFQHAGHRDKVVDFHWSLLNPWTIVSVSDNCESIGGGGTLQIWRMSDLIYRPEDEVLTELEKFKSHVFTCTSKS

SEQ ID NO: 27664 - protein, 253 aa, Arabidopsis thaliana
  misc_feature (1)..(253): Ceres Seq. ID no. 1824174
MAGSDSKSPGSSFKQTGEGSDKTGGPSVGPRGIYNGHKDTVEDVAFCPSSAQEFCSVGDDSCLMLWDARTGTSPAMKVEKAHDADLHCVDWNPHDNNLILTGSADNTVRVFDRRNLTSNGVGSPVYKFEGHRAAVLCVQWSPDKSSVFGSSAEDGLLNIWDCDRVGKKSERATKTPDGLFFQHAGHRDKVVDFHWSLLNPWTIVSVSDNCESIGGGGTLQIWRMSDLIYRPEDEVLTELEKFKSHVFTCTSKS

SEQ ID NO: 27665 - DNA, 4587 bp, Arabidopsis thaliana
  misc_feature (1)..(4587): Ceres Seq. ID no. 1824207
atgggtcagaagaaaaaagctcccgcgccgttggattcggctctgatcaagctcgaatgcgagaaggcactgaagtcattcggtcgtgggagctacaacaaagcgattcgtctcattaaggattcatgctctcgccatcaagactctgccctaatccaccgtgttcagggaactatctgcgtgaaggttgctgctgtctacgaagatctagctacgaaacagaagtatctccggaatgcaattgaatctgctagaaaagctgtggagttgtctcctgattcgattgagtttgggcatttttatgccaacttgctttacgaggctgctaatgatggaaagagagagtacgacgaagttgtgcaagagtgtcatcgtgctctctctatcgaaaatccgattgatcctgctaaagagagtttgcaggatgaaactcagcttaagatattgacacctgaggctcgtattgttcatgtgcaggatgagctcaggtcactaatacagaaatccaacattagttcattgtccacttggatgaataatctgggaaaaggtgaagagaagtttcggttgatacctattaggagaatggctgaggatcctattgagagtaacttggttcagaccaggaggcctaatgagattaaaaaggctaacaagagtattgaagagataaggaaggaggttgaagttagggtagctgcagctaggttgttgcagcagaagtcagagtgtgagaatgtaggcgctgttgacaacaagggatcagatgcaacattaggttcggggaagagaagcggtgagaggagaaagcatgggaatgcaaggagaaacggctccacagcggatagaagggatcgggttaagtcatactgggattctatgagcaaagaaatgaagaaacaattgcttagagttaagcttagcgatcttaagagtcattttagtgcttcaaaggatgggaatgaaaatgagattattagtgaagctctttccttttgtgaggccaataagacttggaggttctgggtttgctgccagtgtagcgaaaagttcataaagtctgaggcttatatgcatcatattgtgcaggtgcacatgggtaatgtcttacctaagatgcaaatggttctgcctcaaagttttgacactgagaggattgatatgcttcttacttccccatggaaaccgttggatctctctgctgcggtaaaatggcttcgcagtcggcagaaaatccaaaactctgagtttagtgagtttcacgctggagataatatggatgacggtgacgattgcttcaaggatgcacggaatgatacttcaccagagaaagaaagccttggagactcttgcaagggttgtgatgagaatgacccagaagaaggtaagctgtcaatcacatttcctcctcctgatggatggcctatatctgatgatcctgaacgtgcaaagctccttgaaaaaatccgtgcagcctttgagctactgatcagacacaaatatttagctgccagccatcatgataaggtgatacagtttacgctggatgaacttcagaatcttgcctcggtgtcacaattcttaaatcgtagcttgaaccagtcacccatatgcatctgctttttgggagcttcccagctcagaaaaattctcaaattcctgcaggacttgtctcaggcctgtggattgagtcgatattctgaacaaagtaaccccaacgatgaatttaattttggggccctgtgtagagaagttacagaggagattcttcttgatggtgaagattcatgtcttcttttggatgaaaaattgcttggcactgagtgcatccaagagatatatatgggctcagcattgcataatgtagctgtagcaagttctggggatattgctaatggaaatgatgtgtcttctggtgcggatggatttctttcatggatcttcacaggaccctctagcgaggaacaagttgtgtcatggatgcgcacaaaggaagagaaaacaaatcaaggactggagatcatgcaacatcttgagaaggagttctatcacttgcagaacctctgcgagagaaaatgcgagcacttaagctacgagggagcactgcagactgttgaggatctttgtcttgaagaaagccggaagagggagacttcagcagagtttacccatgaaagctatgaatctgtgctgaggaaacgaagagaagagctaaatgaaaatgaccttgagttggtgtttatcagtagtaggtttgagttagatgctttaacaaatgtgttgaaagatgctgaaactcttaaccacaatcaatttggatatgaagaatcatatggctgcacgagttctcagctacgtgatctggaatctggtgaagctgatgaatgggggatgaaagattccttacatgaggctgacagtttcatagaggttgcgatccagaaacaaaaagagcaattgtctgcagagcttagcagaattgacgcgcaaatgatgcgaaatgtcactgggatgcagcaattagagctaaagcttggaccggtttcctccaacgattatcagatagtattgttacctttggtgaagtcctacatgcgtgcacatttggaggcgttggcagagaaagatgccactgagaagtctgatgctgcaagagaagcgttactttttgagctagctcttgattctaagaaggagggtcgaggaagaaatgataattcaaaacacacgctggaaaagtcgaaggacaagaaaaagattaaagacactaggaaactgaagaatttgaaggctactattggaaacgaccatcgcttcaatggtgactcaattgagcacagcctcctttcggttgcatcttttggtgatcattcagaggctgacgttgtttctgaagccattgaagcgttaagtgatgaggaagaggaatacagacgttgtaacgagttagaggaagaggagaggaagcttgcaaaaactctagagtatcaaagaagaattgagaatgaagctaaggagaagcacatcgccgaacaaaaaaagaaatacagctgttcagatccgatgaatgtgacagaggcagtgtatgatgattgcatagaaaatttctttgatgatgctgatttacaagaacaagaaaaacccataaatcaggagaaatggaataaacaacttgatgacttggaaggagccaaagtgaatataaatggagttttcccgtcaacaaatcattgtgtgatatctgatactgcaaaggtgctggatgtaatatcccaagaagtagtgcctaacggtatagctattcaagctggtgttttccaatctgatcaacgccctgggaggaggggtagacgccaaaaagcttcaaacaagttggttgatggaaaatatcaggtcacactttctgagagcgaggatagtaaatctcagaggtcaggcaccgacagtgagagacaatctgaaactctacgtagcaatggtgatgcgggaccaaagacattaagacaattacaagctgaagacgatgaagaagaaagatttcaagctgaccttaaaagggcaaaacttcaaagccttgatgtgtaccgaggtcgtagaaatatgacatcatgtttgaagacatctctggaagacaacaatgattgggttttatctgatgtcacaaaggaatctcagagttcgcccggagttgccatatttggcacaggtcttcagaatgaagttggcgaatacaattgctttttaaatgttatcatacagtctctgtggaatctggggatgtttcgggctgagttcttgcggagctcaacactagagcaccatcactttggagatccttgtgttgtctgctcattgtatgcgatttttacagctttaagtactgcttcgagtgaaacacgaaaagaacctgttgctccttcatctctcaggattgctttaagtaacttgtatcctgatagcagtttcttccaagaggctcagatgaacgatgcttcagaagtattggccgtaatcttcgactgccttcatcgctcatttgctcaaagttcaagcgtgtctgacacagaatctgctgagagcaacagtacgggctcatgggactgtgccaatcgctcatgtattgcccattctctgtttggaatggatgtttctgagcaattgaattgctacagctgtgggctggagtccaggcatttgaagtacacttcctttttccataacatcaacgctagtgccctacgcaccatgaaggtatcatatgagtgttcattagacgttacatgcgctgaaaattcatttgacgaacttctaaatcttgtcgagatgaaccatcaactagcttgtgatcgcgaagctggtgggtgtgggaaacgcaaccatatccaccatattctcaccactccaccacatgtttttactatagttttagggtggcaaaacacatgtgagactgtagaagacatagccgctactcttgcagctttgaatacagagatagacatcagcatcatgtaccgtggtgtggaccctaagaacacatatagcttagtttccgtggtacgcatttcttcttcttcttccctatga

SEQ ID NO: 27666 - protein, 1528 aa, Arabidopsis thaliana
  misc_feature (1)..(1528): Ceres Seq. ID no. 1824208
MGQKKKAPAPLDSALIKLECEKALKSFGRGSYNKAIRLIKDSCSRHQDSALIHRVQGTICVKVAAVYEDLATKQKYLRNAIESARKAVELSPDSIEFGHFYANLLYEAANDGKREYDEVVQECHRALSIENPIDPAKESLQDETQLKILTPEARIVHVQDELRSLIQKSNISSLSTWMNNLGKGEEKFRLIPIRRMAEDPIESNLVQTRRPNEIKKANKSIEEIRKEVEVRVAAARLLQQKSECENVGAVDNKGSDATLGSGKRSGERRKHGNARRNGSTADRRDRVKSYWDSMSKEMKKQLLRVKLSDLKSHFSASKDGNENEIISEALSFCEANKTWRFWVCCQCSEKFIKSEAYMHHIVQVHMGNVLPKMQMVLPQSFDTERIDMLLTSPWKPLDLSAAVKWLRSRQKIQNSEFSEFHAGDNMDDGDDCFKDARNDTSPEKESLGDSCKGCDENDPEEGKLSITFPPPDGWPISDDPERAKLLEKIRAAFELLIRHKYLAASHHDKVIQFTLDELQNLASVSQFLNRSLNQSPICICFLGASQLRKILKFLQDLSQACGLSRYSEQSNPNDEFNFGALCREVTEEILLDGEDSCLLLDEKLLGTECIQEIYMGSALHNVAVASSGDIANGNDVSSGADGFLSWIFTGPSSEEQVVSWMRTKEEKTNQGLEIMQHLEKEFYHLQNLCERKCEHLSYEGALQTVEDLCLEESRKRETSAEFTHESYESVLRKRREELNENDLELVFISSRFELDALTNVLKDAETLNHNQFGYEESYGCTSSQLRDLESGEADEWGMKDSLHEADSFIEVAIQKQKEQLSAELSRIDAQMMRNVTGMQQLELKLGPVSSNDYQIVLLPLVKSYMRAHLEALAEKDATEKSDAAREALLFELALDSKKEGRGRNDNSKHTLEKSKDKKKIKDTRKLKNLKATIGNDHRFNGDSIEHSLLSVASFGDHSEADVVSEAIEALSDEEEEYRRCNELEEEERKLAKTLEYQRRIENEAKEKHIAEQKKKYSCSDPMNVTEAVYDDCIENFFDDADLQEQEKPINQEKWNKQLDDLEGAKVNINGVFPSTNHCVISDTAKVLDVISQEVVPNGIAIQAGVFQSDQRPGRRGRRQKASNKLVDGKYQVTLSESEDSKSQRSGTDSERQSETLRSNGDAGPKTLRQLQAEDDEEERFQADLKRAKLQSLDVYRGRRNMTSCLKTSLEDNNDWVLSDVTKESQSSPGVAIFGTGLQNEVGEYNCFLNVIIQSLWNLGMFRAEFLRSSTLEHHHFGDPCVVCSLYAIFTALSTASSETRKEPVAPSSLRIALSNLYPDSSFFQEAQMNDASEVLAVIFDCLHRSFAQSSSVSDTESAESNSTGSWDCANRSCIAHSLFGMDVSEQLNCYSCGLESRHLKYTSFFHNINASALRTMKVSYECSLDVTCAENSFDELLNLVEMNHQLACDREAGGCGKRNHIHHILTTPPHVFTIVLGWQNTCETVEDIAATLAALNTEIDISIMYRGVDPKNTYSLVSVVRISSSSSL

SEQ ID NO: 27667 - protein, 1351 aa, Arabidopsis thaliana
  misc_feature (1)..(1351): Ceres Seq. ID no. 1824209
MNNLGKGEEKFRLIPIRRMAEDPIESNLVQTRRPNEIKKANKSIEEIRKEVEVRVAAARLLQQKSECENVGAVDNKGSDATLGSGKRSGERRKHGNARRNGSTADRRDRVKSYWDSMSKEMKKQLLRVKLSDLKSHFSASKDGNENEIISEALSFCEANKTWRFWVCCQCSEKFIKSEAYMHHIVQVHMGNVLPKMQMVLPQSFDTERIDMLLTSPWKPLDLSAAVKWLRSRQKIQNSEFSEFHAGDNMDDGDDCFKDARNDTSPEKESLGDSCKGCDENDPEEGKLSITFPPPDGWPISDDPERAKLLEKIRAAFELLIRHKYLAASHHDKVIQFTLDELQNLASVSQFLNRSLNQSPICICFLGASQLRKILKFLQDLSQACGLSRYSEQSNPNDEFNFGALCREVTEEILLDGEDSCLLLDEKLLGTECIQEIYMGSALHNVAVASSGDIANGNDVSSGADGFLSWIFTGPSSEEQVVSWMRTKEEKTNQGLEIMQHLEKEFYHLQNLCERKCEHLSYEGALQTVEDLCLEESRKRETSAEFTHESYESVLRKRREELNENDLELVFISSRFELDALTNVLKDAETLNHNQFGYEESYGCTSSQLRDLESGEADEWGMKDSLHEADSFIEVAIQKQKEQLSAELSRIDAQMMRNVTGMQQLELKLGPVSSNDYQIVLLPLVKSYMRAHLEALAEKDATEKSDAAREALLFELALDSKKEGRGRNDNSKHTLEKSKDKKKIKDTRKLKNLKATIGNDHRFNGDSIEHSLLSVASFGDHSEADVVSEAIEALSDEEEEYRRCNELEEEERKLAKTLEYQRRIENEAKEKHIAEQKKKYSCSDPMNVTEAVYDDCIENFFDDADLQEQEKPINQEKWNKQLDDLEGAKVNINGVFPSTNHCVISDTAKVLDVISQEVVPNGIAIQAGVFQSDQRPGRRGRRQKASNKLVDGKYQVTLSESEDSKSQRSGTDSERQSETLRSNGDAGPKTLRQLQAEDDEEERFQADLKRAKLQSLDVYRGRRNMTSCLKTSLEDNNDWVLSDVTKESQSSPGVAIFGTGLQNEVGEYNCFLNVIIQSLWNLGMFRAEFLRSSTLEHHHFGDPCVVCSLYAIFTALSTASSETRKEPVAPSSLRIALSNLYPDSSFFQEAQMNDASEVLAVIFDCLHRSFAQSSSVSDTESAESNSTGSWDCANRSCIAHSLFGMDVSEQLNCYSCGLESRHLKYTSFFHNINASALRTMKVSYECSLDVTCAENSFDELLNLVEMNHQLACDREAGGCGKRNHIHHILTTPPHVFTIVLGWQNTCETVEDIAATLAALNTEIDISIMYRGVDPKNTYSLVSVVRISSSSSL

SEQ ID NO: 27668 - protein, 1333 aa, Arabidopsis thaliana
  misc_feature (1)..(1333): Ceres Seq. ID no. 1824210
MAEDPIESNLVQTRRPNEIKKANKSIEEIRKEVEVRVAAARLLQQKSECENVGAVDNKGSDATLGSGKRSGERRKHGNARRNGSTADRRDRVKSYWDSMSKEMKKQLLRVKLSDLKSHFSASKDGNENEIISEALSFCEANKTWRFWVCCQCSEKFIKSEAYMHHIVQVHMGNVLPKMQMVLPQSFDTERIDMLLTSPWKPLDLSAAVKWLRSRQKIQNSEFSEFHAGDNMDDGDDCFKDARNDTSPEKESLGDSCKGCDENDPEEGKLSITFPPPDGWPISDDPERAKLLEKIRAAFELLIRHKYLAASHHDKVIQFTLDELQNLASVSQFLNRSLNQSPICICFLGASQLRKILKFLQDLSQACGLSRYSEQSNPNDEFNFGALCREVTEEILLDGEDSCLLLDEKLLGTECIQEIYMGSALHNVAVASSGDIANGNDVSSGADGFLSWIFTGPSSEEQVVSWMRTKEEKTNQGLEIMQHLEKEFYHLQNLCERKCEHLSYEGALQTVEDLCLEESRKRETSAEFTHESYESVLRKRREELNENDLELVFISSRFELDALTNVLKDAETLNHNQFGYEESYGCTSSQLRDLESGEADEWGMKDSLHEADSFIEVAIQKQKEQLSAELSRIDAQMMRNVTGMQQLELKLGPVSSNDYQIVLLPLVKSYMRAHLEALAEKDATEKSDAAREALLFELALDSKKEGRGRNDNSKHTLEKSKDKKKIKDTRKLKNLKATIGNDHRFNGDSIEHSLLSVASFGDHSEADVVSEAIEALSDEEEEYRRCNELEEEERKLAKTLEYQRRIENEAKEKHIAEQKKKYSCSDPMNVTEAVYDDCIENFFDDADLQEQEKPINQEKWNKQLDDLEGAKVNINGVFPSTNHCVISDTAKVLDVISQEVVPNGIAIQAGVFQSDQRPGRRGRRQKASNKLVDGKYQVTLSESEDSKSQRSGTDSERQSETLRSNGDAGPKTLRQLQAEDDEEERFQADLKRAKLQSLDVYRGRRNMTSCLKTSLEDNNDWVLSDVTKESQSSPGVAIFGTGLQNEVGEYNCFLNVIIQSLWNLGMFRAEFLRSSTLEHHHFGDPCVVCSLYAIFTALSTASSETRKEPVAPSSLRIALSNLYPDSSFFQEAQMNDASEVLAVIFDCLHRSFAQSSSVSDTESAESNSTGSWDCANRSCIAHSLFGMDVSEQLNCYSCGLESRHLKYTSFFHNINASALRTMKVSYECSLDVTCAENSFDELLNLVEMNHQLACDREAGGCGKRNHIHHILTTPPHVFTIVLGWQNTCETVEDIAATLAALNTEIDISIMYRGVDPKNTYSLVSVVRISSSSSL

SEQ ID NO: 27669 - DNA, 1098 bp, Arabidopsis thaliana
  misc_feature (1)..(1098): Ceres Seq. ID no. 1824211
atggcgtcatgtttgaggacaccgctggaagtaaacaatgatgggggtttatctgatgacacaatggagtctaggagctcaacaggagttaccatatttggcacaggtcttcagaatgaagttggcgaatacaattgctttttaaatgttatcatacagtctctatggaatttggagctgtttcgagctgagttcttacggagttcaacacgagagcaccatcacgtgggagatccttgtgttgtctgctctttgtatgaaatctttaccgctttgagcgctgcttcaagtgaaaaacaaaatgaacctgtggcaccttcatctctcaggattgctttaagtaatttgtatccagatagtagtttcttccaagaggctcagatgaacgatgcttcagaagtactggctgtgatctttgactgccttcatcgctcatttgctcaaagttcaagcgtgtctgatgtggattcctcagacagcaactgtactggttcatgggactgtgccaaccgcacatgtattgcccattctttgtttggaatggatatttttgagcaactgaattgctacagctgtgggctggagtccaggcatttgaagtacacttcctttttccataacatcaacgctagtgccctacgcaccatgaaggttacatgcgctgaaaattcatttgatgaacttcttaaccttgtcgagatgaaccatcaactagcctgtgatcccgaaaccggtgggtgtgggaaactcaaccatatccaccatattctcactactccaccacatgtatttactacagggtggcaaaacacatgtgagactgtagaagacatagcagctactcttgcagccttgaataccgagatagacatcaacatcatgtaccgtggtctggaccctaagagcacatatagcttagtttctgtggtttgttattatggacagcattatcattgttttgcacatagtcgtgagcacgatcagtggatcatgtacgatgacaaaaccgtcaaggtgatcggtagctggatcgatgttctttcaatgtgtgaaagaggacacttgcagccacaggttcttctctacgagagacgttaa

SEQ ID NO: 27670 - protein, 365 aa, Arabidopsis thaliana
  misc_feature (1)..(365): Ceres Seq. ID no. 1824212
MASCLRTPLEVNNDGGLSDDTMESRSSTGVTIFGTGLQNEVGEYNCFLNVIIQSLWNLELFRAEFLRSSTREHHHVGDPCVVCSLYEIFTALSAASSEKQNEPVAPSSLRIALSNLYPDSSFFQEAQMNDASEVLAVIFDCLHRSFAQSSSVSDVDSSDSNCTGSWDCANRTCIAHSLFGMDIFEQLNCYSCGLESRHLKYTSFFHNINASALRTMKVTCAENSFDELLNLVEMNHQLACDPETGGCGKLNHIHHILTTPPHVFTTGWQNTCETVEDIAATLAALNTEIDINIMYRGLDPKSTYSLVSVVCYYGQHYHCFAHSREHDQWIMYDDKTVKVIGSWIDVLSMCERGHLQPQVLLYERR

SEQ ID NO: 27671 - protein, 344 aa, Arabidopsis thaliana
  misc_feature (1)..(344): Ceres Seq. ID no. 1824213
MESRSSTGVTIFGTGLQNEVGEYNCFLNVIIQSLWNLELFRAEFLRSSTREHHHVGDPCVVCSLYEIFTALSAASSEKQNEPVAPSSLRIALSNLYPDSSFFQEAQMNDASEVLAVIFDCLHRSFAQSSSVSDVDSSDSNCTGSWDCANRTCIAHSLFGMDIFEQLNCYSCGLESRHLKYTSFFHNINASALRTMKVTCAENSFDELLNLVEMNHQLACDPETGGCGKLNHIHHILTTPPHVFTTGWQNTCETVEDIAATLAALNTEIDINIMYRGLDPKSTYSLVSVVCYYGQHYHCFAHSREHDQWIMYDDKTVKVIGSWIDVLSMCERGHLQPQVLLYERR

SEQ ID NO: 27672 - protein, 238 aa, Arabidopsis thaliana
  misc_feature (1)..(238): Ceres Seq. ID no. 1824214
MNDASEVLAVIFDCLHRSFAQSSSVSDVDSSDSNCTGSWDCANRTCIAHSLFGMDIFEQLNCYSCGLESRHLKYTSFFHNINASALRTMKVTCAENSFDELLNLVEMNHQLACDPETGGCGKLNHIHHILTTPPHVFTTGWQNTCETVEDIAATLAALNTEIDINIMYRGLDPKSTYSLVSVVCYYGQHYHCFAHSREHDQWIMYDDKTVKVIGSWIDVLSMCERGHLQPQVLLYERR

SEQ ID NO: 27673 - DNA, 921 bp, Arabidopsis thaliana
  misc_feature (1)..(921): Ceres Seq. ID no. 1824515
atggcagttggaataagacaaaaggaaagtgtcaacaagattgtcaagaagtttccatcaagtgagtttgttgtgatgctgtttcactacgatggtgctgtggatgaatggaaggagtttgagtggagtgacactgccattcatatttctgtagtaaaccaaaccaaatgtttgaatatgtttgtgactcttttaggtggtttgcaaagcgttttctacacccggatattgtctcagcttattcttacatttttctatgggatgaagatctcggtgttgaccattttgatgctagaagatgtggtatctaatgagatgaaaattttcaggtatgtttcaattattaaagaagaaaagcttgaaatatcacaacctgctcttgatcccaatttctctgaagtgcatcatcaacttacctcacgagacaagaaatcaagagtacatagtggaaagcataacttgttcttaaactcattaaaaaaaactctctcctacagatttgttgaaatgatggctcctgtgttttccagagcagcttggaggtgtacatggcatatgattcagaatgacttaaaccatggatggggtatagattttcagcttggatattgtgcacagggtgatcgaaccaaaaatatcggtattgttgattccgagtatatacttcatatgggtcttcctacattaggaggaggttcagctgaaaacaaggaagtaattatagttactgtgtataagcagacggattcagggaagctcgataagaccaagactccgcatgctgcagacaaatcatcatcagtgtcaactggtagaactgaggttcggaagcaaacttatgtcgagttagagacttttaaacatagatggaaaaatgctgtgaagaacgatgagtgctggatagaccgattccaaacatga

SEQ ID NO: 27674 - protein, 306 aa, Arabidopsis thaliana
  misc_feature (1)..(306): Ceres Seq. ID no. 1824516
MAVGIRQKESVNKIVKKFPSSEFVVMLFHYDGAVDEWKEFEWSDTAIHISVVNQTKCLNMFVTLLGGLQSVFYTRILSQLILTFFYGMKISVLTILMLEDVVSNEMKIFRYVSIIKEEKLEISQPALDPNFSEVHHQLTSRDKKSRVHSGKHNLFLNSLKKTLSYRFVEMMAPVFSRAAWRCTWHMIQNDLNHGWGIDFQLGYCAQGDRTKNIGIVDSEYILHMGLPTLGGGSAENKEVIIVTVYKQTDSGKLDKTKTPHAADKSSSVSTGRTEVRKQTYVELETFKHRWKNAVKNDECWIDRFQT

SEQ ID NO: 27675 - protein, 281 aa, Arabidopsis thaliana
  misc_feature (1)..(281): Ceres Seq. ID no. 1824517
MLFHYDGAVDEWKEFEWSDTAIHISVVNQTKCLNMFVTLLGGLQSVFYTRILSQLILTFFYGMKISVLTILMLEDVVSNEMKIFRYVSIIKEEKLEISQPALDPNFSEVHHQLTSRDKKSRVHSGKHNLFLNSLKKTLSYRFVEMMAPVFSRAAWRCTWHMIQNDLNHGWGIDFQLGYCAQGDRTKNIGIVDSEYILHMGLPTLGGGSAENKEVIIVTVYKQTDSGKLDKTKTPHAADKSSSVSTGRTEVRKQTYVELETFKHRWKNAVKNDECWIDRFQT

SEQ ID NO: 27676 - protein, 247 aa, Arabidopsis thaliana
  misc_feature (1)..(247): Ceres Seq. ID no. 1824518
MFVTLLGGLQSVFYTRILSQLILTFFYGMKISVLTILMLEDVVSNEMKIFRYVSIIKEEKLEISQPALDPNFSEVHHQLTSRDKKSRVHSGKHNLFLNSLKKTLSYRFVEMMAPVFSRAAWRCTWHMIQNDLNHGWGIDFQLGYCAQGDRTKNIGIVDSEYILHMGLPTLGGGSAENKEVIIVTVYKQTDSGKLDKTKTPHAADKSSSVSTGRTEVRKQTYVELETFKHRWKNAVKNDECWIDRFQT

SEQ ID NO: 27677 - DNA, 2892 bp, Arabidopsis thaliana
  misc_feature (1)..(2892): Ceres Seq. ID no. 1824573
atgcctcaccggactacttacttctttccgcggcagtttcccgatcgtggattcgattcgttttcgcttaagaatgatcacgacaagaagaaatcgtcgtctaacgttggagagagttttggatttcaaagagataataaatctaatggagtcggagaagattctaacaaggagaaggagagtactgtgttctcctctaatcctctgctttctaaaagctcagccgtttcagatctctttagcgatgatcgcaagtcggagaagaagcatcagcagcaactagccgctttctatgagtggttggcggagaagaaggctaatctctctaggtcatcatctactactactactcatggacgcggggtgaagcccacgcgcttctctatgtctagcgacgccgatgaggagagagagcttctgttgtcttctccggctgatcccgctccgcttcctgctacttcttcgccggattctatcattgattcggctaggacggttaacatacatgaacgaaacattgatcggagctttgacagagaggtttcgcttccccgaatgtcgagtgagagcagcttcgctggaagcttcttctccgggacgacggtggacgggaatttctccaatttctcaagtcatacagacgcaagggaaacttcgaccaccacgcttgtctcagtgaacaaagaggaagaagaagttgaggttagggaacagggcaaagagcaaagcttagcgcagaagtcaagagaaggctattacttgcaggtcacgcttgctaagtggctaagttctcaagcaaacctagcatgtgagtctgttcatatacagagcacagaatctatctcctaccgtttttgggtaagtggttgtttatcatacagtgacaagatatcagatggattttacagtatattaggaatggatccgtatctttggttgatgtgtaacaattctgaggatggcaaacgaattccatctcttttgttactcaaggagactgagccgaatgatacatcaatggaagtggttttgatagatagacgtgaggactcacgtcttaaagaactggaggataaggcacatgagctgtattgttcttcagacaacatgttagtgctcgtcgagaaacttggcagacttgttgcggtctatatgggggggaatttccaggtggagcaaggtgatctccagaaacgatggaaactggtcagcaatagactcaaggaatttcggaaatgtatcattcttcctataggtagtctaacaatgggcctttgccggcatcgtgccatcctatttaagaaattggctgattacataggtttaccatgtcggatagctcgaggttgcagatactgtaaagagagccaccaatcttcttgccttgtcaagattgacgatgacaggaagctttcaagggaatatgtagttgacctcatcggggaaccaggaaatgtccatgatccggattcctctatcaacggtgaaacacagtgtcagattccttcacctcttcaaatgagtcatcttacagatttttccaggccttgcgtgcatagtacatctccttgtcagactgtagagtcaaagacttcacgcactctttctgaaaacattcaacgttcagggagtcaaggccaagtacacaaagaatttgagttgcctgataacgcagggacagtatgttgtgctcatattgatcaaacttgctgtgcaaaagtatcatcaatggttttgacagaatctgttcttcgagctctaccacttgatataccaaaccttagtgaagaaaagattgccccacaagaaacctgcaaagaagaaaccgttctattagaagatccaacagctatgaagcagccaaacttatcagttgaaccagagatagtagaggctgacactcgaaaagataaaaaaggaaggttacctgttgacgccatctcaccttacttgactattgaaccttctttggcatcagattggctggaggtctcatggaatgaattacatatcaaagagcgtgtgggtgctggatcatttggaactgttcatcgtgctgagtggcatggatcagatgttgctgtcaagattttgtctattcaagatttccatgatgaccaattcagagaatttctcagagaggtatgtaagcaagcggttgctataatgaaacgtgttcgtcacccaaatgttgttctcttcatgggtgctgtgacagagcgaccccggttatcaataataacagaatatttgccaagaggcagtctttttcgccttatccataggccagcttctggggagttgctagatcagaggaggaggctacgtatggcattggatgtggtttgtgctattccccattatgccaaggggctcaactacctacactgtcttaatcctcctgtagtgcattgggacctgaaatctccaaatctactggttgataagaactggacagtgaaggtttgcgattttggactttcaagattcaaggcaaacactttcataccatcaaaatctgttgcaggaacacctgagtggatggctccagagtttcttagaggggaaccgacaaacgagaaatcagatgtttacagtttcggagtagtcttatgggagttgattactttgcaacagccttggaatggactcagtcctgctcaggtggttggagcagttgcattccagaacaggcggcttataattcctcccaacacctctccggttttggtatctctaatggaagcttgctgggcagatgagccgtctcagcggccagcatttggtagtatagtggacacattgaagaagctactaaagtctccggtgcagctgatccaaatgggtggagacaaaggggtaattccaactaaatcagctcccatactatag

SEQ ID NO: 27678 - protein, 963 aa, Arabidopsis thaliana
  misc_feature (1)..(963): Ceres Seq. ID no. 1824574
MPHRTTYFFPRQFPDRGFDSFSLKNDHDKKKSSSNVGESFGFQRDNKSNGVGEDSNKEKESTVFSSNPLLSKSSAVSDLFSDDRKSEKKHQQQLAAFYEWLAEKKANLSRSSSTTTTHGRGVKPTRFSMSSDADEERELLLSSPADPAPLPATSSPDSIIDSARTVNIHERNIDRSFDREVSLPRMSSESSFAGSFFSGTTVDGNFSNFSSHTDARETSTTTLVSVNKEEEEVEVREQGKEQSLAQKSREGYYLQVTLAKWLSSQANLACESVHIQSTESISYRFWVSGCLSYSDKISDGFYSILGMDPYLWLMCNNSEDGKRIPSLLLLKETEPNDTSMEVVLIDRREDSRLKELEDKAHELYCSSDNMLVLVEKLGRLVAVYMGGNFQVEQGDLQKRWKLVSNRLKEFRKCIILPIGSLTMGLCRHRAILFKKLADYIGLPCRIARGCRYCKESHQSSCLVKIDDDRKLSREYVVDLIGEPGNVHDPDSSINGETQCQIPSPLQMSHLTDFSRPCVHSTSPCQTVESKTSRTLSENIQRSGSQGQVHKEFELPDNAGTVCCAHIDQTCCAKVSSMVLTESVLRALPLDIPNLSEEKIAPQETCKEETVLLEDPTAMKQPNLSVEPEIVEADTRKDKKGRLPVDAISPYLTIEPSLASDWLEVSWNELHIKERVGAGSFGTVHRAEWHGSDVAVKILSIQDFHDDQFREFLREVCKQAVAIMKRVRHPNVVLFMGAVTERPRLSIITEYLPRGSLFRLIHRPASGELLDQRRRLRMALDVVCAIPHYAKGLNYLHCLNPPVVHWDLKSPNLLVDKNWTVKVCDFGLSRFKANTFIPSKSVAGTPEWMAPEFLRGEPTNEKSDVYSFGVVLWELITLQQPWNGLSPAQVVGAVAFQNRRLIIPPNTSPVLVSLMEACWADEPSQRPAFGSIVDTLKKLLKSPVQLIQMGGDKGVIPTKSAPIL

SEQ ID NO: 27679 - protein, 835 aa, Arabidopsis thaliana
  misc_feature (1)..(835): Ceres Seq. ID no. 1824575
MSSDADEERELLLSSPADPAPLPATSSPDSIIDSARTVNIHERNIDRSFDREVSLPRMSSESSFAGSFFSGTTVDGNFSNFSSHTDARETSTTTLVSVNKEEEEVEVREQGKEQSLAQKSREGYYLQVTLAKWLSSQANLACESVHIQSTESISYRFWVSGCLSYSDKISDGFYSILGMDPYLWLMCNNSEDGKRIPSLLLLKETEPNDTSMEVVLIDRREDSRLKELEDKAHELYCSSDNMLVLVEKLGRLVAVYMGGNFQVEQGDLQKRWKLVSNRLKEFRKCIILPIGSLTMGLCRHRAILFKKLADYIGLPCRIARGCRYCKESHQSSCLVKIDDDRKLSREYVVDLIGEPGNVHDPDSSINGETQCQIPSPLQMSHLTDFSRPCVHSTSPCQTVESKTSRTLSENIQRSGSQGQVHKEFELPDNAGTVCCAHIDQTCCAKVSSMVLTESVLRALPLDIPNLSEEKIAPQETCKEETVLLEDPTAMKQPNLSVEPEIVEADTRKDKKGRLPVDAISPYLTIEPSLASDWLEVSWNELHIKERVGAGSFGTVHRAEWHGSDVAVKILSIQDFHDDQFREFLREVCKQAVAIMKRVRHPNVVLFMGAVTERPRLSIITEYLPRGSLFRLIHRPASGELLDQRRRLRMALDVVCAIPHYAKGLNYLHCLNPPVVHWDLKSPNLLVDKNWTVKVCDFGLSRFKANTFIPSKSVAGTPEWMAPEFLRGEPTNEKSDVYSFGVVLWELITLQQPWNGLSPAQVVGAVAFQNRRLIIPPNTSPVLVSLMEACWADEPSQRPAFGSIVDTLKKLLKSPVQLIQMGGDKGVIPTKSAPIL

SEQ ID NO: 27680 - protein, 778 aa, Arabidopsis thaliana
  misc_feature (1)..(778): Ceres Seq. ID no. 1824576
MSSESSFAGSFFSGTTVDGNFSNFSSHTDARETSTTTLVSVNKEEEEVEVREQGKEQSLAQKSREGYYLQVTLAKWLSSQANLACESVHIQSTESISYRFWVSGCLSYSDKISDGFYSILGMDPYLWLMCNNSEDGKRIPSLLLLKETEPNDTSMEVVLIDRREDSRLKELEDKAHELYCSSDNMLVLVEKLGRLVAVYMGGNFQVEQGDLQKRWKLVSNRLKEFRKCIILPIGSLTMGLCRHRAILFKKLADYIGLPCRIARGCRYCKESHQSSCLVKIDDDRKLSREYVVDLIGEPGNVHDPDSSINGETQCQIPSPLQMSHLTDFSRPCVHSTSPCQTVESKTSRTLSENIQRSGSQGQVHKEFELPDNAGTVCCAHIDQTCCAKVSSMVLTESVLRALPLDIPNLSEEKIAPQETCKEETVLLEDPTAMKQPNLSVEPEIVEADTRKDKKGRLPVDAISPYLTIEPSLASDWLEVSWNELHIKERVGAGSFGTVHRAEWHGSDVAVKILSIQDFHDDQFREFLREVCKQAVAIMKRVRHPNVVLFMGAVTERPRLSIITEYLPRGSLFRLIHRPASGELLDQRRRLRMALDVVCAIPHYAKGLNYLHCLNPPVVHWDLKSPNLLVDKNWTVKVCDFGLSRFKANTFIPSKSVAGTPEWMAPEFLRGEPTNEKSDVYSFGVVLWELITLQQPWNGLSPAQVVGAVAFQNRRLIIPPNTSPVLVSLMEACWADEPSQRPAFGSIVDTLKKLLKSPVQLIQMGGDKGVIPTKSAPIL

SEQ ID NO: 27681 - DNA, 1845 bp, Arabidopsis thaliana
  misc_feature (1)..(1845): Ceres Seq. ID no. 1824593
atgtcagaggatgttgagaaatatctcaacttaaatccaccttgctcctcctcctcctcttcttcctccgccgctacattcacgaacaagtctcgaaatttcaaatcttctcccccgccgtgtccagatcatgtccttgagaacgttttagagaacgtgcttcagttcctcacttccagatgcgatcgcaacgcagtctcattggtctgcagatcgtggtatcgcgtcgaggctcagactcgattagaggtttttattggaaactgttactcgctctctcctgctcggcttattcaccggttcaagcgtgttaggtctcttgtgcttaaagggaaacctaggtttgctgattttaatctcatgcctcctaattggggagctcaattctctccttgggttgctgctacagctaaggcttatccttggctcgagaaggttcatttgaagcgtatgtttgttacggatgatgatttggctcttcttgctgagtcgtttcctgggttcaaagagcttactttggtctgctgtgaaggttttgggactagtggtattgctattgttgctaacaaatgcaggcagctaaaggtccttgatttgatggagtcagaagtcacagatgatgagttggattggatttcttgttttcctgagggtgaaactcatctggagtctttgtcttttgactgtgttgaatcccctatcaatttcaaggcattggaggagctcgtggttaggtcaccattcttgaagaaacttagaacgaacaggtttgtttcccttgaagagctgcatcgactaatggttcgagcgccgcagttaacgagtcttgggacggggtcatttagtccagacaatgtgcctcagggagaacaacaaccggattatgcagctgcttttcgtgcttgtaaatccatagtttgtctctcaggattcagggaatttagaccggaatacctcctagccatctcttcagtttgtgctaatctcacctctcttaacttcagttatgctaacatttctcctcacatgctcaagcccatcataagcaactgtcacaatatccgagtcttctgggctcttgactcgatacgtgatgaaggactacaggcagtggctgccacatgcaaggagctccgtgagcttcggattttcccttttgatcctcgtgaagacagtgaaggtcctgtctcgggagtaggcctccaagcaatttcagagggctgtaggaaactggaatctatcctgtacttttgccagaatatgaccaatggagctgtgacagccatgtcggagaactgcccgcagcttactgtgtttagactttgcataatgggtcgccataggcctgaccacgtgacaggaaagccaatggacgatggatttggtgccattgttaaaaactgcaagaagctaacccgacttgcagtatcagggttactaacagatgaagcttttagctatataggagaatatgggaaattgatccgtacgctatctgtagcgtttgctgggaacagtgacaaggctctgagatacgttcttgagggttgtcctaaactacaaaagcttgagatcagggacagtccctttggagatgttggattgcgctctggtatgcatcggtattccaatatgaggtttgtttggttgtcgtcatgtctcatatcccgtggaggctgcaggggtgtttctcatgctctgcctaatgtagtcgtggaagtatttggagccgatggtgatgatgacgaagacactgtcactggggattatgttgagacattgtacttgtatcgatcccttgatggcccaaggaaggatgctccaaagtttgtaacaattttatga

SEQ ID NO: 27682 - protein, 614 aa, Arabidopsis thaliana
  misc_feature (1)..(614): Ceres Seq. ID no. 1824594
MSEDVEKYLNLNPPCSSSSSSSSAATFTNKSRNFKSSPPPCPDHVLENVLENVLQFLTSRCDRNAVSLVCRSWYRVEAQTRLEVFIGNCYSLSPARLIHRFKRVRSLVLKGKPRFADFNLMPPNWGAQFSPWVAATAKAYPWLEKVHLKRMFVTDDDLALLAESFPGFKELTLVCCEGFGTSGIAIVANKCRQLKVLDLMESEVTDDELDWISCFPEGETHLESLSFDCVESPINFKALEELVVRSPFLKKLRTNRFVSLEELHRLMVRAPQLTSLGTGSFSPDNVPQGEQQPDYAAAFRACKSIVCLSGFREFRPEYLLAISSVCANLTSLNFSYANISPHMLKPIISNCHNIRVFWALDSIRDEGLQAVAATCKELRELRIFPFDPREDSEGPVSGVGLQAISEGCRKLESILYFCQNMTNGAVTAMSENCPQLTVFRLCIMGRHRPDHVTGKPMDDGFGAIVKNCKKLTRLAVSGLLTDEAFSYIGEYGKLIRTLSVAFAGNSDKALRYVLEGCPKLQKLEIRDSPFGDVGLRSGMHRYSNMRFVWLSSCLISRGGCRGVSHALPNVVVEVFGADGDDDEDTVTGDYVETLYLYRSLDGPRKDAPKFVTIL

SEQ ID NO: 27683 - protein, 494 aa, Arabidopsis thaliana
  misc_feature (1)..(494): Ceres Seq. ID no. 1824595
MPPNWGAQFSPWVAATAKAYPWLEKVHLKRMFVTDDDLALLAESFPGFKELTLVCCEGFGTSGIAIVANKCRQLKVLDLMESEVTDDELDWISCFPEGETHLESLSFDCVESPINFKALEELVVRSPFLKKLRTNRFVSLEELHRLMVRAPQLTSLGTGSFSPDNVPQGEQQPDYAAAFRACKSIVCLSGFREFRPEYLLAISSVCANLTSLNFSYANISPHMLKPIISNCHNIRVFWALDSIRDEGLQAVAATCKELRELRIFPFDPREDSEGPVSGVGLQAISEGCRKLESILYFCQNMTNGAVTAMSENCPQLTVFRLCIMGRHRPDHVTGKPMDDGFGAIVKNCKKLTRLAVSGLLTDEAFSYIGEYGKLIRTLSVAFAGNSDKALRYVLEGCPKLQKLEIRDSPFGDVGLRSGMHRYSNMRFVWLSSCLISRGGCRGVSHALPNVVVEVFGADGDDDEDTVTGDYVETLYLYRSLDGPRKDAPKFVTIL

SEQ ID NO: 27684 - protein, 464 aa, Arabidopsis thaliana
  misc_feature (1)..(464): Ceres Seq. ID no. 1824596
MFVTDDDLALLAESFPGFKELTLVCCEGFGTSGIAIVANKCRQLKVLDLMESEVTDDELDWISCFPEGETHLESLSFDCVESPINFKALEELVVRSPFLKKLRTNRFVSLEELHRLMVRAPQLTSLGTGSFSPDNVPQGEQQPDYAAAFRACKSIVCLSGFREFRPEYLLAISSVCANLTSLNFSYANISPHMLKPIISNCHNIRVFWALDSIRDEGLQAVAATCKELRELRIFPFDPREDSEGPVSGVGLQAISEGCRKLESILYFCQNMTNGAVTAMSENCPQLTVFRLCIMGRHRPDHVTGKPMDDGFGAIVKNCKKLTRLAVSGLLTDEAFSYIGEYGKLIRTLSVAFAGNSDKALRYVLEGCPKLQKLEIRDSPFGDVGLRSGMHRYSNMRFVWLSSCLISRGGCRGVSHALPNVVVEVFGADGDDDEDTVTGDYVETLYLYRSLDGPRKDAPKFVTIL

SEQ ID NO: 27685 - DNA, 768 bp, Arabidopsis thaliana
  misc_feature (1)..(768): Ceres Seq. ID no. 1824647
atgatcataacagtccttcattctcatgtctcattctatttcatcatccttagcttcctcttcttccatggaagtgatggtgctacaataaccatcgtaaatcgatgcagcttcaccgtgtggccgggaattttgtccaactccggaagcggcgatataggcaccaccggcttcgagctcgttcccggtggttcacgttcgttccaagctccagctagctggtcaggtcggttttgggcacgaaccggttgcaacttcaactcagacacaggacaaggcacctgcctaaccggggactgcggctctaaccaggtcgaatgtaacggtgcaggagcaaaaccgcccgctacactcgccgaattcacaatcgggtcaggtccagcagacccggcccgtaaacaagacttctacgacgtaagcctcgtggacggttacaacgttcccatgttggtggaagcaagtggcgggtcagaaggtacttgcttaaccacgggatgcgtaacggatctaaaccaaaaatgtccaacggagctccggttcgggtccgggtcagcatgcaaaagcgcgtgtgaggcttttggtagtccagaatattgttgtagtggcgcgtacgcctcacccaccgagtgtaaaccatcgatgtactcggagatattcaaatctgcgtgtccaagatcatatagctacgcgttcgacgatgctacaagtacgttcacatgcactgatgctgattacaccatcactttttgcccttccttgcctaggtag

SEQ ID NO: 27686 - protein, 255 aa, Arabidopsis thaliana
  misc_feature (1)..(255): Ceres Seq. ID no. 1824648
MIITVLHSHVSFYFIILSFLFFHGSDGATITIVNRCSFTVWPGILSNSGSGDIGTTGFELVPGGSRSFQAPASWSGRFWARTGCNFNSDTGQGTCLTGDCGSNQVECNGAGAKPPATLAEFTIGSGPADPARKQDFYDVSLVDGYNVPMLVEASGGSEGTCLTTGCVTDLNQKCPTELRFGSGSACKSACEAFGSPEYCCSGAYASPTECKPSMYSEIFKSACPRSYSYAFDDATSTFTCTDADYTITFCPSLPR

SEQ ID NO: 27687 - DNA, 765 bp, Arabidopsis thaliana
  misc_feature (1)..(765): Ceres Seq. ID no. 1824677
atgaactcactcgccattagagtctccaaggttctcagatcctcttcaatatctcctttagcaataagtgctgagagaggctctaagtcgtggttctctactggtcctatcgatgaaggtgtagaagaagattttgaagaaaatgttacagaaaggcctgagcttcaacctcatggagttgatcctcgtaaaggttggggatttcgcggtgttcatagggcgattatttgtgggaaagtagggcaagcaccgttacagaagatcttaaggaacgggcggacagtaacgatctttacagtaggaacaggtgggatgtttgatcagaggcttgtaggagctactaatcagccaaaaccagctcagtggcatagaatcgctgtgcacaacgaagtgcttggctcttacgctgtccaaaaactcgctaaaaactcgtcggtttatgtggaaggtgatattgagactagagtgtataatgatagcatcagcagtgaagtgaagagtatccctgagatttgcgttcgtcgtgatggtatgtatgttcatattgttgatccggaacatcaatttgttgctgagttacgattctcttgctttgttttaggtaagattcggatgatcaaatatggtgaaagcattagcaaaatctcttttgatgagctaagtaagttatcatttttcattcagctaatattcgcaaagaaaaaagagatagttgcttgtgttttaatatttgtttcacatttggcagaagaaggattgatttag

SEQ ID NO: 27688 - protein, 254 aa, Arabidopsis thaliana
  misc_feature (1)..(254): Ceres Seq. ID no. 1824678
MNSLAIRVSKVLRSSSISPLAISAERGSKSWFSTGPIDEGVEEDFEENVTERPELQPHGVDPRKGWGFRGVHRAIICGKVGQAPLQKILRNGRTVTIFTVGTGGMFDQRLVGATNQPKPAQWHRIAVHNEVLGSYAVQKLAKNSSVYVEGDIETRVYNDSISSEVKSIPEICVRRDGMYVHIVDPEHQFVAELRFSCFVLGKIRMIKYGESISKISFDELSKLSFFIQLIFAKKKEIVACVLIFVSHLAEEGLI

SEQ ID NO: 27689 - protein, 150 aa, Arabidopsis thaliana
  misc_feature (1)..(150): Ceres Seq. ID no. 1824679
MFDQRLVGATNQPKPAQWHRIAVHNEVLGSYAVQKLAKNSSVYVEGDIETRVYNDSISSEVKSIPEICVRRDGMYVHIVDPEHQFVAELRFSCFVLGKIRMIKYGESISKISFDELSKLSFFIQLIFAKKKEIVACVLIFVSHLAEEGLI

SEQ ID NO: 27690 - DNA, 981 bp, Arabidopsis thaliana
  misc_feature (1)..(981): Ceres Seq. ID no. 1824787
atggattattcaaaaaccgaagaaacaccgataaacgaagaacaagggtcaacaaattcatctgaaagcagaagcaatgaagagttattctctgattgtgatcaacaacattcttccatagctaacgagttcggactaacggagttgcctaaagacgataaagtttacgagcttatctaccgtcattgccaatctaagctaacttctcacttaagcaatcagtttgagattgtatcaattctcaagaacggatttcaaacaccattaggacaagctaagcttaaagcctttcaaatatacgctgagtctgttgcaaagaaaagcggcagctgctgtggaaacaaagctgcggtggctgaagcggcgagagtgaaatacggttgttgcggtgtggagaaggaagagttaaaagcgattctaatgtatggatttagcaacaatgccttatgtctctcaccagacaatgctcctcttcaatgtatgatagatccttcatcatcttgtaacgaagacgggattagcttcttgctgttttcaagaattattatgggaaaatcagaggttgtgtgctcgacatcacaatcgtatccgagttctatggagtttgattcaggtgtagacagtttgacatctccaaacaagtatattatttggagcacacacatgaacactcatgttttgcctgagtttgttgtttgcatcaaaactccatctatcttgaaaagaattgctgatttggtatgtttatttgatatagaaaacccgaaatctccttggatttcgtttccggtcttaatcaactcgatatcaaagtttctaaatcaatcgcaaatccgtctcattcataaacactataaagaacatcaagataggagaatctcgcggtgtgagttgattcaacgcctgagaagtataactggagatagcttattggttcaaatcatcaaatctgttggacaaaaggtacataaagacacatga

SEQ ID NO: 27691 - protein, 326 aa, Arabidopsis thaliana
  misc_feature (1)..(326): Ceres Seq. ID no. 1824788
MDYSKTEETPINEEQGSTNSSESRSNEELFSDCDQQHSSIANEFGLTELPKDDKVYELIYRHCQSKLTSHLSNQFEIVSILKNGFQTPLGQAKLKAFQIYAESVAKKSGSCCGNKAAVAEAARVKYGCCGVEKEELKAILMYGFSNNALCLSPDNAPLQCMIDPSSSCNEDGISFLLFSRIIMGKSEVVCSTSQSYPSSMEFDSGVDSLTSPNKYIIWSTHMNTHVLPEFVVCIKTPSILKRIADLVCLFDIENPKSPWISFPVLINSISKFLNQSQIRLIHKHYKEHQDRRISRCELIQRLRSITGDSLLVQIIKSVGQKVHKDT

SEQ ID NO: 27692 - protein, 186 aa, Arabidopsis thaliana
  misc_feature (1)..(186): Ceres Seq. ID no. 1824789
MYGFSNNALCLSPDNAPLQCMIDPSSSCNEDGISFLLFSRIIMGKSEVVCSTSQSYPSSMEFDSGVDSLTSPNKYIIWSTHMNTHVLPEFVVCIKTPSILKRIADLVCLFDIENPKSPWISFPVLINSISKFLNQSQIRLIHKHYKEHQDRRISRCELIQRLRSITGDSLLVQIIKSVGQKVHKDT

SEQ ID NO: 27693 - protein, 166 aa, Arabidopsis thaliana
  misc_feature (1)..(166): Ceres Seq. ID no. 1824790
MIDPSSSCNEDGISFLLFSRIIMGKSEVVCSTSQSYPSSMEFDSGVDSLTSPNKYIIWSTHMNTHVLPEFVVCIKTPSILKRIADLVCLFDIENPKSPWISFPVLINSISKFLNQSQIRLIHKHYKEHQDRRISRCELIQRLRSITGDSLLVQIIKSVGQKVHKDT

SEQ ID NO: 27694 - DNA, 1059 bp, Arabidopsis thaliana
  misc_feature (1)..(1059): Ceres Seq. ID no. 1824911
atggccgttacttcgcttctcgataccgttttccgacgtagaaagaagaagtctactgagtttataagctcagttttcgaattcgacttggacaccattaaagctgcaacaaatgatttctcagaactggttggtcgtggcggatttggttttgtttacaagggtaggcttcaaaatggacaagaaatagcagtcaagattttgtctacaagttcaattagaactgagagacagtttcataacgaacttattattttgtctaagcttaaacacaagaatctgatcaatcttcttggtttctgcactaaacgagaccaacatggtcttgtttacgagttcatgcctaactcaagcctcgattgttttatactcgacccacacagagctgctcagctaaattgggagatgtgccgaaacattattgatggcatagctcgagggctacgttaccttcatgaagaatccgggttatgggtcgttcaccgcgacattaaacctggaaacattctattggattcagatttgaaaccgaaaatagtgggatttgaattggcgaggacgatgcaacaaggtgaaaacgcagctgaaacaactgaaattgtcggtaccgtagggtatttagatccggagtacatacgaagcggacgtgtttccgtcaaatctgacgtttatgcctttggagttacaatcttgacgatcattagcagaaggaaggcttggagtgtggacggagactctctaatcaaatatgttaggagatgctggaacagaggagaagccatagatgtgatccatgaagtgatgagggaagaagaaagagaatattcgataagcgaaatcttgagatacattcacattgctttgctatgtgtggatgagaatgctgagagaaggccgaatattgataaagttctgcattggtttagttgtttctctactcctttacctgatccaacatttggtaatagatttcttgtagaggaagaaacaaattggccctggtcgccatctttatctcctggtcacagctctgtcacgtcacccatatcttcacgttaa

SEQ ID NO: 27695 - protein, 352 aa, Arabidopsis thaliana
  misc_feature (1)..(352): Ceres Seq. ID no. 1824912
MAVTSLLDTVFRRRKKKSTEFISSVFEFDLDTIKAATNDFSELVGRGGFGFVYKGRLQNGQEIAVKILSTSSIRTERQFHNELIILSKLKHKNLINLLGFCTKRDQHGLVYEFMPNSSLDCFILDPHRAAQLNWEMCRNIIDGIARGLRYLHEESGLWVVHRDIKPGNILLDSDLKPKIVGFELARTMQQGENAAETTEIVGTVGYLDPEYIRSGRVSVKSDVYAFGVTILTIISRRKAWSVDGDSLIKYVRRCWNRGEAIDVIHEVMREEEREYSISEILRYIHIALLCVDENAERRPNIDKVLHWFSCFSTPLPDPTFGNRFLVEEETNWPWSPSLSPGHSSVTSPISSR

SEQ ID NO: 27696 - protein, 239 aa, Arabidopsis thaliana
  misc_feature (1)..(239): Ceres Seq. ID no. 1824913
MPNSSLDCFILDPHRAAQLNWEMCRNIIDGIARGLRYLHEESGLWVVHRDIKPGNILLDSDLKPKIVGFELARTMQQGENAAETTEIVGTVGYLDPEYIRSGRVSVKSDVYAFGVTILTIISRRKAWSVDGDSLIKYVRRCWNRGEAIDVIHEVMREEEREYSISEILRYIHIALLCVDENAERRPNIDKVLHWFSCFSTPLPDPTFGNRFLVEEETNWPWSPSLSPGHSSVTSPISSR

SEQ ID NO: 27697 - protein, 217 aa, Arabidopsis thaliana
  misc_feature (1)..(217): Ceres Seq. ID no. 1824914
MCRNIIDGIARGLRYLHEESGLWVVHRDIKPGNILLDSDLKPKIVGFELARTMQQGENAAETTEIVGTVGYLDPEYIRSGRVSVKSDVYAFGVTILTIISRRKAWSVDGDSLIKYVRRCWNRGEAIDVIHEVMREEEREYSISEILRYIHIALLCVDENAERRPNIDKVLHWFSCFSTPLPDPTFGNRFLVEEETNWPWSPSLSPGHSSVTSPISSR

SEQ ID NO: 27698 - DNA, 1956 bp, Arabidopsis thaliana
  misc_feature (1)..(1956): Ceres Seq. ID no. 1825189
atgccgtcacgatcaatctcggcaccggttccggttcttgctccggctccgatcgtttcctctttagtcccagcagcgccgtcaggacatcagaataagacaacgcgaatctttccaccgttcgtggtggctggagccggcgccggtttctctcttttcatcactctctccgtctgtttctgtaaattcagccggaaacgttcatcacctccggcggaaaacgcttcctcttcgcctcggagaccgtcgccacgtgagttttcatattcgtctctccgtcgcgccaccggttctttctcgcaggcgaatagactaggtcagggcggatttggcgtcgtgtttcgtggaactatctccggcggcgagaatgtagctgttaaagtaatggattcaggatctcttcaaggagaaggtgagtttcagaacgagttgttcttcgccgccaagcttgactcgcctcacgttgtccctgttattggtttctctcatgatcgaaaacgacgacgtttgcttcttgtttacaagcttatggacaatggtaatctccaagacgccttgcttcaccggagatgccctgagcttatggattggaatcggaggtttttggttgccgttaacattgccgatgggattaagcatcttcatagtcttgaaccacctgtgattcatggtgatattaagcctagcaatgttctattagatagtctcttctctgccaaaatcgctgattttggtttggctaggttgaaagcagagcaagtggagattagtgtagctccggagcgtgatggtgatggatctatggttgaagaagtagagagtgtggtaactactgtgactggttatgaagattttaactttgggttggttgatcagtctccggagagtgttgctaaggttcctgggtctgtgagtgcttctcctgaggcgacgacggttgtctctgtttctccggaaatgggagagaaaacggatgaggatggtggtagtgttgtggtgatgaagaaggggaaagagagtgagagcaaagattggtggtggaagcaggagagcaatgttgaaagagggagagtgaaagagtatgtaatgcaatggattggttcagaggtaaagaaggagagaccaagcagaagtgattggattgaggcggcagctttgtcttcttcgtcaagtaagaaacttgagaagaagactagcaagagactagattggtggttgtcattggaggaagaggatgagaataagaagaagaagaagcggaggatggttagagagtggtggaaagatgagtatcgtagagaactcgctaagaaaaggaagaagaagaagaagatgactttagaagccgagttttgtagtgatgatgggagtagtagtgtgagtcaatggcggcgtggtagtggtagtggtagcagcatagattggtggttagatgggttaagtggtgaacgatggttgagagcaaggggaaatagccatgactcggtgagcggtgagatagctaagagctgcggaattagtagcacgccgagcatgagagggactgtgtgctatgcagctcctgagtactgtaacttggacaacaacgtgtcagagaaatgtgatgtctatagctacggtgttctgttgttagttctgatttccgggaggcgcccgttggagatgacgggctccgcgagtgagatacaacgggcaaacctcatgtcttgggcgaggaagttggcgagaagaggaaaacttgttgatcttgtggatcaaaagttgcaaaacttagaccaagaacaagcagtgttgtgcataaaggtggctttgttgtgtctgcaaagattaccgatttcacgaccgtcaatgaaagaggtcttgggaatgcttaaaggagaagtgaatctaccagagttgcctagtgagttctcaccatcgccaccattaaagacaacgaggaagcagcgccgttga

SEQ ID NO: 27699 - protein, 651 aa, Arabidopsis thaliana
  misc_feature (1)..(651): Ceres Seq. ID no. 1825190
MPSRSISAPVPVLAPAPIVSSLVPAAPSGHQNKTTRIFPPFVVAGAGAGFSLFITLSVCFCKFSRKRSSPPAENASSSPRRPSPREFSYSSLRRATGSFSQANRLGQGGFGVVFRGTISGGENVAVKVMDSGSLQGEGEFQNELFFAAKLDSPHVVPVIGFSHDRKRRRLLLVYKLMDNGNLQDALLHRRCPELMDWNRRFLVAVNIADGIKHLHSLEPPVIHGDIKPSNVLLDSLFSAKIADFGLARLKAEQVEISVAPERDGDGSMVEEVESVVTTVTGYEDFNFGLVDQSPESVAKVPGSVSASPEATTVVSVSPEMGEKTDEDGGSVVVMKKGKESESKDWWWKQESNVERGRVKEYVMQWIGSEVKKERPSRSDWIEAAALSSSSSKKLEKKTSKRLDWWLSLEEEDENKKKKKRRMVREWWKDEYRRELAKKRKKKKKMTLEAEFCSDDGSSSVSQWRRGSGSGSSIDWWLDGLSGERWLRARGNSHDSVSGEIAKSCGISSTPSMRGTVCYAAPEYCNLDNNVSEKCDVYSYGVLLLVLISGRRPLEMTGSASEIQRANLMSWARKLARRGKLVDLVDQKLQNLDQEQAVLCIKVALLCLQRLPISRPSMKEVLGMLKGEVNLPELPSEFSPSPPLKTTRKQRR

SEQ ID NO: 27700 - protein, 523 aa, Arabidopsis thaliana
  misc_feature (1)..(523): Ceres Seq. ID no. 1825191
MDSGSLQGEGEFQNELFFAAKLDSPHVVPVIGFSHDRKRRRLLLVYKLMDNGNLQDALLHRRCPELMDWNRRFLVAVNIADGIKHLHSLEPPVIHGDIKPSNVLLDSLFSAKIADFGLARLKAEQVEISVAPERDGDGSMVEEVESVVTTVTGYEDFNFGLVDQSPESVAKVPGSVSASPEATTVVSVSPEMGEKTDEDGGSVVVMKKGKESESKDWWWKQESNVERGRVKEYVMQWIGSEVKKERPSRSDWIEAAALSSSSSKKLEKKTSKRLDWWLSLEEEDENKKKKKRRMVREWWKDEYRRELAKKRKKKKKMTLEAEFCSDDGSSSVSQWRRGSGSGSSIDWWLDGLSGERWLRARGNSHDSVSGEIAKSCGISSTPSMRGTVCYAAPEYCNLDNNVSEKCDVYSYGVLLLVLISGRRPLEMTGSASEIQRANLMSWARKLARRGKLVDLVDQKLQNLDQEQAVLCIKVALLCLQRLPISRPSMKEVLGMLKGEVNLPELPSEFSPSPPLKTTRKQRR

SEQ ID NO: 27701 - protein, 475 aa, Arabidopsis thaliana
  misc_feature (1)..(475): Ceres Seq. ID no. 1825192
MDNGNLQDALLHRRCPELMDWNRRFLVAVNIADGIKHLHSLEPPVIHGDIKPSNVLLDSLFSAKIADFGLARLKAEQVEISVAPERDGDGSMVEEVESVVTTVTGYEDFNFGLVDQSPESVAKVPGSVSASPEATTVVSVSPEMGEKTDEDGGSVVVMKKGKESESKDWWWKQESNVERGRVKEYVMQWIGSEVKKERPSRSDWIEAAALSSSSSKKLEKKTSKRLDWWLSLEEEDENKKKKKRRMVREWWKDEYRRELAKKRKKKKKMTLEAEFCSDDGSSSVSQWRRGSGSGSSIDWWLDGLSGERWLRARGNSHDSVSGEIAKSCGISSTPSMRGTVCYAAPEYCNLDNNVSEKCDVYSYGVLLLVLISGRRPLEMTGSASEIQRANLMSWARKLARRGKLVDLVDQKLQNLDQEQAVLCIKVALLCLQRLPISRPSMKEVLGMLKGEVNLPELPSEFSPSPPLKTTRKQRR

SEQ ID NO: 27702 - DNA, 2184 bp, Arabidopsis thaliana
  misc_feature (1)..(2184): Ceres Seq. ID no. 1825212
atggagactcatagaaagaactcggtcgtcggcaacatcctccacacgtgtcatccttgccggcgcaccattccatatagaatctacgccatatttcacacgtgtggcatcatagctctcatgtatcaccatgtacactcacttgtcacagcaaacaacactcttataacatgtcttcttctcctctccgatattgttctcgccttcatgtgggcaaccacaacttccctccgcttaaacccggttcatcggaccgagtgcccggagaaatatgcagctaaaccggaggactttccaaagctggacgtgtttatatgcacggctgatccgtacaaggagcctccaatgatggttgttaacaccgctttatcggtgatggcttacgagtatccgtcagataagatctcggtgtatgtatcggacgatggaggatcgtcgttgactttctttgctcttattgaagctgctaagttctctaagcagtggttgcccttttgcaagaagaataatgttcaagatcggtctcctgaagtttatttctcttcagagtcacattctcgaagtgatgaagctgaaaaccttaagacaaacatattaaaatgtgaggtggaacagatgatgtacgaagacatgaagagtagagtagaacatgtggtggagagtggaaaagttgaaactgcgtttatcacatgcgaccaatttcgtggggtattcgatttgtggaccgacaaattcagtcgtcatgaccatcccacaattattcagctacgagtatcaggggtgatgacaaattcaccgatcattctaacactagactgtgatatgtattcgaacgacccggcaacactggttcgtgctttgtgctatttaacagatcctgaaatcaaatccggtttaggatatgtgcagtttcctcagaaatttctaggaataagcaaaaatgatatatatgcttgtgaaaacaaacgcctcttcattattaatatggttgggtttgatggtctaatgggtccaactcatgtgggaactggttgtttctttaatcgacgagctttctatggacctccatatatgttgattttaccggagataaatgaactaaagccttatcggattgcggataagtctatcaaagcccaagatgttttgtcattagcacacaatgtagcaggatgtatctatgagtacaataccaattggggatccaagattggattcagatatgggtcattagtagaagactactacacagggtttatgctccattgtgaaggatggagatcagtattttgcaacccaaaaaaagctgcattttatggagattccccaaagtgcctagttgatcttgtgggtcaacaaatccgttgggcagttgggcttttcgaaatgtccttttcaaagtatagcccaattacctatggaatcaagtcactggaccttttaatgggtttaggttattgcaactctccgtttaagccattttggtcaattcctctgaccgtctatggacttttaccacagcttgcactcatttctggagttagtgtcttccccaaggcatctgatccgtggttttggctttacatcattttattctttggggcttatgcccaagatctatcagactttttattggaaggaggaacttatcggaaatggtggaacgatcaaagaatgttgatgataaaaggactctcttcattcttctttggttttatagagttcattctcaaaaccctaaacctctccacacctaagttcaacgtcaccagtaaagccaatgatgatgacgaacagaggaagcggtacgagcaagaaatctttgatttcggaacctcttcgtccatgttcttgcccttgaccacggttgccatagtgaatctgcttgcttttgtctgggggctttatggtattctcttctgcggaggagaactctaccttgagctgatgctggtgagcttcgcggtggtgaattgcttaccgatctacggggctatggtgttgaggaaagatgatggaaaattatcaaaaagaacttgtttcttagctgggaacctccacgttggttcttattgtgtcaagttacttcgtcctcaagtaacttcaccccttaggttaattcacaacaataatacgtctggctggttcaagcggaagaaacacaatatgaatgaatctgtgtaa

SEQ ID NO: 27703 - protein, 727 aa, Arabidopsis thaliana
  misc_feature (1)..(727): Ceres Seq. ID no. 1825213
METHRKNSVVGNILHTCHPCRRTIPYRIYAIFHTCGIIALMYHHVHSLVTANNTLITCLLLLSDIVLAFMWATTTSLRLNPVHRTECPEKYAAKPEDFPKLDVFICTADPYKEPPMMVVNTALSVMAYEYPSDKISVYVSDDGGSSLTFFALIEAAKFSKQWLPFCKKNNVQDRSPEVYFSSESHSRSDEAENLKTNILKCEVEQMMYEDMKSRVEHVVESGKVETAFITCDQFRGVFDLWTDKFSRHDHPTIIQLRVSGVMTNSPIILTLDCDMYSNDPATLVRALCYLTDPEIKSGLGYVQFPQKFLGISKNDIYACENKRLFIINMVGFDGLMGPTHVGTGCFFNRRAFYGPPYMLILPEINELKPYRIADKSIKAQDVLSLAHNVAGCIYEYNTNWGSKIGFRYGSLVEDYYTGFMLHCEGWRSVFCNPKKAAFYGDSPKCLVDLVGQQIRWAVGLFEMSFSKYSPITYGIKSLDLLMGLGYCNSPFKPFWSIPLTVYGLLPQLALISGVSVFPKASDPWFWLYIILFFGAYAQDLSDFLLEGGTYRKWWNDQRMLMIKGLSSFFFGFIEFILKTLNLSTPKFNVTSKANDDDEQRKRYEQEIFDFGTSSSMFLPLTTVAIVNLLAFVWGLYGILFCGGELYLELMLVSFAVVNCLPIYGAMVLRKDDGKLSKRTCFLAGNLHVGSYCVKLLRPQVTSPLRLIHNNNTSGWFKRKKHNMNESV

SEQ ID NO: 27704 - protein, 687 aa, Arabidopsis thaliana
  misc_feature (1)..(687): Ceres Seq. ID no. 1825214
MYHHVHSLVTANNTLITCLLLLSDIVLAFMWATTTSLRLNPVHRTECPEKYAAKPEDFPKLDVFICTADPYKEPPMMVVNTALSVMAYEYPSDKISVYVSDDGGSSLTFFALIEAAKFSKQWLPFCKKNNVQDRSPEVYFSSESHSRSDEAENLKTNILKCEVEQMMYEDMKSRVEHVVESGKVETAFITCDQFRGVFDLWTDKFSRHDHPTIIQLRVSGVMTNSPIILTLDCDMYSNDPATLVRALCYLTDPEIKSGLGYVQFPQKFLGISKNDIYACENKRLFIINMVGFDGLMGPTHVGTGCFFNRRAFYGPPYMLILPEINELKPYRIADKSIKAQDVLSLAHNVAGCIYEYNTNWGSKIGFRYGSLVEDYYTGFMLHCEGWRSVFCNPKKAAFYGDSPKCLVDLVGQQIRWAVGLFEMSFSKYSPITYGIKSLDLLMGLGYCNSPFKPFWSIPLTVYGLLPQLALISGVSVFPKASDPWFWLYIILFFGAYAQDLSDFLLEGGTYRKWWNDQRMLMIKGLSSFFFGFIEFILKTLNLSTPKFNVTSKANDDDEQRKRYEQEIFDFGTSSSMFLPLTTVAIVNLLAFVWGLYGILFCGGELYLELMLVSFAVVNCLPIYGAMVLRKDDGKLSKRTCFLAGNLHVGSYCVKLLRPQVTSPLRLIHNNNTSGWFKRKKHNMNESV

SEQ ID NO: 27705 - protein, 658 aa, Arabidopsis thaliana
  misc_feature (1)..(658): Ceres Seq. ID no. 1825215
MWATTTSLRLNPVHRTECPEKYAAKPEDFPKLDVFICTADPYKEPPMMVVNTALSVMAYEYPSDKISVYVSDDGGSSLTFFALIEAAKFSKQWLPFCKKNNVQDRSPEVYFSSESHSRSDEAENLKTNILKCEVEQMMYEDMKSRVEHVVESGKVETAFITCDQFRGVFDLWTDKFSRHDHPTIIQLRVSGVMTNSPIILTLDCDMYSNDPATLVRALCYLTDPEIKSGLGYVQFPQKFLGISKNDIYACENKRLFIINMVGFDGLMGPTHVGTGCFFNRRAFYGPPYMLILPEINELKPYRIADKSIKAQDVLSLAHNVAGCIYEYNTNWGSKIGFRYGSLVEDYYTGFMLHCEGWRSVFCNPKKAAFYGDSPKCLVDLVGQQIRWAVGLFEMSFSKYSPITYGIKSLDLLMGLGYCNSPFKPFWSIPLTVYGLLPQLALISGVSVFPKASDPWFWLYIILFFGAYAQDLSDFLLEGGTYRKWWNDQRMLMIKGLSSFFFGFIEFILKTLNLSTPKFNVTSKANDDDEQRKRYEQEIFDFGTSSSMFLPLTTVAIVNLLAFVWGLYGILFCGGELYLELMLVSFAVVNCLPIYGAMVLRKDDGKLSKRTCFLAGNLHVGSYCVKLLRPQVTSPLRLIHNNNTSGWFKRKKHNMNESV

SEQ ID NO: 27706 - DNA, 2070 bp, Arabidopsis thaliana
  misc_feature (1)..(2070): Ceres Seq. ID no. 1825216
atggagcctcacagaaaacactcggtcggcgacacaaccctccacacgtgtcatccttgccggcgcaccattccatatagaatctacgccgtatttcacacgtgtggcatcatagccctcatgtatcaccatgtacactcacttctcacagcaaacacaactctaatcacgtctctccttctcctctccgatattgttctcgccttcatgtgggcaaccacaacttccctccggtataaaccggttcgccggaccgagtaccctgagaaatatgcagctgaaccggaggacttcccgaaactggacgtgtttatatgcacggctgatccgtacaaggagcctccgatgatggtggtcaacactgccttatcggtgatggcttacgagtatccgtccgataagatctcagtctacgtatcggacgatggaggttcgtcgttgactttgtttgctcttatggaggcagctaagttctctaagcattggttgcctttttgcaagaagaataatgttcaagatcggtctcctgaagtttatttctcatcaaagttacgttctcggagtgatgaagctgaaaatatcaagatgatgtacgaagacatgaagagtagagtagaacatgtggtggagagtggaaaagttgagactgcatttatcacatgcgatcaatttcgtggggtattcgatttgtggaccgacaaattcactcgtcatgaccatcccacaattattcagctacgagtgtctggagtgatgacgaattcaccgatcattctaacactagactgtgatatgtattccaacgatccagcaacaccagttcgtgccctgtgctatttaacagaccctaaaatcaaaactggtttagggtttgtgcagtttcctcaaacatttcaaggaataagcaagaacgatatatatgcatgcgcgtataagcgtctctttgagatcaatatgattgggtttgatggtttaatgggcccgaatcatgtgggaactggttgtttcttcaatcgacgaggtttttatggagctccatctaatttaattttgcctgagatagatgaacttaagcccaatcgtattgtagataagcctatcaatgctcaagatgttttagcattggctcaccgtgtagcaggatgtatctacgagcttaacaccaattggggatcaaagattggattcagatatgggtctttagtagaagactactacacagggtataggctccattgtgaaggatggagatcagttttttgcagacccaaaagagcagcattttgcggagattccccaaaaagtctaattgatgtagtgagccaacaaaagagatgggccattgggcttcttgaagttgccatctcaaggtatagccccattacctatggtgtcaaatcaatgggtctagtaacgggagtaggctattgtcaatacgcatgttgggccttttggtcacttcctcttatcgtctatggattcttgccccaacttgctctcctttatcaatctagcgtctttcccaagtcatcagatccatggttttggctttacatcgttttgttcctcggtgcatatgggcaagatctactcgactttgtattagaaggaggaacttatggcggatggtggaacgatcaaagaatgtggtcgataagaggattctcttcacacctatttggcttcatagagttcactcttaaaaccctaaacctctccacgcatggattcaacgtcacaagcaaagccaacgatgacgaagaacaaagcaagaggtatgagaaagagatttttgagttcggcccctcttcgtccatgttcttgcccttgactacggttgccatcgttaacctccttgcttttgtctgggggctttatggtcttttcgcttggggagaaggactcgtccttgagctgatgctggcgagtttcgcggtggtgaactgcttgccgatctatgaggctatggtgttgaggatagacgatggaaaattaccaaaaagggtttgtttcgtagctggaatcctcacatttgtgctgattgtgtcaggttacgtcttcctcaagtaa

SEQ ID NO: 27707 - protein, 689 aa, Arabidopsis thaliana
  misc_feature (1)..(689): Ceres Seq. ID no. 1825217
MEPHRKHSVGDTTLHTCHPCRRTIPYRIYAVFHTCGIIALMYHHVHSLLTANTTLITSLLLLSDIVLAFMWATTTSLRYKPVRRTEYPEKYAAEPEDFPKLDVFICTADPYKEPPMMVVNTALSVMAYEYPSDKISVYVSDDGGSSLTLFALMEAAKFSKHWLPFCKKNNVQDRSPEVYFSSKLRSRSDEAENIKMMYEDMKSRVEHVVESGKVETAFITCDQFRGVFDLWTDKFTRHDHPTIIQLRVSGVMTNSPIILTLDCDMYSNDPATPVRALCYLTDPKIKTGLGFVQFPQTFQGISKNDIYACAYKRLFEINMIGFDGLMGPNHVGTGCFFNRRGFYGAPSNLILPEIDELKPNRIVDKPINAQDVLALAHRVAGCIYELNTNWGSKIGFRYGSLVEDYYTGYRLHCEGWRSVFCRPKRAAFCGDSPKSLIDVVSQQKRWAIGLLEVAISRYSPITYGVKSMGLVTGVGYCQYACWAFWSLPLIVYGFLPQLALLYQSSVFPKSSDPWFWLYIVLFLGAYGQDLLDFVLEGGTYGGWWNDQRMWSIRGFSSHLFGFIEFTLKTLNLSTHGFNVTSKANDDEEQSKRYEKEIFEFGPSSSMFLPLTTVAIVNLLAFVWGLYGLFAWGEGLVLELMLASFAVVNCLPIYEAMVLRIDDGKLPKRVCFVAGILTFVLIVSGYVFLK

SEQ ID NO: 27708 - protein, 649 aa, Arabidopsis thaliana
  misc_feature (1)..(649): Ceres Seq. ID no. 1825218
MYHHVHSLLTANTTLITSLLLLSDIVLAFMWATTTSLRYKPVRRTEYPEKYAAEPEDFPKLDVFICTADPYKEPPMMVVNTALSVMAYEYPSDKISVYVSDDGGSSLTLFALMEAAKFSKHWLPFCKKNNVQDRSPEVYFSSKLRSRSDEAENIKMMYEDMKSRVEHVVESGKVETAFITCDQFRGVFDLWTDKFTRHDHPTIIQLRVSGVMTNSPIILTLDCDMYSNDPATPVRALCYLTDPKIKTGLGFVQFPQTFQGISKNDIYACAYKRLFEINMIGFDGLMGPNHVGTGCFFNRRGFYGAPSNLILPEIDELKPNRIVDKPINAQDVLALAHRVAGCIYELNTNWGSKIGFRYGSLVEDYYTGYRLHCEGWRSVFCRPKRAAFCGDSPKSLIDVVSQQKRWAIGLLEVAISRYSPITYGVKSMGLVTGVGYCQYACWAFWSLPLIVYGFLPQLALLYQSSVFPKSSDPWFWLYIVLFLGAYGQDLLDFVLEGGTYGGWWNDQRMWSIRGFSSHLFGFIEFTLKTLNLSTHGFNVTSKANDDEEQSKRYEKEIFEFGPSSSMFLPLTTVAIVNLLAFVWGLYGLFAWGEGLVLELMLASFAVVNCLPIYEAMVLRIDDGKLPKRVCFVAGILTFVLIVSGYVFLK

SEQ ID NO: 27709 - protein, 620 aa, Arabidopsis thaliana
  misc_feature (1)..(620): Ceres Seq. ID no. 1825219
MWATTTSLRYKPVRRTEYPEKYAAEPEDFPKLDVFICTADPYKEPPMMVVNTALSVMAYEYPSDKISVYVSDDGGSSLTLFALMEAAKFSKHWLPFCKKNNVQDRSPEVYFSSKLRSRSDEAENIKMMYEDMKSRVEHVVESGKVETAFITCDQFRGVFDLWTDKFTRHDHPTIIQLRVSGVMTNSPIILTLDCDMYSNDPATPVRALCYLTDPKIKTGLGFVQFPQTFQGISKNDIYACAYKRLFEINMIGFDGLMGPNHVGTGCFFNRRGFYGAPSNLILPEIDELKPNRIVDKPINAQDVLALAHRVAGCIYELNTNWGSKIGFRYGSLVEDYYTGYRLHCEGWRSVFCRPKRAAFCGDSPKSLIDVVSQQKRWAIGLLEVAISRYSPITYGVKSMGLVTGVGYCQYACWAFWSLPLIVYGFLPQLALLYQSSVFPKSSDPWFWLYIVLFLGAYGQDLLDFVLEGGTYGGWWNDQRMWSIRGFSSHLFGFIEFTLKTLNLSTHGFNVTSKANDDEEQSKRYEKEIFEFGPSSSMFLPLTTVAIVNLLAFVWGLYGLFAWGEGLVLELMLASFAVVNCLPIYEAMVLRIDDGKLPKRVCFVAGILTFVLIVSGYVFLK

SEQ ID NO: 27710 - DNA, 765 bp, Arabidopsis thaliana
  misc_feature (1)..(765): Ceres Seq. ID no. 1825625
atggcgatcgaggatcaagagaacacaatccgtgaaatcaaacctaagaacagaagaatcatgggagctggtggtccggaggaagaggagaaccggtggccgccatggttgaaacctttgcttaaagagcaattctttgttcattgcaagtttcatggagactctcataagagtgaatgcaatatgtattgcttagactgcaccaatggcccactttgctctctttgtcttgctcatcacaaggatcatcgcaccattcagataaggagatcttcttatcatgatgttataagggtgaatgagatacaaaagtatcttgatataggtgggatccaaacctatgtgatcaatagtgctaaagtcgtcttcctgaatgagaggcctcagcctaggcctgggaaaggagtgaccaatacctgcaaggtttgctatcgtagcctcgttgatgatagcttccgcttctgctctcttggctgcaagtttcacctaacttctccttgcatttcagtaaactcttttctgatacttactttctctatgtttttgggaaatgaaatcaagattgctggaacatcaagaggctttgaaaagggaagggagaacctgctaatggaaacagaggattcaagtagcagcattgcaattgggaagaacattacaaatctccagagtttcagcccatcaacacctccacttactacatctagtaactgcagaatcgtcaagcgaagaaagggaattcctcaccgatctccaatgggataa

SEQ ID NO: 27711 - protein, 254 aa, Arabidopsis thaliana
  misc_feature (1)..(254): Ceres Seq. ID no. 1825626
MAIEDQENTIREIKPKNRRIMGAGGPEEEENRWPPWLKPLLKEQFFVHCKFHGDSHKSECNMYCLDCTNGPLCSLCLAHHKDHRTIQIRRSSYHDVIRVNEIQKYLDIGGIQTYVINSAKVVFLNERPQPRPGKGVTNTCKVCYRSLVDDSFRFCSLGCKFHLTSPCISVNSFLILTFSMFLGNEIKIAGTSRGFEKGRENLLMETEDSSSSIAIGKNITNLQSFSPSTPPLTTSSNCRIVKRRKGIPHRSPMG

SEQ ID NO: 27712 - protein, 234 aa, Arabidopsis thaliana
  misc_feature (1)..(234): Ceres Seq. ID no. 1825627
MGAGGPEEEENRWPPWLKPLLKEQFFVHCKFHGDSHKSECNMYCLDCTNGPLCSLCLAHHKDHRTIQIRRSSYHDVIRVNEIQKYLDIGGIQTYVINSAKVVFLNERPQPRPGKGVTNTCKVCYRSLVDDSFRFCSLGCKFHLTSPCISVNSFLILTFSMFLGNEIKIAGTSRGFEKGRENLLMETEDSSSSIAIGKNITNLQSFSPSTPPLTTSSNCRIVKRRKGIPHRSPMG

SEQ ID NO: 27713 - protein, 193 aa, Arabidopsis thaliana
  misc_feature (1)..(193): Ceres Seq. ID no. 1825628
MYCLDCTNGPLCSLCLAHHKDHRTIQIRRSSYHDVIRVNEIQKYLDIGGIQTYVINSAKVVFLNERPQPRPGKGVTNTCKVCYRSLVDDSFRFCSLGCKFHLTSPCISVNSFLILTFSMFLGNEIKIAGTSRGFEKGRENLLMETEDSSSSIAIGKNITNLQSFSPSTPPLTTSSNCRIVKRRKGIPHRSPMG

SEQ ID NO: 27714 - DNA, 3285 bp, Arabidopsis thaliana
  misc_feature (1)..(3285): Ceres Seq. ID no. 1825704
atgggtatttccgctcgtatcttcgccggacatctaggcagtacacaactagccgcggcatccatcggaaacagcagcttcagcctcgtttatgccctcatgttgggcatgggtagtgcggtcgagacactatgtggacaagcgtatggtgcccaccggtacgagatgcttgggatctatctccaaagagcaaccattgtccttgctctagttggctttcccatgacaatactatacactttttcgtacccgattcttctcctcttaggcgagcctaaaacggtatcatacatgggatctttatacatcgccggactcatccctcaaatcttcgcttacgccgtctacttcacggcccaaaagttcctccaggcccaaagcgtagtggccccgagtgcgtacatctcagccgccgccctcgtcctccagatatcgctgacgtggatcaccgtttacgcaatgggccaaggcctcatggcccaaacgttttacgttataactagcgtaaggtttaaagacacttggactggttttagctggaaatcgttacatggtctttggagcttctttaaactgtctgctggctctgcggtcatgatctgtttggaactgtggtatacacagattctggttcttctcgctggtttgcttaaagatcctgcactctctctagattctctatctatctgtatgtcaatttcagcattatcattcatggtctccgttggctttaatgctgctgtaagtgtacgtacaagtaatgagcttggagcaggaaatccgaaatcggcgttattctctacatggacagcgacttttgtatccttcgtgatctccgtcgtagaggcacttgtcgtgattgcgtcacgtgacaacgtcagctacattttcacgtcggatgctgacgtggctaaggccgtctctgacctatgtccttttctcgccgtcaccattattcttaacggaatccaacctgtcttgtccggagtggcagtgggatgtggatggcagacatacgtggcatatgtgaatattggttgttactatatagttggtattccaattggatgtattctcggcttcactttcaattttcaagcaaaggggatatggaccgggatgattggaggcaccctcatgcaaacactaatcttactttacgtcacgtatcaagcagattgggataaagagcaaaatgaattaagcaatgaaattgaaaaaaccttcattgccttcttcattgctctgcgccgtcccgccttgtctctctcaaattcgcttactcatccctcgcaggttagcttcttctaccattattgctttcgcattccttctggggtaagggtttcatcatcaactttcgccaatgcaaagcttgtaactttgagaaaccacactgttaatttgcacatatattactgttccatggctggtactgataaccgccgctctcgccacgacgacgaaagccctaaaaatcccaacaagaagaagaaaggaaaccgtaatccagaaaagagtctccttatcaatcttcattcatgttccaagagaaaggatctctcagctgcattggctctttatgatgcagctatcacttccagtgacattcgcctcaaccagcaacacttccaatcccttctttacctctgctccgcgttcattagtgacccatctcttcaaaccgttgccattgaccgtggctttcaaatttttgaccgtatggttagttctgggataagtcctaatgaatcatctgtcactgcagttgcacgactagctgctgccaagggtgatggagactatgctttcaagcttgttaaagaccttgttgctgttggtggtgtatcggtccctcgtctgagaacttatgctccggctttgctctgtttctgtgatactttggaggctgaaaagggttatgaagtggaagatcacatggatgcttcaggtattgtgttggaggaggcagagatctcggctttgctaaagaagttaagagaatgtgttggctgcgttagtgaagaaacttcaaaagcaatcgaggaatggttttatggagtgaaagctagcgaagttagtgataatgggattggttctgatattgagctgcttagagcagctgttttgaaaaatgggggtgggtggcatggtcttgggtgggttggagaaggcaaatggattgtgaagaaaggtaatgttagctcagccgggaaatgtttgagctgtgatgagcatttggcttgtgttgataccaatgaggtagagactgaagattttgtgaattctttggtgactttggctatggagaggaaggcaaagatgaattcatgcgagcctatggcggatttcagtgagtttcaggagtggcttgaaaagcatggagattacgaagctatactagatggagcaaatattgggctctaccaacaaaattttgcagatggtggtttcagtctaccacagattttaagtcaattttcgactaaacgactaacttatgatatttccaaacgatttttcttatttggatggaaaaggttgaatcagcagaatcaagacatcatgaactcacctcctccttcttctaatgatggcttggcgaagcgaaaaagaggtcgaccgcgcaaagatgaaaactcaactccaaaaccggacatgaatttggtaggtaaggtggttactggtgtaatcgaaggatctttcgacgcaggctatctccttaacgttaaggttaaagacagtgacacccaactcagaggtctcgtgttcatacggggcagagtcactccgatcactccagaaaacgacgtggctcctcttgttaaaatgtacggaagagaagatatcaagaacaaccaaaccgatcattctttccctactgatcaaccaatgcaagatgctgctgtcactactactgacatggatatttctgaatcctctcgagctttggtcgtagttccacaagcgaccaatggccaagcgaaggaagctacgaaggatgaagatggagtcattgaaggacaagctgacactcggttagtggagttttttccaactccaggcacaatgatgatgactgctcaaccaaatcttgtcttggtaccgaaagagacagaacaacagaaaacaactggtgggagtcatggattcgatcttatggaagaggaaccagttcgtcaaggagagaagttgccagaggagctattacatctagagcttggaaacaagacaacattgagtgtagacaacaacatctctacaacagaggcgcctgatctataa

SEQ ID NO: 27715 - protein, 1094 aa, Arabidopsis thaliana
  misc_feature (1)..(1094): Ceres Seq. ID no. 1825705
MGISARIFAGHLGSTQLAAASIGNSSFSLVYALMLGMGSAVETLCGQAYGAHRYEMLGIYLQRATIVLALVGFPMTILYTFSYPILLLLGEPKTVSYMGSLYIAGLIPQIFAYAVYFTAQKFLQAQSVVAPSAYISAAALVLQISLTWITVYAMGQGLMAQTFYVITSVRFKDTWTGFSWKSLHGLWSFFKLSAGSAVMICLELWYTQILVLLAGLLKDPALSLDSLSICMSISALSFMVSVGFNAAVSVRTSNELGAGNPKSALFSTWTATFVSFVISVVEALVVIASRDNVSYIFTSDADVAKAVSDLCPFLAVTIILNGIQPVLSGVAVGCGWQTYVAYVNIGCYYIVGIPIGCILGFTFNFQAKGIWTGMIGGTLMQTLILLYVTYQADWDKEQNELSNEIEKTFIAFFIALRRPALSLSNSLTHPSQVSFFYHYCFRIPSGVRVSSSTFANAKLVTLRNHTVNLHIYYCSMAGTDNRRSRHDDESPKNPNKKKKGNRNPEKSLLINLHSCSKRKDLSAALALYDAAITSSDIRLNQQHFQSLLYLCSAFISDPSLQTVAIDRGFQIFDRMVSSGISPNESSVTAVARLAAAKGDGDYAFKLVKDLVAVGGVSVPRLRTYAPALLCFCDTLEAEKGYEVEDHMDASGIVLEEAEISALLKKLRECVGCVSEETSKAIEEWFYGVKASEVSDNGIGSDIELLRAAVLKNGGGWHGLGWVGEGKWIVKKGNVSSAGKCLSCDEHLACVDTNEVETEDFVNSLVTLAMERKAKMNSCEPMADFSEFQEWLEKHGDYEAILDGANIGLYQQNFADGGFSLPQILSQFSTKRLTYDISKRFFLFGWKRLNQQNQDIMNSPPPSSNDGLAKRKRGRPRKDENSTPKPDMNLVGKVVTGVIEGSFDAGYLLNVKVKDSDTQLRGLVFIRGRVTPITPENDVAPLVKMYGREDIKNNQTDHSFPTDQPMQDAAVTTTDMDISESSRALVVVPQATNGQAKEATKDEDGVIEGQADTRLVEFFPTPGTMMMTAQPNLVLVPKETEQQKTTGGSHGFDLMEEEPVRQGEKLPEELLHLELGNKTTLSVDNNISTTEAPDL

SEQ ID NO: 27716 - protein, 1061 aa, Arabidopsis thaliana
  misc_feature (1)..(1061): Ceres Seq. ID no. 1825706
MLGMGSAVETLCGQAYGAHRYEMLGIYLQRATIVLALVGFPMTILYTFSYPILLLLGEPKTVSYMGSLYIAGLIPQIFAYAVYFTAQKFLQAQSVVAPSAYISAAALVLQISLTWITVYAMGQGLMAQTFYVITSVRFKDTWTGFSWKSLHGLWSFFKLSAGSAVMICLELWYTQILVLLAGLLKDPALSLDSLSICMSISALSFMVSVGFNAAVSVRTSNELGAGNPKSALFSTWTATFVSFVISVVEALVVIASRDNVSYIFTSDADVAKAVSDLCPFLAVTIILNGIQPVLSGVAVGCGWQTYVAYVNIGCYYIVGIPIGCILGFTFNFQAKGIWTGMIGGTLMQTLILLYVTYQADWDKEQNELSNEIEKTFIAFFIALRRPALSLSNSLTHPSQVSFFYHYCFRIPSGVRVSSSTFANAKLVTLRNHTVNLHIYYCSMAGTDNRRSRHDDESPKNPNKKKKGNRNPEKSLLINLHSCSKRKDLSAALALYDAAITSSDIRLNQQHFQSLLYLCSAFISDPSLQTVAIDRGFQIFDRMVSSGISPNESSVTAVARLAAAKGDGDYAFKLVKDLVAVGGVSVPRLRTYAPALLCFCDTLEAEKGYEVEDHMDASGIVLEEAEISALLKKLRECVGCVSEETSKAIEEWFYGVKASEVSDNGIGSDIELLRAAVLKNGGGWHGLGWVGEGKWIVKKGNVSSAGKCLSCDEHLACVDTNEVETEDFVNSLVTLAMERKAKMNSCEPMADFSEFQEWLEKHGDYEAILDGANIGLYQQNFADGGFSLPQILSQFSTKRLTYDISKRFFLFGWKRLNQQNQDIMNSPPPSSNDGLAKRKRGRPRKDENSTPKPDMNLVGKVVTGVIEGSFDAGYLLNVKVKDSDTQLRGLVFIRGRVTPITPENDVAPLVKMYGREDIKNNQTDHSFPTDQPMQDAAVTTTDMDISESSRALVVVPQATNGQAKEATKDEDGVIEGQADTRLVEFFPTPGTMMMTAQPNLVLVPKETEQQKTTGGSHGFDLMEEEPVRQGEKLPEELLHLELGNKTTLSVDNNISTTEAPDL

SEQ ID NO: 27717 - protein, 1058 aa, Arabidopsis thaliana
  misc_feature (1)..(1058): Ceres Seq. ID no. 1825707
MGSAVETLCGQAYGAHRYEMLGIYLQRATIVLALVGFPMTILYTFSYPILLLLGEPKTVSYMGSLYIAGLIPQIFAYAVYFTAQKFLQAQSVVAPSAYISAAALVLQISLTWITVYAMGQGLMAQTFYVITSVRFKDTWTGFSWKSLHGLWSFFKLSAGSAVMICLELWYTQILVLLAGLLKDPALSLDSLSICMSISALSFMVSVGFNAAVSVRTSNELGAGNPKSALFSTWTATFVSFVISVVEALVVIASRDNVSYIFTSDADVAKAVSDLCPFLAVTIILNGIQPVLSGVAVGCGWQTYVAYVNIGCYYIVGIPIGCILGFTFNFQAKGIWTGMIGGTLMQTLILLYVTYQADWDKEQNELSNEIEKTFIAFFIALRRPALSLSNSLTHPSQVSFFYHYCFRIPSGVRVSSSTFANAKLVTLRNHTVNLHIYYCSMAGTDNRRSRHDDESPKNPNKKKKGNRNPEKSLLINLHSCSKRKDLSAALALYDAAITSSDIRLNQQHFQSLLYLCSAFISDPSLQTVAIDRGFQIFDRMVSSGISPNESSVTAVARLAAAKGDGDYAFKLVKDLVAVGGVSVPRLRTYAPALLCFCDTLEAEKGYEVEDHMDASGIVLEEAEISALLKKLRECVGCVSEETSKAIEEWFYGVKASEVSDNGIGSDIELLRAAVLKNGGGWHGLGWVGEGKWIVKKGNVSSAGKCLSCDEHLACVDTNEVETEDFVNSLVTLAMERKAKMNSCEPMADFSEFQEWLEKHGDYEAILDGANIGLYQQNFADGGFSLPQILSQFSTKRLTYDISKRFFLFGWKRLNQQNQDIMNSPPPSSNDGLAKRKRGRPRKDENSTPKPDMNLVGKVVTGVIEGSFDAGYLLNVKVKDSDTQLRGLVFIRGRVTPITPENDVAPLVKMYGREDIKNNQTDHSFPTDQPMQDAAVTTTDMDISESSRALVVVPQATNGQAKEATKDEDGVIEGQADTRLVEFFPTPGTMMMTAQPNLVLVPKETEQQKTTGGSHGFDLMEEEPVRQGEKLPEELLHLELGNKTTLSVDNNISTTEAPDL

SEQ ID NO: 27718 - DNA, 1035 bp, Arabidopsis thaliana
  misc_feature (1)..(1035): Ceres Seq. ID no. 1825816
atgaagggggatcaagaagtacaagtcattggccaatcagttgctacaattctgggcagactatactatgaaaatggaggaaacagcaaatggctagcaacggtagttcagcttgtaggctttcctattctacttccatatcatctcttgtcagtcaaaacacatacaacaactcagagagatggcaaattaacctcacttaggaaccgtgcattagtttacatagtgcttggacttcttgtaggagcagcttgctacctatattccattggactgctttacctacctgtttctaccctttccctgatctgtgcatcacagttagccttcaccgctttcttctcttatttactcaactcacaaaaacttactcctatcattttgaattctcttttcctcctcactatatcttccaccctccttgcatttaataacgaggaatcagattccaaaaaagttacaaaaggagagtatgtcaaaggtttcgtatgcaccgttggtgcatctgctgggtttggtctactcttatccctacaacagctagcctttcgtaaagttttaaagaagcaaactttctcagaagttataaatatgataatctacatgagtctagtggccagttgtgttagcgtggtggggctttttgctagtagcgagtggaaaactttgagcagtgaaatggaaaactacaaacttgggaaggtatcctatgtcatgaacctagtgtggacagctgttacctggcaggtattctccatcggttgcacaggactgatcttcgagctttcctccctattctcaaatgcaataagcgctttgggactccccgtggttcctatcctggctgtcatcattttccatgacaaaatgaacggcttaaaggtgatttctatgattctagctatttggggtttcgtatcctatgtctaccaacaatatcttgatgaaacaaacttgaagaaaagtaatgaaataccaacaacagaatcccctgaccgaccagaagcagaagggtcaagtgagcaatcaaaataa

SEQ ID NO: 27719 - protein, 344 aa, Arabidopsis thaliana
  misc_feature (1)..(344): Ceres Seq. ID no. 1825817
MKGDQEVQVIGQSVATILGRLYYENGGNSKWLATVVQLVGFPILLPYHLLSVKTHTTTQRDGKLTSLRNRALVYIVLGLLVGAACYLYSIGLLYLPVSTLSLICASQLAFTAFFSYLLNSQKLTPIILNSLFLLTISSTLLAFNNEESDSKKVTKGEYVKGFVCTVGASAGFGLLLSLQQLAFRKVLKKQTFSEVINMIIYMSLVASCVSVVGLFASSEWKTLSSEMENYKLGKVSYVMNLVWTAVTWQVFSIGCTGLIFELSSLFSNAISALGLPVVPILAVIIFHDKMNGLKVISMILAIWGFVSYVYQQYLDETNLKKSNEIPTTESPDRPEAEGSSEQSK

SEQ ID NO: 27720 - DNA, 3387 bp, Arabidopsis thaliana
  misc_feature (1)..(3387): Ceres Seq. ID no. 1825820
atggaaataactcaagtaatctatgtcaatggtaagcaagatgcatctcgtagtgtagattacttgattcttttcgctaacctgttgtttttgatgttttcagatcataacaacatagaagcaaacctaacaggtcaggaggaaatgaataccaccatggaaatcgaatcttcgtccgtacctcaatcgaagaactataagaaatggcttcgtatttccatttacgtagtttactatgaaaatggtgggaagagtacatggatgggaacacttgtccaactaatcggcttccctgttctgtttctcttccgcttcttttcccaaaccaaaaatcccaaaccaacagaagcagatttcagaaagttctcttccttcaccattcttggatcagtttacatcgttactggactattagtgtctgctaactcttatatgtcctctgttggtttactatacttaccagtttctactttctccctcatcttggcctcacaattggccttcactgccttcttctcatattttctaaactcgcagaagttcacacctttcattgtgaattctctgtttctccttactatttcctctgccctcctcgtggtcaacactgattcggaaaacacagcaaaagtgtctagagtaaaatatgtgatagggataatatgtaccattggtgcttctgctgggattggattgctgctatccctggtacaactgatcctcaggaaggttttaaagaagcaaacattctcaacggtcactgacttggtcgcttaccaatctctagttgcaagctgtgtggttctcataggacttttcgcaagcggggagtggaaaactttaacaagtgagatggaaaactacaaactggggaaagtgccatacgttatgactttggcctcgatagctatttcctggcaagtctacaccattggcgtcgtgggactgatctttgagtcatcttctgtgttctccaattccataactgctgtgggattgcctatagttccagttgtagcagtgattgttttccatgataaaatgaacgcgtcaaagatcttctccatcattttagctatctggggattcatttcatttgtctatcagcactacctcgacgaaaagaagttgaagactagccacacaagtcctgtaggagatcctcatctactacctgctgaggaaggtcacacaaacatacatagtgaccagaacttagaagcaaaccttatagatcatgaggtggtaactgaatcatcatcatcagctgtgcctcaaaccgagaactataaaaggtggcttcgtgtctccatatacgtaatctttgtcctcttttgccagccactagctacaattctgggtagattgtactatgaaaatggaggaaatagcacatatgtggtaacacttcttcaactcattggcttccctgtactggttctgttccgcttcttttctcgaatcaggcaacccaaatcaacagatacaaatttcagtcagtccccttccttcaccacccttgcatcggtttacttgtgcactggactgctagtgtccgcttatgcttatttgtctgcattggccttcactgcctttttctcatatttccttaactcgcaaaagttcactcctttgatagtcagttctttgcttctcctcactgtatcctctgctcttcttgtggtcaacactgattcagaaaactcaactaatgtatctagagtacagtatgtgatcgggttcatatgtaccatcggtgcttccgctgggattggactgttactatctctgatacaaatgctcttcaggaaagttttcacgaagcatacatcctcagcagtcacggacttggccatttaccagtctctagttgcgagttgtgtagttctcataggactttttgcaagtggagagtgggaaactttgccaagtgagatgagaaactacaaactcgggaaagtgtcatatgttttgactttagcctcggcagctatttcctggcaagtctacactcttggtcttgtgggattgatcttcgagtcatcctctgtgttctccaattccataacagctgtgggattgcctatagttccagttgcggcagtgatagttttccatgatagaatggacgcatcaaaaatcttctccattattttagctatctgcggcttcctttcattcgtctatcagcactacctcgacgaaaagaagttgaatactagccacacaagtgctgtaggagatcttcatctacctgttgaggaaggtcacacaaacatacaaagtgaccagaacttagaagcaaaccttctagatcatgaggaaactgaatcattttcagtacctcaaacgaagaactgtaagaggtggctccgtgtctccatatacgcaatctttgtcatcttctgccaaccacttgctacagttctgggtagactgtactatgaaaatggagggaaaagcacatatgtggtaacacttcttcaactcattggcttccctgtactgattctcttccgcttcttttctcgaatcaggcaacccaaatcaacagatacaaatttcagtcagtccccttccttcaccacccttgcatcggtttacttgtgcactggactgctagtgtctgcttatgcttatttgtctgcagttgggttgctttacttaccagtctctactttctccctcatcttggcctcacagttggccttcactgcctttttctcatatttccttaactcgcaaaagttcactcctttgatagtcaattctttgtttctccttacggtttcctctgccctcctcgtggtcaacactgattcagaaaacacaacaaatgtatctagagtacaatatgtgattgggttcatctgtaccattggtgcttccgctgggattggattggtactatctctgatacaactgctcttcaggaaagttttcacgaagcatacatcctcagcagtcctggacttggccaattaccagtctctagttgcaacttgtgtggtactcataggactgtttgcaagtggagagtggagaactctgccaagtgagatgagaaactacaaactggggaaagtgtcatatatcttgactttggcctcagcagctattttctggcaagtatacactgttggttgtgtgggattaatcttcgagtcttcttctgtgttctccaattccataactgctgtgggactgcctatagttccagttgtagcagtgatagttttccatgataagatggatgcatcaaagattttctccatcattttagctatctggggcttcctttcatttgtctatcagcactacctcgacgaaaagaagttgaagacttgccagacaaaacctgttgaggaagaaacacaaactttatga

SEQ ID NO: 27721 - protein, 1128 aa, Arabidopsis thaliana
  misc_feature (1)..(1128): Ceres Seq. ID no. 1825821
MEITQVIYVNGKQDASRSVDYLILFANLLFLMFSDHNNIEANLTGQEEMNTTMEIESSSVPQSKNYKKWLRISIYVVYYENGGKSTWMGTLVQLIGFPVLFLFRFFSQTKNPKPTEADFRKFSSFTILGSVYIVTGLLVSANSYMSSVGLLYLPVSTFSLILASQLAFTAFFSYFLNSQKFTPFIVNSLFLLTISSALLVVNTDSENTAKVSRVKYVIGIICTIGASAGIGLLLSLVQLILRKVLKKQTFSTVTDLVAYQSLVASCVVLIGLFASGEWKTLTSEMENYKLGKVPYVMTLASIAISWQVYTIGVVGLIFESSSVFSNSITAVGLPIVPVVAVIVFHDKMNASKIFSIILAIWGFISFVYQHYLDEKKLKTSHTSPVGDPHLLPAEEGHTNIHSDQNLEANLIDHEVVTESSSSAVPQTENYKRWLRVSIYVIFVLFCQPLATILGRLYYENGGNSTYVVTLLQLIGFPVLVLFRFFSRIRQPKSTDTNFSQSPSFTTLASVYLCTGLLVSAYAYLSALAFTAFFSYFLNSQKFTPLIVSSLLLLTVSSALLVVNTDSENSTNVSRVQYVIGFICTIGASAGIGLLLSLIQMLFRKVFTKHTSSAVTDLAIYQSLVASCVVLIGLFASGEWETLPSEMRNYKLGKVSYVLTLASAAISWQVYTLGLVGLIFESSSVFSNSITAVGLPIVPVAAVIVFHDRMDASKIFSIILAICGFLSFVYQHYLDEKKLNTSHTSAVGDLHLPVEEGHTNIQSDQNLEANLLDHEETESFSVPQTKNCKRWLRVSIYAIFVIFCQPLATVLGRLYYENGGKSTYVVTLLQLIGFPVLILFRFFSRIRQPKSTDTNFSQSPSFTTLASVYLCTGLLVSAYAYLSAVGLLYLPVSTFSLILASQLAFTAFFSYFLNSQKFTPLIVNSLFLLTVSSALLVVNTDSENTTNVSRVQYVIGFICTIGASAGIGLVLSLIQLLFRKVFTKHTSSAVLDLANYQSLVATCVVLIGLFASGEWRTLPSEMRNYKLGKVSYILTLASAAIFWQVYTVGCVGLIFESSSVFSNSITAVGLPIVPVVAVIVFHDKMDASKIFSIILAIWGFLSFVYQHYLDEKKLKTCQTKPVEEETQTL

SEQ ID NO: 27722 - protein, 1097 aa, Arabidopsis thaliana
  misc_feature (1)..(1097): Ceres Seq. ID no. 1825822
MFSDHNNIEANLTGQEEMNTTMEIESSSVPQSKNYKKWLRISIYVVYYENGGKSTWMGTLVQLIGFPVLFLFRFFSQTKNPKPTEADFRKFSSFTILGSVYIVTGLLVSANSYMSSVGLLYLPVSTFSLILASQLAFTAFFSYFLNSQKFTPFIVNSLFLLTISSALLVVNTDSENTAKVSRVKYVIGIICTIGASAGIGLLLSLVQLILRKVLKKQTFSTVTDLVAYQSLVASCVVLIGLFASGEWKTLTSEMENYKLGKVPYVMTLASIAISWQVYTIGVVGLIFESSSVFSNSITAVGLPIVPVVAVIVFHDKMNASKIFSIILAIWGFISFVYQHYLDEKKLKTSHTSPVGDPHLLPAEEGHTNIHSDQNLEANLIDHEVVTESSSSAVPQTENYKRWLRVSIYVIFVLFCQPLATILGRLYYENGGNSTYVVTLLQLIGFPVLVLFRFFSRIRQPKSTDTNFSQSPSFTTLASVYLCTGLLVSAYAYLSALAFTAFFSYFLNSQKFTPLIVSSLLLLTVSSALLVVNTDSENSTNVSRVQYVIGFICTIGASAGIGLLLSLIQMLFRKVFTKHTSSAVTDLAIYQSLVASCVVLIGLFASGEWETLPSEMRNYKLGKVSYVLTLASAAISWQVYTLGLVGLIFESSSVFSNSITAVGLPIVPVAAVIVFHDRMDASKIFSIILAICGFLSFVYQHYLDEKKLNTSHTSAVGDLHLPVEEGHTNIQSDQNLEANLLDHEETESFSVPQTKNCKRWLRVSIYAIFVIFCQPLATVLGRLYYENGGKSTYVVTLLQLIGFPVLILFRFFSRIRQPKSTDTNFSQSPSFTTLASVYLCTGLLVSAYAYLSAVGLLYLPVSTFSLILASQLAFTAFFSYFLNSQKFTPLIVNSLFLLTVSSALLVVNTDSENTTNVSRVQYVIGFICTIGASAGIGLVLSLIQLLFRKVFTKHTSSAVLDLANYQSLVATCVVLIGLFASGEWRTLPSEMRNYKLGKVSYILTLASAAIFWQVYTVGCVGLIFESSSVFSNSITAVGLPIVPVVAVIVFHDKMDASKIFSIILAIWGFLSFVYQHYLDEKKLKTCQTKPVEEETQTL

SEQ ID NO: 27723 - protein, 1080 aa, Arabidopsis thaliana
  misc_feature (1)..(1080): Ceres Seq. ID no. 1825823
MNTTMEIESSSVPQSKNYKKWLRISIYVVYYENGGKSTWMGTLVQLIGFPVLFLFRFFSQTKNPKPTEADFRKFSSFTILGSVYIVTGLLVSANSYMSSVGLLYLPVSTFSLILASQLAFTAFFSYFLNSQKFTPFIVNSLFLLTISSALLVVNTDSENTAKVSRVKYVIGIICTIGASAGIGLLLSLVQLILRKVLKKQTFSTVTDLVAYQSLVASCVVLIGLFASGEWKTLTSEMENYKLGKVPYVMTLASIAISWQVYTIGVVGLIFESSSVFSNSITAVGLPIVPVVAVIVFHDKMNASKIFSIILAIWGFISFVYQHYLDEKKLKTSHTSPVGDPHLLPAEEGHTNIHSDQNLEANLIDHEVVTESSSSAVPQTENYKRWLRVSIYVIFVLFCQPLATILGRLYYENGGNSTYVVTLLQLIGFPVLVLFRFFSRIRQPKSTDTNFSQSPSFTTLASVYLCTGLLVSAYAYLSALAFTAFFSYFLNSQKFTPLIVSSLLLLTVSSALLVVNTDSENSTNVSRVQYVIGFICTIGASAGIGLLLSLIQMLFRKVFTKHTSSAVTDLAIYQSLVASCVVLIGLFASGEWETLPSEMRNYKLGKVSYVLTLASAAISWQVYTLGLVGLIFESSSVFSNSITAVGLPIVPVAAVIVFHDRMDASKIFSIILAICGFLSFVYQHYLDEKKLNTSHTSAVGDLHLPVEEGHTNIQSDQNLEANLLDHEETESFSVPQTKNCKRWLRVSIYAIFVIFCQPLATVLGRLYYENGGKSTYVVTLLQLIGFPVLILFRFFSRIRQPKSTDTNFSQSPSFTTLASVYLCTGLLVSAYAYLSAVGLLYLPVSTFSLILASQLAFTAFFSYFLNSQKFTPLIVNSLFLLTVSSALLVVNTDSENTTNVSRVQYVIGFICTIGASAGIGLVLSLIQLLFRKVFTKHTSSAVLDLANYQSLVATCVVLIGLFASGEWRTLPSEMRNYKLGKVSYILTLASAAIFWQVYTVGCVGLIFESSSVFSNSITAVGLPIVPVVAVIVFHDKMDASKIFSIILAIWGFLSFVYQHYLDEKKLKTCQTKPVEEETQTL

SEQ ID NO: 27724 - DNA, 558 bp, Arabidopsis thaliana
  misc_feature (1)..(558): Ceres Seq. ID no. 1826051
atgtttccactcaattttcattacgaagatgtatcacgtcaagatccgttgctcaaaccgaatcacgccaacgttatggaagttcctggatcgtgtgaaataagagtagtaccaaaggcaccctataatttcataataaaaaatggaaaattggctatggagattccgcgcggtcagaaattcatacagacacaaaggggttcgacaggaaagtcctttcgatctaatccattcttggggtcaaataaagacaaaggatatgtaagtgacctagcacgacaaagcactctccgagggcatggaatgtctaatttttcggtcagaatctcgacagtaatgtctctattagattttccggtcgaaatacggaaaaactccattcaattctcgatggaaacggagttttgcgaattctccccggaactggaagatcatttcgagatcttcgaacatattcgggggttcaatgtgactattatcacttcggccaacacacaagatgagactttaccactgtggagcggttttttgcaaaaagatgagggggaaactcagtaa

SEQ ID NO: 27725 - protein, 185 aa, Arabidopsis thaliana
  misc_feature (1)..(185): Ceres Seq. ID no. 1826052
MFPLNFHYEDVSRQDPLLKPNHANVMEVPGSCEIRVVPKAPYNFIIKNGKLAMEIPRGQKFIQTQRGSTGKSFRSNPFLGSNKDKGYVSDLARQSTLRGHGMSNFSVRISTVMSLLDFPVEIRKNSIQFSMETEFCEFSPELEDHFEIFEHIRGFNVTIITSANTQDETLPLWSGFLQKDEGETQ

SEQ ID NO: 27726 - protein, 160 aa, Arabidopsis thaliana
  misc_feature (1)..(160): Ceres Seq. ID no. 1826053
MEVPGSCEIRVVPKAPYNFIIKNGKLAMEIPRGQKFIQTQRGSTGKSFRSNPFLGSNKDKGYVSDLARQSTLRGHGMSNFSVRISTVMSLLDFPVEIRKNSIQFSMETEFCEFSPELEDHFEIFEHIRGFNVTIITSANTQDETLPLWSGFLQKDEGETQ

SEQ ID NO: 27727 - protein, 133 aa, Arabidopsis thaliana
  misc_feature (1)..(133): Ceres Seq. ID no. 1826054
MEIPRGQKFIQTQRGSTGKSFRSNPFLGSNKDKGYVSDLARQSTLRGHGMSNFSVRISTVMSLLDFPVEIRKNSIQFSMETEFCEFSPELEDHFEIFEHIRGFNVTIITSANTQDETLPLWSGFLQKDEGETQ

SEQ ID NO: 27728 - DNA, 2088 bp, Arabidopsis thaliana
  misc_feature (1)..(2088): Ceres Seq. ID no. 1826426
atgattttgaagtacaatagtagttacaggttttatctttcaagtagttttctccaagctatggaagtagattgtcggcgttattacgtacgtcttcttcaatcatgcagcagcagaaatcgcgaaactttatggagacaaaccaatggattgctcttgaagaagggttttcttagttcaattgtcattgttgctaaccatctcctccaaatgtactcccggtctggtaaaatgggaattgcgcggaacttgttcgacgaaatgcctgatagaaactatttctcgtggaacactatgattgaagggtacatgaattctggggaaaagggaacgtctttgaggttttttgatatgatgccagaaagagatgggtactcttggaacgtggttgtttccgggtttgctaaagctggtgagctaagtgtcgctaggaggttattcaatgccatgccggaaaaagatgttgtgacgttgaactctctgcttcatggatatattttaaacggttatgcagaggaagctctgaggttgtttaaagaattgaattttagcgctgatgcgatcacattgacgacagttcttaaagcttgtgctgagttagaagctttgaaatgtgggaagcagatacatgctcagattctgatcggtggtgttgaatgtgactcgaaaatgaatagttctttagttaatgtgtatgcaaagtgtggtgatttgagaatggcaagctatatgctggagcagattagggaacctgatgaccattctctatctgccttaatttcaggttatgcaaattgtgggagagtgaatgagtctagaggacttttcgataggaaaagtaacagatgtgtaattctatggaactctatgatttcaggctatattgctaacaatatgaaaatggaggcattggttcttttcaatgagatgaggaatgaaacccgggaagattctcgtacgctggcagcggttataaatgcttgcatcggtttgggcttcctagagactggtaaacaaatgcattgtcatgcttgtaaatttgggttaattgatgacattgttgtagctagcactttgcttgacatgtactccaagtgtggaagcccaatggaagcttgcaaacttttcagtgaggtcgaatcctatgacactatcttacttaacagtatgatcaaggtatatttcagctgcggaagaatcgatgatgcaaaacgggtatttgagagaattgaaaataagagcttgatttcttggaactcaatgactaacggattcagtcaaaatggttgtactgttgaaactttagagtatttccatcagatgcataagctggatttgcctacagatgaggttagcctctctagtgtcattagtgcgtgtgcaagtatatcttctctcgaactcggtgagcaagtttttgcgagggcaactattgttggtcttgactctgatcaagtagtatcatcttctctcattgatctctactgcaagtgtggattcgttgagcatggcaggagagtattcgatacaatggttaaatcagatgaagtaccatggaactcaatgatatcaggttatgctacgaatggtcaaggatttgaagcgattgacttgttcaagaaaatgagtgttgctggtataagacctactcagatcacttttatggttgttctaacagcatgcaattactgtggtttagtcgaagagggacgaaaattgtttgagtcaatgaaggttgatcatggttttgttccagataaagagcatttttcatgtatggttgatcttttggctcgtgctggttatgtggaagaagctataaatcttgtagaagagatgcctttcgatgtggatggaagcatgtggtcatctattctaagaggatgtgtagcaaatggatataaagccatgggaaagaaagctgctgagaagattatagagcttgaacctgagaactcagttgcttatgtgcagttgtccgctatattcgcaacctcgggagattgggaaagctcggcgcttgtaagaaaactgatgagggagaacaatgtgacaaagaatccaggttctagttggactgattgttga

SEQ ID NO: 27729 - protein, 695 aa, Arabidopsis thaliana
  misc_feature (1)..(695): Ceres Seq. ID no. 1826427
MILKYNSSYRFYLSSSFLQAMEVDCRRYYVRLLQSCSSRNRETLWRQTNGLLLKKGFLSSIVIVANHLLQMYSRSGKMGIARNLFDEMPDRNYFSWNTMIEGYMNSGEKGTSLRFFDMMPERDGYSWNVVVSGFAKAGELSVARRLFNAMPEKDVVTLNSLLHGYILNGYAEEALRLFKELNFSADAITLTTVLKACAELEALKCGKQIHAQILIGGVECDSKMNSSLVNVYAKCGDLRMASYMLEQIREPDDHSLSALISGYANCGRVNESRGLFDRKSNRCVILWNSMISGYIANNMKMEALVLFNEMRNETREDSRTLAAVINACIGLGFLETGKQMHCHACKFGLIDDIVVASTLLDMYSKCGSPMEACKLFSEVESYDTILLNSMIKVYFSCGRIDDAKRVFERIENKSLISWNSMTNGFSQNGCTVETLEYFHQMHKLDLPTDEVSLSSVISACASISSLELGEQVFARATIVGLDSDQVVSSSLIDLYCKCGFVEHGRRVFDTMVKSDEVPWNSMISGYATNGQGFEAIDLFKKMSVAGIRPTQITFMVVLTACNYCGLVEEGRKLFESMKVDHGFVPDKEHFSCMVDLLARAGYVEEAINLVEEMPFDVDGSMWSSILRGCVANGYKAMGKKAAEKIIELEPENSVAYVQLSAIFATSGDWESSALVRKLMRENNVTKNPGSSWTDC

SEQ ID NO: 27730 - protein, 675 aa, Arabidopsis thaliana
  misc_feature (1)..(675): Ceres Seq. ID no. 1826428
MEVDCRRYYVRLLQSCSSRNRETLWRQTNGLLLKKGFLSSIVIVANHLLQMYSRSGKMGIARNLFDEMPDRNYFSWNTMIEGYMNSGEKGTSLRFFDMMPERDGYSWNVVVSGFAKAGELSVARRLFNAMPEKDVVTLNSLLHGYILNGYAEEALRLFKELNFSADAITLTTVLKACAELEALKCGKQIHAQILIGGVECDSKMNSSLVNVYAKCGDLRMASYMLEQIREPDDHSLSALISGYANCGRVNESRGLFDRKSNRCVILWNSMISGYIANNMKMEALVLFNEMRNETREDSRTLAAVINACIGLGFLETGKQMHCHACKFGLIDDIVVASTLLDMYSKCGSPMEACKLFSEVESYDTILLNSMIKVYFSCGRIDDAKRVFERIENKSLISWNSMTNGFSQNGCTVETLEYFHQMHKLDLPTDEVSLSSVISACASISSLELGEQVFARATIVGLDSDQVVSSSLIDLYCKCGFVEHGRRVFDTMVKSDEVPWNSMISGYATNGQGFEAIDLFKKMSVAGIRPTQITFMVVLTACNYCGLVEEGRKLFESMKVDHGFVPDKEHFSCMVDLLARAGYVEEAINLVEEMPFDVDGSMWSSILRGCVANGYKAMGKKAAEKIIELEPENSVAYVQLSAIFATSGDWESSALVRKLMRENNVTKNPGSSWTDC

SEQ ID NO: 27731 - protein, 625 aa, Arabidopsis thaliana
  misc_feature (1)..(625): Ceres Seq. ID no. 1826429
MYSRSGKMGIARNLFDEMPDRNYFSWNTMIEGYMNSGEKGTSLRFFDMMPERDGYSWNVVVSGFAKAGELSVARRLFNAMPEKDVVTLNSLLHGYILNGYAEEALRLFKELNFSADAITLTTVLKACAELEALKCGKQIHAQILIGGVECDSKMNSSLVNVYAKCGDLRMASYMLEQIREPDDHSLSALISGYANCGRVNESRGLFDRKSNRCVILWNSMISGYIANNMKMEALVLFNEMRNETREDSRTLAAVINACIGLGFLETGKQMHCHACKFGLIDDIVVASTLLDMYSKCGSPMEACKLFSEVESYDTILLNSMIKVYFSCGRIDDAKRVFERIENKSLISWNSMTNGFSQNGCTVETLEYFHQMHKLDLPTDEVSLSSVISACASISSLELGEQVFARATIVGLDSDQVVSSSLIDLYCKCGFVEHGRRVFDTMVKSDEVPWNSMISGYATNGQGFEAIDLFKKMSVAGIRPTQITFMVVLTACNYCGLVEEGRKLFESMKVDHGFVPDKEHFSCMVDLLARAGYVEEAINLVEEMPFDVDGSMWSSILRGCVANGYKAMGKKAAEKIIELEPENSVAYVQLSAIFATSGDWESSALVRKLMRENNVTKNPGSSWTDC

SEQ ID NO: 27732 - DNA, 1257 bp, Arabidopsis thaliana
  misc_feature (1)..(1257): Ceres Seq. ID no. 1827226
atgcttgatcaaatatctggaaaccacacgcatgaaaaactctctgtggaaactgcagaacctcatcatctgaatgatagagtccacattgttgaggagatcccgaaagcttctgtgattccaatcactgaaatttgtgacgaggctgaagagaaatgcagtccaagcactatttctaggaagagagtcacttttgactccaaagtcaaaacctatgaacacgttgtttcagaagaatctgttgaactctcagaagagaagaacgaagaggttgaatccgaaaagaggtcattaaagtcaagcaagactgatgatcagatcattgaggttgcctccaactcctcagggtcgtatcctgaaaaccacagatacaagaattgcagagaaagtgatgatgacatagaggaggatgagtttgactgcagtgacagcgatctagatgaagatgaagaatattacagtgatgttggatttagtgaggatagcttgcataacccaaccaaggaagtttatactcaagatattggggataaaacagaggagattgattcaaagctgagaaggtctaacgagactgttagagatggaaaccactatgatggccaaggagtacttaaccctgttgagaatcttactcagtggaaatccgctaaatccaaagggagaacaaagcagaaacagtctcaaaaggagaactctaacttcatcgcagatcaagaagaaaaaagggattcctcttctttcggtacagaccctcagattgatgatataacactcagcgtcaaaccgaaatgcagaattgaacccaagaaactgcgaaaccaagaactggccgttgatgctagcctttcaacatggttatcaacatctgagtctggtagtgaatgcaacagcgcctctatgtataccttaacacccgagaaactcaagtctaccagctgctactcaaaaccgcttagaatcaatcatgacgatagacctgtattatgcgcattgacattggaggatatcaaacagttctcggctacatctacgccaaggaaatcaccgagcaaaagccctgatgagacacctattataggcacagttggtggttactggggtaatcgctcaaaggcaatagattgcggctctgcatcttcattcaagggaataccaaacaccagtagcaagtacagagaggataagagcgtaaattggcattcaacaccatttgaggcaagactggagaaagctttgaacaacatagacaaataa

SEQ ID NO: 27733 - protein, 418 aa, Arabidopsis thaliana
  misc_feature (1)..(418): Ceres Seq. ID no. 1827227
MLDQISGNHTHEKLSVETAEPHHLNDRVHIVEEIPKASVIPITEICDEAEEKCSPSTISRKRVTFDSKVKTYEHVVSEESVELSEEKNEEVESEKRSLKSSKTDDQIIEVASNSSGSYPENHRYKNCRESDDDIEEDEFDCSDSDLDEDEEYYSDVGFSEDSLHNPTKEVYTQDIGDKTEEIDSKLRRSNETVRDGNHYDGQGVLNPVENLTQWKSAKSKGRTKQKQSQKENSNFIADQEEKRDSSSFGTDPQIDDITLSVKPKCRIEPKKLRNQELAVDASLSTWLSTSESGSECNSASMYTLTPEKLKSTSCYSKPLRINHDDRPVLCALTLEDIKQFSATSTPRKSPSKSPDETPIIGTVGGYWGNRSKAIDCGSASSFKGIPNTSSKYREDKSVNWHSTPFEARLEKALNNIDK

SEQ ID NO: 27734 - DNA, 1449 bp, Arabidopsis thaliana
  misc_feature (1)..(1449): Ceres Seq. ID no. 1827359
atggctggacttaagatctggcaagccatctttatcaccattgcactgatcatcattgtcgtactctctgttctttcattttgtctcatttggaaaaagaaatcaagaagatccaaaaccttaagtcttcccatcatacaaacccctgtggtgtcaaaggagatcaaggaagtcaggatcgagcatgttgtctcaacgagtagtaacttcgatcctcaggatgaaaacaacaatgaatctgacaaattcttgcttaatttggaaatggagaagaacagagagaatggtttgagtagtagccggtctggttcaggcaaagaaggttatttatgtgttgcaaaccggtctacttcatcattgtatgagatggctacaccatcaccatcacctctttctggtttacctgagtcacaccttggatggggtcattggtttactctgagagatcttgagatagcaacaaacagattctcaaaggaaaatgtgattggtgaaggaggctatggagttgtttaccgaggcgagttggtcaatgggagtcttgttgccgtgaaaaagatcctaaaccacttgggacaagcagagaaagagtttagagtagaggtagatgctataggtcatgtgcgtcacaagaacttggtacgtcttctaggatactgcattgaaggcacaaacaggatattggtttatgagtatatgaacaatgggaaccttgaagaatggcttcacggagcaatgaaacatcatggatatctaacttgggaagctcgaatgaaagttctcactggaacatccaaggctcttgcatatctacacgaggcaatcgaaccaaaagtggtgcatagagacatcaagtcgagcaacatcttgatcgatgatagattcaatgcaaagatttctgattttggccttgccaagttacttggagatgggaaaagccatgtgactactagagtcatgggaacatttgggtatgttgctcctgagtatgcgaataccggacttttgaatgaaaagagtgatgtgtacagctttggtgtcttggtcttagaagcaataaccggaagagatcctgtggattacgcgcggcctgctaatgaggtgaatttggttgagtggttgaagatgatggtaggatctaagagattagaagaagtcattgatccaaacatagcagttaggccagcgactagagcactgaaacgagtacttcttacagcacttagatgcattgatcctgattctgaaaagagacctaaaatgagtcaagttgtgcgtatgctggagtctgaggaatatcctgtaccaagagagaaaagtatgcagaaactgtataaacataagcaagaattcaacttacaggagcggagagtgcgcagaacgcaagaggaaaactcggataccgatagaagcagaccggtttcaagatcacagagcaagagactgtaa

SEQ ID NO: 27735 - protein, 482 aa, Arabidopsis thaliana
  misc_feature (1)..(482): Ceres Seq. ID no. 1827360
MAGLKIWQAIFITIALIIIVVLSVLSFCLIWKKKSRRSKTLSLPIIQTPVVSKEIKEVRIEHVVSTSSNFDPQDENNNESDKFLLNLEMEKNRENGLSSSRSGSGKEGYLCVANRSTSSLYEMATPSPSPLSGLPESHLGWGHWFTLRDLEIATNRFSKENVIGEGGYGVVYRGELVNGSLVAVKKILNHLGQAEKEFRVEVDAIGHVRHKNLVRLLGYCIEGTNRILVYEYMNNGNLEEWLHGAMKHHGYLTWEARMKVLTGTSKALAYLHEAIEPKVVHRDIKSSNILIDDRFNAKISDFGLAKLLGDGKSHVTTRVMGTFGYVAPEYANTGLLNEKSDVYSFGVLVLEAITGRDPVDYARPANEVNLVEWLKMMVGSKRLEEVIDPNIAVRPATRALKRVLLTALRCIDPDSEKRPKMSQVVRMLESEEYPVPREKSMQKLYKHKQEFNLQERRVRRTQEENSDTDRSRPVSRSQSKRL

SEQ ID NO: 27736 - protein, 394 aa, Arabidopsis thaliana
  misc_feature (1)..(394): Ceres Seq. ID no. 1827361
MEKNRENGLSSSRSGSGKEGYLCVANRSTSSLYEMATPSPSPLSGLPESHLGWGHWFTLRDLEIATNRFSKENVIGEGGYGVVYRGELVNGSLVAVKKILNHLGQAEKEFRVEVDAIGHVRHKNLVRLLGYCIEGTNRILVYEYMNNGNLEEWLHGAMKHHGYLTWEARMKVLTGTSKALAYLHEAIEPKVVHRDIKSSNILIDDRFNAKISDFGLAKLLGDGKSHVTTRVMGTFGYVAPEYANTGLLNEKSDVYSFGVLVLEAITGRDPVDYARPANEVNLVEWLKMMVGSKRLEEVIDPNIAVRPATRALKRVLLTALRCIDPDSEKRPKMSQVVRMLESEEYPVPREKSMQKLYKHKQEFNLQERRVRRTQEENSDTDRSRPVSRSQSKRL

SEQ ID NO: 27737 - protein, 360 aa, Arabidopsis thaliana
  misc_feature (1)..(360): Ceres Seq. ID no. 1827362
MATPSPSPLSGLPESHLGWGHWFTLRDLEIATNRFSKENVIGEGGYGVVYRGELVNGSLVAVKKILNHLGQAEKEFRVEVDAIGHVRHKNLVRLLGYCIEGTNRILVYEYMNNGNLEEWLHGAMKHHGYLTWEARMKVLTGTSKALAYLHEAIEPKVVHRDIKSSNILIDDRFNAKISDFGLAKLLGDGKSHVTTRVMGTFGYVAPEYANTGLLNEKSDVYSFGVLVLEAITGRDPVDYARPANEVNLVEWLKMMVGSKRLEEVIDPNIAVRPATRALKRVLLTALRCIDPDSEKRPKMSQVVRMLESEEYPVPREKSMQKLYKHKQEFNLQERRVRRTQEENSDTDRSRPVSRSQSKRL

SEQ ID NO: 27738 - DNA, 2415 bp, Arabidopsis thaliana
  misc_feature (1)..(2415): Ceres Seq. ID no. 1827765
atggggaagaagaggattgtgttctttgcttgtttgctcttgtttaccgtcctattacgttttagctatgcagggataacgacagaaagtcctttgtcagtcgaacaaacactcagctcctctaatggaatttatgaattggggtttttcagtcctaataactcccaaaatctgtatgtgggaatctggttcaagggtatcattccccgggtggttgtgtgggtggcaaatagagaaacacctactacagacacatcggcaaatcttgctatcagcagcaatggtagtcttctattgtttaatggcaaacatggtgttgtgtggtccatcggagaaaattttgcatctaatgggtctcgtgcagagcttacagacaacggaaatctagttgtcatagacaatgcttcgggaagaactttatgggaaagctttgagcactttggtgacactatgctacctttctcaagcctgatgtataatctcgccacaggtgagaagcgggtgttgacttcttggaaaactgacactgatccatcgcctggcgtatttgtgggtcagattacaccacaagtgccatcacaggtgcttattatgagaggctcgacgcgttattatagaaccggtccatgggctaaaacaaggttcacagggataccactaatggatgacacatatgcaagtccattcagccttcagcaggatgctaacgggtcaggattctttacttattttgatagaagtttcaaactttcacgtataattatatcatcagaaggatcaatgaaaaggtttcggcataatggaacggactgggaattaagctacatggctccagccaattcatgcgatatttacggtgtatgtggaccatttgggttgtgtattgtgtcagtacctttaaagtgcaaatgcttgaaaggatttgttcctcattccactgaggaatggaaaagaggaaactggactggtggttgtgcgaggcttacggaactacattgtcaaggaaactctactggcaaagatgtaaatatcttccatcctgttaccaacgtaaagcttccagacttttacgaatatgaaagttctgtggatgctgaagaatgccaccaaagttgcctccacaattgttcttgcttggcctttgcttatatccatggaatagggtgcttaatctggaaccagaacctaatggacgctgtgcaattttctgctggaggagaaattctgtccattcgtcttgcacactctgaactaggtggaaataagcgcaacaaaatcattgttgctagtactgtgagcctttctctgtttgtgatattgacttctgctgcatttggtttctggagatacagagtgaaacataaagcctatacgttaaaggatgcctggaggaatgatctgaaatcaaaggaggtcccaggtttagaattttttgagatgaataccatacaaactgccaccaataatttcagtctatcaaacaaactcggacaaggtggatttggttctgtttacaagggaaagttacaagatgggaaagaaattgctgtaaaacagctttctagcagctccggacagggaaaagaggagttcatgaatgaaatagtactgatatcaaaactccaacacagaaacttagtccgggttttgggatgttgcatcgaaggagaagagaaactactgatctatgagtttatgttgaacaaaagccttgatacttttgtctttgatgcaagaaaaaagctcgaggttgattggccaaagagatttgatatcgttcaaggtattgcacgtggacttctttatcttcaccgtgactcacgcctcaaggtaattcaccgagacctgaaggtcagcaacattcttctggatgagaaaatgaacccgaaaatatcagattttggattggctcggatgtatgagggaacccaatgtcaggacaaaactcgcagggttgtaggaactctaggatatatgtctcctgagtatgcatggaccggagtattctctgagaaatcagacatttacagcttcggagttctactgctagaaattatcatcggagagaagatctcaaggttcagctatggcgaagaaggaaaaacacttctcgcatatgcatgggaatcttggggtgaaaccaaaggaattgatcttttggaccaagatcttgctgattcatgtcgtccgttagaagttggaaggtgtgttcagattggtctgctctgtgtacaacaccaacctgcagacagaccaaacacacttgagttgctggctatgctcacgacaacatcagatcttccatcaccaaaacaacccacatttgtagtgcactctagggatgatgaatcatctctgtctaaggatttgtttaccgtcaatgagatgacacaatctatgatccttgggcgttaa

SEQ ID NO: 27739 - protein, 804 aa, Arabidopsis thaliana
  misc_feature (1)..(804): Ceres Seq. ID no. 1827766
MGKKRIVFFACLLLFTVLLRFSYAGITTESPLSVEQTLSSSNGIYELGFFSPNNSQNLYVGIWFKGIIPRVVVWVANRETPTTDTSANLAISSNGSLLLFNGKHGVVWSIGENFASNGSRAELTDNGNLVVIDNASGRTLWESFEHFGDTMLPFSSLMYNLATGEKRVLTSWKTDTDPSPGVFVGQITPQVPSQVLIMRGSTRYYRTGPWAKTRFTGIPLMDDTYASPFSLQQDANGSGFFTYFDRSFKLSRIIISSEGSMKRFRHNGTDWELSYMAPANSCDIYGVCGPFGLCIVSVPLKCKCLKGFVPHSTEEWKRGNWTGGCARLTELHCQGNSTGKDVNIFHPVTNVKLPDFYEYESSVDAEECHQSCLHNCSCLAFAYIHGIGCLIWNQNLMDAVQFSAGGEILSIRLAHSELGGNKRNKIIVASTVSLSLFVILTSAAFGFWRYRVKHKAYTLKDAWRNDLKSKEVPGLEFFEMNTIQTATNNFSLSNKLGQGGFGSVYKGKLQDGKEIAVKQLSSSSGQGKEEFMNEIVLISKLQHRNLVRVLGCCIEGEEKLLIYEFMLNKSLDTFVFDARKKLEVDWPKRFDIVQGIARGLLYLHRDSRLKVIHRDLKVSNILLDEKMNPKISDFGLARMYEGTQCQDKTRRVVGTLGYMSPEYAWTGVFSEKSDIYSFGVLLLEIIIGEKISRFSYGEEGKTLLAYAWESWGETKGIDLLDQDLADSCRPLEVGRCVQIGLLCVQHQPADRPNTLELLAMLTTTSDLPSPKQPTFVVHSRDDESSLSKDLFTVNEMTQSMILGR

SEQ ID NO: 27740 - protein, 654 aa, Arabidopsis thaliana
  misc_feature (1)..(654): Ceres Seq. ID no. 1827767
MLPFSSLMYNLATGEKRVLTSWKTDTDPSPGVFVGQITPQVPSQVLIMRGSTRYYRTGPWAKTRFTGIPLMDDTYASPFSLQQDANGSGFFTYFDRSFKLSRIIISSEGSMKRFRHNGTDWELSYMAPANSCDIYGVCGPFGLCIVSVPLKCKCLKGFVPHSTEEWKRGNWTGGCARLTELHCQGNSTGKDVNIFHPVTNVKLPDFYEYESSVDAEECHQSCLHNCSCLAFAYIHGIGCLIWNQNLMDAVQFSAGGEILSIRLAHSELGGNKRNKIIVASTVSLSLFVILTSAAFGFWRYRVKHKAYTLKDAWRNDLKSKEVPGLEFFEMNTIQTATNNFSLSNKLGQGGFGSVYKGKLQDGKEIAVKQLSSSSGQGKEEFMNEIVLISKLQHRNLVRVLGCCIEGEEKLLIYEFMLNKSLDTFVFDARKKLEVDWPKRFDIVQGIARGLLYLHRDSRLKVIHRDLKVSNILLDEKMNPKISDFGLARMYEGTQCQDKTRRVVGTLGYMSPEYAWTGVFSEKSDIYSFGVLLLEIIIGEKISRFSYGEEGKTLLAYAWESWGETKGIDLLDQDLADSCRPLEVGRCVQIGLLCVQHQPADRPNTLELLAMLTTTSDLPSPKQPTFVVHSRDDESSLSKDLFTVNEMTQSMILGR

SEQ ID NO: 27741 - protein, 647 aa, Arabidopsis thaliana
  misc_feature (1)..(647): Ceres Seq. ID no. 1827768
MYNLATGEKRVLTSWKTDTDPSPGVFVGQITPQVPSQVLIMRGSTRYYRTGPWAKTRFTGIPLMDDTYASPFSLQQDANGSGFFTYFDRSFKLSRIIISSEGSMKRFRHNGTDWELSYMAPANSCDIYGVCGPFGLCIVSVPLKCKCLKGFVPHSTEEWKRGNWTGGCARLTELHCQGNSTGKDVNIFHPVTNVKLPDFYEYESSVDAEECHQSCLHNCSCLAFAYIHGIGCLIWNQNLMDAVQFSAGGEILSIRLAHSELGGNKRNKIIVASTVSLSLFVILTSAAFGFWRYRVKHKAYTLKDAWRNDLKSKEVPGLEFFEMNTIQTATNNFSLSNKLGQGGFGSVYKGKLQDGKEIAVKQLSSSSGQGKEEFMNEIVLISKLQHRNLVRVLGCCIEGEEKLLIYEFMLNKSLDTFVFDARKKLEVDWPKRFDIVQGIARGLLYLHRDSRLKVIHRDLKVSNILLDEKMNPKISDFGLARMYEGTQCQDKTRRVVGTLGYMSPEYAWTGVFSEKSDIYSFGVLLLEIIIGEKISRFSYGEEGKTLLAYAWESWGETKGIDLLDQDLADSCRPLEVGRCVQIGLLCVQHQPADRPNTLELLAMLTTTSDLPSPKQPTFVVHSRDDESSLSKDLFTVNEMTQSMILGR

SEQ ID NO: 27742 - DNA, 2346 bp, Arabidopsis thaliana
  misc_feature (1)..(2346): Ceres Seq. ID no. 1827781
atgactgatgaggtagacggtgacgcatggctttcggatttagttgacgtgtcgtttctcgctactaaaacggcagaacaatcagagatgatagaaaccggcggagataaacagagctccgtcgaggaaggatgtggtggccgtacgattcttgtcggcgtgaagcttgacgctccgagcagagagttactcacttgggctctggttaaagtcgctgagcctggtgatactgtgatcgctcttcatatccttggaaatgagattgtggatcgcgcagggaactcttcgcttctctctctggttagaactttcgactctgttcttgacgtttatgaaggtttctgcaatttgaaacaggtggatctgaagctgaagctatgtcgtggttcctctgctcgaaagattttagttagggaagcgaaatcgttttctgcaacgaaagttttagttgggatttcaaaaagtcaccacgcgattcgttcatcagcttctgtagctaagtacatagcgaagaaactatcaaaggattgttgggttattgctgtaaacaatggtaaaatcttgttccaaaaggaaggttctccatcatctaccattaatcaatctcaaggaaaggaagatgttcggaggattactttgttgaatgtgcttcagagatctgttacattgaataagactactaaagtagttagccattctgaggaagattctaactctaaggaggaggaggaggatcaagcctgtggccagaatctacggcaagtcttagcggctgctcgtttggagaattgctcggtttgtggttttgattctttgtctccgaacgatacaactactcctggaaagttgtctggagcttcagattttgataggagtgaagatgatgatgagtgcaacaaagcaatggagattgtgcctgtgaatggttcagaagattcaggcggttctgtaactatgttggttaggaaattgcctgaacctagaccaggttggcctttgcttcgtcgtgctgtttctacattaggacaatctgttactcctcataagataccggtagttcaatgggctttgaagcttcctcctagggatactaagcaacttggttatgattcttctgaagataatttgtcaaccttaaacgcacttaggttctcttcaacttgccggtttttcaagtacaaggaactcgtttcagtgacatcgaatttctccgctgataattttattgggaaaggaggcagcagccgggtttttagaggttgtttgtccaatggaagagtggttgctgtgaagattctcaagcaaaccgaagatgtcttgaatgacttcgtggctgagattgagatcatcacaacattacaccataagaatattatctccctcttaggattttgctttgaagaccataaccttttacttgtatacaattatctctcaagaggaagccttgaagagaaccttcatggaaacaagaaagatccgcttgcattttgttggagcgagaggtataaagtggctgtgggagtagcagaggcattggactatctgcataatactgcttcgcaacccgtcatccacagagatgttaagtcatcaaacatactattatctgatgattttgagccacagctttctgattttggacttgcaaggtgggcgtctatatctacgacacacataatctgctctgatgtcgcgggaacttttggatacttggctccagagtacttcatgtatggtaaggtgaatgataagatagatgtgtatgcattcggcgttgttctcctcgagttactttcgggaagaaaaccgattagcagcggatgtccaaagggacaagagagtctagtcatgtgggtatgtacaactgcaaaccaattaagtcaaaaccaagctttttctatactcttattgaaaacaagtatgtatgatgttcatatacaggccaaaccaattctagatgatggaaagtattctcagttattagacccgagtttgcgggataacaacaacaataatgatgaccaaatgcagaggatggcgttagctgctactctttgtattcgacgtagtcctcaagctagaccgaaaatgagcatcgtattaaagctacttaaaggtgatgaagacacgcttgagtgggcaatgcagcaagtgaatagttcatcagaggagtcagagatgctcaaagatgagcaatgccaaagatctaacttgcaatcacaccttaacttagcacttcttgatgttgaagatgactcaatctccatgggaagcattgagcaaggtgtctctgttgaggattatctaaaaggtaggacaagccgttcttcgagcttcgactaa

SEQ ID NO: 27743 - protein, 781 aa, Arabidopsis thaliana
  misc_feature (1)..(781): Ceres Seq. ID no. 1827782
MTDEVDGDAWLSDLVDVSFLATKTAEQSEMIETGGDKQSSVEEGCGGRTILVGVKLDAPSRELLTWALVKVAEPGDTVIALHILGNEIVDRAGNSSLLSLVRTFDSVLDVYEGFCNLKQVDLKLKLCRGSSARKILVREAKSFSATKVLVGISKSHHAIRSSASVAKYIAKKLSKDCWVIAVNNGKILFQKEGSPSSTINQSQGKEDVRRITLLNVLQRSVTLNKTTKVVSHSEEDSNSKEEEEDQACGQNLRQVLAAARLENCSVCGFDSLSPNDTTTPGKLSGASDFDRSEDDDECNKAMEIVPVNGSEDSGGSVTMLVRKLPEPRPGWPLLRRAVSTLGQSVTPHKIPVVQWALKLPPRDTKQLGYDSSEDNLSTLNALRFSSTCRFFKYKELVSVTSNFSADNFIGKGGSSRVFRGCLSNGRVVAVKILKQTEDVLNDFVAEIEIITTLHHKNIISLLGFCFEDHNLLLVYNYLSRGSLEENLHGNKKDPLAFCWSERYKVAVGVAEALDYLHNTASQPVIHRDVKSSNILLSDDFEPQLSDFGLARWASISTTHIICSDVAGTFGYLAPEYFMYGKVNDKIDVYAFGVVLLELLSGRKPISSGCPKGQESLVMWVCTTANQLSQNQAFSILLLKTSMYDVHIQAKPILDDGKYSQLLDPSLRDNNNNNDDQMQRMALAATLCIRRSPQARPKMSIVLKLLKGDEDTLEWAMQQVNSSSEESEMLKDEQCQRSNLQSHLNLALLDVEDDSISMGSIEQGVSVEDYLKGRTSRSSSFD

SEQ ID NO: 27744 - protein, 752 aa, Arabidopsis thaliana
  misc_feature (1)..(752): Ceres Seq. ID no. 1827783
MIETGGDKQSSVEEGCGGRTILVGVKLDAPSRELLTWALVKVAEPGDTVIALHILGNEIVDRAGNSSLLSLVRTFDSVLDVYEGFCNLKQVDLKLKLCRGSSARKILVREAKSFSATKVLVGISKSHHAIRSSASVAKYIAKKLSKDCWVIAVNNGKILFQKEGSPSSTINQSQGKEDVRRITLLNVLQRSVTLNKTTKVVSHSEEDSNSKEEEEDQACGQNLRQVLAAARLENCSVCGFDSLSPNDTTTPGKLSGASDFDRSEDDDECNKAMEIVPVNGSEDSGGSVTMLVRKLPEPRPGWPLLRRAVSTLGQSVTPHKIPVVQWALKLPPRDTKQLGYDSSEDNLSTLNALRFSSTCRFFKYKELVSVTSNFSADNFIGKGGSSRVFRGCLSNGRVVAVKILKQTEDVLNDFVAEIEIITTLHHKNIISLLGFCFEDHNLLLVYNYLSRGSLEENLHGNKKDPLAFCWSERYKVAVGVAEALDYLHNTASQPVIHRDVKSSNILLSDDFEPQLSDFGLARWASISTTHIICSDVAGTFGYLAPEYFMYGKVNDKIDVYAFGVVLLELLSGRKPISSGCPKGQESLVMWVCTTANQLSQNQAFSILLLKTSMYDVHIQAKPILDDGKYSQLLDPSLRDNNNNNDDQMQRMALAATLCIRRSPQARPKMSIVLKLLKGDEDTLEWAMQQVNSSSEESEMLKDEQCQRSNLQSHLNLALLDVEDDSISMGSIEQGVSVEDYLKGRTSRSSSFD

SEQ ID NO: 27745 - protein, 480 aa, Arabidopsis thaliana
  misc_feature (1)..(480): Ceres Seq. ID no. 1827784
MEIVPVNGSEDSGGSVTMLVRKLPEPRPGWPLLRRAVSTLGQSVTPHKIPVVQWALKLPPRDTKQLGYDSSEDNLSTLNALRFSSTCRFFKYKELVSVTSNFSADNFIGKGGSSRVFRGCLSNGRVVAVKILKQTEDVLNDFVAEIEIITTLHHKNIISLLGFCFEDHNLLLVYNYLSRGSLEENLHGNKKDPLAFCWSERYKVAVGVAEALDYLHNTASQPVIHRDVKSSNILLSDDFEPQLSDFGLARWASISTTHIICSDVAGTFGYLAPEYFMYGKVNDKIDVYAFGVVLLELLSGRKPISSGCPKGQESLVMWVCTTANQLSQNQAFSILLLKTSMYDVHIQAKPILDDGKYSQLLDPSLRDNNNNNDDQMQRMALAATLCIRRSPQARPKMSIVLKLLKGDEDTLEWAMQQVNSSSEESEMLKDEQCQRSNLQSHLNLALLDVEDDSISMGSIEQGVSVEDYLKGRTSRSSSFD

SEQ ID NO: 27746 - DNA, 2265 bp, Arabidopsis thaliana
  misc_feature (1)..(2265): Ceres Seq. ID no. 1828083
atggctgctaagagatctatctactgtcttcttcttcttcctctgctcttgtctttactgatctggattccttcgatctccttagctgctactaaccctgatgatgttgctgcaattaacggattattcgctgcacttggagcacctgttcttcctggttggattgcttctggtggagacccatgtggtgaagcttggcaaggcattatctgcaatgtttcagatattataagcataactgtaaatgctgcaaatttgcaaggagagcttggtgacaacttagctaagttcacttctatcaggggaatagatttcagcaacaatcgcattggaggaagcataccttctactttgccggttacattgcagcatttttttctttcagctaatcagttcaccggaagcatcccggaatctctaggaacattgagttttctgaatgacatgtctttgaacgataaccttctctctggagagctacccgacgtgtttcaaaaccttgtcgggctgattaatcttgatatatcatctaacaatataagcggcacattgcctccttctatggagaatttattaactcttacaacattaaacatagagaataacctcttctctggacccataccggacaaattactaagcattccgaaattcctacatgaaggaaacccgttcaatgccacaatgatcaattccacctcgactgcaccatcattgtctccgtctctatctccaacaaaaccagctccaacgcgaccattttctggagttccacctcctccaaatgagaggaatcgagggaaagttgctgatggaccttctgattcagaaggatcgagctctgagaattcaaagggaaagaactcttcacatactaaaaagataatccttattgcattcgctggcgtcctcgtcttcataattctggttttggcaatactcttgctgttgccaaaatgtgcaagacgtagagaacatgctaacagagttttcaaaccgcatcaagttggtgctgatagaggaagcagagagaatgctctggaaaacgggactccggtactgccaccacctggtcgatctgaaaaagttcaaagagaacccttcaagaaagctggagaggaaccaaaggtcttacatgaccttgagaggctgcggagacctgcacctatatcaagacaggaaagtcaagatattgacttttcaatgttgatgcctcctcctccaccacctccaccaccaccaccacctcctcctttggatgagaaggtcacggttatgccaatcatatcacccgaaagacccgttaagaaaacttcccctaaacgcttacccttaacttctgtgaagcactattctattgcttctcttcaacaatacacggaaagcttcgctcaggaaaatctcattggctcaggcatgctcggtagtgtttatagggcccggcttcccaatggaaagttgtttgctgtcaagaagttggacaagagggcttctgaacaacaacaggatcacgaatttatcgaactagtgaacaatatagatatgattcgccactccaatatcgttgaacttgtgggttactgtgctgagcacgatcaaagactattggtctacgaatattgcagtaacggtacgttacaagacgggttgcattcagacgatgaattcaagaagaaactttcgtggaatacccgtgtcagtatggcacttggagctgctagagcccttgagtacttgcatgaggtgtgtgaaccacctatcatacacagaaacttcaaatcagccaatgttctactcgacgatgacctgagtgttcttgtctcagattgtggtttggccccactaatatcatcaggctctgtgagtcagttatcagggcaattgctagccgcttacggatatggagctccagagttcgactctggaatctatacatggcagagtgatgtatatagttttggtgttgttatgttagaactattgacgggtagaatgtcctacgatagggaccggagtagaggagagcagttcttggtgaggtgggcaatcccacagcttcatgatatcgatgcattgggcaaaatggttgatccatctcttaatggacaataccctgcaaagtcattgtcacactttgctgatataatatcccggtgtgttcagtctgaaccagaatttagaccactgatgtcagaagttgttcaagatctactagatatgatcagaagagagcgtcatggttcgggtgattctaccgcggactag

SEQ ID NO: 27747 - protein, 754 aa, Arabidopsis thaliana
  misc_feature (1)..(754): Ceres Seq. ID no. 1828084
MAAKRSIYCLLLLPLLLSLLIWIPSISLAATNPDDVAAINGLFAALGAPVLPGWIASGGDPCGEAWQGIICNVSDIISITVNAANLQGELGDNLAKFTSIRGIDFSNNRIGGSIPSTLPVTLQHFFLSANQFTGSIPESLGTLSFLNDMSLNDNLLSGELPDVFQNLVGLINLDISSNNISGTLPPSMENLLTLTTLNIENNLFSGPIPDKLLSIPKFLHEGNPFNATMINSTSTAPSLSPSLSPTKPAPTRPFSGVPPPPNERNRGKVADGPSDSEGSSSENSKGKNSSHTKKIILIAFAGVLVFIILVLAILLLLPKCARRREHANRVFKPHQVGADRGSRENALENGTPVLPPPGRSEKVQREPFKKAGEEPKVLHDLERLRRPAPISRQESQDIDFSMLMPPPPPPPPPPPPPPLDEKVTVMPIISPERPVKKTSPKRLPLTSVKHYSIASLQQYTESFAQENLIGSGMLGSVYRARLPNGKLFAVKKLDKRASEQQQDHEFIELVNNIDMIRHSNIVELVGYCAEHDQRLLVYEYCSNGTLQDGLHSDDEFKKKLSWNTRVSMALGAARALEYLHEVCEPPIIHRNFKSANVLLDDDLSVLVSDCGLAPLISSGSVSQLSGQLLAAYGYGAPEFDSGIYTWQSDVYSFGVVMLELLTGRMSYDRDRSRGEQFLVRWAIPQLHDIDALGKMVDPSLNGQYPAKSLSHFADIISRCVQSEPEFRPLMSEVVQDLLDMIRRERHGSGDSTAD

SEQ ID NO: 27748 - protein, 606 aa, Arabidopsis thaliana
  misc_feature (1)..(606): Ceres Seq. ID no. 1828085
MSLNDNLLSGELPDVFQNLVGLINLDISSNNISGTLPPSMENLLTLTTLNIENNLFSGPIPDKLLSIPKFLHEGNPFNATMINSTSTAPSLSPSLSPTKPAPTRPFSGVPPPPNERNRGKVADGPSDSEGSSSENSKGKNSSHTKKIILIAFAGVLVFIILVLAILLLLPKCARRREHANRVFKPHQVGADRGSRENALENGTPVLPPPGRSEKVQREPFKKAGEEPKVLHDLERLRRPAPISRQESQDIDFSMLMPPPPPPPPPPPPPPLDEKVTVMPIISPERPVKKTSPKRLPLTSVKHYSIASLQQYTESFAQENLIGSGMLGSVYRARLPNGKLFAVKKLDKRASEQQQDHEFIELVNNIDMIRHSNIVELVGYCAEHDQRLLVYEYCSNGTLQDGLHSDDEFKKKLSWNTRVSMALGAARALEYLHEVCEPPIIHRNFKSANVLLDDDLSVLVSDCGLAPLISSGSVSQLSGQLLAAYGYGAPEFDSGIYTWQSDVYSFGVVMLELLTGRMSYDRDRSRGEQFLVRWAIPQLHDIDALGKMVDPSLNGQYPAKSLSHFADIISRCVQSEPEFRPLMSEVVQDLLDMIRRERHGSGDSTAD

SEQ ID NO: 27749 - protein, 567 aa, Arabidopsis thaliana
  misc_feature (1)..(567): Ceres Seq. ID no. 1828086
MENLLTLTTLNIENNLFSGPIPDKLLSIPKFLHEGNPFNATMINSTSTAPSLSPSLSPTKPAPTRPFSGVPPPPNERNRGKVADGPSDSEGSSSENSKGKNSSHTKKIILIAFAGVLVFIILVLAILLLLPKCARRREHANRVFKPHQVGADRGSRENALENGTPVLPPPGRSEKVQREPFKKAGEEPKVLHDLERLRRPAPISRQESQDIDFSMLMPPPPPPPPPPPPPPLDEKVTVMPIISPERPVKKTSPKRLPLTSVKHYSIASLQQYTESFAQENLIGSGMLGSVYRARLPNGKLFAVKKLDKRASEQQQDHEFIELVNNIDMIRHSNIVELVGYCAEHDQRLLVYEYCSNGTLQDGLHSDDEFKKKLSWNTRVSMALGAARALEYLHEVCEPPIIHRNFKSANVLLDDDLSVLVSDCGLAPLISSGSVSQLSGQLLAAYGYGAPEFDSGIYTWQSDVYSFGVVMLELLTGRMSYDRDRSRGEQFLVRWAIPQLHDIDALGKMVDPSLNGQYPAKSLSHFADIISRCVQSEPEFRPLMSEVVQDLLDMIRRERHGSGDSTAD

SEQ ID NO: 27750 - DNA, 2559 bp, Arabidopsis thaliana
  misc_feature (1)..(2559): Ceres Seq. ID no. 1828125
atgattctttctgtcttcttctatatgtttttgctgcatattcgtcgattagattgttttgttgcagttcaagactccaaaacattgttcaaaggttcaacattgatcaatgacagccatggagagactcttgtttcagctggtcagagatttgagcttggcttcttcactcctaatggaagctccgacgaaagaaggtacttagggatttggttttacaatttacatccactgactgttgtctgggttgcaaatcgtgaatctccggttcttgaccgttcctgcattttcaccatctctaaagatgggaatcttgaagttattgattcaaagggaagagtgtattgggacaccggtgttaaaccttcctcagtatctgcggagagaatggtaaagctgatggataatggtaatcttgtgttgattagtgatggaaatgaagcaaatgtggtttggcagagttttcagaatcctactgatacatttctcccagggatgaggatggatgagaatatgactttatcatcatggagaagcttcaacgatccatcacatggaaatttcacctttcagatggatcaagaagaagacaaacagttcatcatttggaaaagatcaatgagatactggaaatccggaatttcgggtaaattcataggatccgacgagatgccttatgcgatttcttactttctttccaatttcacagagactgttactgttcacaatgcctctgtgcctcctctcttcacatctttgtataccaatacaaggttcaccatgagctcctctggtcaagctcagtacttcaggttagatggagaaagattctgggcacagatttgggctgaacctagagatgaatgtagtgtatacaatgcttgtggaaattttggtagctgcaacagcaagaatgaggaaatgtgtaagtgtttgccaggttttaggcctaatttcctggagaaatgggtcaagggagatttttctggtggatgttccagggagtcaaggatctgtggtaaagacggtgttgtggtgggagacatgttcttgaatctgagtgtggttgaagtaggaagtccggattcacagtttgatgcacataatgaaaaagaatgcagagcagagtgcttgaataattgccaatgccaagcttactcatatgaagaagttgatatacttcaaagcaataccaagtgctggatttggttggaggatctcaataatctcaaggaaggctatttaggtagccgcaacgttttcattcgcgtagcagttccagatataggttctcatgtagaacgaggtcgaggaagatacggggaagctaaaaccccggtggttttgatcattgtggtgacgtttacaagtgcagctattctggtcgttctgtcaagcactgcttcctatgtatttttgcaaagaagaaaagtaaacaaggaactaggaagtataccaagaggagttcatttatgtgacagtgagagacatatcaaagaattgattgaatcgggaaggtttaaacaagatgatagtcagggcatagatgttccatcttttgagctcgagaccatcctatatgcaacatccaacttctcaaatgcaaacaagctaggccaaggagggtttggaccggtttataagggaatgtttcctggagatcaagagattgctgtgaagaggctatctcgctgctcgggtcaaggactggaggaattcaagaatgaagttgttttgattgccaagctccaacaccggaatcttgttcgacttcttggctattgtgttgctggagaagagaaactgttattgtatgaatacatgccacacaaaagcttagacttcttcatcttcgaccggaagctttgccagcgattagattggaagatgcgttgtaatatcattctaggaatcgctcgtggacttctctatctgcatcaagactctagactgagaatcatccacagagatctaaaaacaagcaacattctgttagatgaagagatgaatcccaagatctctgactttggcttggctagaatatttggaggcagtgaaacatcagccaatactaatagagttgttggaacctatggatacatgtctccagagtatgctttagaaggtcttttctcattcaaatcagatgtctttagtttcggcgtggttgtgattgaaactatcagcgggaagcgtaacaccgggtttcatgaacctgagaaatctttaagccttctaggccatgcgtgggatctctggaaagcggaaagggggattgagttattggatcaggctttacaagaatcatgcgaaaccgagggattcttgaagtgcttgaacgtaggacttctctgtgtacaagaagatcctaatgatcgtcctacaatgtcaaatgttgttttcatgctcggaagcagcgaagctgctactcttcctactccaaaacaaccggcttttgttcttagacgttgcccttcatcaagcaaagcttcctcatccaccaagccagaaacttgctctgaaaatgagcttaccataactcttgaagatggaagataa

SEQ ID NO: 27751 - protein, 852 aa, Arabidopsis thaliana
  misc_feature (1)..(852): Ceres Seq. ID no. 1828126
MILSVFFYMFLLHIRRLDCFVAVQDSKTLFKGSTLINDSHGETLVSAGQRFELGFFTPNGSSDERRYLGIWFYNLHPLTVVWVANRESPVLDRSCIFTISKDGNLEVIDSKGRVYWDTGVKPSSVSAERMVKLMDNGNLVLISDGNEANVVWQSFQNPTDTFLPGMRMDENMTLSSWRSFNDPSHGNFTFQMDQEEDKQFIIWKRSMRYWKSGISGKFIGSDEMPYAISYFLSNFTETVTVHNASVPPLFTSLYTNTRFTMSSSGQAQYFRLDGERFWAQIWAEPRDECSVYNACGNFGSCNSKNEEMCKCLPGFRPNFLEKWVKGDFSGGCSRESRICGKDGVVVGDMFLNLSVVEVGSPDSQFDAHNEKECRAECLNNCQCQAYSYEEVDILQSNTKCWIWLEDLNNLKEGYLGSRNVFIRVAVPDIGSHVERGRGRYGEAKTPVVLIIVVTFTSAAILVVLSSTASYVFLQRRKVNKELGSIPRGVHLCDSERHIKELIESGRFKQDDSQGIDVPSFELETILYATSNFSNANKLGQGGFGPVYKGMFPGDQEIAVKRLSRCSGQGLEEFKNEVVLIAKLQHRNLVRLLGYCVAGEEKLLLYEYMPHKSLDFFIFDRKLCQRLDWKMRCNIILGIARGLLYLHQDSRLRIIHRDLKTSNILLDEEMNPKISDFGLARIFGGSETSANTNRVVGTYGYMSPEYALEGLFSFKSDVFSFGVVVIETISGKRNTGFHEPEKSLSLLGHAWDLWKAERGIELLDQALQESCETEGFLKCLNVGLLCVQEDPNDRPTMSNVVFMLGSSEAATLPTPKQPAFVLRRCPSSSKASSSTKPETCSENELTITLEDGR

SEQ ID NO: 27752 - protein, 844 aa, Arabidopsis thaliana
  misc_feature (1)..(844): Ceres Seq. ID no. 1828127
MFLLHIRRLDCFVAVQDSKTLFKGSTLINDSHGETLVSAGQRFELGFFTPNGSSDERRYLGIWFYNLHPLTVVWVANRESPVLDRSCIFTISKDGNLEVIDSKGRVYWDTGVKPSSVSAERMVKLMDNGNLVLISDGNEANVVWQSFQNPTDTFLPGMRMDENMTLSSWRSFNDPSHGNFTFQMDQEEDKQFIIWKRSMRYWKSGISGKFIGSDEMPYAISYFLSNFTETVTVHNASVPPLFTSLYTNTRFTMSSSGQAQYFRLDGERFWAQIWAEPRDECSVYNACGNFGSCNSKNEEMCKCLPGFRPNFLEKWVKGDFSGGCSRESRICGKDGVVVGDMFLNLSVVEVGSPDSQFDAHNEKECRAECLNNCQCQAYSYEEVDILQSNTKCWIWLEDLNNLKEGYLGSRNVFIRVAVPDIGSHVERGRGRYGEAKTPVVLIIVVTFTSAAILVVLSSTASYVFLQRRKVNKELGSIPRGVHLCDSERHIKELIESGRFKQDDSQGIDVPSFELETILYATSNFSNANKLGQGGFGPVYKGMFPGDQEIAVKRLSRCSGQGLEEFKNEVVLIAKLQHRNLVRLLGYCVAGEEKLLLYEYMPHKSLDFFIFDRKLCQRLDWKMRCNIILGIARGLLYLHQDSRLRIIHRDLKTSNILLDEEMNPKISDFGLARIFGGSETSANTNRVVGTYGYMSPEYALEGLFSFKSDVFSFGVVVIETISGKRNTGFHEPEKSLSLLGHAWDLWKAERGIELLDQALQESCETEGFLKCLNVGLLCVQEDPNDRPTMSNVVFMLGSSEAATLPTPKQPAFVLRRCPSSSKASSSTKPETCSENELTITLEDGR

SEQ ID NO: 27753 - protein, 723 aa, Arabidopsis thaliana
  misc_feature (1)..(723): Ceres Seq. ID no. 1828128
MVKLMDNGNLVLISDGNEANVVWQSFQNPTDTFLPGMRMDENMTLSSWRSFNDPSHGNFTFQMDQEEDKQFIIWKRSMRYWKSGISGKFIGSDEMPYAISYFLSNFTETVTVHNASVPPLFTSLYTNTRFTMSSSGQAQYFRLDGERFWAQIWAEPRDECSVYNACGNFGSCNSKNEEMCKCLPGFRPNFLEKWVKGDFSGGCSRESRICGKDGVVVGDMFLNLSVVEVGSPDSQFDAHNEKECRAECLNNCQCQAYSYEEVDILQSNTKCWIWLEDLNNLKEGYLGSRNVFIRVAVPDIGSHVERGRGRYGEAKTPVVLIIVVTFTSAAILVVLSSTASYVFLQRRKVNKELGSIPRGVHLCDSERHIKELIESGRFKQDDSQGIDVPSFELETILYATSNFSNANKLGQGGFGPVYKGMFPGDQEIAVKRLSRCSGQGLEEFKNEVVLIAKLQHRNLVRLLGYCVAGEEKLLLYEYMPHKSLDFFIFDRKLCQRLDWKMRCNIILGIARGLLYLHQDSRLRIIHRDLKTSNILLDEEMNPKISDFGLARIFGGSETSANTNRVVGTYGYMSPEYALEGLFSFKSDVFSFGVVVIETISGKRNTGFHEPEKSLSLLGHAWDLWKAERGIELLDQALQESCETEGFLKCLNVGLLCVQEDPNDRPTMSNVVFMLGSSEAATLPTPKQPAFVLRRCPSSSKASSSTKPETCSENELTITLEDGR

SEQ ID NO: 27754 - DNA, 2361 bp, Arabidopsis thaliana
  misc_feature (1)..(2361): Ceres Seq. ID no. 1828458
atgttgttgtttccttctacttctttacgtctcttcttctttctcttcctcttgttctcctcttgtttcttacagattagaggagatgatgatgatgatgatataagcgatgataatatcaaagtcgacccgagtctcaagttcgaaaacccaagtcttcgacaagcctacattgctcttcaatcatggaaacaagctattttctctgatccttttaacttcactgctaattggaatggctctgatgtttgttcctacaacggtatcttttgtgctccttctccttctagtccgaaaactcgagttgttgcgggtattgaccttaaccatgcggacatggctggttatttacctcgtgagcttggtcttctcactgatcttgctctctttcatctcaactcaaaccgcttttgtggagaagtacctctcacgtttaaacacatgaagcttctcttcgagcttgacttaagtaacaaccgttttgttgggaagttccctaatgttgtcttgtctttaccttccctcaagttcttggatcttcggtacaacgagtttgaaggtagtatcccttcgaagctattcgataaagagctcgacgcgatattcttaaaccataaccggtttatgtttgggatacccgaaaacatgggaaactctccggtgtctgctctagttcttgcggataatgatcttggaggttgcataccgggaagtatcggtttaatgggaaagactctcaacgagatcatcctctctaacgataacttaaccggttgcttaccaccacagattgggaatctcaagaatgtgacggttttcgatatcagtttcaaccgtttaagcggtccattgccatcaagcattggaaacatgaagagtttggaacagctcaatgttgctaacaatagattcacaggagttataccaagcagcatttgtcagctctctaaccttgagaacttcacttattcttccaacttcttcaccggtgatgccccgagatgtgtggctcttttgggagacaatgtggtggttaatggctcgatgaattgtattgatggtaaagaagatcaaagatcgtctaaagagtgttcttctccagcctcacgctctgttgattgtagtaagtttgggtgtaacaactttttctctcctccaccaccgtcttttaagatgtcacccaccgttcgagtacttcctccaccgcctccgtcttccaagatgtcgcctacatttagagcaactccgccaccgccgtcttctaagatgtcaccatcttttagagcaactccgccaccgccttcttctaaaatgtcgccttcttttagagcaactccgccaccaccttcttctaagatgtcgccttccgtcaaggcgtatcctcctcctccaccaccgccagagtatgagccatctccgcctcctccttcttccgaaatgtcaccttccgttagggcataccctccaccaccaccactatcaccaccaccaccatctcctcctccaccatacatctactcatctcctccaccaccgtcaccatctcctcctccgccatacatttactcatctcctccgcccgtagttaactgtccacccacaacacaaagtcccccacctccgaaatatgagcaaactccttcaccaagggaatactatccatcaccttcaccaccttactaccaatacacgtcttctccgccaccgcctacttactacgccactcaatctccaccgccaccaccaccgcctacttactacgctgttcaatctcccccgccaccaccaccggtatactacccacctgtaacagcaagtcctcctccaccaccggtctactatacaccggttatacaatctcctcctcctccaccggtttactattcacctgttacccaaagtcctccaccaccaccaccggtttactatcccccggtaacacaaagtccaccaccatcaccggtctactatccgccagttacccaaagtccacctcccccaccagtttattatcttccagtaactcaaagccctccaccgccatcaccagtctactatccaccggtagcaaaaagccctccaccaccatcaccagtctactatccaccggtaacacaaagcccacctccaccgtcaacaccagttgagtaccatccaccggcaagcccaaaccagtctccaccaccggagtatcaatcaccaccaccaaagggatgcaacgacagtccaagtaacgaccatcactaccaaacaccaacaccaccttctctgccgcctccatattacgaagacacacctcttccgcctatccgcggtgtctcttatgcgtctcctcctccaccatcaatcccatactactaa

SEQ ID NO: 27755 - protein, 786 aa, Arabidopsis thaliana
  misc_feature (1)..(786): Ceres Seq. ID no. 1828459
MLLFPSTSLRLFFFLFLLFSSCFLQIRGDDDDDDISDDNIKVDPSLKFENPSLRQAYIALQSWKQAIFSDPFNFTANWNGSDVCSYNGIFCAPSPSSPKTRVVAGIDLNHADMAGYLPRELGLLTDLALFHLNSNRFCGEVPLTFKHMKLLFELDLSNNRFVGKFPNVVLSLPSLKFLDLRYNEFEGSIPSKLFDKELDAIFLNHNRFMFGIPENMGNSPVSALVLADNDLGGCIPGSIGLMGKTLNEIILSNDNLTGCLPPQIGNLKNVTVFDISFNRLSGPLPSSIGNMKSLEQLNVANNRFTGVIPSSICQLSNLENFTYSSNFFTGDAPRCVALLGDNVVVNGSMNCIDGKEDQRSSKECSSPASRSVDCSKFGCNNFFSPPPPSFKMSPTVRVLPPPPPSSKMSPTFRATPPPPSSKMSPSFRATPPPPSSKMSPSFRATPPPPSSKMSPSVKAYPPPPPPPEYEPSPPPPSSEMSPSVRAYPPPPPLSPPPPSPPPPYIYSSPPPPSPSPPPPYIYSSPPPVVNCPPTTQSPPPPKYEQTPSPREYYPSPSPPYYQYTSSPPPPTYYATQSPPPPPPPTYYAVQSPPPPPPVYYPPVTASPPPPPVYYTPVIQSPPPPPVYYSPVTQSPPPPPPVYYPPVTQSPPPSPVYYPPVTQSPPPPPVYYLPVTQSPPPPSPVYYPPVAKSPPPPSPVYYPPVTQSPPPPSTPVEYHPPASPNQSPPPEYQSPPPKGCNDSPSNDHHYQTPTPPSLPPPYYEDTPLPPIRGVSYASPPPPSIPYY

SEQ ID NO: 27756 - protein, 674 aa, Arabidopsis thaliana
  misc_feature (1)..(674): Ceres Seq. ID no. 1828460
MAGYLPRELGLLTDLALFHLNSNRFCGEVPLTFKHMKLLFELDLSNNRFVGKFPNVVLSLPSLKFLDLRYNEFEGSIPSKLFDKELDAIFLNHNRFMFGIPENMGNSPVSALVLADNDLGGCIPGSIGLMGKTLNEIILSNDNLTGCLPPQIGNLKNVTVFDISFNRLSGPLPSSIGNMKSLEQLNVANNRFTGVIPSSICQLSNLENFTYSSNFFTGDAPRCVALLGDNVVVNGSMNCIDGKEDQRSSKECSSPASRSVDCSKFGCNNFFSPPPPSFKMSPTVRVLPPPPPSSKMSPTFRATPPPPSSKMSPSFRATPPPPSSKMSPSFRATPPPPSSKMSPSVKAYPPPPPPPEYEPSPPPPSSEMSPSVRAYPPPPPLSPPPPSPPPPYIYSSPPPPSPSPPPPYIYSSPPPVVNCPPTTQSPPPPKYEQTPSPREYYPSPSPPYYQYTSSPPPPTYYATQSPPPPPPPTYYAVQSPPPPPPVYYPPVTASPPPPPVYYTPVIQSPPPPPVYYSPVTQSPPPPPPVYYPPVTQSPPPSPVYYPPVTQSPPPPPVYYLPVTQSPPPPSPVYYPPVAKSPPPPSPVYYPPVTQSPPPPSTPVEYHPPASPNQSPPPEYQSPPPKGCNDSPSNDHHYQTPTPPSLPPPYYEDTPLPPIRGVSYASPPPPSIPYY

SEQ ID NO: 27757 - protein, 639 aa, Arabidopsis thaliana
  misc_feature (1)..(639): Ceres Seq. ID no. 1828461
MKLLFELDLSNNRFVGKFPNVVLSLPSLKFLDLRYNEFEGSIPSKLFDKELDAIFLNHNRFMFGIPENMGNSPVSALVLADNDLGGCIPGSIGLMGKTLNEIILSNDNLTGCLPPQIGNLKNVTVFDISFNRLSGPLPSSIGNMKSLEQLNVANNRFTGVIPSSICQLSNLENFTYSSNFFTGDAPRCVALLGDNVVVNGSMNCIDGKEDQRSSKECSSPASRSVDCSKFGCNNFFSPPPPSFKMSPTVRVLPPPPPSSKMSPTFRATPPPPSSKMSPSFRATPPPPSSKMSPSFRATPPPPSSKMSPSVKAYPPPPPPPEYEPSPPPPSSEMSPSVRAYPPPPPLSPPPPSPPPPYIYSSPPPPSPSPPPPYIYSSPPPVVNCPPTTQSPPPPKYEQTPSPREYYPSPSPPYYQYTSSPPPPTYYATQSPPPPPPPTYYAVQSPPPPPPVYYPPVTASPPPPPVYYTPVIQSPPPPPVYYSPVTQSPPPPPPVYYPPVTQSPPPSPVYYPPVTQSPPPPPVYYLPVTQSPPPPSPVYYPPVAKSPPPPSPVYYPPVTQSPPPPSTPVEYHPPASPNQSPPPEYQSPPPKGCNDSPSNDHHYQTPTPPSLPPPYYEDTPLPPIRGVSYASPPPPSIPYY

SEQ ID NO: 27758 - DNA, 2529 bp, Arabidopsis thaliana
  misc_feature (1)..(2529): Ceres Seq. ID no. 1828496
atggcaggatttaacagaaaccttactttggtgacgactcttttgatattccatcaactatgtagcaacgtatcttgctccacaagcaactcattcactagaaaccacacaatacgagagggagactcactgatcagcgaggatgaaagcttcgagcttggattcttcacccccaaaaattcgacgttaaggtatgttggaatatggtacaagaacatagaacctcaaacagttgtttgggttgcgaatagagagaagccgttgttggatcacaagggagctctaaagattgcagatgacggaaatttggtgatcgtgaacggtcaaaacgaaaccatttggtccacaaatgtcgagcccgagtcaaacaacacggttgctgttctgttcaaaacaggggatttggttctgtgttcagactcagacagaagaaaatggtattgggagagttttaacaatccaaccgacactttcttgcccggtatgagggttcgggtgaatccttcgcttggagaaaatcgcgcatttatcccgtggaaatccgagagtgatccttcaccaggaaagtattcaatggggattgatcctgtgggagcactagagattgtgatttgggaaggggaaaagagaaaatggcgtagcggaccgtggaattcggctatctttaccggtatacctgatatgctccgtttcacaaattatatttacgggtttaagctctcttctcctcctgatagagatggtagcgtgtacttcacgtatgttgcctcagatagttccgatttcttgaggttttggattaggcctgatggcgtagaagagcagttcagatggaataaggatatcaggaactggaatttgcttcaatggaaaccaagcacggaatgtgagaagtataaccgttgtggtaattacagtgtatgtgatgatagtaaggagtttgattccggtaaatgcagttgcattgatggatttgagccggttcatcaggatcaatggaacaacagggacttctcaggtggctgccaaagaagagttcctttgaactgtaatcagagtctggttgcaggtcaagaggatgggtttacggtacttaagggaataaaggtgcctgattttggatcagttgttttacataacaactcagagacctgtaaagatgtatgcgcaagggactgttcttgtaaggcttatgcgttagtagtagggatcggatgcatgatttggacccgtgatttgatcgatatggaacattttgaacgcggtggaaactctatcaacatccggctagcgggttctaaactaggtggtgggaaggaaaattcaacactttggataattgttttcagtgttataggagcattcttactaggattatgcatttggatcttatggaagtttaagaaaagccttaaagctttcttgtggaagaagaaagatatcacagtttctgatatcatagagaacagagattactcaagctcgccgatcaaagttctagtaggggatcaagttgacacacccgatttaccaatattcagttttgacagcgtagcctcagctactggagatttcgctgaagagaacaagcttggacagggcggattcggtactgtatataagggaaacttttcagaaggaagagagattgcagtgaagagactatcagggaaatctaaacaaggactagaggagttcaagaacgagatcttactaatcgcgaaactccagcatcggaatcttgttagattactaggatgttgcattgaagacaatgagaagatgcttctctatgaatatatgccaaacaagagtttggaccgctttctttttgatgagagtaaacaaggaagtttggactggagaaaacgatgggaggtcattggaggaatcgcgaggggattactttacttacatagagactcaagactaaagatcattcaccgtgacctaaaagctagcaatatcttgctagacacggaaatgaatccaaagatctcggatttcggtatggctaggatattcaactaccgacaagaccatgccaacacaatccgagtcgtcggcacatatggttatatggctccggagtatgcaatggaagggatattctcagagaaatcagatgtgtatagctttggagtgttgatattggagattgtgagtggaagaaaaaacgttagctttcgagggactgatcatggaagtctcattggttatgcgtggcatttatggagccaaggaaagacaaaagagatgatagatccaattgtgaaggacactagagacgtgacggaagcgatgagatgcatccacgtgggtatgttgtgtacacaagactcggtcattcacagaccaaacatgggttcggttttgttgatgttggagagtcaaaccagtcaacttccacccccgagacagccgaccttccactcgttcttgaactctggtgacattgaactcaactttgacggtcacgatgttgcctccgttaacgatgttactttcacaacaattgttggtagatga

SEQ ID NO: 27759 - protein, 842 aa, Arabidopsis thaliana
  misc_feature (1)..(842): Ceres Seq. ID no. 1828497
MAGFNRNLTLVTTLLIFHQLCSNVSCSTSNSFTRNHTIREGDSLISEDESFELGFFTPKNSTLRYVGIWYKNIEPQTVVWVANREKPLLDHKGALKIADDGNLVIVNGQNETIWSTNVEPESNNTVAVLFKTGDLVLCSDSDRRKWYWESFNNPTDTFLPGMRVRVNPSLGENRAFIPWKSESDPSPGKYSMGIDPVGALEIVIWEGEKRKWRSGPWNSAIFTGIPDMLRFTNYIYGFKLSSPPDRDGSVYFTYVASDSSDFLRFWIRPDGVEEQFRWNKDIRNWNLLQWKPSTECEKYNRCGNYSVCDDSKEFDSGKCSCIDGFEPVHQDQWNNRDFSGGCQRRVPLNCNQSLVAGQEDGFTVLKGIKVPDFGSVVLHNNSETCKDVCARDCSCKAYALVVGIGCMIWTRDLIDMEHFERGGNSINIRLAGSKLGGGKENSTLWIIVFSVIGAFLLGLCIWILWKFKKSLKAFLWKKKDITVSDIIENRDYSSSPIKVLVGDQVDTPDLPIFSFDSVASATGDFAEENKLGQGGFGTVYKGNFSEGREIAVKRLSGKSKQGLEEFKNEILLIAKLQHRNLVRLLGCCIEDNEKMLLYEYMPNKSLDRFLFDESKQGSLDWRKRWEVIGGIARGLLYLHRDSRLKIIHRDLKASNILLDTEMNPKISDFGMARIFNYRQDHANTIRVVGTYGYMAPEYAMEGIFSEKSDVYSFGVLILEIVSGRKNVSFRGTDHGSLIGYAWHLWSQGKTKEMIDPIVKDTRDVTEAMRCIHVGMLCTQDSVIHRPNMGSVLLMLESQTSQLPPPRQPTFHSFLNSGDIELNFDGHDVASVNDVTFTTIVGR

SEQ ID NO: 27760 - protein, 681 aa, Arabidopsis thaliana
  misc_feature (1)..(681): Ceres Seq. ID no. 1828498
MRVRVNPSLGENRAFIPWKSESDPSPGKYSMGIDPVGALEIVIWEGEKRKWRSGPWNSAIFTGIPDMLRFTNYIYGFKLSSPPDRDGSVYFTYVASDSSDFLRFWIRPDGVEEQFRWNKDIRNWNLLQWKPSTECEKYNRCGNYSVCDDSKEFDSGKCSCIDGFEPVHQDQWNNRDFSGGCQRRVPLNCNQSLVAGQEDGFTVLKGIKVPDFGSVVLHNNSETCKDVCARDCSCKAYALVVGIGCMIWTRDLIDMEHFERGGNSINIRLAGSKLGGGKENSTLWIIVFSVIGAFLLGLCIWILWKFKKSLKAFLWKKKDITVSDIIENRDYSSSPIKVLVGDQVDTPDLPIFSFDSVASATGDFAEENKLGQGGFGTVYKGNFSEGREIAVKRLSGKSKQGLEEFKNEILLIAKLQHRNLVRLLGCCIEDNEKMLLYEYMPNKSLDRFLFDESKQGSLDWRKRWEVIGGIARGLLYLHRDSRLKIIHRDLKASNILLDTEMNPKISDFGMARIFNYRQDHANTIRVVGTYGYMAPEYAMEGIFSEKSDVYSFGVLILEIVSGRKNVSFRGTDHGSLIGYAWHLWSQGKTKEMIDPIVKDTRDVTEAMRCIHVGMLCTQDSVIHRPNMGSVLLMLESQTSQLPPPRQPTFHSFLNSGDIELNFDGHDVASVNDVTFTTIVGR

SEQ ID NO: 27761 - protein, 651 aa, Arabidopsis thaliana
  misc_feature (1)..(651): Ceres Seq. ID no. 1828499
MGIDPVGALEIVIWEGEKRKWRSGPWNSAIFTGIPDMLRFTNYIYGFKLSSPPDRDGSVYFTYVASDSSDFLRFWIRPDGVEEQFRWNKDIRNWNLLQWKPSTECEKYNRCGNYSVCDDSKEFDSGKCSCIDGFEPVHQDQWNNRDFSGGCQRRVPLNCNQSLVAGQEDGFTVLKGIKVPDFGSVVLHNNSETCKDVCARDCSCKAYALVVGIGCMIWTRDLIDMEHFERGGNSINIRLAGSKLGGGKENSTLWIIVFSVIGAFLLGLCIWILWKFKKSLKAFLWKKKDITVSDIIENRDYSSSPIKVLVGDQVDTPDLPIFSFDSVASATGDFAEENKLGQGGFGTVYKGNFSEGREIAVKRLSGKSKQGLEEFKNEILLIAKLQHRNLVRLLGCCIEDNEKMLLYEYMPNKSLDRFLFDESKQGSLDWRKRWEVIGGIARGLLYLHRDSRLKIIHRDLKASNILLDTEMNPKISDFGMARIFNYRQDHANTIRVVGTYGYMAPEYAMEGIFSEKSDVYSFGVLILEIVSGRKNVSFRGTDHGSLIGYAWHLWSQGKTKEMIDPIVKDTRDVTEAMRCIHVGMLCTQDSVIHRPNMGSVLLMLESQTSQLPPPRQPTFHSFLNSGDIELNFDGHDVASVNDVTFTTIVGR

SEQ ID NO: 27762 - DNA, 1359 bp, Arabidopsis thaliana
  misc_feature (1)..(1359): Ceres Seq. ID no. 1828908
atgttgaaactttctcgtgatccgattctatgtatcactacattaattctcattataacattttctctcttatcctatggaactgaagcaaggctacatcatcaagcgtctcagcctccttctccctctccaaaccctaacgacccgtcgaaatctccatctcggtcccaagatctcgaccacgaagtagtttacgacgtgaggaaatacggtgcggtcggtaatggtgtcgcagatgacactgtgtcgttcaagacagcttgggattcagcttgtagcaacaacaaaaacaatactgcctccgtcttgcatgtgccttacggtttcactttcatgatccgttccactattttcactggtccttgtcgctcttaccaatacttccaagttgatgggaccatcgtgccacgggatggaccaaagtcgtggccaagcagtttaaacaaaagacaatggctcgccttttatagaatcaacggaatggctctacaaggcgccggagttatcgacggtcgtggacaaaattggtgggatcttccctgcaaacctcatcaggctttaaggttcttcatgagctcgaatgtaattgtgaaaggcctaagtataaaaaacagccctcaggttcacctcaaattagatggatgtcacgtagttcacatcaactcccttcgaatcatatctccgccggctagtcccaacaccgacggtatccacattgagaactccaactccgttgagatttacaactccgttatctccaacggagatgattgtgtctccataggacccggagcatacgatatcgatatacgaaatatcacttgtggaccaggagggcatggaattagcattggaagtttgggagaaaaaaactcacatgcgtgtgtctccaacgttacggttagagactcgttcataaaattttccgaaaatggagtacgaatcaagacatggcaaggtggatcagggtccgtttcgggtgtaacgtttgacaatatccatgtagatactgtccggaatccgataatcatcgatcaatactattgcacgactaaaagttgtgctaacaaaacatcagcggtttttgtgaatgatatagtatatcaaagtataaaaggcacatacgatattcgtagtcccccaatgcattttggatgcagcaacaatgtcccgtgcacaaacttaacactttcgaatatcgaattgttaccttcaaaagaagatattgttgtgggtccgttctgttggaatgcgtatgggatcacggatgagttctctgtacctttgatctcgtgtctcaaatcgaatccttcgacatcgttgttaagtggtctttcagggaggtgtggatcaccgtga

SEQ ID NO: 27763 - protein, 452 aa, Arabidopsis thaliana
  misc_feature (1)..(452): Ceres Seq. ID no. 1828909
MLKLSRDPILCITTLILIITFSLLSYGTEARLHHQASQPPSPSPNPNDPSKSPSRSQDLDHEVVYDVRKYGAVGNGVADDTVSFKTAWDSACSNNKNNTASVLHVPYGFTFMIRSTIFTGPCRSYQYFQVDGTIVPRDGPKSWPSSLNKRQWLAFYRINGMALQGAGVIDGRGQNWWDLPCKPHQALRFFMSSNVIVKGLSIKNSPQVHLKLDGCHVVHINSLRIISPPASPNTDGIHIENSNSVEIYNSVISNGDDCVSIGPGAYDIDIRNITCGPGGHGISIGSLGEKNSHACVSNVTVRDSFIKFSENGVRIKTWQGGSGSVSGVTFDNIHVDTVRNPIIIDQYYCTTKSCANKTSAVFVNDIVYQSIKGTYDIRSPPMHFGCSNNVPCTNLTLSNIELLPSKEDIVVGPFCWNAYGITDEFSVPLISCLKSNPSTSLLSGLSGRCGSP

SEQ ID NO: 27764 - protein, 341 aa, Arabidopsis thaliana
  misc_feature (1)..(341): Ceres Seq. ID no. 1828910
MIRSTIFTGPCRSYQYFQVDGTIVPRDGPKSWPSSLNKRQWLAFYRINGMALQGAGVIDGRGQNWWDLPCKPHQALRFFMSSNVIVKGLSIKNSPQVHLKLDGCHVVHINSLRIISPPASPNTDGIHIENSNSVEIYNSVISNGDDCVSIGPGAYDIDIRNITCGPGGHGISIGSLGEKNSHACVSNVTVRDSFIKFSENGVRIKTWQGGSGSVSGVTFDNIHVDTVRNPIIIDQYYCTTKSCANKTSAVFVNDIVYQSIKGTYDIRSPPMHFGCSNNVPCTNLTLSNIELLPSKEDIVVGPFCWNAYGITDEFSVPLISCLKSNPSTSLLSGLSGRCGSP

SEQ ID NO: 27765 - protein, 292 aa, Arabidopsis thaliana
  misc_feature (1)..(292): Ceres Seq. ID no. 1828911
MALQGAGVIDGRGQNWWDLPCKPHQALRFFMSSNVIVKGLSIKNSPQVHLKLDGCHVVHINSLRIISPPASPNTDGIHIENSNSVEIYNSVISNGDDCVSIGPGAYDIDIRNITCGPGGHGISIGSLGEKNSHACVSNVTVRDSFIKFSENGVRIKTWQGGSGSVSGVTFDNIHVDTVRNPIIIDQYYCTTKSCANKTSAVFVNDIVYQSIKGTYDIRSPPMHFGCSNNVPCTNLTLSNIELLPSKEDIVVGPFCWNAYGITDEFSVPLISCLKSNPSTSLLSGLSGRCGSP

SEQ ID NO: 27766 - DNA, 486 bp, Arabidopsis thaliana
  misc_feature (1)..(486): Ceres Seq. ID no. 1828950
atggatcacatagcggcagcggaggagcaaattgtaacggagaggattagaagaaaacttgaagaagttaatgcaactgctcaatcgcaactctctcctattcaagatcacatcaatttcacccttcagttgatgaatcaaacccggaaaattgatcaattgcagcaagcctatttcaaatgtgcatacgagtgctttgacagaaataggaagcaagaggagatagccaactgtgttgagcactgcagtgttccagttgtcaatgctcaacagcatttcgaaggcgaaatgtctcagtttcaggaaaggatgaacagatctctcatggtctgtcaagacaaatttgaggctgcaaagctccataagaacaggggagatgccgccaaagctatggagagttgtgtgaacacatccattgaggatagtctcgatacattgcctcatattgtgcagagaatgaagacgtcattctccattgccgactaa

SEQ ID NO: 27767 - protein, 161 aa, Arabidopsis thaliana
  misc_feature (1)..(161): Ceres Seq. ID no. 1828951
MDHIAAAEEQIVTERIRRKLEEVNATAQSQLSPIQDHINFTLQLMNQTRKIDQLQQAYFKCAYECFDRNRKQEEIANCVEHCSVPVVNAQQHFEGEMSQFQERMNRSLMVCQDKFEAAKLHKNRGDAAKAMESCVNTSIEDSLDTLPHIVQRMKTSFSIAD

SEQ ID NO: 27768 - protein, 117 aa, Arabidopsis thaliana
  misc_feature (1)..(117): Ceres Seq. ID no. 1828952
MNQTRKIDQLQQAYFKCAYECFDRNRKQEEIANCVEHCSVPVVNAQQHFEGEMSQFQERMNRSLMVCQDKFEAAKLHKNRGDAAKAMESCVNTSIEDSLDTLPHIVQRMKTSFSIAD

SEQ ID NO: 27769 - DNA, 996 bp, Arabidopsis thaliana
  misc_feature (1)..(996): Ceres Seq. ID no. 1829109
atgggggttgattactacaatgtactcaacgtgaatccaagcgcaacggaagacgatctaaagaaatcgtatcgaagacttgcaatgaaatggcaccctgacaaaaaccctacttcaatcaagcaagaagctgaagctaagttcaaacaaatctccgaagcttacgatgttttaagcgatcctaacaaacgtcagatctatgatcaatatggtgaagacggacttacggcgacagaagcaacggcgtcgtctcaacaacataattactcttctggtaacaacaataattacaatgcagggtttaggtattatccacgtgatgctgaagatattttcgctgagtttttcggtgcatctgagaaagtctttgatggtggcgtcggcggtggcgggaggtttaaaagtgcggaggcgggaagtcagacgaataggaaaactccggtgaacaggaaagctccggcgattgagagtaaattggcttgtactcttgaggagttgtataaaggtgggaggaggaagatgaagatttcccgcgttgttcctgatggtcttggaaagtcaaagccagtggaagagatcttgaagatagatataacaccaggatggaagaaaggaactaagataacttttccagagaaaggaaaccaagaacccggtgttactcccgcagatctcatctttgttatagatgagaaaccgcattcggtttacaaaagagacggtaacgatcttattgtagacaagaaagtttcgcttttggaggctttaacagggatcactcttagcttaacaacactagacgggaggaatctgactatcccggttttggatatcgttaaaccgggtcaggagatagtgattcctagtgaaggaatgcccatctctaaagaaggttcaaagagaggagatctaagaatcaactttgagatatgtttcccctcgaggctaacatcggaacagaagacagatctcaagagagttcttggtggtagctga

SEQ ID NO: 27770 - protein, 331 aa, Arabidopsis thaliana
  misc_feature (1)..(331): Ceres Seq. ID no. 1829110
MGVDYYNVLNVNPSATEDDLKKSYRRLAMKWHPDKNPTSIKQEAEAKFKQISEAYDVLSDPNKRQIYDQYGEDGLTATEATASSQQHNYSSGNNNNYNAGFRYYPRDAEDIFAEFFGASEKVFDGGVGGGGRFKSAEAGSQTNRKTPVNRKAPAIESKLACTLEELYKGGRRKMKISRVVPDGLGKSKPVEEILKIDITPGWKKGTKITFPEKGNQEPGVTPADLIFVIDEKPHSVYKRDGNDLIVDKKVSLLEALTGITLSLTTLDGRNLTIPVLDIVKPGQEIVIPSEGMPISKEGSKRGDLRINFEICFPSRLTSEQKTDLKRVLGGS

SEQ ID NO: 27771 - protein, 303 aa, Arabidopsis thaliana
  misc_feature (1)..(303): Ceres Seq. ID no. 1829111
MKWHPDKNPTSIKQEAEAKFKQISEAYDVLSDPNKRQIYDQYGEDGLTATEATASSQQHNYSSGNNNNYNAGFRYYPRDAEDIFAEFFGASEKVFDGGVGGGGRFKSAEAGSQTNRKTPVNRKAPAIESKLACTLEELYKGGRRKMKISRVVPDGLGKSKPVEEILKIDITPGWKKGTKITFPEKGNQEPGVTPADLIFVIDEKPHSVYKRDGNDLIVDKKVSLLEALTGITLSLTTLDGRNLTIPVLDIVKPGQEIVIPSEGMPISKEGSKRGDLRINFEICFPSRLTSEQKTDLKRVLGGS

SEQ ID NO: 27772 - DNA, 2244 bp, Arabidopsis thaliana
  misc_feature (1)..(2244): Ceres Seq. ID no. 1830949
atggagcctcacagaaaacactcggtcggcgacacaaccctccacacgtgtcatccttgccggcgcaccattccatatagaatctacgccgtatttcacacgtgtggcatcatagccctcatgtatcaccatgtacactcacttctcacagcaaacacaactctaatcacgtctctccttctcctctccgatattgttctcgccttcatgtgggcaaccacaacttccctccggtataaaccggttcgccggaccgagtaccctgagaaatatgcagctgaaccggaggacttcccgaaactggacgtgtttatatgcacggctgatccgtacaaggagcctccgatgatggtggtcaacactgccttatcggtgatggcttacgagtatccgtccgataagatctcagtctacgtatcggacgatggaggttcgtcgttgactttgtttgctcttatggaggcagctaagttctctaagcattggttgcctttttgcaagaagaataatgttcaagatcggtctcctgaagtttatttctcatcaaagttacgttctcggagtgatgaagctgaaaatatcaagatgatgtacgaagacatgaagagtagagtagaacatgtggtggagagtggaaaagttgagactgcatttatcacatgcgatcaatttcgtggggtattcgatttgtggaccgacaaattcactcgtcatgaccatcccacaattattcaggtgctacaaaatagtgagaatgatatggacgataccaaaaaatatataatgccaaacctaatctacgtttcaagagagaagagtaaagtttcatcacatcatttcaaagccggtgctcttaataccttgctacgagtgtctggagtgatgacgaattcaccgatcattctaacactagactgtgatatgtattccaacgatccagcaacaccagttcgtgccctgtgctatttaacagaccctaaaatcaaaactggtttagggtttgtgcagtttcctcaaacatttcaaggaataagcaagaacgatatatatgcatgcgcgtataagcgtctctttgagatcaatatgattgggtttgatggtttaatgggcccgaatcatgtgggaactggttgtttcttcaatcgacgaggtttttatggagctccatctaatttaattttgcctgagatagatgaacttaagcccaatcgtattgtagataagcctatcaatgctcaagatgttttagcattggctcaccgtgtagcaggatgtatctacgagcttaacaccaattggggatcaaagtttgttataccgtataacttcattttatcattcaaaactatgcagattggattcagatatgggtctttagtagaagactactacacagggtataggctccattgtgaaggatggagatcagttttttgcagacccaaaagagcagcattttgcggagattccccaaaaagtctaattgatgtagtgagccaacaaaagagatgggccattgggcttcttgaagttgccatctcaaggtatagccccattacctatggtgtcaaatcaatgggtctagtaacgggagtaggctattgtcaatacgcatgttgggccttttggtcacttcctcttatcgtctatggattcttgccccaacttgctctcctttatcaatctagcgtctttcccaagtcatcagatccatggttttggctttacatcgttttgttcctcggtgcatatgggcaagatctactcgactttgtattagaaggaggaacttatggcggatggtggaacgatcaaagaatgtggtcgataagaggattctcttcacacctatttggcttcatagagttcactcttaaaaccctaaacctctccacgcatggattcaacgtcacaagcaaagccaacgatgacgaagaacaaagcaagaggtatgagaaagagatttttgagttcggcccctcttcgtccatgttcttgcccttgactacggttgccatcgttaacctccttgcttttgtctgggggctttatggtcttttcgcttggggagaaggactcgtccttgagctgatgctggcgagtttcgcggtggtgaactgcttgccgatctatgaggctatggtgttgaggatagacgatggaaaattaccaaaaagggtttgtttcgtagctggaatcctcacatttgtgctgattgtgtcaggttacgtcttcctcaagtaa

SEQ ID NO: 27773 - protein, 747 aa, Arabidopsis thaliana
  misc_feature (1)..(747): Ceres Seq. ID no. 1830950
MEPHRKHSVGDTTLHTCHPCRRTIPYRIYAVFHTCGIIALMYHHVHSLLTANTTLITSLLLLSDIVLAFMWATTTSLRYKPVRRTEYPEKYAAEPEDFPKLDVFICTADPYKEPPMMVVNTALSVMAYEYPSDKISVYVSDDGGSSLTLFALMEAAKFSKHWLPFCKKNNVQDRSPEVYFSSKLRSRSDEAENIKMMYEDMKSRVEHVVESGKVETAFITCDQFRGVFDLWTDKFTRHDHPTIIQVLQNSENDMDDTKKYIMPNLIYVSREKSKVSSHHFKAGALNTLLRVSGVMTNSPIILTLDCDMYSNDPATPVRALCYLTDPKIKTGLGFVQFPQTFQGISKNDIYACAYKRLFEINMIGFDGLMGPNHVGTGCFFNRRGFYGAPSNLILPEIDELKPNRIVDKPINAQDVLALAHRVAGCIYELNTNWGSKFVIPYNFILSFKTMQIGFRYGSLVEDYYTGYRLHCEGWRSVFCRPKRAAFCGDSPKSLIDVVSQQKRWAIGLLEVAISRYSPITYGVKSMGLVTGVGYCQYACWAFWSLPLIVYGFLPQLALLYQSSVFPKSSDPWFWLYIVLFLGAYGQDLLDFVLEGGTYGGWWNDQRMWSIRGFSSHLFGFIEFTLKTLNLSTHGFNVTSKANDDEEQSKRYEKEIFEFGPSSSMFLPLTTVAIVNLLAFVWGLYGLFAWGEGLVLELMLASFAVVNCLPIYEAMVLRIDDGKLPKRVCFVAGILTFVLIVSGYVFLK

SEQ ID NO: 27774 - protein, 707 aa, Arabidopsis thaliana
  misc_feature (1)..(707): Ceres Seq. ID no. 1830951
MYHHVHSLLTANTTLITSLLLLSDIVLAFMWATTTSLRYKPVRRTEYPEKYAAEPEDFPKLDVFICTADPYKEPPMMVVNTALSVMAYEYPSDKISVYVSDDGGSSLTLFALMEAAKFSKHWLPFCKKNNVQDRSPEVYFSSKLRSRSDEAENIKMMYEDMKSRVEHVVESGKVETAFITCDQFRGVFDLWTDKFTRHDHPTIIQVLQNSENDMDDTKKYIMPNLIYVSREKSKVSSHHFKAGALNTLLRVSGVMTNSPIILTLDCDMYSNDPATPVRALCYLTDPKIKTGLGFVQFPQTFQGISKNDIYACAYKRLFEINMIGFDGLMGPNHVGTGCFFNRRGFYGAPSNLILPEIDELKPNRIVDKPINAQDVLALAHRVAGCIYELNTNWGSKFVIPYNFILSFKTMQIGFRYGSLVEDYYTGYRLHCEGWRSVFCRPKRAAFCGDSPKSLIDVVSQQKRWAIGLLEVAISRYSPITYGVKSMGLVTGVGYCQYACWAFWSLPLIVYGFLPQLALLYQSSVFPKSSDPWFWLYIVLFLGAYGQDLLDFVLEGGTYGGWWNDQRMWSIRGFSSHLFGFIEFTLKTLNLSTHGFNVTSKANDDEEQSKRYEKEIFEFGPSSSMFLPLTTVAIVNLLAFVWGLYGLFAWGEGLVLELMLASFAVVNCLPIYEAMVLRIDDGKLPKRVCFVAGILTFVLIVSGYVFLK

SEQ ID NO: 27775 - protein, 678 aa, Arabidopsis thaliana
  misc_feature (1)..(678): Ceres Seq. ID no. 1830952
MWATTTSLRYKPVRRTEYPEKYAAEPEDFPKLDVFICTADPYKEPPMMVVNTALSVMAYEYPSDKISVYVSDDGGSSLTLFALMEAAKFSKHWLPFCKKNNVQDRSPEVYFSSKLRSRSDEAENIKMMYEDMKSRVEHVVESGKVETAFITCDQFRGVFDLWTDKFTRHDHPTIIQVLQNSENDMDDTKKYIMPNLIYVSREKSKVSSHHFKAGALNTLLRVSGVMTNSPIILTLDCDMYSNDPATPVRALCYLTDPKIKTGLGFVQFPQTFQGISKNDIYACAYKRLFEINMIGFDGLMGPNHVGTGCFFNRRGFYGAPSNLILPEIDELKPNRIVDKPINAQDVLALAHRVAGCIYELNTNWGSKFVIPYNFILSFKTMQIGFRYGSLVEDYYTGYRLHCEGWRSVFCRPKRAAFCGDSPKSLIDVVSQQKRWAIGLLEVAISRYSPITYGVKSMGLVTGVGYCQYACWAFWSLPLIVYGFLPQLALLYQSSVFPKSSDPWFWLYIVLFLGAYGQDLLDFVLEGGTYGGWWNDQRMWSIRGFSSHLFGFIEFTLKTLNLSTHGFNVTSKANDDEEQSKRYEKEIFEFGPSSSMFLPLTTVAIVNLLAFVWGLYGLFAWGEGLVLELMLASFAVVNCLPIYEAMVLRIDDGKLPKRVCFVAGILTFVLIVSGYVFLK

SEQ ID NO: 27776 - DNA, 2313 bp, Arabidopsis thaliana
  misc_feature (1)..(2313): Ceres Seq. ID no. 1830953
atggagactcatagaaagaactcggtcgtcggcaacatcctccacacgtgtcatccttgccggcgcaccattccatatagaatctacgccatatttcacacgtgtggcatcatagctctcatgtatcaccatgtacactcacttgtcacagcaaacaacactcttataacatgtcttcttctcctctccgatattgttctcgccttcatgtgggcaaccacaacttccctccgcttaaacccggttcatcggaccgagtgcccggagaaatatgcagctaaaccggaggactttccaaagctggacgtgtttatatgcacggctgatccgtacaaggagcctccaatgatggttgttaacaccgctttatcggtgatggcttacgagtatccgtcagataagatctcggtgtatgtatcggacgatggaggatcgtcgttgactttctttgctcttattgaagctgctaagttctctaagcagtggttgcccttttgcaagaagaataatgttcaagatcggtctcctgaagtttatttctcttcagagtcacattctcgaagtgatgaagctgaaaaccttaagacaaacatattaaaatgtgaggtggaacagatgatgtacgaagacatgaagagtagagtagaacatgtggtggagagtggaaaagttgaaactgcgtttatcacatgcgaccaatttcgtggggtattcgatttgtggaccgacaaattcagtcgtcatgaccatcccacaattattcaggtgttgcaaaatagcgagacagatatggacaataccagaaaatatataatgccaaacctaatctatgtttcaagagagaagagtaaagtttcaccacatcatttcaaagctggtgctcttaatactttgctacgagtatcaggggtgatgacaaattcaccgatcattctaacactagactgtgatatgtattcgaacgacccggcaacactggttcgtgctttgtgctatttaacagatcctgaaatcaaatccggtttaggatatgtgcagtttcctcagaaatttctaggaataagcaaaaatgatatatatgcttgtgaaaacaaacgcctcttcattattaatatggttgggtttgatggtctaatgggtccaactcatgtgggaactggttgtttctttaatcgacgagctttctatggacctccatatatgttgattttaccggagataaatgaactaaagccttatcggattgcggataagtctatcaaagcccaagatgttttgtcattagcacacaatgtagcaggatgtatctatgagtacaataccaattggggatccaagattggattcagatatgggtcattagtagaagactactacacagggtttatgctccattgtgaaggatggagatcagtattttgcaacccaaaaaaagctgcattttatggagattccccaaagtgcctagttgatcttgtgggtcaacaaatccgttgggcagttgggcttttcgaaatgtccttttcaaagtatagcccaattacctatggaatcaagtcactggaccttttaatgggtttaggttattgcaactctccgtttaagccattttggtcaattcctctgaccgtctatggacttttaccacagcttgcactcatttctggagttagtgtcttccccaaggcatctgatccgtggttttggctttacatcattttattctttggggcttatgcccaagatctatcagactttttattggaaggaggaacttatcggaaatggtggaacgatcaaagaatgttgatgataaaaggactctcttcattcttctttggttttatagagttcattctcaaaaccctaaacctctccacacctaagttcaacgtcaccagtaaagccaatgatgatgacgaacagaggaagcggtacgagcaagaaatctttgatttcggaacctcttcgtccatgttcttgcccttgaccacggttgccatagtgaatctgcttgcttttgtctgggggctttatggtattctcttctgcggaggagaactctaccttgagctgatgctggtgagcttcgcggtggtgaattgcttaccgatctacggggctatggtgttgaggaaagatgatggaaaattatcaaaaagaacttgtttcttagctgggaacctccacgttggttcttattgtgtcaagttacttcgtcctcaagtaacttcaccccttaggttaattcacaacaataatacgtctggctggttcaagcggaagaaacacaatatgaatgaatctgtgtaa

SEQ ID NO: 27777 - protein, 770 aa, Arabidopsis thaliana
  misc_feature (1)..(770): Ceres Seq. ID no. 1830954
METHRKNSVVGNILHTCHPCRRTIPYRIYAIFHTCGIIALMYHHVHSLVTANNTLITCLLLLSDIVLAFMWATTTSLRLNPVHRTECPEKYAAKPEDFPKLDVFICTADPYKEPPMMVVNTALSVMAYEYPSDKISVYVSDDGGSSLTFFALIEAAKFSKQWLPFCKKNNVQDRSPEVYFSSESHSRSDEAENLKTNILKCEVEQMMYEDMKSRVEHVVESGKVETAFITCDQFRGVFDLWTDKFSRHDHPTIIQVLQNSETDMDNTRKYIMPNLIYVSREKSKVSPHHFKAGALNTLLRVSGVMTNSPIILTLDCDMYSNDPATLVRALCYLTDPEIKSGLGYVQFPQKFLGISKNDIYACENKRLFIINMVGFDGLMGPTHVGTGCFFNRRAFYGPPYMLILPEINELKPYRIADKSIKAQDVLSLAHNVAGCIYEYNTNWGSKIGFRYGSLVEDYYTGFMLHCEGWRSVFCNPKKAAFYGDSPKCLVDLVGQQIRWAVGLFEMSFSKYSPITYGIKSLDLLMGLGYCNSPFKPFWSIPLTVYGLLPQLALISGVSVFPKASDPWFWLYIILFFGAYAQDLSDFLLEGGTYRKWWNDQRMLMIKGLSSFFFGFIEFILKTLNLSTPKFNVTSKANDDDEQRKRYEQEIFDFGTSSSMFLPLTTVAIVNLLAFVWGLYGILFCGGELYLELMLVSFAVVNCLPIYGAMVLRKDDGKLSKRTCFLAGNLHVGSYCVKLLRPQVTSPLRLIHNNNTSGWFKRKKHNMNESV

SEQ ID NO: 27778 - protein, 730 aa, Arabidopsis thaliana
  misc_feature (1)..(730): Ceres Seq. ID no. 1830955
MYHHVHSLVTANNTLITCLLLLSDIVLAFMWATTTSLRLNPVHRTECPEKYAAKPEDFPKLDVFICTADPYKEPPMMVVNTALSVMAYEYPSDKISVYVSDDGGSSLTFFALIEAAKFSKQWLPFCKKNNVQDRSPEVYFSSESHSRSDEAENLKTNILKCEVEQMMYEDMKSRVEHVVESGKVETAFITCDQFRGVFDLWTDKFSRHDHPTIIQVLQNSETDMDNTRKYIMPNLIYVSREKSKVSPHHFKAGALNTLLRVSGVMTNSPIILTLDCDMYSNDPATLVRALCYLTDPEIKSGLGYVQFPQKFLGISKNDIYACENKRLFIINMVGFDGLMGPTHVGTGCFFNRRAFYGPPYMLILPEINELKPYRIADKSIKAQDVLSLAHNVAGCIYEYNTNWGSKIGFRYGSLVEDYYTGFMLHCEGWRSVFCNPKKAAFYGDSPKCLVDLVGQQIRWAVGLFEMSFSKYSPITYGIKSLDLLMGLGYCNSPFKPFWSIPLTVYGLLPQLALISGVSVFPKASDPWFWLYIILFFGAYAQDLSDFLLEGGTYRKWWNDQRMLMIKGLSSFFFGFIEFILKTLNLSTPKFNVTSKANDDDEQRKRYEQEIFDFGTSSSMFLPLTTVAIVNLLAFVWGLYGILFCGGELYLELMLVSFAVVNCLPIYGAMVLRKDDGKLSKRTCFLAGNLHVGSYCVKLLRPQVTSPLRLIHNNNTSGWFKRKKHNMNESV

SEQ ID NO: 27779 - protein, 701 aa, Arabidopsis thaliana
  misc_feature (1)..(701): Ceres Seq. ID no. 1830956
MWATTTSLRLNPVHRTECPEKYAAKPEDFPKLDVFICTADPYKEPPMMVVNTALSVMAYEYPSDKISVYVSDDGGSSLTFFALIEAAKFSKQWLPFCKKNNVQDRSPEVYFSSESHSRSDEAENLKTNILKCEVEQMMYEDMKSRVEHVVESGKVETAFITCDQFRGVFDLWTDKFSRHDHPTIIQVLQNSETDMDNTRKYIMPNLIYVSREKSKVSPHHFKAGALNTLLRVSGVMTNSPIILTLDCDMYSNDPATLVRALCYLTDPEIKSGLGYVQFPQKFLGISKNDIYACENKRLFIINMVGFDGLMGPTHVGTGCFFNRRAFYGPPYMLILPEINELKPYRIADKSIKAQDVLSLAHNVAGCIYEYNTNWGSKIGFRYGSLVEDYYTGFMLHCEGWRSVFCNPKKAAFYGDSPKCLVDLVGQQIRWAVGLFEMSFSKYSPITYGIKSLDLLMGLGYCNSPFKPFWSIPLTVYGLLPQLALISGVSVFPKASDPWFWLYIILFFGAYAQDLSDFLLEGGTYRKWWNDQRMLMIKGLSSFFFGFIEFILKTLNLSTPKFNVTSKANDDDEQRKRYEQEIFDFGTSSSMFLPLTTVAIVNLLAFVWGLYGILFCGGELYLELMLVSFAVVNCLPIYGAMVLRKDDGKLSKRTCFLAGNLHVGSYCVKLLRPQVTSPLRLIHNNNTSGWFKRKKHNMNESV

SEQ ID NO: 27780 - DNA, 789 bp, Arabidopsis thaliana
  misc_feature (1)..(789): Ceres Seq. ID no. 1830981
atgatcataacagtccttcattctcatgtctcattctatttcatcatccttagcttcctcttcttccatgctaaagcattgcatttggtaggaagtgatggtgctacaataaccatcgtaaatcgatgcagcttcaccgtgtggccgggaattttgtccaactccggaagcggcgatataggcaccaccggcttcgagctcgttcccggtggttcacgttcgttccaagctccagctagctggtcaggtcggttttgggcacgaaccggttgcaacttcaactcagacacaggacaaggcacctgcctaaccggggactgcggctctaaccaggtcgaatgtaacggtgcaggagcaaaaccgcccgctacactcgccgaattcacaatcgggtcaggtccagcagacccggcccgtaaacaagacttctacgacgtaagcctcgtggacggttacaacgttcccatgttggtggaagcaagtggcgggtcagaaggtacttgcttaaccacgggatgcgtaacggatctaaaccaaaaatgtccaacggagctccggttcgggtccgggtcagcatgcaaaagcgcgtgtgaggcttttggtagtccagaatattgttgtagtggcgcgtacgcctcacccaccgagtgtaaaccatcgatgtactcggagatattcaaatctgcgtgtccaagatcatatagctacgcgttcgacgatgctacaagtacgttcacatgcactgatgctgattacaccatcactttttgcccttccttgcctaggtag

SEQ ID NO: 27781 - protein, 262 aa, Arabidopsis thaliana
  misc_feature (1)..(262): Ceres Seq. ID no. 1830982
MIITVLHSHVSFYFIILSFLFFHAKALHLVGSDGATITIVNRCSFTVWPGILSNSGSGDIGTTGFELVPGGSRSFQAPASWSGRFWARTGCNFNSDTGQGTCLTGDCGSNQVECNGAGAKPPATLAEFTIGSGPADPARKQDFYDVSLVDGYNVPMLVEASGGSEGTCLTTGCVTDLNQKCPTELRFGSGSACKSACEAFGSPEYCCSGAYASPTECKPSMYSEIFKSACPRSYSYAFDDATSTFTCTDADYTITFCPSLPR

SEQ ID NO: 27782 - DNA, 891 bp, Arabidopsis thaliana
  misc_feature (1)..(891): Ceres Seq. ID no. 1841049
atgcctatagctatcaataccgagacggcaaagactcaacactatgaattaccaacagctttcttcgaacatgctcttggaagaaacatcaaatacagctgttgttactattcaaacgattcaagtagcttagaagaggcaggggaagctatgttggctctttcttgtgaaagagctaaagtggaagatggtcaaagtgttcttgatatcggatgtggctggggatctttgactttgtacattgcacgcaagtacagcaaatgcaagttaaccggtatctgcaactccaaaacgcagaaagcatttatcgatgagaaatgccggaaactcgggcttcagaatgtcgaaatcattgctgcggatattagcacttttgagcatgaagggacatacgatcggatattctccatcgaaatgttcgagcatatgaaaaactatggagagctactgaagaagataggaaactggatgaaggaagatagtcttctgtttgttcactatctctgccataagacatatgcttaccactttgaggatgtgaatgacgatgactggatcacaagacacttcttcagcggaggaacaatgccatcagcagatcttctcctatatttccaagtaatatacattataacttgtgaaaatgtttcgattatggatcattggctcgttaacgggacgcattatgcaaagacaagtgaagagtggctgaaaggaatggataaggagatagttgccgtaaaagagataatggaagtgacttatgggaaagaagaagcagtgaagtggacggtttactggagaaccttcttcatcgcgcttgctgagcttttcgcatacaacaatggagacgagtggatgattgcacacttcctcttcaagaagaaatga

SEQ ID NO: 27783 - protein, 296 aa, Arabidopsis thaliana
  misc_feature (1)..(296): Ceres Seq. ID no. 1841050
MPIAINTETAKTQHYELPTAFFEHALGRNIKYSCCYYSNDSSSLEEAGEAMLALSCERAKVEDGQSVLDIGCGWGSLTLYIARKYSKCKLTGICNSKTQKAFIDEKCRKLGLQNVEIIAADISTFEHEGTYDRIFSIEMFEHMKNYGELLKKIGNWMKEDSLLFVHYLCHKTYAYHFEDVNDDDWITRHFFSGGTMPSADLLLYFQVIYIITCENVSIMDHWLVNGTHYAKTSEEWLKGMDKEIVAVKEIMEVTYGKEEAVKWTVYWRTFFIALAELFAYNNGDEWMIAHFLFKKK

SEQ ID NO: 27784 - protein, 246 aa, Arabidopsis thaliana
  misc_feature (1)..(246): Ceres Seq. ID no. 1841051
MLALSCERAKVEDGQSVLDIGCGWGSLTLYIARKYSKCKLTGICNSKTQKAFIDEKCRKLGLQNVEIIAADISTFEHEGTYDRIFSIEMFEHMKNYGELLKKIGNWMKEDSLLFVHYLCHKTYAYHFEDVNDDDWITRHFFSGGTMPSADLLLYFQVIYIITCENVSIMDHWLVNGTHYAKTSEEWLKGMDKEIVAVKEIMEVTYGKEEAVKWTVYWRTFFIALAELFAYNNGDEWMIAHFLFKKK

SEQ ID NO: 27785 - protein, 158 aa, Arabidopsis thaliana
  misc_feature (1)..(158): Ceres Seq. ID no. 1841052
MFEHMKNYGELLKKIGNWMKEDSLLFVHYLCHKTYAYHFEDVNDDDWITRHFFSGGTMPSADLLLYFQVIYIITCENVSIMDHWLVNGTHYAKTSEEWLKGMDKEIVAVKEIMEVTYGKEEAVKWTVYWRTFFIALAELFAYNNGDEWMIAHFLFKKK

SEQ ID NO: 27786 - DNA, 1056 bp, Arabidopsis thaliana
  misc_feature (1)..(1056): Ceres Seq. ID no. 1843013
atgaaagaagctcttacgcagagctacgtcaagcaatgcgacttcgtagcagtcttcgatgctgatttccaacccgagcccgattatctcatccgcgctgtccctttccttgtccacaaccctgacgttgctctagttcaagcccgatggatatttgttaacgcgaacaaatgcttgatgacgaggatgcaagagatgtctctcaactatcatttcaaagtggaacaagaatcagggtcgactagacatgctttcttcgggtttaatggaaccgcgggtgtatggagaatatcggcaatggaagcagcaggaggatggaaatcaaggaccacagtagaggacatggacttggctgttcgtgttggtcttcatggctggaaatttgtctaccttaacgacctcacggtgagaaacgagcttccaagcaaatttaaggcctacagattccagcaacataggtggtcctgtggaccggcgaatctatttagaaaaatgacgatggagatcattttcaataagagagtatcaatttggaagaagttttatgtgatctacagctttttcttcgtaaggaaagtggcggtacacttcttgacattcttcttctactgtataattgtgccaacaagtgtcttcttccctgaaatccacatcccatcttggtctaccatttacgttccctctttgatcagtatcttccacaccctggcaactccaagatccttctacctcgtgatattttgggtcttgttcgagaatgtaatggctatgcatcgaaccaaaggtacgtgcattggcctacttgaaggaggaagagtaaacgaatgggttgtgaccgaaaaactaggagatgctttgaagagtaagctactctctcgggtagtccaaagaaaatcttgttatcaaagagtgaattccaaggaagtgatggtgggggtatacatattaggatgtgcactctatggcctgatctatgggcacacatggttacatttctatctttttcttcaggccacagcctttttcgtctccggttttggttttgtcggaacctaa

SEQ ID NO: 27787 - protein, 351 aa, Arabidopsis thaliana
  misc_feature (1)..(351): Ceres Seq. ID no. 1843014
MKEALTQSYVKQCDFVAVFDADFQPEPDYLIRAVPFLVHNPDVALVQARWIFVNANKCLMTRMQEMSLNYHFKVEQESGSTRHAFFGFNGTAGVWRISAMEAAGGWKSRTTVEDMDLAVRVGLHGWKFVYLNDLTVRNELPSKFKAYRFQQHRWSCGPANLFRKMTMEIIFNKRVSIWKKFYVIYSFFFVRKVAVHFLTFFFYCIIVPTSVFFPEIHIPSWSTIYVPSLISIFHTLATPRSFYLVIFWVLFENVMAMHRTKGTCIGLLEGGRVNEWVVTEKLGDALKSKLLSRVVQRKSCYQRVNSKEVMVGVYILGCALYGLIYGHTWLHFYLFLQATAFFVSGFGFVGT

SEQ ID NO: 27788 - protein, 292 aa, Arabidopsis thaliana
  misc_feature (1)..(292): Ceres Seq. ID no. 1843015
MTRMQEMSLNYHFKVEQESGSTRHAFFGFNGTAGVWRISAMEAAGGWKSRTTVEDMDLAVRVGLHGWKFVYLNDLTVRNELPSKFKAYRFQQHRWSCGPANLFRKMTMEIIFNKRVSIWKKFYVIYSFFFVRKVAVHFLTFFFYCIIVPTSVFFPEIHIPSWSTIYVPSLISIFHTLATPRSFYLVIFWVLFENVMAMHRTKGTCIGLLEGGRVNEWVVTEKLGDALKSKLLSRVVQRKSCYQRVNSKEVMVGVYILGCALYGLIYGHTWLHFYLFLQATAFFVSGFGFVGT

SEQ ID NO: 27789 - protein, 289 aa, Arabidopsis thaliana
  misc_feature (1)..(289): Ceres Seq. ID no. 1843016
MQEMSLNYHFKVEQESGSTRHAFFGFNGTAGVWRISAMEAAGGWKSRTTVEDMDLAVRVGLHGWKFVYLNDLTVRNELPSKFKAYRFQQHRWSCGPANLFRKMTMEIIFNKRVSIWKKFYVIYSFFFVRKVAVHFLTFFFYCIIVPTSVFFPEIHIPSWSTIYVPSLISIFHTLATPRSFYLVIFWVLFENVMAMHRTKGTCIGLLEGGRVNEWVVTEKLGDALKSKLLSRVVQRKSCYQRVNSKEVMVGVYILGCALYGLIYGHTWLHFYLFLQATAFFVSGFGFVGT

SEQ ID NO: 27790 - DNA, 636 bp, Arabidopsis thaliana
  misc_feature (1)..(636): Ceres Seq. ID no. 1957209
  misc_feature (376)..(376): n is a, c, t, g, unknown, or other
  misc_feature (536)..(536): n is a, c, t, g, unknown, or other
  misc_feature (550)..(550): n is a, c, t, g, unknown, or other
  misc_feature (572)..(572): n is a, c, t, g, unknown, or other
  misc_feature (594)..(594): n is a, c, t, g, unknown, or other
  misc_feature (618)..(618): n is a, c, t, g, unknown, or other
gggagaagaagaaaaagaagatcaatgacgttgaagaagcttgacgcgaatccatcgaccttagaatcgattttacaggaactgaaatcagacgagacaaatcgtagcaagatcaatttcatactcttcctcgccgacaatgatcccaccaccggtcaaagctggtgtccagactgtgttagagctgaacctgtgatttacaagactctagaggaatttccagaggaggtgaatctaattcgtgcttacgccggagaccgaccgacgtggcggactccggcgcatccttggagagttgattctcggtttaagctaacccggagtaccaactcttgttcgttgggatggtgactctggttaaggacgtcttggaaantattaaagctcacctttcttacttgattctttccctttttgccccttcacttgaattgatcgatttcgatttcttcgggactatcgtgggattgaggtcaaatatcttatatatattctagtgggaattggttttcaataaatccttacaatgggtaaanggaaagttggtttnttcgatgatctttacgatttcnggctcaatggaaggggtatttntctataaattaccggggatattanctgaattctaactttggg

SEQ ID NO: 27791 - protein, 116 aa, Arabidopsis thaliana
  misc_feature (1)..(116): Ceres Seq. ID no. 1957210
GRRRKRRSMTLKKLDANPSTLESILQELKSDETNRSKINFILFLADNDPTTGQSWCPDCVRAEPVIYKTLEEFPEEVNLIRAYAGDRPTWRTPAHPWRVDSRFKLTRSTNSCSLGW

SEQ ID NO: 27792 - protein, 108 aa, Arabidopsis thaliana
  misc_feature (1)..(108): Ceres Seq. ID no. 1957211
MTLKKLDANPSTLESILQELKSDETNRSKINFILFLADNDPTTGQSWCPDCVRAEPVIYKTLEEFPEEVNLIRAYAGDRPTWRTPAHPWRVDSRFKLTRSTNSCSLGW

SEQ ID NO: 27793 - DNA, 2124 bp, Arabidopsis thaliana
  misc_feature (1)..(2124): Ceres Seq. ID no. 1989451
atgttcatgatcaaatataacataaaaccaaaacaaagaaaaaagatagttgcaatgggtgtgattagaacctcaagaacgatggggttaggacagtgcatggtttatgttgtcgtcctaagtgccattgcggctacagtgacatcatacccttacacatcccctcaaactccacattacaattctccaagccatgaacacaaaatccctaagtacacaccacatccaaaaccatctatttacagctcttcaccacctccatcatactactctccttctccaaaggttgattacaagtctccaccaccatcatacgtttacagttccccaccaccaccatactactctccgtctccaaaggttgactacaagtccctaccacccccatacgtctacagttccccacccccaccatactactctccttcaccaaaggttaactacaagtctccaccgccaccatacgtctacagctctccaccaccaccatactacagtccatctccaaagggtgactacaagtctccaccacccccatacgtctacagttccccacccccaccatactactctccttctccaaaggttgactacaagtctccaccaccaccatacgtctacagctccccaccaccaccatactacagtccaactccaaaggttgactacaagtccccaccacccccatacgtctacagctccccacccccaccatactacagtccatctccaaaggttgactacaagtctccaccacccccatacgtgtacagctccccacccccaccatactactctccttcaccaaaggttaactacaagtctccaccaccaccatacgtctacggctctccaccaccaccatactacagtccatctccaaaggttgactacaagtccccaccacccccatacgtctacagttccccacccccaccatactactctccttcaccaaaggttaactacaagtctccaccaccaccatacgtctacggctctccaccaccaccatactacagtccatctccaaaggttgactacaagtccccaccacccccatacgtctacagttccccacccccaccatactactctccttctccaaaggttgactacaagtctccaccaccaccatacgtttacagctccacaccaccaccatactacagtccatcaccaaaggttgactacaagtccccaccacccccatacgtctacagttccccacccccaccatactactctccttctccaaaggttgactacaagtccccaccaccaccatacatctacagctccacaccactaccatactacagtccatctccaaaggttgactacaagtccccaccacccccatacgtctacagctccccacccccaccatactactctccttctccaaaggttgactacaagcctccaccaccaccatacgtctacagctccccaccaccaccatactacagtccatctccaaaggttgactacaagtccccaccacccccatacgtctacagcttcccacccccaccatactacagtccatctccaaaggttgactacaagtctccaccacccccatacgtctacagctctccacccccaccatactactctccttcaccaaaggttaactataagtctccaccaccaccatacgtctacagttctccaccaccaccgtactactctccttctccaaaagttgaatacaagtccccaccacccccatacatctatagttccccacctccaccatactacgctccttcaccaaaggttgactacaagtctccaccaccaccatacgtctatagctccccacccccaccatattactctccttctccaaaagttgactataagtctccacctccaccatacgtctatagctcaccaccaccaccatactactctccttctccaaaggttaactacaagtccccaccaccaccatatgtctacagctccccacctccaccgtactactccccttctcctaaggtcgactacaaatcttccccaccacaatatgtctacagctcaccacccacaccatactactctccttctcctaaagtcacttacaagtctcccccaccaccatatgtttactag

SEQ ID NO: 27794 - protein, 707 aa, Arabidopsis thaliana
  misc_feature (1)..(707): Ceres Seq. ID no. 2028021
MFMIKYNIKPKQRKKIVAMGVIRTSRTMGLGQCMVYVVVLSAIAATVTSYPYTSPQTPHYNSPSHEHKIPKYTPHPKPSIYSSSPPPSYYSPSPKVDYKSPPPSYVYSSPPPPYYSPSPKVDYKSLPPPYVYSSPPPPYYSPSPKVNYKSPPPPYVYSSPPPPYYSPSPKGDYKSPPPPYVYSSPPPPYYSPSPKVDYKSPPPPYVYSSPPPPYYSPTPKVDYKSPPPPYVYSSPPPPYYSPSPKVDYKSPPPPYVYSSPPPPYYSPSPKVNYKSPPPPYVYGSPPPPYYSPSPKVDYKSPPPPYVYSSPPPPYYSPSPKVNYKSPPPPYVYGSPPPPYYSPSPKVDYKSPPPPYVYSSPPPPYYSPSPKVDYKSPPPPYVYSSTPPPYYSPSPKVDYKSPPPPYVYSSPPPPYYSPSPKVDYKSPPPPYIYSSTPLPYYSPSPKVDYKSPPPPYVYSSPPPPYYSPSPKVDYKPPPPPYVYSSPPPPYYSPSPKVDYKSPPPPYVYSFPPPPYYSPSPKVDYKSPPPPYVYSSPPPPYYSPSPKVNYKSPPPPYVYSSPPPPYYSPSPKVEYKSPPPPYIYSSPPPPYYAPSPKVDYKSPPPPYVYSSPPPPYYSPSPKVDYKSPPPPYVYSSPPPPYYSPSPKVNYKSPPPPYVYSSPPPPYYSPSPKVDYKSSPPQYVYSSPPTPYYSPSPKVTYKSPPPPYVY

SEQ ID NO: 27795 - protein, 705 aa, Arabidopsis thaliana
  misc_feature (1)..(705): Ceres Seq. ID no. 2028022
MIKYNIKPKQRKKIVAMGVIRTSRTMGLGQCMVYVVVLSAIAATVTSYPYTSPQTPHYNSPSHEHKIPKYTPHPKPSIYSSSPPPSYYSPSPKVDYKSPPPSYVYSSPPPPYYSPSPKVDYKSLPPPYVYSSPPPPYYSPSPKVNYKSPPPPYVYSSPPPPYYSPSPKGDYKSPPPPYVYSSPPPPYYSPSPKVDYKSPPPPYVYSSPPPPYYSPTPKVDYKSPPPPYVYSSPPPPYYSPSPKVDYKSPPPPYVYSSPPPPYYSPSPKVNYKSPPPPYVYGSPPPPYYSPSPKVDYKSPPPPYVYSSPPPPYYSPSPKVNYKSPPPPYVYGSPPPPYYSPSPKVDYKSPPPPYVYSSPPPPYYSPSPKVDYKSPPPPYVYSSTPPPYYSPSPKVDYKSPPPPYVYSSPPPPYYSPSPKVDYKSPPPPYIYSSTPLPYYSPSPKVDYKSPPPPYVYSSPPPPYYSPSPKVDYKPPPPPYVYSSPPPPYYSPSPKVDYKSPPPPYVYSFPPPPYYSPSPKVDYKSPPPPYVYSSPPPPYYSPSPKVNYKSPPPPYVYSSPPPPYYSPSPKVEYKSPPPPYIYSSPPPPYYAPSPKVDYKSPPPPYVYSSPPPPYYSPSPKVDYKSPPPPYVYSSPPPPYYSPSPKVNYKSPPPPYVYSSPPPPYYSPSPKVDYKSSPPQYVYSSPPTPYYSPSPKVTYKSPPPPYVY

SEQ ID NO: 27796 - protein, 689 aa, Arabidopsis thaliana
  misc_feature (1)..(689): Ceres Seq. ID no. 2028023
MGVIRTSRTMGLGQCMVYVVVLSAIAATVTSYPYTSPQTPHYNSPSHEHKIPKYTPHPKPSIYSSSPPPSYYSPSPKVDYKSPPPSYVYSSPPPPYYSPSPKVDYKSLPPPYVYSSPPPPYYSPSPKVNYKSPPPPYVYSSPPPPYYSPSPKGDYKSPPPPYVYSSPPPPYYSPSPKVDYKSPPPPYVYSSPPPPYYSPTPKVDYKSPPPPYVYSSPPPPYYSPSPKVDYKSPPPPYVYSSPPPPYYSPSPKVNYKSPPPPYVYGSPPPPYYSPSPKVDYKSPPPPYVYSSPPPPYYSPSPKVNYKSPPPPYVYGSPPPPYYSPSPKVDYKSPPPPYVYSSPPPPYYSPSPKVDYKSPPPPYVYSSTPPPYYSPSPKVDYKSPPPPYVYSSPPPPYYSPSPKVDYKSPPPPYIYSSTPLPYYSPSPKVDYKSPPPPYVYSSPPPPYYSPSPKVDYKPPPPPYVYSSPPPPYYSPSPKVDYKSPPPPYVYSFPPPPYYSPSPKVDYKSPPPPYVYSSPPPPYYSPSPKVNYKSPPPPYVYSSPPPPYYSPSPKVEYKSPPPPYIYSSPPPPYYAPSPKVDYKSPPPPYVYSSPPPPYYSPSPKVDYKSPPPPYVYSSPPPPYYSPSPKVNYKSPPPPYVYSSPPPPYYSPSPKVDYKSSPPQYVYSSPPTPYYSPSPKVTYKSPPPPYVY

SEQ ID NO: 27797 - protein, 643 aa, Arabidopsis thaliana
  misc_feature (1)..(643): Ceres Seq. ID no. 2028024
MNTKSLSTHHIQNHLFTALHHLHHTTLLLQRLITSLHHHHTFTVPHHHHTTLRLQRLTTSPYHPHTSTVPHPHHTTLLHQRLTTSLHRHHTSTALHHHHTTVHLQRVTTSLHHPHTSTVPHPHHTTLLLQRLTTSLHHHHTSTAPHHHHTTVQLQRLTTSPHHPHTSTAPHPHHTTVHLQRLTTSLHHPHTCTAPHPHHTTLLHQRLTTSLHHHHTSTALHHHHTTVHLQRLTTSPHHPHTSTVPHPHHTTLLHQRLTTSLHHHHTSTALHHHHTTVHLQRLTTSPHHPHTSTVPHPHHTTLLLQRLTTSLHHHHTFTAPHHHHTTVHHQRLTTSPHHPHTSTVPHPHHTTLLLQRLTTSPHHHHTSTAPHHYHTTVHLQRLTTSPHHPHTSTAPHPHHTTLLLQRLTTSLHHHHTSTAPHHHHTTVHLQRLTTSPHHPHTSTASHPHHTTVHLQRLTTSLHHPHTSTALHPHHTTLLHQRLTISLHHHHTSTVLHHHRTTLLLQKLNTSPHHPHTSIVPHLHHTTLLHQRLTTSLHHHHTSIAPHPHHITLLLQKLTISLHLHHTSIAHHHHHTTLLLQRLTTSPHHHHMSTAPHLHRTTPLLLRSTTNLPHHNMSTAHHPHHTTLLLLKSLTSLPHHHMFT

SEQ ID NO: 27798 - DNA, 1431 bp, Arabidopsis thaliana
  misc_feature (1)..(1431): Ceres Seq. ID no. 1989637
atgttagagatcattacggtaagaaaagtgttcttgatcggattcttgatcttgatactgaattgggtatggagagctgtgaattgggtttggttaaggccaaagagactggagaaatatctgaagaaacaaggattctctgggaattcttatagaattttaatgggagatatgagagagagtaatcagatggatcaagttgctcactctcttcctcttcctctcgacgccgattttctccctcgcatgatgccttttctccaccacactgttctaaaacatgggaagaagtgtttcacatggtacggaccgtacccgaacgtgatagtaatggatccagagacactccgagagattatgtcaaaacacgaactctttccaaaaccaaagatcgggtcacataatcatgttttcctaagtggtcttctcaatcacgaaggtcctaaatggtccaagcatcgaagcattcttaatcctgcttttcgtattgataatttgaagagcatactaccagcatttaactcgagttgcaaagaaatgttagaagaatgggagagattagcctcagcaaaaggaacaatggaacttgattcatggactcactgtcatgacttaaccagaaacatgcttgctcgtgcttcttttggtgattcctacaaagatggtatcaagatcttcgaaatccaacaagaacagattgatcttggtctccttgctattcgagccgtctacattcctggctcaaagtttttgccaacaaagttcaacaggaggttgagagaaaccgaaagggacatgagggctatgtttaaagcgatgattgagacaaaagaggaggagataaaaagaggaagagctggtcaaaatgtgacttcttcattgtttgtttggacacttgttgctctaagccaacatcaagattggcaaaacaaagcaagagacgagatttctcaggccttcggtaacaacgaacccgatttcgaagggctaagccacctgaaagtcgtaacaatgatcctccatgaagttctacgactctattcaccagcttacttcacatgtcggataactaaacaagaagtgaagctagagagattctctttacctgaaggagttgtagtaacaataccaatgctcttggtgcaccatgattctgatctttggggagacgatgtgaaagagtttaagcccgagagattcgccaatggcgtggcgggtgcaaccaaaggaagactctccttcttgccatttagctcgggccctcggacttgtatcggtcagaacttttcgatgttgcaagctaaactcttcttggcaatggtacttcaaaggttcagtgttgaactctctccatcgtatactcatgctcctttcccagctgcaactacatttccacaacatggagctcatttgatcatccgaaaactgtag

SEQ ID NO: 27799 - protein, 476 aa, Arabidopsis thaliana
  misc_feature (1)..(476): Ceres Seq. ID no. 2028493
MLEIITVRKVFLIGFLILILNWVWRAVNWVWLRPKRLEKYLKKQGFSGNSYRILMGDMRESNQMDQVAHSLPLPLDADFLPRMMPFLHHTVLKHGKKCFTWYGPYPNVIVMDPETLREIMSKHELFPKPKIGSHNHVFLSGLLNHEGPKWSKHRSILNPAFRIDNLKSILPAFNSSCKEMLEEWERLASAKGTMELDSWTHCHDLTRNMLARASFGDSYKDGIKIFEIQQEQIDLGLLAIRAVYIPGSKFLPTKFNRRLRETERDMRAMFKAMIETKEEEIKRGRAGQNVTSSLFVWTLVALSQHQDWQNKARDEISQAFGNNEPDFEGLSHLKVVTMILHEVLRLYSPAYFTCRITKQEVKLERFSLPEGVVVTIPMLLVHHDSDLWGDDVKEFKPERFANGVAGATKGRLSFLPFSSGPRTCIGQNFSMLQAKLFLAMVLQRFSVELSPSYTHAPFPAATTFPQHGAHLIIRKL

SEQ ID NO: 27800 - protein, 422 aa, Arabidopsis thaliana
  misc_feature (1)..(422): Ceres Seq. ID no. 2028494
MGDMRESNQMDQVAHSLPLPLDADFLPRMMPFLHHTVLKHGKKCFTWYGPYPNVIVMDPETLREIMSKHELFPKPKIGSHNHVFLSGLLNHEGPKWSKHRSILNPAFRIDNLKSILPAFNSSCKEMLEEWERLASAKGTMELDSWTHCHDLTRNMLARASFGDSYKDGIKIFEIQQEQIDLGLLAIRAVYIPGSKFLPTKFNRRLRETERDMRAMFKAMIETKEEEIKRGRAGQNVTSSLFVWTLVALSQHQDWQNKARDEISQAFGNNEPDFEGLSHLKVVTMILHEVLRLYSPAYFTCRITKQEVKLERFSLPEGVVVTIPMLLVHHDSDLWGDDVKEFKPERFANGVAGATKGRLSFLPFSSGPRTCIGQNFSMLQAKLFLAMVLQRFSVELSPSYTHAPFPAATTFPQHGAHLIIRKL

SEQ ID NO: 27801 - protein, 419 aa, Arabidopsis thaliana
  misc_feature (1)..(419): Ceres Seq. ID no. 2028495
MRESNQMDQVAHSLPLPLDADFLPRMMPFLHHTVLKHGKKCFTWYGPYPNVIVMDPETLREIMSKHELFPKPKIGSHNHVFLSGLLNHEGPKWSKHRSILNPAFRIDNLKSILPAFNSSCKEMLEEWERLASAKGTMELDSWTHCHDLTRNMLARASFGDSYKDGIKIFEIQQEQIDLGLLAIRAVYIPGSKFLPTKFNRRLRETERDMRAMFKAMIETKEEEIKRGRAGQNVTSSLFVWTLVALSQHQDWQNKARDEISQAFGNNEPDFEGLSHLKVVTMILHEVLRLYSPAYFTCRITKQEVKLERFSLPEGVVVTIPMLLVHHDSDLWGDDVKEFKPERFANGVAGATKGRLSFLPFSSGPRTCIGQNFSMLQAKLFLAMVLQRFSVELSPSYTHAPFPAATTFPQHGAHLIIRKL

SEQ ID NO: 27802 - DNA, 846 bp, Arabidopsis thaliana
  misc_feature (1)..(846): Ceres Seq. ID no. 1989714
atgacgacgttcaattactatttagcggagcatccaacgatcgttaacttccgttggagtccaacccaatcctacgcctccacgtggtctttcctcttcaccgccgtctcatcttacatcatcgccgccgtcactctccacctcctcctcctcataaccctctccctctctaaccgccgccgcggattctccctcggtccaatcccagctctacacagcttaaccatttccataatctccgccgtcatattcgtcggtatcctcctctccgccgcagcagagatcagagacacgcggtggctatggcgtcgcacccgcaccactgctctccaatggttcctctgctttcccgtaggtacacgcgcttcgggacgcgtgttcttctggtcatacgcgttttacctctcaagattccttcacttgttccgtactttcttctccgtgatacgacgtcgtaaactcagcttcttccagcttatcaaccagtcttctcttctctgtatctccttcctctggctcgaatattcccaatcctttcaggtggtagcgatactattaacgaccgtttcgtacgccgttgtgtacggttacaggttctggacggagattgggttgcgtggcgcgtgttttccgtttgtcggaaactgtcaagccattctgttagggtgtatgacggtttgccacgtaggcgtactctgtatacacctggtcaaacgcggcggttgtaacggtatcggtgcttggttgtttaactctgttcttaacgccgttatcacgttgctctacttgaagttttattgcaagacgcgttcaatgatgaccaaggctaatcacaacaccacataa

SEQ ID NO: 27803 - protein, 281 aa, Arabidopsis thaliana
  misc_feature (1)..(281): Ceres Seq. ID no. 2037343
MTTFNYYLAEHPTIVNFRWSPTQSYASTWSFLFTAVSSYIIAAVTLHLLLLITLSLSNRRRGFSLGPIPALHSLTISIISAVIFVGILLSAAAEIRDTRWLWRRTRTTALQWFLCFPVGTRASGRVFFWSYAFYLSRFLHLFRTFFSVIRRRKLSFFQLINQSSLLCISFLWLEYSQSFQVVAILLTTVSYAVVYGYRFWTEIGLRGACFPFVGNCQAILLGCMTVCHVGVLCIHLVKRGGCNGIGAWLFNSVLNAVITLLYLKFYCKTRSMMTKANHNTT

SEQ ID NO: 27804 - DNA, 1542 bp, Arabidopsis thaliana
  misc_feature (1)..(1542): Ceres Seq. ID no. 1989744
atgggtgtgattagaacctcaagaacgatggggttaggacagtgcatggtttatgttgtcgtcctaagtgccattgcggctacagtgacatcatacccttacacatcccctcaaactccacattacaattctccaagccatgaacacaaaatccctaagtacacaccacatccaaaaccatctatttacagctcttcaccacctccatcatactactctccttctccaaaggttgattacaagtctccaccaccatcatacgtttacagttccccaccaccaccatactactctccgtctccaaaggttgactacaagtccctaccacccccatacgtctacagttccccacccccaccatactactctccttcaccaaaggttaactacaagtctccaccgccaccatacgtctacagctctccaccaccaccatactacagtccatctccaaagggtgactacaagtctccaccacccccatacgtctacagttccccacccccaccatactactctccttctccaaaggttgactacaagtctccaccaccaccatacgtctacagctccccaccaccaccatactacagtccaactccaaaggttgactacaagtccccaccacccccatacgtctacagctccccacccccaccatactacagtccatctccaaaggttgactacaagtctccaccaccaccatacgtctacagctccccacccccaccatactactctccttcaccaaaggttaactacaagtctccaccaccaccatactacagatctccaccaccaccatactacagtccatctccaaaggttgattacaagtccccaccacccccatacgtctacagttccccacccccaccatactactctccttctccaaaggttgactacaagtctccaccaccaccatacgtctacagctccccaccaccaccatactacagtccaactccaaaggttgactacaagtccccaccacccccatacgtctacagctccccaccaccaccatactatagtccatctccaaaggttgactacaagtccccaccacccccatacgtctacagttccccacccccaccatactactctccttcaccaaaagttgactataagtctccaccaccaccatacgtctataactccccacccccaccatattactctccttctccaaaagttgactacaagtctccacctccaccatacatctataactccccacccccaccatattattctccttcaccaaaggtaaactacaaaactccaccaccaccatacgtctatagctccccaccaccaccatactactctccttctccaaaggttaactacaagtccccaccaccaccatatgtctacagctccccacctccaccgtactactccccttctccaaatgtcgactacaaatctcccccaccaccatatgtctacagctcaccacccacaccatactactctccttcttctaaagtcacttacaagtctcccccaccaccatatgtctactag

SEQ ID NO: 27805 - protein, 513 aa, Arabidopsis thaliana
  misc_feature (1)..(513): Ceres Seq. ID no. 2028747
MGVIRTSRTMGLGQCMVYVVVLSAIAATVTSYPYTSPQTPHYNSPSHEHKIPKYTPHPKPSIYSSSPPPSYYSPSPKVDYKSPPPSYVYSSPPPPYYSPSPKVDYKSLPPPYVYSSPPPPYYSPSPKVNYKSPPPPYVYSSPPPPYYSPSPKGDYKSPPPPYVYSSPPPPYYSPSPKVDYKSPPPPYVYSSPPPPYYSPTPKVDYKSPPPPYVYSSPPPPYYSPSPKVDYKSPPPPYVYSSPPPPYYSPSPKVNYKSPPPPYYRSPPPPYYSPSPKVDYKSPPPPYVYSSPPPPYYSPSPKVDYKSPPPPYVYSSPPPPYYSPTPKVDYKSPPPPYVYSSPPPPYYSPSPKVDYKSPPPPYVYSSPPPPYYSPSPKVDYKSPPPPYVYNSPPPPYYSPSPKVDYKSPPPPYIYNSPPPPYYSPSPKVNYKTPPPPYVYSSPPPPYYSPSPKVNYKSPPPPYVYSSPPPPYYSPSPNVDYKSPPPPYVYSSPPTPYYSPSSKVTYKSPPPPYVY

SEQ ID NO: 27806 - protein, 504 aa, Arabidopsis thaliana
  misc_feature (1)..(504): Ceres Seq. ID no. 2028748
MGLGQCMVYVVVLSAIAATVTSYPYTSPQTPHYNSPSHEHKIPKYTPHPKPSIYSSSPPPSYYSPSPKVDYKSPPPSYVYSSPPPPYYSPSPKVDYKSLPPPYVYSSPPPPYYSPSPKVNYKSPPPPYVYSSPPPPYYSPSPKGDYKSPPPPYVYSSPPPPYYSPSPKVDYKSPPPPYVYSSPPPPYYSPTPKVDYKSPPPPYVYSSPPPPYYSPSPKVDYKSPPPPYVYSSPPPPYYSPSPKVNYKSPPPPYYRSPPPPYYSPSPKVDYKSPPPPYVYSSPPPPYYSPSPKVDYKSPPPPYVYSSPPPPYYSPTPKVDYKSPPPPYVYSSPPPPYYSPSPKVDYKSPPPPYVYSSPPPPYYSPSPKVDYKSPPPPYVYNSPPPPYYSPSPKVDYKSPPPPYIYNSPPPPYYSPSPKVNYKTPPPPYVYSSPPPPYYSPSPKVNYKSPPPPYVYSSPPPPYYSPSPNVDYKSPPPPYVYSSPPTPYYSPSSKVTYKSPPPPYVY

SEQ ID NO: 27807 - protein, 498 aa, Arabidopsis thaliana
  misc_feature (1)..(498): Ceres Seq. ID no. 2028749
MVYVVVLSAIAATVTSYPYTSPQTPHYNSPSHEHKIPKYTPHPKPSIYSSSPPPSYYSPSPKVDYKSPPPSYVYSSPPPPYYSPSPKVDYKSLPPPYVYSSPPPPYYSPSPKVNYKSPPPPYVYSSPPPPYYSPSPKGDYKSPPPPYVYSSPPPPYYSPSPKVDYKSPPPPYVYSSPPPPYYSPTPKVDYKSPPPPYVYSSPPPPYYSPSPKVDYKSPPPPYVYSSPPPPYYSPSPKVNYKSPPPPYYRSPPPPYYSPSPKVDYKSPPPPYVYSSPPPPYYSPSPKVDYKSPPPPYVYSSPPPPYYSPTPKVDYKSPPPPYVYSSPPPPYYSPSPKVDYKSPPPPYVYSSPPPPYYSPSPKVDYKSPPPPYVYNSPPPPYYSPSPKVDYKSPPPPYIYNSPPPPYYSPSPKVNYKTPPPPYVYSSPPPPYYSPSPKVNYKSPPPPYVYSSPPPPYYSPSPNVDYKSPPPPYVYSSPPTPYYSPSSKVTYKSPPPPYVY

SEQ ID NO: 27808 - protein, 380 aa, Arabidopsis thaliana
  misc_feature (1)..(380): Ceres Seq. ID no. 2028750
MNTKSLSTHHIQNHLFTALHHLHHTTLLLQRLITSLHHHHTFTVPHHHHTTLRLQRLTTSPYHPHTSTVPHPHHTTLLHQRLTTSLHRHHTSTALHHHHTTVHLQRVTTSLHHPHTSTVPHPHHTTLLLQRLTTSLHHHHTSTAPHHHHTTVQLQRLTTSPHHPHTSTAPHPHHTTVHLQRLTTSLHHHHTSTAPHPHHTTLLHQRLTTSLHHHHTTDLHHHHTTVHLQRLITSPHHPHTSTVPHPHHTTLLLQRLTTSLHHHHTSTAPHHHHTTVQLQRLTTSPHHPHTSTAPHHHHTIVHLQRLTTSPHHPHTSTVPHPHHTTLLHQKLTISLHHHHTSITPHPHHITLLLQKLTTSLHLHHTSITPHPHHIILLHQR

SEQ ID NO: 27809 - DNA, 1047 bp, Arabidopsis thaliana
  misc_feature (1)..(1047): Ceres Seq. ID no. 2040308
atgggacacttcttgataggttttcttgtagttgtcttgtccgtgggaaatgttattgaagaagcaaatggtgaaatacctagaaccacattggaaaaaatagagaggatgaatcaaaagggtccttatttgggaattgtagctccaaacaactatgagcttaaccctcttctcggttctaaagcctatttcccatcttcttcgttgcctttcatcgatttcgcaggtcgaaaatttcgatttggaaaattatcaaaccaaccagtgataatcgtgatgtcgggattaggaatggtgaatgcaggagtaacaacacaattactggtgagcctctttaggctgaaaggagttttgcattatggaatcgctggaaacgcagatgttaaccttgagattggcgacgtcactattcctcaatattgggcacactctggcctttggaattggcagaggtatggagatgggattgacaacgaattagctcttgaatccggcggagactatactcgggaagttggttatctccagttttccaaatatagtaaccgaaccgataacttgcttaatcgagtttggtatcaaccggaagaaatcttcccggtcaccggaactcctgaagagcggcaacatgtgttctggattcccgttgacaagtcctacttgaaacttgcacgcaaactcgaggacacgaagctaccgcagtgtgttaacaccacatgccttcctcgaccaccgaaggtcaccatcgttaaacgtggtatgagtgcaagtgttttcatcgacaacgcagcttaccggactttcctcaactccaagtttaacgccaccgccgttgaaatggagagcgccgccgtggctctcatttcccaccagcaaaacctccctttcatcgtcatccgtgccctctccgatctcgctggcggcggctccgacgtctccaacgaggccagcatattcagcagcctcgccgcagaaaactccgtcgatattctcgttaagttcgttgctttgttgcctccacacgaaagcaagattcaatcagaatga

SEQ ID NO: 27810 - protein, 348 aa, Arabidopsis thaliana
  misc_feature (1)..(348): Ceres Seq. ID no. 2040309
MGHFLIGFLVVVLSVGNVIEEANGEIPRTTLEKIERMNQKGPYLGIVAPNNYELNPLLGSKAYFPSSSLPFIDFAGRKFRFGKLSNQPVIIVMSGLGMVNAGVTTQLLVSLFRLKGVLHYGIAGNADVNLEIGDVTIPQYWAHSGLWNWQRYGDGIDNELALESGGDYTREVGYLQFSKYSNRTDNLLNRVWYQPEEIFPVTGTPEERQHVFWIPVDKSYLKLARKLEDTKLPQCVNTTCLPRPPKVTIVKRGMSASVFIDNAAYRTFLNSKFNATAVEMESAAVALISHQQNLPFIVIRALSDLAGGGSDVSNEASIFSSLAAENSVDILVKFVALLPPHESKIQSE

SEQ ID NO: 27811 - protein, 312 aa, Arabidopsis thaliana
  misc_feature (1)..(312): Ceres Seq. ID no. 2040310
MNQKGPYLGIVAPNNYELNPLLGSKAYFPSSSLPFIDFAGRKFRFGKLSNQPVIIVMSGLGMVNAGVTTQLLVSLFRLKGVLHYGIAGNADVNLEIGDVTIPQYWAHSGLWNWQRYGDGIDNELALESGGDYTREVGYLQFSKYSNRTDNLLNRVWYQPEEIFPVTGTPEERQHVFWIPVDKSYLKLARKLEDTKLPQCVNTTCLPRPPKVTIVKRGMSASVFIDNAAYRTFLNSKFNATAVEMESAAVALISHQQNLPFIVIRALSDLAGGGSDVSNEASIFSSLAAENSVDILVKFVALLPPHESKIQSE

SEQ ID NO: 27812 - protein, 256 aa, Arabidopsis thaliana
  misc_feature (1)..(256): Ceres Seq. ID no. 2040311
MSGLGMVNAGVTTQLLVSLFRLKGVLHYGIAGNADVNLEIGDVTIPQYWAHSGLWNWQRYGDGIDNELALESGGDYTREVGYLQFSKYSNRTDNLLNRVWYQPEEIFPVTGTPEERQHVFWIPVDKSYLKLARKLEDTKLPQCVNTTCLPRPPKVTIVKRGMSASVFIDNAAYRTFLNSKFNATAVEMESAAVALISHQQNLPFIVIRALSDLAGGGSDVSNEASIFSSLAAENSVDILVKFVALLPPHESKIQSE

SEQ ID NO: 27813 - DNA, 2520 bp, Arabidopsis thaliana
  misc_feature (1)..(2520): Ceres Seq. ID no. 2041497
atgccactttgcaataatttctccggcaatctcgtcgtcgccgttgctctcttctttgccggcgccctatatatcttcaactaccaaaactatgtcaacactctgagaacaacacagtatccggtagatgagctagaggcggccttgtatacggcagccgccggaaacaacaagacggtgataataacgatggtgaacaaagcgtacgtgaaggaggttggaagagggagtacgatgcttgatctgtttttggagagtttttgggaaggagaagggactctaccacttttggaccatctaatggtggtggcagtggatcaaacggcctatgatcgctgccgtttcaagaggcttcactgctacaagatggagactgaagatggggttgacttagagggagagaaagtattcatgtcaaaagatttcattgagatgatgtggagaaggactcgcttgatcctagacgttcttcgtcgtggctacaatgttattttcacggacacggacgtgatgtggctaaggagtccattgtctcggttaaacatgagcttggatatgcaaataagcgtggacagaattaacgtgggaggacagttgatcaacacgggattctaccacgtccggtctaacaacaagaccatctcactcttccaaaaatggtacgacatgaggctaaactcgacggggatgaaggaacaagacgttctcaagaatctcctagactccggcttcttcaaccagttaggtctcaacgttggcttccttagtaccaccgaattcagcggtttttgccaagacagtcctcacatgggcgttgtcactaccgtccatgctaactgctgcctccacatccctgccaaagtctttgatctcactcgtgttcttcgtgattggaaacgctacaaagcgtcacatgtcaacagcaaatggagccctcatcttaagtctaatgtaagcatgagaatcttcagattcacgtcaatctcaccgcggattttgccgtcgaatcattactcaacattcccgttgaaacaaaacgtgtcttctctctcaccggcgaaatacattgcgggagctttacaagaacatatcaattctccggccccaaaagctggtaagaagatacacgcagatatcatcaaaactgggtttcaaccagatttgaatatatccatcaaactactcattcttcatttaaaatgcggttgcttgagttatgcacgccaagtgttcgacgaattacccaagccaacattatcggcttacaactacatgattagtgggtacttgaagcatggattggtaaaggaattacttcttctagttcaacggatgtcatactctggggaaaaggcagatgggtacacgctttccatggttctaaaggcttctaatagtcgtggctcgactatgatactgccgcgtagcttatgtaggttggtccatgcccggattataaaatgtgatgttgagctagatgatgtgttgattactgcacttgttgatacttatgtgaagagtgggaagttggagtctgcaaggactgtgtttgaaacaatgaaagatgagaatgttgtgtgttgtacatcaatgatctcaggttacatgaatcaaggttttgtagaggatgcggaagagattttcaatactaccaaagtgaaggatattgtagtttacaatgctatggtggaaggtttcagcagatcaggtgaaactgctaagagatcagttgacatgtatatttcgatgcaacgagctggtttccatccgaatatttcaactttcgctagcgtgattggagcgtgttcggttttgacgtcccatgaagttggtcagcaagtgcacgctcagattatgaagagtggagtttacacgcatatcaaaatggggagctctttgttagacatgtatgccaaatgcggagggatcaatgatgcaagaagagtctttgaccaaatgcaagagaaaaacgtattttcgtggacttcgatgattgatggatatggaaagaatggaaaccctgaggaagcactcgaactcttcactaggatgaaggaattccgtatagaacccaattatgtaacctttcttggtgctctctctgcttgttcacattctggtttagtcgataaaggttatgagatctttgagagcatgcagagagattattccatgaaaccaaagatggaacactatgcttgcatagttgatctcatgggacgagctggagatttgaataaagctttcgaatttgctagggcgatgccggaaaggcctgactcagatatttgggcagctcttctcagttcttgtaatttgcatggtaatgttgaactcgcaagcatagctgcgagtgagcttttcaaactgaatgctgataaaagacctggagcttatttagctttatccaatgtctacgcttctaatgataaatgggacaatgtgagcaagatccgagaagtgatgaaaagaagaaggatatctaaaactattggtcgtagttggaccagcgaagattga

SEQ ID NO: 27814 - protein, 839 aa, Arabidopsis thaliana
  misc_feature (1)..(839): Ceres Seq. ID no. 2041498
MPLCNNFSGNLVVAVALFFAGALYIFNYQNYVNTLRTTQYPVDELEAALYTAAAGNNKTVIITMVNKAYVKEVGRGSTMLDLFLESFWEGEGTLPLLDHLMVVAVDQTAYDRCRFKRLHCYKMETEDGVDLEGEKVFMSKDFIEMMWRRTRLILDVLRRGYNVIFTDTDVMWLRSPLSRLNMSLDMQISVDRINVGGQLINTGFYHVRSNNKTISLFQKWYDMRLNSTGMKEQDVLKNLLDSGFFNQLGLNVGFLSTTEFSGFCQDSPHMGVVTTVHANCCLHIPAKVFDLTRVLRDWKRYKASHVNSKWSPHLKSNVSMRIFRFTSISPRILPSNHYSTFPLKQNVSSLSPAKYIAGALQEHINSPAPKAGKKIHADIIKTGFQPDLNISIKLLILHLKCGCLSYARQVFDELPKPTLSAYNYMISGYLKHGLVKELLLLVQRMSYSGEKADGYTLSMVLKASNSRGSTMILPRSLCRLVHARIIKCDVELDDVLITALVDTYVKSGKLESARTVFETMKDENVVCCTSMISGYMNQGFVEDAEEIFNTTKVKDIVVYNAMVEGFSRSGETAKRSVDMYISMQRAGFHPNISTFASVIGACSVLTSHEVGQQVHAQIMKSGVYTHIKMGSSLLDMYAKCGGINDARRVFDQMQEKNVFSWTSMIDGYGKNGNPEEALELFTRMKEFRIEPNYVTFLGALSACSHSGLVDKGYEIFESMQRDYSMKPKMEHYACIVDLMGRAGDLNKAFEFARAMPERPDSDIWAALLSSCNLHGNVELASIAASELFKLNADKRPGAYLALSNVYASNDKWDNVSKIREVMKRRRISKTIGRSWTSED

SEQ ID NO: 27815 - protein, 776 aa, Arabidopsis thaliana
  misc_feature (1)..(776): Ceres Seq. ID no. 2041499
MVNKAYVKEVGRGSTMLDLFLESFWEGEGTLPLLDHLMVVAVDQTAYDRCRFKRLHCYKMETEDGVDLEGEKVFMSKDFIEMMWRRTRLILDVLRRGYNVIFTDTDVMWLRSPLSRLNMSLDMQISVDRINVGGQLINTGFYHVRSNNKTISLFQKWYDMRLNSTGMKEQDVLKNLLDSGFFNQLGLNVGFLSTTEFSGFCQDSPHMGVVTTVHANCCLHIPAKVFDLTRVLRDWKRYKASHVNSKWSPHLKSNVSMRIFRFTSISPRILPSNHYSTFPLKQNVSSLSPAKYIAGALQEHINSPAPKAGKKIHADIIKTGFQPDLNISIKLLILHLKCGCLSYARQVFDELPKPTLSAYNYMISGYLKHGLVKELLLLVQRMSYSGEKADGYTLSMVLKASNSRGSTMILPRSLCRLVHARIIKCDVELDDVLITALVDTYVKSGKLESARTVFETMKDENVVCCTSMISGYMNQGFVEDAEEIFNTTKVKDIVVYNAMVEGFSRSGETAKRSVDMYISMQRAGFHPNISTFASVIGACSVLTSHEVGQQVHAQIMKSGVYTHIKMGSSLLDMYAKCGGINDARRVFDQMQEKNVFSWTSMIDGYGKNGNPEEALELFTRMKEFRIEPNYVTFLGALSACSHSGLVDKGYEIFESMQRDYSMKPKMEHYACIVDLMGRAGDLNKAFEFARAMPERPDSDIWAALLSSCNLHGNVELASIAASELFKLNADKRPGAYLALSNVYASNDKWDNVSKIREVMKRRRISKTIGRSWTSED

SEQ ID NO: 27816 - protein, 761 aa, Arabidopsis thaliana
  misc_feature (1)..(761): Ceres Seq. ID no. 2041500
MLDLFLESFWEGEGTLPLLDHLMVVAVDQTAYDRCRFKRLHCYKMETEDGVDLEGEKVFMSKDFIEMMWRRTRLILDVLRRGYNVIFTDTDVMWLRSPLSRLNMSLDMQISVDRINVGGQLINTGFYHVRSNNKTISLFQKWYDMRLNSTGMKEQDVLKNLLDSGFFNQLGLNVGFLSTTEFSGFCQDSPHMGVVTTVHANCCLHIPAKVFDLTRVLRDWKRYKASHVNSKWSPHLKSNVSMRIFRFTSISPRILPSNHYSTFPLKQNVSSLSPAKYIAGALQEHINSPAPKAGKKIHADIIKTGFQPDLNISIKLLILHLKCGCLSYARQVFDELPKPTLSAYNYMISGYLKHGLVKELLLLVQRMSYSGEKADGYTLSMVLKASNSRGSTMILPRSLCRLVHARIIKCDVELDDVLITALVDTYVKSGKLESARTVFETMKDENVVCCTSMISGYMNQGFVEDAEEIFNTTKVKDIVVYNAMVEGFSRSGETAKRSVDMYISMQRAGFHPNISTFASVIGACSVLTSHEVGQQVHAQIMKSGVYTHIKMGSSLLDMYAKCGGINDARRVFDQMQEKNVFSWTSMIDGYGKNGNPEEALELFTRMKEFRIEPNYVTFLGALSACSHSGLVDKGYEIFESMQRDYSMKPKMEHYACIVDLMGRAGDLNKAFEFARAMPERPDSDIWAALLSSCNLHGNVELASIAASELFKLNADKRPGAYLALSNVYASNDKWDNVSKIREVMKRRRISKTIGRSWTSED

SEQ ID NO: 27817 - DNA, 2493 bp, Arabidopsis thaliana
  misc_feature (1)..(2493): Ceres Seq. ID no. 2044245
atgacaacggcgatgatgatattcgcggttttggttacagtggtggaggtggaagcacagactgagtgcgtgagcaagatagttccctgcttcaggttcttgaacacgacaacaaagccgtcgacggattgttgcaactcgatcaaggaagcgatggagaaagattttagctgtctctgcaccatctacaacactcctggtttactcgctcagttcaacatcactacagatcaagctctcggtctcaaccttcgatgtggagtcaacactgatctatccgcttgttccggttctggtgctccaccaccaccacctgatctatttcctccaccttcagctcaaatgctccctccacctccagcaaaaggtgcttgtaagagtcgtaactttagtttgggcagttttcaacagtcacaacatttagtttggtcagatatgtacttaagatcagtatcttcgtcacctgcacctccatcgccaccttcttcatcccgaccacgtccattgccacgtccatcaatgtcaaggagctttacgatagaaaacaaatgccaatacaccatatggcctgcaacctacggctataggagatcactagaaacaaccggttttgttcttgagaaaggagagacgcgtaccatcaaagcgccgtcatcatggataggtcgtttctggggtaggacactctgctccaccaactcaacagggggtttctcatgtgccacgggagactgcacctccggaaaaatcaagtgcctcggtatccccatagatccaacaacagtggtcgagtttaacctcgcttcttacggtgtcgactattatgtcgtcaacgtcttcaatggttacaacctccctttgcttgtgacccccgagaacaaaaactgcagaagcattgaatgcgttattgacatgaacgagacatgtccctcggagctaatggtgaacagtagtggccttggatcgcaccatccaatagcctgcatgaccacttgtcagagataccagttgccagagctttgctgtatcggactctcttctggggtggtcgtaccaccgggaatatgcaagcggacgatctactcgcggacattcaataacgtgtgcccaagcgcttatagttacgcctacgacgttgataacagcagtttcacttgtccaaacttctccaactttgtcatcacgttttgtccgtctagctcaacggtcccagaggcaggaaacatcaatagctcaacggtcccagaggcaggaaacatcaaaactggaacagaagcaaaaggaaatattccattgaggttaaaactcatacttggagtttcatcagtattggctacaatgatcattattgtgattgtgggaaaggttagagcaaataatatgagaaagagtgatttgaatgagaagaacatggaagcagtggtaatgttgaaacgatttagttatgtacaagtcaagaagatgacaaaatcatttgagaatgttcttgggaaagggggatttggaactgtctataaagggaagttacctgatggcagccgagatgttgcagtgaagatcttgaaggagtcaaacgaggatggagaagacttcatcaatgaaatagctagcatgagtaggacatctcatgctaatatcgtttctctacttggattctgttatgaagggaggaagaaagctataatttacgagttgatgccgaatggatccctcgacaagttcatctccaagaatatgtcggcgaagatggaatggaaaacgttatacaacattgcggtaggtgtgtctcatggcctagaatacttgcatagccattgtgtatcaaggattgtacatttcgatataaagccacagaacatactcatagatggagacttatgccctaagatttcggatttcggtcttgctaagctttgcaaaaataatgaaagcatcatttcaatgctacatgcaagaggcaccatagggtacattgctccagaagtgttctcccagaattttggaggagtttctcataagtctgatgtgtatagttatggaatggtggttcttgagatgattggagcaaggaacataggaagagctcaaaatgctggatccagtaatacttcaatgtactttccagattggatttataaagatcttgagaaaggagaaatcatgagttttttggcagatcaaataaccgaagaagaagatgagaagatagtaaagaaaatggtattggtgggtctgtggtgtattcagaccaatccatatgatcgtccaccaatgagcaaagttgttgaaatgttagagggaagtctagaggctctccagattccacctaagcctcttttatgtttacccgcaataacagctccaataacagttgatgaagacattcaagagacttcaagcttcttgaaaccaagtcaagatacttcatattattccgaacaaatagttcaagatattgtagaagagaatcaagatagctcaagatcttcctaa

SEQ ID NO: 27818 - protein, 830 aa, Arabidopsis thaliana
  misc_feature (1)..(830): Ceres Seq. ID no. 2044246
MTTAMMIFAVLVTVVEVEAQTECVSKIVPCFRFLNTTTKPSTDCCNSIKEAMEKDFSCLCTIYNTPGLLAQFNITTDQALGLNLRCGVNTDLSACSGSGAPPPPPDLFPPPSAQMLPPPPAKGACKSRNFSLGSFQQSQHLVWSDMYLRSVSSSPAPPSPPSSSRPRPLPRPSMSRSFTIENKCQYTIWPATYGYRRSLETTGFVLEKGETRTIKAPSSWIGRFWGRTLCSTNSTGGFSCATGDCTSGKIKCLGIPIDPTTVVEFNLASYGVDYYVVNVFNGYNLPLLVTPENKNCRSIECVIDMNETCPSELMVNSSGLGSHHPIACMTTCQRYQLPELCCIGLSSGVVVPPGICKRTIYSRTFNNVCPSAYSYAYDVDNSSFTCPNFSNFVITFCPSSSTVPEAGNINSSTVPEAGNIKTGTEAKGNIPLRLKLILGVSSVLATMIIIVIVGKVRANNMRKSDLNEKNMEAVVMLKRFSYVQVKKMTKSFENVLGKGGFGTVYKGKLPDGSRDVAVKILKESNEDGEDFINEIASMSRTSHANIVSLLGFCYEGRKKAIIYELMPNGSLDKFISKNMSAKMEWKTLYNIAVGVSHGLEYLHSHCVSRIVHFDIKPQNILIDGDLCPKISDFGLAKLCKNNESIISMLHARGTIGYIAPEVFSQNFGGVSHKSDVYSYGMVVLEMIGARNIGRAQNAGSSNTSMYFPDWIYKDLEKGEIMSFLADQITEEEDEKIVKKMVLVGLWCIQTNPYDRPPMSKVVEMLEGSLEALQIPPKPLLCLPAITAPITVDEDIQETSSFLKPSQDTSYYSEQIVQDIVEENQDSSRSS

SEQ ID NO: 27819 - protein, 826 aa, Arabidopsis thaliana
  misc_feature (1)..(826): Ceres Seq. ID no. 2044247
MMIFAVLVTVVEVEAQTECVSKIVPCFRFLNTTTKPSTDCCNSIKEAMEKDFSCLCTIYNTPGLLAQFNITTDQALGLNLRCGVNTDLSACSGSGAPPPPPDLFPPPSAQMLPPPPAKGACKSRNFSLGSFQQSQHLVWSDMYLRSVSSSPAPPSPPSSSRPRPLPRPSMSRSFTIENKCQYTIWPATYGYRRSLETTGFVLEKGETRTIKAPSSWIGRFWGRTLCSTNSTGGFSCATGDCTSGKIKCLGIPIDPTTVVEFNLASYGVDYYVVNVFNGYNLPLLVTPENKNCRSIECVIDMNETCPSELMVNSSGLGSHHPIACMTTCQRYQLPELCCIGLSSGVVVPPGICKRTIYSRTFNNVCPSAYSYAYDVDNSSFTCPNFSNFVITFCPSSSTVPEAGNINSSTVPEAGNIKTGTEAKGNIPLRLKLILGVSSVLATMIIIVIVGKVRANNMRKSDLNEKNMEAVVMLKRFSYVQVKKMTKSFENVLGKGGFGTVYKGKLPDGSRDVAVKILKESNEDGEDFINEIASMSRTSHANIVSLLGFCYEGRKKAIIYELMPNGSLDKFISKNMSAKMEWKTLYNIAVGVSHGLEYLHSHCVSRIVHFDIKPQNILIDGDLCPKISDFGLAKLCKNNESIISMLHARGTIGYIAPEVFSQNFGGVSHKSDVYSYGMVVLEMIGARNIGRAQNAGSSNTSMYFPDWIYKDLEKGEIMSFLADQITEEEDEKIVKKMVLVGLWCIQTNPYDRPPMSKVVEMLEGSLEALQIPPKPLLCLPAITAPITVDEDIQETSSFLKPSQDTSYYSEQIVQDIVEENQDSSRSS

SEQ ID NO: 27820 - protein, 825 aa, Arabidopsis thaliana
  misc_feature (1)..(825): Ceres Seq. ID no. 2044248
MIFAVLVTVVEVEAQTECVSKIVPCFRFLNTTTKPSTDCCNSIKEAMEKDFSCLCTIYNTPGLLAQFNITTDQALGLNLRCGVNTDLSACSGSGAPPPPPDLFPPPSAQMLPPPPAKGACKSRNFSLGSFQQSQHLVWSDMYLRSVSSSPAPPSPPSSSRPRPLPRPSMSRSFTIENKCQYTIWPATYGYRRSLETTGFVLEKGETRTIKAPSSWIGRFWGRTLCSTNSTGGFSCATGDCTSGKIKCLGIPIDPTTVVEFNLASYGVDYYVVNVFNGYNLPLLVTPENKNCRSIECVIDMNETCPSELMVNSSGLGSHHPIACMTTCQRYQLPELCCIGLSSGVVVPPGICKRTIYSRTFNNVCPSAYSYAYDVDNSSFTCPNFSNFVITFCPSSSTVPEAGNINSSTVPEAGNIKTGTEAKGNIPLRLKLILGVSSVLATMIIIVIVGKVRANNMRKSDLNEKNMEAVVMLKRFSYVQVKKMTKSFENVLGKGGFGTVYKGKLPDGSRDVAVKILKESNEDGEDFINEIASMSRTSHANIVSLLGFCYEGRKKAIIYELMPNGSLDKFISKNMSAKMEWKTLYNIAVGVSHGLEYLHSHCVSRIVHFDIKPQNILIDGDLCPKISDFGLAKLCKNNESIISMLHARGTIGYIAPEVFSQNFGGVSHKSDVYSYGMVVLEMIGARNIGRAQNAGSSNTSMYFPDWIYKDLEKGEIMSFLADQITEEEDEKIVKKMVLVGLWCIQTNPYDRPPMSKVVEMLEGSLEALQIPPKPLLCLPAITAPITVDEDIQETSSFLKPSQDTSYYSEQIVQDIVEENQDSSRSS

SEQ ID NO: 27821 - DNA, 957 bp, Arabidopsis thaliana
  misc_feature (1)..(957): Ceres Seq. ID no. 2044354
atggaaacaagcgacagaattagccctggtggtggtataggagcagaagttccatcagcgtatcatatggctccgagaccttcagatagccctgctaaccagtttatggggttgtctctccctcccatggaagccccaatgccttcttcaggggaagcctcagggaagaagaggagaggcagacctcgtaaatatgaagctaatggtgctcctttgccttcttcatcagttcctcttgtgaagaaacgagtaagaggcaagctcaatggttttgatatgaagaagatgcataagaccattgggttccattcttctggtgaaaggtttggtgttggtggtggtgttggtggtggtgttggatcaaatttcacgccgcatgtaatcacagtgaacactggtgaggatattactatgagaatcatctccttttcacaacaaggaccacgagctatttgtatcttatcagcaaatggagtgatatcaaacgttactcttcgccaacccgattcttgcggtggtactctcacctacgagggtcggtttgagatactgtctctgtctggttcattcatggaaacagagaatcaaggttcaaaaggtcggtctggtggcatgagtgtatctttggccggtcctgatggtcgtgttgtcggtggcggtgtcgctggcctgctcattgccgccactcctattcaggttgttgttggcagttttataacgagtgatcaacaagatcatcagaaaccgaggaagcaaagagtcgagcatgcccctgcagcagtcatgtcagtgcctcctcctccttctcctcctcctccggcggcttctgttttctcaccgacaaacccggacagagagcagccgccatcttcattcggtatctccagctggaccaacggacaggacatgccgagaaactcagccactgacatcaacatatctttaccagtcgactga

SEQ ID NO: 27822 - protein, 318 aa, Arabidopsis thaliana
  misc_feature (1)..(318): Ceres Seq. ID no. 2044355
METSDRISPGGGIGAEVPSAYHMAPRPSDSPANQFMGLSLPPMEAPMPSSGEASGKKRRGRPRKYEANGAPLPSSSVPLVKKRVRGKLNGFDMKKMHKTIGFHSSGERFGVGGGVGGGVGSNFTPHVITVNTGEDITMRIISFSQQGPRAICILSANGVISNVTLRQPDSCGGTLTYEGRFEILSLSGSFMETENQGSKGRSGGMSVSLAGPDGRVVGGGVAGLLIAATPIQVVVGSFITSDQQDHQKPRKQRVEHAPAAVMSVPPPPSPPPPAASVFSPTNPDREQPPSSFGISSWTNGQDMPRNSATDINISLPVD

SEQ ID NO: 27823 - protein, 296 aa, Arabidopsis thaliana
  misc_feature (1)..(296): Ceres Seq. ID no. 2044356
MAPRPSDSPANQFMGLSLPPMEAPMPSSGEASGKKRRGRPRKYEANGAPLPSSSVPLVKKRVRGKLNGFDMKKMHKTIGFHSSGERFGVGGGVGGGVGSNFTPHVITVNTGEDITMRIISFSQQGPRAICILSANGVISNVTLRQPDSCGGTLTYEGRFEILSLSGSFMETENQGSKGRSGGMSVSLAGPDGRVVGGGVAGLLIAATPIQVVVGSFITSDQQDHQKPRKQRVEHAPAAVMSVPPPPSPPPPAASVFSPTNPDREQPPSSFGISSWTNGQDMPRNSATDINISLPVD

SEQ ID NO: 27824 - protein, 283 aa, Arabidopsis thaliana
  misc_feature (1)..(283): Ceres Seq. ID no. 2044357
MGLSLPPMEAPMPSSGEASGKKRRGRPRKYEANGAPLPSSSVPLVKKRVRGKLNGFDMKKMHKTIGFHSSGERFGVGGGVGGGVGSNFTPHVITVNTGEDITMRIISFSQQGPRAICILSANGVISNVTLRQPDSCGGTLTYEGRFEILSLSGSFMETENQGSKGRSGGMSVSLAGPDGRVVGGGVAGLLIAATPIQVVVGSFITSDQQDHQKPRKQRVEHAPAAVMSVPPPPSPPPPAASVFSPTNPDREQPPSSFGISSWTNGQDMPRNSATDINISLPVD

SEQ ID NO: 27825 - DNA, 2028 bp, Arabidopsis thaliana
  misc_feature (1)..(2028): Ceres Seq. ID no. 2046276
atgaggagtatgatgatggagagagagggaaggaatgagatagaaagagaagtaatagatgacttggaagagacgcaaaacgaaggagatgatttcaagtcaatacctccatggaaggaacaaatcactttcagaggaattgttgcaagtttaatcattggtataatctacagtgtgatcgtgatgaaactaaacctaacaacaggtttggtcccaaacctaaatgtctctgcagcacttttagcctttgtcttccttagaagctggaccaagctgttgaccaaagccgggattgtgactaaaccgttcactaaacaagagaacactgttgtccaaacatgtgctgttgcttgttacagcattgcagttggaggtgggtttggttcataccttcttggtttgaacagaattacttatgaacagtcaggaggaactcacactgatgggaattatccggaaggcacgaaagagcctggaatcggttggatgaccgctttcttgttctttacttgctttgttggtcttttagcattggttcctctaagaaagatcatgatcatagactacaagctgacatatccaagtggaacagctaccgcggttttgatcaacggtttccacactcctaaaggcaataaaatggccaagaaacaagtgtttgggtttgtgaagtacttctcatttagcttcatttgggctttcttccaatggttcttctctggtggtacagagtgcggtttcattcagtttccaactttcgggttagaagctttgaagaacacattctacttcgactttagcatgacatacgttggagcaggaatgatctgtccccatattgtcaatatatctttgctttttggcgcggttctgtcttggggaatcatgtggccactcattaaaggtcttaaaggagattggttcccatcaactcttcctgaaaacagcatgaagagtctcaatggttacaaggtgtttatatcaatctcattgatcctcggagacgggctttaccaattcatcaagatactttttaagacaggaataaacatgtacgtcaagttaaacaatcgcaactctgggaaatctaattcggagaaagataagcaatctattgcagatcttaaaagagatgagatctttgtaagagacagcattccattatgggttgcagcagtaggatacgcagcgttctctgttgtctcgatcatcgcgatccctataatgttccccgagctgaaatggtacttcatagtcgtagcttacatgttagctccatcgttaggtttcagtaacgcttatggagcagggctaacagatatgaacatggcttataactatggtaaagtcgctctgtttatcttagccgctatggcagggaaacaaaatggtgtagtcgcgggacttgtcggatgcgggttgataaaatcgattgtatcgatttcttctgacctaatgcacgatttcaagacaggacatttgactctgacttcacctaggtcgatgcttgtgagtcaagcgatcggtacagcgatcggatgcgttgtggcgcctctaactttcttcttgttttataaagctttcgatgtcgggaaccaggagggagagtacaaagctccttacgctttggtatacagaaacatggcaattcttggagttgaaggtttctctgctttgcctcaacattgtttacagctttgttacgggtttttcgcattcgcggtggcggcaaatctcgttagggataggttaccggataagatagggaattgggttccattaccgatggcaatggcggttccgtttcttgttggagggtactttgctattgatatgtgtgtgggaagtttgattgtgtttgcttggaatatgagagatcgagttaaagccggtttaatggtaccggcggttgcttccggtttgatatgtggagatggtctatggattttgccgtcgtcggttcttgctttggccggcgttagacctcctatatgtatgggcttcatgccgagtaaatattcgagttaa

SEQ ID NO: 27826 - protein, 675 aa, Arabidopsis thaliana
  misc_feature (1)..(675): Ceres Seq. ID no. 2046277
MRSMMMEREGRNEIEREVIDDLEETQNEGDDFKSIPPWKEQITFRGIVASLIIGIIYSVIVMKLNLTTGLVPNLNVSAALLAFVFLRSWTKLLTKAGIVTKPFTKQENTVVQTCAVACYSIAVGGGFGSYLLGLNRITYEQSGGTHTDGNYPEGTKEPGIGWMTAFLFFTCFVGLLALVPLRKIMIIDYKLTYPSGTATAVLINGFHTPKGNKMAKKQVFGFVKYFSFSFIWAFFQWFFSGGTECGFIQFPTFGLEALKNTFYFDFSMTYVGAGMICPHIVNISLLFGAVLSWGIMWPLIKGLKGDWFPSTLPENSMKSLNGYKVFISISLILGDGLYQFIKILFKTGINMYVKLNNRNSGKSNSEKDKQSIADLKRDEIFVRDSIPLWVAAVGYAAFSVVSIIAIPIMFPELKWYFIVVAYMLAPSLGFSNAYGAGLTDMNMAYNYGKVALFILAAMAGKQNGVVAGLVGCGLIKSIVSISSDLMHDFKTGHLTLTSPRSMLVSQAIGTAIGCVVAPLTFFLFYKAFDVGNQEGEYKAPYALVYRNMAILGVEGFSALPQHCLQLCYGFFAFAVAANLVRDRLPDKIGNWVPLPMAMAVPFLVGGYFAIDMCVGSLIVFAWNMRDRVKAGLMVPAVASGLICGDGLWILPSSVLALAGVRPPICMGFMPSKYSS

SEQ ID NO: 27827 - protein, 672 aa, Arabidopsis thaliana
  misc_feature (1)..(672): Ceres Seq. ID no. 2046278
MMMEREGRNEIEREVIDDLEETQNEGDDFKSIPPWKEQITFRGIVASLIIGIIYSVIVMKLNLTTGLVPNLNVSAALLAFVFLRSWTKLLTKAGIVTKPFTKQENTVVQTCAVACYSIAVGGGFGSYLLGLNRITYEQSGGTHTDGNYPEGTKEPGIGWMTAFLFFTCFVGLLALVPLRKIMIIDYKLTYPSGTATAVLINGFHTPKGNKMAKKQVFGFVKYFSFSFIWAFFQWFFSGGTECGFIQFPTFGLEALKNTFYFDFSMTYVGAGMICPHIVNISLLFGAVLSWGIMWPLIKGLKGDWFPSTLPENSMKSLNGYKVFISISLILGDGLYQFIKILFKTGINMYVKLNNRNSGKSNSEKDKQSIADLKRDEIFVRDSIPLWVAAVGYAAFSVVSIIAIPIMFPELKWYFIVVAYMLAPSLGFSNAYGAGLTDMNMAYNYGKVALFILAAMAGKQNGVVAGLVGCGLIKSIVSISSDLMHDFKTGHLTLTSPRSMLVSQAIGTAIGCVVAPLTFFLFYKAFDVGNQEGEYKAPYALVYRNMAILGVEGFSALPQHCLQLCYGFFAFAVAANLVRDRLPDKIGNWVPLPMAMAVPFLVGGYFAIDMCVGSLIVFAWNMRDRVKAGLMVPAVASGLICGDGLWILPSSVLALAGVRPPICMGFMPSKYSS

SEQ ID NO: 27828 - protein, 671 aa, Arabidopsis thaliana
  misc_feature (1)..(671): Ceres Seq. ID no. 2046279
MMEREGRNEIEREVIDDLEETQNEGDDFKSIPPWKEQITFRGIVASLIIGIIYSVIVMKLNLTTGLVPNLNVSAALLAFVFLRSWTKLLTKAGIVTKPFTKQENTVVQTCAVACYSIAVGGGFGSYLLGLNRITYEQSGGTHTDGNYPEGTKEPGIGWMTAFLFFTCFVGLLALVPLRKIMIIDYKLTYPSGTATAVLINGFHTPKGNKMAKKQVFGFVKYFSFSFIWAFFQWFFSGGTECGFIQFPTFGLEALKNTFYFDFSMTYVGAGMICPHIVNISLLFGAVLSWGIMWPLIKGLKGDWFPSTLPENSMKSLNGYKVFISISLILGDGLYQFIKILFKTGINMYVKLNNRNSGKSNSEKDKQSIADLKRDEIFVRDSIPLWVAAVGYAAFSVVSIIAIPIMFPELKWYFIVVAYMLAPSLGFSNAYGAGLTDMNMAYNYGKVALFILAAMAGKQNGVVAGLVGCGLIKSIVSISSDLMHDFKTGHLTLTSPRSMLVSQAIGTAIGCVVAPLTFFLFYKAFDVGNQEGEYKAPYALVYRNMAILGVEGFSALPQHCLQLCYGFFAFAVAANLVRDRLPDKIGNWVPLPMAMAVPFLVGGYFAIDMCVGSLIVFAWNMRDRVKAGLMVPAVASGLICGDGLWILPSSVLALAGVRPPICMGFMPSKYSS

SEQ ID NO: 27829 - DNA, 909 bp, Arabidopsis thaliana
  misc_feature (1)..(909): Ceres Seq. ID no. 2047346
atgttgtctttattctctgttgtttttacttttctagctctttttctcatccctggtctcttcatctctcggcgactaaatgttcctttgtcgttgacaaatatcctcagattcatcaaaatcatagcttctaaatacgatgatgaggaagaaaggaacgagaaacgtggtacaatgggagagaaacagaaacgagggagaaatataatgccaaagcatgtggcggttatattggacggaaacagacgttgggctgaaaaacgaggactcgggacatcggaaggccacgaggccggagcgagaaggctcatggagaatgctaaggattgtttcgctatggggacaaacactatctcactctttgctttctccaccgaaaattgggaaagaccagaggatgaagttaagtgcttgatggccttgtttgagaaatacttagcgtctgatatgccttacctccgaagtgataagatcaagatctcggttatcgggaaccgtacaaaactccccgagtcgcttctaggtttgatagaagaggtagaggaagctacaaagagttacgaagggaagaatctcattatagcaatagactatagtggaagatatgatatcttacaagcatgcaaaagtcttgcaaataaagtgaaagacgggctgattcaagtggaggacattaacgagaaggcgatggagaaagagttgttgacaaagtgtagcgaattcccaaaccctgacctgttgatcagaacaagcggagagcaaaggatcagtaacttctttttatggcaatctgcttacactgagctttactttccaactgttttgtggcctgattttggcgaagctgagtatcttgaggccttgacttggtatcagcaaaggcagaggcgattcggtcgacgagtttaa

SEQ ID NO: 27830 - protein, 302 aa, Arabidopsis thaliana
  misc_feature (1)..(302): Ceres Seq. ID no. 2047347
MLSLFSVVFTFLALFLIPGLFISRRLNVPLSLTNILRFIKIIASKYDDEEERNEKRGTMGEKQKRGRNIMPKHVAVILDGNRRWAEKRGLGTSEGHEAGARRLMENAKDCFAMGTNTISLFAFSTENWERPEDEVKCLMALFEKYLASDMPYLRSDKIKISVIGNRTKLPESLLGLIEEVEEATKSYEGKNLIIAIDYSGRYDILQACKSLANKVKDGLIQVEDINEKAMEKELLTKCSEFPNPDLLIRTSGEQRISNFFLWQSAYTELYFPTVLWPDFGEAEYLEALTWYQQRQRRFGRRV

SEQ ID NO: 27831 - protein, 244 aa, Arabidopsis thaliana
  misc_feature (1)..(244): Ceres Seq. ID no. 2047348
MGEKQKRGRNIMPKHVAVILDGNRRWAEKRGLGTSEGHEAGARRLMENAKDCFAMGTNTISLFAFSTENWERPEDEVKCLMALFEKYLASDMPYLRSDKIKISVIGNRTKLPESLLGLIEEVEEATKSYEGKNLIIAIDYSGRYDILQACKSLANKVKDGLIQVEDINEKAMEKELLTKCSEFPNPDLLIRTSGEQRISNFFLWQSAYTELYFPTVLWPDFGEAEYLEALTWYQQRQRRFGRRV

SEQ ID NO: 27832 - protein, 233 aa, Arabidopsis thaliana
  misc_feature (1)..(233): Ceres Seq. ID no. 2047349
MPKHVAVILDGNRRWAEKRGLGTSEGHEAGARRLMENAKDCFAMGTNTISLFAFSTENWERPEDEVKCLMALFEKYLASDMPYLRSDKIKISVIGNRTKLPESLLGLIEEVEEATKSYEGKNLIIAIDYSGRYDILQACKSLANKVKDGLIQVEDINEKAMEKELLTKCSEFPNPDLLIRTSGEQRISNFFLWQSAYTELYFPTVLWPDFGEAEYLEALTWYQQRQRRFGRRV

SEQ ID NO: 27833 - DNA, 1944 bp, Arabidopsis thaliana
  misc_feature (1)..(1944): Ceres Seq. ID no. 2047670
atgccttctttagatgttatcactccacaagcttatcttactccactggggtctcagagtatcaaccatgctaaatttttacaaatcccatggagacaatttgtcttcacaaagcctttaggtctctctaaatcaaccaaactcgacgaagccgtgacattgatagagaattcatcatcctcgccgtccaatctctccactcccgaagcttacacagaccttcttcatgcttgtatctccgctaaatcactccaccatggtataaaaatatgttctttgattctcaacaatcctagtctccgtcacaaccccaaattgctaagcaagctcattaccctattctcggtttgtcgccgattggatcttgctcggaaaatctttgacgatgtaactgattcgagtctacttactgagaaagtctgggcagctatggcgattgggtattctagaaacgggtcaccaagagacgctttgatcgtctatgtggatatgttgtgtagcttcattgagcctgggaatttttcgatatccgtggcgttgaaagcgtgcgtggatttgaaagatcttcgggttggtagaggaatccatgcccagattgtgaaacgaaaggagaaggttgaccaagtagtgtataatgtgctcttgaagctttatatggaaagtggcttatttgatgatgcacgtaaggtgttcgatggaatgtctgagagaaatgttgttacttggaattctttaatttcggtactcagtaagaaagttcgggttcatgagatgtttaatctgttcaggaagatgcaggaagagatgatcgggtttagttgggcgacgttgacgacaatattacccgcttgttcacgtgtcgctgctcttctcaccgggaaagagattcatgcacagattctgaaatcgaaagagaaacctgatgttccattgcttaattcattgatggatatgtatgggaaatgtggagaggttgagtattctcggagagtctttgatgtgatgttaactaaggatttggcttcatggaacataatgctaaactgttatgcaatcaacggaaatattgaagaagtgataaatctgtttgaatggatgatagagtcaggcgttgcaccagatgggattacctttgttgctttgttatctgggtgtagcgatacagggcttacggaatatggtctaagtttgtttgaacgcatgaaaacggagttcagagtttcaccggctttggagcattatgcttgtttggttgacatcttggggcgagctggtaagatcaaagaagcagtgaaggtgatagaaacaatgccatttaagccaagtgcgtccatttggggatcactgctcaactcttgcaggcttcatgggaatgtttcagtgggagagattgcagcaaaagagttgtttgttcttgaacctcataatccagggaactacgttatggtttctaacatatatgctgatgcaaagatgtgggacaatgtggataagattcgagagatgatgaaacaaagaggggtcaaaaaggaagctggttgcagttgggtacaggttaaagacaagattcaaatctttgttgcaggaggtggttatgagtttcgtaattctgatgagtataagaaagtatggacagaactacaagaagcaattgaaaaatccggttattcgcctaatacgagtgtggtgcttcatgatgttgatgaagaaaccaaagcaaattgggtttgtggacacagcgagagactcgcgacaacctactccctaatccacacaggtgaaggggttccaattaggattaccaagaatctcagagtatgtgcagactgtcattcatggatgaagattgtgtcacaagtaactaggagagtcatagtcctcagagacacaaaacgattccaccatttcgtcgacggaatctgctcatgtaaagactactggtga

SEQ ID NO: 27834 - protein, 647 aa, Arabidopsis thaliana
  misc_feature (1)..(647): Ceres Seq. ID no. 2047671
MPSLDVITPQAYLTPLGSQSINHAKFLQIPWRQFVFTKPLGLSKSTKLDEAVTLIENSSSSPSNLSTPEAYTDLLHACISAKSLHHGIKICSLILNNPSLRHNPKLLSKLITLFSVCRRLDLARKIFDDVTDSSLLTEKVWAAMAIGYSRNGSPRDALIVYVDMLCSFIEPGNFSISVALKACVDLKDLRVGRGIHAQIVKRKEKVDQVVYNVLLKLYMESGLFDDARKVFDGMSERNVVTWNSLISVLSKKVRVHEMFNLFRKMQEEMIGFSWATLTTILPACSRVAALLTGKEIHAQILKSKEKPDVPLLNSLMDMYGKCGEVEYSRRVFDVMLTKDLASWNIMLNCYAINGNIEEVINLFEWMIESGVAPDGITFVALLSGCSDTGLTEYGLSLFERMKTEFRVSPALEHYACLVDILGRAGKIKEAVKVIETMPFKPSASIWGSLLNSCRLHGNVSVGEIAAKELFVLEPHNPGNYVMVSNIYADAKMWDNVDKIREMMKQRGVKKEAGCSWVQVKDKIQIFVAGGGYEFRNSDEYKKVWTELQEAIEKSGYSPNTSVVLHDVDEETKANWVCGHSERLATTYSLIHTGEGVPIRITKNLRVCADCHSWMKIVSQVTRRVIVLRDTKRFHHFVDGICSCKDYW

SEQ ID NO: 27835 - protein, 504 aa, Arabidopsis thaliana
  misc_feature (1)..(504): Ceres Seq. ID no. 2047672
MAIGYSRNGSPRDALIVYVDMLCSFIEPGNFSISVALKACVDLKDLRVGRGIHAQIVKRKEKVDQVVYNVLLKLYMESGLFDDARKVFDGMSERNVVTWNSLISVLSKKVRVHEMFNLFRKMQEEMIGFSWATLTTILPACSRVAALLTGKEIHAQILKSKEKPDVPLLNSLMDMYGKCGEVEYSRRVFDVMLTKDLASWNIMLNCYAINGNIEEVINLFEWMIESGVAPDGITFVALLSGCSDTGLTEYGLSLFERMKTEFRVSPALEHYACLVDILGRAGKIKEAVKVIETMPFKPSASIWGSLLNSCRLHGNVSVGEIAAKELFVLEPHNPGNYVMVSNIYADAKMWDNVDKIREMMKQRGVKKEAGCSWVQVKDKIQIFVAGGGYEFRNSDEYKKVWTELQEAIEKSGYSPNTSVVLHDVDEETKANWVCGHSERLATTYSLIHTGEGVPIRITKNLRVCADCHSWMKIVSQVTRRVIVLRDTKRFHHFVDGICSCKDYW

SEQ ID NO: 27836 - protein, 484 aa, Arabidopsis thaliana
  misc_feature (1)..(484): Ceres Seq. ID no. 2047673
MLCSFIEPGNFSISVALKACVDLKDLRVGRGIHAQIVKRKEKVDQVVYNVLLKLYMESGLFDDARKVFDGMSERNVVTWNSLISVLSKKVRVHEMFNLFRKMQEEMIGFSWATLTTILPACSRVAALLTGKEIHAQILKSKEKPDVPLLNSLMDMYGKCGEVEYSRRVFDVMLTKDLASWNIMLNCYAINGNIEEVINLFEWMIESGVAPDGITFVALLSGCSDTGLTEYGLSLFERMKTEFRVSPALEHYACLVDILGRAGKIKEAVKVIETMPFKPSASIWGSLLNSCRLHGNVSVGEIAAKELFVLEPHNPGNYVMVSNIYADAKMWDNVDKIREMMKQRGVKKEAGCSWVQVKDKIQIFVAGGGYEFRNSDEYKKVWTELQEAIEKSGYSPNTSVVLHDVDEETKANWVCGHSERLATTYSLIHTGEGVPIRITKNLRVCADCHSWMKIVSQVTRRVIVLRDTKRFHHFVDGICSCKDYW

SEQ ID NO: 27837 - DNA, 1065 bp, Arabidopsis thaliana
  misc_feature (1)..(1065): Ceres Seq. ID no. 2048171
atggtgagtgaaacaccattgagagttactaatcgatctggagatggatcaaatggatcaaaggaagtatcgatcgcgagagagaagaatggtgaaaacgcagagatattcatcagcccgagattcaaatcagcggcggctatggcgggttgggacgaagaagatctgataatcgctagctttgtggtagatgatactcctgaaagaagttcttcaaagcgaaggagacgttccaatttgttgtttaaatcaaccccaccttctggttcttcaagaaggaatcagcgtgttaagcaaagtcttgttccgttacctgttattgatcttgataaagtaatcagacatgaagaagaaaaatctgcagagaagaagaaaaagaagagagagatggaaacagaaacaaaagaagagaagaaaatagataaagatgagaagagtttgtcagatcatgttgtgcttccttgcatagataagcttcgagatgaattgtcttgcgcgatttgtcttgagatttgctttgaacctagtactacaacttgtggacacagcttctgcaaaaagtgtttgcgatctgcggcggataagtgtggaaggaaatgccctaaatgcaggcaactaataggaaatggaagatattgtactgtcaatacggttctttggaacacaatccagcttttgttccctaaagaagtcgaagcacagagagctgcttctgctaacttgaaaggcaaggagacaccgagtcctagaaatccgaatcaaaggctaagaagcagaaacagggaaactgcattgtttcaagagaggttacaaagagaggatatttcgagattgcttgtatctgaagagagaagtgagaggagcgaaagaaggaggagaagtacaagtatgaggttggatcaaaatagggatgcagcattagcgatgcggttacagcgacaggagttcgcatcagcttttggcgcaacgacggctgaaacttcttcttcatcggtttctactctgtcgcgagcaagagctaacctgcaagctatggcgtcaagagctgttcgcaggcaaggatga

SEQ ID NO: 27838 - protein, 354 aa, Arabidopsis thaliana
  misc_feature (1)..(354): Ceres Seq. ID no. 2048172
MVSETPLRVTNRSGDGSNGSKEVSIAREKNGENAEIFISPRFKSAAAMAGWDEEDLIIASFVVDDTPERSSSKRRRRSNLLFKSTPPSGSSRRNQRVKQSLVPLPVIDLDKVIRHEEEKSAEKKKKKREMETETKEEKKIDKDEKSLSDHVVLPCIDKLRDELSCAICLEICFEPSTTTCGHSFCKKCLRSAADKCGRKCPKCRQLIGNGRYCTVNTVLWNTIQLLFPKEVEAQRAASANLKGKETPSPRNPNQRLRSRNRETALFQERLQREDISRLLVSEERSERSERRRRSTSMRLDQNRDAALAMRLQRQEFASAFGATTAETSSSSVSTLSRARANLQAMASRAVRRQG

SEQ ID NO: 27839 - protein, 307 aa, Arabidopsis thaliana
  misc_feature (1)..(307): Ceres Seq. ID no. 2048173
MAGWDEEDLIIASFVVDDTPERSSSKRRRRSNLLFKSTPPSGSSRRNQRVKQSLVPLPVIDLDKVIRHEEEKSAEKKKKKREMETETKEEKKIDKDEKSLSDHVVLPCIDKLRDELSCAICLEICFEPSTTTCGHSFCKKCLRSAADKCGRKCPKCRQLIGNGRYCTVNTVLWNTIQLLFPKEVEAQRAASANLKGKETPSPRNPNQRLRSRNRETALFQERLQREDISRLLVSEERSERSERRRRSTSMRLDQNRDAALAMRLQRQEFASAFGATTAETSSSSVSTLSRARANLQAMASRAVRRQG

SEQ ID NO: 27840 - protein, 225 aa, Arabidopsis thaliana
  misc_feature (1)..(225): Ceres Seq. ID no. 2048174
METETKEEKKIDKDEKSLSDHVVLPCIDKLRDELSCAICLEICFEPSTTTCGHSFCKKCLRSAADKCGRKCPKCRQLIGNGRYCTVNTVLWNTIQLLFPKEVEAQRAASANLKGKETPSPRNPNQRLRSRNRETALFQERLQREDISRLLVSEERSERSERRRRSTSMRLDQNRDAALAMRLQRQEFASAFGATTAETSSSSVSTLSRARANLQAMASRAVRRQG

SEQ ID NO: 27841 - DNA, 1467 bp, Arabidopsis thaliana
  misc_feature (1)..(1467): Ceres Seq. ID no. 2048304
atgggagacgaaccacttcttcagaaagtcaagattcaagaagacattgaatccgtaccacttcttcagaaagtcaagattcaagaagacattgaatccgttaaaggaattcgtgtaaataatgacggcgaagaggacggtcccgttactttaattctactcttcacaaccttcactgctctctgcggcaccttctcctatggcactgccgccggctttacatcaccagctcaaaccgggattatggcaggactgaacctttctttggctgagttctcattctttggggctgtcttaacaattggtggacttgtgggagccgcgatgtcgggaaaacttgctgatgtctttggtcgaagaggcgctttgggggtttcaaactcgttttgcatggccggctggcttatgattgccttctctcaggcgacttggtcccttgatatcggaagactttttctcggggtcgcagctggcgtagcttcttatgtggtaccagtctatattgttgaaatcgctcccaaaaaagttcgtggcacattctctgcgattaactcgcttgtgatgtgtgctagcgtcgccgtcacatacctccttggatcagtcatttcatggcaaaaattagctctcataagtacggttccttgtgtttttgaattcgtcggtttattcttcataccggagtctcctaggtggctgtctagaaacggtagggtgaaagaatcggaagtttcactccaacgcctacgaggaaacaacactgatatcactaaagaggctgcagaaatcaaaaaatatatggataatcttcaagaattcaaagaagatggttttttcgatctcttcaacccacgatattctcgtgtcgttactgttggaattggattgctagtactacaacaactgggaggtctcagtggctatacattttaccttagctcgatattcaaaaaatcggggtttcctaacaacgtaggagtaatgatggcgagcgtggtgcagtctgtgacaagcgttttaggaatagtaatcgtggataaatatggaagacgatcccttttaacggttgcgacgatcatgatgtgtttgggctcattaattacaggactatcgtttttgtttcagagctatggtttacttgaacattacaccccaatttcaacatttatgggagtgttggtttttctaacttcgattacaatcggaataggaggtattccatgggttatgatatctgagatgacaccgatcaatataaaaggatcagcagggacgctatgcaatttaactagctggtccagcaattggttcgtctcttacacattcaacttcctcttccagtggagctcttctggtgtgtttttcatatatacaatgatatcgggtgtgggcatcctgtttgtgatgaagatggtacccgagactcgaggtcgttcgctcgaagaaattcaagctgccattacccgataa

SEQ ID NO: 27842 - protein, 488 aa, Arabidopsis thaliana
  misc_feature (1)..(488): Ceres Seq. ID no. 2048305
MGDEPLLQKVKIQEDIESVPLLQKVKIQEDIESVKGIRVNNDGEEDGPVTLILLFTTFTALCGTFSYGTAAGFTSPAQTGIMAGLNLSLAEFSFFGAVLTIGGLVGAAMSGKLADVFGRRGALGVSNSFCMAGWLMIAFSQATWSLDIGRLFLGVAAGVASYVVPVYIVEIAPKKVRGTFSAINSLVMCASVAVTYLLGSVISWQKLALISTVPCVFEFVGLFFIPESPRWLSRNGRVKESEVSLQRLRGNNTDITKEAAEIKKYMDNLQEFKEDGFFDLFNPRYSRVVTVGIGLLVLQQLGGLSGYTFYLSSIFKKSGFPNNVGVMMASVVQSVTSVLGIVIVDKYGRRSLLTVATIMMCLGSLITGLSFLFQSYGLLEHYTPISTFMGVLVFLTSITIGIGGIPWVMISEMTPINIKGSAGTLCNLTSWSSNWFVSYTFNFLFQWSSSGVFFIYTMISGVGILFVMKMVPETRGRSLEEIQAAITR

SEQ ID NO: 27843 - protein, 407 aa, Arabidopsis thaliana
  misc_feature (1)..(407): Ceres Seq. ID no. 2048306
MAGLNLSLAEFSFFGAVLTIGGLVGAAMSGKLADVFGRRGALGVSNSFCMAGWLMIAFSQATWSLDIGRLFLGVAAGVASYVVPVYIVEIAPKKVRGTFSAINSLVMCASVAVTYLLGSVISWQKLALISTVPCVFEFVGLFFIPESPRWLSRNGRVKESEVSLQRLRGNNTDITKEAAEIKKYMDNLQEFKEDGFFDLFNPRYSRVVTVGIGLLVLQQLGGLSGYTFYLSSIFKKSGFPNNVGVMMASVVQSVTSVLGIVIVDKYGRRSLLTVATIMMCLGSLITGLSFLFQSYGLLEHYTPISTFMGVLVFLTSITIGIGGIPWVMISEMTPINIKGSAGTLCNLTSWSSNWFVSYTFNFLFQWSSSGVFFIYTMISGVGILFVMKMVPETRGRSLEEIQAAITR

SEQ ID NO: 27844 - protein, 380 aa, Arabidopsis thaliana
  misc_feature (1)..(380): Ceres Seq. ID no. 2048307
MSGKLADVFGRRGALGVSNSFCMAGWLMIAFSQATWSLDIGRLFLGVAAGVASYVVPVYIVEIAPKKVRGTFSAINSLVMCASVAVTYLLGSVISWQKLALISTVPCVFEFVGLFFIPESPRWLSRNGRVKESEVSLQRLRGNNTDITKEAAEIKKYMDNLQEFKEDGFFDLFNPRYSRVVTVGIGLLVLQQLGGLSGYTFYLSSIFKKSGFPNNVGVMMASVVQSVTSVLGIVIVDKYGRRSLLTVATIMMCLGSLITGLSFLFQSYGLLEHYTPISTFMGVLVFLTSITIGIGGIPWVMISEMTPINIKGSAGTLCNLTSWSSNWFVSYTFNFLFQWSSSGVFFIYTMISGVGILFVMKMVPETRGRSLEEIQAAITR

SEQ ID NO: 27845 - DNA, 3570 bp, Arabidopsis thaliana
  misc_feature (1)..(3570): Ceres Seq. ID no. 2049237
atggctggagagaggagaaaagggatgaaattcagtaaattatattctttcaagtgttttaaaccattctctagagaagatcattctcagattggttcaagaggttactcaagagttgtgttctgtaatgatcctgataatcctgaagctcttcagcttaattacagaggaaattatgtgtcaaccactaagtatactgctgctaatttcatcccaaagtctttgtttgagcagtttagaagagttgcaaatatatatttcctcgttgttgctttcgtttcttttagtcctttggctccttataccgctcctagcgttcttgcaccgctcttgattgttatcggtgctaccatggttaaagaaggtgttgaagatttgaggagaagaaaacaagatgttgaagctaacaataggaaagttgaagttcttggtaaaaccggaacatttgtcgaaacgaagtggaaaaatctccgtgttggtgatcttgtgaaggttcataaagatgagtacttccctgctgatcttctactgctttcatctagctatgaagatgggatttgttatgttgaaactatgaatcttgatggagagactaacttgaagcttaagcacgcgttggagataacatcggacgaagaatcgatcaagaacttcagaggaatgatcaaatgtgaggatcctaatgagcatctttattcctttgtgggaacactttactttgaaggaaagcaatatcctttatctcctcagcagatactattgagagattccaaactgaaaaatacggattatgtatacggcgtggttgtttttaccggtcatgacactaaagtgatgcagaatgctaccgatcctccttctaagaggagtaagattgagaaaaaaatggatcagattatttacattctcttcagtatcttgattgtgatagcgtttactggatctgtattcttcgggattgcaacgagaagggatatgagtgataatgggaagctaagaagatggtatcttagaccagatcatactactgttttctatgatcctcggagagcggttgctgctgctttctttcatttcttgaccgctttaatgctatacggttacttaataccgatatctttatatgtgtctattgaagttgtgaaggtgttacagagtattttcattaaccaagatcaagaaatgtaccatgaagaaacagataggcctgctcgtgcaagaacgtcgaatcttaatgaagagcttggacaagttgatacaattctctcggataaaacaggtactttgacttgcaactcaatggagtttgtgaaatgttcgattgctggaacagcttatggtcgcggtatgaccgaagtagaagtggctttgagaaagcaaaagggtcttatgactcaagaagaagttggtgataatgaatctttatccattaaggagcaaaaagcggttaaaggttttaacttctgggatgagagaatagttgatggacaatggattaatcaaccaaatgcagaacttattcagaagttctttcgtgtgttggctatttgccacactgctattcctgatgttaacagcgatacaggagagatcacatatgaagctgagtctccggatgaagcggcttttgttatagcttctcgagagcttggatttgaattcttttcaaggtcccaaactagtatttccttgcatgaaatagaccacatgaccggtgaaaaagttgatagagtatatgagcttcttcatgtcctagagttcagcagttcacggaaaagaatgtcggtgattgtccgaaatcccgaaaaccggttgttgttgctttcgaaaggcgcagacagtgtaatgtttaaaagacttgcgaaacatggacggcaaaatgagagagagacaaaggaacatatcaagaagtatgcagaggcgggtttaagaacattagtgattacatatagagaaatcgatgaagacgagtacatagtgtgggaagaggagtttctgaatgccaaaactttggttactgaagatagagatgctttaattgatgcagctgctgataagattgagaaagatttgattcttcttggttctactgcagtggaagacaaactgcagaaaggtgttccagattgtattgagaagttatctcaggctggagtcaagatttgggttttaaccggcgataagacagaaaccgcgataaatatcggatatgcttgtagtctcttaagagaaggcatgaaacagattttggtaactctagattcatctgacattgaagcattggaaaaacaaggagacaaggaggctgttgcaaaggcttcttttcaaagtattaaaaaacagttacgagaaggaatgtcacaaactgctgcagtaaccgataattcagctaaagaaaactcggaaatgtttggtttagtgattgatggaaagtctttaacttatgcattggactcaaagctggagaaagagttcttggaacttgcgattcgatgtaattctgttatatgttgtcggtcttcgccaaaacaaaaggcgctcgttacaagattggtaaagaatgggacaggtagaacaacactggccattggagatggcgcaaatgatgttggaatgcttcaagaagccgatattggagttggtataagtggtgctgaaggaatgcaggcggtgatggctagtgattttgcgattgctcagtttcggtttctggaacgtttattacttgttcacggtcattggtgttatagacgaatcacattgatgatatgttacttcttctacaagaacctcgcattcgggttcacgctgttttggtatgaagcttatgcttctttctctggaaaaccggcgtataacgattggtacatgtcgtgctacaacgtcttcttcacttcacttcctgttatcgcccttggagtcttcgatcaagacgtctctgctcgcctttgtctcaagtatccgttgctataccaagaaggagtacaaaacgtattattcagctgggaacggatcctaggatggatgttgaatggagtcataagctcaatgatcattttcttcctcactatcaacacaatggcaactcaagcttttaggaaagatggacaagtagttgattactcggtcctcggagtcacaatgtactcttccgtggtctggactgtgaattgccaaatggcgatttcgataaactacttcacttggatccaacattgcttcatatggggaagcattggggtttggtatttgtttcttgtcatctacggttcccttcctccgacgttttccactaccgcgtttcaggtcttcgtcgagacttcagcaccgagtccgatctattggctcgttcttttccttgtggtgttctctgctctcttgccttatttcacttacagggcgtttcagattaagttcagaccaatgtaccacgatattattgttgaacagaggagaacagaacggacagagaccgcgccaaatgcggttcttggtgagcttccggtgcaagttgagtttactttgcatcatcttagggcaaatttgtctagaagagattcttggaattga

SEQ ID NO: 27846 - protein, 1189 aa, Arabidopsis thaliana
  misc_feature (1)..(1189): Ceres Seq. ID no. 2049238
MAGERRKGMKFSKLYSFKCFKPFSREDHSQIGSRGYSRVVFCNDPDNPEALQLNYRGNYVSTTKYTAANFIPKSLFEQFRRVANIYFLVVAFVSFSPLAPYTAPSVLAPLLIVIGATMVKEGVEDLRRRKQDVEANNRKVEVLGKTGTFVETKWKNLRVGDLVKVHKDEYFPADLLLLSSSYEDGICYVETMNLDGETNLKLKHALEITSDEESIKNFRGMIKCEDPNEHLYSFVGTLYFEGKQYPLSPQQILLRDSKLKNTDYVYGVVVFTGHDTKVMQNATDPPSKRSKIEKKMDQIIYILFSILIVIAFTGSVFFGIATRRDMSDNGKLRRWYLRPDHTTVFYDPRRAVAAAFFHFLTALMLYGYLIPISLYVSIEVVKVLQSIFINQDQEMYHEETDRPARARTSNLNEELGQVDTILSDKTGTLTCNSMEFVKCSIAGTAYGRGMTEVEVALRKQKGLMTQEEVGDNESLSIKEQKAVKGFNFWDERIVDGQWINQPNAELIQKFFRVLAICHTAIPDVNSDTGEITYEAESPDEAAFVIASRELGFEFFSRSQTSISLHEIDHMTGEKVDRVYELLHVLEFSSSRKRMSVIVRNPENRLLLLSKGADSVMFKRLAKHGRQNERETKEHIKKYAEAGLRTLVITYREIDEDEYIVWEEEFLNAKTLVTEDRDALIDAAADKIEKDLILLGSTAVEDKLQKGVPDCIEKLSQAGVKIWVLTGDKTETAINIGYACSLLREGMKQILVTLDSSDIEALEKQGDKEAVAKASFQSIKKQLREGMSQTAAVTDNSAKENSEMFGLVIDGKSLTYALDSKLEKEFLELAIRCNSVICCRSSPKQKALVTRLVKNGTGRTTLAIGDGANDVGMLQEADIGVGISGAEGMQAVMASDFAIAQFRFLERLLLVHGHWCYRRITLMICYFFYKNLAFGFTLFWYEAYASFSGKPAYNDWYMSCYNVFFTSLPVIALGVFDQDVSARLCLKYPLLYQEGVQNVLFSWERILGWMLNGVISSMIIFFLTINTMATQAFRKDGQVVDYSVLGVTMYSSVVWTVNCQMAISINYFTWIQHCFIWGSIGVWYLFLVIYGSLPPTFSTTAFQVFVETSAPSPIYWLVLFLVVFSALLPYFTYRAFQIKFRPMYHDIIVEQRRTERTETAPNAVLGELPVQVEFTLHHLRANLSRRDSWN

SEQ ID NO: 27847 - protein, 1181 aa, Arabidopsis thaliana
  misc_feature (1)..(1181): Ceres Seq. ID no. 2049239
MKFSKLYSFKCFKPFSREDHSQIGSRGYSRVVFCNDPDNPEALQLNYRGNYVSTTKYTAANFIPKSLFEQFRRVANIYFLVVAFVSFSPLAPYTAPSVLAPLLIVIGATMVKEGVEDLRRRKQDVEANNRKVEVLGKTGTFVETKWKNLRVGDLVKVHKDEYFPADLLLLSSSYEDGICYVETMNLDGETNLKLKHALEITSDEESIKNFRGMIKCEDPNEHLYSFVGTLYFEGKQYPLSPQQILLRDSKLKNTDYVYGVVVFTGHDTKVMQNATDPPSKRSKIEKKMDQIIYILFSILIVIAFTGSVFFGIATRRDMSDNGKLRRWYLRPDHTTVFYDPRRAVAAAFFHFLTALMLYGYLIPISLYVSIEVVKVLQSIFINQDQEMYHEETDRPARARTSNLNEELGQVDTILSDKTGTLTCNSMEFVKCSIAGTAYGRGMTEVEVALRKQKGLMTQEEVGDNESLSIKEQKAVKGFNFWDERIVDGQWINQPNAELIQKFFRVLAICHTAIPDVNSDTGEITYEAESPDEAAFVIASRELGFEFFSRSQTSISLHEIDHMTGEKVDRVYELLHVLEFSSSRKRMSVIVRNPENRLLLLSKGADSVMFKRLAKHGRQNERETKEHIKKYAEAGLRTLVITYREIDEDEYIVWEEEFLNAKTLVTEDRDALIDAAADKIEKDLILLGSTAVEDKLQKGVPDCIEKLSQAGVKIWVLTGDKTETAINIGYACSLLREGMKQILVTLDSSDIEALEKQGDKEAVAKASFQSIKKQLREGMSQTAAVTDNSAKENSEMFGLVIDGKSLTYALDSKLEKEFLELAIRCNSVICCRSSPKQKALVTRLVKNGTGRTTLAIGDGANDVGMLQEADIGVGISGAEGMQAVMASDFAIAQFRFLERLLLVHGHWCYRRITLMICYFFYKNLAFGFTLFWYEAYASFSGKPAYNDWYMSCYNVFFTSLPVIALGVFDQDVSARLCLKYPLLYQEGVQNVLFSWERILGWMLNGVISSMIIFFLTINTMATQAFRKDGQVVDYSVLGVTMYSSVVWTVNCQMAISINYFTWIQHCFIWGSIGVWYLFLVIYGSLPPTFSTTAFQVFVETSAPSPIYWLVLFLVVFSALLPYFTYRAFQIKFRPMYHDIIVEQRRTERTETAPNAVLGELPVQVEFTLHHLRANLSRRDSWN

SEQ ID NO: 27848 - protein, 1072 aa, Arabidopsis thaliana
  misc_feature (1)..(1072): Ceres Seq. ID no. 2049240
MVKEGVEDLRRRKQDVEANNRKVEVLGKTGTFVETKWKNLRVGDLVKVHKDEYFPADLLLLSSSYEDGICYVETMNLDGETNLKLKHALEITSDEESIKNFRGMIKCEDPNEHLYSFVGTLYFEGKQYPLSPQQILLRDSKLKNTDYVYGVVVFTGHDTKVMQNATDPPSKRSKIEKKMDQIIYILFSILIVIAFTGSVFFGIATRRDMSDNGKLRRWYLRPDHTTVFYDPRRAVAAAFFHFLTALMLYGYLIPISLYVSIEVVKVLQSIFINQDQEMYHEETDRPARARTSNLNEELGQVDTILSDKTGTLTCNSMEFVKCSIAGTAYGRGMTEVEVALRKQKGLMTQEEVGDNESLSIKEQKAVKGFNFWDERIVDGQWINQPNAELIQKFFRVLAICHTAIPDVNSDTGEITYEAESPDEAAFVIASRELGFEFFSRSQTSISLHEIDHMTGEKVDRVYELLHVLEFSSSRKRMSVIVRNPENRLLLLSKGADSVMFKRLAKHGRQNERETKEHIKKYAEAGLRTLVITYREIDEDEYIVWEEEFLNAKTLVTEDRDALIDAAADKIEKDLILLGSTAVEDKLQKGVPDCIEKLSQAGVKIWVLTGDKTETAINIGYACSLLREGMKQILVTLDSSDIEALEKQGDKEAVAKASFQSIKKQLREGMSQTAAVTDNSAKENSEMFGLVIDGKSLTYALDSKLEKEFLELAIRCNSVICCRSSPKQKALVTRLVKNGTGRTTLAIGDGANDVGMLQEADIGVGISGAEGMQAVMASDFAIAQFRFLERLLLVHGHWCYRRITLMICYFFYKNLAFGFTLFWYEAYASFSGKPAYNDWYMSCYNVFFTSLPVIALGVFDQDVSARLCLKYPLLYQEGVQNVLFSWERILGWMLNGVISSMIIFFLTINTMATQAFRKDGQVVDYSVLGVTMYSSVVWTVNCQMAISINYFTWIQHCFIWGSIGVWYLFLVIYGSLPPTFSTTAFQVFVETSAPSPIYWLVLFLVVFSALLPYFTYRAFQIKFRPMYHDIIVEQRRTERTETAPNAVLGELPVQVEFTLHHLRANLSRRDSWN

SEQ ID NO: 27849 - DNA, 2541 bp, Arabidopsis thaliana
  misc_feature (1)..(2541): Ceres Seq. ID no. 2049879
atgggttgtacaagttctaagcttgacgatcttccggcggttgctctttgccgtgaacgctgtgctttcttagaagctgctattcatcaacgttacgctttagctgaatcacacgtggcttacactcattcgcttcgagaaatcggtcactctctccatcttttcatcaatcaccaccaccgtttcgtcgcttccggcggcgctaacgtcggtgattctcctcgacttaatcttcctcctcagagaaaaggtgaccttgacgacgaagcaacaaattccccaaaaaaacaaaagcttgcttcttctcaccacaaccacaaccacgctcactcgggttccggttctgattcgggtcatctcgaattcgattcagattccgacgaagatgaagaagacgacgacgacttggatttggattcgttgcatcaccactctcctccccaccaccatctcggcaatttccctattcccgaatcagcaccaatgggcggatacatggaacaacaaccgggttatataaacccgtacccgaatccagatatgatggggcatccttactctggaggaggaagttatatgcacatgaattacatgaagaacaaatccatgcctccttcagttgtctatgagcaaagaccaactagtcctcaacgagtctacataggcgaatcatcatcttcatatccatatcctcctcaaaattcatattttggatactcaaatccagtacccggacccggaccaggatactacggttcttcttctgcttctacaactgctgcagcaacaaaaccgccaccacctccaccgtcgccgcctaggtctaacggttgggattttttgaatccctttgatacttattatcctccgtatactccgagtcgagattcgagagagttaagagaagaagaaggtataccggatttagaagacgatgattcacattacgaagttgttaaagaagtttacggcaaaccaaaattcgccgccggtggtggtcaccaaccaaatcccgccgccgtacacatgatgagggaagagtccccgtctccgccgcttgataaatccggtgctagtactagcggtggaggtgatgtcggagatgcatctgcgtatcagtctagaccaagtgtgtcggtggagaaagaagggatggagtatgaagttcacgttgttgagaagaaggttgttgaagatgaggaacggcggagtaatgccacggcgacacgtggtggtggtggaggaggagggccacgtgcggtgcctgaagttgcgaaagagattgagaatcaattcgtgaaagctgcagagtcaggaagtgagattgctaagttacttgaagttgggaagcatccttatggtcgtaaacatgctgcttcgaagatgttgcacggtgttactccttcgttaccttctacctctggaggaacttcttcgtctgctgctgctgctgttgtgccacctacttatgcagatattgaagaagagcttgcttcgaggtcgaggaatctttcttcgacgttgcacaagctccatctttgggagaagaagctttatcatgaagtcaaggccgaggagaaactgcgtctagctcacgagaaaaagcttaggaagctaaagcgtttggatcaaagaggtgccgaggctatcaaagtagataaaacgcggaaattagtgagagatatgtccacaaaaatacggattgcgattcaggttgtcgacaaaatatccgtgacgattaataagataagagacgaagacctgtggccgcaactgaatgcattgattcaagggcttacaagaatgtggaaaacaatgcttgaatgtcatcaaagtcaatgtcaagctattagggaagcacaaggtttaggcccgataagagcaagcaagaaactaggcgatgaacatctagaagcgacgagtttgcttggacatgaacttattaattggatattgggattctctagctgggttagtgcgcagaagggttatgtaaaagagttgaataaatggctcatgaaatgtcttctgtatgaacctgaggaaacacctgatgggatagttcccttttcacctggtaggattggggctccacctatctttgtcatctgtaaccaatggtctcaagctctggataggatatctgagaaggaagttattgaggcaatgcgtagtttcactacaagtgtgcttcagctttgggaacaagatcggttagatacgatgatgacggggcatggtgattcagagaagaaagtcaggaacatggacagagaagaacagaggatacagagagagattcaagcattggaaaagaaaatgattcttgtggcaccgggtgatggtaacagtctttcgatatccggcaacgttgtttaccaaagcgatactagcagcgatagtttacaaggtagtttgcaacggatttttgaagctatggagagattcactgctgaatcgatgagagcttatgaggatctcttagagcgcaccaatgaagaaactgcaccacgggaacttgaggaagaagaggaggagtaa

SEQ ID NO: 27850 - protein, 846 aa, Arabidopsis thaliana
  misc_feature (1)..(846): Ceres Seq. ID no. 2049880
MGCTSSKLDDLPAVALCRERCAFLEAAIHQRYALAESHVAYTHSLREIGHSLHLFINHHHRFVASGGANVGDSPRLNLPPQRKGDLDDEATNSPKKQKLASSHHNHNHAHSGSGSDSGHLEFDSDSDEDEEDDDDLDLDSLHHHSPPHHHLGNFPIPESAPMGGYMEQQPGYINPYPNPDMMGHPYSGGGSYMHMNYMKNKSMPPSVVYEQRPTSPQRVYIGESSSSYPYPPQNSYFGYSNPVPGPGPGYYGSSSASTTAAATKPPPPPPSPPRSNGWDFLNPFDTYYPPYTPSRDSRELREEEGIPDLEDDDSHYEVVKEVYGKPKFAAGGGHQPNPAAVHMMREESPSPPLDKSGASTSGGGDVGDASAYQSRPSVSVEKEGMEYEVHVVEKKVVEDEERRSNATATRGGGGGGGPRAVPEVAKEIENQFVKAAESGSEIAKLLEVGKHPYGRKHAASKMLHGVTPSLPSTSGGTSSSAAAAVVPPTYADIEEELASRSRNLSSTLHKLHLWEKKLYHEVKAEEKLRLAHEKKLRKLKRLDQRGAEAIKVDKTRKLVRDMSTKIRIAIQVVDKISVTINKIRDEDLWPQLNALIQGLTRMWKTMLECHQSQCQAIREAQGLGPIRASKKLGDEHLEATSLLGHELINWILGFSSWVSAQKGYVKELNKWLMKCLLYEPEETPDGIVPFSPGRIGAPPIFVICNQWSQALDRISEKEVIEAMRSFTTSVLQLWEQDRLDTMMTGHGDSEKKVRNMDREEQRIQREIQALEKKMILVAPGDGNSLSISGNVVYQSDTSSDSLQGSLQRIFEAMERFTAESMRAYEDLLERTNEETAPRELEEEEEE

SEQ ID NO: 27851 - protein, 685 aa, Arabidopsis thaliana
  misc_feature (1)..(685): Ceres Seq. ID no. 2049881
MGGYMEQQPGYINPYPNPDMMGHPYSGGGSYMHMNYMKNKSMPPSVVYEQRPTSPQRVYIGESSSSYPYPPQNSYFGYSNPVPGPGPGYYGSSSASTTAAATKPPPPPPSPPRSNGWDFLNPFDTYYPPYTPSRDSRELREEEGIPDLEDDDSHYEVVKEVYGKPKFAAGGGHQPNPAAVHMMREESPSPPLDKSGASTSGGGDVGDASAYQSRPSVSVEKEGMEYEVHVVEKKVVEDEERRSNATATRGGGGGGGPRAVPEVAKEIENQFVKAAESGSEIAKLLEVGKHPYGRKHAASKMLHGVTPSLPSTSGGTSSSAAAAVVPPTYADIEEELASRSRNLSSTLHKLHLWEKKLYHEVKAEEKLRLAHEKKLRKLKRLDQRGAEAIKVDKTRKLVRDMSTKIRIAIQVVDKISVTINKIRDEDLWPQLNALIQGLTRMWKTMLECHQSQCQAIREAQGLGPIRASKKLGDEHLEATSLLGHELINWILGFSSWVSAQKGYVKELNKWLMKCLLYEPEETPDGIVPFSPGRIGAPPIFVICNQWSQALDRISEKEVIEAMRSFTTSVLQLWEQDRLDTMMTGHGDSEKKVRNMDREEQRIQREIQALEKKMILVAPGDGNSLSISGNVVYQSDTSSDSLQGSLQRIFEAMERFTAESMRAYEDLLERTNEETAPRELEEEEEE

SEQ ID NO: 27852 - protein, 681 aa, Arabidopsis thaliana
  misc_feature (1)..(681): Ceres Seq. ID no. 2049882
MEQQPGYINPYPNPDMMGHPYSGGGSYMHMNYMKNKSMPPSVVYEQRPTSPQRVYIGESSSSYPYPPQNSYFGYSNPVPGPGPGYYGSSSASTTAAATKPPPPPPSPPRSNGWDFLNPFDTYYPPYTPSRDSRELREEEGIPDLEDDDSHYEVVKEVYGKPKFAAGGGHQPNPAAVHMMREESPSPPLDKSGASTSGGGDVGDASAYQSRPSVSVEKEGMEYEVHVVEKKVVEDEERRSNATATRGGGGGGGPRAVPEVAKEIENQFVKAAESGSEIAKLLEVGKHPYGRKHAASKMLHGVTPSLPSTSGGTSSSAAAAVVPPTYADIEEELASRSRNLSSTLHKLHLWEKKLYHEVKAEEKLRLAHEKKLRKLKRLDQRGAEAIKVDKTRKLVRDMSTKIRIAIQVVDKISVTINKIRDEDLWPQLNALIQGLTRMWKTMLECHQSQCQAIREAQGLGPIRASKKLGDEHLEATSLLGHELINWILGFSSWVSAQKGYVKELNKWLMKCLLYEPEETPDGIVPFSPGRIGAPPIFVICNQWSQALDRISEKEVIEAMRSFTTSVLQLWEQDRLDTMMTGHGDSEKKVRNMDREEQRIQREIQALEKKMILVAPGDGNSLSISGNVVYQSDTSSDSLQGSLQRIFEAMERFTAESMRAYEDLLERTNEETAPRELEEEEEE

SEQ ID NO: 27853 - DNA, 5121 bp, Arabidopsis thaliana
  misc_feature (1)..(5121): Ceres Seq. ID no. 2049939
atgtcaacgtcacaaaccctcggcggcgccacacgttgtggccggatcataggtccatcattagacaagatcataaaaaacgctgcgtggcgtaaacacacgtaccttgtctcttcatgtaaatccgttctcgacaagctcgaatctcttcccgacgacttccacgatccttcctccgtcgtctctggcctcgccgcatcagatgcagattccgttctccaaccttttctcttatctctcgaaacagcttattcaaaagtcgtcgagccttctctagattgcgcttttaaactcttctctctctcaatcctccgcggtgagatccaatcatcaaaacaagattcaatcctcttcaaactcgtcaacgccgtctccaaagtcggtgctatagccgaagaaccgattcaactcgctgttcttagagttcttctcgctgccgttagatctccatgtatcttgatccgtggtgattgcttgttacacgttgtcaagacttgttataatatttaccttggtggcttgagcggcacgacacagatctgtgctaaatctgtcttagctcagatgatgcttgtgatcttcacaagatctgaagaagattcgcttgatgtttctgtcaaaacgatttacgtcaacgagttattaactttcacggacaagagtgttaatgaaggaagctctgtttatttctgtcaagggtttgtgaatgaagtcatggctgcaggacaaggaagtcctcttcctcctcctgatgtgattcagattctgttgcaaaatcccgagactgaaaccgttatgactccggattcaccgtctttccgaggatacgtggcaaacggagaaggtgattctgagaccggtgacatgagtaaggtgagacaagacgcttttcttctgttcaagaacttgtgtaaattgtccatgaggttttcgtccaaggagaacaatgatgatcagatcatggtgagaggtaagactctgtctttggagttgcttaaagtcattattgacaatggtggttctgtttggcggactaatgaaagcttcatcaatgccgttaagcaatacttatgcttatcactactaaagaacagtgcggtatcaatcatgtcaatatttcaattgcaatgtgctatcttcatgagcttgttatcaaagcttagatcagtcttgaaagcagaaatcggcattttctttccgatgattgttcttcgcgtgcttgagaatgttcttcaacctagttacttgcagaagatgactgttctcaacttgctagacaaaatgtcgcaagatccgcagttgatggtcgatatctttgtgaactatgactgcgatgtggagtcttcaaacatacttgaaaggattgtcaacggtcttctcaaaactgctctaggaccacccaccggatcatcaacaacgttgtctccagcgcaagatagtacattcaggaatgattctgtcaagtgtttggttaacttagccaaggcaatgggaaattggatggaccagcagttgaaagtgaacgagacggtctggcctaagggctcacaagtttatgcttctatggacagtaatgcaagccagattagtgagttagaaggaactatatctgactgtgattcacagccagatactagtaatccagaagcttatgatgcttctatgcttgagcaacgaagggcttacaaaattgaattgcagaaaggtatctctctgttcaataggaagccgtcgaaaggtgtcgaatttctcataagtaccaagaaaataggtagctcccctgaggaagttgcttcgtttctgatgaagaccgcagggctaaatggaactgtgattggtgattatcttggtgaaagagatgaacttccactaaaagttatgcatgcatatgttgattcgtttaactttgaaaagaaggattttgtcgaagcaatacggttctttctacgtgggtttaggctaccaggagaagcacagaagattgatcgaatcatggagaagtttgcagaacattactggaaatgcaaccctggttcttttactagtgcagacactgcttatgttcttgcatactctgtgataatgctcaacacagatgcacacaacaacatggttaaggataagatgacgaaagctgacttcgtccgcaacaatagggggatagacgatggaaaggacttgcctgaagagtatttaggttctctatatgatcgagttgtgaaagaagaaatcaggatgaactcggacactttagccccacaaaacaaacaggtgaatggcttgaataaactgttgggcctagacggaattctcaatctggtttcttggatgcaaccagatgagaaacctcatggtgccaatggacgtcttataagggatattcaggaacagttccaagctaagccagagaaatcagagtcagtttatcatactgttacagatatttcgatcttgagattcatactagaggtctcttggggaccgatgcttgctgcattcagtgtcactattgaccagagtgatgatagactagcaacttctctttgcttacaaggcttcagatatgcggttcatgtcactgcagttatgggaatgcaaactcaaagagatgcttttgtaacttccatggccaagttcactaatcttcattgtgctgcagatatgaagcagaaaaatgttgatgctgttaaagcgataataacaatagccatagaagacggtaaccatctacatggttcttgggaacatattttaacttgtctttcacgcattgaacatttgcaactccttggagaagtatcaccatcagagaaacgttacgtccctacaaaaaaagctgaggtagatgacaagaaagctttagggtttccaaatttaaagaaacgtggatcttttcagaatccatctgttatggctgttgttaggggaggttcttatgatagtacttcacttgtgaaaagtgttcccaaactagttactccggagcagatcaaaagtttcattgcaaatttgaatctacttgatcaaattggcaattttgagttgaaccatgtctatgctaatagccaaaggttgaacagtgaagctatagtttcttttgttaaagcgctatgtaaagtctccatgtcagaacttcagtcaccaacagatcctcgtgtctttagcctcacgaaactagtcgaaacagcgcattataacatgaaccggatccgattagtttggtcccgcatatggaatgttctttctgatttcttcgtatcagttggcttgtcagagaatctctctgttgcaatatttgtcatggactcgcttcgtcagctttccatgaaattcttggagcgtgaggagctagcaaactaccatttccaacatgagtttcttcgaccattcgtcgttgttatgcagaaaagcagttccgcggagattagagagctaatagtccgatgtgtttctcaaatggttcttagtcgagttagtaatgtgaaatctggttggaaaaatgtcttcacagtttttacaactgcagcgcttgatgagaggaagaacattgtactgttagctttcgagacaatcgagaaaattgtgcgggatcattttcattgcataatcgagacagagataacggtatacgcagactgcattagatgtctcatcaccttcacaaacagcaagtttgaaggtgacattggcttcaacaccatagaatttcttcgtttctgcgctttaaagcttgaagaaggaggacttgtcttgaatgagaaactcaagaacaatactatctcagcgttaaaggaagatttttctgatacacagagttttactgaccttgatgaacaagtatcctattggattcctctgcttacaggtttatgtaagcaagtctcggatccaagaccagcaattcgaaagcgttccatagaagtattgttccacattctgatggatcatggtcatctttttacaagacccttttggactggaatcttcagctctatcattctcccagttttcaacaacatacgaagtaaaaccgatatgctatttgaagaaagtgttgattcgccatcctcagcttctctagacaccgaagaaactacatgggacgttgagacatcaacacttgcattgcagcttctcgtcgatctactcgttaaatttttcagatccgtgagatctcagcttccaagcgttgtgtcaatcatcgtagggttcataaagagtccttttcaaggctctacaggctctggaatctctgttttgctacatctggctgatggattggctcgtagtgcctctgaagatgaatggagagagatattcttggctctcaaggaagcagcgtcgctgactttcgccggtttcatgaaagtcttgagaacaatggatgatatcgaagatgttgaaacactttctggtcaaagcgtaaacataggtgatcttgatgatgacagtcttcacatcatgtcgtatgttgtctccagaacaaagaaacacattgatgtcctgtctcaaatcgttgaggttgtgagtgatttatacagaagaaaccagttctcattgtccgcatcacacgtggatattctggcagacattttctcgtgcatcgcgtctcacgcacagcaactaaacaccgacacagtccttagaaggaagttcaagagagcatgctctgtccaaaacctaacagagcctcaactacttaacttcgagaacgaggcttacaaatcctacatgatgttcctccaagacatggttacttgcaatccaaacgtctccaaagaactagatctcgagtctcgtctagtcactgaatgcgcaaaaatcgtgaagatctaccttaaatgcacagatccacaacaacaagaacaacaacaaagaaaaccggtgctatgggttcttccgatggaatcagatcgtgtagaagaagcaacggcgagaacttcactgcttgtttcttcactcgaagccttgtgctcattagaagcagagtctctgaagaaacacgtgtccagcttcttccctttgttggtggatcttgtgaggactgagcattgctctccacaagttccgtacgtcctaagcaatgttttgaaatcgtgcattggtcctattttggcttag

SEQ ID NO: 27854 - protein, 1706 aa, Arabidopsis thaliana
  misc_feature (1)..(1706): Ceres Seq. ID no. 2049940
MSTSQTLGGATRCGRIIGPSLDKIIKNAAWRKHTYLVSSCKSVLDKLESLPDDFHDPSSVVSGLAASDADSVLQPFLLSLETAYSKVVEPSLDCAFKLFSLSILRGEIQSSKQDSILFKLVNAVSKVGAIAEEPIQLAVLRVLLAAVRSPCILIRGDCLLHVVKTCYNIYLGGLSGTTQICAKSVLAQMMLVIFTRSEEDSLDVSVKTIYVNELLTFTDKSVNEGSSVYFCQGFVNEVMAAGQGSPLPPPDVIQILLQNPETETVMTPDSPSFRGYVANGEGDSETGDMSKVRQDAFLLFKNLCKLSMRFSSKENNDDQIMVRGKTLSLELLKVIIDNGGSVWRTNESFINAVKQYLCLSLLKNSAVSIMSIFQLQCAIFMSLLSKLRSVLKAEIGIFFPMIVLRVLENVLQPSYLQKMTVLNLLDKMSQDPQLMVDIFVNYDCDVESSNILERIVNGLLKTALGPPTGSSTTLSPAQDSTFRNDSVKCLVNLAKAMGNWMDQQLKVNETVWPKGSQVYASMDSNASQISELEGTISDCDSQPDTSNPEAYDASMLEQRRAYKIELQKGISLFNRKPSKGVEFLISTKKIGSSPEEVASFLMKTAGLNGTVIGDYLGERDELPLKVMHAYVDSFNFEKKDFVEAIRFFLRGFRLPGEAQKIDRIMEKFAEHYWKCNPGSFTSADTAYVLAYSVIMLNTDAHNNMVKDKMTKADFVRNNRGIDDGKDLPEEYLGSLYDRVVKEEIRMNSDTLAPQNKQVNGLNKLLGLDGILNLVSWMQPDEKPHGANGRLIRDIQEQFQAKPEKSESVYHTVTDISILRFILEVSWGPMLAAFSVTIDQSDDRLATSLCLQGFRYAVHVTAVMGMQTQRDAFVTSMAKFTNLHCAADMKQKNVDAVKAIITIAIEDGNHLHGSWEHILTCLSRIEHLQLLGEVSPSEKRYVPTKKAEVDDKKALGFPNLKKRGSFQNPSVMAVVRGGSYDSTSLVKSVPKLVTPEQIKSFIANLNLLDQIGNFELNHVYANSQRLNSEAIVSFVKALCKVSMSELQSPTDPRVFSLTKLVETAHYNMNRIRLVWSRIWNVLSDFFVSVGLSENLSVAIFVMDSLRQLSMKFLEREELANYHFQHEFLRPFVVVMQKSSSAEIRELIVRCVSQMVLSRVSNVKSGWKNVFTVFTTAALDERKNIVLLAFETIEKIVRDHFHCIIETEITVYADCIRCLITFTNSKFEGDIGFNTIEFLRFCALKLEEGGLVLNEKLKNNTISALKEDFSDTQSFTDLDEQVSYWIPLLTGLCKQVSDPRPAIRKRSIEVLFHILMDHGHLFTRPFWTGIFSSIILPVFNNIRSKTDMLFEESVDSPSSASLDTEETTWDVETSTLALQLLVDLLVKFFRSVRSQLPSVVSIIVGFIKSPFQGSTGSGISVLLHLADGLARSASEDEWREIFLALKEAASLTFAGFMKVLRTMDDIEDVETLSGQSVNIGDLDDDSLHIMSYVVSRTKKHIDVLSQIVEVVSDLYRRNQFSLSASHVDILADIFSCIASHAQQLNTDTVLRRKFKRACSVQNLTEPQLLNFENEAYKSYMMFLQDMVTCNPNVSKELDLESRLVTECAKIVKIYLKCTDPQQQEQQQRKPVLWVLPMESDRVEEATARTSLLVSSLEALCSLEAESLKKHVSSFFPLLVDLVRTEHCSPQVPYVLSNVLKSCIGPILA

SEQ ID NO: 27855 - protein, 1518 aa, Arabidopsis thaliana
  misc_feature (1)..(1518): Ceres Seq. ID no. 2049941
MMLVIFTRSEEDSLDVSVKTIYVNELLTFTDKSVNEGSSVYFCQGFVNEVMAAGQGSPLPPPDVIQILLQNPETETVMTPDSPSFRGYVANGEGDSETGDMSKVRQDAFLLFKNLCKLSMRFSSKENNDDQIMVRGKTLSLELLKVIIDNGGSVWRTNESFINAVKQYLCLSLLKNSAVSIMSIFQLQCAIFMSLLSKLRSVLKAEIGIFFPMIVLRVLENVLQPSYLQKMTVLNLLDKMSQDPQLMVDIFVNYDCDVESSNILERIVNGLLKTALGPPTGSSTTLSPAQDSTFRNDSVKCLVNLAKAMGNWMDQQLKVNETVWPKGSQVYASMDSNASQISELEGTISDCDSQPDTSNPEAYDASMLEQRRAYKIELQKGISLFNRKPSKGVEFLISTKKIGSSPEEVASFLMKTAGLNGTVIGDYLGERDELPLKVMHAYVDSFNFEKKDFVEAIRFFLRGFRLPGEAQKIDRIMEKFAEHYWKCNPGSFTSADTAYVLAYSVIMLNTDAHNNMVKDKMTKADFVRNNRGIDDGKDLPEEYLGSLYDRVVKEEIRMNSDTLAPQNKQVNGLNKLLGLDGILNLVSWMQPDEKPHGANGRLIRDIQEQFQAKPEKSESVYHTVTDISILRFILEVSWGPMLAAFSVTIDQSDDRLATSLCLQGFRYAVHVTAVMGMQTQRDAFVTSMAKFTNLHCAADMKQKNVDAVKAIITIAIEDGNHLHGSWEHILTCLSRIEHLQLLGEVSPSEKRYVPTKKAEVDDKKALGFPNLKKRGSFQNPSVMAVVRGGSYDSTSLVKSVPKLVTPEQIKSFIANLNLLDQIGNFELNHVYANSQRLNSEAIVSFVKALCKVSMSELQSPTDPRVFSLTKLVETAHYNMNRIRLVWSRIWNVLSDFFVSVGLSENLSVAIFVMDSLRQLSMKFLEREELANYHFQHEFLRPFVVVMQKSSSAEIRELIVRCVSQMVLSRVSNVKSGWKNVFTVFTTAALDERKNIVLLAFETIEKIVRDHFHCIIETEITVYADCIRCLITFTNSKFEGDIGFNTIEFLRFCALKLEEGGLVLNEKLKNNTISALKEDFSDTQSFTDLDEQVSYWIPLLTGLCKQVSDPRPAIRKRSIEVLFHILMDHGHLFTRPFWTGIFSSIILPVFNNIRSKTDMLFEESVDSPSSASLDTEETTWDVETSTLALQLLVDLLVKFFRSVRSQLPSVVSIIVGFIKSPFQGSTGSGISVLLHLADGLARSASEDEWREIFLALKEAASLTFAGFMKVLRTMDDIEDVETLSGQSVNIGDLDDDSLHIMSYVVSRTKKHIDVLSQIVEVVSDLYRRNQFSLSASHVDILADIFSCIASHAQQLNTDTVLRRKFKRACSVQNLTEPQLLNFENEAYKSYMMFLQDMVTCNPNVSKELDLESRLVTECAKIVKIYLKCTDPQQQEQQQRKPVLWVLPMESDRVEEATARTSLLVSSLEALCSLEAESLKKHVSSFFPLLVDLVRTEHCSPQVPYVLSNVLKSCIGPILA

SEQ ID NO: 27856 - protein, 1517 aa, Arabidopsis thaliana
  misc_feature (1)..(1517): Ceres Seq. ID no. 2049942
MLVIFTRSEEDSLDVSVKTIYVNELLTFTDKSVNEGSSVYFCQGFVNEVMAAGQGSPLPPPDVIQILLQNPETETVMTPDSPSFRGYVANGEGDSETGDMSKVRQDAFLLFKNLCKLSMRFSSKENNDDQIMVRGKTLSLELLKVIIDNGGSVWRTNESFINAVKQYLCLSLLKNSAVSIMSIFQLQCAIFMSLLSKLRSVLKAEIGIFFPMIVLRVLENVLQPSYLQKMTVLNLLDKMSQDPQLMVDIFVNYDCDVESSNILERIVNGLLKTALGPPTGSSTTLSPAQDSTFRNDSVKCLVNLAKAMGNWMDQQLKVNETVWPKGSQVYASMDSNASQISELEGTISDCDSQPDTSNPEAYDASMLEQRRAYKIELQKGISLFNRKPSKGVEFLISTKKIGSSPEEVASFLMKTAGLNGTVIGDYLGERDELPLKVMHAYVDSFNFEKKDFVEAIRFFLRGFRLPGEAQKIDRIMEKFAEHYWKCNPGSFTSADTAYVLAYSVIMLNTDAHNNMVKDKMTKADFVRNNRGIDDGKDLPEEYLGSLYDRVVKEEIRMNSDTLAPQNKQVNGLNKLLGLDGILNLVSWMQPDEKPHGANGRLIRDIQEQFQAKPEKSESVYHTVTDISILRFILEVSWGPMLAAFSVTIDQSDDRLATSLCLQGFRYAVHVTAVMGMQTQRDAFVTSMAKFTNLHCAADMKQKNVDAVKAIITIAIEDGNHLHGSWEHILTCLSRIEHLQLLGEVSPSEKRYVPTKKAEVDDKKALGFPNLKKRGSFQNPSVMAVVRGGSYDSTSLVKSVPKLVTPEQIKSFIANLNLLDQIGNFELNHVYANSQRLNSEAIVSFVKALCKVSMSELQSPTDPRVFSLTKLVETAHYNMNRIRLVWSRIWNVLSDFFVSVGLSENLSVAIFVMDSLRQLSMKFLEREELANYHFQHEFLRPFVVVMQKSSSAEIRELIVRCVSQMVLSRVSNVKSGWKNVFTVFTTAALDERKNIVLLAFETIEKIVRDHFHCIIETEITVYADCIRCLITFTNSKFEGDIGFNTIEFLRFCALKLEEGGLVLNEKLKNNTISALKEDFSDTQSFTDLDEQVSYWIPLLTGLCKQVSDPRPAIRKRSIEVLFHILMDHGHLFTRPFWTGIFSSIILPVFNNIRSKTDMLFEESVDSPSSASLDTEETTWDVETSTLALQLLVDLLVKFFRSVRSQLPSVVSIIVGFIKSPFQGSTGSGISVLLHLADGLARSASEDEWREIFLALKEAASLTFAGFMKVLRTMDDIEDVETLSGQSVNIGDLDDDSLHIMSYVVSRTKKHIDVLSQIVEVVSDLYRRNQFSLSASHVDILADIFSCIASHAQQLNTDTVLRRKFKRACSVQNLTEPQLLNFENEAYKSYMMFLQDMVTCNPNVSKELDLESRLVTECAKIVKIYLKCTDPQQQEQQQRKPVLWVLPMESDRVEEATARTSLLVSSLEALCSLEAESLKKHVSSFFPLLVDLVRTEHCSPQVPYVLSNVLKSCIGPILA

SEQ ID NO: 27857 - DNA, 1665 bp, Arabidopsis thaliana
  misc_feature (1)..(1665): Ceres Seq. ID no. 2051502
atggcggatacaatggttgctcatatggaccgacataataagatagatgttgagatctcagaagatgacaagagattaacaaagctttgctctctaaagaagaaggctataaatgcgacgaacaagtttaagcactcaatgaccaagaaaggtcgaaggcatagccgtgtggcgtgtgtctcaatcgtcgatgaaatcgatacagaagagttgcaagcggttgatgctttccgtcaagctcttattttagacgaactacttccctctaagcatgatgatcatcacatgatgcttaggttcttgagggcaagaaagtttgatctcgaaaaggctaagcaaatgtggtctgatatgcttaactggaggaaagaatatggcgcagacacgatcatggaggactttgatttcaaagaaatcgaagaagtggttaagtattatccacaaggatatcatggtgttgacaaggaaggaagacctatctatattgagaggctaggccaagttgatgccacaaagctgatgaaagtgaccacaattgataggtacgtgaagtaccatgtgaaagagttcgagaagactttcaacgtcaaattccctgcttgttccatcgctgcgaaacgacacattgatcagagcacaacgatcttggatgttcaaggcgtggggcttagtaacttcaacaaagctgcaaaagatcttcttcagagtattcagaaaatcgacaacgataactaccctgagacgctgaaccgtatgttcatcatcaatgctggttgtgggtttaggcttttatggaacacagtgaaatctttccttgacccaaagactacagcaaagattcacgttcttggcaacaaataccaaaccaaacttctagaaatcattgacgccaatgaactgcctgagttcttgggtggtaagtgcacctgcgcagacaaaggtggatgtatgcgttcagacaaaggtccatggaacgaccctgagatcttcaagttggttcagaacggtgaaggtagatgcctgcgaaggagcttgtcagggatcgaggaaaagacaatctttgagtataacaacgaaacaaagaagaaatgcgaaccagaagagactcacaagcaatctgctgcggagatggagaagaagttcatcgacacgaatgtggatgctgcagcggctgctgattggcctacaaagcttaacaaggctgaaaaaaaccctaccgaccttaaagatgtgtactcagctgtgaatccgttggagaggaaagggtacttatatggcagcgtcatggcattgctaatggggatagtgggagtgatgaggctaaccaagaacatgccaaggaggctcaccgaggcaaatgtttatagccgtgaaggcagcgccgtctaccaggacggagtgactgttatgtcgaagcaggagtatattgcgatggtgaagaagataacagatcttgaggagaaatgtaagtccatggaagctcaggctgcgttttatatggagagggagaagactctagacgctgcacttcgtcgtattgaccagctcgagcttcagttgtctgaaaccaacaaggcactagacgagacaatgacgaggcaacatgagataatggctttcatcgagaagaaaaagaagaagaagcggaagttcttattattctag

SEQ ID NO: 27858 - protein, 554 aa, Arabidopsis thaliana
  misc_feature (1)..(554): Ceres Seq. ID no. 2051503
MADTMVAHMDRHNKIDVEISEDDKRLTKLCSLKKKAINATNKFKHSMTKKGRRHSRVACVSIVDEIDTEELQAVDAFRQALILDELLPSKHDDHHMMLRFLRARKFDLEKAKQMWSDMLNWRKEYGADTIMEDFDFKEIEEVVKYYPQGYHGVDKEGRPIYIERLGQVDATKLMKVTTIDRYVKYHVKEFEKTFNVKFPACSIAAKRHIDQSTTILDVQGVGLSNFNKAAKDLLQSIQKIDNDNYPETLNRMFIINAGCGFRLLWNTVKSFLDPKTTAKIHVLGNKYQTKLLEIIDANELPEFLGGKCTCADKGGCMRSDKGPWNDPEIFKLVQNGEGRCLRRSLSGIEEKTIFEYNNETKKKCEPEETHKQSAAEMEKKFIDTNVDAAAAADWPTKLNKAEKNPTDLKDVYSAVNPLERKGYLYGSVMALLMGIVGVMRLTKNMPRRLTEANVYSREGSAVYQDGVTVMSKQEYIAMVKKITDLEEKCKSMEAQAAFYMEREKTLDAALRRIDQLELQLSETNKALDETMTRQHEIMAFIEKKKKKKRKFLLF

SEQ ID NO: 27859 - protein, 550 aa, Arabidopsis thaliana
  misc_feature (1)..(550): Ceres Seq. ID no. 2051504
MVAHMDRHNKIDVEISEDDKRLTKLCSLKKKAINATNKFKHSMTKKGRRHSRVACVSIVDEIDTEELQAVDAFRQALILDELLPSKHDDHHMMLRFLRARKFDLEKAKQMWSDMLNWRKEYGADTIMEDFDFKEIEEVVKYYPQGYHGVDKEGRPIYIERLGQVDATKLMKVTTIDRYVKYHVKEFEKTFNVKFPACSIAAKRHIDQSTTILDVQGVGLSNFNKAAKDLLQSIQKIDNDNYPETLNRMFIINAGCGFRLLWNTVKSFLDPKTTAKIHVLGNKYQTKLLEIIDANELPEFLGGKCTCADKGGCMRSDKGPWNDPEIFKLVQNGEGRCLRRSLSGIEEKTIFEYNNETKKKCEPEETHKQSAAEMEKKFIDTNVDAAAAADWPTKLNKAEKNPTDLKDVYSAVNPLERKGYLYGSVMALLMGIVGVMRLTKNMPRRLTEANVYSREGSAVYQDGVTVMSKQEYIAMVKKITDLEEKCKSMEAQAAFYMEREKTLDAALRRIDQLELQLSETNKALDETMTRQHEIMAFIEKKKKKKRKFLLF

SEQ ID NO: 27860 - protein, 546 aa, Arabidopsis thaliana
  misc_feature (1)..(546): Ceres Seq. ID no. 2051505
MDRHNKIDVEISEDDKRLTKLCSLKKKAINATNKFKHSMTKKGRRHSRVACVSIVDEIDTEELQAVDAFRQALILDELLPSKHDDHHMMLRFLRARKFDLEKAKQMWSDMLNWRKEYGADTIMEDFDFKEIEEVVKYYPQGYHGVDKEGRPIYIERLGQVDATKLMKVTTIDRYVKYHVKEFEKTFNVKFPACSIAAKRHIDQSTTILDVQGVGLSNFNKAAKDLLQSIQKIDNDNYPETLNRMFIINAGCGFRLLWNTVKSFLDPKTTAKIHVLGNKYQTKLLEIIDANELPEFLGGKCTCADKGGCMRSDKGPWNDPEIFKLVQNGEGRCLRRSLSGIEEKTIFEYNNETKKKCEPEETHKQSAAEMEKKFIDTNVDAAAAADWPTKLNKAEKNPTDLKDVYSAVNPLERKGYLYGSVMALLMGIVGVMRLTKNMPRRLTEANVYSREGSAVYQDGVTVMSKQEYIAMVKKITDLEEKCKSMEAQAAFYMEREKTLDAALRRIDQLELQLSETNKALDETMTRQHEIMAFIEKKKKKKRKFLLF

SEQ ID NO: 27861 - DNA, 1500 bp, Arabidopsis thaliana
  misc_feature (1)..(1500): Ceres Seq. ID no. 2051898
atgagcactatgtggagagaaacaaggaatgtattcatagttccattgttcaagtgtatagtggttatgtgtttgatcatctcgctcttagttttcgttgagagtgtttacatgaaccttgtagtactctatgtcaagttgtttaaccgaaaaccagagaaagtctacaaatgggaggcaatgcaggaggatatggagcttggtcatcaaaattatccgatggtccttgttcaaatcccaatgtacaacgaacgagaggtctttgaattatctataggtgctgcgtgcagactaacatggccatcggaccgtctaattgttcaagttttagatgattccaccgatccagcaatcatggaactggtgagcatggaatgtacaaaatgggcatcaaaagacataaatataaattatgagaggcgagagaacagaaatggctacaaggctggagctcttaagcacggcatgaggcacagttacgtcaagcagtgccaatatcttgccatctttgatgctgatttccagcccgagcccgattacctccaacgcgctatcccctttcttatccacaaccctgaggtcgctcttgtccaagctcgatggagatttgtaaacgctaacacatgcttaatgacgaggatgcaagagatgtctctgaactaccatttcatggcagagcaacaatctggatccacaagacatgctttctttggctttaatggaactgcgggagtatggagaatggtggcgatggaagaagctggaggatggaaggaccggacgacggtagaggacatggacttggccgttcgtgttggtcttctcggttggaaatttatcttcgtcaatgacctcgaggttaaaagcgagctaccaagccaatttaaggcctttcgattccaacagcatcggtggtcttgtggtccagccaatcttattaggaaaatgacgatggaaattattcacaataagagagtgaagatttggaagaagttttacgtgatctacagcttctttttcctacggaagatcgtagtccacttcttcacttatttcttttactgtgtcattcttcctacaagtgtcttccttcccgaagtaaatataccgaactggtcaactatatatgttccttctgtcatcaccctcttgagtgccattgccactccaagatcattctacctcgtgattttttgggtcttattcgaaaatgtaatggctatgcaccggaccaagggaactttgattggcttatttgaaggaggaagagtcaatgaatgggttgtcacagagaaattaggagatactcttaacactaagctacttccccagaatggacgacttccgaaaagagtaaatttgaaggagatgatgatgggtatatacatattatgttgtgcttgctacgactttgcatttggaaatgcatttttatatttgtatctcttcatgcaagccactgcttttctcatctccggagttggctttgttggaacttaa

SEQ ID NO: 27862 - protein, 499 aa, Arabidopsis thaliana
  misc_feature (1)..(499): Ceres Seq. ID no. 2051899
MSTMWRETRNVFIVPLFKCIVVMCLIISLLVFVESVYMNLVVLYVKLFNRKPEKVYKWEAMQEDMELGHQNYPMVLVQIPMYNEREVFELSIGAACRLTWPSDRLIVQVLDDSTDPAIMELVSMECTKWASKDININYERRENRNGYKAGALKHGMRHSYVKQCQYLAIFDADFQPEPDYLQRAIPFLIHNPEVALVQARWRFVNANTCLMTRMQEMSLNYHFMAEQQSGSTRHAFFGFNGTAGVWRMVAMEEAGGWKDRTTVEDMDLAVRVGLLGWKFIFVNDLEVKSELPSQFKAFRFQQHRWSCGPANLIRKMTMEIIHNKRVKIWKKFYVIYSFFFLRKIVVHFFTYFFYCVILPTSVFLPEVNIPNWSTIYVPSVITLLSAIATPRSFYLVIFWVLFENVMAMHRTKGTLIGLFEGGRVNEWVVTEKLGDTLNTKLLPQNGRLPKRVNLKEMMMGIYILCCACYDFAFGNAFLYLYLFMQATAFLISGVGFVGT

SEQ ID NO: 27863 - protein, 496 aa, Arabidopsis thaliana
  misc_feature (1)..(496): Ceres Seq. ID no. 2051900
MWRETRNVFIVPLFKCIVVMCLIISLLVFVESVYMNLVVLYVKLFNRKPEKVYKWEAMQEDMELGHQNYPMVLVQIPMYNEREVFELSIGAACRLTWPSDRLIVQVLDDSTDPAIMELVSMECTKWASKDININYERRENRNGYKAGALKHGMRHSYVKQCQYLAIFDADFQPEPDYLQRAIPFLIHNPEVALVQARWRFVNANTCLMTRMQEMSLNYHFMAEQQSGSTRHAFFGFNGTAGVWRMVAMEEAGGWKDRTTVEDMDLAVRVGLLGWKFIFVNDLEVKSELPSQFKAFRFQQHRWSCGPANLIRKMTMEIIHNKRVKIWKKFYVIYSFFFLRKIVVHFFTYFFYCVILPTSVFLPEVNIPNWSTIYVPSVITLLSAIATPRSFYLVIFWVLFENVMAMHRTKGTLIGLFEGGRVNEWVVTEKLGDTLNTKLLPQNGRLPKRVNLKEMMMGIYILCCACYDFAFGNAFLYLYLFMQATAFLISGVGFVGT

SEQ ID NO: 27864 - protein, 477 aa, Arabidopsis thaliana
  misc_feature (1)..(477): Ceres Seq. ID no. 2051901
MCLIISLLVFVESVYMNLVVLYVKLFNRKPEKVYKWEAMQEDMELGHQNYPMVLVQIPMYNEREVFELSIGAACRLTWPSDRLIVQVLDDSTDPAIMELVSMECTKWASKDININYERRENRNGYKAGALKHGMRHSYVKQCQYLAIFDADFQPEPDYLQRAIPFLIHNPEVALVQARWRFVNANTCLMTRMQEMSLNYHFMAEQQSGSTRHAFFGFNGTAGVWRMVAMEEAGGWKDRTTVEDMDLAVRVGLLGWKFIFVNDLEVKSELPSQFKAFRFQQHRWSCGPANLIRKMTMEIIHNKRVKIWKKFYVIYSFFFLRKIVVHFFTYFFYCVILPTSVFLPEVNIPNWSTIYVPSVITLLSAIATPRSFYLVIFWVLFENVMAMHRTKGTLIGLFEGGRVNEWVVTEKLGDTLNTKLLPQNGRLPKRVNLKEMMMGIYILCCACYDFAFGNAFLYLYLFMQATAFLISGVGFVGT

SEQ ID NO: 27865 - DNA, 2331 bp, Arabidopsis thaliana
  misc_feature (1)..(2331): Ceres Seq. ID no. 2052999
atggctgctaagagatctatctactgtcttcttcttcttcctctgctcttgtctttactgatctggattccttcgatctccttagctgctactaaccctgatgatgttgctgcaattaacggattattcgctgcacttggagcacctgttcttcctggttggattgcttctggtggagacccatgtggtgaagcttggcaaggcattatctgcaatgtttcagatattataagcataactgtaaatgctgcaaatttgcaaggagagcttggtgacaacttagctaagttcacttctatcaggggaatagatttcagcaacaatcgcattggaggaagcataccttctactttgccggttacattgcagcatttttttctttcagctaatcagttcaccggaagcatcccggaatctctaggaacattgagttttctgaatgacatgtctttgaacgataaccttctctctggagagctacccgacgtgtttcaaaaccttgtcgggctgattaatcttgatatatcatctaacaatataagcggcacattgcctccttctatggagaatttattaactcttacaacattacgtgttcagaacaatcagctctcaggaactctggacgttcttcaaggccttcctcttcaagacttaaacatagagaataacctcttctctggacccataccggacaaattactaagcattccgaaattcctacatgaaggaaacccgttcaatgccacaatgatcaattccacctcgactgcaccatcattgtctccgtctctatctccaacaaaaccagctccaacgcgaccattttctggagttccacctcctccaaatgagaggaatcgagggaaagttgctgatggaccttctgattcagaaggatcgagctctgagaattcaaagggaaagaactcttcacatactaaaaagataatccttattgcattcgctggcgtcctcgtcttcataattctggttttggcaatactcttgctgttgccaaaatgtgcaagacgtagagaacatgctaacagagttttcaaaccgcatcaagttggtgctgatagaggaagcagagagaatgctctggaaaacgggactccggtactgccaccacctggtcgatctgaaaaagttcaaagagaacccttcaagaaagctggagaggaaccaaaggtcttacatgaccttgagaggctgcggagacctgcacctatatcaagacaggaaagtcaagatattgacttttcaatgttgatgcctcctcctccaccacctccaccaccaccaccacctcctcctttggatgagaaggtcacggttatgccaatcatatcacccgaaagacccgttaagaaaacttcccctaaacgcttacccttaacttctgtgaagcactattctattgcttctcttcaacaatacacggaaagcttcgctcaggaaaatctcattggctcaggcatgctcggtagtgtttatagggcccggcttcccaatggaaagttgtttgctgtcaagaagttggacaagagggcttctgaacaacaacaggatcacgaatttatcgaactagtgaacaatatagatatgattcgccactccaatatcgttgaacttgtgggttactgtgctgagcacgatcaaagactattggtctacgaatattgcagtaacggtacgttacaagacgggttgcattcagacgatgaattcaagaagaaactttcgtggaatacccgtgtcagtatggcacttggagctgctagagcccttgagtacttgcatgaggtgtgtgaaccacctatcatacacagaaacttcaaatcagccaatgttctactcgacgatgacctgagtgttcttgtctcagattgtggtttggccccactaatatcatcaggctctgtgagtcagttatcagggcaattgctagccgcttacggatatggagctccagagttcgactctggaatctatacatggcagagtgatgtatatagttttggtgttgttatgttagaactattgacgggtagaatgtcctacgatagggaccggagtagaggagagcagttcttggtgaggtgggcaatcccacagcttcatgatatcgatgcattgggcaaaatggttgatccatctcttaatggacaataccctgcaaagtcattgtcacactttgctgatataatatcccggtgtgttcagtctgaaccagaatttagaccactgatgtcagaagttgttcaagatctactagatatgatcagaagagagcgtcatggttcgggtgattctaccgcggactag

SEQ ID NO: 27866 - protein, 776 aa, Arabidopsis thaliana
  misc_feature (1)..(776): Ceres Seq. ID no. 2053000
MAAKRSIYCLLLLPLLLSLLIWIPSISLAATNPDDVAAINGLFAALGAPVLPGWIASGGDPCGEAWQGIICNVSDIISITVNAANLQGELGDNLAKFTSIRGIDFSNNRIGGSIPSTLPVTLQHFFLSANQFTGSIPESLGTLSFLNDMSLNDNLLSGELPDVFQNLVGLINLDISSNNISGTLPPSMENLLTLTTLRVQNNQLSGTLDVLQGLPLQDLNIENNLFSGPIPDKLLSIPKFLHEGNPFNATMINSTSTAPSLSPSLSPTKPAPTRPFSGVPPPPNERNRGKVADGPSDSEGSSSENSKGKNSSHTKKIILIAFAGVLVFIILVLAILLLLPKCARRREHANRVFKPHQVGADRGSRENALENGTPVLPPPGRSEKVQREPFKKAGEEPKVLHDLERLRRPAPISRQESQDIDFSMLMPPPPPPPPPPPPPPLDEKVTVMPIISPERPVKKTSPKRLPLTSVKHYSIASLQQYTESFAQENLIGSGMLGSVYRARLPNGKLFAVKKLDKRASEQQQDHEFIELVNNIDMIRHSNIVELVGYCAEHDQRLLVYEYCSNGTLQDGLHSDDEFKKKLSWNTRVSMALGAARALEYLHEVCEPPIIHRNFKSANVLLDDDLSVLVSDCGLAPLISSGSVSQLSGQLLAAYGYGAPEFDSGIYTWQSDVYSFGVVMLELLTGRMSYDRDRSRGEQFLVRWAIPQLHDIDALGKMVDPSLNGQYPAKSLSHFADIISRCVQSEPEFRPLMSEVVQDLLDMIRRERHGSGDSTAD

SEQ ID NO: 27867 - protein, 628 aa, Arabidopsis thaliana
  misc_feature (1)..(628): Ceres Seq. ID no. 2053001
MSLNDNLLSGELPDVFQNLVGLINLDISSNNISGTLPPSMENLLTLTTLRVQNNQLSGTLDVLQGLPLQDLNIENNLFSGPIPDKLLSIPKFLHEGNPFNATMINSTSTAPSLSPSLSPTKPAPTRPFSGVPPPPNERNRGKVADGPSDSEGSSSENSKGKNSSHTKKIILIAFAGVLVFIILVLAILLLLPKCARRREHANRVFKPHQVGADRGSRENALENGTPVLPPPGRSEKVQREPFKKAGEEPKVLHDLERLRRPAPISRQESQDIDFSMLMPPPPPPPPPPPPPPLDEKVTVMPIISPERPVKKTSPKRLPLTSVKHYSIASLQQYTESFAQENLIGSGMLGSVYRARLPNGKLFAVKKLDKRASEQQQDHEFIELVNNIDMIRHSNIVELVGYCAEHDQRLLVYEYCSNGTLQDGLHSDDEFKKKLSWNTRVSMALGAARALEYLHEVCEPPIIHRNFKSANVLLDDDLSVLVSDCGLAPLISSGSVSQLSGQLLAAYGYGAPEFDSGIYTWQSDVYSFGVVMLELLTGRMSYDRDRSRGEQFLVRWAIPQLHDIDALGKMVDPSLNGQYPAKSLSHFADIISRCVQSEPEFRPLMSEVVQDLLDMIRRERHGSGDSTAD

SEQ ID NO: 27868 - protein, 589 aa, Arabidopsis thaliana
  misc_feature (1)..(589): Ceres Seq. ID no. 2053002
MENLLTLTTLRVQNNQLSGTLDVLQGLPLQDLNIENNLFSGPIPDKLLSIPKFLHEGNPFNATMINSTSTAPSLSPSLSPTKPAPTRPFSGVPPPPNERNRGKVADGPSDSEGSSSENSKGKNSSHTKKIILIAFAGVLVFIILVLAILLLLPKCARRREHANRVFKPHQVGADRGSRENALENGTPVLPPPGRSEKVQREPFKKAGEEPKVLHDLERLRRPAPISRQESQDIDFSMLMPPPPPPPPPPPPPPLDEKVTVMPIISPERPVKKTSPKRLPLTSVKHYSIASLQQYTESFAQENLIGSGMLGSVYRARLPNGKLFAVKKLDKRASEQQQDHEFIELVNNIDMIRHSNIVELVGYCAEHDQRLLVYEYCSNGTLQDGLHSDDEFKKKLSWNTRVSMALGAARALEYLHEVCEPPIIHRNFKSANVLLDDDLSVLVSDCGLAPLISSGSVSQLSGQLLAAYGYGAPEFDSGIYTWQSDVYSFGVVMLELLTGRMSYDRDRSRGEQFLVRWAIPQLHDIDALGKMVDPSLNGQYPAKSLSHFADIISRCVQSEPEFRPLMSEVVQDLLDMIRRERHGSGDSTAD

SEQ ID NO: 27869 - DNA, 1449 bp, Arabidopsis thaliana
  misc_feature (1)..(1449): Ceres Seq. ID no. 2053617
atggtagaagtttatgagttattaactgtgatggtttcactcattgtggtgaagctatttcattggatatatcagtcgaagaatccgaaacctaatgaaaaactacctccagggtcgatgggttttccgatcattggagagacttttgagttcatgaagcctcatgacgcttttcagtttccaacattcatcaaggagagaatcatcagatatggaccaatttttcggacaagtttatttggagccaaagttataatctcgacggatattgaattaaatatggagatagcaaagacaaaccatgctcctggtctcacaaagagcatagcacaactctttggagaaaacaacttgttttttcagagcaaggagtctcataaacatgtccgaaacttgacattccagttgttaggttcacaaggtttgaaattgagtgtgatgcaagacatcgatctcttgactcgcacacacatggaagaaggagctaggagaggttgtcttgacgtcaaggaaatatcaagcaagattttaattgaatgccttgcaaagaaagttaccggcgacatggaaccagaggcggcgaaagaactcgcactctgttggagatgttttccgagtggctggtttagattccctctcaatcttcctgggactggtgtttataaaatgatgaaagcaagaaagaggatgcttcacttactaaaggagacaatactgaagaagagagcatcaggagaggagttaggggagttcttcaagatcatctttgaaggagcggaaacaatgagcgtagacaatgcgatcgagtacatatacaccttatttctgcttgctaacgaaacaacaccacgtattcttgcagctacaataaagctcataagtgacaaccctaaagtcatgaaggagttgcatagagagcatgagggaattgtccggggtaagactgagaaggagaccagcataacatgggaagagtacaaatctatgacatttacccaaatggtgatcaatgagtcccttaggatcacaagcacggcgccaacagtatttagaatatttgatcatgagttccaagttggttcttataaaattccagctggttggatcttcatgggctatccaaacaatcatttcaatccaaaaacttacgatgaccctttagtattcaatccatggcgttgggagggaaaagacttgggcgcgatcgtctctcggacttacattccctttggtgctggctctagacaatgtgtaggagctgagtttgctaagctgcaaatggccatttttatccatcatttgtctagagacaggtggtcaatgaagataggaaccacaatacttcgaaactttgtactcatgtttccaaatggatgtgaggttcaattcttaaaagacactgaagtggataactcgagtggttcgaatcccgattgctgcaatggataa

SEQ ID NO: 27870 - protein, 482 aa, Arabidopsis thaliana
  misc_feature (1)..(482): Ceres Seq. ID no. 2053618
MVEVYELLTVMVSLIVVKLFHWIYQSKNPKPNEKLPPGSMGFPIIGETFEFMKPHDAFQFPTFIKERIIRYGPIFRTSLFGAKVIISTDIELNMEIAKTNHAPGLTKSIAQLFGENNLFFQSKESHKHVRNLTFQLLGSQGLKLSVMQDIDLLTRTHMEEGARRGCLDVKEISSKILIECLAKKVTGDMEPEAAKELALCWRCFPSGWFRFPLNLPGTGVYKMMKARKRMLHLLKETILKKRASGEELGEFFKIIFEGAETMSVDNAIEYIYTLFLLANETTPRILAATIKLISDNPKVMKELHREHEGIVRGKTEKETSITWEEYKSMTFTQMVINESLRITSTAPTVFRIFDHEFQVGSYKIPAGWIFMGYPNNHFNPKTYDDPLVFNPWRWEGKDLGAIVSRTYIPFGAGSRQCVGAEFAKLQMAIFIHHLSRDRWSMKIGTTILRNFVLMFPNGCEVQFLKDTEVDNSSGSNPDCCNG

SEQ ID NO: 27871 - protein, 472 aa, Arabidopsis thaliana
  misc_feature (1)..(472): Ceres Seq. ID no. 2053619
MVSLIVVKLFHWIYQSKNPKPNEKLPPGSMGFPIIGETFEFMKPHDAFQFPTFIKERIIRYGPIFRTSLFGAKVIISTDIELNMEIAKTNHAPGLTKSIAQLFGENNLFFQSKESHKHVRNLTFQLLGSQGLKLSVMQDIDLLTRTHMEEGARRGCLDVKEISSKILIECLAKKVTGDMEPEAAKELALCWRCFPSGWFRFPLNLPGTGVYKMMKARKRMLHLLKETILKKRASGEELGEFFKIIFEGAETMSVDNAIEYIYTLFLLANETTPRILAATIKLISDNPKVMKELHREHEGIVRGKTEKETSITWEEYKSMTFTQMVINESLRITSTAPTVFRIFDHEFQVGSYKIPAGWIFMGYPNNHFNPKTYDDPLVFNPWRWEGKDLGAIVSRTYIPFGAGSRQCVGAEFAKLQMAIFIHHLSRDRWSMKIGTTILRNFVLMFPNGCEVQFLKDTEVDNSSGSNPDCCNG

SEQ ID NO: 27872 - protein, 443 aa, Arabidopsis thaliana
  misc_feature (1)..(443): Ceres Seq. ID no. 2053620
MGFPIIGETFEFMKPHDAFQFPTFIKERIIRYGPIFRTSLFGAKVIISTDIELNMEIAKTNHAPGLTKSIAQLFGENNLFFQSKESHKHVRNLTFQLLGSQGLKLSVMQDIDLLTRTHMEEGARRGCLDVKEISSKILIECLAKKVTGDMEPEAAKELALCWRCFPSGWFRFPLNLPGTGVYKMMKARKRMLHLLKETILKKRASGEELGEFFKIIFEGAETMSVDNAIEYIYTLFLLANETTPRILAATIKLISDNPKVMKELHREHEGIVRGKTEKETSITWEEYKSMTFTQMVINESLRITSTAPTVFRIFDHEFQVGSYKIPAGWIFMGYPNNHFNPKTYDDPLVFNPWRWEGKDLGAIVSRTYIPFGAGSRQCVGAEFAKLQMAIFIHHLSRDRWSMKIGTTILRNFVLMFPNGCEVQFLKDTEVDNSSGSNPDCCNG

SEQ ID NO: 27873 - DNA, 2199 bp, Arabidopsis thaliana
  misc_feature (1)..(2199): Ceres Seq. ID no. 2053819
atgtcatatggatacgacgatgaggatgcaaagaggaaaaagagatatgtaattatctctatctcctctgttcttttaatctccatggttgtcgctgttaccataggtgttagcgtcaacaagtccgataacgctggtgacgaagaaatcacaacttctgttaaagccatcaaagatgtttgtgcaccgacggattacaaagagacttgtgaggatacactaaggaaagatgcgaaggacacatcagacccgttggagctggtgaagacagcttttaacgcaacgatgaaacaaataagtgacgtggcaaagaagtcacaaactatgattgagctacaaaaggatccaagggcaaagatggcgttggatcaatgcaaggagctaatggattacgcaatcggtgagcttagtaagtcgtttgaagagttggggaagttcgagtttcataaagttgatgaggccttggttaagttgaggatttggcttagtgcgacgataagccatgagcaaacttgtcttgatgggtttcaagggacacaaggtaatgctggtgagacgataaagaaggcgttgaaaaccgcggtgcagttaacgcataacgggcttgcaatggttaccgaaatgtcgaattacttaggacaaatgcagattccggagatgaatagtagacggttgttgtcccaagagtttccttcgtggatggatgcgcgagcacgtaggctattgaacgctcctatgtccgaggtaaaacccgatatcgtggtggcgcaagacggaagtggtcagtacaagacgattaacgaggcattgaattttgtcccgaagaagaagaacacgactttcgtggttcatattaaggaaggaatctataaagagtatgttcaggtgaataggagcatgacacatctagttttcataggtgatggccccgacaaaactgtcatttctggcagcaaaagttacaaggacggtattactacctacaaaacagccaccgttgcaatcgttggagatcatttcattgccaagaacattgccttcgagaacacagccggggcaataaagcatcaagcggttgctattagggttctagcagatgagtcaatattctacaattgtaaattcgatggttaccaagacactctatatgcacattcccaccgtcagttttaccgtgactgtactatctcgggcacaatcgattttctctttggagacgcagctgcggtattccaaaactgtactttactggtgagaaagccacttctaaaccaagcatgccccattacagcccatggacgtaaagatccgcgagaatccacgggatttgttctccaaggatgtacgattgttggcgaaccggattacttggcagtcaaggaacagagcaaaacttatcttggaagaccatggaaagagtattcaagaactatcatcatgaacacgttcataccagattttgttccgccggaaggatggcaaccgtggctcggcgaattcggtcttaacacacttttctactcggaggtgcagaacactgggccgggtgcagctatcacaaaacgggttacttggccaggaatcaagaagttgagtgatgaagaaatccttaaattcactccagctcaatacatccaaggtgacgcttggattcctggtaaaggtgttccgtacatcctaggtctttttagtggaaacggttccacaaattctaccgtaactggctctagtttgtcttctaacacaacagagtcatcagattcaccttcgacggtagtaactccttcaacttctccaccagctggtcatcttggttctccatcagatacaccttcatcggtagtgtctccttcaacttctctgccagctggtcaacttggtgccccaccggctacaccatcaatggtagtgtctccttcaacttctccaccagctggtcatcttggttccccatcagatacaccttcatcgttagtttctccttcaacttctccaccagctggtcatcttggttctccatcagatacaccttcatcggtagtgactccttcagcttctccttctacttcaccatcagcttctccttctgtttcaccatcagcttttccttctgcttcaccatcagcttcaccatcagcttctccttcagtttctccttctgcttcaccatcagcttctccacaaagctcaatcggttga

SEQ ID NO: 27874 - protein, 732 aa, Arabidopsis thaliana
  misc_feature (1)..(732): Ceres Seq. ID no. 2053820
MSYGYDDEDAKRKKRYVIISISSVLLISMVVAVTIGVSVNKSDNAGDEEITTSVKAIKDVCAPTDYKETCEDTLRKDAKDTSDPLELVKTAFNATMKQISDVAKKSQTMIELQKDPRAKMALDQCKELMDYAIGELSKSFEELGKFEFHKVDEALVKLRIWLSATISHEQTCLDGFQGTQGNAGETIKKALKTAVQLTHNGLAMVTEMSNYLGQMQIPEMNSRRLLSQEFPSWMDARARRLLNAPMSEVKPDIVVAQDGSGQYKTINEALNFVPKKKNTTFVVHIKEGIYKEYVQVNRSMTHLVFIGDGPDKTVISGSKSYKDGITTYKTATVAIVGDHFIAKNIAFENTAGAIKHQAVAIRVLADESIFYNCKFDGYQDTLYAHSHRQFYRDCTISGTIDFLFGDAAAVFQNCTLLVRKPLLNQACPITAHGRKDPRESTGFVLQGCTIVGEPDYLAVKEQSKTYLGRPWKEYSRTIIMNTFIPDFVPPEGWQPWLGEFGLNTLFYSEVQNTGPGAAITKRVTWPGIKKLSDEEILKFTPAQYIQGDAWIPGKGVPYILGLFSGNGSTNSTVTGSSLSSNTTESSDSPSTVVTPSTSPPAGHLGSPSDTPSSVVSPSTSLPAGQLGAPPATPSMVVSPSTSPPAGHLGSPSDTPSSLVSPSTSPPAGHLGSPSDTPSSVVTPSASPSTSPSASPSVSPSAFPSASPSASPSASPSVSPSASPSASPQSSIG

SEQ ID NO: 27875 - protein, 704 aa, Arabidopsis thaliana
  misc_feature (1)..(704): Ceres Seq. ID no. 2053821
MVVAVTIGVSVNKSDNAGDEEITTSVKAIKDVCAPTDYKETCEDTLRKDAKDTSDPLELVKTAFNATMKQISDVAKKSQTMIELQKDPRAKMALDQCKELMDYAIGELSKSFEELGKFEFHKVDEALVKLRIWLSATISHEQTCLDGFQGTQGNAGETIKKALKTAVQLTHNGLAMVTEMSNYLGQMQIPEMNSRRLLSQEFPSWMDARARRLLNAPMSEVKPDIVVAQDGSGQYKTINEALNFVPKKKNTTFVVHIKEGIYKEYVQVNRSMTHLVFIGDGPDKTVISGSKSYKDGITTYKTATVAIVGDHFIAKNIAFENTAGAIKHQAVAIRVLADESIFYNCKFDGYQDTLYAHSHRQFYRDCTISGTIDFLFGDAAAVFQNCTLLVRKPLLNQACPITAHGRKDPRESTGFVLQGCTIVGEPDYLAVKEQSKTYLGRPWKEYSRTIIMNTFIPDFVPPEGWQPWLGEFGLNTLFYSEVQNTGPGAAITKRVTWPGIKKLSDEEILKFTPAQYIQGDAWIPGKGVPYILGLFSGNGSTNSTVTGSSLSSNTTESSDSPSTVVTPSTSPPAGHLGSPSDTPSSVVSPSTSLPAGQLGAPPATPSMVVSPSTSPPAGHLGSPSDTPSSLVSPSTSPPAGHLGSPSDTPSSVVTPSASPSTSPSASPSVSPSAFPSASPSASPSASPSVSPSASPSASPQSSIG

SEQ ID NO: 27876 - protein, 637 aa, Arabidopsis thaliana
  misc_feature (1)..(637): Ceres Seq. ID no. 2053822
MKQISDVAKKSQTMIELQKDPRAKMALDQCKELMDYAIGELSKSFEELGKFEFHKVDEALVKLRIWLSATISHEQTCLDGFQGTQGNAGETIKKALKTAVQLTHNGLAMVTEMSNYLGQMQIPEMNSRRLLSQEFPSWMDARARRLLNAPMSEVKPDIVVAQDGSGQYKTINEALNFVPKKKNTTFVVHIKEGIYKEYVQVNRSMTHLVFIGDGPDKTVISGSKSYKDGITTYKTATVAIVGDHFIAKNIAFENTAGAIKHQAVAIRVLADESIFYNCKFDGYQDTLYAHSHRQFYRDCTISGTIDFLFGDAAAVFQNCTLLVRKPLLNQACPITAHGRKDPRESTGFVLQGCTIVGEPDYLAVKEQSKTYLGRPWKEYSRTIIMNTFIPDFVPPEGWQPWLGEFGLNTLFYSEVQNTGPGAAITKRVTWPGIKKLSDEEILKFTPAQYIQGDAWIPGKGVPYILGLFSGNGSTNSTVTGSSLSSNTTESSDSPSTVVTPSTSPPAGHLGSPSDTPSSVVSPSTSLPAGQLGAPPATPSMVVSPSTSPPAGHLGSPSDTPSSLVSPSTSPPAGHLGSPSDTPSSVVTPSASPSTSPSASPSVSPSAFPSASPSASPSASPSVSPSASPSASPQSSIG

SEQ ID NO: 27877 - DNA, 1107 bp, Arabidopsis thaliana
  misc_feature (1)..(1107): Ceres Seq. ID no. 2122223
atgaatcgagatgagcatattgcaaagaaagttgaaggatcaatctctagcttctccggggagaccagtacttcctcaaaacaaatctatgttaatcccgtgaccacgaccgggacgaaatcaatggaagacgacgacgtttcactctctcttctatacaatctatctaccttacatgaaaaagtccatcagatccaatctctggtcagcttctacatggtatctactaataacattaaccaatcctcggggtcaacgtctttggccgtggctaacatcggaagtttggttcaagagatcatcacggctgcttcatccatgttatatacttgccaacaactccaaatcggatctaacaacaacaacaacgatatcgataatgatcaaaccgtagatgcaatggttttggagttttcccgacaagaaaccgacccgggtcatgattttgtgcaagagtcgaccaacctttttggtgtccaagaaagagggcagatctcgtttcccgaccagaatcttgattggtacaacaccgaaaccataaaccctaaaaaagataaacatcgttctaaaccaagttccgggagctacgatatactggagctagacgtagcggacctactagcgaaatacacgcattactgccagatttgtgggaaagggtttaagagagacgctaatctaaggatgcacatgagagcgcacggggatgagtacaagacacgtgaggccttgatcagcccaacgagccaagacaagaaaggaggatactcgttaaagaaacattactactcctgtcctcaacacgggtgtagatggaaccagaggcacgagaagtttcaaccgttgaaatctgtgatttgcgccaagaatcattacaagaggagtcattgtcccaaaatgtatatgtgcaggagatgtagtgtgaagcatttctcggttctgtctgatcttaggacacacgagaagcattgtggggatataaagtgggtttgctcttgtgggactaaattttctaggaaagacaagctgatgagccacgtttctttgtttttgggccacgtaccggcacatgggtcgtccaagccgccgacaatcaccctaaagtaa

SEQ ID NO: 27878 - protein, 368 aa, Arabidopsis thaliana
  misc_feature (1)..(368): Ceres Seq. ID no. 2122224
MNRDEHIAKKVEGSISSFSGETSTSSKQIYVNPVTTTGTKSMEDDDVSLSLLYNLSTLHEKVHQIQSLVSFYMVSTNNINQSSGSTSLAVANIGSLVQEIITAASSMLYTCQQLQIGSNNNNNDIDNDQTVDAMVLEFSRQETDPGHDFVQESTNLFGVQERGQISFPDQNLDWYNTETINPKKDKHRSKPSSGSYDILELDVADLLAKYTHYCQICGKGFKRDANLRMHMRAHGDEYKTREALISPTSQDKKGGYSLKKHYYSCPQHGCRWNQRHEKFQPLKSVICAKNHYKRSHCPKMYMCRRCSVKHFSVLSDLRTHEKHCGDIKWVCSCGTKFSRKDKLMSHVSLFLGHVPAHGSSKPPTITLK

SEQ ID NO: 27879 - protein, 327 aa, Arabidopsis thaliana
  misc_feature (1)..(327): Ceres Seq. ID no. 2122225
MEDDDVSLSLLYNLSTLHEKVHQIQSLVSFYMVSTNNINQSSGSTSLAVANIGSLVQEIITAASSMLYTCQQLQIGSNNNNNDIDNDQTVDAMVLEFSRQETDPGHDFVQESTNLFGVQERGQISFPDQNLDWYNTETINPKKDKHRSKPSSGSYDILELDVADLLAKYTHYCQICGKGFKRDANLRMHMRAHGDEYKTREALISPTSQDKKGGYSLKKHYYSCPQHGCRWNQRHEKFQPLKSVICAKNHYKRSHCPKMYMCRRCSVKHFSVLSDLRTHEKHCGDIKWVCSCGTKFSRKDKLMSHVSLFLGHVPAHGSSKPPTITLK

SEQ ID NO: 27880 - protein, 296 aa, Arabidopsis thaliana
  misc_feature (1)..(296): Ceres Seq. ID no. 2122226
MVSTNNINQSSGSTSLAVANIGSLVQEIITAASSMLYTCQQLQIGSNNNNNDIDNDQTVDAMVLEFSRQETDPGHDFVQESTNLFGVQERGQISFPDQNLDWYNTETINPKKDKHRSKPSSGSYDILELDVADLLAKYTHYCQICGKGFKRDANLRMHMRAHGDEYKTREALISPTSQDKKGGYSLKKHYYSCPQHGCRWNQRHEKFQPLKSVICAKNHYKRSHCPKMYMCRRCSVKHFSVLSDLRTHEKHCGDIKWVCSCGTKFSRKDKLMSHVSLFLGHVPAHGSSKPPTITLK

SEQ ID NO: 27881 - DNA, 540 bp, Arabidopsis thaliana
  misc_feature (1)..(540): Ceres Seq. ID no. 2123863
atggatgtttcaggaagcttgaattgcgttgttgtggcggtagatggaagcgaggtgagtatggaagctctgaggtgggctctagacaacctcaagctctcttcgtcttcttccgattcatcattcgtcgtgctccacgtccagccgtcgccttctgtagccgccggcgtgagtcccggcaccatacctttcggtggtggtcttgaggttcctgctttcactgctgcaatcgagcaacaccagaagcggatcaccgacaccatcctcgaacacgctagtcaaatttgtgctgaaaaatctgtgagtagagttatttcccttgtgtcccctgtgaatgtgaaaacacaagtggttattggggatcccaagtataaaatctgcgaagctgtagagaatttgcatgctgatcttcttgtcatgggctcccgggcttatggccgcattaagagaatgtttctgggaagtgtaagcaactactgcaccaaccacgcccattgtcctgttgtgataatcaaaccaaaagaggattcttctgcataa

SEQ ID NO: 27882 - protein, 179 aa, Arabidopsis thaliana
  misc_feature (1)..(179): Ceres Seq. ID no. 2123864
MDVSGSLNCVVVAVDGSEVSMEALRWALDNLKLSSSSSDSSFVVLHVQPSPSVAAGVSPGTIPFGGGLEVPAFTAAIEQHQKRITDTILEHASQICAEKSVSRVISLVSPVNVKTQVVIGDPKYKICEAVENLHADLLVMGSRAYGRIKRMFLGSVSNYCTNHAHCPVVIIKPKEDSSA

SEQ ID NO: 27883 - protein, 159 aa, Arabidopsis thaliana
  misc_feature (1)..(159): Ceres Seq. ID no. 2123865
MEALRWALDNLKLSSSSSDSSFVVLHVQPSPSVAAGVSPGTIPFGGGLEVPAFTAAIEQHQKRITDTILEHASQICAEKSVSRVISLVSPVNVKTQVVIGDPKYKICEAVENLHADLLVMGSRAYGRIKRMFLGSVSNYCTNHAHCPVVIIKPKEDSSA

SEQ ID NO: 27884 - DNA, 1752 bp, Arabidopsis thaliana
  misc_feature (1)..(1752): Ceres Seq. ID no. 2124700
atggtgaattcgaatgaagaagacgaaaggagaattcttgacgttgaagaatctcttcttacacaggaggaagtgaacaatcacttgaccggattgtcttctacagctgaagatggttctattgacatttatggaaacccaccatcgaagaagaagacaggaaactggaaagcttgtccctttattcttggaaacgaatgttgtgagagattagcttactatggaattgccaagaatctaatcacttactacacaagtgaattacacgagtccaatgtttctgcagctagtgacgttatgatttggcaaggaacttgctatatcacacctctcattggagctgttatagctgattcttactggggaagatactggaccattgcttctttctctgctatttatttcattggaatggctttgttgacactctcggcttcacttccggttttaaagccagcggcatgtgctggcgttgctgcggctctatgctcaccagcaacaacggttcagtatgcggttttctttacagggctttaccttattgctcttggtactggaggtatcaaaccatgtgtatcatcttttggtgctgatcagtttgatgatactgacccgagggaacgagttagaaaagcttctttctttaactggttttacttctccatcaacattggttcatttatctcatccactttgttagtttgggttcaagaaaatgtcgggtggggactcggtttcttgattcccaccgtgtttatgggagtctctattgcgagtttcttcattggaactccgctttatcggtttcagaaaccgggaggtagtccgattactagagtttgccaagttcttgtagctgcataccgtaaattgaagcttaatctccctgaagatatctcatttctgtatgaaacacgagagaaaaactccatgattgctggaagcaggaagattcaacacactgacgctgctgttatctcagaatatgaatctaaatccggtgctttttccaacccatggaagctatgtactgtaactcaagtcgaagaagttaagactctaatccgtatgtttccaatctgggcctcggggatcgtctactcggtcctatattcacagatttccactctattcgtgcaacaaggacggtccatgaaccgaataatccgttctttcgagatccctcctgcttcattcggggttttcgacacacttatcgtgctcatatccatcccaatatatgaccgtttcctcgtaccctttgtaagacggttcacagggataccaaaagggttaactgatctgcagcgaatgggcattggtctttttctctctgtcctaagcattgcagctgcagctattgttgagacagtgcggttgcagcttgctcaagactttgttgcaatgagcatattttggcagatccctcagtacatactaatgggaatagcagaggtctttttcttcattggtcgagttgagtttttctatgatgaatctcctgatgcaatgagaagtgtatgcagcgctttggcactactcaataccgcagtcggaagctacctgagctcgttgatcctcactcttgtggcgtatttcacagctcttggaggtaaagatggttgggttccagacgaccttaataaaggacatcttgactacttcttctggcttttggtctctcttggacttgtcaacattcctgtttatgccttgatttgtgttaagcacacaaagaagaaggctttgtaa

SEQ ID NO: 27885 - protein, 583 aa, Arabidopsis thaliana
  misc_feature (1)..(583): Ceres Seq. ID no. 2124701
MVNSNEEDERRILDVEESLLTQEEVNNHLTGLSSTAEDGSIDIYGNPPSKKKTGNWKACPFILGNECCERLAYYGIAKNLITYYTSELHESNVSAASDVMIWQGTCYITPLIGAVIADSYWGRYWTIASFSAIYFIGMALLTLSASLPVLKPAACAGVAAALCSPATTVQYAVFFTGLYLIALGTGGIKPCVSSFGADQFDDTDPRERVRKASFFNWFYFSINIGSFISSTLLVWVQENVGWGLGFLIPTVFMGVSIASFFIGTPLYRFQKPGGSPITRVCQVLVAAYRKLKLNLPEDISFLYETREKNSMIAGSRKIQHTDAAVISEYESKSGAFSNPWKLCTVTQVEEVKTLIRMFPIWASGIVYSVLYSQISTLFVQQGRSMNRIIRSFEIPPASFGVFDTLIVLISIPIYDRFLVPFVRRFTGIPKGLTDLQRMGIGLFLSVLSIAAAAIVETVRLQLAQDFVAMSIFWQIPQYILMGIAEVFFFIGRVEFFYDESPDAMRSVCSALALLNTAVGSYLSSLILTLVAYFTALGGKDGWVPDDLNKGHLDYFFWLLVSLGLVNIPVYALICVKHTKKKAL

SEQ ID NO: 27886 - protein, 484 aa, Arabidopsis thaliana
  misc_feature (1)..(484): Ceres Seq. ID no. 2124702
MIWQGTCYITPLIGAVIADSYWGRYWTIASFSAIYFIGMALLTLSASLPVLKPAACAGVAAALCSPATTVQYAVFFTGLYLIALGTGGIKPCVSSFGADQFDDTDPRERVRKASFFNWFYFSINIGSFISSTLLVWVQENVGWGLGFLIPTVFMGVSIASFFIGTPLYRFQKPGGSPITRVCQVLVAAYRKLKLNLPEDISFLYETREKNSMIAGSRKIQHTDAAVISEYESKSGAFSNPWKLCTVTQVEEVKTLIRMFPIWASGIVYSVLYSQISTLFVQQGRSMNRIIRSFEIPPASFGVFDTLIVLISIPIYDRFLVPFVRRFTGIPKGLTDLQRMGIGLFLSVLSIAAAAIVETVRLQLAQDFVAMSIFWQIPQYILMGIAEVFFFIGRVEFFYDESPDAMRSVCSALALLNTAVGSYLSSLILTLVAYFTALGGKDGWVPDDLNKGHLDYFFWLLVSLGLVNIPVYALICVKHTKKKAL

SEQ ID NO: 27887 - protein, 446 aa, Arabidopsis thaliana
  misc_feature (1)..(446): Ceres Seq. ID no. 2124703
MALLTLSASLPVLKPAACAGVAAALCSPATTVQYAVFFTGLYLIALGTGGIKPCVSSFGADQFDDTDPRERVRKASFFNWFYFSINIGSFISSTLLVWVQENVGWGLGFLIPTVFMGVSIASFFIGTPLYRFQKPGGSPITRVCQVLVAAYRKLKLNLPEDISFLYETREKNSMIAGSRKIQHTDAAVISEYESKSGAFSNPWKLCTVTQVEEVKTLIRMFPIWASGIVYSVLYSQISTLFVQQGRSMNRIIRSFEIPPASFGVFDTLIVLISIPIYDRFLVPFVRRFTGIPKGLTDLQRMGIGLFLSVLSIAAAAIVETVRLQLAQDFVAMSIFWQIPQYILMGIAEVFFFIGRVEFFYDESPDAMRSVCSALALLNTAVGSYLSSLILTLVAYFTALGGKDGWVPDDLNKGHLDYFFWLLVSLGLVNIPVYALICVKHTKKKAL

SEQ ID NO: 27888 - DNA, 1158 bp, Arabidopsis thaliana
  misc_feature (1)..(1158): Ceres Seq. ID no. 2126439
atgcatgatagtgaaatattcaagtttaaagacatgatgatgatgtcttgcacagttcaaacattagtacttgttccatggtttctagtagtatttgtactcgccggtggagaagactcatccgagacgacggcaatgtttccggcgatgtttgtgttcggagactctttggtggataacggaaacaataaccacttgaactcactggctaggtccaactatctcccttacggcatcgatttcgctggaaatcaaccaaccggtcgcttctctaacggcaaaactatcgtcgatttcattggagagttgctagggctgccggagataccggcgtttatggacacggttgacggaggagtggatattctccatggtgtgaactatgcctcagctgccggaggaatcttagaggaaaccggtcgccatctgggagagagatttagcatgggaagacaagtggagaacttcgagaagacattaatggagataagtaggagcatgaggaaagagtcagtgaaggaatatatggcaaagtcattggtggtggtgtcattgggtaacaatgactacattaacaattatctgaaaccaaggctattcctctcaagctctatttacgaccctacttctttcgccgacctccttctctccaacttcaccactcatctccttgaattgtatggaaaggggtttaggaaatttgtaatagccggtgtgggtccattgggttgcataccagaccaactagccgcccaagcggctctgccaggtgaatgtgtcgaggctgtaaacgagatggctgaacttttcaacaaccgtcttgtatcgctggtggatcgtctcaattccgataacaaaaccgctagtgaagccatctttgtttacggtaatacctatggagccgccgtggatattctcaccaacccatttaattacggattcgaagtgacggatagagggtgttgtggagtagggagaaatagaggagaaataacgtgtctgccattagcggtaccatgcgctttcagagaccgacatgtgttctgggatgcatttcatccaacacaagcttttaatctcataattgctctcagagcctttaatggttccaaatccgattgttaccccattaatctttctcaactttctcgtctctaa

SEQ ID NO: 27889 - protein, 385 aa, Arabidopsis thaliana
  misc_feature (1)..(385): Ceres Seq. ID no. 2126440
MHDSEIFKFKDMMMMSCTVQTLVLVPWFLVVFVLAGGEDSSETTAMFPAMFVFGDSLVDNGNNNHLNSLARSNYLPYGIDFAGNQPTGRFSNGKTIVDFIGELLGLPEIPAFMDTVDGGVDILHGVNYASAAGGILEETGRHLGERFSMGRQVENFEKTLMEISRSMRKESVKEYMAKSLVVVSLGNNDYINNYLKPRLFLSSSIYDPTSFADLLLSNFTTHLLELYGKGFRKFVIAGVGPLGCIPDQLAAQAALPGECVEAVNEMAELFNNRLVSLVDRLNSDNKTASEAIFVYGNTYGAAVDILTNPFNYGFEVTDRGCCGVGRNRGEITCLPLAVPCAFRDRHVFWDAFHPTQAFNLIIALRAFNGSKSDCYPINLSQLSRL

SEQ ID NO: 27890 - protein, 374 aa, Arabidopsis thaliana
  misc_feature (1)..(374): Ceres Seq. ID no. 2126441
MMMMSCTVQTLVLVPWFLVVFVLAGGEDSSETTAMFPAMFVFGDSLVDNGNNNHLNSLARSNYLPYGIDFAGNQPTGRFSNGKTIVDFIGELLGLPEIPAFMDTVDGGVDILHGVNYASAAGGILEETGRHLGERFSMGRQVENFEKTLMEISRSMRKESVKEYMAKSLVVVSLGNNDYINNYLKPRLFLSSSIYDPTSFADLLLSNFTTHLLELYGKGFRKFVIAGVGPLGCIPDQLAAQAALPGECVEAVNEMAELFNNRLVSLVDRLNSDNKTASEAIFVYGNTYGAAVDILTNPFNYGFEVTDRGCCGVGRNRGEITCLPLAVPCAFRDRHVFWDAFHPTQAFNLIIALRAFNGSKSDCYPINLSQLSRL

SEQ ID NO: 27891 - protein, 373 aa, Arabidopsis thaliana
  misc_feature (1)..(373): Ceres Seq. ID no. 2126442
MMMSCTVQTLVLVPWFLVVFVLAGGEDSSETTAMFPAMFVFGDSLVDNGNNNHLNSLARSNYLPYGIDFAGNQPTGRFSNGKTIVDFIGELLGLPEIPAFMDTVDGGVDILHGVNYASAAGGILEETGRHLGERFSMGRQVENFEKTLMEISRSMRKESVKEYMAKSLVVVSLGNNDYINNYLKPRLFLSSSIYDPTSFADLLLSNFTTHLLELYGKGFRKFVIAGVGPLGCIPDQLAAQAALPGECVEAVNEMAELFNNRLVSLVDRLNSDNKTASEAIFVYGNTYGAAVDILTNPFNYGFEVTDRGCCGVGRNRGEITCLPLAVPCAFRDRHVFWDAFHPTQAFNLIIALRAFNGSKSDCYPINLSQLSRL

SEQ ID NO: 27892 - DNA, 723 bp, Arabidopsis thaliana
  misc_feature (1)..(723): Ceres Seq. ID no. 2130043
atgacggacccccacaccgcccggacgatcgtcggaatcgttggaaacgtgatttctttcggcttgttctgcgctccaataccaacgatggtgaagatatggaagatgaaatcggtctccgagtttaagccagatccatacgtagctacggttttaaactgcatgatgtggacattttacggacttcctttcgtccagcccgacagtctcctcgtcatcaccattaatggaactggtcttttcatggaactcgtttacgtcaccatcttctttgtcttcgctacctcccctgtccgcagaaagatcacaatagctatggttatcgaggtaatattcatggcggtggtgatcttctgcacaatgtattttttgcatacaacaaagcagagatcaatgcttattgggatcttgtgcattgttttcaacgtcatcatgtatgctgctcctctcaccgtcatgaaacttgtgataaagacaaagagcgtgaaatacatgccgttcttcctatcattagccaacttcatgaacggtgtcgtttgggtcatttatgcatgtcttaaatttgacccttatattttgattccaaatggtcttggatcgctatcaggaataatccagcttataatatacataacttactataaaacaactaactggaacgatgacgatgaagataaagaaaagcgctattcgaatgctggaatcgaacttggccaggcttga

SEQ ID NO: 27893 - protein, 240 aa, Arabidopsis thaliana
  misc_feature (1)..(240): Ceres Seq. ID no. 2130044
MTDPHTARTIVGIVGNVISFGLFCAPIPTMVKIWKMKSVSEFKPDPYVATVLNCMMWTFYGLPFVQPDSLLVITINGTGLFMELVYVTIFFVFATSPVRRKITIAMVIEVIFMAVVIFCTMYFLHTTKQRSMLIGILCIVFNVIMYAAPLTVMKLVIKTKSVKYMPFFLSLANFMNGVVWVIYACLKFDPYILIPNGLGSLSGIIQLIIYITYYKTTNWNDDDEDKEKRYSNAGIELGQA

SEQ ID NO: 27894 - protein, 211 aa, Arabidopsis thaliana
  misc_feature (1)..(211): Ceres Seq. ID no. 2130045
MVKIWKMKSVSEFKPDPYVATVLNCMMWTFYGLPFVQPDSLLVITINGTGLFMELVYVTIFFVFATSPVRRKITIAMVIEVIFMAVVIFCTMYFLHTTKQRSMLIGILCIVFNVIMYAAPLTVMKLVIKTKSVKYMPFFLSLANFMNGVVWVIYACLKFDPYILIPNGLGSLSGIIQLIIYITYYKTTNWNDDDEDKEKRYSNAGIELGQA

SEQ ID NO: 27895 - protein, 205 aa, Arabidopsis thaliana
  misc_feature (1)..(205): Ceres Seq. ID no. 2130046
MKSVSEFKPDPYVATVLNCMMWTFYGLPFVQPDSLLVITINGTGLFMELVYVTIFFVFATSPVRRKITIAMVIEVIFMAVVIFCTMYFLHTTKQRSMLIGILCIVFNVIMYAAPLTVMKLVIKTKSVKYMPFFLSLANFMNGVVWVIYACLKFDPYILIPNGLGSLSGIIQLIIYITYYKTTNWNDDDEDKEKRYSNAGIELGQA

SEQ ID NO: 27896 - DNA, 2337 bp, Arabidopsis thaliana
  misc_feature (1)..(2337): Ceres Seq. ID no. 2130264
atggcgacattagcagatattggactagcagcagcgattaatattctaagtgcattgatatttctattgctatttgcaatcttgaggattcaaccattcaatgatagggtttatttccctaaatggtacttaaaaggtgttagaagcagccctgtgaattcgggtgctttcgttagcaagattatgaatttggactttcgatcatacgttcggtttttaaactggatgcctgatgctcttaagatgccagagcctgaacttattgatcatgctggtttggattctgctgtttacttgaggatttacttgattgggcttaagatctttggtccgattgcattactttcatggtcaattttagtacctgtaaattggacaagtgatggattgcagctagcaaaacttcgtaatgtaacatcgagtaatatcgataagctttcgatttcgaatgtcgaacgtggatcagacaggttttgggcacatcttgtgatggcttatgcattcacattttggacttgctatgtactaatgaaggaatatgagaaaattgctgcaatgcggttatcttttctccaatcagagaagcgacgtgctgatcaattcactgttctggttaggaacgtaccaccggactcagacgagtcgattagcgaaaacgtgcagcatttctttcttgttaaccacccagaccattatcttacacatcaggtggtgtacaatgcaaatgaattggctaaattggtagaagacaagaagaaaatgcagaattggttagattactaccagttgaagtatacaagaaacaaggaacaacggccacgggtaaagatgggatttctcgggctatggggcaaaaaagtagatgcaatggatcattatacagcagagatcgagaaacttagcgagcaaataatggaagaaaggaagaggataaagaaagatgacaaaagtgtaatgcaagcagcttttgtgtcttttaaaacgcgttggggcgctgcggtctgcgcgcagacacaacagacgaagaatccaactgaatggttaaccgaatgggctcctgaggcaagagaaatgtactggccaaatctcgcaatgccttacgtatctctcactgtaaggagatttgtaatgcacatcgccttcttcttcctcacgttctttttcatcatcccaatcgcatttgtgcaatccttagcgagtattgaaggtatcgagaaatccgctccgttcctcagtcccattgtcaaaaacaagttaatgaaatcattgatccaaggttttcttcccggtattgtcttgaagctctttttgatattcctgccaacaatattgatgatcatgtcgaaattcgaagggtttatttcaatatcatcgttagagagaagagcggcttttcgatactatattttcaaccttgtgaatgttttcctcggtagcgtaatcactggatctgcttttgaacagctcgattcttttcttaaacaatccgcaaacgacattccgcggacagttggagtcgcgataccgataaaagcaacgttctttataacgtatataatggtagacggttgggcgggtgtggcgggagaaatctttaggctgaaaccattagtcattttccatttaaagaacttcttctttgtgaaaactgaaaaggatagagaagaagctatggatccgggacagattgatttctacgctaccgagcctcggattcaactatacttcctccttggccttgtctacgctcctgtcactcctgttcttcttcctttcatcatcttcttctttggtttcgcctacctcgtcttccgtcatcagatcataaatgtgtacaatcagaagtatgagagtgcgggtgcattctggccagacgttcatggacgtataatatcggcattgatcatctcacaaatccttttgttgggattaatgagcacgaaaggaaaagttcagtccacacctttcctcctcgttctagcgattctcaccttcggttttcatcggttttgcaaaggccggtacgaatcggcattcgtcattaacccgttgcaggaagctatgattaaggatacattggaacgagcaagagaaccaaacttgaatcttaaagggtttcttcagaatgcatatgttcatcctgtttttaaagacgaagaagattcagatgaagagggactaatcgaggattcagatgacgaagattgtgtagttgtacaaaccaaacgtcaaagatcacggagaaccaccgttgcgagcagcaatgcgagccgtggctcgtcacaatcaacgccttttaatcaacttgatttgggtaaggggaaaccggagacttga

SEQ ID NO: 27897 - protein, 778 aa, Arabidopsis thaliana
  misc_feature (1)..(778): Ceres Seq. ID no. 2130265
MATLADIGLAAAINILSALIFLLLFAILRIQPFNDRVYFPKWYLKGVRSSPVNSGAFVSKIMNLDFRSYVRFLNWMPDALKMPEPELIDHAGLDSAVYLRIYLIGLKIFGPIALLSWSILVPVNWTSDGLQLAKLRNVTSSNIDKLSISNVERGSDRFWAHLVMAYAFTFWTCYVLMKEYEKIAAMRLSFLQSEKRRADQFTVLVRNVPPDSDESISENVQHFFLVNHPDHYLTHQVVYNANELAKLVEDKKKMQNWLDYYQLKYTRNKEQRPRVKMGFLGLWGKKVDAMDHYTAEIEKLSEQIMEERKRIKKDDKSVMQAAFVSFKTRWGAAVCAQTQQTKNPTEWLTEWAPEAREMYWPNLAMPYVSLTVRRFVMHIAFFFLTFFFIIPIAFVQSLASIEGIEKSAPFLSPIVKNKLMKSLIQGFLPGIVLKLFLIFLPTILMIMSKFEGFISISSLERRAAFRYYIFNLVNVFLGSVITGSAFEQLDSFLKQSANDIPRTVGVAIPIKATFFITYIMVDGWAGVAGEIFRLKPLVIFHLKNFFFVKTEKDREEAMDPGQIDFYATEPRIQLYFLLGLVYAPVTPVLLPFIIFFFGFAYLVFRHQIINVYNQKYESAGAFWPDVHGRIISALIISQILLLGLMSTKGKVQSTPFLLVLAILTFGFHRFCKGRYESAFVINPLQEAMIKDTLERAREPNLNLKGFLQNAYVHPVFKDEEDSDEEGLIEDSDDEDCVVVQTKRQRSRRTTVASSNASRGSSQSTPFNQLDLGKGKPET

SEQ ID NO: 27898 - protein, 717 aa, Arabidopsis thaliana
  misc_feature (1)..(717): Ceres Seq. ID no. 2130266
MNLDFRSYVRFLNWMPDALKMPEPELIDHAGLDSAVYLRIYLIGLKIFGPIALLSWSILVPVNWTSDGLQLAKLRNVTSSNIDKLSISNVERGSDRFWAHLVMAYAFTFWTCYVLMKEYEKIAAMRLSFLQSEKRRADQFTVLVRNVPPDSDESISENVQHFFLVNHPDHYLTHQVVYNANELAKLVEDKKKMQNWLDYYQLKYTRNKEQRPRVKMGFLGLWGKKVDAMDHYTAEIEKLSEQIMEERKRIKKDDKSVMQAAFVSFKTRWGAAVCAQTQQTKNPTEWLTEWAPEAREMYWPNLAMPYVSLTVRRFVMHIAFFFLTFFFIIPIAFVQSLASIEGIEKSAPFLSPIVKNKLMKSLIQGFLPGIVLKLFLIFLPTILMIMSKFEGFISISSLERRAAFRYYIFNLVNVFLGSVITGSAFEQLDSFLKQSANDIPRTVGVAIPIKATFFITYIMVDGWAGVAGEIFRLKPLVIFHLKNFFFVKTEKDREEAMDPGQIDFYATEPRIQLYFLLGLVYAPVTPVLLPFIIFFFGFAYLVFRHQIINVYNQKYESAGAFWPDVHGRIISALIISQILLLGLMSTKGKVQSTPFLLVLAILTFGFHRFCKGRYESAFVINPLQEAMIKDTLERAREPNLNLKGFLQNAYVHPVFKDEEDSDEEGLIEDSDDEDCVVVQTKRQRSRRTTVASSNASRGSSQSTPFNQLDLGKGKPET

SEQ ID NO: 27899 - protein, 703 aa, Arabidopsis thaliana
  misc_feature (1)..(703): Ceres Seq. ID no. 2130267
MPDALKMPEPELIDHAGLDSAVYLRIYLIGLKIFGPIALLSWSILVPVNWTSDGLQLAKLRNVTSSNIDKLSISNVERGSDRFWAHLVMAYAFTFWTCYVLMKEYEKIAAMRLSFLQSEKRRADQFTVLVRNVPPDSDESISENVQHFFLVNHPDHYLTHQVVYNANELAKLVEDKKKMQNWLDYYQLKYTRNKEQRPRVKMGFLGLWGKKVDAMDHYTAEIEKLSEQIMEERKRIKKDDKSVMQAAFVSFKTRWGAAVCAQTQQTKNPTEWLTEWAPEAREMYWPNLAMPYVSLTVRRFVMHIAFFFLTFFFIIPIAFVQSLASIEGIEKSAPFLSPIVKNKLMKSLIQGFLPGIVLKLFLIFLPTILMIMSKFEGFISISSLERRAAFRYYIFNLVNVFLGSVITGSAFEQLDSFLKQSANDIPRTVGVAIPIKATFFITYIMVDGWAGVAGEIFRLKPLVIFHLKNFFFVKTEKDREEAMDPGQIDFYATEPRIQLYFLLGLVYAPVTPVLLPFIIFFFGFAYLVFRHQIINVYNQKYESAGAFWPDVHGRIISALIISQILLLGLMSTKGKVQSTPFLLVLAILTFGFHRFCKGRYESAFVINPLQEAMIKDTLERAREPNLNLKGFLQNAYVHPVFKDEEDSDEEGLIEDSDDEDCVVVQTKRQRSRRTTVASSNASRGSSQSTPFNQLDLGKGKPET

SEQ ID NO: 27900 - DNA, 666 bp, Arabidopsis thaliana
  misc_feature (1)..(666): Ceres Seq. ID no. 2130361
atggagcctgaacgtttaaaatttggaggtccaagagagttgtgcggtgctgcggatcttatatctcaattcaaactagtgcaacaccatgaattcttttgcaagaaatctcttcctgtttctttatcagattcccattatcttcataatgtggttggggacacagagatcagaaaaggagaaggaatgcaattagatcagcttattgagagcatatcacagagccgggagactaatattcgcatccagccttttgatatagatgagcttcaggagtctttccaactaaatgatatgactcctgttgaattacccccagcagagaagggagctcctacaattccgtctaagtcaaaaagtgagtcgaaagatagggacaggaaacataagaaacacaaggacagggataaagacaaagatagagagcataagaagcacaagcacaaacataaagatagaagcaaagataaagataaagacaaggaccgagacagaaagaaggacaaaaatggccaccatgattcgggtgatcattctaagaaacatcatgataagaaaaggaaacacgatggagatgaagatcttaatgacgttcagaggcacaaaaaaaacaagcataaaagctcaaagcttgatgaggtgggtgcaataagggttgctggctaa

SEQ ID NO: 27901 - protein, 221 aa, Arabidopsis thaliana
  misc_feature (1)..(221): Ceres Seq. ID no. 2130362
MEPERLKFGGPRELCGAADLISQFKLVQHHEFFCKKSLPVSLSDSHYLHNVVGDTEIRKGEGMQLDQLIESISQSRETNIRIQPFDIDELQESFQLNDMTPVELPPAEKGAPTIPSKSKSESKDRDRKHKKHKDRDKDKDREHKKHKHKHKDRSKDKDKDKDRDRKKDKNGHHDSGDHSKKHHDKKRKHDGDEDLNDVQRHKKNKHKSSKLDEVGAIRVAG

SEQ ID NO: 27902 - protein, 159 aa, Arabidopsis thaliana
  misc_feature (1)..(159): Ceres Seq. ID no. 2130363
MQLDQLIESISQSRETNIRIQPFDIDELQESFQLNDMTPVELPPAEKGAPTIPSKSKSESKDRDRKHKKHKDRDKDKDREHKKHKHKHKDRSKDKDKDKDRDRKKDKNGHHDSGDHSKKHHDKKRKHDGDEDLNDVQRHKKNKHKSSKLDEVGAIRVAG

SEQ ID NO: 27903 - protein, 123 aa, Arabidopsis thaliana
  misc_feature (1)..(123): Ceres Seq. ID no. 2130364
MTPVELPPAEKGAPTIPSKSKSESKDRDRKHKKHKDRDKDKDREHKKHKHKHKDRSKDKDKDKDRDRKKDKNGHHDSGDHSKKHHDKKRKHDGDEDLNDVQRHKKNKHKSSKLDEVGAIRVAG

SEQ ID NO: 27904 - DNA, 2100 bp, Arabidopsis thaliana
  misc_feature (1)..(2100): Ceres Seq. ID no. 2133275
atggcggacgcagaaacctttgctttccaagctgagatcaaccagttgctctccctcatcatcaataccttttactctaacaaggagatcttccttcgtgaactcatcagtaactcttctgatgctttggacaagattaggtttgagtccttgacagacaagagcaagctcgatggtcagccagagctcttcattcacatcattcccgacaagactaacaacaccttgacgattatcgatagtggtattgggatgaccaaggctgatctggtgaacaaccttggaacaattgcaagatctggaaccaaagaattcatggaggcgttggctgctggagctgatgttagcatgattggacagtttggtgttggtttctactctgcttacttggttgctgacaaggttgttgttactaccaagcacaatgacgatgagcagtacgtgtgggagtctcaggccggtggatctttcaccgtcaccagagacacctctggtgaggctcttggtagaggaactaagatggtcctttacctcaaggaagaccagatggagtacattgaggagcgaaggcttaaggatttggtgaagaagcactctgagttcatcagctacccaatctctctctggattgagaagaccattgagaaggagatctctgatgatgaagaggaggaagagaagaaggatgaggaaggcaaggttgaggaagttgatgaggagaaagaaaaggaggagaagaaaaagaagaagattaaggaggtttctcatgagtgggatttggtgaacaagcagaaaccgatttggatgaggaagccagaggagatcaacaaggaggagtacgctgctttctacaagagtttgagcaatgactgggaagagcatttggctgtgaagcatttctcagttgaaggacagcttgagttcaaagctatcctctttgttcccaagagagctccttttgatctctttgacactaagaagaagcccaacaacatcaagctctatgtccgtcgtgtcttcatcatggacaactgtgaagacatcattcctgagtaccttgggtttgtcaagggtattgttgactctgaagatcttcctctcaacatctcaagagaaacattgcagcagaacaagatcctcaaggtcatccgcaagaaccttgtgaagaagtgtcttgagctcttctttgagattgctgagaacaaggaggactacaacaagttctatgaggctttctctaagaacctgaagctcggtatccatgaggactcccaaaacagaaccaagattgctgagttgctccgttaccactcaaccaagagcggtgatgaattgaccagtctcaaggactacgtgacaaggatgaaggaaggtcagaacgatatcttctatatcactggtgagagcaagaaggctgttgagaactctccattccttgagaagctcaagaagaagggtattgaagttctctacatggttgacgctatcgatgagtatgctattggtcagctcaaggaattcgaaggaaagaagcttgtctctgcaaccaaggaaggtctgaaactggatgagactgaagacgagaagaagaagaaagaagagctcaaggagaagtttgagggactctgcaaagtgatcaaggacgttttgggagacaaggttgagaaggttatcgtctctgaccgtgttgtggactcaccctgctgtcttgtaacaggcgagtatggctggactgcaaacatggagaggatcatgaaagctcaagccttgagagacagcagcatgggtggctacatgtcgagcaagaagacaatggagattaacccagagaactccatcatggatgagctgagaaagagagctgatgcagacaagaacgacaagtctgtgaaggaccttgtacttcttctctttgagaccgctcttctcacttctggtttcagcctcgatgagcccaacactttcgggagcaggattcacaggatgttgaagcttggattgagcattgatgacgatgatgttgttgaagccgatgctgacatgcctccacttgaagatgatgccgatgctgaaggtagcaagatggaggaagttgactaa

SEQ ID NO: 27905 - protein, 699 aa, Arabidopsis thaliana
  misc_feature (1)..(699): Ceres Seq. ID no. 2133276
MADAETFAFQAEINQLLSLIINTFYSNKEIFLRELISNSSDALDKIRFESLTDKSKLDGQPELFIHIIPDKTNNTLTIIDSGIGMTKADLVNNLGTIARSGTKEFMEALAAGADVSMIGQFGVGFYSAYLVADKVVVTTKHNDDEQYVWESQAGGSFTVTRDTSGEALGRGTKMVLYLKEDQMEYIEERRLKDLVKKHSEFISYPISLWIEKTIEKEISDDEEEEEKKDEEGKVEEVDEEKEKEEKKKKKIKEVSHEWDLVNKQKPIWMRKPEEINKEEYAAFYKSLSNDWEEHLAVKHFSVEGQLEFKAILFVPKRAPFDLFDTKKKPNNIKLYVRRVFIMDNCEDIIPEYLGFVKGIVDSEDLPLNISRETLQQNKILKVIRKNLVKKCLELFFEIAENKEDYNKFYEAFSKNLKLGIHEDSQNRTKIAELLRYHSTKSGDELTSLKDYVTRMKEGQNDIFYITGESKKAVENSPFLEKLKKKGIEVLYMVDAIDEYAIGQLKEFEGKKLVSATKEGLKLDETEDEKKKKEELKEKFEGLCKVIKDVLGDKVEKVIVSDRVVDSPCCLVTGEYGWTANMERIMKAQALRDSSMGGYMSSKKTMEINPENSIMDELRKRADADKNDKSVKDLVLLLFETALLTSGFSLDEPNTFGSRIHRMLKLGLSIDDDDVVEADADMPPLEDDADAEGSKMEEVD

SEQ ID NO: 27906 - protein, 615 aa, Arabidopsis thaliana
  misc_feature (1)..(615): Ceres Seq. ID no. 2133277
MTKADLVNNLGTIARSGTKEFMEALAAGADVSMIGQFGVGFYSAYLVADKVVVTTKHNDDEQYVWESQAGGSFTVTRDTSGEALGRGTKMVLYLKEDQMEYIEERRLKDLVKKHSEFISYPISLWIEKTIEKEISDDEEEEEKKDEEGKVEEVDEEKEKEEKKKKKIKEVSHEWDLVNKQKPIWMRKPEEINKEEYAAFYKSLSNDWEEHLAVKHFSVEGQLEFKAILFVPKRAPFDLFDTKKKPNNIKLYVRRVFIMDNCEDIIPEYLGFVKGIVDSEDLPLNISRETLQQNKILKVIRKNLVKKCLELFFEIAENKEDYNKFYEAFSKNLKLGIHEDSQNRTKIAELLRYHSTKSGDELTSLKDYVTRMKEGQNDIFYITGESKKAVENSPFLEKLKKKGIEVLYMVDAIDEYAIGQLKEFEGKKLVSATKEGLKLDETEDEKKKKEELKEKFEGLCKVIKDVLGDKVEKVIVSDRVVDSPCCLVTGEYGWTANMERIMKAQALRDSSMGGYMSSKKTMEINPENSIMDELRKRADADKNDKSVKDLVLLLFETALLTSGFSLDEPNTFGSRIHRMLKLGLSIDDDDVVEADADMPPLEDDADAEGSKMEEVD

SEQ ID NO: 27907 - protein, 594 aa, Arabidopsis thaliana
  misc_feature (1)..(594): Ceres Seq. ID no. 2133278
MEALAAGADVSMIGQFGVGFYSAYLVADKVVVTTKHNDDEQYVWESQAGGSFTVTRDTSGEALGRGTKMVLYLKEDQMEYIEERRLKDLVKKHSEFISYPISLWIEKTIEKEISDDEEEEEKKDEEGKVEEVDEEKEKEEKKKKKIKEVSHEWDLVNKQKPIWMRKPEEINKEEYAAFYKSLSNDWEEHLAVKHFSVEGQLEFKAILFVPKRAPFDLFDTKKKPNNIKLYVRRVFIMDNCEDIIPEYLGFVKGIVDSEDLPLNISRETLQQNKILKVIRKNLVKKCLELFFEIAENKEDYNKFYEAFSKNLKLGIHEDSQNRTKIAELLRYHSTKSGDELTSLKDYVTRMKEGQNDIFYITGESKKAVENSPFLEKLKKKGIEVLYMVDAIDEYAIGQLKEFEGKKLVSATKEGLKLDETEDEKKKKEELKEKFEGLCKVIKDVLGDKVEKVIVSDRVVDSPCCLVTGEYGWTANMERIMKAQALRDSSMGGYMSSKKTMEINPENSIMDELRKRADADKNDKSVKDLVLLLFETALLTSGFSLDEPNTFGSRIHRMLKLGLSIDDDDVVEADADMPPLEDDADAEGSKMEEVD

SEQ ID NO: 27908 - DNA, 1080 bp, Arabidopsis thaliana
  misc_feature (1)..(1080): Ceres Seq. ID no. 2134333
atggcgagaagcgatgttttgatttttgtttctactcttcttctgtttctgtctctgcttacggtagctgatgcggaattggtgaaatctgacaagtttccggtagtggtgagtacttggcctttccttgaagctgttagagctgcttggagagcagttgataatgggagctctgcagtggaagctgttgttgaaggttgttctgcttgtgaagaacttcgttgtgacggtacagttgggcctggaggaagtccggatgagaatggtgagaccatgattgatgctttagtcatggatggggtgactatggaggttggagctgttgctgcaatgcggtatgttaaagacggtataagagctgcacatctagtgatgaaatactctcaacacacgttgcttgccggagaaggagcatcagcatttgcaatctccatgggtctccccggacccatgaacctaagctcccctgaatctgtaaagaagtggtcggactggaaagagaatcagtgtcaacccaatttcaggaagaatgtagtccccgcaaatgactgtggaccttacaagccaaacaatagtgctatgaatgtttttgtagacaaaagcactgaatcttgcgagatgggggcgattgagtataaacctcctcttgttggtcctcacaatcacgatacgatatcgatggctgtcattgacagaatggggcatatagctgttgggacatcgaccaatggagccacatataaaattcctggaagggttggtgatgggcctatcgtcggttcatcagcctacgctgatgatgaagtaggtggatgtggtgcaactggagatggtgacaccatgatgcgcttcctcccttgttaccaagttgtggagagcatgagacaaggaatgaaaccagaagaagctgctaaagatgcaatctcgagaatcgcaaggaagtttccagatttcgtgggagcagttgtggctgttgacaagaacggatctcacgcaggagcttgctatggctggacgtttcagtactcagtccaaaaccctgacatgaacgatgttcaagtctttacagttcttccatga

SEQ ID NO: 27909 - protein, 359 aa, Arabidopsis thaliana
  misc_feature (1)..(359): Ceres Seq. ID no. 2134334
MARSDVLIFVSTLLLFLSLLTVADAELVKSDKFPVVVSTWPFLEAVRAAWRAVDNGSSAVEAVVEGCSACEELRCDGTVGPGGSPDENGETMIDALVMDGVTMEVGAVAAMRYVKDGIRAAHLVMKYSQHTLLAGEGASAFAISMGLPGPMNLSSPESVKKWSDWKENQCQPNFRKNVVPANDCGPYKPNNSAMNVFVDKSTESCEMGAIEYKPPLVGPHNHDTISMAVIDRMGHIAVGTSTNGATYKIPGRVGDGPIVGSSAYADDEVGGCGATGDGDTMMRFLPCYQVVESMRQGMKPEEAAKDAISRIARKFPDFVGAVVAVDKNGSHAGACYGWTFQYSVQNPDMNDVQVFTVLP

SEQ ID NO: 27910 - protein, 268 aa, Arabidopsis thaliana
  misc_feature (1)..(268): Ceres Seq. ID no. 2134335
MIDALVMDGVTMEVGAVAAMRYVKDGIRAAHLVMKYSQHTLLAGEGASAFAISMGLPGPMNLSSPESVKKWSDWKENQCQPNFRKNVVPANDCGPYKPNNSAMNVFVDKSTESCEMGAIEYKPPLVGPHNHDTISMAVIDRMGHIAVGTSTNGATYKIPGRVGDGPIVGSSAYADDEVGGCGATGDGDTMMRFLPCYQVVESMRQGMKPEEAAKDAISRIARKFPDFVGAVVAVDKNGSHAGACYGWTFQYSVQNPDMNDVQVFTVLP

SEQ ID NO: 27911 - protein, 262 aa, Arabidopsis thaliana
  misc_feature (1)..(262): Ceres Seq. ID no. 2134336
MDGVTMEVGAVAAMRYVKDGIRAAHLVMKYSQHTLLAGEGASAFAISMGLPGPMNLSSPESVKKWSDWKENQCQPNFRKNVVPANDCGPYKPNNSAMNVFVDKSTESCEMGAIEYKPPLVGPHNHDTISMAVIDRMGHIAVGTSTNGATYKIPGRVGDGPIVGSSAYADDEVGGCGATGDGDTMMRFLPCYQVVESMRQGMKPEEAAKDAISRIARKFPDFVGAVVAVDKNGSHAGACYGWTFQYSVQNPDMNDVQVFTVLP

SEQ ID NO: 27912 - DNA, 2106 bp, Arabidopsis thaliana
  misc_feature (1)..(2106): Ceres Seq. ID no. 2135111
atggagattccactctcgcgttaccagagcataagattagacgagattcgagactcttcttccaatcccaaggttctcactttcccgcgaaaattctcgttacgaggaagaagatggaagaacccatttggaagactcagttgttcttctgtagttcaaggtctgaaaccaaaaccaaagctgaaaccagaaccaattagaatcgaggttaaggaatcgaaagatcagattttggatgatacccagatcagtaaatctggtgtaacgatttgtagtcagatagagaagttggttttgtgtaatagattcagagaagcttttgaattgtttgagattctggagattcgctgtagttttaaggttggtgttagtacttatgatgctttagtggaagcttgtattcgtttgaaatcgattcggtgtgttaaaagggtttatgggtttatgatgagtaatgggtttgagccggagcagtatatgatgaacagaatcttgttgatgcatgtcaagtgtgggatgattattgatgcacgtaggttgtttgatgaaatccctgagagaaatttgtattcttattactcgattatctctgggtttgttaattttgggaattatgttgaagcttttgagttgtttaagatgatgtgggaggagctttctgattgtgagactcatacgtttgcggtgatgctacgggcctcggctggcttagggtctatttatgtggggaaacagttacacgtttgtgcgttgaagttaggagttgttgataatacctttgtctcgtgtggattgattgatatgtatagcaagtgtggggatattgaagatgctcgatgtgcttttgagtgtatgcccgagaaaactactgttgcttggaacaacgttattgcgggttatgcgcttcatggttatagtgaggaagctctgtgtttgttgtatgacatgcgagactcaggtgtgtctattgatcagttcacactttcgataatgataagaatttctacaaagcttgcaaagcttgagcttactaagcaggcacacgctagtttaattcgaaacggttttgaatcggaaatcgttgcaaacacagctcttgtagacttttatagcaaatggggtagagtagatactgctagatatgtttttgataaattgccgagaaaaaatataatctcatggaacgctttgatgggtggatatgcaaatcatggtagaggaactgatgctgttaagttgtttgagaaaatgattgcagcaaacgtcgctccaaaccatgtcacatttcttgcagttctatcagcttgtgcctattcaggtttatctgagcaaggttgggagatttttctatcgatgagtgaggttcatgggatcaaaccaagggcgatgcattatgcctgcatgattgagctgttgggtagagacggtttattagatgaagccattgcgtttatccgaagagctcctttgaaaaccacggtgaacatgtgggcagcactcttgaatgcctgtaggatgcaggaaaacttagagcttggaagagtggttgctgaaaaactctatggaatgggacccgagaagctcggaaactacgttgtgatgtataatatgtacaacagtatgggaaaaactgcagaagctgcaggggttttggagacattggagagcaaaggattaagcatgatgccggcttgtacttgggttgaggttggagatcagactcacagctttctttcaggagataggtttgattcttacaatgagacggtgaaaaggcagatataccaaaaagtggatgaactaatggaagagatttccgagtatgggtactcagaggaggagcaacaccttcttccagacgtagatgaaaaggaagaagagcgagtagggcgatatcacagcgagaaactagccatagcttacggattggtgaatacgccggaatggaatccattgcagattactcagaaccataggatatgcaaaaattgccacaaggtggttgagttcatatctttggttacaggacgagagatggtagtgagagacgcgagccggttccatcattttaaagaagggaagtgttcttgtggaggttattggtga

SEQ ID NO: 27913 - protein, 701 aa, Arabidopsis thaliana
  misc_feature (1)..(701): Ceres Seq. ID no. 2135112
MEIPLSRYQSIRLDEIRDSSSNPKVLTFPRKFSLRGRRWKNPFGRLSCSSVVQGLKPKPKLKPEPIRIEVKESKDQILDDTQISKSGVTICSQIEKLVLCNRFREAFELFEILEIRCSFKVGVSTYDALVEACIRLKSIRCVKRVYGFMMSNGFEPEQYMMNRILLMHVKCGMIIDARRLFDEIPERNLYSYYSIISGFVNFGNYVEAFELFKMMWEELSDCETHTFAVMLRASAGLGSIYVGKQLHVCALKLGVVDNTFVSCGLIDMYSKCGDIEDARCAFECMPEKTTVAWNNVIAGYALHGYSEEALCLLYDMRDSGVSIDQFTLSIMIRISTKLAKLELTKQAHASLIRNGFESEIVANTALVDFYSKWGRVDTARYVFDKLPRKNIISWNALMGGYANHGRGTDAVKLFEKMIAANVAPNHVTFLAVLSACAYSGLSEQGWEIFLSMSEVHGIKPRAMHYACMIELLGRDGLLDEAIAFIRRAPLKTTVNMWAALLNACRMQENLELGRVVAEKLYGMGPEKLGNYVVMYNMYNSMGKTAEAAGVLETLESKGLSMMPACTWVEVGDQTHSFLSGDRFDSYNETVKRQIYQKVDELMEEISEYGYSEEEQHLLPDVDEKEEERVGRYHSEKLAIAYGLVNTPEWNPLQITQNHRICKNCHKVVEFISLVTGREMVVRDASRFHHFKEGKCSCGGYW

SEQ ID NO: 27914 - protein, 553 aa, Arabidopsis thaliana
  misc_feature (1)..(553): Ceres Seq. ID no. 2135113
MMSNGFEPEQYMMNRILLMHVKCGMIIDARRLFDEIPERNLYSYYSIISGFVNFGNYVEAFELFKMMWEELSDCETHTFAVMLRASAGLGSIYVGKQLHVCALKLGVVDNTFVSCGLIDMYSKCGDIEDARCAFECMPEKTTVAWNNVIAGYALHGYSEEALCLLYDMRDSGVSIDQFTLSIMIRISTKLAKLELTKQAHASLIRNGFESEIVANTALVDFYSKWGRVDTARYVFDKLPRKNIISWNALMGGYANHGRGTDAVKLFEKMIAANVAPNHVTFLAVLSACAYSGLSEQGWEIFLSMSEVHGIKPRAMHYACMIELLGRDGLLDEAIAFIRRAPLKTTVNMWAALLNACRMQENLELGRVVAEKLYGMGPEKLGNYVVMYNMYNSMGKTAEAAGVLETLESKGLSMMPACTWVEVGDQTHSFLSGDRFDSYNETVKRQIYQKVDELMEEISEYGYSEEEQHLLPDVDEKEEERVGRYHSEKLAIAYGLVNTPEWNPLQITQNHRICKNCHKVVEFISLVTGREMVVRDASRFHHFKEGKCSCGGYW

SEQ ID NO: 27915 - protein, 552 aa, Arabidopsis thaliana
  misc_feature (1)..(552): Ceres Seq. ID no. 2135114
MSNGFEPEQYMMNRILLMHVKCGMIIDARRLFDEIPERNLYSYYSIISGFVNFGNYVEAFELFKMMWEELSDCETHTFAVMLRASAGLGSIYVGKQLHVCALKLGVVDNTFVSCGLIDMYSKCGDIEDARCAFECMPEKTTVAWNNVIAGYALHGYSEEALCLLYDMRDSGVSIDQFTLSIMIRISTKLAKLELTKQAHASLIRNGFESEIVANTALVDFYSKWGRVDTARYVFDKLPRKNIISWNALMGGYANHGRGTDAVKLFEKMIAANVAPNHVTFLAVLSACAYSGLSEQGWEIFLSMSEVHGIKPRAMHYACMIELLGRDGLLDEAIAFIRRAPLKTTVNMWAALLNACRMQENLELGRVVAEKLYGMGPEKLGNYVVMYNMYNSMGKTAEAAGVLETLESKGLSMMPACTWVEVGDQTHSFLSGDRFDSYNETVKRQIYQKVDELMEEISEYGYSEEEQHLLPDVDEKEEERVGRYHSEKLAIAYGLVNTPEWNPLQITQNHRICKNCHKVVEFISLVTGREMVVRDASRFHHFKEGKCSCGGYW

SEQ ID NO: 27916 - DNA, 1854 bp, Arabidopsis thaliana
  misc_feature (1)..(1854): Ceres Seq. ID no. 2136569
atggctctgcttattatcactgccttagtttttagtagtttatggtcatctgtgtcaccagatgctcaaggggatgcattatttgcgttgaggagctcgttacgtgcatctcctgaacagcttagtgattggaaccagaatcaagtcgatccttgtacttggtctcaagttatttgtgatgacaagaaacatgttacttctgtaaccttgtcttacatgaacttctcctcgggaacactgtcttcaggaataggaatcttgacaactctcaagactcttacattgaagggaaatggaataatgggtggaataccagaatccattggaaatctgtctagcttgaccagcttagatttggaggataatcacttaactgatcgcattccatccactctcggtaatctcaagaatctacagttcttgaccttgagtaggaataaccttaatggttctatcccggattcacttacaggtctatcaaaactgataaatattctgctcgactcaaataatctcagtggtgagattcctcagagtttattcaaaatcccaaaatacaatttcacagcaaacaacttgagctgtggtggcactttcccgcaaccttgtgtaaccgagtccagtccttcaggtgattcaagcagtagaaaaactggaatcatcgctggagttgttagcggaatagcggttattctactaggattcttcttctttttcttctgcaaggataaacataaaggatataaacgagacgtatttgtggatgttgcaggaacgaactttaaaaaaggtttgatttcaggtgaagtggacagaaggattgcttttggacagttgagaagatttgcatggagagagcttcagttggctacagatgagttcagtgaaaagaatgttctcggacaaggaggctttgggaaagtttacaaaggattgctttcggatggcaccaaagtcgctgtaaaaagattgactgattttgaacgtccaggaggagatgaagctttccagagagaagttgagatgataagtgtagctgttcataggaatctgcttcgccttatcggcttttgtacaacacaaactgaacgacttttggtgtatcctttcatgcagaatctaagtgttgcatattgcttaagagagattaaacccggggatccagttctggattggttcaggaggaaacagattgcgttaggtgcagcacgaggactcgaatatcttcatgaacattgcaacccgaagatcatacacagagatgtgaaagctgcaaatgtgttactagatgaagactttgaagcagtggttggtgattttggtttagccaagttggtagatgttagaaggactaatgtaaccactcaggtccgaggaacaatgggtcatattgcaccagaatgtatatccacagggaaatcgtcagagaaaaccgatgttttcgggtacggaattatgcttctggagcttgtaactggacaaagagcaattgatttctcgcggttagaggaagaagatgatgtcttattgctagaccatgtgaagaaactggaaagagagaagagattagaagacatagtagataagaagcttgatgaggattatataaaggaagaagttgaaatgatgatacaagtagctctgctatgcacacaagcagcaccggaagaacgaccagcgatgtcggaagtagtaagaatgctagaaggagaagggcttgcagagagatgggaagagtggcagaatcttgaagtgacgagacaagaagagtttcagaggttgcagaggagatttgattggggtgaagattccattaataatcaagatgctattgaattatctggtggaagatag

SEQ ID NO: 27917 - protein, 617 aa, Arabidopsis thaliana
  misc_feature (1)..(617): Ceres Seq. ID no. 2136570
MALLIITALVFSSLWSSVSPDAQGDALFALRSSLRASPEQLSDWNQNQVDPCTWSQVICDDKKHVTSVTLSYMNFSSGTLSSGIGILTTLKTLTLKGNGIMGGIPESIGNLSSLTSLDLEDNHLTDRIPSTLGNLKNLQFLTLSRNNLNGSIPDSLTGLSKLINILLDSNNLSGEIPQSLFKIPKYNFTANNLSCGGTFPQPCVTESSPSGDSSSRKTGIIAGVVSGIAVILLGFFFFFFCKDKHKGYKRDVFVDVAGTNFKKGLISGEVDRRIAFGQLRRFAWRELQLATDEFSEKNVLGQGGFGKVYKGLLSDGTKVAVKRLTDFERPGGDEAFQREVEMISVAVHRNLLRLIGFCTTQTERLLVYPFMQNLSVAYCLREIKPGDPVLDWFRRKQIALGAARGLEYLHEHCNPKIIHRDVKAANVLLDEDFEAVVGDFGLAKLVDVRRTNVTTQVRGTMGHIAPECISTGKSSEKTDVFGYGIMLLELVTGQRAIDFSRLEEEDDVLLLDHVKKLEREKRLEDIVDKKLDEDYIKEEVEMMIQVALLCTQAAPEERPAMSEVVRMLEGEGLAERWEEWQNLEVTRQEEFQRLQRRFDWGEDSINNQDAIELSGGR

SEQ ID NO: 27918 - protein, 545 aa, Arabidopsis thaliana
  misc_feature (1)..(545): Ceres Seq. ID no. 2136571
MNFSSGTLSSGIGILTTLKTLTLKGNGIMGGIPESIGNLSSLTSLDLEDNHLTDRIPSTLGNLKNLQFLTLSRNNLNGSIPDSLTGLSKLINILLDSNNLSGEIPQSLFKIPKYNFTANNLSCGGTFPQPCVTESSPSGDSSSRKTGIIAGVVSGIAVILLGFFFFFFCKDKHKGYKRDVFVDVAGTNFKKGLISGEVDRRIAFGQLRRFAWRELQLATDEFSEKNVLGQGGFGKVYKGLLSDGTKVAVKRLTDFERPGGDEAFQREVEMISVAVHRNLLRLIGFCTTQTERLLVYPFMQNLSVAYCLREIKPGDPVLDWFRRKQIALGAARGLEYLHEHCNPKIIHRDVKAANVLLDEDFEAVVGDFGLAKLVDVRRTNVTTQVRGTMGHIAPECISTGKSSEKTDVFGYGIMLLELVTGQRAIDFSRLEEEDDVLLLDHVKKLEREKRLEDIVDKKLDEDYIKEEVEMMIQVALLCTQAAPEERPAMSEVVRMLEGEGLAERWEEWQNLEVTRQEEFQRLQRRFDWGEDSINNQDAIELSGGR

SEQ ID NO: 27919 - protein, 517 aa, Arabidopsis thaliana
  misc_feature (1)..(517): Ceres Seq. ID no. 2136572
MGGIPESIGNLSSLTSLDLEDNHLTDRIPSTLGNLKNLQFLTLSRNNLNGSIPDSLTGLSKLINILLDSNNLSGEIPQSLFKIPKYNFTANNLSCGGTFPQPCVTESSPSGDSSSRKTGIIAGVVSGIAVILLGFFFFFFCKDKHKGYKRDVFVDVAGTNFKKGLISGEVDRRIAFGQLRRFAWRELQLATDEFSEKNVLGQGGFGKVYKGLLSDGTKVAVKRLTDFERPGGDEAFQREVEMISVAVHRNLLRLIGFCTTQTERLLVYPFMQNLSVAYCLREIKPGDPVLDWFRRKQIALGAARGLEYLHEHCNPKIIHRDVKAANVLLDEDFEAVVGDFGLAKLVDVRRTNVTTQVRGTMGHIAPECISTGKSSEKTDVFGYGIMLLELVTGQRAIDFSRLEEEDDVLLLDHVKKLEREKRLEDIVDKKLDEDYIKEEVEMMIQVALLCTQAAPEERPAMSEVVRMLEGEGLAERWEEWQNLEVTRQEEFQRLQRRFDWGEDSINNQDAIELSGGR

SEQ ID NO: 27920 - DNA, 2145 bp, Arabidopsis thaliana
  misc_feature (1)..(2145): Ceres Seq. ID no. 2137262
atgggctgcaattgcaccaaaggaacacggcctgataatgataacgtcgataacagcaacagcattgtcagcaatgtcaatgtcaaggagagaagaagcaagcctaagaaaacccccaagaagaagaaaaaatcaaaatctgcttcttcgagcaaagacaacaatgtaggattcgaggaacgaagcaacgacaataaagaagcctccttgacgttgttgatacccattgatgccaagaaggatgatgagtccgagaagaaggtgaatctcgagagaaagtcttctagattggtgtttcagagacggcccaccggtattgaggttggtgccaacaacatagggacattgcagcaacctaagatgactagaatatgcagtgttagtaatggagaaagaggagctcaggttatggctggttggccttcatggttagcttctgttgctggcgaagctatcaatggatggattccacgaaaggctgattctttcgagaagttggaaaagattggacaagggacgtatagcagtgtgtacaaagcccgggacctagagacgaaccaattagttgcactgaagaaagtgcggtttgctaatatggatcccgacagtgttcggttcatggctagagaaataatcatccttcgaaggcttgaccatcctaatgttatgaagcttgagggtttgatcacttcaagagtatcaggaagtatgtatcttatatttgaatacatggaacacgatcttgctggcctagcttcaacccctgggattaacttctctgaggcacagattaagtgctatatgaaacagctgcttcatggtcttgaacattgtcatagccgaggtgtattgcatcgtgacatcaagggctctaatctgctgcttgaccataacaacaatctcaaaattggagatttcggtcttgccaatttttaccaaggtcaccagaagcagcctctcactagccgcgttgtaactttgtggtatcgtccacctgaactattacttggttcaacagactatggtgttacagtagatctgtggagcacaggatgcatactagctgaactctttactgggaaacctatcatgcccggtagaaccgaggtagaacaactacacaagatcttcaaactctgtggatcaccttctgaagagtattggaaaatatcaaaattgccacatgccaccatctttaaacctcaacaaccttacaagcggtgtgtagctgaaacatttaagagtcttccatcttcagctttggccctagttgaggttcttttagctgtagaaccagatgctcgtggaaccacagcttctgcccttgaaagcgagttctttactacatcgcctttggcaagtgacccatcaagtttaccaaagtaccaaccgagaaaggaaattgatgtgaaggctcaagaggaggaggcaaaacgaaagaaagacactagcagtaaacagaatgattcaaaacaagtatctagagaatctaaagctgtgccggctccagactccaatgccgagtctctgacatcaatacaaaaacgtcaagggcagcataaccaggtaagcaatagtgacaagttcaatcctggtgaagatgcagctagcttccggatagaaccactgaagagtggaactgcaaaagacggtcacactcgttatggtgtgtcctcggtgaatagaaatggagagaatgttatgatgggctcgagtcggtctcctagaaaagaactgaggacacaacggtcttttgtccaacgcggaacagcccaattgtcaagattctcaaactcggtagctgctagagatggatcacatttcgctatagcaaatccacggtggtttgaagatagttataacaataataacggaaggcaaaacggaggtgcttggtcccaacgtttggtggttaaacacaaagagtttacaaaacacaaagaatctataacggttaacggtgaaaagaaagagagaatgcactgctcagggcctttggtttctgcaggaggaaacttagatgaaatgttgaaagaacatgaaaggcagattcagttagcggttcgcaaagctcgggtggataagaagacgaatagaggcgataacagacagactcaagcgtttcttgctgcaaatggcaggtga

SEQ ID NO: 27921 - protein, 714 aa, Arabidopsis thaliana
  misc_feature (1)..(714): Ceres Seq. ID no. 2137263
MGCNCTKGTRPDNDNVDNSNSIVSNVNVKERRSKPKKTPKKKKKSKSASSSKDNNVGFEERSNDNKEASLTLLIPIDAKKDDESEKKVNLERKSSRLVFQRRPTGIEVGANNIGTLQQPKMTRICSVSNGERGAQVMAGWPSWLASVAGEAINGWIPRKADSFEKLEKIGQGTYSSVYKARDLETNQLVALKKVRFANMDPDSVRFMAREIIILRRLDHPNVMKLEGLITSRVSGSMYLIFEYMEHDLAGLASTPGINFSEAQIKCYMKQLLHGLEHCHSRGVLHRDIKGSNLLLDHNNNLKIGDFGLANFYQGHQKQPLTSRVVTLWYRPPELLLGSTDYGVTVDLWSTGCILAELFTGKPIMPGRTEVEQLHKIFKLCGSPSEEYWKISKLPHATIFKPQQPYKRCVAETFKSLPSSALALVEVLLAVEPDARGTTASALESEFFTTSPLASDPSSLPKYQPRKEIDVKAQEEEAKRKKDTSSKQNDSKQVSRESKAVPAPDSNAESLTSIQKRQGQHNQVSNSDKFNPGEDAASFRIEPLKSGTAKDGHTRYGVSSVNRNGENVMMGSSRSPRKELRTQRSFVQRGTAQLSRFSNSVAARDGSHFAIANPRWFEDSYNNNNGRQNGGAWSQRLVVKHKEFTKHKESITVNGEKKERMHCSGPLVSAGGNLDEMLKEHERQIQLAVRKARVDKKTNRGDNRQTQAFLAANGR

SEQ ID NO: 27922 - protein, 594 aa, Arabidopsis thaliana
  misc_feature (1)..(594): Ceres Seq. ID no. 2137264
MTRICSVSNGERGAQVMAGWPSWLASVAGEAINGWIPRKADSFEKLEKIGQGTYSSVYKARDLETNQLVALKKVRFANMDPDSVRFMAREIIILRRLDHPNVMKLEGLITSRVSGSMYLIFEYMEHDLAGLASTPGINFSEAQIKCYMKQLLHGLEHCHSRGVLHRDIKGSNLLLDHNNNLKIGDFGLANFYQGHQKQPLTSRVVTLWYRPPELLLGSTDYGVTVDLWSTGCILAELFTGKPIMPGRTEVEQLHKIFKLCGSPSEEYWKISKLPHATIFKPQQPYKRCVAETFKSLPSSALALVEVLLAVEPDARGTTASALESEFFTTSPLASDPSSLPKYQPRKEIDVKAQEEEAKRKKDTSSKQNDSKQVSRESKAVPAPDSNAESLTSIQKRQGQHNQVSNSDKFNPGEDAASFRIEPLKSGTAKDGHTRYGVSSVNRNGENVMMGSSRSPRKELRTQRSFVQRGTAQLSRFSNSVAARDGSHFAIANPRWFEDSYNNNNGRQNGGAWSQRLVVKHKEFTKHKESITVNGEKKERMHCSGPLVSAGGNLDEMLKEHERQIQLAVRKARVDKKTNRGDNRQTQAFLAANGR

SEQ ID NO: 27923 - protein, 578 aa, Arabidopsis thaliana
  misc_feature (1)..(578): Ceres Seq. ID no. 2137265
MAGWPSWLASVAGEAINGWIPRKADSFEKLEKIGQGTYSSVYKARDLETNQLVALKKVRFANMDPDSVRFMAREIIILRRLDHPNVMKLEGLITSRVSGSMYLIFEYMEHDLAGLASTPGINFSEAQIKCYMKQLLHGLEHCHSRGVLHRDIKGSNLLLDHNNNLKIGDFGLANFYQGHQKQPLTSRVVTLWYRPPELLLGSTDYGVTVDLWSTGCILAELFTGKPIMPGRTEVEQLHKIFKLCGSPSEEYWKISKLPHATIFKPQQPYKRCVAETFKSLPSSALALVEVLLAVEPDARGTTASALESEFFTTSPLASDPSSLPKYQPRKEIDVKAQEEEAKRKKDTSSKQNDSKQVSRESKAVPAPDSNAESLTSIQKRQGQHNQVSNSDKFNPGEDAASFRIEPLKSGTAKDGHTRYGVSSVNRNGENVMMGSSRSPRKELRTQRSFVQRGTAQLSRFSNSVAARDGSHFAIANPRWFEDSYNNNNGRQNGGAWSQRLVVKHKEFTKHKESITVNGEKKERMHCSGPLVSAGGNLDEMLKEHERQIQLAVRKARVDKKTNRGDNRQTQAFLAANGR

SEQ ID NO: 27924 - DNA, 981 bp, Arabidopsis thaliana
  misc_feature (1)..(981): Ceres Seq. ID no. 2138218
atgactaatggcggtagaggttccggcggcggtggtggtggcggcggcagggagtcaggcggtcgtgatttggaaattagacctggtggtatgttggttcagaaacgtaacccggatttggatcctgtcggacctccaccaccaccgatgatcagagttagaatcaagtacggtgccgtctaccatgagatcaatattagtcctcaagcttcttttggggagctaaagaagatgttgactggaccaacgggtattcatcatcaagatcagaagctaatgtataaagataaagagagggattcgaaggcgttcctcgatgtttcgggagtgaaagataaatctaagatggtgcttatagaagacccgcttagccaagagaaacggtttttggagatgaggaagattgctaaaaccgaaaaggcgtctaaagcgatatcggatattagccttgaagttgataggctcggcggacgagtttcggcttttgagatggtaactaaaaaaggagggaagattgcggagaaagatcttgtaacggttatcgaattgctgatgaatgagttgattaagttggatgcgattgtagctgaaggagatgtcaagttacaaagaaagatgcaggtgaagagagtgcagaattatgtggaaacactcgatgccttgaaggtgaaaaactccatggctaatgggcaacagaaacagtcaagtactgctcagagacttgcaccgattcaagaacataacaatgaagagagacaagaacagaaaccgatacaatcgctcatggacatgccgatacaatacaaagagaagaagcaagagattgaagaggagcctaggaattcaggggaaggaccatttgtgttagattcttctgctaaatgggaaacattcgatcatcatcccgtgacgccattgagctcgactactgcgaaaaataacgcgatcccgcccaggtttaattgggaattctttgattga

SEQ ID NO: 27925 - protein, 326 aa, Arabidopsis thaliana
  misc_feature (1)..(326): Ceres Seq. ID no. 2138219
MTNGGRGSGGGGGGGGRESGGRDLEIRPGGMLVQKRNPDLDPVGPPPPPMIRVRIKYGAVYHEINISPQASFGELKKMLTGPTGIHHQDQKLMYKDKERDSKAFLDVSGVKDKSKMVLIEDPLSQEKRFLEMRKIAKTEKASKAISDISLEVDRLGGRVSAFEMVTKKGGKIAEKDLVTVIELLMNELIKLDAIVAEGDVKLQRKMQVKRVQNYVETLDALKVKNSMANGQQKQSSTAQRLAPIQEHNNEERQEQKPIQSLMDMPIQYKEKKQEIEEEPRNSGEGPFVLDSSAKWETFDHHPVTPLSSTTAKNNAIPPRFNWEFFD

SEQ ID NO: 27926 - protein, 296 aa, Arabidopsis thaliana
  misc_feature (1)..(296): Ceres Seq. ID no. 2138220
MLVQKRNPDLDPVGPPPPPMIRVRIKYGAVYHEINISPQASFGELKKMLTGPTGIHHQDQKLMYKDKERDSKAFLDVSGVKDKSKMVLIEDPLSQEKRFLEMRKIAKTEKASKAISDISLEVDRLGGRVSAFEMVTKKGGKIAEKDLVTVIELLMNELIKLDAIVAEGDVKLQRKMQVKRVQNYVETLDALKVKNSMANGQQKQSSTAQRLAPIQEHNNEERQEQKPIQSLMDMPIQYKEKKQEIEEEPRNSGEGPFVLDSSAKWETFDHHPVTPLSSTTAKNNAIPPRFNWEFFD

SEQ ID NO: 27927 - protein, 277 aa, Arabidopsis thaliana
  misc_feature (1)..(277): Ceres Seq. ID no. 2138221
MIRVRIKYGAVYHEINISPQASFGELKKMLTGPTGIHHQDQKLMYKDKERDSKAFLDVSGVKDKSKMVLIEDPLSQEKRFLEMRKIAKTEKASKAISDISLEVDRLGGRVSAFEMVTKKGGKIAEKDLVTVIELLMNELIKLDAIVAEGDVKLQRKMQVKRVQNYVETLDALKVKNSMANGQQKQSSTAQRLAPIQEHNNEERQEQKPIQSLMDMPIQYKEKKQEIEEEPRNSGEGPFVLDSSAKWETFDHHPVTPLSSTTAKNNAIPPRFNWEFFD

SEQ ID NO: 27928 - DNA, 1170 bp, Arabidopsis thaliana
  misc_feature (1)..(1170): Ceres Seq. ID no. 2139038
atgatgaagctttgtccttgtttcatcaacccgcatcagcttggacctaattcgcctagagattcatttgacgaaggtcttacagcttatagaggccatagccgtaaactttttgcactgttcacatttcgctcacatcggaaaggaagctgcaggcagaagtatataacggaagagataaagaagtatgggaacgtgaagaactgcggtcgaatcttcaaattcaaggagctaatagctgcaaccgacaatttcagcatggattgtatgattggtgaaggcggttttggaagagtctacaaagggtttctcaccagcctcaatcaggtggtggctgtaaagaggcttgataggaatgggttgcaaggaacaagagagttctttgcagaagtaatggtattgagtctggctcaacatccaaaccttgtcaatctcattggctattgcgtcgaagacgagcaacgagtcctcgtttatgaattcatgcctaacggatctttggaagatcatttgttcgacttaccagaagggtcaccaagtctagactggttcaccagaatgcggatagtgcacggagcagcgaaagggctcgagtacttgcacgactacgcagatcctcctgtgatctaccgcgatttcaaagcttcaaacatattgttacaatctgacttcaactcaaagctatcggatttcgggttagctagacttggaccaactgaaggcaaagatcatgtgtccacaagagtcatgggaacatacggatactgtgcccctgaatatgcgatgaccggtcaactcactgctaaatccgatgtctacagtttcggtgttgtccttcttgagatcatttccggaagacgagctattgatggcgatagaccaactgaagaacaaaacttgatctcttgggcggaaccgttgttgaaagatagaaggatgtttgcgcagattgtggatccaaatctagatgggaactacccagtaaaagggttgcatcaagctctagcgattgcagcgatgtgtttgcaagaagaagcagagactaggccattgatgggagatgtggtcacagcacttgagttcttggctaagcctatagaggtggttgataacactaacactactcctgcctctcctactcagacatcatcatctgattcatcaaactaa

SEQ ID NO: 27929 - protein, 389 aa, Arabidopsis thaliana
  misc_feature (1)..(389): Ceres Seq. ID no. 2139039
MMKLCPCFINPHQLGPNSPRDSFDEGLTAYRGHSRKLFALFTFRSHRKGSCRQKYITEEIKKYGNVKNCGRIFKFKELIAATDNFSMDCMIGEGGFGRVYKGFLTSLNQVVAVKRLDRNGLQGTREFFAEVMVLSLAQHPNLVNLIGYCVEDEQRVLVYEFMPNGSLEDHLFDLPEGSPSLDWFTRMRIVHGAAKGLEYLHDYADPPVIYRDFKASNILLQSDFNSKLSDFGLARLGPTEGKDHVSTRVMGTYGYCAPEYAMTGQLTAKSDVYSFGVVLLEIISGRRAIDGDRPTEEQNLISWAEPLLKDRRMFAQIVDPNLDGNYPVKGLHQALAIAAMCLQEEAETRPLMGDVVTALEFLAKPIEVVDNTNTTPASPTQTSSSDSSN

SEQ ID NO: 27930 - protein, 388 aa, Arabidopsis thaliana
  misc_feature (1)..(388): Ceres Seq. ID no. 2139040
MKLCPCFINPHQLGPNSPRDSFDEGLTAYRGHSRKLFALFTFRSHRKGSCRQKYITEEIKKYGNVKNCGRIFKFKELIAATDNFSMDCMIGEGGFGRVYKGFLTSLNQVVAVKRLDRNGLQGTREFFAEVMVLSLAQHPNLVNLIGYCVEDEQRVLVYEFMPNGSLEDHLFDLPEGSPSLDWFTRMRIVHGAAKGLEYLHDYADPPVIYRDFKASNILLQSDFNSKLSDFGLARLGPTEGKDHVSTRVMGTYGYCAPEYAMTGQLTAKSDVYSFGVVLLEIISGRRAIDGDRPTEEQNLISWAEPLLKDRRMFAQIVDPNLDGNYPVKGLHQALAIAAMCLQEEAETRPLMGDVVTALEFLAKPIEVVDNTNTTPASPTQTSSSDSSN

SEQ ID NO: 27931 - protein, 303 aa, Arabidopsis thaliana
  misc_feature (1)..(303): Ceres Seq. ID no. 2139041
MDCMIGEGGFGRVYKGFLTSLNQVVAVKRLDRNGLQGTREFFAEVMVLSLAQHPNLVNLIGYCVEDEQRVLVYEFMPNGSLEDHLFDLPEGSPSLDWFTRMRIVHGAAKGLEYLHDYADPPVIYRDFKASNILLQSDFNSKLSDFGLARLGPTEGKDHVSTRVMGTYGYCAPEYAMTGQLTAKSDVYSFGVVLLEIISGRRAIDGDRPTEEQNLISWAEPLLKDRRMFAQIVDPNLDGNYPVKGLHQALAIAAMCLQEEAETRPLMGDVVTALEFLAKPIEVVDNTNTTPASPTQTSSSDSSN

SEQ ID NO: 27932 - DNA, 531 bp, Arabidopsis thaliana
  misc_feature (1)..(531): Ceres Seq. ID no. 2139394
atggaggagactatactggtcggtgatgacctaatgacgggtcctccatctcctgttatccctcctgaaattgcttcacatgtgcttgaaggtgttgatttgtgcgatgggattttgaggaatctattcctgtgtttgcaaatcaatgatattgaaccattttgccaagatgagcttgcattgtatcgacaatgtgctgaaaagagggacaaaatattgagagttagacttcaagagagcgaacacaagttaggattgtctatgcccattgaactcgctaaggaaaggattacgcagcttgaagctgaagccacatcttttgagaggcacttgattctagcaagtggagctgaaggaatagaaggatttcgccggagatggagtttacacggtcggatgacggataccaaaaaaagactggagtcactgaagcagggaatggagaacaggaacaaggttgaacatgaacataaccaacaccatgatcagtccccaaaaccttctgctccaaaaagatggttcttttggtga

SEQ ID NO: 27933 - protein, 176 aa, Arabidopsis thaliana
  misc_feature (1)..(176): Ceres Seq. ID no. 2139395
MEETILVGDDLMTGPPSPVIPPEIASHVLEGVDLCDGILRNLFLCLQINDIEPFCQDELALYRQCAEKRDKILRVRLQESEHKLGLSMPIELAKERITQLEAEATSFERHLILASGAEGIEGFRRRWSLHGRMTDTKKRLESLKQGMENRNKVEHEHNQHHDQSPKPSAPKRWFFW

SEQ ID NO: 27934 - protein, 165 aa, Arabidopsis thaliana
  misc_feature (1)..(165): Ceres Seq. ID no. 2139396
MTGPPSPVIPPEIASHVLEGVDLCDGILRNLFLCLQINDIEPFCQDELALYRQCAEKRDKILRVRLQESEHKLGLSMPIELAKERITQLEAEATSFERHLILASGAEGIEGFRRRWSLHGRMTDTKKRLESLKQGMENRNKVEHEHNQHHDQSPKPSAPKRWFFW

SEQ ID NO: 27935 - protein, 89 aa, Arabidopsis thaliana
  misc_feature (1)..(89): Ceres Seq. ID no. 2139397
MPIELAKERITQLEAEATSFERHLILASGAEGIEGFRRRWSLHGRMTDTKKRLESLKQGMENRNKVEHEHNQHHDQSPKPSAPKRWFFW

SEQ ID NO: 27936 - DNA, 1323 bp, Arabidopsis thaliana
  misc_feature (1)..(1323): Ceres Seq. ID no. 2141877
atggaaggagaatccaaaggattaatcgttgggatctcactaggtttggtgattggtgttgtcttagctatctcagctttgttctgctttaggtatcatagaaaaaagtctcagattgtgaatagtggatcacgaagaagtgcaaccattcccatcagagagaatggagctgattcgtgtaatataatgtcggattcgaccattggtccggattcacctgtgaaatcttctaagaatgggaggtctgtttggcttgaagggtttagtaagaggagtaatgtcatctctgcttctggcattttggaatattcttacagggatttgcagaaagcgacgtgtaatttcacgactttgataggccaaggagcatttggacctgtctacaaagctcaaatgtctactggtgagatcgtggctgtgaaagttctagccactgattctaaacagggcgaaaaagagtttcagacagaggttatgttattgggaaggttgcatcaccgtaacctagtgaacttgattggatactgtgcagagaaaggccaacacatgcttatatatgtttacatgagtaaaggaagcttagcttctcatttatacagcgaaaaacatgaaccgctgagctgggatttgagagtatatattgctttagacgtggcacgtggtctagagtatcttcatgatggggctgttcctcctgtaatccacagagatatcaaatcttccaacatcttgctggatcaatctatgagagctcgggttgctgactttggcctctccagagaagaaatggtagacaaacatgcagctaacatcagaggaacatttggctacctcgatcccgaatacatttcaacaagaacattcaccaagaaaagcgatgtctatggcttcggagttttgcttttcgagcttatagcaggaagaaatcctcaacaaggtctaatggaattggttgagctggcggctatgaatgcagaggaaaaagtcggatgggaagagatagtagattcaagattagatgggagatatgatttacaagaagtgaatgaagtagcagcttttgcttacaaatgcatctctcgtgcacctagaaaacgtcctaacatgagggacattgttcaggttttgactcgtgttattaaagtgagacattgcagaaagcggcagaagaattctccgtcgccgtctccacggcttcctcctcctcctccgatagtggaggagtcagaaggtgagttaactgcaaacggatcattacgatcagaaattcatcggagggataattccttggacagtagtatagctgaagacgtgattttgtaa

SEQ ID NO: 27937 - protein, 440 aa, Arabidopsis thaliana
  misc_feature (1)..(440): Ceres Seq. ID no. 2141878
MEGESKGLIVGISLGLVIGVVLAISALFCFRYHRKKSQIVNSGSRRSATIPIRENGADSCNIMSDSTIGPDSPVKSSKNGRSVWLEGFSKRSNVISASGILEYSYRDLQKATCNFTTLIGQGAFGPVYKAQMSTGEIVAVKVLATDSKQGEKEFQTEVMLLGRLHHRNLVNLIGYCAEKGQHMLIYVYMSKGSLASHLYSEKHEPLSWDLRVYIALDVARGLEYLHDGAVPPVIHRDIKSSNILLDQSMRARVADFGLSREEMVDKHAANIRGTFGYLDPEYISTRTFTKKSDVYGFGVLLFELIAGRNPQQGLMELVELAAMNAEEKVGWEEIVDSRLDGRYDLQEVNEVAAFAYKCISRAPRKRPNMRDIVQVLTRVIKVRHCRKRQKNSPSPSPRLPPPPPIVEESEGELTANGSLRSEIHRRDNSLDSSIAEDVIL

SEQ ID NO: 27938 - protein, 378 aa, Arabidopsis thaliana
  misc_feature (1)..(378): Ceres Seq. ID no. 2141879
MSDSTIGPDSPVKSSKNGRSVWLEGFSKRSNVISASGILEYSYRDLQKATCNFTTLIGQGAFGPVYKAQMSTGEIVAVKVLATDSKQGEKEFQTEVMLLGRLHHRNLVNLIGYCAEKGQHMLIYVYMSKGSLASHLYSEKHEPLSWDLRVYIALDVARGLEYLHDGAVPPVIHRDIKSSNILLDQSMRARVADFGLSREEMVDKHAANIRGTFGYLDPEYISTRTFTKKSDVYGFGVLLFELIAGRNPQQGLMELVELAAMNAEEKVGWEEIVDSRLDGRYDLQEVNEVAAFAYKCISRAPRKRPNMRDIVQVLTRVIKVRHCRKRQKNSPSPSPRLPPPPPIVEESEGELTANGSLRSEIHRRDNSLDSSIAEDVIL

SEQ ID NO: 27939 - protein, 309 aa, Arabidopsis thaliana
  misc_feature (1)..(309): Ceres Seq. ID no. 2141880
MSTGEIVAVKVLATDSKQGEKEFQTEVMLLGRLHHRNLVNLIGYCAEKGQHMLIYVYMSKGSLASHLYSEKHEPLSWDLRVYIALDVARGLEYLHDGAVPPVIHRDIKSSNILLDQSMRARVADFGLSREEMVDKHAANIRGTFGYLDPEYISTRTFTKKSDVYGFGVLLFELIAGRNPQQGLMELVELAAMNAEEKVGWEEIVDSRLDGRYDLQEVNEVAAFAYKCISRAPRKRPNMRDIVQVLTRVIKVRHCRKRQKNSPSPSPRLPPPPPIVEESEGELTANGSLRSEIHRRDNSLDSSIAEDVIL

SEQ ID NO: 27940 - DNA, 3264 bp, Arabidopsis thaliana
  misc_feature (1)..(3264): Ceres Seq. ID no. 2142328
atggcgagtggcggaaagggggagaagatattggtttcggtaagggtaaggccgcagaacgagaaagagaaggcgaggaatgatatatgtgattgggaatgtgtaaacaacacaacaatagtatgcaataacaatttgcctgagaggtctctcttcccctctacctatacatttgacaaagtgtttggatttgattctcccacgaaacaagtctatgaagatggagcgaaggaggttgctctttgtgttctcggcggaatcaactcaagtattttcgcatatggacagacaagcagtgggaagacgtatacaatgtgtggcatcactaaatttgcaatggatgacattttttgttacattcaaaagcatacggaccgcaaatttaccctcaaattctctgcgattgagatctacaatgaagctgtgagggatctcctaagtggggataataatcaacggaggctcctcgatgatccagagagaggaaccgtcgttgagaaacttattgaggagaccatccaagacagaacacatctagaggaacttcttacagtctgtgaaactcagaggaagattggagagacctccctgaatgaagttagctctagatcacatcaaatactccggctgacaatcgaaagcactggtcgagaatattctccggatagctcaagcactcttgcagcgtccgtgtgcttcattgatctggctggaagtgaacgtgcttctcagactttatctgctggtacaagattgaaagaaggttgtcatataaacaggagtttacttactcttggaacggtcatccgcaaactaaggttcgatccatgtgatatagctcaatctcaggtggagaatttacttaaatcaacagcagaagagcggtcttctaggatggatgaacaatccatgtttagctccatggattttgatgctgatttccgaagaagaagctatgattcaacagatcttggagaacctagtatcatcaataacttaaccgagaggaactttgagtttttggaaaattctgaagaagatgatttcctgctagatgataagacccctcaattttcgaggcataacctgtatgatgactgggaagagttggttcaaataaccgacgaaagactggaagatgcatgcaaagaagttagatgcattgaacctgaagctgagcagagtagtggacaaccagcagcatgcgaaagccatgactcattagacgacattgttgataagatagctatctctgaggttctctcacctagaaaggaagaaactttaccaggtctggaacacgaacaaagctataacccttctacaggtattgagaaagccgagaatgaagacatggagattagcatacctgcagcaaaggaagaaactttaccagctctagaatacgaacaaagctataactcttatacaggtaatgagagagccgagaatgaagtcatggagattagcacacctagaaaggacgaaccattatcagctctggaatacgaacaaagctataactcttctacaagtaatgagaaagccgagaatgaagatatggagattagcacacctgcagaaaaggaaaatgttgacttatctttaaaaacaatagatgtgaatgctaagcctgagacctatgagctaactctaaagaactcggatttggagataggcccatcagttgaagctcaagaatcacaggaatctgtgaatgaagaggaacaaatgaagaatgaagagaggaaaatgagtccttccacaaagcaagctgagcaatgcttaaataaagaagaaaatgctcagtcagaacagcaatcaacggaagactgtgaattgaattcactccctattaataaccaatcagaagcaacagtcgaagtggagttaacacccaacgatgctaagttagatgaggatgcgacatctagagataagtgggagagcaaacagcaacaagaggctgataaagattgtaacgaatcatctgtctgcaaaaatattgggacagatgataatgacaacgacacttacatggctttgaaagaaaaagttaaggagatgcagaagaaaattgaataccttatgagcatgcacacagcagaacaacaacaatcaccctccttcagaagagatttcaagagtcctccagaatattttactgccaaaagaagccgaagttgcagagaaaatctcttgagtgttagatctcctcattggtttgagagtttggaagttagtaacaatacatcacctacctggagggttatgcagacaaaagcttctcctggaagacccaacacttcgagcatttcctttgattcagggagttctacctccattgatacgcgtagcctgaaagactatgatcctgagatgggcaatagcttccgtgaatttgtagcagggcttgaggaaatggcaaagaagcatcactcaattgactcgacaccggagctagattatgggattccatacgctcccacaaaaaccgaaagaatggagatcagaccggaaagccctgcagatagcgttagaggaaacgagaatgcattgccaaatcctcaggatataaataaagaaaccacagatgccaccaataatcagtcacagagagagcaggttggtgattcggtagaagaagcaaaacctaaggaaacagattccacagaggcttcccaggagaaactacaggtagctgctaatggacaatattcaatcagttcttcagactttgagagacagcaaaggaaaataattgagctttgggcagcatgcaatgtaccactggttcacagaacctacttctttttgctcttcaaaggtgatccttcagactatgtttatatggaagttgaacttcgaaggctatcttttctgaagcagacgatatctaatgacatggaaacatcaaggatgcaaacagtgaaggcactcacacgcgagaaggaatggatttccaaacaattaccaaagaagtttccatggaaccaaagaatagggctttaccaaaaatggggcgtggaggtgaactcaaagcagagaagcctgcaagtggcgcacaagctgtggaccaacacccaagatatggaccacataaaagaaagtgcttctcttgtggctaagctgcttggatttgttgagccaagtcgaatgccgaaggaaatgtttggcctcagcttgttacctagaaccgaaaacgtaaaatcatctggctggagatttaccaaatcattctctgctatacgcttgaccagatga

SEQ ID NO: 27941 - protein, 1087 aa, Arabidopsis thaliana
  misc_feature (1)..(1087): Ceres Seq. ID no. 2142329
MASGGKGEKILVSVRVRPQNEKEKARNDICDWECVNNTTIVCNNNLPERSLFPSTYTFDKVFGFDSPTKQVYEDGAKEVALCVLGGINSSIFAYGQTSSGKTYTMCGITKFAMDDIFCYIQKHTDRKFTLKFSAIEIYNEAVRDLLSGDNNQRRLLDDPERGTVVEKLIEETIQDRTHLEELLTVCETQRKIGETSLNEVSSRSHQILRLTIESTGREYSPDSSSTLAASVCFIDLAGSERASQTLSAGTRLKEGCHINRSLLTLGTVIRKLRFDPCDIAQSQVENLLKSTAEERSSRMDEQSMFSSMDFDADFRRRSYDSTDLGEPSIINNLTERNFEFLENSEEDDFLLDDKTPQFSRHNLYDDWEELVQITDERLEDACKEVRCIEPEAEQSSGQPAACESHDSLDDIVDKIAISEVLSPRKEETLPGLEHEQSYNPSTGIEKAENEDMEISIPAAKEETLPALEYEQSYNSYTGNERAENEVMEISTPRKDEPLSALEYEQSYNSSTSNEKAENEDMEISTPAEKENVDLSLKTIDVNAKPETYELTLKNSDLEIGPSVEAQESQESVNEEEQMKNEERKMSPSTKQAEQCLNKEENAQSEQQSTEDCELNSLPINNQSEATVEVELTPNDAKLDEDATSRDKWESKQQQEADKDCNESSVCKNIGTDDNDNDTYMALKEKVKEMQKKIEYLMSMHTAEQQQSPSFRRDFKSPPEYFTAKRSRSCRENLLSVRSPHWFESLEVSNNTSPTWRVMQTKASPGRPNTSSISFDSGSSTSIDTRSLKDYDPEMGNSFREFVAGLEEMAKKHHSIDSTPELDYGIPYAPTKTERMEIRPESPADSVRGNENALPNPQDINKETTDATNNQSQREQVGDSVEEAKPKETDSTEASQEKLQVAANGQYSISSSDFERQQRKIIELWAACNVPLVHRTYFFLLFKGDPSDYVYMEVELRRLSFLKQTISNDMETSRMQTVKALTREKEWISKQLPKKFPWNQRIGLYQKWGVEVNSKQRSLQVAHKLWTNTQDMDHIKESASLVAKLLGFVEPSRMPKEMFGLSLLPRTENVKSSGWRFTKSFSAIRLTR

SEQ ID NO: 27942 - protein, 983 aa, Arabidopsis thaliana
  misc_feature (1)..(983): Ceres Seq. ID no. 2142330
MCGITKFAMDDIFCYIQKHTDRKFTLKFSAIEIYNEAVRDLLSGDNNQRRLLDDPERGTVVEKLIEETIQDRTHLEELLTVCETQRKIGETSLNEVSSRSHQILRLTIESTGREYSPDSSSTLAASVCFIDLAGSERASQTLSAGTRLKEGCHINRSLLTLGTVIRKLRFDPCDIAQSQVENLLKSTAEERSSRMDEQSMFSSMDFDADFRRRSYDSTDLGEPSIINNLTERNFEFLENSEEDDFLLDDKTPQFSRHNLYDDWEELVQITDERLEDACKEVRCIEPEAEQSSGQPAACESHDSLDDIVDKIAISEVLSPRKEETLPGLEHEQSYNPSTGIEKAENEDMEISIPAAKEETLPALEYEQSYNSYTGNERAENEVMEISTPRKDEPLSALEYEQSYNSSTSNEKAENEDMEISTPAEKENVDLSLKTIDVNAKPETYELTLKNSDLEIGPSVEAQESQESVNEEEQMKNEERKMSPSTKQAEQCLNKEENAQSEQQSTEDCELNSLPINNQSEATVEVELTPNDAKLDEDATSRDKWESKQQQEADKDCNESSVCKNIGTDDNDNDTYMALKEKVKEMQKKIEYLMSMHTAEQQQSPSFRRDFKSPPEYFTAKRSRSCRENLLSVRSPHWFESLEVSNNTSPTWRVMQTKASPGRPNTSSISFDSGSSTSIDTRSLKDYDPEMGNSFREFVAGLEEMAKKHHSIDSTPELDYGIPYAPTKTERMEIRPESPADSVRGNENALPNPQDINKETTDATNNQSQREQVGDSVEEAKPKETDSTEASQEKLQVAANGQYSISSSDFERQQRKIIELWAACNVPLVHRTYFFLLFKGDPSDYVYMEVELRRLSFLKQTISNDMETSRMQTVKALTREKEWISKQLPKKFPWNQRIGLYQKWGVEVNSKQRSLQVAHKLWTNTQDMDHIKESASLVAKLLGFVEPSRMPKEMFGLSLLPRTENVKSSGWRFTKSFSAIRLTR

SEQ ID NO: 27943 - protein, 975 aa, Arabidopsis thaliana
  misc_feature (1)..(975): Ceres Seq. ID no. 2142331
MDDIFCYIQKHTDRKFTLKFSAIEIYNEAVRDLLSGDNNQRRLLDDPERGTVVEKLIEETIQDRTHLEELLTVCETQRKIGETSLNEVSSRSHQILRLTIESTGREYSPDSSSTLAASVCFIDLAGSERASQTLSAGTRLKEGCHINRSLLTLGTVIRKLRFDPCDIAQSQVENLLKSTAEERSSRMDEQSMFSSMDFDADFRRRSYDSTDLGEPSIINNLTERNFEFLENSEEDDFLLDDKTPQFSRHNLYDDWEELVQITDERLEDACKEVRCIEPEAEQSSGQPAACESHDSLDDIVDKIAISEVLSPRKEETLPGLEHEQSYNPSTGIEKAENEDMEISIPAAKEETLPALEYEQSYNSYTGNERAENEVMEISTPRKDEPLSALEYEQSYNSSTSNEKAENEDMEISTPAEKENVDLSLKTIDVNAKPETYELTLKNSDLEIGPSVEAQESQESVNEEEQMKNEERKMSPSTKQAEQCLNKEENAQSEQQSTEDCELNSLPINNQSEATVEVELTPNDAKLDEDATSRDKWESKQQQEADKDCNESSVCKNIGTDDNDNDTYMALKEKVKEMQKKIEYLMSMHTAEQQQSPSFRRDFKSPPEYFTAKRSRSCRENLLSVRSPHWFESLEVSNNTSPTWRVMQTKASPGRPNTSSISFDSGSSTSIDTRSLKDYDPEMGNSFREFVAGLEEMAKKHHSIDSTPELDYGIPYAPTKTERMEIRPESPADSVRGNENALPNPQDINKETTDATNNQSQREQVGDSVEEAKPKETDSTEASQEKLQVAANGQYSISSSDFERQQRKIIELWAACNVPLVHRTYFFLLFKGDPSDYVYMEVELRRLSFLKQTISNDMETSRMQTVKALTREKEWISKQLPKKFPWNQRIGLYQKWGVEVNSKQRSLQVAHKLWTNTQDMDHIKESASLVAKLLGFVEPSRMPKEMFGLSLLPRTENVKSSGWRFTKSFSAIRLTR

SEQ ID NO: 27944 - DNA, 1215 bp, Arabidopsis thaliana
  misc_feature (1)..(1215): Ceres Seq. ID no. 2142813
atggcttccttcaaccactttgtgttactgcttctgttaataatcactcttattctatccgctgaagcaactaaggaacgccgagcaataccatcaaaggcagaaaggaatgaaatgaagagacaactcaaagctatcaacaagcctgcaatcaagagtttcaagactgaacatggtgatatattcgattgtatcgatattcacaaacaactagcatttgatcatcacctactaaaaaaccactctgttcagctaaggccaacaacagtacctgaatatatcactggaaacaacatttcagagagttttagtcttttgcaagaaggtataagctgtccagatggcacagtaattgtaaaaaggactacaatgcaagatcttatgcatgcacaacgtttgaaatccatgggattcgagggcccgagaccttttctcacagagacaaacaacatgaattttaatggaaaattctacgatgcaagagctgattatggaccgaacccttttgctggagttgcaggaaacattaacatatggaaaccaaaaatcttgcaagatcaagttagtattggatacatggcagttagtggggggcctattgaagaagatttcgccagcatttcagttggatggattgtgaatccatcgatgcaccatggtgatcatgttcgtttatacgcctactggactttacatggaagcagtactggcggctgctacggcatgtcatgtcctggatttgtgcaagttagcaagactataccagttggtgccgttcttcaaccattttccatctataatggtcgacaatatgaattgcgtttaggcttgtttcaggatagtggcacgggaaattggtggtttgtatttaaagaggagattattggatactggccagcatcattgttcaagtcctggatggaatctaacagcgcaaattatgcatcttggggagggcaagtgtatagccctatcagagagaagagtccacctatgggaagtggtcattggcctagtgagggctttcataaagctgcttttattagtggcctcaaactcttcgatggtcacgggaaagtttataatccaggacgcgggacagtgaaggtacatgagagcagaccaatctgttacaaagccagatatgttcatgatgttgataaaccttggttaaaatctgtttactttggaggtcctggagggtgcatagggtaa

SEQ ID NO: 27945 - protein, 404 aa, Arabidopsis thaliana
  misc_feature (1)..(404): Ceres Seq. ID no. 2142814
MASFNHFVLLLLLIITLILSAEATKERRAIPSKAERNEMKRQLKAINKPAIKSFKTEHGDIFDCIDIHKQLAFDHHLLKNHSVQLRPTTVPEYITGNNISESFSLLQEGISCPDGTVIVKRTTMQDLMHAQRLKSMGFEGPRPFLTETNNMNFNGKFYDARADYGPNPFAGVAGNINIWKPKILQDQVSIGYMAVSGGPIEEDFASISVGWIVNPSMHHGDHVRLYAYWTLHGSSTGGCYGMSCPGFVQVSKTIPVGAVLQPFSIYNGRQYELRLGLFQDSGTGNWWFVFKEEIIGYWPASLFKSWMESNSANYASWGGQVYSPIREKSPPMGSGHWPSEGFHKAAFISGLKLFDGHGKVYNPGRGTVKVHESRPICYKARYVHDVDKPWLKSVYFGGPGGCIG

SEQ ID NO: 27946 - protein, 366 aa, Arabidopsis thaliana
  misc_feature (1)..(366): Ceres Seq. ID no. 2142815
MKRQLKAINKPAIKSFKTEHGDIFDCIDIHKQLAFDHHLLKNHSVQLRPTTVPEYITGNNISESFSLLQEGISCPDGTVIVKRTTMQDLMHAQRLKSMGFEGPRPFLTETNNMNFNGKFYDARADYGPNPFAGVAGNINIWKPKILQDQVSIGYMAVSGGPIEEDFASISVGWIVNPSMHHGDHVRLYAYWTLHGSSTGGCYGMSCPGFVQVSKTIPVGAVLQPFSIYNGRQYELRLGLFQDSGTGNWWFVFKEEIIGYWPASLFKSWMESNSANYASWGGQVYSPIREKSPPMGSGHWPSEGFHKAAFISGLKLFDGHGKVYNPGRGTVKVHESRPICYKARYVHDVDKPWLKSVYFGGPGGCIG

SEQ ID NO: 27947 - protein, 281 aa, Arabidopsis thaliana
  misc_feature (1)..(281): Ceres Seq. ID no. 2142816
MQDLMHAQRLKSMGFEGPRPFLTETNNMNFNGKFYDARADYGPNPFAGVAGNINIWKPKILQDQVSIGYMAVSGGPIEEDFASISVGWIVNPSMHHGDHVRLYAYWTLHGSSTGGCYGMSCPGFVQVSKTIPVGAVLQPFSIYNGRQYELRLGLFQDSGTGNWWFVFKEEIIGYWPASLFKSWMESNSANYASWGGQVYSPIREKSPPMGSGHWPSEGFHKAAFISGLKLFDGHGKVYNPGRGTVKVHESRPICYKARYVHDVDKPWLKSVYFGGPGGCIG

SEQ ID NO: 27948 - DNA, 1356 bp, Arabidopsis thaliana
  misc_feature (1)..(1356): Ceres Seq. ID no. 2143179
atggagaagagtaatggcctgcgagtgattctgtttccacttccattacaaggctgcatcaaccctatgattcagctcgccaagatcctccactcaagaggtttttcaatcactgtgatccacacttgcttcaacgcgccaaaagcttcaagccatccactcttcaccttcatacagatccaagatggcttgtctgaaacagagacaagaactcgcgacgtcaaacttctcataacacttctcaaccaaaattgcgagtctccggttcgtgaatgtttgcgtaaactgttgcaatctgccaaggaagagaaacagaggattagctgtttgatcaatgattctggttggatcttcactcaacacttagccaagagtttgaatctcatgagattggcctttaatacctataagatctccttctttcgaagccattttgttcttcctcagctccggcgtgaaatgtttcttccattacaagattcagaacaagatgatccagttgagaagtttccaccgcttagaaagaaagatcttttacggattcttgaagcagattcggtgcagggagactcgtactcggatatgattttggaaaagacaaaggcgtcttcaggtcttatattcatgtcctgtgaagagttggaccaagactcactgagtcaatcacgtgaagattttaaggttccgatatttgcgataggaccttctcatagccattttcctgcttcttctagtagcttgttcacaccggacgagacttgcatcccatggttagacagacaagaagacaaatccgtaatatacgtgagtattgggagcctcgtgaccatcaacgaaacagagctaatggagattgcttggggtctaagtaacagcgaccaaccatttttatgggtcgtccgggttggttcagtcaatggcacggaatggattgaagcaatcccggaatatttcatcaaaaggcttaatgagaagggaaagatagtgaaatgggctccacaacaagaggttctaaagcatcgagctattggaggtttcttgacacataatggttggaactcgacggttgagagtgtttgtgaaggcgtccctatgatctgtttgccttttcgttgggaccaattgttaaatgcaagatttgttagtgatgtatggatggttgggatacatctcgagggtcggattgagagggatgagatcgagagagcgataaggagattattgttggaaactgaaggagaagccatccgagagaggatacaacttcttaaggaaaaagtaggaagatcagttaaacaaaacggttcggcatatcaatctctacaaaatttgattaattatatatcatctttctag

SEQ ID NO: 27949 - protein, 451 aa, Arabidopsis thaliana
  misc_feature (1)..(451): Ceres Seq. ID no. 2143180
MEKSNGLRVILFPLPLQGCINPMIQLAKILHSRGFSITVIHTCFNAPKASSHPLFTFIQIQDGLSETETRTRDVKLLITLLNQNCESPVRECLRKLLQSAKEEKQRISCLINDSGWIFTQHLAKSLNLMRLAFNTYKISFFRSHFVLPQLRREMFLPLQDSEQDDPVEKFPPLRKKDLLRILEADSVQGDSYSDMILEKTKASSGLIFMSCEELDQDSLSQSREDFKVPIFAIGPSHSHFPASSSSLFTPDETCIPWLDRQEDKSVIYVSIGSLVTINETELMEIAWGLSNSDQPFLWVVRVGSVNGTEWIEAIPEYFIKRLNEKGKIVKWAPQQEVLKHRAIGGFLTHNGWNSTVESVCEGVPMICLPFRWDQLLNARFVSDVWMVGIHLEGRIERDEIERAIRRLLLETEGEAIRERIQLLKEKVGRSVKQNGSAYQSLQNLINYISSF

SEQ ID NO: 27950 - protein, 429 aa, Arabidopsis thaliana
  misc_feature (1)..(429): Ceres Seq. ID no. 2143181
MIQLAKILHSRGFSITVIHTCFNAPKASSHPLFTFIQIQDGLSETETRTRDVKLLITLLNQNCESPVRECLRKLLQSAKEEKQRISCLINDSGWIFTQHLAKSLNLMRLAFNTYKISFFRSHFVLPQLRREMFLPLQDSEQDDPVEKFPPLRKKDLLRILEADSVQGDSYSDMILEKTKASSGLIFMSCEELDQDSLSQSREDFKVPIFAIGPSHSHFPASSSSLFTPDETCIPWLDRQEDKSVIYVSIGSLVTINETELMEIAWGLSNSDQPFLWVVRVGSVNGTEWIEAIPEYFIKRLNEKGKIVKWAPQQEVLKHRAIGGFLTHNGWNSTVESVCEGVPMICLPFRWDQLLNARFVSDVWMVGIHLEGRIERDEIERAIRRLLLETEGEAIRERIQLLKEKVGRSVKQNGSAYQSLQNLINYISSF

SEQ ID NO: 27951 - protein, 323 aa, Arabidopsis thaliana
  misc_feature (1)..(323): Ceres Seq. ID no. 2143182
MRLAFNTYKISFFRSHFVLPQLRREMFLPLQDSEQDDPVEKFPPLRKKDLLRILEADSVQGDSYSDMILEKTKASSGLIFMSCEELDQDSLSQSREDFKVPIFAIGPSHSHFPASSSSLFTPDETCIPWLDRQEDKSVIYVSIGSLVTINETELMEIAWGLSNSDQPFLWVVRVGSVNGTEWIEAIPEYFIKRLNEKGKIVKWAPQQEVLKHRAIGGFLTHNGWNSTVESVCEGVPMICLPFRWDQLLNARFVSDVWMVGIHLEGRIERDEIERAIRRLLLETEGEAIRERIQLLKEKVGRSVKQNGSAYQSLQNLINYISSF

SEQ ID NO: 27952 - DNA, 1362 bp, Arabidopsis thaliana
  misc_feature (1)..(1362): Ceres Seq. ID no. 2144864
atggaaaacaaaagccatagcaaccaccaccggtaccatcatctatcatcccggagccacgagcaaaaccagcgtggcctaatttcgataaatgccataatcatcattggcatctccattatctccatattcataatccttgcaattctcctaataatcattttacttcatcgacttaaatccgcaagagtcaaagcacaagaattatcttgcaaagaaagcttcaacaacatgaacaatggtggagcttccaccaactacagctacacttctagccctgatgacatcaagagagattgtctatactcaagaaacccaacatcgttcagacaattacccccacagacaaaaagttgtaggagaagccgagccgaaggagtagaagtgtacacatacaaggaattagagattgcaacaaataatttcagcgaggagaagaaaatcggaaatggagatgtgtacaaaggagtactaagtgatggaactgttgcggccattaaaaagcttcatatgtttaatgataatgctagtaaccaaaagcatgaagaacggtcctttaggcttgaggttgatcttcttagtcgattacaatgcccatatttggtggaattacttggatattgtgcagatcaaaaccataggatcctgatatatgaatttatgcctaatggtactgtggaacatcatctccacgatcataattttaagaatctaaaggatcgacctcaaccattagattggggagctcggcttaggatcgcccttgattgcgccagagccctagagtttcttcatgagaatacaatctctactgttatccaccggaacttcaagtgtaccaacattttgttggatcaaaataatcgagctaaagtttcagatttcggattagccaaaaccggatccgataaactaaacggtgagatttcaacaagggttattggcaccacaggatatcttgctccagagtatgcctctactggaaagcttactacaaaatcagatgtttatagttatggtattgtgttactacaactcttaacgggtcgcacaccgatcgattcaagacgtccacggggacaagatgtccttgtctcttgggctcttccaagactaaccaatagagagaaaattagtgaaatggtggatccaaccatgaaaggtcaatactcacaaaaagatcttattcaggtagcagccatagcagcagtgtgtgtgcaaccagaagcaagttatagaccgttgatgacggatgttgttcactcgctcattccccttgttaaagctttcaacaaaagtactgattcttctcggtttcctagccgtagagaaagcttgtcatttgatgatattatgccatga

SEQ ID NO: 27953 - protein, 453 aa, Arabidopsis thaliana
  misc_feature (1)..(453): Ceres Seq. ID no. 2144865
MENKSHSNHHRYHHLSSRSHEQNQRGLISINAIIIIGISIISIFIILAILLIIILLHRLKSARVKAQELSCKESFNNMNNGGASTNYSYTSSPDDIKRDCLYSRNPTSFRQLPPQTKSCRRSRAEGVEVYTYKELEIATNNFSEEKKIGNGDVYKGVLSDGTVAAIKKLHMFNDNASNQKHEERSFRLEVDLLSRLQCPYLVELLGYCADQNHRILIYEFMPNGTVEHHLHDHNFKNLKDRPQPLDWGARLRIALDCARALEFLHENTISTVIHRNFKCTNILLDQNNRAKVSDFGLAKTGSDKLNGEISTRVIGTTGYLAPEYASTGKLTTKSDVYSYGIVLLQLLTGRTPIDSRRPRGQDVLVSWALPRLTNREKISEMVDPTMKGQYSQKDLIQVAAIAAVCVQPEASYRPLMTDVVHSLIPLVKAFNKSTDSSRFPSRRESLSFDDIMP

SEQ ID NO: 27954 - protein, 376 aa, Arabidopsis thaliana
  misc_feature (1)..(376): Ceres Seq. ID no. 2144866
MNNGGASTNYSYTSSPDDIKRDCLYSRNPTSFRQLPPQTKSCRRSRAEGVEVYTYKELEIATNNFSEEKKIGNGDVYKGVLSDGTVAAIKKLHMFNDNASNQKHEERSFRLEVDLLSRLQCPYLVELLGYCADQNHRILIYEFMPNGTVEHHLHDHNFKNLKDRPQPLDWGARLRIALDCARALEFLHENTISTVIHRNFKCTNILLDQNNRAKVSDFGLAKTGSDKLNGEISTRVIGTTGYLAPEYASTGKLTTKSDVYSYGIVLLQLLTGRTPIDSRRPRGQDVLVSWALPRLTNREKISEMVDPTMKGQYSQKDLIQVAAIAAVCVQPEASYRPLMTDVVHSLIPLVKAFNKSTDSSRFPSRRESLSFDDIMP

SEQ ID NO: 27955 - protein, 283 aa, Arabidopsis thaliana
  misc_feature (1)..(283): Ceres Seq. ID no. 2144867
MFNDNASNQKHEERSFRLEVDLLSRLQCPYLVELLGYCADQNHRILIYEFMPNGTVEHHLHDHNFKNLKDRPQPLDWGARLRIALDCARALEFLHENTISTVIHRNFKCTNILLDQNNRAKVSDFGLAKTGSDKLNGEISTRVIGTTGYLAPEYASTGKLTTKSDVYSYGIVLLQLLTGRTPIDSRRPRGQDVLVSWALPRLTNREKISEMVDPTMKGQYSQKDLIQVAAIAAVCVQPEASYRPLMTDVVHSLIPLVKAFNKSTDSSRFPSRRESLSFDDIMP

SEQ ID NO: 27956 - DNA, 3309 bp, Arabidopsis thaliana
  misc_feature (1)..(3309): Ceres Seq. ID no. 2148150
atggtaaaggaaatgatgaagcttgctgtttttttcatatctcttcttcttatccttctgatctctgagacaacagggttgaacttagaaggtcaatatcttcttgaaatcaagagcaagtttgtggatgctaagcagaatttgagaaactggaattcaaatgattctgtaccttgtggatggactggcgtgatgtgcagcaactattcgagtgatccagaggttttgtccttgaatctgtcttcgatggttctctcgggtaagctatcaccaagcataggtggattggttcatctgaagcagctggatctgtcatataatgggttgtcagggaaaattcctaaggaaattggcaactgttcaagcttggagattctgaaactaaacaataaccagtttgatggtgagatacctgtggaaataggtaagcttgtgtctttggagaatctgatcatatacaacaacagaatctcagggtctctccctgtggagattgggaaccttttgtctctctctcaactggtgacttacagtaacaacatcagtggacaattgccccgttccatcggcaacctcaagagactgacaagcttccgagccggtcagaacatgatctctggaagtttgccttctgagattggtggatgtgagagcttggtcatgcttggtcttgcacagaaccagttgagtggtgaattaccaaaagagattggaatgctcaagaaactttcacaggtgattctttgggaaaatgagttctcagggtttatccccagggagattagcaactgcacaagtttagaaacccttgctctctacaagaaccagcttgtcgggccaatcccgaaagagctcggggaccttcagtcgctggagtttctctacctttacagaaacgggttgaatggaacgattccaagagagattgggaatctctcatatgcaattgagatagatttctcggaaaacgctttgaccggagagatacctttggagttagggaacatagaggggcttgagcttctttatctttttgagaaccaactcacaggtaccatccctgtggagctttctactttgaagaatctatcaaagcttgatctctccatcaatgctttaacgggtcctattcccctgggatttcagtatctaagaggactcttcatgctgcagctgtttcagaactcccttagcgggaccatacctccaaaacttggctggtatagcgatctctgggttcttgatatgtccgataaccatctcagtggaagaattccaagctacctctgccttcactccaatatgatcatcttgaacttgggtacaaacaacctctctggcaacattcctactggaatcaccacttgcaaaactctggtccaacttcgtctagccagaaacaacctcgttggtcggttcccatccaacctgtgtaaacaggttaatgtcacagccatcgagttgggacagaacagattccgtggttccatccctagggaggtcgggaactgcagtgccctacaaaggctgcagctagcagacaatggcttcacgggggagctacctagagagattggcatgctttcacagcttgggaccttgaatatctcatccaataagcttactggagaggtcccttctgaaatcttcaactgcaagatgcttcagcgactagacatgtgttgcaacaatttctctggaaccttaccaagtgaggtaggttccctctaccagcttgagcttctgaagctctcaaacaataatctttcgggtacaatacctgtggctctagggaacttatctcgcttgaccgaactacaaatgggtggaaacttgttcaacggtagcattccacgggagttgggcagtctgacgggtttgcaaatagcattgaacctcagttataacaagcttaccggagaaataccacctgagctcagtaatcttgttatgcttgagttcctgctcctcaacaacaacaatttgtctggggaaataccaagctcttttgctaatctctccagcttgcttggttacaacttctcatacaacagcttaactggtcctattccacttctccgtaacatatccatgtctagcttcatcggtaatgaagggctttgcggcccgccgctcaaccagtgtatccaaacacagcctttcgcgccttctcagtcaaccgggaagcccggaggaatgcgttcgagtaaaatcatagccattactgcagctgtgattggcggggtctctctcatgctgattgctctcattgtctacctcatgagacgcccagtgagaacagtcgcttcttctgctcaagatggccaaccatcggaaatgtctttggacatatacttccctccaaaggaaggattcacgttccaagatttagttgcagccactgataatttcgacgagagctttgtagttgggagaggagcttgtggaaccgtctacaaagcggttcttccagccgggtacactctagctgtcaagaagctggcatcaaaccatgaaggcggcaacaacaacaatgtggataatagctttagagcagagattctaactcttgggaatatcaggcaccgtaacatcgtcaagctacatggattctgcaatcaccaaggatcaaatctgcttctgtatgagtacatgcccaagggaagccttggagaaatacttcatgatccttcatgcaacttggattggtctaagagatttaaaatcgctttaggtgcggctcagggtctcgcctatttgcaccatgattgcaagccgagaatcttccaccgggacataaaatcaaacaatatactgcttgacgacaagtttgaagctcatgtgggagattttggactagcaaaagtgattgacatgccacattctaaatccatgtctgctattgctggctcctatggctacattgccccagaatatgcatacaccatgaaagtgacagagaagtctgacatctatagctacggggtggttctactggagctgctaaccggaaaagccccggttcagccaatagatcaaggaggagatgtggtgaattgggtgaggagttacataagaagagatgcattgtcctcaggagttcttgatgctcggttaacgctagaagacgagagaattgtctctcatatgctcactgtgttaaagattgcacttctttgcacaagtgtgtctccagtcgcgaggccatcgatgcgacaagttgttctcatgcttattgagtctgagagatcggaaggagaacaagaacatttggatacagaagaattgacacaaacaactaccccatga

SEQ ID NO: 27957 - protein, 1102 aa, Arabidopsis thaliana
  misc_feature (1)..(1102): Ceres Seq. ID no. 2148151
MVKEMMKLAVFFISLLLILLISETTGLNLEGQYLLEIKSKFVDAKQNLRNWNSNDSVPCGWTGVMCSNYSSDPEVLSLNLSSMVLSGKLSPSIGGLVHLKQLDLSYNGLSGKIPKEIGNCSSLEILKLNNNQFDGEIPVEIGKLVSLENLIIYNNRISGSLPVEIGNLLSLSQLVTYSNNISGQLPRSIGNLKRLTSFRAGQNMISGSLPSEIGGCESLVMLGLAQNQLSGELPKEIGMLKKLSQVILWENEFSGFIPREISNCTSLETLALYKNQLVGPIPKELGDLQSLEFLYLYRNGLNGTIPREIGNLSYAIEIDFSENALTGEIPLELGNIEGLELLYLFENQLTGTIPVELSTLKNLSKLDLSINALTGPIPLGFQYLRGLFMLQLFQNSLSGTIPPKLGWYSDLWVLDMSDNHLSGRIPSYLCLHSNMIILNLGTNNLSGNIPTGITTCKTLVQLRLARNNLVGRFPSNLCKQVNVTAIELGQNRFRGSIPREVGNCSALQRLQLADNGFTGELPREIGMLSQLGTLNISSNKLTGEVPSEIFNCKMLQRLDMCCNNFSGTLPSEVGSLYQLELLKLSNNNLSGTIPVALGNLSRLTELQMGGNLFNGSIPRELGSLTGLQIALNLSYNKLTGEIPPELSNLVMLEFLLLNNNNLSGEIPSSFANLSSLLGYNFSYNSLTGPIPLLRNISMSSFIGNEGLCGPPLNQCIQTQPFAPSQSTGKPGGMRSSKIIAITAAVIGGVSLMLIALIVYLMRRPVRTVASSAQDGQPSEMSLDIYFPPKEGFTFQDLVAATDNFDESFVVGRGACGTVYKAVLPAGYTLAVKKLASNHEGGNNNNVDNSFRAEILTLGNIRHRNIVKLHGFCNHQGSNLLLYEYMPKGSLGEILHDPSCNLDWSKRFKIALGAAQGLAYLHHDCKPRIFHRDIKSNNILLDDKFEAHVGDFGLAKVIDMPHSKSMSAIAGSYGYIAPEYAYTMKVTEKSDIYSYGVVLLELLTGKAPVQPIDQGGDVVNWVRSYIRRDALSSGVLDARLTLEDERIVSHMLTVLKIALLCTSVSPVARPSMRQVVLMLIESERSEGEQEHLDTEELTQTTTP

SEQ ID NO: 27958 - protein, 1098 aa, Arabidopsis thaliana
  misc_feature (1)..(1098): Ceres Seq. ID no. 2148152
MMKLAVFFISLLLILLISETTGLNLEGQYLLEIKSKFVDAKQNLRNWNSNDSVPCGWTGVMCSNYSSDPEVLSLNLSSMVLSGKLSPSIGGLVHLKQLDLSYNGLSGKIPKEIGNCSSLEILKLNNNQFDGEIPVEIGKLVSLENLIIYNNRISGSLPVEIGNLLSLSQLVTYSNNISGQLPRSIGNLKRLTSFRAGQNMISGSLPSEIGGCESLVMLGLAQNQLSGELPKEIGMLKKLSQVILWENEFSGFIPREISNCTSLETLALYKNQLVGPIPKELGDLQSLEFLYLYRNGLNGTIPREIGNLSYAIEIDFSENALTGEIPLELGNIEGLELLYLFENQLTGTIPVELSTLKNLSKLDLSINALTGPIPLGFQYLRGLFMLQLFQNSLSGTIPPKLGWYSDLWVLDMSDNHLSGRIPSYLCLHSNMIILNLGTNNLSGNIPTGITTCKTLVQLRLARNNLVGRFPSNLCKQVNVTAIELGQNRFRGSIPREVGNCSALQRLQLADNGFTGELPREIGMLSQLGTLNISSNKLTGEVPSEIFNCKMLQRLDMCCNNFSGTLPSEVGSLYQLELLKLSNNNLSGTIPVALGNLSRLTELQMGGNLFNGSIPRELGSLTGLQIALNLSYNKLTGEIPPELSNLVMLEFLLLNNNNLSGEIPSSFANLSSLLGYNFSYNSLTGPIPLLRNISMSSFIGNEGLCGPPLNQCIQTQPFAPSQSTGKPGGMRSSKIIAITAAVIGGVSLMLIALIVYLMRRPVRTVASSAQDGQPSEMSLDIYFPPKEGFTFQDLVAATDNFDESFVVGRGACGTVYKAVLPAGYTLAVKKLASNHEGGNNNNVDNSFRAEILTLGNIRHRNIVKLHGFCNHQGSNLLLYEYMPKGSLGEILHDPSCNLDWSKRFKIALGAAQGLAYLHHDCKPRIFHRDIKSNNILLDDKFEAHVGDFGLAKVIDMPHSKSMSAIAGSYGYIAPEYAYTMKVTEKSDIYSYGVVLLELLTGKAPVQPIDQGGDVVNWVRSYIRRDALSSGVLDARLTLEDERIVSHMLTVLKIALLCTSVSPVARPSMRQVVLMLIESERSEGEQEHLDTEELTQTTTP

SEQ ID NO: 27959 - protein, 1097 aa, Arabidopsis thaliana
  misc_feature (1)..(1097): Ceres Seq. ID no. 2148153
MKLAVFFISLLLILLISETTGLNLEGQYLLEIKSKFVDAKQNLRNWNSNDSVPCGWTGVMCSNYSSDPEVLSLNLSSMVLSGKLSPSIGGLVHLKQLDLSYNGLSGKIPKEIGNCSSLEILKLNNNQFDGEIPVEIGKLVSLENLIIYNNRISGSLPVEIGNLLSLSQLVTYSNNISGQLPRSIGNLKRLTSFRAGQNMISGSLPSEIGGCESLVMLGLAQNQLSGELPKEIGMLKKLSQVILWENEFSGFIPREISNCTSLETLALYKNQLVGPIPKELGDLQSLEFLYLYRNGLNGTIPREIGNLSYAIEIDFSENALTGEIPLELGNIEGLELLYLFENQLTGTIPVELSTLKNLSKLDLSINALTGPIPLGFQYLRGLFMLQLFQNSLSGTIPPKLGWYSDLWVLDMSDNHLSGRIPSYLCLHSNMIILNLGTNNLSGNIPTGITTCKTLVQLRLARNNLVGRFPSNLCKQVNVTAIELGQNRFRGSIPREVGNCSALQRLQLADNGFTGELPREIGMLSQLGTLNISSNKLTGEVPSEIFNCKMLQRLDMCCNNFSGTLPSEVGSLYQLELLKLSNNNLSGTIPVALGNLSRLTELQMGGNLFNGSIPRELGSLTGLQIALNLSYNKLTGEIPPELSNLVMLEFLLLNNNNLSGEIPSSFANLSSLLGYNFSYNSLTGPIPLLRNISMSSFIGNEGLCGPPLNQCIQTQPFAPSQSTGKPGGMRSSKIIAITAAVIGGVSLMLIALIVYLMRRPVRTVASSAQDGQPSEMSLDIYFPPKEGFTFQDLVAATDNFDESFVVGRGACGTVYKAVLPAGYTLAVKKLASNHEGGNNNNVDNSFRAEILTLGNIRHRNIVKLHGFCNHQGSNLLLYEYMPKGSLGEILHDPSCNLDWSKRFKIALGAAQGLAYLHHDCKPRIFHRDIKSNNILLDDKFEAHVGDFGLAKVIDMPHSKSMSAIAGSYGYIAPEYAYTMKVTEKSDIYSYGVVLLELLTGKAPVQPIDQGGDVVNWVRSYIRRDALSSGVLDARLTLEDERIVSHMLTVLKIALLCTSVSPVARPSMRQVVLMLIESERSEGEQEHLDTEELTQTTTP

SEQ ID NO: 27960 - DNA, 1713 bp, Arabidopsis thaliana
  misc_feature (1)..(1713): Ceres Seq. ID no. 2149393
atggcgggacaatcacgaaaatggatgattctggtagcgacgatttggattcaagcattcaccggtacgaatttcgatttctcgacgtattcgtcgaatttgaaatcggttctagggatttcgcaagtacaattgaattatctcgccgtcgcttcggatcttggtaaagttttcggttggtcatcgggacttgcactcttgtatttccctctttggacggttcttttcgcggcggcgattatgggtttcgttggttatggtgttcaatggctcgtcatcactaacgtcatctctttgccttatattctggtgtttctgtgttgtttgctagctgggctaagtatctgttggttcaacacagtctgctttgtgctctgcatcagaaacttccctgcaaacagatcacttgcactttctctcacagtgagctttaatggtgtaagtgctgctttatacactcttgcttacaacgcaatcaatcctgtttctacagagctatacctactcttaaacgctcttgtacctctttttgtctcatttgctgcactcatccctattcttcgccaaccgcctcttgaacctcttccaccagatggagttcgaagagactctctcatgtttctattgcttaacatattagcggtcttgaacggtgtttatctgcttctctttcgttcaaagacttctgatgtaacttcagctcgtcttctctttggtggatcaatacttctcttgattcttcctctatgcctccctggtctagtctacgctcgcaattggtatctacacaacatccactccagcttccgtttagaaggttctggtttcattcttgttgatgttgatgagcttgagatgcataaaggaatggtgacacgtgaagccagccttgaaggctaccagttgcttaacgatgatgtagtgcgagctgtcaatactcctgatcagaagagtttcattgaagatgacgacggatgttgttgcacaaaggtcattacaagaaatcagcttggaatgttgggagaggaacatcctctatctttcctcttatgcagatcagatttctggctttactatatagcctatttttgcggcggcacgattggactggtttacagcaacaacctgggacagattgcacaatctttaggacaaagctctgagacaacaactcttgtcacgctttattcgtctttctcattcttcggtagattactttcagcaacaccagactatatcagagcgaaggtttattttgctagaactgggtggctagccgttgctcttttaccaaccacaattgctcttttcttgttggcatcatcaggaagcttggcagcgttacaagcaggaactgctctaatcggtctaagttcgggtttcatatttgcagcagcggtttccataacatctgagctttttggacccaatagcgttggggttaaccacaacatcctcatcacaaacataccgataggatcgttggtctacggtttcttagctgctttggtctatgaatcccatagcgtggctgggtcaaagaccgagtcggttatatgtatgggaagagactgttatctccaaacgtttatgtggtggggatgcttgtcggtgattggactagcttcaagtgttgtcttgtttctgagaaccagacgagcctatcaacgttttgaacaagatcggataacttccagcatgctctattcttag

SEQ ID NO: 27961 - protein, 570 aa, Arabidopsis thaliana
  misc_feature (1)..(570): Ceres Seq. ID no. 2149394
MAGQSRKWMILVATIWIQAFTGTNFDFSTYSSNLKSVLGISQVQLNYLAVASDLGKVFGWSSGLALLYFPLWTVLFAAAIMGFVGYGVQWLVITNVISLPYILVFLCCLLAGLSICWFNTVCFVLCIRNFPANRSLALSLTVSFNGVSAALYTLAYNAINPVSTELYLLLNALVPLFVSFAALIPILRQPPLEPLPPDGVRRDSLMFLLLNILAVLNGVYLLLFRSKTSDVTSARLLFGGSILLLILPLCLPGLVYARNWYLHNIHSSFRLEGSGFILVDVDELEMHKGMVTREASLEGYQLLNDDVVRAVNTPDQKSFIEDDDGCCCTKVITRNQLGMLGEEHPLSFLLCRSDFWLYYIAYFCGGTIGLVYSNNLGQIAQSLGQSSETTTLVTLYSSFSFFGRLLSATPDYIRAKVYFARTGWLAVALLPTTIALFLLASSGSLAALQAGTALIGLSSGFIFAAAVSITSELFGPNSVGVNHNILITNIPIGSLVYGFLAALVYESHSVAGSKTESVICMGRDCYLQTFMWWGCLSVIGLASSVVLFLRTRRAYQRFEQDRITSSMLYS

SEQ ID NO: 27962 - protein, 562 aa, Arabidopsis thaliana
  misc_feature (1)..(562): Ceres Seq. ID no. 2149395
MILVATIWIQAFTGTNFDFSTYSSNLKSVLGISQVQLNYLAVASDLGKVFGWSSGLALLYFPLWTVLFAAAIMGFVGYGVQWLVITNVISLPYILVFLCCLLAGLSICWFNTVCFVLCIRNFPANRSLALSLTVSFNGVSAALYTLAYNAINPVSTELYLLLNALVPLFVSFAALIPILRQPPLEPLPPDGVRRDSLMFLLLNILAVLNGVYLLLFRSKTSDVTSARLLFGGSILLLILPLCLPGLVYARNWYLHNIHSSFRLEGSGFILVDVDELEMHKGMVTREASLEGYQLLNDDVVRAVNTPDQKSFIEDDDGCCCTKVITRNQLGMLGEEHPLSFLLCRSDFWLYYIAYFCGGTIGLVYSNNLGQIAQSLGQSSETTTLVTLYSSFSFFGRLLSATPDYIRAKVYFARTGWLAVALLPTTIALFLLASSGSLAALQAGTALIGLSSGFIFAAAVSITSELFGPNSVGVNHNILITNIPIGSLVYGFLAALVYESHSVAGSKTESVICMGRDCYLQTFMWWGCLSVIGLASSVVLFLRTRRAYQRFEQDRITSSMLYS

SEQ ID NO: 27963 - protein, 490 aa, Arabidopsis thaliana
  misc_feature (1)..(490): Ceres Seq. ID no. 2149396
MGFVGYGVQWLVITNVISLPYILVFLCCLLAGLSICWFNTVCFVLCIRNFPANRSLALSLTVSFNGVSAALYTLAYNAINPVSTELYLLLNALVPLFVSFAALIPILRQPPLEPLPPDGVRRDSLMFLLLNILAVLNGVYLLLFRSKTSDVTSARLLFGGSILLLILPLCLPGLVYARNWYLHNIHSSFRLEGSGFILVDVDELEMHKGMVTREASLEGYQLLNDDVVRAVNTPDQKSFIEDDDGCCCTKVITRNQLGMLGEEHPLSFLLCRSDFWLYYIAYFCGGTIGLVYSNNLGQIAQSLGQSSETTTLVTLYSSFSFFGRLLSATPDYIRAKVYFARTGWLAVALLPTTIALFLLASSGSLAALQAGTALIGLSSGFIFAAAVSITSELFGPNSVGVNHNILITNIPIGSLVYGFLAALVYESHSVAGSKTESVICMGRDCYLQTFMWWGCLSVIGLASSVVLFLRTRRAYQRFEQDRITSSMLYS

SEQ ID NO: 27964 - DNA, 1500 bp, Arabidopsis thaliana
  misc_feature (1)..(1500): Ceres Seq. ID no. 2151501
atggtgttttactctctactcttcttcacttttcttctccgattcgtctttgttctctccaccgttgatactatcgacggcgatccctctccttgctcctctcttgcttgcttggggaaaagactaaagccaaagcttttaggaagaagggttgattctggtaatgttccagaagctatgtaccaagttttagaacagcctttaagcgaacaagaactcaaaggaagatcagatatacctcaaacacttcaagatttcatgtctgaagtcaaaagaagcaaatcagacgcaagagaatttgctcaaaagctaaaagaaatggtgacattgatggaacagagaacaagaacggctaagattcaagagtatttatatcgacatgtcgcatcaagcagcataccgaaacaacttcactgtttagctcttaaactagccaacgaacactcgataaacgcagcggcgcgtctccagcttccagaagctgagcttgtccctatgttggtagacaacaactactttcactttgtcttggcttcagacaatattcttgcagcttcggttgtggctaagtcgttggttcaaaatgctttaagacctcataagatcgttcttcacatcataacggataggaaaacttatttcccaatgcaagcttggttctcattgcatcctctgtctccagcaataattgaggtcaaggctttgcatcatttcgattggttatcgaaaggtaaagtacccgttttggaagctatggagaaagatcagagagtgaggtctcaattcagaggtggatcatcggttattgtggctaataacaaagagaacccggttgttgttgctgctaagttacaagctctcagccctaaatacaactccttgatgaatcacatccgtattcatctaccagagttgtttccaagcttaaacaaggttgtgtttctagacgatgacattgtgatccaaactgatctttcacctctttgggacattgacatgaatggaaaagtaaatggagcagtggaaacatgtagaggagaagacaagtttgtgatgtcaaagaagttcaagagttacctcaacttctcgaatccgacaattgccaaaaacttcaatccagaggaatgtgcatgggcttatggaatgaatgttttcgacctagcggcttggaggaggactaacataagctccacttactatcattggcttgacgagaacttaaaatcagacctgagtttgtggcagctgggaactttgcctcctgggctgattgctttccacggtcatgtccaaaccatagatccgttctggcatatgcttggtctcggataccaagagaccacgagctatgccgatgctgaaagtgccgctgttgttcatttcaatggaagagctaagccttggctggatatagcatttcctcatctacgtcctctctgggctaagtatcttgattcttctgacagatttatcaagagctgtcacattagagcatcatga

SEQ ID NO: 27965 - protein, 499 aa, Arabidopsis thaliana
  misc_feature (1)..(499): Ceres Seq. ID no. 2151502
MVFYSLLFFTFLLRFVFVLSTVDTIDGDPSPCSSLACLGKRLKPKLLGRRVDSGNVPEAMYQVLEQPLSEQELKGRSDIPQTLQDFMSEVKRSKSDAREFAQKLKEMVTLMEQRTRTAKIQEYLYRHVASSSIPKQLHCLALKLANEHSINAAARLQLPEAELVPMLVDNNYFHFVLASDNILAASVVAKSLVQNALRPHKIVLHIITDRKTYFPMQAWFSLHPLSPAIIEVKALHHFDWLSKGKVPVLEAMEKDQRVRSQFRGGSSVIVANNKENPVVVAAKLQALSPKYNSLMNHIRIHLPELFPSLNKVVFLDDDIVIQTDLSPLWDIDMNGKVNGAVETCRGEDKFVMSKKFKSYLNFSNPTIAKNFNPEECAWAYGMNVFDLAAWRRTNISSTYYHWLDENLKSDLSLWQLGTLPPGLIAFHGHVQTIDPFWHMLGLGYQETTSYADAESAAVVHFNGRAKPWLDIAFPHLRPLWAKYLDSSDRFIKSCHIRAS

SEQ ID NO: 27966 - protein, 440 aa, Arabidopsis thaliana
  misc_feature (1)..(440): Ceres Seq. ID no. 2151503
MYQVLEQPLSEQELKGRSDIPQTLQDFMSEVKRSKSDAREFAQKLKEMVTLMEQRTRTAKIQEYLYRHVASSSIPKQLHCLALKLANEHSINAAARLQLPEAELVPMLVDNNYFHFVLASDNILAASVVAKSLVQNALRPHKIVLHIITDRKTYFPMQAWFSLHPLSPAIIEVKALHHFDWLSKGKVPVLEAMEKDQRVRSQFRGGSSVIVANNKENPVVVAAKLQALSPKYNSLMNHIRIHLPELFPSLNKVVFLDDDIVIQTDLSPLWDIDMNGKVNGAVETCRGEDKFVMSKKFKSYLNFSNPTIAKNFNPEECAWAYGMNVFDLAAWRRTNISSTYYHWLDENLKSDLSLWQLGTLPPGLIAFHGHVQTIDPFWHMLGLGYQETTSYADAESAAVVHFNGRAKPWLDIAFPHLRPLWAKYLDSSDRFIKSCHIRAS

SEQ ID NO: 27967 - protein, 413 aa, Arabidopsis thaliana
  misc_feature (1)..(413): Ceres Seq. ID no. 2151504
MSEVKRSKSDAREFAQKLKEMVTLMEQRTRTAKIQEYLYRHVASSSIPKQLHCLALKLANEHSINAAARLQLPEAELVPMLVDNNYFHFVLASDNILAASVVAKSLVQNALRPHKIVLHIITDRKTYFPMQAWFSLHPLSPAIIEVKALHHFDWLSKGKVPVLEAMEKDQRVRSQFRGGSSVIVANNKENPVVVAAKLQALSPKYNSLMNHIRIHLPELFPSLNKVVFLDDDIVIQTDLSPLWDIDMNGKVNGAVETCRGEDKFVMSKKFKSYLNFSNPTIAKNFNPEECAWAYGMNVFDLAAWRRTNISSTYYHWLDENLKSDLSLWQLGTLPPGLIAFHGHVQTIDPFWHMLGLGYQETTSYADAESAAVVHFNGRAKPWLDIAFPHLRPLWAKYLDSSDRFIKSCHIRAS

SEQ ID NO: 27968 - DNA, 1089 bp, Arabidopsis thaliana
  misc_feature (1)..(1089): Ceres Seq. ID no. 2153201
atgagattagtgattcaccttcatatttttaatcctaatctcatttccgatcaaaatgtctctcatggctggcttcatcttaagagaggagagaaggagatggatgctgaaaccgtggagatgttgtcatttcgaatgccgtctatcggaagccaacctacggcatttgctgcaaaaataacggacaatccaaagaccgtggcacaactcaagtcggctgcatcgccttcacctcatagtaccgtgacgtgcggttaccaagctcatgtggcagggttctttcgaaacgtcaccgttttatggtccaagaatctcatgaatcattccctcaccgtaatggtgtcgagtttagacaatgacatgaattattgttgtaagattgatctcgtgaagccatggcagttttggagcaaaagagggtcaaagtcattcgacgtagagggaaactttgtggaggtcttttgggatcttcgatcagcaaaattggctggaaacggtagccccgaacccgtgtcagactattacgtggcagtagtttctgatgaagaggttgttttattgttgggagatttaaagcaaaaggcttataagcggaccaagtcaagaccggcattggtggaagggttcatatactttaaaaaagaaagcatatttgggaagaaaacgttttcgactcgggcaaggtttgacgaacaaagaaaggaacatgaagtggtggtggagagctctaatggagcagcggagccagagatgtggataagcgttgatgggatcgtggttgtgaacgtgaagaatctacaatggaaatttaggggaaaccaaatggtgatggtggatagaacaccggtaatggtctactatgatgttcatgattggttgtttgcaagttcggagactgcagcgagttcagggttgtttttgtttaagcctgttccggttggagcgatggtagatgagagctttagcgatgcggaggaaggagatagcggaggagggagtagtcctttgagtcgttataattcagcatcaagtggttttggaccattgcatgacttttgtttgtttctttatgcttggaaacttgaatga

SEQ ID NO: 27969 - protein, 362 aa, Arabidopsis thaliana
  misc_feature (1)..(362): Ceres Seq. ID no. 2153202
MRLVIHLHIFNPNLISDQNVSHGWLHLKRGEKEMDAETVEMLSFRMPSIGSQPTAFAAKITDNPKTVAQLKSAASPSPHSTVTCGYQAHVAGFFRNVTVLWSKNLMNHSLTVMVSSLDNDMNYCCKIDLVKPWQFWSKRGSKSFDVEGNFVEVFWDLRSAKLAGNGSPEPVSDYYVAVVSDEEVVLLLGDLKQKAYKRTKSRPALVEGFIYFKKESIFGKKTFSTRARFDEQRKEHEVVVESSNGAAEPEMWISVDGIVVVNVKNLQWKFRGNQMVMVDRTPVMVYYDVHDWLFASSETAASSGLFLFKPVPVGAMVDESFSDAEEGDSGGGSSPLSRYNSASSGFGPLHDFCLFLYAWKLE

SEQ ID NO: 27970 - protein, 329 aa, Arabidopsis thaliana
  misc_feature (1)..(329): Ceres Seq. ID no. 2153203
MDAETVEMLSFRMPSIGSQPTAFAAKITDNPKTVAQLKSAASPSPHSTVTCGYQAHVAGFFRNVTVLWSKNLMNHSLTVMVSSLDNDMNYCCKIDLVKPWQFWSKRGSKSFDVEGNFVEVFWDLRSAKLAGNGSPEPVSDYYVAVVSDEEVVLLLGDLKQKAYKRTKSRPALVEGFIYFKKESIFGKKTFSTRARFDEQRKEHEVVVESSNGAAEPEMWISVDGIVVVNVKNLQWKFRGNQMVMVDRTPVMVYYDVHDWLFASSETAASSGLFLFKPVPVGAMVDESFSDAEEGDSGGGSSPLSRYNSASSGFGPLHDFCLFLYAWKLE

SEQ ID NO: 27971 - protein, 322 aa, Arabidopsis thaliana
  misc_feature (1)..(322): Ceres Seq. ID no. 2153204
MLSFRMPSIGSQPTAFAAKITDNPKTVAQLKSAASPSPHSTVTCGYQAHVAGFFRNVTVLWSKNLMNHSLTVMVSSLDNDMNYCCKIDLVKPWQFWSKRGSKSFDVEGNFVEVFWDLRSAKLAGNGSPEPVSDYYVAVVSDEEVVLLLGDLKQKAYKRTKSRPALVEGFIYFKKESIFGKKTFSTRARFDEQRKEHEVVVESSNGAAEPEMWISVDGIVVVNVKNLQWKFRGNQMVMVDRTPVMVYYDVHDWLFASSETAASSGLFLFKPVPVGAMVDESFSDAEEGDSGGGSSPLSRYNSASSGFGPLHDFCLFLYAWKLE

SEQ ID NO: 27972 - DNA, 1476 bp, Arabidopsis thaliana
  misc_feature (1)..(1476): Ceres Seq. ID no. 2156310
atgctgattcgttgcgttgcggttgcgaagacgaggttcaacaccaccggcgtagtatcaaggctcgtgtcttcacttgcagatggttcggacacgtcatcagtcgcaaatcggaatagcttgaaggagatactgagaaagaacggtccacgacgcagcgttacctctctgcttcaggaacggatcgattcgggtcatgccgtctctttatcggagctccgattgatttccaagcgtctcattagatcaaatcgttacgatctcgctctccagatgatggagtggatggagaatcaaaaagatattgaatttagtgtttatgacattgctcttagattggatttgatcatcaaaactcatggcttgaaacaaggagaggagtattttgagaagctgctacatagttctgtgtctatgagagtagcgaaatcggcttatcttccgcttcttcgtgcttatgtgaagaataaaatggttaaagaagcggaagctctaatggagaagttgaatggattagggtttcttgttactccacacccgtttaacgaaatgatgaagctttatgaagctagtggtcagtatgagaaagtagttatggttgtttcgatgatgaaagggaataagataccaagaaacgttctttcgtataatctttggatgaatgcatgttgtgaagtgtctggagttgcggctgtggaaacggtttataaggaaatggttggtgataagagtgttgaagttgggtggagttcgttgtgtactttagctaatgtttatattaagagtggttttgatgagaaggctaggttggtgcttgaggatgcggaaaagatgttgaatagaagtaataggcttggatatttctttcttatcacgctttatgcgtctttagggaataaggaaggagttgttcgtttgtgggaagtttctaaatcggtttgtggtaggattagttgtgtgaactacatatgtgtattgtcgtctttggtgaaaactggtgatcttgaagaggctgaaagggtgtttagtgagtgggaggctcaatgttttaactatgatgttagggtctccaatgttcttttgggtgcttatgtgcgtaatggagaaatccggaaagccgagtcattgcatggttgtgtgttggagagaggaggtactccaaactacaagacctgggaaatcttaatggagggatgggtgaaatgtgagaatatggagaaagccattgatgctatgcaccaagtgtttgtactaatgaggcggtgtcattggaggccatcccataacatcgtcatggcgattgccgagtactttgagaaagaggagaaaattgaagaagcaactgcatatgttagagatttgcatcgtcttggtcttgcaagcttaccattatacagattgttacttagaatgcatgaacatgccaaaagaccagcttatgatatctatgaaatgatgaagttggacaaactatga

SEQ ID NO: 27973 - protein, 491 aa, Arabidopsis thaliana
  misc_feature (1)..(491): Ceres Seq. ID no. 2156311
MLIRCVAVAKTRFNTTGVVSRLVSSLADGSDTSSVANRNSLKEILRKNGPRRSVTSLLQERIDSGHAVSLSELRLISKRLIRSNRYDLALQMMEWMENQKDIEFSVYDIALRLDLIIKTHGLKQGEEYFEKLLHSSVSMRVAKSAYLPLLRAYVKNKMVKEAEALMEKLNGLGFLVTPHPFNEMMKLYEASGQYEKVVMVVSMMKGNKIPRNVLSYNLWMNACCEVSGVAAVETVYKEMVGDKSVEVGWSSLCTLANVYIKSGFDEKARLVLEDAEKMLNRSNRLGYFFLITLYASLGNKEGVVRLWEVSKSVCGRISCVNYICVLSSLVKTGDLEEAERVFSEWEAQCFNYDVRVSNVLLGAYVRNGEIRKAESLHGCVLERGGTPNYKTWEILMEGWVKCENMEKAIDAMHQVFVLMRRCHWRPSHNIVMAIAEYFEKEEKIEEATAYVRDLHRLGLASLPLYRLLLRMHEHAKRPAYDIYEMMKLDKL

SEQ ID NO: 27974 - protein, 400 aa, Arabidopsis thaliana
  misc_feature (1)..(400): Ceres Seq. ID no. 2156312
MMEWMENQKDIEFSVYDIALRLDLIIKTHGLKQGEEYFEKLLHSSVSMRVAKSAYLPLLRAYVKNKMVKEAEALMEKLNGLGFLVTPHPFNEMMKLYEASGQYEKVVMVVSMMKGNKIPRNVLSYNLWMNACCEVSGVAAVETVYKEMVGDKSVEVGWSSLCTLANVYIKSGFDEKARLVLEDAEKMLNRSNRLGYFFLITLYASLGNKEGVVRLWEVSKSVCGRISCVNYICVLSSLVKTGDLEEAERVFSEWEAQCFNYDVRVSNVLLGAYVRNGEIRKAESLHGCVLERGGTPNYKTWEILMEGWVKCENMEKAIDAMHQVFVLMRRCHWRPSHNIVMAIAEYFEKEEKIEEATAYVRDLHRLGLASLPLYRLLLRMHEHAKRPAYDIYEMMKLDKL

SEQ ID NO: 27975 - protein, 399 aa, Arabidopsis thaliana
  misc_feature (1)..(399): Ceres Seq. ID no. 2156313
MEWMENQKDIEFSVYDIALRLDLIIKTHGLKQGEEYFEKLLHSSVSMRVAKSAYLPLLRAYVKNKMVKEAEALMEKLNGLGFLVTPHPFNEMMKLYEASGQYEKVVMVVSMMKGNKIPRNVLSYNLWMNACCEVSGVAAVETVYKEMVGDKSVEVGWSSLCTLANVYIKSGFDEKARLVLEDAEKMLNRSNRLGYFFLITLYASLGNKEGVVRLWEVSKSVCGRISCVNYICVLSSLVKTGDLEEAERVFSEWEAQCFNYDVRVSNVLLGAYVRNGEIRKAESLHGCVLERGGTPNYKTWEILMEGWVKCENMEKAIDAMHQVFVLMRRCHWRPSHNIVMAIAEYFEKEEKIEEATAYVRDLHRLGLASLPLYRLLLRMHEHAKRPAYDIYEMMKLDKL

SEQ ID NO: 27976 - DNA, 1068 bp, Arabidopsis thaliana
  misc_feature (1)..(1068): Ceres Seq. ID no. 2156549
atggagaagattattgacgtagcttatggtgcatcagtgaaggcgggtttgacgttgttggagaagaatctgttgccggatcttgtcattaggcggctcatacgtctgcttttggccagtcgtctccgttccgtttacaaacccacggcggagatgcaactctccgatctcctccgttttgttgactctctaaagaagatgcctatagctatcaataccgagacggcaaagactcaacactatgaattaccaacagctttcttcgaacatgctcttggaagaaacatcaaatacagctgttgttactattcaaacgattcaagtagcttagaagaggcaggggaagctatgttggctctttcttgtgaaagagctaaagtggaagatggtcaaagtgttcttgatatcggatgtggctggggatctttgactttgtacattgcacgcaagtacagcaaatgcaagttaaccggtatctgcaactccaaaacgcagaaagcatttatcgatgagaaatgccggaaactcgggcttcagaatgtcgaaatcattgctgcggatattagcacttttgagcatgaagggacatacgatcggatattctccatcgaaatgttcgagcatatgaaaaactatggagagctactgaagaagataggaaactggatgaaggaagatagtcttctgtttgttcactatctctgccataagacatatgcttaccactttgaggatgtgaatgacgatgactggatcacaagacacttcttcagcggaggaacaatgccatcagcagatcttctcctatatttccaagaaaatgtttcgattatggatcattggctcgttaacgggacgcattatgcaaagacaagtgaagagtggctgaaaggaatggataaggagatagttgccgtaaaagagataatggaagtgacttatgggaaagaagaagcagtgaagtggacggtttactggagaaccttcttcatcgcgcttgctgagcttttcgcatacaacaatggagacgagtggatgattgcacacttcctcttcaagaagaaatga

SEQ ID NO: 27977 - protein, 355 aa, Arabidopsis thaliana
  misc_feature (1)..(355): Ceres Seq. ID no. 2156550
MEKIIDVAYGASVKAGLTLLEKNLLPDLVIRRLIRLLLASRLRSVYKPTAEMQLSDLLRFVDSLKKMPIAINTETAKTQHYELPTAFFEHALGRNIKYSCCYYSNDSSSLEEAGEAMLALSCERAKVEDGQSVLDIGCGWGSLTLYIARKYSKCKLTGICNSKTQKAFIDEKCRKLGLQNVEIIAADISTFEHEGTYDRIFSIEMFEHMKNYGELLKKIGNWMKEDSLLFVHYLCHKTYAYHFEDVNDDDWITRHFFSGGTMPSADLLLYFQENVSIMDHWLVNGTHYAKTSEEWLKGMDKEIVAVKEIMEVTYGKEEAVKWTVYWRTFFIALAELFAYNNGDEWMIAHFLFKKK

SEQ ID NO: 27978 - protein, 304 aa, Arabidopsis thaliana
  misc_feature (1)..(304): Ceres Seq. ID no. 2156551
MQLSDLLRFVDSLKKMPIAINTETAKTQHYELPTAFFEHALGRNIKYSCCYYSNDSSSLEEAGEAMLALSCERAKVEDGQSVLDIGCGWGSLTLYIARKYSKCKLTGICNSKTQKAFIDEKCRKLGLQNVEIIAADISTFEHEGTYDRIFSIEMFEHMKNYGELLKKIGNWMKEDSLLFVHYLCHKTYAYHFEDVNDDDWITRHFFSGGTMPSADLLLYFQENVSIMDHWLVNGTHYAKTSEEWLKGMDKEIVAVKEIMEVTYGKEEAVKWTVYWRTFFIALAELFAYNNGDEWMIAHFLFKKK

SEQ ID NO: 27979 - protein, 289 aa, Arabidopsis thaliana
  misc_feature (1)..(289): Ceres Seq. ID no. 2156552
MPIAINTETAKTQHYELPTAFFEHALGRNIKYSCCYYSNDSSSLEEAGEAMLALSCERAKVEDGQSVLDIGCGWGSLTLYIARKYSKCKLTGICNSKTQKAFIDEKCRKLGLQNVEIIAADISTFEHEGTYDRIFSIEMFEHMKNYGELLKKIGNWMKEDSLLFVHYLCHKTYAYHFEDVNDDDWITRHFFSGGTMPSADLLLYFQENVSIMDHWLVNGTHYAKTSEEWLKGMDKEIVAVKEIMEVTYGKEEAVKWTVYWRTFFIALAELFAYNNGDEWMIAHFLFKKK

SEQ ID NO: 27980 - DNA, 912 bp, Arabidopsis thaliana
  misc_feature (1)..(912): Ceres Seq. ID no. 2157561
atgaaaatcttgatcttgattctatcctttgtgacactctttgagatttgcgttgtggacgcatgtcgatcatactgtggaaacataaccgttgattatccgtttgggatccgaaacggatgtgggcatccagggtatagagatctattgttttgtatgaacgatgtgttgatgtttcacataagttcaggttcttatagagttttggacatcgattacgcatatcagtccataacactgcatgatcctcacatgtcgaactgcgaaaccatcgtgctcggtggcaaaggcaatggctttgaagctgaggattggagaactccatatttcaatcctacctcagataatgtctttatgttgatcggatgttctcctaaatctcctatatttcaaggcttcccggaaaagaaagtgccgtgccgcaacatctctggaatgagctgcgaagaatacatgtcatgtccagcttgggacatggtcggatacagacaaccgggtatacattccgggtcaggtccacccatgtgttgtggggtcgggttcgaatccgtaaaagcgattaatctaagtaagttggagtgtgaaggatacagtagtgcgtataatctagcacccttgaaacttagaggaccctctgattgggcttatgggatacgtgttaagtatgaactccaaggaagtgatgcgttttgtcgtgcgtgtgttgcaacttctgggacttgtggctatgaacctgctgatggtggagggcttagacatgtttgcatgtgtgacaaccataattccactacaaactgtgattcagttatatcaccaaccggtgcatcatcaagtgttcgaccaaaagctatcggatcactgatcatctacttcatagctatgaacataggctttcagagaagacagcgatga

SEQ ID NO: 27981 - protein, 303 aa, Arabidopsis thaliana
  misc_feature (1)..(303): Ceres Seq. ID no. 2157562
MKILILILSFVTLFEICVVDACRSYCGNITVDYPFGIRNGCGHPGYRDLLFCMNDVLMFHISSGSYRVLDIDYAYQSITLHDPHMSNCETIVLGGKGNGFEAEDWRTPYFNPTSDNVFMLIGCSPKSPIFQGFPEKKVPCRNISGMSCEEYMSCPAWDMVGYRQPGIHSGSGPPMCCGVGFESVKAINLSKLECEGYSSAYNLAPLKLRGPSDWAYGIRVKYELQGSDAFCRACVATSGTCGYEPADGGGLRHVCMCDNHNSTTNCDSVISPTGASSSVRPKAIGSLIIYFIAMNIGFQRRQR

SEQ ID NO: 27982 - protein, 251 aa, Arabidopsis thaliana
  misc_feature (1)..(251): Ceres Seq. ID no. 2157563
MNDVLMFHISSGSYRVLDIDYAYQSITLHDPHMSNCETIVLGGKGNGFEAEDWRTPYFNPTSDNVFMLIGCSPKSPIFQGFPEKKVPCRNISGMSCEEYMSCPAWDMVGYRQPGIHSGSGPPMCCGVGFESVKAINLSKLECEGYSSAYNLAPLKLRGPSDWAYGIRVKYELQGSDAFCRACVATSGTCGYEPADGGGLRHVCMCDNHNSTTNCDSVISPTGASSSVRPKAIGSLIIYFIAMNIGFQRRQR

SEQ ID NO: 27983 - protein, 246 aa, Arabidopsis thaliana
  misc_feature (1)..(246): Ceres Seq. ID no. 2157564
MFHISSGSYRVLDIDYAYQSITLHDPHMSNCETIVLGGKGNGFEAEDWRTPYFNPTSDNVFMLIGCSPKSPIFQGFPEKKVPCRNISGMSCEEYMSCPAWDMVGYRQPGIHSGSGPPMCCGVGFESVKAINLSKLECEGYSSAYNLAPLKLRGPSDWAYGIRVKYELQGSDAFCRACVATSGTCGYEPADGGGLRHVCMCDNHNSTTNCDSVISPTGASSSVRPKAIGSLIIYFIAMNIGFQRRQR

SEQ ID NO: 27984 - DNA, 2085 bp, Arabidopsis thaliana
  misc_feature (1)..(2085): Ceres Seq. ID no. 2157684
atgtcggaagcatcttgtcttgcttctcctttgctctacaccaattctggaatccattctgattctttctacgcttcgcttattgatagtgccactcataaagctcagctgaagcaaatccacgcacgtttacttgttttaggtttgcagttcagtggtttcttgatcaccaagctcattcacgctagctcttcctttggtgacattacttttgcacgccaagtgttcgacgatttacctcgtcctcaaatattcccttggaatgctataatcaggggttattcaaggaacaatcacttccaagatgctcttctcatgtattccaatatgcaactcgctcgtgtttctcctgattctttcactttccctcatcttcttaaagcttgcagcggtttgtctcatcttcagatgggtagattcgttcatgctcaggtgttcaggcttggatttgatgcggatgtgtttgttcagaacggtctcattgccttgtatgcgaaatgtaggcgtttgggatctgcgagaactgtgtttgaaggactgccattgccagagaggacgatagtctcatggactgctatcgtttcagcttatgctcagaacggtgagcctatggaggctcttgagatttttagtcagatgaggaagatggatgtgaagcctgactgggtagctcttgtcagcgttctcaatgctttcacttgcttgcaggatttgaagcaagggagatctattcatgcttctgttgtgaagatgggtcttgaaatagagcctgacttactcatctctctcaacaccatgtatgcaaaatgtggccaagttgcaactgccaagattctgtttgataagatgaagtcacctaacctgattttgtggaacgccatgatctctggctatgcgaagaacggttatgccagggaagctattgatatgtttcatgagatgatcaataaagatgttagacccgacaccatctctataacatctgccatttcggcttgcgctcaagtaggttctcttgagcaggctcgcagtatgtatgaatatgtaggcagaagtgactacagggatgacgttttcataagcagcgcattaatcgatatgtttgctaaatgtggaagtgtagaaggcgcaaggttggtttttgaccgaacacttgacagggatgttgtggtgtggagtgctatgattgttgggtatggattgcacgggcgggcaagagaagcaatcagtctgtaccgtgcaatggagcgtggtggagtacatcccaatgacgtcacttttctggggcttctcatggcctgtaaccattcaggcatggtaagagaaggctggtggtttttcaaccggatggcggatcacaaaataaatccacaacagcaacattatgcatgtgtcattgatcttctcgggcgtgctggtcatctggatcaagcttatgaagtgatcaaatgcatgccggtccagcccggtgtaacggtttggggagcactcctaagcgcttgcaagaagcatcgccacgttgaactgggagaatatgcagctcaacagcttttctcaatagacccatccaacacaggccactatgtacagctctctaatctgtatgctgcagcacgtttgtgggaccgtgttgcagaggtgcgagtgagaatgaaggagaaaggattgaacaaagacgttggatgtagctgggttgaagtaaggggaaggttggaggctttccgagtgggtgataagtcacatccgagatatgaagagatagagagacaagtagagtggatagagagtagattgaaggaaggtggatttgtggctaacaaggatgcttcattgcacgatctcaacgatgaagaagctgaagagactttgtgcagccacagcgagaggatcgcgattgcgtatgggcttataagtacaccccaaggcacaccactgcggatcacaaagaatctgagagcatgcgtaaactgtcatgctgctacaaagcttatctcgaagctagtggacagagagattgttgtgagagatacaaataggttccaccattttaaggatggagtttgttcctgtggtgattattggtaa

SEQ ID NO: 27985 - protein, 694 aa, Arabidopsis thaliana
  misc_feature (1)..(694): Ceres Seq. ID no. 2157685
MSEASCLASPLLYTNSGIHSDSFYASLIDSATHKAQLKQIHARLLVLGLQFSGFLITKLIHASSSFGDITFARQVFDDLPRPQIFPWNAIIRGYSRNNHFQDALLMYSNMQLARVSPDSFTFPHLLKACSGLSHLQMGRFVHAQVFRLGFDADVFVQNGLIALYAKCRRLGSARTVFEGLPLPERTIVSWTAIVSAYAQNGEPMEALEIFSQMRKMDVKPDWVALVSVLNAFTCLQDLKQGRSIHASVVKMGLEIEPDLLISLNTMYAKCGQVATAKILFDKMKSPNLILWNAMISGYAKNGYAREAIDMFHEMINKDVRPDTISITSAISACAQVGSLEQARSMYEYVGRSDYRDDVFISSALIDMFAKCGSVEGARLVFDRTLDRDVVVWSAMIVGYGLHGRAREAISLYRAMERGGVHPNDVTFLGLLMACNHSGMVREGWWFFNRMADHKINPQQQHYACVIDLLGRAGHLDQAYEVIKCMPVQPGVTVWGALLSACKKHRHVELGEYAAQQLFSIDPSNTGHYVQLSNLYAAARLWDRVAEVRVRMKEKGLNKDVGCSWVEVRGRLEAFRVGDKSHPRYEEIERQVEWIESRLKEGGFVANKDASLHDLNDEEAEETLCSHSERIAIAYGLISTPQGTPLRITKNLRACVNCHAATKLISKLVDREIVVRDTNRFHHFKDGVCSCGDYW

SEQ ID NO: 27986 - protein, 589 aa, Arabidopsis thaliana
  misc_feature (1)..(589): Ceres Seq. ID no. 2157686
MYSNMQLARVSPDSFTFPHLLKACSGLSHLQMGRFVHAQVFRLGFDADVFVQNGLIALYAKCRRLGSARTVFEGLPLPERTIVSWTAIVSAYAQNGEPMEALEIFSQMRKMDVKPDWVALVSVLNAFTCLQDLKQGRSIHASVVKMGLEIEPDLLISLNTMYAKCGQVATAKILFDKMKSPNLILWNAMISGYAKNGYAREAIDMFHEMINKDVRPDTISITSAISACAQVGSLEQARSMYEYVGRSDYRDDVFISSALIDMFAKCGSVEGARLVFDRTLDRDVVVWSAMIVGYGLHGRAREAISLYRAMERGGVHPNDVTFLGLLMACNHSGMVREGWWFFNRMADHKINPQQQHYACVIDLLGRAGHLDQAYEVIKCMPVQPGVTVWGALLSACKKHRHVELGEYAAQQLFSIDPSNTGHYVQLSNLYAAARLWDRVAEVRVRMKEKGLNKDVGCSWVEVRGRLEAFRVGDKSHPRYEEIERQVEWIESRLKEGGFVANKDASLHDLNDEEAEETLCSHSERIAIAYGLISTPQGTPLRITKNLRACVNCHAATKLISKLVDREIVVRDTNRFHHFKDGVCSCGDYW

SEQ ID NO: 27987 - protein, 585 aa, Arabidopsis thaliana
  misc_feature (1)..(585): Ceres Seq. ID no. 2157687
MQLARVSPDSFTFPHLLKACSGLSHLQMGRFVHAQVFRLGFDADVFVQNGLIALYAKCRRLGSARTVFEGLPLPERTIVSWTAIVSAYAQNGEPMEALEIFSQMRKMDVKPDWVALVSVLNAFTCLQDLKQGRSIHASVVKMGLEIEPDLLISLNTMYAKCGQVATAKILFDKMKSPNLILWNAMISGYAKNGYAREAIDMFHEMINKDVRPDTISITSAISACAQVGSLEQARSMYEYVGRSDYRDDVFISSALIDMFAKCGSVEGARLVFDRTLDRDVVVWSAMIVGYGLHGRAREAISLYRAMERGGVHPNDVTFLGLLMACNHSGMVREGWWFFNRMADHKINPQQQHYACVIDLLGRAGHLDQAYEVIKCMPVQPGVTVWGALLSACKKHRHVELGEYAAQQLFSIDPSNTGHYVQLSNLYAAARLWDRVAEVRVRMKEKGLNKDVGCSWVEVRGRLEAFRVGDKSHPRYEEIERQVEWIESRLKEGGFVANKDASLHDLNDEEAEETLCSHSERIAIAYGLISTPQGTPLRITKNLRACVNCHAATKLISKLVDREIVVRDTNRFHHFKDGVCSCGDYW

SEQ ID NO: 27988 - DNA, 1965 bp, Arabidopsis thaliana
  misc_feature (1)..(1965): Ceres Seq. ID no. 2158341
atgtcgacgatttgcagccacagagaacttaaagcttatcgtccgctgcaagataataatctacaggaggtgtatgcttcctcagctgctgcagtgcactacgatccagatctgaaagatgtgaacatagttgcgacatacagtgaccattacggcaatatacgccttggtagggtgaaaatgggggatctttcaccttcttgggttttggagaatcctgcctatcaagttagccgcaaaacaaaaggttcgcagctagttataccacgggattcatttcaaaatgatactggaatggaagataatgcaagccattctacaactaatcagactgatgaaagcgaaaatcagtttccaaacgtggattttgcaagcccagcaaaactgaagcggcagattttacgtcaggaaaggagaggtcaacgaactttagagctgatccgacaagaaaaggaaactgatgagcagatgcaagaagcagccattcagaagtcaatgagctttgaaaactcagtcatagggaaatacagtatatggaggagagactatgagagcccaaatgctgatgctatcttgaagcttatgagagaccagatcataatggcaaaagcatatgcaaatattgccaaatcaaaaaatgtaaccaatctgtacgttttcttgatgcagcagtgtggagaaaataaacgtgttataggtaaagcaacctctgatgctgaccttccttcaagcgctcttgatcaagcaaaagccatgggccatgcactctctcttgcaaaagacgagttatatgactgccatgaacttgcaaaaaagttccgggccatccttcagtccactgaacgcaaagtagatggactgaagaaaaagggaaccttcttaattcagctagctgccaaaacatttcccaagccattgcattgcctgagtctgcagctagcggcagactattttattctaggtttcaatgaagaggatgcagtgaaagaggatgtcagtcaaaagaagcttgaagatccttcgctctatcactatgcgatcttttcggataacgttctggctacatcagtggtggtgaactccactgtcttgaatgcaaaggaaccgcagaggcatgtgttccatatagtaactgacaaactgaattttggtgcaatgaagatgtggtttcgcatcaatgctcctgctgatgcgacgattcaagttgaaaacataaatgatttcaagtggctgaactcctcttactgctctgttctacggcagcttgaatctgcaaggctgaaagaatactatttcaaagcaaatcatccttcatcaatctcagctggcgcagataatctaaagtaccgcaacccaaagtatctatcgatgctgaatcatctcagattctaccttcctgaggtttatccgaagctggagaagattctgtttctagacgatgacattgtggtgcagaaggacctggcaccactatgggaaatagacatgcaaggaaaagtgaatggtgcggtggagacgtgcaaggagagcttccacagatttgacaagtacctcaacttctcaaatccaaagatttcagagaattttgacgctggtgcttgtgggtgggcatttgggatgaatatgtttgacctgaaagagtggaggaaacggaacattacagggatatatcactattggcaagacttgaatgaagacagaacactgtggaagctgggatcgttgccaccggggctgataacattttacaacctgacgtatgcaatggataggagctggcacgtactagggctgggatatgacccagcgctaaaccaaacagcaatagagaatgcagcggtagtgcattacaatgggaactacaagccatggctgggtttagcattcgccaagtacaaaccgtactggtccaagtacgttgagtacgacaacccttatctccgacggtgcgacatcaatgaatga

SEQ ID NO: 27989 - protein, 654 aa, Arabidopsis thaliana
  misc_feature (1)..(654): Ceres Seq. ID no. 2158342
MSTICSHRELKAYRPLQDNNLQEVYASSAAAVHYDPDLKDVNIVATYSDHYGNIRLGRVKMGDLSPSWVLENPAYQVSRKTKGSQLVIPRDSFQNDTGMEDNASHSTTNQTDESENQFPNVDFASPAKLKRQILRQERRGQRTLELIRQEKETDEQMQEAAIQKSMSFENSVIGKYSIWRRDYESPNADAILKLMRDQIIMAKAYANIAKSKNVTNLYVFLMQQCGENKRVIGKATSDADLPSSALDQAKAMGHALSLAKDELYDCHELAKKFRAILQSTERKVDGLKKKGTFLIQLAAKTFPKPLHCLSLQLAADYFILGFNEEDAVKEDVSQKKLEDPSLYHYAIFSDNVLATSVVVNSTVLNAKEPQRHVFHIVTDKLNFGAMKMWFRINAPADATIQVENINDFKWLNSSYCSVLRQLESARLKEYYFKANHPSSISAGADNLKYRNPKYLSMLNHLRFYLPEVYPKLEKILFLDDDIVVQKDLAPLWEIDMQGKVNGAVETCKESFHRFDKYLNFSNPKISENFDAGACGWAFGMNMFDLKEWRKRNITGIYHYWQDLNEDRTLWKLGSLPPGLITFYNLTYAMDRSWHVLGLGYDPALNQTAIENAAVVHYNGNYKPWLGLAFAKYKPYWSKYVEYDNPYLRRCDINE

SEQ ID NO: 27990 - protein, 594 aa, Arabidopsis thaliana
  misc_feature (1)..(594): Ceres Seq. ID no. 2158343
MGDLSPSWVLENPAYQVSRKTKGSQLVIPRDSFQNDTGMEDNASHSTTNQTDESENQFPNVDFASPAKLKRQILRQERRGQRTLELIRQEKETDEQMQEAAIQKSMSFENSVIGKYSIWRRDYESPNADAILKLMRDQIIMAKAYANIAKSKNVTNLYVFLMQQCGENKRVIGKATSDADLPSSALDQAKAMGHALSLAKDELYDCHELAKKFRAILQSTERKVDGLKKKGTFLIQLAAKTFPKPLHCLSLQLAADYFILGFNEEDAVKEDVSQKKLEDPSLYHYAIFSDNVLATSVVVNSTVLNAKEPQRHVFHIVTDKLNFGAMKMWFRINAPADATIQVENINDFKWLNSSYCSVLRQLESARLKEYYFKANHPSSISAGADNLKYRNPKYLSMLNHLRFYLPEVYPKLEKILFLDDDIVVQKDLAPLWEIDMQGKVNGAVETCKESFHRFDKYLNFSNPKISENFDAGACGWAFGMNMFDLKEWRKRNITGIYHYWQDLNEDRTLWKLGSLPPGLITFYNLTYAMDRSWHVLGLGYDPALNQTAIENAAVVHYNGNYKPWLGLAFAKYKPYWSKYVEYDNPYLRRCDINE

SEQ ID NO: 27991 - protein, 556 aa, Arabidopsis thaliana
  misc_feature (1)..(556): Ceres Seq. ID no. 2158344
MEDNASHSTTNQTDESENQFPNVDFASPAKLKRQILRQERRGQRTLELIRQEKETDEQMQEAAIQKSMSFENSVIGKYSIWRRDYESPNADAILKLMRDQIIMAKAYANIAKSKNVTNLYVFLMQQCGENKRVIGKATSDADLPSSALDQAKAMGHALSLAKDELYDCHELAKKFRAILQSTERKVDGLKKKGTFLIQLAAKTFPKPLHCLSLQLAADYFILGFNEEDAVKEDVSQKKLEDPSLYHYAIFSDNVLATSVVVNSTVLNAKEPQRHVFHIVTDKLNFGAMKMWFRINAPADATIQVENINDFKWLNSSYCSVLRQLESARLKEYYFKANHPSSISAGADNLKYRNPKYLSMLNHLRFYLPEVYPKLEKILFLDDDIVVQKDLAPLWEIDMQGKVNGAVETCKESFHRFDKYLNFSNPKISENFDAGACGWAFGMNMFDLKEWRKRNITGIYHYWQDLNEDRTLWKLGSLPPGLITFYNLTYAMDRSWHVLGLGYDPALNQTAIENAAVVHYNGNYKPWLGLAFAKYKPYWSKYVEYDNPYLRRCDINE

SEQ ID NO: 27992 - DNA, 2343 bp, Arabidopsis thaliana
  misc_feature (1)..(2343): Ceres Seq. ID no. 2160993
atggagtcaataaaggtttgcatgaacgcactgtgcggagcggcctctacgtcgggcgagtggaaaaaaggctggcctatgcgatccggtgatttagcttctctctgcgataagtgtgggtgtgcatacgagcaatccatattctgtgaagtgttccatgccaaggaatctggttggagagagtgtaattcatgtgacaagcgtcttcactgtggatgcattgcttctagatttatgatggagcttctagagaatggtggtgttacctgtataagttgcgccaagaaatccggactaatttctatgaatgtgagccatgaatctaacggtaaggacttcccctcatttgcttcagcagagcatgtaggcagtgttcttgagaggacaaatctcaagcacttgcttcactttcaaagaatcgaccccactcattcttctcttcaaatgaaacaagaagaatcgctgcttccttccagcctagatgctcttagacacaaaactgaaaggaaagaattgtctgcacagccaaacttgagcatttcacttggacctacgcttatgacaagcccatttcatgatgctgctgttgatgacagaagtaagactaattcgattttccaactggcccctcggtccaggcagctgcttccaaaacctgcaaattcagctcccattgctgctggcatggagcctagtgggagcctggtgtcacagattcatgtcgctcggcctcctccagaaggtcgcgggaagacccaattgcttccccgttactggcctaggattactgaccaagagctgctgcaattatctggacagtatcctcatctctcaaattccaaaattataccactctttgaaaaagttctgagtgcgagcgatgcgggtcgtattggtcgactggttcttccgaaagcatgtgcagaggcatatttcccccctatatctctacccgagggtctcccgttaaagatacaagacataaaagggaaagaatgggtgttccagttcaggttttggcctaataataacagcaggatgtacgttttggagggtgtgactccttgcatacagtccatgcagttgcaagctggtgacactgtaacattcagccgtacagaacctgaaggaaaactcgtaatgggataccgtaaagcgacgaactctacagcgacacagatgttcaagggaagcagtgaacccaatctgaacatgttttccaacagcttgaatccgggatgtggtgacatcaattggtctaaactagagaagtctgaggacatggcaaaggataacttatttcttcagtcgtccttaacttctgctaggaaacgggttcggaacattgggactaagagcaagcgtctgctcattgatagcgtagatgttctggaactgaaaataacttgggaggaggcacaggagctgttgcggcctccccaatccaccaaacccagcatctttacgctggaaaatcaagattttgaagaatatgacgaaccaccagttttcgggaagaggaccctttttgtctcacgtcaaacaggggaacaagagcaatgggtgcagtgtgatgcttgtgggaaatggcgacagctgccggtggatattcttcttccaccaaagtggtcgtgctctgataatctcttggatcctggcaggtcttcatgttccgcacctgatgaactctctccaagagaacaggatacacttgtccggcagagcaaagagttcaaaaggaggagactggcatcatcaaacgaaaagctaaaccagtcgcaggatgcatctgctctgaatagtttaggaaatgcaggcatcaccacaaccggtgaacagggggaaatcacggttgcagccacgaccaagcatccaagacaccgggcagggtgttcgtgcatcgtctgcagccaaccaccgagcggaaaaggcaaacacaagccgtcatgcacttgcactgtgtgcgaggcagtgaagagacgattcaggacgctcatgctgcggaagcggaacaaaggagaggcaggacaggcaagccagcaggcgcagtcacagtcagagtgcagggacgagacagaagtggagagcattccagcggttgaactagccgcaggggaaaacatcgacttgaactcagacccgggggcttcccgagtaagcatgatgaggcttctccaagctgcagcgtttcctctggaagcatatctgaaacaaaaggctatttccaatacagcaggagaacagcaaagcagtgatatggtcagcacagaacacggttcgtcctcagccgcacaagaaactgagaaagacacaacaaatggagctcatgatcctgtgaactaa

SEQ ID NO: 27993 - protein, 780 aa, Arabidopsis thaliana
  misc_feature (1)..(780): Ceres Seq. ID no. 2160994
MESIKVCMNALCGAASTSGEWKKGWPMRSGDLASLCDKCGCAYEQSIFCEVFHAKESGWRECNSCDKRLHCGCIASRFMMELLENGGVTCISCAKKSGLISMNVSHESNGKDFPSFASAEHVGSVLERTNLKHLLHFQRIDPTHSSLQMKQEESLLPSSLDALRHKTERKELSAQPNLSISLGPTLMTSPFHDAAVDDRSKTNSIFQLAPRSRQLLPKPANSAPIAAGMEPSGSLVSQIHVARPPPEGRGKTQLLPRYWPRITDQELLQLSGQYPHLSNSKIIPLFEKVLSASDAGRIGRLVLPKACAEAYFPPISLPEGLPLKIQDIKGKEWVFQFRFWPNNNSRMYVLEGVTPCIQSMQLQAGDTVTFSRTEPEGKLVMGYRKATNSTATQMFKGSSEPNLNMFSNSLNPGCGDINWSKLEKSEDMAKDNLFLQSSLTSARKRVRNIGTKSKRLLIDSVDVLELKITWEEAQELLRPPQSTKPSIFTLENQDFEEYDEPPVFGKRTLFVSRQTGEQEQWVQCDACGKWRQLPVDILLPPKWSCSDNLLDPGRSSCSAPDELSPREQDTLVRQSKEFKRRRLASSNEKLNQSQDASALNSLGNAGITTTGEQGEITVAATTKHPRHRAGCSCIVCSQPPSGKGKHKPSCTCTVCEAVKRRFRTLMLRKRNKGEAGQASQQAQSQSECRDETEVESIPAVELAAGENIDLNSDPGASRVSMMRLLQAAAFPLEAYLKQKAISNTAGEQQSSDMVSTEHGSSSAAQETEKDTTNGAHDPVN

SEQ ID NO: 27994 - protein, 773 aa, Arabidopsis thaliana
  misc_feature (1)..(773): Ceres Seq. ID no. 2160995
MNALCGAASTSGEWKKGWPMRSGDLASLCDKCGCAYEQSIFCEVFHAKESGWRECNSCDKRLHCGCIASRFMMELLENGGVTCISCAKKSGLISMNVSHESNGKDFPSFASAEHVGSVLERTNLKHLLHFQRIDPTHSSLQMKQEESLLPSSLDALRHKTERKELSAQPNLSISLGPTLMTSPFHDAAVDDRSKTNSIFQLAPRSRQLLPKPANSAPIAAGMEPSGSLVSQIHVARPPPEGRGKTQLLPRYWPRITDQELLQLSGQYPHLSNSKIIPLFEKVLSASDAGRIGRLVLPKACAEAYFPPISLPEGLPLKIQDIKGKEWVFQFRFWPNNNSRMYVLEGVTPCIQSMQLQAGDTVTFSRTEPEGKLVMGYRKATNSTATQMFKGSSEPNLNMFSNSLNPGCGDINWSKLEKSEDMAKDNLFLQSSLTSARKRVRNIGTKSKRLLIDSVDVLELKITWEEAQELLRPPQSTKPSIFTLENQDFEEYDEPPVFGKRTLFVSRQTGEQEQWVQCDACGKWRQLPVDILLPPKWSCSDNLLDPGRSSCSAPDELSPREQDTLVRQSKEFKRRRLASSNEKLNQSQDASALNSLGNAGITTTGEQGEITVAATTKHPRHRAGCSCIVCSQPPSGKGKHKPSCTCTVCEAVKRRFRTLMLRKRNKGEAGQASQQAQSQSECRDETEVESIPAVELAAGENIDLNSDPGASRVSMMRLLQAAAFPLEAYLKQKAISNTAGEQQSSDMVSTEHGSSSAAQETEKDTTNGAHDPVN

SEQ ID NO: 27995 - protein, 754 aa, Arabidopsis thaliana
  misc_feature (1)..(754): Ceres Seq. ID no. 2160996
MRSGDLASLCDKCGCAYEQSIFCEVFHAKESGWRECNSCDKRLHCGCIASRFMMELLENGGVTCISCAKKSGLISMNVSHESNGKDFPSFASAEHVGSVLERTNLKHLLHFQRIDPTHSSLQMKQEESLLPSSLDALRHKTERKELSAQPNLSISLGPTLMTSPFHDAAVDDRSKTNSIFQLAPRSRQLLPKPANSAPIAAGMEPSGSLVSQIHVARPPPEGRGKTQLLPRYWPRITDQELLQLSGQYPHLSNSKIIPLFEKVLSASDAGRIGRLVLPKACAEAYFPPISLPEGLPLKIQDIKGKEWVFQFRFWPNNNSRMYVLEGVTPCIQSMQLQAGDTVTFSRTEPEGKLVMGYRKATNSTATQMFKGSSEPNLNMFSNSLNPGCGDINWSKLEKSEDMAKDNLFLQSSLTSARKRVRNIGTKSKRLLIDSVDVLELKITWEEAQELLRPPQSTKPSIFTLENQDFEEYDEPPVFGKRTLFVSRQTGEQEQWVQCDACGKWRQLPVDILLPPKWSCSDNLLDPGRSSCSAPDELSPREQDTLVRQSKEFKRRRLASSNEKLNQSQDASALNSLGNAGITTTGEQGEITVAATTKHPRHRAGCSCIVCSQPPSGKGKHKPSCTCTVCEAVKRRFRTLMLRKRNKGEAGQASQQAQSQSECRDETEVESIPAVELAAGENIDLNSDPGASRVSMMRLLQAAAFPLEAYLKQKAISNTAGEQQSSDMVSTEHGSSSAAQETEKDTTNGAHDPVN

SEQ ID NO: 27996 - DNA, 720 bp, Arabidopsis thaliana
  misc_feature (1)..(720): Ceres Seq. ID no. 2162054
atggattatctaggaatcgacttgagctgcgcaatcggatctctccgtaacggtgagtttccggcgaaagattgtcttcttcctctcatttcaaagctactcggttacttcctcgtcgctgcttcaatgaccgttaagcttcctcagataatgaaaatcgtggacaacaagagtgtaaaaggcctaagtgttgtagcatttgagcttgaagtgattggttacacaatctcacttgcttactgtcttaacaaagaccttcctttttcagcttttggtgaattagcttttcttttgatccaagctttaatcttggtggcttgtatctactatttctcacaacctctctctgtaacaacttgggtcaaagcaattctttattttgctatagcaccaactgtgtttgctggtaagattgatccttttctttttgaagctctttatgcttctaagcatttgatatttctctctgcaagaatccctcagatttggaagaacttcagaaacaaaagcactggacaacttagtttcttgacttgtctcatgaactttggtggagctttggcgagagttttcaccagcattcaagagaaggctccacttagcatgcttttgggtattgttctttctatcttcaccaatggaatcattatgagtcagattcttttgtatagaagcaaaggaaacgaagataagctagtgaaaagtaaaaagatttcatga

SEQ ID NO: 27997 - protein, 239 aa, Arabidopsis thaliana
  misc_feature (1)..(239): Ceres Seq. ID no. 2162055
MDYLGIDLSCAIGSLRNGEFPAKDCLLPLISKLLGYFLVAASMTVKLPQIMKIVDNKSVKGLSVVAFELEVIGYTISLAYCLNKDLPFSAFGELAFLLIQALILVACIYYFSQPLSVTTWVKAILYFAIAPTVFAGKIDPFLFEALYASKHLIFLSARIPQIWKNFRNKSTGQLSFLTCLMNFGGALARVFTSIQEKAPLSMLLGIVLSIFTNGIIMSQILLYRSKGNEDKLVKSKKIS

SEQ ID NO: 27998 - protein, 197 aa, Arabidopsis thaliana
  misc_feature (1)..(197): Ceres Seq. ID no. 2162056
MTVKLPQIMKIVDNKSVKGLSVVAFELEVIGYTISLAYCLNKDLPFSAFGELAFLLIQALILVACIYYFSQPLSVTTWVKAILYFAIAPTVFAGKIDPFLFEALYASKHLIFLSARIPQIWKNFRNKSTGQLSFLTCLMNFGGALARVFTSIQEKAPLSMLLGIVLSIFTNGIIMSQILLYRSKGNEDKLVKSKKIS

SEQ ID NO: 27999 - protein, 189 aa, Arabidopsis thaliana
  misc_feature (1)..(189): Ceres Seq. ID no. 2162057
MKIVDNKSVKGLSVVAFELEVIGYTISLAYCLNKDLPFSAFGELAFLLIQALILVACIYYFSQPLSVTTWVKAILYFAIAPTVFAGKIDPFLFEALYASKHLIFLSARIPQIWKNFRNKSTGQLSFLTCLMNFGGALARVFTSIQEKAPLSMLLGIVLSIFTNGIIMSQILLYRSKGNEDKLVKSKKIS

SEQ ID NO: 28000 - DNA, 1362 bp, Arabidopsis thaliana
  misc_feature (1)..(1362): Ceres Seq. ID no. 2162086
atggaagaactaggagtgaagagaaggatagtattggttccagttccagcacaaggtcatgtaactccgattatgcaactcgggaaggctctttactccaagggcttctccatcactgttgttctcacacagtataatcgagttagctcatccaaggacttctctgattttcatttcctcaccatcccaggcagcttgaccgagtctgatctcaaaaaccttggaccattcaagtttctcttcaagctcaatcaaatttgcgaggcaagcttcaagcaatgtattggtcaactattgcaggagcaaggtaatgatatcgcttgtgtcgtctacgatgagtacatgtacttctcccaagctgcagttaaagagtttcaacttcctagcgtcctcttcagcacgacaagtgctactgcctttgtctgtcgctctgttttgtctagagtcaacgcagagtcattcttgcttgacatgaaagatcccaaagtgtcagacaaggaatttccagggttgcatccgctaaggtacaaggacctgccaacttcagcatttgggccattagagagtatactcaaggtttacagtgagactgtcaacattcgaacagcttcggcagttatcatcaactcaacaagctgtctagagagctcatctttggcatggttacaaaaacaactgcaagttccagtgtatcctataggcccacttcacattgcagcttcagcgccttctagtttacttgaagaggacaggagttgccttgagtggttgaacaagcaaaaaataggctcagtgatttacataagtttgggaagcttggctctaatggaaactaaagacatgttggagatggcttggggtttacgtaatagcaaccaacctttcttatgggtgatccgaccgggttctattcccggctcggaatggacagagtctttaccggaggaattcagtaggttggtttcagaaagaggttacattgtgaaatgggcaccacagatagaagttctcagacatcctgcagtgggagggttttggagtcactgcggatggaactcgaccctagagagcatcggggaaggagttccgatgatctgtaggccttttacgggagatcagaaagtcaatgcgaggtacttagagagagtttggagaattggggttcaattggaaggagagctggataaaggaacagtggagagagctgtagagagattgattatggatgaagaaggagcagaaatgaggaagagagttatcaacttgaaagagaagcttcaagcctctgtcaagagtagaggttcctcattcagctcattagacaactttgtcaattccttaaaaatgatgaatttcatgtag

SEQ ID NO: 28001 - protein, 453 aa, Arabidopsis thaliana
  misc_feature (1)..(453): Ceres Seq. ID no. 2162087
MEELGVKRRIVLVPVPAQGHVTPIMQLGKALYSKGFSITVVLTQYNRVSSSKDFSDFHFLTIPGSLTESDLKNLGPFKFLFKLNQICEASFKQCIGQLLQEQGNDIACVVYDEYMYFSQAAVKEFQLPSVLFSTTSATAFVCRSVLSRVNAESFLLDMKDPKVSDKEFPGLHPLRYKDLPTSAFGPLESILKVYSETVNIRTASAVIINSTSCLESSSLAWLQKQLQVPVYPIGPLHIAASAPSSLLEEDRSCLEWLNKQKIGSVIYISLGSLALMETKDMLEMAWGLRNSNQPFLWVIRPGSIPGSEWTESLPEEFSRLVSERGYIVKWAPQIEVLRHPAVGGFWSHCGWNSTLESIGEGVPMICRPFTGDQKVNARYLERVWRIGVQLEGELDKGTVERAVERLIMDEEGAEMRKRVINLKEKLQASVKSRGSSFSSLDNFVNSLKMMNFM

SEQ ID NO: 28002 - protein, 429 aa, Arabidopsis thaliana
  misc_feature (1)..(429): Ceres Seq. ID no. 2162088
MQLGKALYSKGFSITVVLTQYNRVSSSKDFSDFHFLTIPGSLTESDLKNLGPFKFLFKLNQICEASFKQCIGQLLQEQGNDIACVVYDEYMYFSQAAVKEFQLPSVLFSTTSATAFVCRSVLSRVNAESFLLDMKDPKVSDKEFPGLHPLRYKDLPTSAFGPLESILKVYSETVNIRTASAVIINSTSCLESSSLAWLQKQLQVPVYPIGPLHIAASAPSSLLEEDRSCLEWLNKQKIGSVIYISLGSLALMETKDMLEMAWGLRNSNQPFLWVIRPGSIPGSEWTESLPEEFSRLVSERGYIVKWAPQIEVLRHPAVGGFWSHCGWNSTLESIGEGVPMICRPFTGDQKVNARYLERVWRIGVQLEGELDKGTVERAVERLIMDEEGAEMRKRVINLKEKLQASVKSRGSSFSSLDNFVNSLKMMNFM

SEQ ID NO: 28003 - protein, 339 aa, Arabidopsis thaliana
  misc_feature (1)..(339): Ceres Seq. ID no. 2162089
MYFSQAAVKEFQLPSVLFSTTSATAFVCRSVLSRVNAESFLLDMKDPKVSDKEFPGLHPLRYKDLPTSAFGPLESILKVYSETVNIRTASAVIINSTSCLESSSLAWLQKQLQVPVYPIGPLHIAASAPSSLLEEDRSCLEWLNKQKIGSVIYISLGSLALMETKDMLEMAWGLRNSNQPFLWVIRPGSIPGSEWTESLPEEFSRLVSERGYIVKWAPQIEVLRHPAVGGFWSHCGWNSTLESIGEGVPMICRPFTGDQKVNARYLERVWRIGVQLEGELDKGTVERAVERLIMDEEGAEMRKRVINLKEKLQASVKSRGSSFSSLDNFVNSLKMMNFM

SEQ ID NO: 28004 - DNA, 1218 bp, Arabidopsis thaliana
  misc_feature (1)..(1218): Ceres Seq. ID no. 2162652
atggaagaagataaccaagaaatacaacgtgacaatgtcggatcttcatctttctttaaaacatgtttcaacgcactcaatgctctttcaggaattggaatattatcggtaccatattcacttgctcgtggaggatggttgagtctttcacttttgttactcctagccgtaaccgccttctacacatccttactcattacaaaatgtatgaatgcggaccgcaacatcaaaacatatcccgacataggagaacgcgcatttggtagaccgggaagaatcattgtgtcagtcttcatgcacctagagctctatctagtcaccacgggtttcttgatcctcgagggcgacaatcttcacaatcttttcccgggttttaccatcgaaatgatcggattgagattgaatggcaaacaagctttcatggcgaccgtcgcctttgtcattatgccaactctatggtgggataatctcagcgtcttgtcgtatgtttctatgagtggcgttttagctacgactgtgacgcttggatcaatatcttggattggcgcatttgatgggattgggtttcatcaaaaaggaaagttgataaattggagtgggatccctactgctttgagcttatatgctttttgctatggtgcgcatccagttttgcccactttgtattcttctatgaaaagcaaacatcagttcaacaatgtcctactaatatgttttatattatgcaccataggatacacatcaatggcagttttgggctacttaatgtatggatcacaaacattatcacaaataacactgaatcttccaattcataagacgagttcgaaggtggcaatatacacaactctcgtaaacccggtagccaaatacgcactgatgatcacaccaaccgtgaacactataaaagattggtttccttcacggtactccaaaaaggcatacttacatctcttgataagcacatttttcatcataagtagtgtcgtgatcgccgagacacttcccttttttggttatatgatgtcgctggttggagcattattgagcgttacggtttctatacttctgccttgtttatgttacttgaagatctttggaaactacaagaaaattgggtgtgagactataatgttgtttggaatggtagtgatgagtgtttttgttggggtaataggtacttacattgcacttcgagatataattggtagtgtataa

SEQ ID NO: 28005 - protein, 405 aa, Arabidopsis thaliana
  misc_feature (1)..(405): Ceres Seq. ID no. 2162653
MEEDNQEIQRDNVGSSSFFKTCFNALNALSGIGILSVPYSLARGGWLSLSLLLLLAVTAFYTSLLITKCMNADRNIKTYPDIGERAFGRPGRIIVSVFMHLELYLVTTGFLILEGDNLHNLFPGFTIEMIGLRLNGKQAFMATVAFVIMPTLWWDNLSVLSYVSMSGVLATTVTLGSISWIGAFDGIGFHQKGKLINWSGIPTALSLYAFCYGAHPVLPTLYSSMKSKHQFNNVLLICFILCTIGYTSMAVLGYLMYGSQTLSQITLNLPIHKTSSKVAIYTTLVNPVAKYALMITPTVNTIKDWFPSRYSKKAYLHLLISTFFIISSVVIAETLPFFGYMMSLVGALLSVTVSILLPCLCYLKIFGNYKKIGCETIMLFGMVVMSVFVGVIGTYIALRDIIGSV

SEQ ID NO: 28006 - protein, 336 aa, Arabidopsis thaliana
  misc_feature (1)..(336): Ceres Seq. ID no. 2162654
MNADRNIKTYPDIGERAFGRPGRIIVSVFMHLELYLVTTGFLILEGDNLHNLFPGFTIEMIGLRLNGKQAFMATVAFVIMPTLWWDNLSVLSYVSMSGVLATTVTLGSISWIGAFDGIGFHQKGKLINWSGIPTALSLYAFCYGAHPVLPTLYSSMKSKHQFNNVLLICFILCTIGYTSMAVLGYLMYGSQTLSQITLNLPIHKTSSKVAIYTTLVNPVAKYALMITPTVNTIKDWFPSRYSKKAYLHLLISTFFIISSVVIAETLPFFGYMMSLVGALLSVTVSILLPCLCYLKIFGNYKKIGCETIMLFGMVVMSVFVGVIGTYIALRDIIGSV

SEQ ID NO: 28007 - protein, 307 aa, Arabidopsis thaliana
  misc_feature (1)..(307): Ceres Seq. ID no. 2162655
MHLELYLVTTGFLILEGDNLHNLFPGFTIEMIGLRLNGKQAFMATVAFVIMPTLWWDNLSVLSYVSMSGVLATTVTLGSISWIGAFDGIGFHQKGKLINWSGIPTALSLYAFCYGAHPVLPTLYSSMKSKHQFNNVLLICFILCTIGYTSMAVLGYLMYGSQTLSQITLNLPIHKTSSKVAIYTTLVNPVAKYALMITPTVNTIKDWFPSRYSKKAYLHLLISTFFIISSVVIAETLPFFGYMMSLVGALLSVTVSILLPCLCYLKIFGNYKKIGCETIMLFGMVVMSVFVGVIGTYIALRDIIGSV

SEQ ID NO: 28008 - DNA, 1515 bp, Arabidopsis thaliana
  misc_feature (1)..(1515): Ceres Seq. ID no. 2163825
atgggtcggttagtagaagctatcattgcttcgatattattgtctttgtgttttacaataacaaagtcagctccaaaatctgctctcattaccaatcttcctggtttcaacggcacttttccatctaaacactatgccgggtatgtggcaatagataaacatcgtaataagaatctatggtattactttgtggaatctgagagaaatgcttcggtagatccagttgtgctttggcttaatggtggtccaggttgctctagcatggatggatttgtctacgagcacggtccattcaatttcgaaccaaaaaagaagaactcacatcttttgcatctcaatccttatagttggtccaaggtgtccaacatcatataccttgactctccagttggtgtgggattctcttactcaaatgacaacgccgattatacaactgatgatacaaaaaccgcgtctgatactcacacattccttctcgagtggtttaaaatgtttccggagtttcagtcaaatccgttctttatatcaggagaatcatatgctggtatctatgtgccaactcttgcggccgaggttgtcaaaggaaataaaaatgcaatgagaacaaacaaaacaagcaagaatgtgacaaagccggttatcaacttcaagggatatttggtgggtaatggtgttaccgatgaggtgtttgatggtaatgctcttgttcccttcactcatggcatgggactcatctctgatgaactctatgaggaaactaaattagtgtgcaacggaacatactataccggcggccagtcaggagtgagtaaagaatgtgctggcaaacttaaaacagtgtcagatactgtgaacttattgaacttatataacattctagaaccgtgctaccacggaacatctctatccgccttagatatcgagtttctgcctaagagtctccttactctaggcaaaacagaaaagccaatggcggtgagaaagagaatgtttggtcgtgcatggcctctaggtgccgttgtgcgtccaggcattgtacctagttggtctcaactcctcgctggctttggtgttccttgcattgacgatacagttgcgaccaaatggctaaacgatccagctgtaaggaaagcggttcatgctaaagaggaaaaagcgattggaaattgggagttatgttcaagcaacctcgaatataggcacgacaccggtagcatgatcgaataccatagaaacctcactcttagtggctttcgagctctcattttcagtggagatcatgatatgtgtgtaccatatactggctctgaagcatggactaaggcaatgggatacaaagtggttgatgaatggaggccatggatgtcaaataaccaagtcgccgggtttacacaagggtatgccaataatctcacatttctaaccatcaagggtgcaggacataccgttccagaatacaaaccgcgtgaatctttggacttctatagtcgtttcctagcaggagaaaagatatag

SEQ ID NO: 28009 - protein, 504 aa, Arabidopsis thaliana
  misc_feature (1)..(504): Ceres Seq. ID no. 2163826
MGRLVEAIIASILLSLCFTITKSAPKSALITNLPGFNGTFPSKHYAGYVAIDKHRNKNLWYYFVESERNASVDPVVLWLNGGPGCSSMDGFVYEHGPFNFEPKKKNSHLLHLNPYSWSKVSNIIYLDSPVGVGFSYSNDNADYTTDDTKTASDTHTFLLEWFKMFPEFQSNPFFISGESYAGIYVPTLAAEVVKGNKNAMRTNKTSKNVTKPVINFKGYLVGNGVTDEVFDGNALVPFTHGMGLISDELYEETKLVCNGTYYTGGQSGVSKECAGKLKTVSDTVNLLNLYNILEPCYHGTSLSALDIEFLPKSLLTLGKTEKPMAVRKRMFGRAWPLGAVVRPGIVPSWSQLLAGFGVPCIDDTVATKWLNDPAVRKAVHAKEEKAIGNWELCSSNLEYRHDTGSMIEYHRNLTLSGFRALIFSGDHDMCVPYTGSEAWTKAMGYKVVDEWRPWMSNNQVAGFTQGYANNLTFLTIKGAGHTVPEYKPRESLDFYSRFLAGEKI

SEQ ID NO: 28010 - protein, 417 aa, Arabidopsis thaliana
  misc_feature (1)..(417): Ceres Seq. ID no. 2163827
MDGFVYEHGPFNFEPKKKNSHLLHLNPYSWSKVSNIIYLDSPVGVGFSYSNDNADYTTDDTKTASDTHTFLLEWFKMFPEFQSNPFFISGESYAGIYVPTLAAEVVKGNKNAMRTNKTSKNVTKPVINFKGYLVGNGVTDEVFDGNALVPFTHGMGLISDELYEETKLVCNGTYYTGGQSGVSKECAGKLKTVSDTVNLLNLYNILEPCYHGTSLSALDIEFLPKSLLTLGKTEKPMAVRKRMFGRAWPLGAVVRPGIVPSWSQLLAGFGVPCIDDTVATKWLNDPAVRKAVHAKEEKAIGNWELCSSNLEYRHDTGSMIEYHRNLTLSGFRALIFSGDHDMCVPYTGSEAWTKAMGYKVVDEWRPWMSNNQVAGFTQGYANNLTFLTIKGAGHTVPEYKPRESLDFYSRFLAGEKI

SEQ ID NO: 28011 - protein, 341 aa, Arabidopsis thaliana
  misc_feature (1)..(341): Ceres Seq. ID no. 2163828
MFPEFQSNPFFISGESYAGIYVPTLAAEVVKGNKNAMRTNKTSKNVTKPVINFKGYLVGNGVTDEVFDGNALVPFTHGMGLISDELYEETKLVCNGTYYTGGQSGVSKECAGKLKTVSDTVNLLNLYNILEPCYHGTSLSALDIEFLPKSLLTLGKTEKPMAVRKRMFGRAWPLGAVVRPGIVPSWSQLLAGFGVPCIDDTVATKWLNDPAVRKAVHAKEEKAIGNWELCSSNLEYRHDTGSMIEYHRNLTLSGFRALIFSGDHDMCVPYTGSEAWTKAMGYKVVDEWRPWMSNNQVAGFTQGYANNLTFLTIKGAGHTVPEYKPRESLDFYSRFLAGEKI

SEQ ID NO: 28012 - DNA, 951 bp, Arabidopsis thaliana
  misc_feature (1)..(951): Ceres Seq. ID no. 2166760
atggattattcaaaaaccgaagaaacaccgataaacgaagaacaagggtcaacaaattcatctgaaagcagaagcaatgaagagttattctctgattgtgatcaacaacattcttccatagctaacgagttcggactaacggagttgcctaaagacgataaagtttacgagcttatctaccgtcattgccaatctaagctaacttctcacttaagcaatcagtttgagattgtatcaattctcaagaacggatttcaaacaccattaggacaagctaagcttaaagcctttcaaatatacgctgagtctgttgcaaagaaaagcggcagctgctgtggaaacaaagctgcggtggctgaagcggcgagagtgaaatacggttgttgcggtgtggagaaggaagagttaaaagcgattctaatgtatggatttagcaacaatgccttatgtctctcaccagacaatgctcctcttcaatgtatgatagatccttcatcatcttgtaacgaagacgggattagcttcttgctgttttcaagaattattatgggaaaatcagaggttgtgtgctcgacatcacaatcgtatccgagttctatggagtttgattcaggtgtagacagtttgacatctccaaacaagtatattatttggagcacacacatgaacactcatgttttgcctgagtttgttgtttgcatcaaaactccatctatcttgaaaagaaaaaacccgaaatctccttggatttcgtttccggtcttaatcaactcgatatcaaagtttctaaatcaatcgcaaatccgtctcattcataaacactataaagaacatcaagataggagaatctcgcggtgtgagttgattcaacgcctgagaagtataactggagatagcttattggttcaaatcatcaaatctgttggacaaaaggtacataaagacacatga

SEQ ID NO: 28013 - protein, 316 aa, Arabidopsis thaliana
  misc_feature (1)..(316): Ceres Seq. ID no. 2166761
MDYSKTEETPINEEQGSTNSSESRSNEELFSDCDQQHSSIANEFGLTELPKDDKVYELIYRHCQSKLTSHLSNQFEIVSILKNGFQTPLGQAKLKAFQIYAESVAKKSGSCCGNKAAVAEAARVKYGCCGVEKEELKAILMYGFSNNALCLSPDNAPLQCMIDPSSSCNEDGISFLLFSRIIMGKSEVVCSTSQSYPSSMEFDSGVDSLTSPNKYIIWSTHMNTHVLPEFVVCIKTPSILKRKNPKSPWISFPVLINSISKFLNQSQIRLIHKHYKEHQDRRISRCELIQRLRSITGDSLLVQIIKSVGQKVHKDT

SEQ ID NO: 28014 - protein, 176 aa, Arabidopsis thaliana
  misc_feature (1)..(176): Ceres Seq. ID no. 2166762
MYGFSNNALCLSPDNAPLQCMIDPSSSCNEDGISFLLFSRIIMGKSEVVCSTSQSYPSSMEFDSGVDSLTSPNKYIIWSTHMNTHVLPEFVVCIKTPSILKRKNPKSPWISFPVLINSISKFLNQSQIRLIHKHYKEHQDRRISRCELIQRLRSITGDSLLVQIIKSVGQKVHKDT

SEQ ID NO: 28015 - DNA, 1860 bp, Arabidopsis thaliana
  misc_feature (1)..(1860): Ceres Seq. ID no. 2170393
atggtgtcaaagctttctcttttccgagccaattcacttccttttccagtcatctcttcctactctgctcgttttatccttaaaccctatcccaaacctaaaacccttatcttctgtgtcttctccagtaatctctcctccaccacctttccgtatggcccgtctcttctgaaaggaaagaagcctgtgctagatgatattagattagcttcaattggtcgagacagagatgcccatcgaggcaaaattggagagtttgatgaatcaattgagaaagatgttcttttgaatgaagatgaatttactagggtttttgagatttcggcgattcgagtcccggcgaaggattgtttcgcgctcgagaatcgtctccgtggtcatcttcttaattggcctaggattcggaacattgctagggttcctggagatgagattgaagaagatgtggtgaagctgttgggccgtgagactgatgaagaagaagaagatgaagatagtgttgtggattcggttaaccggagaataagagggaaagcagaaggggatggggagagattgagttcagtgttgcatagagataaactcgccaggacatttaattcaactgggtatctcaaattcagaaacttggccaagatttctcggccaaagaggaagaggaagacagagagaacaagggaggggaaggaaaaggaaatagcaagcagacgcaacgaaatggcggtggtggaagtggtggaaactcgaggaggagaagaggattttgaggggttattgggagaaggctatggtagtagaggaagatggagaggttcaacaagattgttgcttttggatgagaaatattccggtgaggaagttcaagacttgcctgaggctatcaaggttctgtttgcagaagctaaaatggctgatgcaagcttaagtttcgagctagtgaaatgcagactgactttgttctatgactattggccaatgattgagatattggaggctgtactacctaagggtatgattgtgccttcggcatttgagatggtggggcatattgcgcatctgaacctaagagatgagcatctaccatacaaaaggctcatagctaaggtagtcctggacaagaatcagccaaagatacaaaccgttgtgaataagattgatcctatccacaatgacttcagaactatgcagctagaggttttagctggaaaccattcgctggtgactctagttgttgaaaatggactgcgctttcatgttgatttagctagagtatattggaattcgaaacttgggacagaaagacagaggctgctactcgggttcgaccaaaatgacgttgtctgtgatgtttttgctggagttggtcctatcgcacttgctgcagcaagaattgtaaaacgtgtatatgccaatgacctgaatcctcatgcagtagaatttatggaacagaatagtgttgtcaataagctcgagaagagaattgagatctttaacatggacggacgaagattcataaaggctatgttttcaagcgaaaaaggtcaaaaagtcacccaagtagtcatgaatttaccaaaagatgctgctgaatctctagatgcatttcgcggagtatacaacgataggcacagagatgaaggcttatctttcccaaccatccatgtgtatggattctccaaggcttctgatccagaattcgacttccacgagcggatacggattgctttatctgaggtagccgtggatgtgaagatgcgaaaggtacgccttgtggctccagggaaatggatgctatgtgcttcattcatacttcccaagaatgtagccttctcaagaaaaaacttaagttatgtagattaa

SEQ ID NO: 28016 - protein, 619 aa, Arabidopsis thaliana; identical to SEQ ID NO: 2576
  misc_feature (1)..(619): Ceres Seq. ID no. 2170394

SEQ ID NO: 28017 - protein, 380 aa, Arabidopsis thaliana; identical to SEQ ID NO: 2577
  misc_feature (1)..(380): Ceres Seq. ID no. 2170395

SEQ ID NO: 28018 - protein, 317 aa, Arabidopsis thaliana; identical to SEQ ID NO: 2578
  misc_feature (1)..(317): Ceres Seq. ID no. 2170396

SEQ ID NO: 28019 - DNA, 4101 bp, Arabidopsis thaliana
  misc_feature (1)..(4101): Ceres Seq. ID no. 2171501
atgagttctgtgggtgtatttgataaggtggaaatggatgagaagtcatatttagtatacacattaacacaaacaaaacacccaacctcttccgccgtggagtctagtggtgatgaccttcctctccaacctcttttttcttgtccctatgcacgtatcagatctcataagttcaaagtagagaagaactatgatggtgttaactttttcaactttcatccattcaattcttaccctcactttccaagaacaagaaccagttatcaacaaggcgaatctttacttgattatgatcaccataacatctgtaagttccctgtagtccctctgttttggtgcaacaataaaacccctgatagtaatgaattcgagtgtggtggatgtgaagagtcaaagactagcagaagctattatgcttgtcttgaatgtggaaacaagtttcacaagcaatgtgtagagtctccacttgagatcaaacacccttcacacccttttcattctcttcgactttatagtcatccaacacatatggtgtgcatttgttgtggaagacttgtgtctaacatgttttatcattgtgtgacatgcgatttgagtatggacccgatttgtgctatggaaccaataccctttgttgtagaccatcctaaaagccatccccaccctattacctttttccctacacaagctactttggcttgcaatatttgtggccttgttaagatgcttgatcccacatacatttgtatccaatgtgtcttcgtcatccataaagattgtatgggttacccacatgtcattagaatatctcgtcaccaacaccggatctcttttgcctcttctctaccatatggaaatttgtcttgtggggtttgtcatcaacgtgttgacaacaattatggagcatattcttgtggtaaatgtgatgcttattttgttcattcaaaatgtgcatttcatagaaatgtgtgggatggaaaagaactcgaaggtgtatcagaagaagatgatataatagatgatggtgagccatttgagaggatatctgatggagtaatactccatccatatcacagtcaccatctacgacttgagatcagcaaagtttatgatgaaaataagtattgtcgagggtgttctttcccaatctacgaaggccagttctattcatgcatggaatgtgacttcatcctccatgaaagttgtgcaaatgctccacgcatgaaacgacatcccttacatccacatccacttactctaaatgttgccacaaaggagcttggtaataacgaaggcgtataccattgtaatgtttgtggtcgtgatggtactggcttcttctatgaacatcatataggcgaaagaagattccggctagacttgagatgtgcctcgattcgtgaaccatttgaatatcaatgccacaaacatcccttatgcatagcttcggagctagagaaaaaggtacgatgtcaaatatgcaaagggaaaagctattcgaaattaaattgcatggaatgcgattatattatatgttttcgttgcgctaccttcccatacaaggtaaggtacaagcacgacagtcattttcttagaattcgcgatgggaaaaaggcaagtgatgaaccagactggtgtgaggtttgcgaaggcaaaatagaagaagtaaaagaaagagagtctccgtgggacaaaagacgagaaatgcgattttataaatgcaatgactgttgcacgactcttcatgttgaatgtttacttgggagagacatgtacatgaaacctggtaatagtgtaaaagattacatttctaagcactcactaggaattgaaggtacgcaatggacagatgttcgagtctttctcaacagttcgctctcccgaccaatatgcaccggatgtatgcgccgttgtctattcccaatagttttcaaaggctacaacacaatcttttgttcttgggagtgtattggatatggcgacacagtgtttgagcatccaacaatgaccggagtttcttctgcttttggccgtcttttcaaacaagataaaacccacaagcgtgttatcggcaccggaaccaaacttacagtgacccgtcagattcttgagcatctcgaaggcggtaatgtctcgaaagccgtctctgttctctttgcttctccagagccagttagttattggctatacgagcgtcttttccgttcttgttcctcgaaagctcttgttgtgcaagcccgtaaagtccaatctcacttagtaactttctctccgttgcctccgattttcctcttgaacagagccattgaggcttatggtaaatgtgggtgtgttgatgatgcacgagagctgttcgaggaaatgcctgaacgagatggtgggtcttggaacgctgtgattactgcttgtgcgcaaaacggtgtctctgatgaggtgtttcgtatgtttcgtagaatgaatagagatggcgtacgagctacggagacttcttttgctggtgttttaaagtcatgtggtttaatcttggacttgagattattgaggcagctgcattgtgctgtggtgaagtatgggtattcggggaatgtagatttggagacttcgattgttgatgtttatgggaagtgtcgggtgatgagtgatgcgagaagagtgtttgatgagattgtaaaccctagtgatgtatcttggaatgtgattgtgcggcggtatcttgagatggggtttaatgatgaggcagtggtgatgtttttcaagatgctggagttgaatgttcgacctttgaatcacacggtttctagtgtaatgttagcttgttcgagatccttggcccttgaggtgggaaaggtaatccatgccattgctgtgaaacttagtgttgtggcagatacagttgtttctacttctgtatttgatatgtatgtaaaatgtgacagattggagagtgctcgcagagtatttgaccaaactagatctaaagatttgaaatcttggacttcggcgatgtcgggatatgcaatgagtggtttaactagagaggcaagggagctctttgatttgatgcctgaacggaatatagtctcatggaacgcaatgttgggcggatatgtacatgcccatgaatgggatgaggcactggattttctcactttgatgcgccaggagattgaaaatattgataatgtcactcttgtgtggatcctaaatgtctgctctggtatatcagatgttcaaatggggaagcaagctcatggttttatctaccgacatggatatgatacgaatgtaattgtagccaatgcacttcttgatatgtatggaaaatgcgggaccttgcagagtgccaatatttggttccgccaaatgagtgaactaagggatgaggtttcatggaatgctttattgactggtgtagctcgagttggcaggagtgaacaagccttatctttctttgaagggatgcaagtggaggccaaaccaagcaaatacacactggcaacgctcttagcaggttgtgcgaacattcctgctttaaatttaggcaaagcaatccacggattcctgatcagagatggctataaaattgatgttgttatacggggtgcaatggttgacatgtattccaaatgccgatgtttcgactatgctatcgaagtattcaaagaggcagctacacgggacttgattctatggaactctattatccgtggatgttgtcgtaatggaagaagcaaggaggtctttgagttgttcatgcttttggaaaatgaaggagttaagcctgaccatgtcacctttttgggaatcttacaagcttgcatacgtgaaggtcatgtcgaactcggttttcagtatttcagttctatgagcaccaaatatcatatatcaccacaggttgagcattatgattgtatgattgaactctactgcaagtatggatgcttgcatcagcttgaagaatttctcctcttgatgccttttgatccacctatgcaaatgttgacaaggataaatgatgcttgccaaagataccgctggtcaaagttaggagcatgggctgctaaacggcttatgaatgatcattaccttcagccaccatga

SEQ ID NO: 28020 - protein, 1366 aa, Arabidopsis thaliana
  misc_feature (1)..(1366): Ceres Seq. ID no. 2171502
MSSVGVFDKVEMDEKSYLVYTLTQTKHPTSSAVESSGDDLPLQPLFSCPYARIRSHKFKVEKNYDGVNFFNFHPFNSYPHFPRTRTSYQQGESLLDYDHHNICKFPVVPLFWCNNKTPDSNEFECGGCEESKTSRSYYACLECGNKFHKQCVESPLEIKHPSHPFHSLRLYSHPTHMVCICCGRLVSNMFYHCVTCDLSMDPICAMEPIPFVVDHPKSHPHPITFFPTQATLACNICGLVKMLDPTYICIQCVFVIHKDCMGYPHVIRISRHQHRISFASSLPYGNLSCGVCHQRVDNNYGAYSCGKCDAYFVHSKCAFHRNVWDGKELEGVSEEDDIIDDGEPFERISDGVILHPYHSHHLRLEISKVYDENKYCRGCSFPIYEGQFYSCMECDFILHESCANAPRMKRHPLHPHPLTLNVATKELGNNEGVYHCNVCGRDGTGFFYEHHIGERRFRLDLRCASIREPFEYQCHKHPLCIASELEKKVRCQICKGKSYSKLNCMECDYIICFRCATFPYKVRYKHDSHFLRIRDGKKASDEPDWCEVCEGKIEEVKERESPWDKRREMRFYKCNDCCTTLHVECLLGRDMYMKPGNSVKDYISKHSLGIEGTQWTDVRVFLNSSLSRPICTGCMRRCLFPIVFKGYNTIFCSWECIGYGDTVFEHPTMTGVSSAFGRLFKQDKTHKRVIGTGTKLTVTRQILEHLEGGNVSKAVSVLFASPEPVSYWLYERLFRSCSSKALVVQARKVQSHLVTFSPLPPIFLLNRAIEAYGKCGCVDDARELFEEMPERDGGSWNAVITACAQNGVSDEVFRMFRRMNRDGVRATETSFAGVLKSCGLILDLRLLRQLHCAVVKYGYSGNVDLETSIVDVYGKCRVMSDARRVFDEIVNPSDVSWNVIVRRYLEMGFNDEAVVMFFKMLELNVRPLNHTVSSVMLACSRSLALEVGKVIHAIAVKLSVVADTVVSTSVFDMYVKCDRLESARRVFDQTRSKDLKSWTSAMSGYAMSGLTREARELFDLMPERNIVSWNAMLGGYVHAHEWDEALDFLTLMRQEIENIDNVTLVWILNVCSGISDVQMGKQAHGFIYRHGYDTNVIVANALLDMYGKCGTLQSANIWFRQMSELRDEVSWNALLTGVARVGRSEQALSFFEGMQVEAKPSKYTLATLLAGCANIPALNLGKAIHGFLIRDGYKIDVVIRGAMVDMYSKCRCFDYAIEVFKEAATRDLILWNSIIRGCCRNGRSKEVFELFMLLENEGVKPDHVTFLGILQACIREGHVELGFQYFSSMSTKYHISPQVEHYDCMIELYCKYGCLHQLEEFLLLMPFDPPMQMLTRINDACQRYRWSKLGAWAAKRLMNDHYLQPP

SEQ ID NO: 28021 - protein, 1355 aa, Arabidopsis thaliana
  misc_feature (1)..(1355): Ceres Seq. ID no. 2171503
MDEKSYLVYTLTQTKHPTSSAVESSGDDLPLQPLFSCPYARIRSHKFKVEKNYDGVNFFNFHPFNSYPHFPRTRTSYQQGESLLDYDHHNICKFPVVPLFWCNNKTPDSNEFECGGCEESKTSRSYYACLECGNKFHKQCVESPLEIKHPSHPFHSLRLYSHPTHMVCICCGRLVSNMFYHCVTCDLSMDPICAMEPIPFVVDHPKSHPHPITFFPTQATLACNICGLVKMLDPTYICIQCVFVIHKDCMGYPHVIRISRHQHRISFASSLPYGNLSCGVCHQRVDNNYGAYSCGKCDAYFVHSKCAFHRNVWDGKELEGVSEEDDIIDDGEPFERISDGVILHPYHSHHLRLEISKVYDENKYCRGCSFPIYEGQFYSCMECDFILHESCANAPRMKRHPLHPHPLTLNVATKELGNNEGVYHCNVCGRDGTGFFYEHHIGERRFRLDLRCASIREPFEYQCHKHPLCIASELEKKVRCQICKGKSYSKLNCMECDYIICFRCATFPYKVRYKHDSHFLRIRDGKKASDEPDWCEVCEGKIEEVKERESPWDKRREMRFYKCNDCCTTLHVECLLGRDMYMKPGNSVKDYISKHSLGIEGTQWTDVRVFLNSSLSRPICTGCMRRCLFPIVFKGYNTIFCSWECIGYGDTVFEHPTMTGVSSAFGRLFKQDKTHKRVIGTGTKLTVTRQILEHLEGGNVSKAVSVLFASPEPVSYWLYERLFRSCSSKALVVQARKVQSHLVTFSPLPPIFLLNRAIEAYGKCGCVDDARELFEEMPERDGGSWNAVITACAQNGVSDEVFRMFRRMNRDGVRATETSFAGVLKSCGLILDLRLLRQLHCAVVKYGYSGNVDLETSIVDVYGKCRVMSDARRVFDEIVNPSDVSWNVIVRRYLEMGFNDEAVVMFFKMLELNVRPLNHTVSSVMLACSRSLALEVGKVIHAIAVKLSVVADTVVSTSVFDMYVKCDRLESARRVFDQTRSKDLKSWTSAMSGYAMSGLTREARELFDLMPERNIVSWNAMLGGYVHAHEWDEALDFLTLMRQEIENIDNVTLVWILNVCSGISDVQMGKQAHGFIYRHGYDTNVIVANALLDMYGKCGTLQSANIWFRQMSELRDEVSWNALLTGVARVGRSEQALSFFEGMQVEAKPSKYTLATLLAGCANIPALNLGKAIHGFLIRDGYKIDVVIRGAMVDMYSKCRCFDYAIEVFKEAATRDLILWNSIIRGCCRNGRSKEVFELFMLLENEGVKPDHVTFLGILQACIREGHVELGFQYFSSMSTKYHISPQVEHYDCMIELYCKYGCLHQLEEFLLLMPFDPPMQMLTRINDACQRYRWSKLGAWAAKRLMNDHYLQPP

SEQ ID NO: 28022 - protein, 1190 aa, Arabidopsis thaliana
  misc_feature (1)..(1190): Ceres Seq. ID no. 2171504
MVCICCGRLVSNMFYHCVTCDLSMDPICAMEPIPFVVDHPKSHPHPITFFPTQATLACNICGLVKMLDPTYICIQCVFVIHKDCMGYPHVIRISRHQHRISFASSLPYGNLSCGVCHQRVDNNYGAYSCGKCDAYFVHSKCAFHRNVWDGKELEGVSEEDDIIDDGEPFERISDGVILHPYHSHHLRLEISKVYDENKYCRGCSFPIYEGQFYSCMECDFILHESCANAPRMKRHPLHPHPLTLNVATKELGNNEGVYHCNVCGRDGTGFFYEHHIGERRFRLDLRCASIREPFEYQCHKHPLCIASELEKKVRCQICKGKSYSKLNCMECDYIICFRCATFPYKVRYKHDSHFLRIRDGKKASDEPDWCEVCEGKIEEVKERESPWDKRREMRFYKCNDCCTTLHVECLLGRDMYMKPGNSVKDYISKHSLGIEGTQWTDVRVFLNSSLSRPICTGCMRRCLFPIVFKGYNTIFCSWECIGYGDTVFEHPTMTGVSSAFGRLFKQDKTHKRVIGTGTKLTVTRQILEHLEGGNVSKAVSVLFASPEPVSYWLYERLFRSCSSKALVVQARKVQSHLVTFSPLPPIFLLNRAIEAYGKCGCVDDARELFEEMPERDGGSWNAVITACAQNGVSDEVFRMFRRMNRDGVRATETSFAGVLKSCGLILDLRLLRQLHCAVVKYGYSGNVDLETSIVDVYGKCRVMSDARRVFDEIVNPSDVSWNVIVRRYLEMGFNDEAVVMFFKMLELNVRPLNHTVSSVMLACSRSLALEVGKVIHAIAVKLSVVADTVVSTSVFDMYVKCDRLESARRVFDQTRSKDLKSWTSAMSGYAMSGLTREARELFDLMPERNIVSWNAMLGGYVHAHEWDEALDFLTLMRQEIENIDNVTLVWILNVCSGISDVQMGKQAHGFIYRHGYDTNVIVANALLDMYGKCGTLQSANIWFRQMSELRDEVSWNALLTGVARVGRSEQALSFFEGMQVEAKPSKYTLATLLAGCANIPALNLGKAIHGFLIRDGYKIDVVIRGAMVDMYSKCRCFDYAIEVFKEAATRDLILWNSIIRGCCRNGRSKEVFELFMLLENEGVKPDHVTFLGILQACIREGHVELGFQYFSSMSTKYHISPQVEHYDCMIELYCKYGCLHQLEEFLLLMPFDPPMQMLTRINDACQRYRWSKLGAWAAKRLMNDHYLQPP

SEQ ID NO: 28023 - DNA, 837 bp, Arabidopsis thaliana
  misc_feature (1)..(837): Ceres Seq. ID no. 2172075
atgtattcttcatcatctgtatcaaaacgcttcgttctagtccctattgtggtcgtggtgaccacacaactcctcctggtacgtaacgtttcttcactaaaccttaccaattcgtatcttcaccacaaatgcgtagtcaatcaagggaaatacaagccaggaagcaagtacgagaaatccctcgatgatatcatccaaagcttttcgaataaagataaagattcgtatggttttcgtaccggttacagcatgaaggcctacggtaaagaacctgatatggtctccatcacctaccagtgccgtatcgactctcgtgggcccaagtgccagtcctgcgttgtcacggccggttatgagcttcttcgtaagagatgtccgagatataaagaggcaataatatggtacgaccaatgtcttgtggagttttcttcgttagatacttctgggcagatcaattacgacgacaacttctgtatgcctagcgcgaagaacctgatcggcaattcaatctctcttgaagaaaggttgcatctcctcaacaatcttacaaagatagccgtcacgaaaatagataaaaacatagaaggtataaaaaaaccagtactgtatgcggcgggggagaagagactcgggacgaaaagtctatacggaatggtgcaatgttcggctgacttatctgttcagggttgtaatgagtgtatgttatattatatagtgcattttcaagagtgctgggaaagtaaacaaggagtaagagttttgagtagaagctgtaactttaggtatgagctttacccttttattagccccaagggttcttactataccaagttctaa

SEQ ID NO: 28024 - protein, 278 aa, Arabidopsis thaliana
  misc_feature (1)..(278): Ceres Seq. ID no. 2172076
MYSSSSVSKRFVLVPIVVVVTTQLLLVRNVSSLNLTNSYLHHKCVVNQGKYKPGSKYEKSLDDIIQSFSNKDKDSYGFRTGYSMKAYGKEPDMVSITYQCRIDSRGPKCQSCVVTAGYELLRKRCPRYKEAIIWYDQCLVEFSSLDTSGQINYDDNFCMPSAKNLIGNSISLEERLHLLNNLTKIAVTKIDKNIEGIKKPVLYAAGEKRLGTKSLYGMVQCSADLSVQGCNECMLYYIVHFQECWESKQGVRVLSRSCNFRYELYPFISPKGSYYTKF

SEQ ID NO: 28025 - protein, 195 aa, Arabidopsis thaliana
  misc_feature (1)..(195): Ceres Seq. ID no. 2172077
MKAYGKEPDMVSITYQCRIDSRGPKCQSCVVTAGYELLRKRCPRYKEAIIWYDQCLVEFSSLDTSGQINYDDNFCMPSAKNLIGNSISLEERLHLLNNLTKIAVTKIDKNIEGIKKPVLYAAGEKRLGTKSLYGMVQCSADLSVQGCNECMLYYIVHFQECWESKQGVRVLSRSCNFRYELYPFISPKGSYYTKF

SEQ ID NO: 28026 - protein, 186 aa, Arabidopsis thaliana
  misc_feature (1)..(186): Ceres Seq. ID no. 2172078
MVSITYQCRIDSRGPKCQSCVVTAGYELLRKRCPRYKEAIIWYDQCLVEFSSLDTSGQINYDDNFCMPSAKNLIGNSISLEERLHLLNNLTKIAVTKIDKNIEGIKKPVLYAAGEKRLGTKSLYGMVQCSADLSVQGCNECMLYYIVHFQECWESKQGVRVLSRSCNFRYELYPFISPKGSYYTKF

SEQ ID NO: 28027 - DNA, 777 bp, Arabidopsis thaliana
  misc_feature (1)..(777): Ceres Seq. ID no. 2172123
atgtactcttcatattctctatcaaaacgcctcatttatgtccctatcctggccatccaattcctcctcgtacgcagcgtttcatcactaaaccttaccaatgagtatcttaaccacaaatgcttcgtcagtgaagggaaatataagcatggtgataagtacgagaataacctcaacgttctcaacaagaatgtcctttcttatgatcttactagcggttttctacacgtttctcatggcgagggtcctgattccgtcaccatcatattacaatgtcgtggcgactccttcgggtcgaattgccgctcttgctataccaccgccatcgacgggtttcataggagatgtcagagaaacaaagggggaattatatggtacgaccaatgttttcttgttatttctacgatcaaaccccaactcccaaggaagattgatttcaaaaacactttctcaatgcacaacccaaacaacgtgagcagtgaaccaggatcgtttgacaagatgacaagggatttcctctacaagctggtgcagaaagcctcttatccaaccgtggtcgaacaccagtctacatattatgctgcgggggagaaaaaactcgggaaaaggaagctgtatgcaatgatgcagtgtgcatcggacatattgcaatgtaaggtttgtttggaatggtgtatcagagagcttcccaagtgttgtgatggtaaacaaggagggagaattttgggtatgagttgtaatcttaggtatgagctatacccttttcttcggcgttaa

SEQ ID NO: 28028 - protein, 258 aa, Arabidopsis thaliana
  misc_feature (1)..(258): Ceres Seq. ID no. 2172124
MYSSYSLSKRLIYVPILAIQFLLVRSVSSLNLTNEYLNHKCFVSEGKYKHGDKYENNLNVLNKNVLSYDLTSGFLHVSHGEGPDSVTIILQCRGDSFGSNCRSCYTTAIDGFHRRCQRNKGGIIWYDQCFLVISTIKPQLPRKIDFKNTFSMHNPNNVSSEPGSFDKMTRDFLYKLVQKASYPTVVEHQSTYYAAGEKKLGKRKLYAMMQCASDILQCKVCLEWCIRELPKCCDGKQGGRILGMSCNLRYELYPFLRR

SEQ ID NO: 28029 - DNA, 1974 bp, Arabidopsis thaliana
  misc_feature (1)..(1974): Ceres Seq. ID no. 2172709
atgggtgggctttgttcaaggagttcatctgtaaataatgctcctggtggaacctttgcacatgttaatggtcatcatctcaataacaatgcctctgacttgaattctcattctggtgaaagtggacttaaagatgatccttctcctgttaccgagaatgttgatgataataagcatacatcggaatcgttttcgtttcctatagtctctagtggatctcatcctcaaaatatcgaggatgggattcctcggttatcgagggttttatctcagaaatctagatccactaagtctagacaagctgctgttgctaaggtttcggaagtaagctctcttttgggtagggctggtactatgggacttggtaaagctgtggatgtgttggatacactcgggagtagtatgacgaatctgaatcttagtggggggttttcttctgcgacgacggtgaaagggaataagatatcaatcttgtcttttgaagttgctaatactattgttaaaggcgccaatcttatgcattctctttcgaaagatagcattactcatttgaaagaggttgtgttaccttcagaaggtgttcagaacctgatatcgaaagacatggatgaactgttgagaattgctgctgctgataaaagggaagagttgaggattttttctggagaggtggtgcgttttgggaatcgttgcaaggatcctcaataccacaacctggatcgtttctttgacaggttgggctctgaatttacaccccagaaacacttgaaacaggaagcagagaccattatgcaccagatgatgtcatttgttcattttacagctgacttgtatcatgaactccatgcgctggataggtttgaacaagattaccaacgtaagatccaggaagaagagaacccaagcacagcacaacgaggtgtgggagataccctcgctatcttgagaactgaattaaagagtcagaagaagcatgttagaaacttaaagaaaaagtctctttggtctaggatcttggaagaggtgatggagaaactagtagatgttgtccatttcttgcatttagagattcacgaagcctttggtggtgcggatcctgataagcctgcaaatgacccgccaatcaatcataaaaaactgggctctgctggtcttgccttgcattacgcaaacatcattactcaaattgatactcttgtgtcccggtctagcactatgcctgcaagcacaagagatgctttgtaccaaggtttacccccaagcataaaatctgctttacgctccagaatacagtccttccaggttaaagaagagctcactgttcctcaaataaaagctgaaatggaaaaaacattgcagtggcttgttcctgttgctacaaacaccaccaaagcgcatcatggttttggatgggttggagaatgggcaagttccgggtcggaggcgaaccagagacctgcaggtcaaaccatactaaggatagatactcttcaccatgcagataaagaaaaaaccgaggcttacatattagacctggtggtgtggctccatcatctcgttacccaagtcagggccactacaggttatggcctaagatctcctgttaagtctccaatcagatcacctaaccagaaaacgatccaactctccagcggttcacacaacccgagtatgggtttgccattgctgactacggaggatcaagagatgcttagagatgtaagcaagcggagaaagacgccaggaataagcaagagccaagagtttgaaacggtggctaaagcacgtctttgtaagcaccataggctaagcaaaagcagtagccactcaccaatgatgggcgagatgatgaagaataagaaggatactttctcaaccagaagaccttcttctgttcccatcattgattttgacattgatcgcatgaaagctctcgatgtgattgatcgcgtggacaccattcgaagcttgtag

SEQ ID NO: 28030 - protein, 657 aa, Arabidopsis thaliana
  misc_feature (1)..(657): Ceres Seq. ID no. 2172710
MGGLCSRSSSVNNAPGGTFAHVNGHHLNNNASDLNSHSGESGLKDDPSPVTENVDDNKHTSESFSFPIVSSGSHPQNIEDGIPRLSRVLSQKSRSTKSRQAAVAKVSEVSSLLGRAGTMGLGKAVDVLDTLGSSMTNLNLSGGFSSATTVKGNKISILSFEVANTIVKGANLMHSLSKDSITHLKEVVLPSEGVQNLISKDMDELLRIAAADKREELRIFSGEVVRFGNRCKDPQYHNLDRFFDRLGSEFTPQKHLKQEAETIMHQMMSFVHFTADLYHELHALDRFEQDYQRKIQEEENPSTAQRGVGDTLAILRTELKSQKKHVRNLKKKSLWSRILEEVMEKLVDVVHFLHLEIHEAFGGADPDKPANDPPINHKKLGSAGLALHYANIITQIDTLVSRSSTMPASTRDALYQGLPPSIKSALRSRIQSFQVKEELTVPQIKAEMEKTLQWLVPVATNTTKAHHGFGWVGEWASSGSEANQRPAGQTILRIDTLHHADKEKTEAYILDLVVWLHHLVTQVRATTGYGLRSPVKSPIRSPNQKTIQLSSGSHNPSMGLPLLTTEDQEMLRDVSKRRKTPGISKSQEFETVAKARLCKHHRLSKSSSHSPMMGEMMKNKKDTFSTRRPSSVPIIDFDIDRMKALDVIDRVDTIRSL

SEQ ID NO: 28031 - protein, 539 aa, Arabidopsis thaliana
  misc_feature (1)..(539): Ceres Seq. ID no. 2172711
MGLGKAVDVLDTLGSSMTNLNLSGGFSSATTVKGNKISILSFEVANTIVKGANLMHSLSKDSITHLKEVVLPSEGVQNLISKDMDELLRIAAADKREELRIFSGEVVRFGNRCKDPQYHNLDRFFDRLGSEFTPQKHLKQEAETIMHQMMSFVHFTADLYHELHALDRFEQDYQRKIQEEENPSTAQRGVGDTLAILRTELKSQKKHVRNLKKKSLWSRILEEVMEKLVDVVHFLHLEIHEAFGGADPDKPANDPPINHKKLGSAGLALHYANIITQIDTLVSRSSTMPASTRDALYQGLPPSIKSALRSRIQSFQVKEELTVPQIKAEMEKTLQWLVPVATNTTKAHHGFGWVGEWASSGSEANQRPAGQTILRIDTLHHADKEKTEAYILDLVVWLHHLVTQVRATTGYGLRSPVKSPIRSPNQKTIQLSSGSHNPSMGLPLLTTEDQEMLRDVSKRRKTPGISKSQEFETVAKARLCKHHRLSKSSSHSPMMGEMMKNKKDTFSTRRPSSVPIIDFDIDRMKALDVIDRVDTIRSL

SEQ ID NO: 28032 - protein, 523 aa, Arabidopsis thaliana
  misc_feature (1)..(523): Ceres Seq. ID no. 2172712
MTNLNLSGGFSSATTVKGNKISILSFEVANTIVKGANLMHSLSKDSITHLKEVVLPSEGVQNLISKDMDELLRIAAADKREELRIFSGEVVRFGNRCKDPQYHNLDRFFDRLGSEFTPQKHLKQEAETIMHQMMSFVHFTADLYHELHALDRFEQDYQRKIQEEENPSTAQRGVGDTLAILRTELKSQKKHVRNLKKKSLWSRILEEVMEKLVDVVHFLHLEIHEAFGGADPDKPANDPPINHKKLGSAGLALHYANIITQIDTLVSRSSTMPASTRDALYQGLPPSIKSALRSRIQSFQVKEELTVPQIKAEMEKTLQWLVPVATNTTKAHHGFGWVGEWASSGSEANQRPAGQTILRIDTLHHADKEKTEAYILDLVVWLHHLVTQVRATTGYGLRSPVKSPIRSPNQKTIQLSSGSHNPSMGLPLLTTEDQEMLRDVSKRRKTPGISKSQEFETVAKARLCKHHRLSKSSSHSPMMGEMMKNKKDTFSTRRPSSVPIIDFDIDRMKALDVIDRVDTIRSL

SEQ ID NO: 28033 - DNA, 1134 bp, Arabidopsis thaliana
  misc_feature (1)..(1134): Ceres Seq. ID no. 2173491
atgagttttttcagatcaaagacttcaaaaactgaaacacaacaaccatcatcgtatggacaacaacaagacgctatgtactcatcttacggaaccgtgagtgacgaagtgttattacagattcatggatgcagagctcatctcatcaacggatccgaagctgtggagctagccgccggagacttcgagcttgtacaagtcttagacagcaacgtagccttagctatggtcgtgaggatcggaaatgacttacaatggccggtgattaaagacgagccagtggtgaaacttgactctcgtgactacctcttcacgttgccggttaaagatggagagccacttagttacggcatcacgtttttccctattgatgaaaatgacatcgtttttgtgaatagtatcgagttgctagacgatttcttgagagagaattcttgtttctcttcgtctccgtcttcttcttcgtcttcttcttcgtcttcttcttcgagtgttaacaatggaattgattggaaagagtttgcgcctaagattgaagattataacaatgttgtagctaaagctattgcaggaggtacagggcatatcattagagggatgtttaaatgcagtaatgcttacactaatcaggttcataaaggaggtgaaattatgattacgaaggctgagaaaaagaatggtgcctcgtcaaaaagaaatgcaaccacaaacaagaatcaaatcaacaagaaccttcaacgagtaaggaaattgtctagggcgacggagaaattgagcaagacaatgttgaatggtgtgggagtggtgagtggctcggtgatgggtccagttgtaaagtcgaagccagggaaagcttttttctcaatggttccaggggaggttctattggcttcacttgatgctcttaataaattactagacgctgctgaagccgcagagagacaaactctttctgctacgtccaaagctctacaagaatggttaggtgagagcgcgggagaagctacgaaagatgtactaggcacggttgggcacgcagccggcactgcgtggaacgtcttcaatatccgcaaagctttctctccttcctcttcagtcacatcggggatcctcaaaaacgcttcacgaaagtga

SEQ ID NO: 28034 - protein, 377 aa, Arabidopsis thaliana
  misc_feature (1)..(377): Ceres Seq. ID no. 2173492
MSFFRSKTSKTETQQPSSYGQQQDAMYSSYGTVSDEVLLQIHGCRAHLINGSEAVELAAGDFELVQVLDSNVALAMVVRIGNDLQWPVIKDEPVVKLDSRDYLFTLPVKDGEPLSYGITFFPIDENDIVFVNSIELLDDFLRENSCFSSSPSSSSSSSSSSSSSVNNGIDWKEFAPKIEDYNNVVAKAIAGGTGHIIRGMFKCSNAYTNQVHKGGEIMITKAEKKNGASSKRNATTNKNQINKNLQRVRKLSRATEKLSKTMLNGVGVVSGSVMGPVVKSKPGKAFFSMVPGEVLLASLDALNKLLDAAEAAERQTLSATSKALQEWLGESAGEATKDVLGTVGHAAGTAWNVFNIRKAFSPSSSVTSGILKNASRK

SEQ ID NO: 28035 - protein, 352 aa, Arabidopsis thaliana
  misc_feature (1)..(352): Ceres Seq. ID no. 2173493
MYSSYGTVSDEVLLQIHGCRAHLINGSEAVELAAGDFELVQVLDSNVALAMVVRIGNDLQWPVIKDEPVVKLDSRDYLFTLPVKDGEPLSYGITFFPIDENDIVFVNSIELLDDFLRENSCFSSSPSSSSSSSSSSSSSVNNGIDWKEFAPKIEDYNNVVAKAIAGGTGHIIRGMFKCSNAYTNQVHKGGEIMITKAEKKNGASSKRNATTNKNQINKNLQRVRKLSRATEKLSKTMLNGVGVVSGSVMGPVVKSKPGKAFFSMVPGEVLLASLDALNKLLDAAEAAERQTLSATSKALQEWLGESAGEATKDVLGTVGHAAGTAWNVFNIRKAFSPSSSVTSGILKNASRK

SEQ ID NO: 28036 - protein, 302 aa, Arabidopsis thaliana
  misc_feature (1)..(302): Ceres Seq. ID no. 2173494
MVVRIGNDLQWPVIKDEPVVKLDSRDYLFTLPVKDGEPLSYGITFFPIDENDIVFVNSIELLDDFLRENSCFSSSPSSSSSSSSSSSSSVNNGIDWKEFAPKIEDYNNVVAKAIAGGTGHIIRGMFKCSNAYTNQVHKGGEIMITKAEKKNGASSKRNATTNKNQINKNLQRVRKLSRATEKLSKTMLNGVGVVSGSVMGPVVKSKPGKAFFSMVPGEVLLASLDALNKLLDAAEAAERQTLSATSKALQEWLGESAGEATKDVLGTVGHAAGTAWNVFNIRKAFSPSSSVTSGILKNASRK

SEQ ID NO: 28037 - DNA, 630 bp, Arabidopsis thaliana
  misc_feature (1)..(630): Ceres Seq. ID no. 2174168
atggccaaagcatataacttggacgatttaggagaaacgagtgataacagtacactagaatgtttacaaacgaacaagtgtccaattcagatgcaagactcttcctctcacgaatcgcaacgtaacctccggtcaccggtgccggagaaaaccggaaagagttctaagactaaaaatgagcaaaaaggtgtttctaaacaaccaaattttcgtggggtcagaatgagacaatggggaaaatgggtgtctgaaattagagaaccaagaaagaaatcaagaatatggctcggtactttctctacgccggagatggcggcgcgtgcacacgacgtggcggctttagccatcaaaggtggctctgcccaccttaatttcccggagctagcttaccatttgccgagaccggctagcgcggaccctaaagacattcaagaagccgccgccgcagcagctgccgttgactggaaagcaccggagtctccgtctagcaccgtgacgtcatctccagtcgccgacgacgctttctccgatcttcctgatcttttgcttgacgtgaatgatcacaacaaaaacgatggattctgggactcgtttccgtacgaagatcctttcttcttggaaaattactag

SEQ ID NO: 28038 - protein, 209 aa, Arabidopsis thaliana
  misc_feature (1)..(209): Ceres Seq. ID no. 2174169
MAKAYNLDDLGETSDNSTLECLQTNKCPIQMQDSSSHESQRNLRSPVPEKTGKSSKTKNEQKGVSKQPNFRGVRMRQWGKWVSEIREPRKKSRIWLGTFSTPEMAARAHDVAALAIKGGSAHLNFPELAYHLPRPASADPKDIQEAAAAAAAVDWKAPESPSSTVTSSPVADDAFSDLPDLLLDVNDHNKNDGFWDSFPYEDPFFLENY

SEQ ID NO: 28039 - protein, 179 aa, Arabidopsis thaliana
  misc_feature (1)..(179): Ceres Seq. ID no. 2174170
MQDSSSHESQRNLRSPVPEKTGKSSKTKNEQKGVSKQPNFRGVRMRQWGKWVSEIREPRKKSRIWLGTFSTPEMAARAHDVAALAIKGGSAHLNFPELAYHLPRPASADPKDIQEAAAAAAAVDWKAPESPSSTVTSSPVADDAFSDLPDLLLDVNDHNKNDGFWDSFPYEDPFFLENY

SEQ ID NO: 28040 - protein, 135 aa, Arabidopsis thaliana
  misc_feature (1)..(135): Ceres Seq. ID no. 2174171
MRQWGKWVSEIREPRKKSRIWLGTFSTPEMAARAHDVAALAIKGGSAHLNFPELAYHLPRPASADPKDIQEAAAAAAAVDWKAPESPSSTVTSSPVADDAFSDLPDLLLDVNDHNKNDGFWDSFPYEDPFFLENY

SEQ ID NO: 28041 - DNA, 3984 bp, Arabidopsis thaliana
  misc_feature (1)..(3984): Ceres Seq. ID no. 2174607
atgggtgtcgaggattatcatgtgatagagcttgtcggtgaaggatcttttgggagggtttacaaaggaagacgcaagtataccggccagacggtggcgatgaagttcatcatgaaacaaggaaagactgacaaggatatacatagtctaaggcaagaaatcgagatattgcggaagctcaagcatgagaatatcattgaaatgctcgactcctttgaaaacgcacgagagttctgtgtcgtcactgagtttgcccaaggtgaattgtttgagattcttgaagatgacaagtgccttcccgaagagcaagttcaagcaatcgcaaagcaattggtaaaagcattagattacttgcattccaaccgtataattcaccgtgacatgaagccacaaaacattcttattggtgctggctctgtcgttaagctatgtgattttggttttgctcgagctatgtccaccaacactgtggttttgcgatccattaaaggcactccgctgtacatggcaccagagcttgtgaaagaacagccatacgatcgcactgtcgacctgtggtctcttggtgttatattgtacgagttatatgtaggtcagcctcccttctacaccaattctgtgtatgctctcattcgtcacattgttaaggatcctgtcaaatatcctgatgaaatgagtacttatttcgaaagctttttgaaaggattgctcaacaaggaaccccacagtcgattaacctggcctgctcttcgtgagcaccctttcgttaaagaaacacaagaagaagttgaagccagggaaatccatactgcagtagttgacaataaggcagcttggatgctcaaaggaaatggagggcaacagagaaatgtgttaaatgtcacagaaaagtgcgactcagtgaccctggttgaggacatgtctgctacaaaaggtctagctgacgttcagtcagatatgaagagtgctgtcaaagtaaattctccacccactgaggattttgtgggattcccaacccaagaggagataaaaagttcaggtaacccaacactggacaaattggaaaatacatcccgcactgttaaaggtgcacaagttataggtgaaaatgataaagcattggaccttgttttgctgtcactggaaagattttcaaaatcgccagattctaaaagggacaaagatgttgcttgctctgttcagtccctcaggatcatctccaatttggttgcaactcgtgccatagtttcagttggactgattgagaaaataacatgtgcactgctagactttactgacgctcttgttgggatgaaatcacccgagttcaacaacataataccaaagagtctttcagtcactaaaaacttggtagggcatgttgaaggcaataacatacatagttcttacatcaggcactggaccaaagtagtggaaatcttcatacaggtcgttagatgggaagaagagggaactggtagaattatatatgaggcctgttcttgcatcacaacaatgttatctcgagttgcccaagatcttaaatcttcaactcctgattctgtttctaaacagattttggagcatgctaacatgtctcgcatagttgatcatttgtgtctttgtctggcttcttctgggtcgagtttaacttccggctcttcgcaaatgttagcagctgcctgtgaagcttgtcgagcaatatggattctcatagatacttccgaaacattcttcaagaacgatgatgtaaacatattacctctagatgccttgcagaaccgtctctctcagcatgacataggaaacagtgagtggggtccgttatctgagaaacttgtcgatacagtgacaagagcatatctccgatcaaagcatgtgcaagttgctgttggtcattgccttcaccaacgagtggaggctccattggtttctgcaattcagctcttgtcaagatgctgccttcataatggaattctgcctagcatgctttgtggtcttcccagttcactgcctattacgaccgtagtcagtggtggagaggatggtacagttatttcagaaatattttctatactatcatacgcaacattatcaagcaaagaccagcaaacaggagaaaaagataacttcgagggcagactaaacaatctggtgttccattcatgccttatgttggcaacagttgctcaatgtttgaagttaactgggagaaattctgttctgttaatgcttacaacttctccaaagaagcatcaacatcgtctttctgctatagccaatcacattgcctcagatgataaaatcgaagcttctcttcagaatcactctgcttcagctatgcttgctctcgcatctattctcgctcttgaaaaaggatcttctgctggatcttctgtctctgagctagtggtgtctctgattcctcgagctactaagctttgttatcatcttaggcctatgccaagtaatgaaggtgaagtcatctctcattctgccaattatgccaaatggcacggacttctggatggatgtatcggtttattagaatccagattgaagtggggtggacctctagctgtgcagcagcttattgctagtggtacgccattgcttctcataaatctgttagctggcaaactttcaaatgcttccccagaggacatcaagaagacatccaaccggattggcttgtcccctattggcgttgtatggactatttcgtccatatgccactgtctttcgggtggcacaactttccgtcaggttcttgtgaaaatcgaaaccatgaagctaattacttgtttactatctgatgctcatatcaagctagtaaagagctggggaggtccggggggaggaaaagatggggtcagagagacaataaatgtgataattgatctcctagcatttccttttgttgctctgcaaagtcaaccaggttcgttatctgccacagcttctgtaaatagtggattcattctcaacattggctctcctggtgtgagagtatgcatggaagatagagatttgctaaaagctatagaagaggatatggacaaatacataatagtcctcctggaggtgggagtgccgagtttaatcctacgttgcttggatcatttggaattaaaagatttagtaaggcccgttgcttttcttgccaaaatggtgggtcgtccacgtcttgctgtagatctcgtgagcaaaggtctgttagatcctaatagaatgaaaaaattactcaaccaatcaagtccaagagaagtcatacttgatattttgatgatcatatctgatctatcgaggatggataaggctttttataaatacatcggcgaggcttctgttttacagcctttgaaagaatatcttacccatgtggatccaaatatacgtgcaaaagcttgtagtgctcttggcaatatgtgcagacacaatggatatttctacagcgctcttgcggaacatcaaatcatcggtctcctcattgatcgatgcgctgatccggacaaacgaacacagaaattcgcttgttttgctattggaaatgcggcttaccataacgacacgctgtatgaagagctaagaagatctataacgcagctagcaaacgttttgaccacggctgaagaagacaagacaaaagcaaacgcggctggtgcattgagcaaccttgtccgaaactccaacaaactctgtgaagatatagtctccaagggagctttacaaacgttactgaggctagttgcggattgctcgactcttgccttgaacccaagcaagaaagagacagcgagtgagtcaccgctcaagattgcactcttctcattggctaaaatgtgttcgaaccaccagatttgcagacagtttgtgaagtcatcagagttgttcccggtcattgcaaggcttaaacaatcccctgaggctaacattgctcactatgcttcagttattgtcgccaaagtcagtggtgagtcttaa

SEQ ID NO: 28042 - protein, 1327 aa, Arabidopsis thaliana
  misc_feature (1)..(1327): Ceres Seq. ID no. 2174608
MGVEDYHVIELVGEGSFGRVYKGRRKYTGQTVAMKFIMKQGKTDKDIHSLRQEIEILRKLKHENIIEMLDSFENAREFCVVTEFAQGELFEILEDDKCLPEEQVQAIAKQLVKALDYLHSNRIIHRDMKPQNILIGAGSVVKLCDFGFARAMSTNTVVLRSIKGTPLYMAPELVKEQPYDRTVDLWSLGVILYELYVGQPPFYTNSVYALIRHIVKDPVKYPDEMSTYFESFLKGLLNKEPHSRLTWPALREHPFVKETQEEVEAREIHTAVVDNKAAWMLKGNGGQQRNVLNVTEKCDSVTLVEDMSATKGLADVQSDMKSAVKVNSPPTEDFVGFPTQEEIKSSGNPTLDKLENTSRTVKGAQVIGENDKALDLVLLSLERFSKSPDSKRDKDVACSVQSLRIISNLVATRAIVSVGLIEKITCALLDFTDALVGMKSPEFNNIIPKSLSVTKNLVGHVEGNNIHSSYIRHWTKVVEIFIQVVRWEEEGTGRIIYEACSCITTMLSRVAQDLKSSTPDSVSKQILEHANMSRIVDHLCLCLASSGSSLTSGSSQMLAAACEACRAIWILIDTSETFFKNDDVNILPLDALQNRLSQHDIGNSEWGPLSEKLVDTVTRAYLRSKHVQVAVGHCLHQRVEAPLVSAIQLLSRCCLHNGILPSMLCGLPSSLPITTVVSGGEDGTVISEIFSILSYATLSSKDQQTGEKDNFEGRLNNLVFHSCLMLATVAQCLKLTGRNSVLLMLTTSPKKHQHRLSAIANHIASDDKIEASLQNHSASAMLALASILALEKGSSAGSSVSELVVSLIPRATKLCYHLRPMPSNEGEVISHSANYAKWHGLLDGCIGLLESRLKWGGPLAVQQLIASGTPLLLINLLAGKLSNASPEDIKKTSNRIGLSPIGVVWTISSICHCLSGGTTFRQVLVKIETMKLITCLLSDAHIKLVKSWGGPGGGKDGVRETINVIIDLLAFPFVALQSQPGSLSATASVNSGFILNIGSPGVRVCMEDRDLLKAIEEDMDKYIIVLLEVGVPSLILRCLDHLELKDLVRPVAFLAKMVGRPRLAVDLVSKGLLDPNRMKKLLNQSSPREVILDILMIISDLSRMDKAFYKYIGEASVLQPLKEYLTHVDPNIRAKACSALGNMCRHNGYFYSALAEHQIIGLLIDRCADPDKRTQKFACFAIGNAAYHNDTLYEELRRSITQLANVLTTAEEDKTKANAAGALSNLVRNSNKLCEDIVSKGALQTLLRLVADCSTLALNPSKKETASESPLKIALFSLAKMCSNHQICRQFVKSSELFPVIARLKQSPEANIAHYASVIVAKVSGES

SEQ ID NO: 28043 - protein, 1294 aa, Arabidopsis thaliana
  misc_feature (1)..(1294): Ceres Seq. ID no. 2174609
MKFIMKQGKTDKDIHSLRQEIEILRKLKHENIIEMLDSFENAREFCVVTEFAQGELFEILEDDKCLPEEQVQAIAKQLVKALDYLHSNRIIHRDMKPQNILIGAGSVVKLCDFGFARAMSTNTVVLRSIKGTPLYMAPELVKEQPYDRTVDLWSLGVILYELYVGQPPFYTNSVYALIRHIVKDPVKYPDEMSTYFESFLKGLLNKEPHSRLTWPALREHPFVKETQEEVEAREIHTAVVDNKAAWMLKGNGGQQRNVLNVTEKCDSVTLVEDMSATKGLADVQSDMKSAVKVNSPPTEDFVGFPTQEEIKSSGNPTLDKLENTSRTVKGAQVIGENDKALDLVLLSLERFSKSPDSKRDKDVACSVQSLRIISNLVATRAIVSVGLIEKITCALLDFTDALVGMKSPEFNNIIPKSLSVTKNLVGHVEGNNIHSSYIRHWTKVVEIFIQVVRWEEEGTGRIIYEACSCITTMLSRVAQDLKSSTPDSVSKQILEHANMSRIVDHLCLCLASSGSSLTSGSSQMLAAACEACRAIWILIDTSETFFKNDDVNILPLDALQNRLSQHDIGNSEWGPLSEKLVDTVTRAYLRSKHVQVAVGHCLHQRVEAPLVSAIQLLSRCCLHNGILPSMLCGLPSSLPITTVVSGGEDGTVISEIFSILSYATLSSKDQQTGEKDNFEGRLNNLVFHSCLMLATVAQCLKLTGRNSVLLMLTTSPKKHQHRLSAIANHIASDDKIEASLQNHSASAMLALASILALEKGSSAGSSVSELVVSLIPRATKLCYHLRPMPSNEGEVISHSANYAKWHGLLDGCIGLLESRLKWGGPLAVQQLIASGTPLLLINLLAGKLSNASPEDIKKTSNRIGLSPIGVVWTISSICHCLSGGTTFRQVLVKIETMKLITCLLSDAHIKLVKSWGGPGGGKDGVRETINVIIDLLAFPFVALQSQPGSLSATASVNSGFILNIGSPGVRVCMEDRDLLKAIEEDMDKYIIVLLEVGVPSLILRCLDHLELKDLVRPVAFLAKMVGRPRLAVDLVSKGLLDPNRMKKLLNQSSPREVILDILMIISDLSRMDKAFYKYIGEASVLQPLKEYLTHVDPNIRAKACSALGNMCRHNGYFYSALAEHQIIGLLIDRCADPDKRTQKFACFAIGNAAYHNDTLYEELRRSITQLANVLTTAEEDKTKANAAGALSNLVRNSNKLCEDIVSKGALQTLLRLVADCSTLALNPSKKETASESPLKIALFSLAKMCSNHQICRQFVKSSELFPVIARLKQSPEANIAHYASVIVAKVSGES

SEQ ID NO: 28044 - protein, 1290 aa, Arabidopsis thaliana
  misc_feature (1)..(1290): Ceres Seq. ID no. 2174610
MKQGKTDKDIHSLRQEIEILRKLKHENIIEMLDSFENAREFCVVTEFAQGELFEILEDDKCLPEEQVQAIAKQLVKALDYLHSNRIIHRDMKPQNILIGAGSVVKLCDFGFARAMSTNTVVLRSIKGTPLYMAPELVKEQPYDRTVDLWSLGVILYELYVGQPPFYTNSVYALIRHIVKDPVKYPDEMSTYFESFLKGLLNKEPHSRLTWPALREHPFVKETQEEVEAREIHTAVVDNKAAWMLKGNGGQQRNVLNVTEKCDSVTLVEDMSATKGLADVQSDMKSAVKVNSPPTEDFVGFPTQEEIKSSGNPTLDKLENTSRTVKGAQVIGENDKALDLVLLSLERFSKSPDSKRDKDVACSVQSLRIISNLVATRAIVSVGLIEKITCALLDFTDALVGMKSPEFNNIIPKSLSVTKNLVGHVEGNNIHSSYIRHWTKVVEIFIQVVRWEEEGTGRIIYEACSCITTMLSRVAQDLKSSTPDSVSKQILEHANMSRIVDHLCLCLASSGSSLTSGSSQMLAAACEACRAIWILIDTSETFFKNDDVNILPLDALQNRLSQHDIGNSEWGPLSEKLVDTVTRAYLRSKHVQVAVGHCLHQRVEAPLVSAIQLLSRCCLHNGILPSMLCGLPSSLPITTVVSGGEDGTVISEIFSILSYATLSSKDQQTGEKDNFEGRLNNLVFHSCLMLATVAQCLKLTGRNSVLLMLTTSPKKHQHRLSAIANHIASDDKIEASLQNHSASAMLALASILALEKGSSAGSSVSELVVSLIPRATKLCYHLRPMPSNEGEVISHSANYAKWHGLLDGCIGLLESRLKWGGPLAVQQLIASGTPLLLINLLAGKLSNASPEDIKKTSNRIGLSPIGVVWTISSICHCLSGGTTFRQVLVKIETMKLITCLLSDAHIKLVKSWGGPGGGKDGVRETINVIIDLLAFPFVALQSQPGSLSATASVNSGFILNIGSPGVRVCMEDRDLLKAIEEDMDKYIIVLLEVGVPSLILRCLDHLELKDLVRPVAFLAKMVGRPRLAVDLVSKGLLDPNRMKKLLNQSSPREVILDILMIISDLSRMDKAFYKYIGEASVLQPLKEYLTHVDPNIRAKACSALGNMCRHNGYFYSALAEHQIIGLLIDRCADPDKRTQKFACFAIGNAAYHNDTLYEELRRSITQLANVLTTAEEDKTKANAAGALSNLVRNSNKLCEDIVSKGALQTLLRLVADCSTLALNPSKKETASESPLKIALFSLAKMCSNHQICRQFVKSSELFPVIARLKQSPEANIAHYASVIVAKVSGES

SEQ ID NO: 28045 - DNA, 3057 bp, Arabidopsis thaliana
  misc_feature (1)..(3057): Ceres Seq. ID no. 2178739
atggggccttctgcccatctcgtctacgctataggagttatcatcatggcaacaatggttgcggcatatgagccatacacagatagctcacctccaccatactctgtgccacttcccaaagtggaatacaaatctcctccattaccagatgtttacagttctccaccaccaccactagaatactctccagcgcctaaagttgattataaatctccaccaccaccatactattcaccatctcctaaagttgagtacaagtctcctccaccaccatatgtctacaactctccaccaccaccatattactctccatccccaaaggtagactacaagtctcctccaccaccatatgtttacagttcgccaccaccaccaatctattcaccatctcctaaggtagactacaaatctcctccaccaccatatgtttacagttccccaccaccaccatactattcgccatcccctaaggtggagtacaaatctccaccatcaccgtatgtttacaactctccaccaccatcatattattcaccatcccctaaggtagattacaaatctcctccaccaccatatgtttatagttctccaccaccaccatattactctccatcccctaaggttgtatacaagtctcctcctccaccatatgtttacagttctccaccaccaccatactactcaccatcacctaaggtagactacaagtctccaccaccaccatacgtctacagctcaccaccaccaccatactactcaccttctcctaagatagtctacaaatctcccccaccaccgtacgtctacagctccccaccacccccatactactcaccttcccctaaggtagactacaaatctcccccaccaccgtatgtctacagttctccaccaccaccatactactctccatcccctaaggttgtatacaagtctcctcctccaccatatgtttacagttccccaccaccaccatactactcaccaaccccgaaggtagactacaaatctcctcctccaccatatgtttacagttctccaccaccaccatactactcaccatcacctaaggtagactacaagtctccaccaccaccatacgtctacagctcaccaccaccaccatactactcaccttctcctaagatagtctacaaatctcccccaccaccgtacgtctacagctccccaccacccccatactacacaccttcaccaaaggttgtatacaagtctcctcctccaccatatgtttacagttccccaccaccaccatactactcaccatcccctaaggtagactacaaatctcctcctccaccatatgtttacagttctcctccaccaccatactactcgccatctccaaaggttgtatacaaatctcctcctccaccatatgtttacagttctcctccaccaccatactattcaccatcccctaaggtagactacaagtctcctccaccaccatatgtttacagttctccaccaccaccgtactactctccttcaccaaaggttttatacaagtctcccccaccaccgtatgtctacagttctccaccaccaccatactactctccttctcctaaggtagtctacaagtctcccccaccaccgtatgtttacagttctccaccacctccatactactctccttctcctaaggtagtctacaagtctcccccaccaccgtatgtctacagttctccaccaccaccatactactctccttctcctaaggtagtctacaagtctcccccaccaccatacgtttacagttctccaccaccaccatactactccccttctcctaaagtatactacaagtctcctccatcaccataccacgcaccatcccctaaggttctatacaaatctccaccacaccctcatgtatgtgtctgtccaccacctcctccatgttattctccatctccaaaggttgtgtacaagtcctccccaccaccgtacgtttacagttctccaccaccaccatatcactctccttctcctaaggtacactacaagtctcccccaccaccgtatgtctacagttctccaccaccaccatattactctccttcccctaaggtacactacaagtctcccccaccaccgtatgtctatagttctccaccaccaccatactactctccttctcctaaggtagtctacaagtctcccccaccaccgtatgtttacagttctccaccacctccatactattctccttctcctaaggtagtctacaagtctcccccaccaccgtatgtctacagttctccaccaccaccatactactctccttctcctaaggtagtctacaagtctcccccaccaccatacgtttacagttctccaccaccaccatattattctccttctcctaaggtagtctacaagtctcctccaccaccgtatgtctacagttctccaccaccaccatactactctccttctcctaaggtagtctacaagtctcccccaccaccgtacgtctacagctcaccaccaccaccatactactctccttctcctaaagtagtttacaagtctcccccaccaccgtacgtctacagctcaccaccaccaccatactactcaccttcccctaaggtagactacaaatctcccccaccaccgtacgtctacagctcaccaccaccaccatactactcaccttcccctaaagtagactacaaatctcctccaccaccgtacgtctatagctcaccaccaccaccatactactcaccttccccgaaggtagactacaaatctcccccaccaccgtatgtctacagctcacccccaccaccatactactcacctgcccctaaggtagattacaaatctccaccaccaccatacgtctatagttcaccaccaccaccatactactcaccttcccctaaggttgactacaaatctcctccaccaccatactactcaccttcccctaaggttgactacaaatctcctccaccaccatatgtctacagttctccaccaccaccatcatactcaccttctccaaaaactgagtactaa

SEQ ID NO: 28046 - protein, 1018 aa, Arabidopsis thaliana
  misc_feature (1)..(1018): Ceres Seq. ID no. 2178740
MGPSAHLVYAIGVIIMATMVAAYEPYTDSSPPPYSVPLPKVEYKSPPLPDVYSSPPPPLEYSPAPKVDYKSPPPPYYSPSPKVEYKSPPPPYVYNSPPPPYYSPSPKVDYKSPPPPYVYSSPPPPIYSPSPKVDYKSPPPPYVYSSPPPPYYSPSPKVEYKSPPSPYVYNSPPPSYYSPSPKVDYKSPPPPYVYSSPPPPYYSPSPKVVYKSPPPPYVYSSPPPPYYSPSPKVDYKSPPPPYVYSSPPPPYYSPSPKIVYKSPPPPYVYSSPPPPYYSPSPKVDYKSPPPPYVYSSPPPPYYSPSPKVVYKSPPPPYVYSSPPPPYYSPTPKVDYKSPPPPYVYSSPPPPYYSPSPKVDYKSPPPPYVYSSPPPPYYSPSPKIVYKSPPPPYVYSSPPPPYYTPSPKVVYKSPPPPYVYSSPPPPYYSPSPKVDYKSPPPPYVYSSPPPPYYSPSPKVVYKSPPPPYVYSSPPPPYYSPSPKVDYKSPPPPYVYSSPPPPYYSPSPKVLYKSPPPPYVYSSPPPPYYSPSPKVVYKSPPPPYVYSSPPPPYYSPSPKVVYKSPPPPYVYSSPPPPYYSPSPKVVYKSPPPPYVYSSPPPPYYSPSPKVYYKSPPSPYHAPSPKVLYKSPPHPHVCVCPPPPPCYSPSPKVVYKSSPPPYVYSSPPPPYHSPSPKVHYKSPPPPYVYSSPPPPYYSPSPKVHYKSPPPPYVYSSPPPPYYSPSPKVVYKSPPPPYVYSSPPPPYYSPSPKVVYKSPPPPYVYSSPPPPYYSPSPKVVYKSPPPPYVYSSPPPPYYSPSPKVVYKSPPPPYVYSSPPPPYYSPSPKVVYKSPPPPYVYSSPPPPYYSPSPKVVYKSPPPPYVYSSPPPPYYSPSPKVDYKSPPPPYVYSSPPPPYYSPSPKVDYKSPPPPYVYSSPPPPYYSPSPKVDYKSPPPPYVYSSPPPPYYSPAPKVDYKSPPPPYVYSSPPPPYYSPSPKVDYKSPPPPYYSPSPKVDYKSPPPPYVYSSPPPPSYSPSPKTEY

SEQ ID NO: 28047 - protein, 1003 aa, Arabidopsis thaliana
  misc_feature (1)..(1003): Ceres Seq. ID no. 2178741
MATMVAAYEPYTDSSPPPYSVPLPKVEYKSPPLPDVYSSPPPPLEYSPAPKVDYKSPPPPYYSPSPKVEYKSPPPPYVYNSPPPPYYSPSPKVDYKSPPPPYVYSSPPPPIYSPSPKVDYKSPPPPYVYSSPPPPYYSPSPKVEYKSPPSPYVYNSPPPSYYSPSPKVDYKSPPPPYVYSSPPPPYYSPSPKVVYKSPPPPYVYSSPPPPYYSPSPKVDYKSPPPPYVYSSPPPPYYSPSPKIVYKSPPPPYVYSSPPPPYYSPSPKVDYKSPPPPYVYSSPPPPYYSPSPKVVYKSPPPPYVYSSPPPPYYSPTPKVDYKSPPPPYVYSSPPPPYYSPSPKVDYKSPPPPYVYSSPPPPYYSPSPKIVYKSPPPPYVYSSPPPPYYTPSPKVVYKSPPPPYVYSSPPPPYYSPSPKVDYKSPPPPYVYSSPPPPYYSPSPKVVYKSPPPPYVYSSPPPPYYSPSPKVDYKSPPPPYVYSSPPPPYYSPSPKVLYKSPPPPYVYSSPPPPYYSPSPKVVYKSPPPPYVYSSPPPPYYSPSPKVVYKSPPPPYVYSSPPPPYYSPSPKVVYKSPPPPYVYSSPPPPYYSPSPKVYYKSPPSPYHAPSPKVLYKSPPHPHVCVCPPPPPCYSPSPKVVYKSSPPPYVYSSPPPPYHSPSPKVHYKSPPPPYVYSSPPPPYYSPSPKVHYKSPPPPYVYSSPPPPYYSPSPKVVYKSPPPPYVYSSPPPPYYSPSPKVVYKSPPPPYVYSSPPPPYYSPSPKVVYKSPPPPYVYSSPPPPYYSPSPKVVYKSPPPPYVYSSPPPPYYSPSPKVVYKSPPPPYVYSSPPPPYYSPSPKVVYKSPPPPYVYSSPPPPYYSPSPKVDYKSPPPPYVYSSPPPPYYSPSPKVDYKSPPPPYVYSSPPPPYYSPSPKVDYKSPPPPYVYSSPPPPYYSPAPKVDYKSPPPPYVYSSPPPPYYSPSPKVDYKSPPPPYYSPSPKVDYKSPPPPYVYSSPPPPSYSPSPKTEY

SEQ ID NO: 28048 - protein, 1000 aa, Arabidopsis thaliana
  misc_feature (1)..(1000): Ceres Seq. ID no. 2178742
MVAAYEPYTDSSPPPYSVPLPKVEYKSPPLPDVYSSPPPPLEYSPAPKVDYKSPPPPYYSPSPKVEYKSPPPPYVYNSPPPPYYSPSPKVDYKSPPPPYVYSSPPPPIYSPSPKVDYKSPPPPYVYSSPPPPYYSPSPKVEYKSPPSPYVYNSPPPSYYSPSPKVDYKSPPPPYVYSSPPPPYYSPSPKVVYKSPPPPYVYSSPPPPYYSPSPKVDYKSPPPPYVYSSPPPPYYSPSPKIVYKSPPPPYVYSSPPPPYYSPSPKVDYKSPPPPYVYSSPPPPYYSPSPKVVYKSPPPPYVYSSPPPPYYSPTPKVDYKSPPPPYVYSSPPPPYYSPSPKVDYKSPPPPYVYSSPPPPYYSPSPKIVYKSPPPPYVYSSPPPPYYTPSPKVVYKSPPPPYVYSSPPPPYYSPSPKVDYKSPPPPYVYSSPPPPYYSPSPKVVYKSPPPPYVYSSPPPPYYSPSPKVDYKSPPPPYVYSSPPPPYYSPSPKVLYKSPPPPYVYSSPPPPYYSPSPKVVYKSPPPPYVYSSPPPPYYSPSPKVVYKSPPPPYVYSSPPPPYYSPSPKVVYKSPPPPYVYSSPPPPYYSPSPKVYYKSPPSPYHAPSPKVLYKSPPHPHVCVCPPPPPCYSPSPKVVYKSSPPPYVYSSPPPPYHSPSPKVHYKSPPPPYVYSSPPPPYYSPSPKVHYKSPPPPYVYSSPPPPYYSPSPKVVYKSPPPPYVYSSPPPPYYSPSPKVVYKSPPPPYVYSSPPPPYYSPSPKVVYKSPPPPYVYSSPPPPYYSPSPKVVYKSPPPPYVYSSPPPPYYSPSPKVVYKSPPPPYVYSSPPPPYYSPSPKVVYKSPPPPYVYSSPPPPYYSPSPKVDYKSPPPPYVYSSPPPPYYSPSPKVDYKSPPPPYVYSSPPPPYYSPSPKVDYKSPPPPYVYSSPPPPYYSPAPKVDYKSPPPPYVYSSPPPPYYSPSPKVDYKSPPPPYYSPSPKVDYKSPPPPYVYSSPPPPSYSPSPKTEY

SEQ ID NO: 28049 - DNA, 846 bp, Arabidopsis thaliana
  misc_feature (1)..(846): Ceres Seq. ID no. 2178940
atgggttcctccatattattggttttgtttactctcatggttatgctgtccatttcttatgaaccactcaaatggatgggcataaacgcgagccatgtaccggaaacttgctaccatcattgtaaccagacgttcgagagtagtcgccaatgctttaaatggtgtcaagaattagctcgtaaagatgagtacaagatttatgggtacccttactcaaccaacacaaggcgtgtcctcgccgttcttcatgagaaaggtctctcttacgatcccatcaccgtcaacttgatagccggtgaccagaagaagccgagttttctcgctatcaatccatttggtcaagtcccagttttcctagacgggggtcttaagttgactgaatctcgagctatatctgaatacatagcgactgtccataaatcaagaggcacacaacttctgaattacaaaagctacaaaacaatgggaacacaaagaatgtggatggctatcgaatcttttgagtttgatccactcacatcaacactgacctgggaacaatccatcaagcctatgtacggtctaaagacggactataaggttgtgaatgaaaccgaggcgaagctagagaaggttctagatatatacgaagaacgactcaaaaattctagcttcttggctagtaacagcttcacaatggctgatctttatcaccttcctaatatacaataccttatggacacacatacaaagagaatgtttgtaaaccggccaagcgtgcgccggtgggtggctgagatcacagctagaccggcttggaagagggcatgtgatgtgaaggcttggtaccataagaagaagaattaa

SEQ ID NO: 28050 - protein, 281 aa, Arabidopsis thaliana
  misc_feature (1)..(281): Ceres Seq. ID no. 2178941
MGSSILLVLFTLMVMLSISYEPLKWMGINASHVPETCYHHCNQTFESSRQCFKWCQELARKDEYKIYGYPYSTNTRRVLAVLHEKGLSYDPITVNLIAGDQKKPSFLAINPFGQVPVFLDGGLKLTESRAISEYIATVHKSRGTQLLNYKSYKTMGTQRMWMAIESFEFDPLTSTLTWEQSIKPMYGLKTDYKVVNETEAKLEKVLDIYEERLKNSSFLASNSFTMADLYHLPNIQYLMDTHTKRMFVNRPSVRRWVAEITARPAWKRACDVKAWYHKKKN

SEQ ID NO: 28051 - protein, 269 aa, Arabidopsis thaliana
  misc_feature (1)..(269): Ceres Seq. ID no. 2178942
MVMLSISYEPLKWMGINASHVPETCYHHCNQTFESSRQCFKWCQELARKDEYKIYGYPYSTNTRRVLAVLHEKGLSYDPITVNLIAGDQKKPSFLAINPFGQVPVFLDGGLKLTESRAISEYIATVHKSRGTQLLNYKSYKTMGTQRMWMAIESFEFDPLTSTLTWEQSIKPMYGLKTDYKVVNETEAKLEKVLDIYEERLKNSSFLASNSFTMADLYHLPNIQYLMDTHTKRMFVNRPSVRRWVAEITARPAWKRACDVKAWYHKKKN

SEQ ID NO: 28052 - protein, 267 aa, Arabidopsis thaliana
  misc_feature (1)..(267): Ceres Seq. ID no. 2178943
MLSISYEPLKWMGINASHVPETCYHHCNQTFESSRQCFKWCQELARKDEYKIYGYPYSTNTRRVLAVLHEKGLSYDPITVNLIAGDQKKPSFLAINPFGQVPVFLDGGLKLTESRAISEYIATVHKSRGTQLLNYKSYKTMGTQRMWMAIESFEFDPLTSTLTWEQSIKPMYGLKTDYKVVNETEAKLEKVLDIYEERLKNSSFLASNSFTMADLYHLPNIQYLMDTHTKRMFVNRPSVRRWVAEITARPAWKRACDVKAWYHKKKN

SEQ ID NO: 28053 - DNA, 1674 bp, Arabidopsis thaliana
  misc_feature (1)..(1674): Ceres Seq. ID no. 2181359
atgtcgatctccggcgctgttgatgaagctgggactccacttctcgctgtcaccgtcgactacaggaacaaacccgccgtcaaatcttcctccggtggctggagatccgccggattcatcatcggtgtggaggttgctgagcgatttgcttactatgggatatcgtcgaatctgataacgtatttgaccggaccactgggacaatcgacggcggctgcggcggctaacgtgaacgcttggtctggaacggcgtcgttgcttcctctccttggtgcttttgtcgctgactcgtttctaggtcgtttccggacaatcctcgccgcctctgctctctatatagtggggctgggtgtattgactttatctgcaatgattccttcagactgcaaagtttcgaatctactctcgtcatgctctcctcgatttcaagtaattacattctttagtgcattgtatctagtggctttagctcaaggtggtcacaagccgtgtgttcaggcttttggagcggatcagtttgatgaaaaggaacctgaagagtgcaaagcaaagagttctttctttaattggtggtattttggtatgtgctttgggacgttaacaactctatgggtgttgaattatatccaagataatctaagttgggcgttaggctttggtattccatgcattgctatggtagttgctttggttgttctcttgcttggaacctgcacttatcggttcagtattcgaagagaagatcaaagtccttttgtgaggattggaaatgtttatgtagcggctgtaaagaactggagtgtttcagctttagatgtagctgctgcagaggagagacttggtcttgtgtcttgcagtagctctcagcaatttagttttctcaacaaagctctggtcgcaaagaatggttcttgtagtatagatgaacttgaagaagcaaaatcagtgcttaggttagctccgatatggttaacatgcttggtttatgcggttgtgtttgcgcagtctccaactttcttcaccaaacaaggagctacaatggagagatcaatcacacctggttacaagatctctccggctaccctccagtccttcatcagcctctctatagtcatcttcatcccaatctacgaccgtgtactaatcccaattgcaagatcatttacacataaaccaggcggaatcacaatgcttcagagaatcggcacaggcatattcctctctttccttgctatggttgtagccgctctagtggagatgaaaaggcttaaaactgctgcggattacgggctcgtagattcacctgacgctacggttccaatgagtgtgtggtggttagttcctcagtatgttctctttggtatcacggatgttttcgcaatggtgggtcttcaagagttcttctatgaccaagtcccgaatgagctgaggagtgtggggttggctctgtacttgagcatattcggtattggtaactttctcagcagtttcatgatatcaatcattgagaaagcgacaagccaatctggtcaagcgagttggttcgcaaacaacctgaaccaagctcatctcgattacttttactggttactcgcttgtctcagcttcattggcttagcctcctacttgtatgttgcaaagtcttacgtctctaaaaggctcgacaccagttaa

SEQ ID NO: 28054 - protein, 557 aa, Arabidopsis thaliana
  misc_feature (1)..(557): Ceres Seq. ID no. 2181360
MSISGAVDEAGTPLLAVTVDYRNKPAVKSSSGGWRSAGFIIGVEVAERFAYYGISSNLITYLTGPLGQSTAAAAANVNAWSGTASLLPLLGAFVADSFLGRFRTILAASALYIVGLGVLTLSAMIPSDCKVSNLLSSCSPRFQVITFFSALYLVALAQGGHKPCVQAFGADQFDEKEPEECKAKSSFFNWWYFGMCFGTLTTLWVLNYIQDNLSWALGFGIPCIAMVVALVVLLLGTCTYRFSIRREDQSPFVRIGNVYVAAVKNWSVSALDVAAAEERLGLVSCSSSQQFSFLNKALVAKNGSCSIDELEEAKSVLRLAPIWLTCLVYAVVFAQSPTFFTKQGATMERSITPGYKISPATLQSFISLSIVIFIPIYDRVLIPIARSFTHKPGGITMLQRIGTGIFLSFLAMVVAALVEMKRLKTAADYGLVDSPDATVPMSVWWLVPQYVLFGITDVFAMVGLQEFFYDQVPNELRSVGLALYLSIFGIGNFLSSFMISIIEKATSQSGQASWFANNLNQAHLDYFYWLLACLSFIGLASYLYVAKSYVSKRLDTS

SEQ ID NO: 28055 - protein, 434 aa, Arabidopsis thaliana
  misc_feature (1)..(434): Ceres Seq. ID no. 2181361
MIPSDCKVSNLLSSCSPRFQVITFFSALYLVALAQGGHKPCVQAFGADQFDEKEPEECKAKSSFFNWWYFGMCFGTLTTLWVLNYIQDNLSWALGFGIPCIAMVVALVVLLLGTCTYRFSIRREDQSPFVRIGNVYVAAVKNWSVSALDVAAAEERLGLVSCSSSQQFSFLNKALVAKNGSCSIDELEEAKSVLRLAPIWLTCLVYAVVFAQSPTFFTKQGATMERSITPGYKISPATLQSFISLSIVIFIPIYDRVLIPIARSFTHKPGGITMLQRIGTGIFLSFLAMVVAALVEMKRLKTAADYGLVDSPDATVPMSVWWLVPQYVLFGITDVFAMVGLQEFFYDQVPNELRSVGLALYLSIFGIGNFLSSFMISIIEKATSQSGQASWFANNLNQAHLDYFYWLLACLSFIGLASYLYVAKSYVSKRLDTS

SEQ ID NO: 28056 - protein, 363 aa, Arabidopsis thaliana
  misc_feature (1)..(363): Ceres Seq. ID no. 2181362
MCFGTLTTLWVLNYIQDNLSWALGFGIPCIAMVVALVVLLLGTCTYRFSIRREDQSPFVRIGNVYVAAVKNWSVSALDVAAAEERLGLVSCSSSQQFSFLNKALVAKNGSCSIDELEEAKSVLRLAPIWLTCLVYAVVFAQSPTFFTKQGATMERSITPGYKISPATLQSFISLSIVIFIPIYDRVLIPIARSFTHKPGGITMLQRIGTGIFLSFLAMVVAALVEMKRLKTAADYGLVDSPDATVPMSVWWLVPQYVLFGITDVFAMVGLQEFFYDQVPNELRSVGLALYLSIFGIGNFLSSFMISIIEKATSQSGQASWFANNLNQAHLDYFYWLLACLSFIGLASYLYVAKSYVSKRLDTS

SEQ ID NO: 28057 - DNA, 1407 bp, Arabidopsis thaliana
  misc_feature (1)..(1407): Ceres Seq. ID no. 2182011
atgattaaaccctttattatttctctgtttgctctgttgatggtagcttcttatggagctacaggaaaaatgttgttcaaggaacttgacattcttgggaagcttgagaacctcgatgtacctgaggatgatattgaggatgatgtgaccttctttgatttctcgtcgtttacaagccaatattctggtaagaatctggtgaatgtggatagctttaatgcatctggagatggagtttctgatgatactcaggcatttataagagcttggaccatggcctgctctgcaccaaactctgttttattggttccacaaggacgtagctatttagtaaatgcgacgaaattcgatggtccatgtcaagaaaaattgatcattcagattgatggaacaatcatagcaccagatgagcctagccaatgggacccgaaattcccaaggaattggcttcaattttccaaactccaaggagttgtattccaagggaatggagttatagatggttctggtaccaaatggtgggctgcttcttgcaagaagaacaagtctaacccttgcgtaggcgcaccaacggctctaactatatattcaagttcaaatgtgtatgtgagaggcttaactatccggaacagccaacagatgcacttgatcatacaacggtcaactacagttcgaatctctagagttatggtcacatctccaggagacagtcccaacactgatggaattcatataaccgcatctaccgatgttgtagtccaagacagtaaaatcagcacaggagatgattgtgtctcgattgtgaatggaagcgccaagataaagatgaagaggatctactgtggaccaggacatggaatcagtattggaagtcttggacaaggacattcgaaaggaaccgtcactgcagttgtgttggaaactgcgttcttaaagaacacaactaatggtctaagaatcaagacatggcagggtggtaatggttacgtaaagggtgtacgtttcgagaacgtagtgatgcaggacgttgcgaatccgattataatcgatcaattctactgtgattcaccatcaacttgtcaaaaccagacatcggcggttcacatatccgagataatgtacaggaacataaccggaaccacgaaaagctcaaaagccatcaacttcaagtgtagtgacgcagtcccttgcagccacattgtcctcaacaatatcaacttggaaggcaatgatggaaaagtagaagcatattgtaactctgctgaagggtttggttatggtgtagttcatccttctgcggattgtctgtattcgcatgacgacaagagcttaaaccaaactgatcagtatttggcagaaactattatggtcgaaaaagaaactgaaaatgctcatgatgagctttaa

SEQ ID NO: 28058 - protein, 468 aa, Arabidopsis thaliana
  misc_feature (1)..(468): Ceres Seq. ID no. 2182012
MIKPFIISLFALLMVASYGATGKMLFKELDILGKLENLDVPEDDIEDDVTFFDFSSFTSQYSGKNLVNVDSFNASGDGVSDDTQAFIRAWTMACSAPNSVLLVPQGRSYLVNATKFDGPCQEKLIIQIDGTIIAPDEPSQWDPKFPRNWLQFSKLQGVVFQGNGVIDGSGTKWWAASCKKNKSNPCVGAPTALTIYSSSNVYVRGLTIRNSQQMHLIIQRSTTVRISRVMVTSPGDSPNTDGIHITASTDVVVQDSKISTGDDCVSIVNGSAKIKMKRIYCGPGHGISIGSLGQGHSKGTVTAVVLETAFLKNTTNGLRIKTWQGGNGYVKGVRFENVVMQDVANPIIIDQFYCDSPSTCQNQTSAVHISEIMYRNITGTTKSSKAINFKCSDAVPCSHIVLNNINLEGNDGKVEAYCNSAEGFGYGVVHPSADCLYSHDDKSLNQTDQYLAETIMVEKETENAHDEL

SEQ ID NO: 28059 - protein, 455 aa, Arabidopsis thaliana
  misc_feature (1)..(455): Ceres Seq. ID no. 2182013
MVASYGATGKMLFKELDILGKLENLDVPEDDIEDDVTFFDFSSFTSQYSGKNLVNVDSFNASGDGVSDDTQAFIRAWTMACSAPNSVLLVPQGRSYLVNATKFDGPCQEKLIIQIDGTIIAPDEPSQWDPKFPRNWLQFSKLQGVVFQGNGVIDGSGTKWWAASCKKNKSNPCVGAPTALTIYSSSNVYVRGLTIRNSQQMHLIIQRSTTVRISRVMVTSPGDSPNTDGIHITASTDVVVQDSKISTGDDCVSIVNGSAKIKMKRIYCGPGHGISIGSLGQGHSKGTVTAVVLETAFLKNTTNGLRIKTWQGGNGYVKGVRFENVVMQDVANPIIIDQFYCDSPSTCQNQTSAVHISEIMYRNITGTTKSSKAINFKCSDAVPCSHIVLNNINLEGNDGKVEAYCNSAEGFGYGVVHPSADCLYSHDDKSLNQTDQYLAETIMVEKETENAHDEL

SEQ ID NO: 28060 - protein, 445 aa, Arabidopsis thaliana
  misc_feature (1)..(445): Ceres Seq. ID no. 2182014
MLFKELDILGKLENLDVPEDDIEDDVTFFDFSSFTSQYSGKNLVNVDSFNASGDGVSDDTQAFIRAWTMACSAPNSVLLVPQGRSYLVNATKFDGPCQEKLIIQIDGTIIAPDEPSQWDPKFPRNWLQFSKLQGVVFQGNGVIDGSGTKWWAASCKKNKSNPCVGAPTALTIYSSSNVYVRGLTIRNSQQMHLIIQRSTTVRISRVMVTSPGDSPNTDGIHITASTDVVVQDSKISTGDDCVSIVNGSAKIKMKRIYCGPGHGISIGSLGQGHSKGTVTAVVLETAFLKNTTNGLRIKTWQGGNGYVKGVRFENVVMQDVANPIIIDQFYCDSPSTCQNQTSAVHISEIMYRNITGTTKSSKAINFKCSDAVPCSHIVLNNINLEGNDGKVEAYCNSAEGFGYGVVHPSADCLYSHDDKSLNQTDQYLAETIMVEKETENAHDEL

SEQ ID NO: 28061 - DNA, 2193 bp, Arabidopsis thaliana
  misc_feature (1)..(2193): Ceres Seq. ID no. 2182678
atgaagacaaagactagcatcttccaatttattgtagcatctgtccttactctgctcatcaatgactcatcagcagcaacacctccacctccaattagcaattcttcaacgtcttgtaacaaaacctgtggaggaatctcgatcccgttcccattcggaattggcgggaaagattgttatctcaacggttggtacgaggttatctgcaacacaaccacttccgattctaacacaactgttcctttactctctatgatcaatcgggaagtggtgaatatctctctcccagacagtaacgaaccatacggacttgttcaaatcaaaggtcctgtgacatcgttgggttgttctagtaatactagtgaaggaccccaaaactcgctcccggttttgaatgtcacaggtaagggcagcccatatttcctgaccgacgagaaccgtcttgtggcggttggttgtggtataaaggcattgatgacagatacagaatcagagatcttgggttgtgaatcgagctgcgaacacagaaagagtggtgaagaagtaacaaatttgatctgtactggttacagatgctgccaggcgaggctaccggtggggcgtcctcaggctataaccgtaaatatagagaactctagtggaggagaagaaacgtgcaaagttgcgttcttgacggacaagaggtattcgccgtctaatgttacagagccagaacagtttcataacaatggatatgtggtgctagagttaggatggtactttgccacttcgaactctcgctttaagagcctcttgggttgtacaaatatgagccgaaaaggttctgggttctcggatgataattgcagttgcgagtatgattacttctccgggatgagttataggaattgttattgcgactatggctacacagggaacccataccttcgaggtggctgcgtagatactgattcatgcgaaggaaatcacaactgtggggaagatgctcattgtgttaacatgcctggaccaatgtccatgtgcaggcctaaccccaagataaccaaacctaccaaacccccggtgcttcaaggcattcttataggtttgtcaggattagtattttttgttgggctattctggctatttaaactcataaagaagcgaaggaacatcaaccgcagcaagaagtttttcaaacggaacggaggcttgctgttgaaacaacaattaactacaaaggacggaaatgtagaaatgtctaagattttcagttcaaaggagttaagaaaagccactgataacttcagcatagatagagtgcttgggcaaggcggtcaaggcactgtgtacaaaggaatgttggtagatgggagcatcgttgcggttaaaagatccaaagttgtggatgaagacaaaatggaagagtttatcaatgagattgttcttctgtcacaaatcaatcaccgcaacattgtgaaactcttgggatgttgcttggagacagaagttccaatcttggtgtacgaatatattcccaatggagatctgttcaagcggcttcatgatgaatctgatgattacaccatgacttgggaagtgcggcttcgcatagccatagagatagcaggagctcttacatacatgcactcagctgcaagttttccaatattccatagagatattaagactaccaatatcctactggacgagaaataccgagccaaagtgtctgactttggaacttcaagatcagtaaccttagatcaaactcacttgacaacattagttgcaggaacttttggttacatggatccagagtacttcttgtcaagccaatacactcacaagagcgatgtttatagtttcggggtcgtcttggtggagctcataaccggagaaaaaccattgtcccgtgtccggtctgaagaaggtagaggcttggcaactcatttcctcgaggccatgaaagagaacagagtgattgacataattgatattcggatcaaagacgaaagcaaactggagcaagtaatggcggtagcaaaactcgccagaaaatgtcttaaccggaaagggaagaaccggccaaacatgaaagaggtttcaaatgagctagagaggatccgttcatcacccgaagatttagatgtccgtaccgaaaacgaagacgaagaagaggatcaaccaatggcaatcaacaacaaaagatga

SEQ ID NO: 28062 - protein, 730 aa, Arabidopsis thaliana
  misc_feature (1)..(730): Ceres Seq. ID no. 2182679
MKTKTSIFQFIVASVLTLLINDSSAATPPPPISNSSTSCNKTCGGISIPFPFGIGGKDCYLNGWYEVICNTTTSDSNTTVPLLSMINREVVNISLPDSNEPYGLVQIKGPVTSLGCSSNTSEGPQNSLPVLNVTGKGSPYFLTDENRLVAVGCGIKALMTDTESEILGCESSCEHRKSGEEVTNLICTGYRCCQARLPVGRPQAITVNIENSSGGEETCKVAFLTDKRYSPSNVTEPEQFHNNGYVVLELGWYFATSNSRFKSLLGCTNMSRKGSGFSDDNCSCEYDYFSGMSYRNCYCDYGYTGNPYLRGGCVDTDSCEGNHNCGEDAHCVNMPGPMSMCRPNPKITKPTKPPVLQGILIGLSGLVFFVGLFWLFKLIKKRRNINRSKKFFKRNGGLLLKQQLTTKDGNVEMSKIFSSKELRKATDNFSIDRVLGQGGQGTVYKGMLVDGSIVAVKRSKVVDEDKMEEFINEIVLLSQINHRNIVKLLGCCLETEVPILVYEYIPNGDLFKRLHDESDDYTMTWEVRLRIAIEIAGALTYMHSAASFPIFHRDIKTTNILLDEKYRAKVSDFGTSRSVTLDQTHLTTLVAGTFGYMDPEYFLSSQYTHKSDVYSFGVVLVELITGEKPLSRVRSEEGRGLATHFLEAMKENRVIDIIDIRIKDESKLEQVMAVAKLARKCLNRKGKNRPNMKEVSNELERIRSSPEDLDVRTENEDEEEDQPMAINNKR

SEQ ID NO: 28063 - protein, 646 aa, Arabidopsis thaliana
  misc_feature (1)..(646): Ceres Seq. ID no. 2182680
MINREVVNISLPDSNEPYGLVQIKGPVTSLGCSSNTSEGPQNSLPVLNVTGKGSPYFLTDENRLVAVGCGIKALMTDTESEILGCESSCEHRKSGEEVTNLICTGYRCCQARLPVGRPQAITVNIENSSGGEETCKVAFLTDKRYSPSNVTEPEQFHNNGYVVLELGWYFATSNSRFKSLLGCTNMSRKGSGFSDDNCSCEYDYFSGMSYRNCYCDYGYTGNPYLRGGCVDTDSCEGNHNCGEDAHCVNMPGPMSMCRPNPKITKPTKPPVLQGILIGLSGLVFFVGLFWLFKLIKKRRNINRSKKFFKRNGGLLLKQQLTTKDGNVEMSKIFSSKELRKATDNFSIDRVLGQGGQGTVYKGMLVDGSIVAVKRSKVVDEDKMEEFINEIVLLSQINHRNIVKLLGCCLETEVPILVYEYIPNGDLFKRLHDESDDYTMTWEVRLRIAIEIAGALTYMHSAASFPIFHRDIKTTNILLDEKYRAKVSDFGTSRSVTLDQTHLTTLVAGTFGYMDPEYFLSSQYTHKSDVYSFGVVLVELITGEKPLSRVRSEEGRGLATHFLEAMKENRVIDIIDIRIKDESKLEQVMAVAKLARKCLNRKGKNRPNMKEVSNELERIRSSPEDLDVRTENEDEEEDQPMAINNKR

SEQ ID NO: 28064 - protein, 572 aa, Arabidopsis thaliana
  misc_feature (1)..(572): Ceres Seq. ID no. 2182681
MTDTESEILGCESSCEHRKSGEEVTNLICTGYRCCQARLPVGRPQAITVNIENSSGGEETCKVAFLTDKRYSPSNVTEPEQFHNNGYVVLELGWYFATSNSRFKSLLGCTNMSRKGSGFSDDNCSCEYDYFSGMSYRNCYCDYGYTGNPYLRGGCVDTDSCEGNHNCGEDAHCVNMPGPMSMCRPNPKITKPTKPPVLQGILIGLSGLVFFVGLFWLFKLIKKRRNINRSKKFFKRNGGLLLKQQLTTKDGNVEMSKIFSSKELRKATDNFSIDRVLGQGGQGTVYKGMLVDGSIVAVKRSKVVDEDKMEEFINEIVLLSQINHRNIVKLLGCCLETEVPILVYEYIPNGDLFKRLHDESDDYTMTWEVRLRIAIEIAGALTYMHSAASFPIFHRDIKTTNILLDEKYRAKVSDFGTSRSVTLDQTHLTTLVAGTFGYMDPEYFLSSQYTHKSDVYSFGVVLVELITGEKPLSRVRSEEGRGLATHFLEAMKENRVIDIIDIRIKDESKLEQVMAVAKLARKCLNRKGKNRPNMKEVSNELERIRSSPEDLDVRTENEDEEEDQPMAINNKR

SEQ ID NO: 28065 - DNA, 933 bp, Arabidopsis thaliana
  misc_feature (1)..(933): Ceres Seq. ID no. 2182836
atgacggaagagtttgagatcgcaggaatctccaccggagcttggtggagctcgccaacaaacaccgccgcagtattctctggctactcgctgccatgttccactgagattagccctgatgtcacaaatttcggatggcaaaacttcgataacaagattaacgatcataatgatggttgtatgaacatgcataatagtttcttcgaaggactattaatcgatcctaacgatcaattactaccggatccatggtccaaaagtacaattcctaacgctaaatctgagctccttgaaaacttcccattcttagataacatgttcttggtcgattcagaagctgaatctttgttggatcatgaaatcagaaaccataagtcgtctaaggagcaaattacacaagactacaagaatcttacttcaaaggcacgtaacaaacataaaaacctaactatttttgttaggagtgaagaattagaagagaacagcgatgagtattcaccgcgattactaaaaagaccgagactcgagacactatctccattgccaagcttcaaagttcgtaaagaaaaactcggagatagaatcactgcgcttcagcaactggtttctccatttggcaagacagatacagcttctgttctcaacgaagctgtagagtacataaagtttcttcaagaacaagtcactgtattgagtaatccagaacagaacaccataggatctgttcaacaacagcagtgttcaaacaagaaatctatcaatactcaaggagaagtagaagaagacgaatgtagtccaagaagatatgtagatctttcgagccgtggactatgtctaatgccgatctcagcttcatatcccgtggctgcagctgcggcttcggctgcagagatgaacgtacatctggtttctggcatcttccattctttgtaa

SEQ ID NO: 28066 - protein, 310 aa, Arabidopsis thaliana
  misc_feature (1)..(310): Ceres Seq. ID no. 2182837
MTEEFEIAGISTGAWWSSPTNTAAVFSGYSLPCSTEISPDVTNFGWQNFDNKINDHNDGCMNMHNSFFEGLLIDPNDQLLPDPWSKSTIPNAKSELLENFPFLDNMFLVDSEAESLLDHEIRNHKSSKEQITQDYKNLTSKARNKHKNLTIFVRSEELEENSDEYSPRLLKRPRLETLSPLPSFKVRKEKLGDRITALQQLVSPFGKTDTASVLNEAVEYIKFLQEQVTVLSNPEQNTIGSVQQQQCSNKKSINTQGEVEEDECSPRRYVDLSSRGLCLMPISASYPVAAAAASAAEMNVHLVSGIFHSL

SEQ ID NO: 28067 - protein, 250 aa, Arabidopsis thaliana
  misc_feature (1)..(250): Ceres Seq. ID no. 2182838
MNMHNSFFEGLLIDPNDQLLPDPWSKSTIPNAKSELLENFPFLDNMFLVDSEAESLLDHEIRNHKSSKEQITQDYKNLTSKARNKHKNLTIFVRSEELEENSDEYSPRLLKRPRLETLSPLPSFKVRKEKLGDRITALQQLVSPFGKTDTASVLNEAVEYIKFLQEQVTVLSNPEQNTIGSVQQQQCSNKKSINTQGEVEEDECSPRRYVDLSSRGLCLMPISASYPVAAAAASAAEMNVHLVSGIFHSL

SEQ ID NO: 28068 - protein, 248 aa, Arabidopsis thaliana
  misc_feature (1)..(248): Ceres Seq. ID no. 2182839
MHNSFFEGLLIDPNDQLLPDPWSKSTIPNAKSELLENFPFLDNMFLVDSEAESLLDHEIRNHKSSKEQITQDYKNLTSKARNKHKNLTIFVRSEELEENSDEYSPRLLKRPRLETLSPLPSFKVRKEKLGDRITALQQLVSPFGKTDTASVLNEAVEYIKFLQEQVTVLSNPEQNTIGSVQQQQCSNKKSINTQGEVEEDECSPRRYVDLSSRGLCLMPISASYPVAAAAASAAEMNVHLVSGIFHSL

SEQ ID NO: 28069 - DNA, 690 bp, Arabidopsis thaliana
  misc_feature (1)..(690): Ceres Seq. ID no. 2183288
atggctcaaaatggttcgaatactactgtgaagctgatagggacatgggcaagcccattcgctataagggctcaagtggctctacacctcaagtcagtagagcacgagtatgtcgaagaaaccgatgttctgaaaggaaagagcgatcttcttattaaatccaaccctatacacaagaaagtccctgtcctcatccatggtgatgtatcaatctgtgaatctctcaacatcgtccaatacgtcgatgaatcttggccgtctgatctttccatcctcccaacacttccctcggaacgtgcctttgcccgtttttgggctcacttcgttgacggaaagttgtttgaatcgatcgatgcggtggcgggagcaaaagacgacgccgccaggatgacattggcggggaatctgatggagaatctagcggcacttgaagaggcgtttcaaaagagtagcaaaggcggggacttttttggaggggggaacattgggtttgtcgatataactgttggggccatagtaggtccaatctctgtcattgaagctttttcaggtgttaagtttttgcgtccagacacaacaccgggcctgattcagtgggctgagaaatttagggcccatgaagctgtaaaaccttacatgcctaccgttgccgagttcatcgagtttgccaaaaagaaattcagtgtttag

SEQ ID NO: 28070 - protein, 229 aa, Arabidopsis thaliana
  misc_feature (1)..(229): Ceres Seq. ID no. 2183289
MAQNGSNTTVKLIGTWASPFAIRAQVALHLKSVEHEYVEETDVLKGKSDLLIKSNPIHKKVPVLIHGDVSICESLNIVQYVDESWPSDLSILPTLPSERAFARFWAHFVDGKLFESIDAVAGAKDDAARMTLAGNLMENLAALEEAFQKSSKGGDFFGGGNIGFVDITVGAIVGPISVIEAFSGVKFLRPDTTPGLIQWAEKFRAHEAVKPYMPTVAEFIEFAKKKFSV

SEQ ID NO: 28071 - DNA, 1878 bp, Arabidopsis thaliana
  misc_feature (1)..(1878): Ceres Seq. ID no. 2183293
atgtctcaaccaccgtggagatgtttctctctactcatctttgttctcaccatttttagtactaaaccttcctctgcatctacttcatgttcttcttcatttcattgcccaccgttcaactcctcaccaccgtaccctttctcagcttctccgggatgtggccacccaaacttccagatccaatgctcatcttcacgcgccaccatcacaatcaaaaacctcactttctctatcctccattactcatcaatctcctcttctctaaccctctctcccattacaaacactaaccggaacacaaacaactgttcttctctccggttctcctcctcaccaaaccggttcatcgacttaaccggttcacctttcagagtctctgactcttcttgctctcgtctctctcttctccgtccttgctctccttttactctccccaactgttctcgttgtccttgggactgtaaactcctaaagaatccgggtcggatcctccacggttgtgaatcaacccacgggtcgttatctgaacaaggctgtcaaggagatcttcttggttttcttcaagatttcttcactagatttggatttgaagttgaatgggacgaatctcaagatccatacttcattaaatgcagagattgtcaaatcaagaatggtgtttgcgggtttaattcgacccacccgaatcaagatttcatctgtttccacaaatcaagatccgaattagtaactcaaagagataacaacaaaagagtcaatcatattgctgtgttgtctcttatcttcgctttgacttgtctcttacttgttttctccgtcgccgtagcgattttccgatcacgaagagctagctttttatcctcaatcaatgaagaagacccggctgctctgttcctccgtcaccaccgctccgccgctcttctcccaccagtcttcaccttcgaagaactcgaatccgccacaaacaaattcgaccccaagcgaaaaatcggagacggtggtttcggttctgtttacttaggccaactcagcgacggacaactcctcgccgttaaattcctccaccatcaccacgctttctcaatgaagtctttttgcaatgagattttgatcctttcttcaatcaaccatcctaacctcgtcaagctccatggctattgctctgacccgagaggacttcttcttgttcacgattacgtcactaacggtactctcgctgatcatcttcacggcaggggaccgaagatgacgtggcgtgtaaggttagatattgcgttgcaaacggctttagctatggagtatcttcacttcgatattgttcctccggttgttcatagagatataacttcgtcgaatatctttgtggagaaggatatgaaaatcaaagtcggagactttggtctctctaggctcttggtgttttcagagacgactgtgaattcagctacttcgtctgattacgtttgtaccggaccacaaggtacgcccggttatttagacccggattatcaccggtcttttcggttaacggagaaaagtgacgtgtatagctacggtgtcgttttgatggagttgattacgggtatgaaagcggttgatcaacgacgtgagaagagggacatggctttagcggatcttgttgtatccaagattcaaatgggtcttttggatcaggtgattgaccccttgcttgcgttagacggcgatgatgtggctgcggtgagtgacggattcggtgttgcggcggttgctgagctggcgttccggtgtgttgcgacggataaggatgatcgtccggatgctaaagagattgttcaggagttgaggaggattaggagccatacacgtgtagcggatgatgacgtggcgaaaaattga

SEQ ID NO: 28072 - protein, 625 aa, Arabidopsis thaliana
  misc_feature (1)..(625): Ceres Seq. ID no. 2183294
MSQPPWRCFSLLIFVLTIFSTKPSSASTSCSSSFHCPPFNSSPPYPFSASPGCGHPNFQIQCSSSRATITIKNLTFSILHYSSISSSLTLSPITNTNRNTNNCSSLRFSSSPNRFIDLTGSPFRVSDSSCSRLSLLRPCSPFTLPNCSRCPWDCKLLKNPGRILHGCESTHGSLSEQGCQGDLLGFLQDFFTRFGFEVEWDESQDPYFIKCRDCQIKNGVCGFNSTHPNQDFICFHKSRSELVTQRDNNKRVNHIAVLSLIFALTCLLLVFSVAVAIFRSRRASFLSSINEEDPAALFLRHHRSAALLPPVFTFEELESATNKFDPKRKIGDGGFGSVYLGQLSDGQLLAVKFLHHHHAFSMKSFCNEILILSSINHPNLVKLHGYCSDPRGLLLVHDYVTNGTLADHLHGRGPKMTWRVRLDIALQTALAMEYLHFDIVPPVVHRDITSSNIFVEKDMKIKVGDFGLSRLLVFSETTVNSATSSDYVCTGPQGTPGYLDPDYHRSFRLTEKSDVYSYGVVLMELITGMKAVDQRREKRDMALADLVVSKIQMGLLDQVIDPLLALDGDDVAAVSDGFGVAAVAELAFRCVATDKDDRPDAKEIVQELRRIRSHTRVADDDVAKN

SEQ ID NO: 28073 - DNA, 1668 bp, Arabidopsis thaliana
  misc_feature (1)..(1668): Ceres Seq. ID no. 2183315
atggacaatgagaaagggacaagttcctcggatttaacgacgagacaaaggaagcctcttggttggaaagcgatgccttatatcatagggaatgaaacattggagaggcttgccacattcggtttgatggcgaatttcatggtgtatatggtaagagagtatcatatggaccaagttcaagctgtcactcttatcaacacttggtctgctctcaccaactttgctcctatcatcggagctttcatctccgactcctacaccggaaaatttaataccattgtcttcggttccatcgctgagttgttgggcatgttggtgttgactttcacgtctctggtccctaatctacgaccaccaccttgcactgccgaccaaatcactggacaatgtattccctatagctattcgcagttatacgttttactctcaggacttttcttgttatcagttggaacaggtggaatccggtcatgcagtgttcctttcagtctcgatcagttcgatgattcgactgaagaaggaagagaaggaagtagaagcttctttagctggtactataccactcatacaatcgtccagttagtttcaatgacactagtgttgtacgtacagaacaacatcagttggggcattggattcgcaatcccgaccgttctcaatttttttgcgcttcttctgctttttgtgggtactcggtattatgtctttgtcaaacccgaaggaagtgtcttctctggagttttcaaggttcttgtggctgcttataagaaacgcaaggcacggtttacttctggaattgactaccatcaacccttactagagacagatttacaatcaaataaactcgtactcactgatcaattcagattcttgaacaaagctgtgatagtgatgaacaatgatgaagctggaaatgaggagtggagaacctgcacagtgagacagatagaggacatcaagtcaataatcagtattattccaatatttgcttcgagcattattggatttttggctatgaaccaacaacagacgtttacagtctcacaagcactaaaaatggacctccaatttccaggcacttcttacctaatccctcctgcttctataaccgtcatatcattattaaacataggtatatggcttcccttctatgaaaccgttttggtccgacacatcgaaaacattacaaaacaaaacggaggtatctcgttactacaaaaagtcggcattgggaatattttctccatctcgacgatgctcatatccggtattgtggagcgaaagagaagagatttatcgcttaatggagtaaaaatgtcggttttctggctaaccccgcaacaagtactaatgggattttatcaagtcttcacgattgttggtctcaccgagttcttcaacaaacaagttccaatcaacatgagaagcattgggaactcgttgctttacttaggtttgtctctagccagttatctaagcagtgccatggtgagcattgttcatagtgtgactgctcgtggaggacagagttggctaacggatgatattgacaaaagcaagttggattgtttctattactttattgccgctttaagcactcttaatttcatcttcttcttctggtgtgctcgaaggtatcgttacagaaactatagtaatgaacaataa

SEQ ID NO: 28074 - protein, 555 aa, Arabidopsis thaliana
  misc_feature (1)..(555): Ceres Seq. ID no. 2183316
MDNEKGTSSSDLTTRQRKPLGWKAMPYIIGNETLERLATFGLMANFMVYMVREYHMDQVQAVTLINTWSALTNFAPIIGAFISDSYTGKFNTIVFGSIAELLGMLVLTFTSLVPNLRPPPCTADQITGQCIPYSYSQLYVLLSGLFLLSVGTGGIRSCSVPFSLDQFDDSTEEGREGSRSFFSWYYTTHTIVQLVSMTLVLYVQNNISWGIGFAIPTVLNFFALLLLFVGTRYYVFVKPEGSVFSGVFKVLVAAYKKRKARFTSGIDYHQPLLETDLQSNKLVLTDQFRFLNKAVIVMNNDEAGNEEWRTCTVRQIEDIKSIISIIPIFASSIIGFLAMNQQQTFTVSQALKMDLQFPGTSYLIPPASITVISLLNIGIWLPFYETVLVRHIENITKQNGGISLLQKVGIGNIFSISTMLISGIVERKRRDLSLNGVKMSVFWLTPQQVLMGFYQVFTIVGLTEFFNKQVPINMRSIGNSLLYLGLSLASYLSSAMVSIVHSVTARGGQSWLTDDIDKSKLDCFYYFIAALSTLNFIFFFWCARRYRYRNYSNEQ

SEQ ID NO: 28075 - protein, 531 aa, Arabidopsis thaliana
  misc_feature (1)..(531): Ceres Seq. ID no. 2183317
MPYIIGNETLERLATFGLMANFMVYMVREYHMDQVQAVTLINTWSALTNFAPIIGAFISDSYTGKFNTIVFGSIAELLGMLVLTFTSLVPNLRPPPCTADQITGQCIPYSYSQLYVLLSGLFLLSVGTGGIRSCSVPFSLDQFDDSTEEGREGSRSFFSWYYTTHTIVQLVSMTLVLYVQNNISWGIGFAIPTVLNFFALLLLFVGTRYYVFVKPEGSVFSGVFKVLVAAYKKRKARFTSGIDYHQPLLETDLQSNKLVLTDQFRFLNKAVIVMNNDEAGNEEWRTCTVRQIEDIKSIISIIPIFASSIIGFLAMNQQQTFTVSQALKMDLQFPGTSYLIPPASITVISLLNIGIWLPFYETVLVRHIENITKQNGGISLLQKVGIGNIFSISTMLISGIVERKRRDLSLNGVKMSVFWLTPQQVLMGFYQVFTIVGLTEFFNKQVPINMRSIGNSLLYLGLSLASYLSSAMVSIVHSVTARGGQSWLTDDIDKSKLDCFYYFIAALSTLNFIFFFWCARRYRYRNYSNEQ

SEQ ID NO: 28076 - protein, 513 aa, Arabidopsis thaliana
  misc_feature (1)..(513): Ceres Seq. ID no. 2183318
MANFMVYMVREYHMDQVQAVTLINTWSALTNFAPIIGAFISDSYTGKFNTIVFGSIAELLGMLVLTFTSLVPNLRPPPCTADQITGQCIPYSYSQLYVLLSGLFLLSVGTGGIRSCSVPFSLDQFDDSTEEGREGSRSFFSWYYTTHTIVQLVSMTLVLYVQNNISWGIGFAIPTVLNFFALLLLFVGTRYYVFVKPEGSVFSGVFKVLVAAYKKRKARFTSGIDYHQPLLETDLQSNKLVLTDQFRFLNKAVIVMNNDEAGNEEWRTCTVRQIEDIKSIISIIPIFASSIIGFLAMNQQQTFTVSQALKMDLQFPGTSYLIPPASITVISLLNIGIWLPFYETVLVRHIENITKQNGGISLLQKVGIGNIFSISTMLISGIVERKRRDLSLNGVKMSVFWLTPQQVLMGFYQVFTIVGLTEFFNKQVPINMRSIGNSLLYLGLSLASYLSSAMVSIVHSVTARGGQSWLTDDIDKSKLDCFYYFIAALSTLNFIFFFWCARRYRYRNYSNEQ

SEQ ID NO: 28077 - DNA, 1740 bp, Arabidopsis thaliana
  misc_feature (1)..(1740): Ceres Seq. ID no. 2184283
atggagaagcgagtcaaatacaagagctttgtgaaggatccaggaactcttggatccctcgaattaagtgaagtgatgctgctctttgtcccaaatgatcctaaatcagatttgaagcttaaagttcagactcacaacatcaaaagtcagaaatataccaaagaaggatcaaataaacctccttggctcaatctgaccagcaagcagggaaggagtcatatctttgagtttgaaaattatcctgacatgcatgcttgtcgtgatttcatcactaaggcccttgctaaatgtgaagaggagcctaataaactagttgtcttgacacctgctgaacaacttagtatggcagaatttgagctacgcttcaagcttcttcgagaaaatagtgagttgcagaaattgcataagcaatttgtggaaagtaaagtcctgacggaagacgaattctggtctacgaggaagaaattacttggtaaagattccattagaaagtcaaaacaacagatggggctcaaaagcatgatggtttcaggcatcaaaccgtctactgatggccggactaatagggtgacgtttaacttaacgtctgagataatttttcagatttttgctgagaagccggctgttcgccaggcattcataaattatgttccgaaaaagatgacagaaaaggacttttggacaaaatattttagagcagaatatctttacagcacaaaaaatacagcagtagctgcagcagaagctgctgaggatgaggaactcgctgtctttctgaagcctgacgagatattggctcaggaagctcgtcaaaagatgagacgggttgatccaactcttgacatggacgctgacgagggagatgactacacccatcttatggaccacgggatccagcgcgatggcaccaatgacattattgaaccacagaatgaccagcttaagaggtcacttttacaagatcttaatcgtcatgctgctgttgtattggaaggaagatgcatcaatgttcagtctgaagatacgagaattgttgcagaggctctcacacgggcgaaacaagtaagcaaagctgatggtgaaatcaccaaggacgctaatcaggagaggttggagagaatgtcccgtgcaacagaaatggaggatcttcaagcaccacaaaacttcccattagcaccactctctatcaaggaccctcgtgattactttgaatctcaacaaggaaacatcctcagtgaacccagaggagcaaaggcgtcaaaaagaaatgtccatgaagcttatggattactaaaagaatccattttggtgattagaatgacgggattaagtgatccgttgattaaacctgaagtttcctttgaggttttcagttcgttgacccgaactatctcaactgccaaaaatattctcgggaagaacccgcaagagagctttctggacagattaccaaagtccactaaggatgaagttatacatcactggacatcaatacaagaattagtgagacatttttggtcatcttacccaataacaacgacatatcttagtaccaaggttggtaaactgaaggatgcaatgtccaatacttattcactactcgatgcaatgaaacagtcggtgcagtctgatctccggcatcaagtttccttactagttcgtccaatgcaacaggctcttgatgctgcgttccaacactacgaatcggacttgcagagaagaaccgctaagattacatag

SEQ ID NO: 28078 - protein, 579 aa, Arabidopsis thaliana
  misc_feature (1)..(579): Ceres Seq. ID no. 2184284
MEKRVKYKSFVKDPGTLGSLELSEVMLLFVPNDPKSDLKLKVQTHNIKSQKYTKEGSNKPPWLNLTSKQGRSHIFEFENYPDMHACRDFITKALAKCEEEPNKLVVLTPAEQLSMAEFELRFKLLRENSELQKLHKQFVESKVLTEDEFWSTRKKLLGKDSIRKSKQQMGLKSMMVSGIKPSTDGRTNRVTFNLTSEIIFQIFAEKPAVRQAFINYVPKKMTEKDFWTKYFRAEYLYSTKNTAVAAAEAAEDEELAVFLKPDEILAQEARQKMRRVDPTLDMDADEGDDYTHLMDHGIQRDGTNDIIEPQNDQLKRSLLQDLNRHAAVVLEGRCINVQSEDTRIVAEALTRAKQVSKADGEITKDANQERLERMSRATEMEDLQAPQNFPLAPLSIKDPRDYFESQQGNILSEPRGAKASKRNVHEAYGLLKESILVIRMTGLSDPLIKPEVSFEVFSSLTRTISTAKNILGKNPQESFLDRLPKSTKDEVIHHWTSIQELVRHFWSSYPITTTYLSTKVGKLKDAMSNTYSLLDAMKQSVQSDLRHQVSLLVRPMQQALDAAFQHYESDLQRRTAKIT

SEQ ID NO: 28079 - protein, 554 aa, Arabidopsis thaliana
  misc_feature (1)..(554): Ceres Seq. ID no. 2184285
MLLFVPNDPKSDLKLKVQTHNIKSQKYTKEGSNKPPWLNLTSKQGRSHIFEFENYPDMHACRDFITKALAKCEEEPNKLVVLTPAEQLSMAEFELRFKLLRENSELQKLHKQFVESKVLTEDEFWSTRKKLLGKDSIRKSKQQMGLKSMMVSGIKPSTDGRTNRVTFNLTSEIIFQIFAEKPAVRQAFINYVPKKMTEKDFWTKYFRAEYLYSTKNTAVAAAEAAEDEELAVFLKPDEILAQEARQKMRRVDPTLDMDADEGDDYTHLMDHGIQRDGTNDIIEPQNDQLKRSLLQDLNRHAAVVLEGRCINVQSEDTRIVAEALTRAKQVSKADGEITKDANQERLERMSRATEMEDLQAPQNFPLAPLSIKDPRDYFESQQGNILSEPRGAKASKRNVHEAYGLLKESILVIRMTGLSDPLIKPEVSFEVFSSLTRTISTAKNILGKNPQESFLDRLPKSTKDEVIHHWTSIQELVRHFWSSYPITTTYLSTKVGKLKDAMSNTYSLLDAMKQSVQSDLRHQVSLLVRPMQQALDAAFQHYESDLQRRTAKIT

SEQ ID NO: 28080 - protein, 497 aa, Arabidopsis thaliana
  misc_feature (1)..(497): Ceres Seq. ID no. 2184286
MHACRDFITKALAKCEEEPNKLVVLTPAEQLSMAEFELRFKLLRENSELQKLHKQFVESKVLTEDEFWSTRKKLLGKDSIRKSKQQMGLKSMMVSGIKPSTDGRTNRVTFNLTSEIIFQIFAEKPAVRQAFINYVPKKMTEKDFWTKYFRAEYLYSTKNTAVAAAEAAEDEELAVFLKPDEILAQEARQKMRRVDPTLDMDADEGDDYTHLMDHGIQRDGTNDIIEPQNDQLKRSLLQDLNRHAAVVLEGRCINVQSEDTRIVAEALTRAKQVSKADGEITKDANQERLERMSRATEMEDLQAPQNFPLAPLSIKDPRDYFESQQGNILSEPRGAKASKRNVHEAYGLLKESILVIRMTGLSDPLIKPEVSFEVFSSLTRTISTAKNILGKNPQESFLDRLPKSTKDEVIHHWTSIQELVRHFWSSYPITTTYLSTKVGKLKDAMSNTYSLLDAMKQSVQSDLRHQVSLLVRPMQQALDAAFQHYESDLQRRTAKIT

SEQ ID NO: 28081 - DNA, 1056 bp, Arabidopsis thaliana
  misc_feature (1)..(1056): Ceres Seq. ID no. 2185574
atgcaaaagatgagagtttcggggtttagagttcttctcttggtttcttgtttcttctgcaaatccaaaggagctgttgttcctgcactcatcatgtttggcgactccattgttgacgttggcaacaacaataacttactcagcattgtcaaatccaactttcttccttacggtagagacttcatcgaccaaagacccaccggaagattctgcaacggaaaactcgctgtagatttctcagccgagtaccttggtttctcttcatacccacctgcattcctaagccgggaagcaagcaacgagaatatcctgatcggtgccaactttgcatcagcttcttcaggatactatgatgccacatctgttccatttggctcgatctccttaacacgacagctgagctattacagggcgtatcaaaatagagtaacgagaatgatcgggagggggaacgcgcgcatactgttctctagaggtatccacattttgagtgcgggatctagcgactttcttcagaattattacatcaatcctctactcaacatcctaaatacacctgatcagttcgctgacattctcctgagatccttctcagaattcatccagaatctgtatgaactaggagcaaggagaatcggagtgatatcgctaccgccgatgggttgcctgcctgcagctatcactcttttcggtgcaggaaacaaaagttgtgttgagagactgaacaatgatgctatcatgttcaatactaaacttgagaacacaacccggttactgatgaatagacactcaggcctcagactcgtcgcctttaatgtctaccaacctttcctggacatcatcaccaacccaactgacaatggattctttgaaacaaaaagggcatgctgcggaacagggacaatagaaacatcgttcctttgcaattctctatccttcggaacgtgtgtaaatgccacaggatatgtgttttgggatggatttcatcccacagaggctgtaaacgagctgttggctggtcaactactgggtcaagggatttctctaatcaattga

SEQ ID NO: 28082 - protein, 351 aa, Arabidopsis thaliana
  misc_feature (1)..(351): Ceres Seq. ID no. 2185575
MQKMRVSGFRVLLLVSCFFCKSKGAVVPALIMFGDSIVDVGNNNNLLSIVKSNFLPYGRDFIDQRPTGRFCNGKLAVDFSAEYLGFSSYPPAFLSREASNENILIGANFASASSGYYDATSVPFGSISLTRQLSYYRAYQNRVTRMIGRGNARILFSRGIHILSAGSSDFLQNYYINPLLNILNTPDQFADILLRSFSEFIQNLYELGARRIGVISLPPMGCLPAAITLFGAGNKSCVERLNNDAIMFNTKLENTTRLLMNRHSGLRLVAFNVYQPFLDIITNPTDNGFFETKRACCGTGTIETSFLCNSLSFGTCVNATGYVFWDGFHPTEAVNELLAGQLLGQGISLIN

SEQ ID NO: 28083 - protein, 348 aa, Arabidopsis thaliana
  misc_feature (1)..(348): Ceres Seq. ID no. 2185576
MRVSGFRVLLLVSCFFCKSKGAVVPALIMFGDSIVDVGNNNNLLSIVKSNFLPYGRDFIDQRPTGRFCNGKLAVDFSAEYLGFSSYPPAFLSREASNENILIGANFASASSGYYDATSVPFGSISLTRQLSYYRAYQNRVTRMIGRGNARILFSRGIHILSAGSSDFLQNYYINPLLNILNTPDQFADILLRSFSEFIQNLYELGARRIGVISLPPMGCLPAAITLFGAGNKSCVERLNNDAIMFNTKLENTTRLLMNRHSGLRLVAFNVYQPFLDIITNPTDNGFFETKRACCGTGTIETSFLCNSLSFGTCVNATGYVFWDGFHPTEAVNELLAGQLLGQGISLIN

SEQ ID NO: 28084 - protein, 320 aa, Arabidopsis thaliana
  misc_feature (1)..(320): Ceres Seq. ID no. 2185577
MFGDSIVDVGNNNNLLSIVKSNFLPYGRDFIDQRPTGRFCNGKLAVDFSAEYLGFSSYPPAFLSREASNENILIGANFASASSGYYDATSVPFGSISLTRQLSYYRAYQNRVTRMIGRGNARILFSRGIHILSAGSSDFLQNYYINPLLNILNTPDQFADILLRSFSEFIQNLYELGARRIGVISLPPMGCLPAAITLFGAGNKSCVERLNNDAIMFNTKLENTTRLLMNRHSGLRLVAFNVYQPFLDIITNPTDNGFFETKRACCGTGTIETSFLCNSLSFGTCVNATGYVFWDGFHPTEAVNELLAGQLLGQGISLIN

SEQ ID NO: 28085 - DNA, 1620 bp, Arabidopsis thaliana
  misc_feature (1)..(1620): Ceres Seq. ID no. 2185743
atgatgaggaactcgccgtcatatacctctgcaacgcactctcgtaatttcgacaccattttgtctccactcgtcaaaaccggcaccggtgcttctaaccgatcctacgccttcttctccatctttctcttcctcctcctcggcgcgtttctctccacgcgcctcctcctcgatccctccgttttgatagagaaagaagcggtgtccgtgactgagagagaaaccactcaatccccagaataccctcagtcgactaagctaattacggaaaaaccaaaagagtttacgctaaactgcgctgctttctccggcaacgacactggaacttgcccaaaggacaattatccgacgagtttccgatctagcgccggagaaggagaatctgaccgttctccatccgccacgtgcccagattacttccgatggattcacgaggatctacggccatgggagaagaccgggatcacgagggaagccttggagcgagccaatgcgacggcgattttccgcctggcgattatcaacgggagaatctacgtcgagaaatttcgtgaggcttttcagacaagagatgtgttcacgatctggggattcgtacagctcctacggagatatccgggaaagattccggatctcgagctcatgtttgactgcgttgactggccggtagtgaaggcggctgaattcgccggagttgatcaacctccaccgccgccattgttccgttattgcgcgaacgacgagacgctcgacattgtatttcccgattggtcctattggggatgggctgaggtgaatataaagccatgggaaagtctgttgaaagaactaagagaaggaaaccagaggactaaatggatagatagagagccttatgcttactggaaagggaatccaacggttgctgagacgagacttgatctcatgaaatgtaatctctccgaggtgtatgactggaaagctcgtttgtacaagcaggactgggtcaaggaatcaaaggaaggttacaagcagtcagacttggcgagccaatgccatcacaggtacaagatttacatagaagggtctgcgtggtcggtgagtgagaagtacattctggcttgtgactcggtgacattaatggtgaaacctcattactacgatttcttcacaagaggtatgtttccaggtcaccattactggcctgtcaaggaggacgacaaatgccgttccatcaaattcgctgttgattggggcaacttgcatatgcgaaaggcacaagacataggtaagaaggcaagtgagtttgtgcaacaagaactcaagatggactatgtgtacgattacatgtttcatctcttaatccaatactctaaactcctccggtttaaacccgagatccctcagaactccactgagctctgctcagaggcaatggcatgcccgagggatggaaatgaacgaaagtttatgatggaatcactcgtaaaacgcccagctgagacaggtccctgcgccatgccgcctccgtatgatccggcatcattttattcagttttgaaaaggagacagagtacgactagtagaatcgaacagtgggagagtaagtactggaggaagcagaacaagaccggttcgtaa

SEQ ID NO: 28086 - protein, 539 aa, Arabidopsis thaliana
  misc_feature (1)..(539): Ceres Seq. ID no. 2185744
MMRNSPSYTSATHSRNFDTILSPLVKTGTGASNRSYAFFSIFLFLLLGAFLSTRLLLDPSVLIEKEAVSVTERETTQSPEYPQSTKLITEKPKEFTLNCAAFSGNDTGTCPKDNYPTSFRSSAGEGESDRSPSATCPDYFRWIHEDLRPWEKTGITREALERANATAIFRLAIINGRIYVEKFREAFQTRDVFTIWGFVQLLRRYPGKIPDLELMFDCVDWPVVKAAEFAGVDQPPPPPLFRYCANDETLDIVFPDWSYWGWAEVNIKPWESLLKELREGNQRTKWIDREPYAYWKGNPTVAETRLDLMKCNLSEVYDWKARLYKQDWVKESKEGYKQSDLASQCHHRYKIYIEGSAWSVSEKYILACDSVTLMVKPHYYDFFTRGMFPGHHYWPVKEDDKCRSIKFAVDWGNLHMRKAQDIGKKASEFVQQELKMDYVYDYMFHLLIQYSKLLRFKPEIPQNSTELCSEAMACPRDGNERKFMMESLVKRPAETGPCAMPPPYDPASFYSVLKRRQSTTSRIEQWESKYWRKQNKTGS

SEQ ID NO: 28087 - protein, 538 aa, Arabidopsis thaliana
  misc_feature (1)..(538): Ceres Seq. ID no. 2185745
MRNSPSYTSATHSRNFDTILSPLVKTGTGASNRSYAFFSIFLFLLLGAFLSTRLLLDPSVLIEKEAVSVTERETTQSPEYPQSTKLITEKPKEFTLNCAAFSGNDTGTCPKDNYPTSFRSSAGEGESDRSPSATCPDYFRWIHEDLRPWEKTGITREALERANATAIFRLAIINGRIYVEKFREAFQTRDVFTIWGFVQLLRRYPGKIPDLELMFDCVDWPVVKAAEFAGVDQPPPPPLFRYCANDETLDIVFPDWSYWGWAEVNIKPWESLLKELREGNQRTKWIDREPYAYWKGNPTVAETRLDLMKCNLSEVYDWKARLYKQDWVKESKEGYKQSDLASQCHHRYKIYIEGSAWSVSEKYILACDSVTLMVKPHYYDFFTRGMFPGHHYWPVKEDDKCRSIKFAVDWGNLHMRKAQDIGKKASEFVQQELKMDYVYDYMFHLLIQYSKLLRFKPEIPQNSTELCSEAMACPRDGNERKFMMESLVKRPAETGPCAMPPPYDPASFYSVLKRRQSTTSRIEQWESKYWRKQNKTGS

SEQ ID NO: 28088 - protein, 325 aa, Arabidopsis thaliana
  misc_feature (1)..(325): Ceres Seq. ID no. 2185746
MFDCVDWPVVKAAEFAGVDQPPPPPLFRYCANDETLDIVFPDWSYWGWAEVNIKPWESLLKELREGNQRTKWIDREPYAYWKGNPTVAETRLDLMKCNLSEVYDWKARLYKQDWVKESKEGYKQSDLASQCHHRYKIYIEGSAWSVSEKYILACDSVTLMVKPHYYDFFTRGMFPGHHYWPVKEDDKCRSIKFAVDWGNLHMRKAQDIGKKASEFVQQELKMDYVYDYMFHLLIQYSKLLRFKPEIPQNSTELCSEAMACPRDGNERKFMMESLVKRPAETGPCAMPPPYDPASFYSVLKRRQSTTSRIEQWESKYWRKQNKTGS

SEQ ID NO: 28089 - DNA, 699 bp, Arabidopsis thaliana
  misc_feature (1)..(699): Ceres Seq. ID no. 2187003
atgaactctcgagatcttacactcgtctctacatctgcaatcttcggtgctttgatttcagctctagcatttcgcttcttctcatcaaaccctaaaaaccccaaatcccgaaaattcacttccaccgaaatctctgcaatttccagaaaattccctgctctagatcctttcagtcctttgaaacgaaatgggtacttatcatgggatgattatttcatggcgattgcattcctttctgcagaacgatccaaggatcctaacaggcaggttggcgcatgtttggtgagccaaaatggtgtaatccttgggattggctataatggttttccaagaggctgctctgatgacaaacttccttgggccaagaaatcaagaactggggacccattagagaccaagtatccatatgtttgtcacgctgaagtcaatgccatactaaacacaaaccacgcatcggcggctggccagaagctttatgtgacaatgttcccttgcaatgaatgtgccaagattattttacagtctggtgttgctgaggtaatctattttgtggaaaagagaccaaatgactcagatgttgcctatgtagcttctcacaagctcttatccatggcaaacgtcaaagtcaggaaacatcaaccagagatggatgagatcttgatcaagttcgaagaacacttactccaaccagagacctaa

SEQ ID NO: 28090 - protein, 232 aa, Arabidopsis thaliana
  misc_feature (1)..(232): Ceres Seq. ID no. 2187004
MNSRDLTLVSTSAIFGALISALAFRFFSSNPKNPKSRKFTSTEISAISRKFPALDPFSPLKRNGYLSWDDYFMAIAFLSAERSKDPNRQVGACLVSQNGVILGIGYNGFPRGCSDDKLPWAKKSRTGDPLETKYPYVCHAEVNAILNTNHASAAGQKLYVTMFPCNECAKIILQSGVAEVIYFVEKRPNDSDVAYVASHKLLSMANVKVRKHQPEMDEILIKFEEHLLQPET

SEQ ID NO: 28091 - protein, 160 aa, Arabidopsis thaliana
  misc_feature (1)..(160): Ceres Seq. ID no. 2187005
MAIAFLSAERSKDPNRQVGACLVSQNGVILGIGYNGFPRGCSDDKLPWAKKSRTGDPLETKYPYVCHAEVNAILNTNHASAAGQKLYVTMFPCNECAKIILQSGVAEVIYFVEKRPNDSDVAYVASHKLLSMANVKVRKHQPEMDEILIKFEEHLLQPET

SEQ ID NO: 28092 - DNA, 1533 bp, Arabidopsis thaliana
  misc_feature (1)..(1533): Ceres Seq. ID no. 2701972
atggcagtctcgtttctacgaattccaattccatcgcgggtcttctggtacccgacccgacttattcgggtcacaccagcgttattacgattctcttcctccgccgcatttcagccgtcttctacttcactctcaccgccttcttccgacaactttctcgccgataaatgggaatcatatcggaagaagaaggtcgtcattcgaattggatacgtgggtactgattacagaggcttacagattcaaagagacgacccttctatcaaaactattgagggtgagttggaagttgctatatacaaggcaggtgggattagagatagtaactatggtgatcttcataagattggttgggctagaagtagtcgaactgataaaggagttcattctttggcaacgtcaatatcgctgaaaatggagatccctgagacagcgtggaaggatgatcctcaaggcactgttcttgctaaatgcattagcaaacaccttcctgagaatattagagttttcagtgttttaccgtcaaataggagatttgatcctcgaagagagtgtacgctacggaaatattcttacctcctccctgttgatgttcttgggatcaagaatagctttacttcagatgagattgactatcacattacggatttcaacgaaattttaaaagaatttgagggtgaatatcctttccataactatacacagcggtcacggtacagaaggaaatcggaacaaaaaataaagcaaagaaacggacgccctccaagagaaccaaaatcaatcaaagcatcagaatcagagtttagagaggagaaccacatagaaattggagaagaagaagaagaaaaagaagtggatggtgaatctgatgaacatgtggttactcctgattctgataattctcaggtgtacagtcgtgcaaaatggctgtacgagccagatgagacagataagattagcggtgctcatttcaggaaagtgtttcgatgtcgtagtggaaagctagagaattcacttggattcggctttgtggagatctccatatggggagaatcattcatgttgcatcagatacggaagatgattggaacggccgtggcagtgaagagagagctgcttcctagagacatcataagactatctctgaacaagttcacaagaattgtcttgccactggctccatctgaagtactgatcctgagaggaaacagtttcgaagtgcgtagattgcctgagaggccggggatggaagcaacaggtgaatcagaagaagtggagaaggagatagaggagttttacagagcagtgatggttccacaggtgagtatattcctggattctgagaaatctccatggaaagagtgggtggatcatttggataggaatgatggtttgatagacgaggaattggaagatgtaaggaaaggttgggaggagtggaaagctgcgaagccatggatgaatttgaagaagacagaagatgatgaagaagcattgagttctgtttcagtacctattcatcaagctctatga

SEQ ID NO: 28093 - protein, 510 aa, Arabidopsis thaliana
  misc_feature (1)..(510): Ceres Seq. ID no. 2701973
MAVSFLRIPIPSRVFWYPTRLIRVTPALLRFSSSAAFQPSSTSLSPPSSDNFLADKWESYRKKKVVIRIGYVGTDYRGLQIQRDDPSIKTIEGELEVAIYKAGGIRDSNYGDLHKIGWARSSRTDKGVHSLATSISLKMEIPETAWKDDPQGTVLAKCISKHLPENIRVFSVLPSNRRFDPRRECTLRKYSYLLPVDVLGIKNSFTSDEIDYHITDFNEILKEFEGEYPFHNYTQRSRYRRKSEQKIKQRNGRPPREPKSIKASESEFREENHIEIGEEEEEKEVDGESDEHVVTPDSDNSQVYSRAKWLYEPDETDKISGAHFRKVFRCRSGKLENSLGFGFVEISIWGESFMLHQIRKMIGTAVAVKRELLPRDIIRLSLNKFTRIVLPLAPSEVLILRGNSFEVRRLPERPGMEATGESEEVEKEIEEFYRAVMVPQVSIFLDSEKSPWKEWVDHLDRNDGLIDEELEDVRKGWEEWKAAKPWMNLKKTEDDEEALSSVSVPIHQAL

SEQ ID NO: 28094 - protein, 372 aa, Arabidopsis thaliana
  misc_feature (1)..(372): Ceres Seq. ID no. 2701974
MEIPETAWKDDPQGTVLAKCISKHLPENIRVFSVLPSNRRFDPRRECTLRKYSYLLPVDVLGIKNSFTSDEIDYHITDFNEILKEFEGEYPFHNYTQRSRYRRKSEQKIKQRNGRPPREPKSIKASESEFREENHIEIGEEEEEKEVDGESDEHVVTPDSDNSQVYSRAKWLYEPDETDKISGAHFRKVFRCRSGKLENSLGFGFVEISIWGESFMLHQIRKMIGTAVAVKRELLPRDIIRLSLNKFTRIVLPLAPSEVLILRGNSFEVRRLPERPGMEATGESEEVEKEIEEFYRAVMVPQVSIFLDSEKSPWKEWVDHLDRNDGLIDEELEDVRKGWEEWKAAKPWMNLKKTEDDEEALSSVSVPIHQAL

SEQ ID NO: 28095 - DNA, 1017 bp, Arabidopsis thaliana
  misc_feature (1)..(1017): Ceres Seq. ID no. 2702062
atgtttttttttcttgtcatcacatatgtagcaaatcaaaagaatcaaaaaccacaagatcttgcaaagcctaaggagattcttcccattatagttccttccttgtcagtggatgaggttaatgaacagactgacaattttggaccaaattctctgattggtgagggatcttatggaagggtatactatgcaactctaaatgatggaaaagcagttgctttgaagaaactcgatcttgcacctgaagatgaaacaaacaccgagtttttaagccaggtttccatggtttcaagactaaagcatgagaatctcattcaactggtcggttattgtgttgatgaaaaccttcgtgttcttgcttatgagtttgcaacaatgggatcattgcacgatattctgcatggtaggaagggagttcaagatgcactaccaggtccaacacttgactggataacaagggtgaagatagccgttgaggcagctagaggtttagaataccttcatgagaaggttcagcctcaagtaatacatagagacataagatctagcaatatacttctttttgacgactatcaagcaaaaattgctgattttaatctttcaaatcaatctcctgataatgctgctcgtttacaatctacaagagttttgggcagctttggctattactctccagaatatgctatgactggagagttgacacataagagtgatgtatatggttttggggttgtacttctagagctcttgacagggaggaaaccagttgaccatacaatgccgcgaggccaacaaagtcttgtaacttgggctacaccgaaacttagtgaagatacagtagaggagtgtgttgatccaaagctaaagggagaatattctcctaaatcagtagctaagctagcagcggtggcagcattgtgtgtgcaatatgaatctaattgtagaccaaaaatgagtacagttgtgaaagctttgcaacaacttcttatagcgacaggctcaataccgcaattctaa

SEQ ID NO: 28096 - protein, 338 aa, Arabidopsis thaliana
  misc_feature (1)..(338): Ceres Seq. ID no. 2702063
MFFFLVITYVANQKNQKPQDLAKPKEILPIIVPSLSVDEVNEQTDNFGPNSLIGEGSYGRVYYATLNDGKAVALKKLDLAPEDETNTEFLSQVSMVSRLKHENLIQLVGYCVDENLRVLAYEFATMGSLHDILHGRKGVQDALPGPTLDWITRVKIAVEAARGLEYLHEKVQPQVIHRDIRSSNILLFDDYQAKIADFNLSNQSPDNAARLQSTRVLGSFGYYSPEYAMTGELTHKSDVYGFGVVLLELLTGRKPVDHTMPRGQQSLVTWATPKLSEDTVEECVDPKLKGEYSPKSVAKLAAVAALCVQYESNCRPKMSTVVKALQQLLIATGSIPQF

SEQ ID NO: 28097 - protein, 244 aa, Arabidopsis thaliana
  misc_feature (1)..(244): Ceres Seq. ID no. 2702064
MVSRLKHENLIQLVGYCVDENLRVLAYEFATMGSLHDILHGRKGVQDALPGPTLDWITRVKIAVEAARGLEYLHEKVQPQVIHRDIRSSNILLFDDYQAKIADFNLSNQSPDNAARLQSTRVLGSFGYYSPEYAMTGELTHKSDVYGFGVVLLELLTGRKPVDHTMPRGQQSLVTWATPKLSEDTVEECVDPKLKGEYSPKSVAKLAAVAALCVQYESNCRPKMSTVVKALQQLLIATGSIPQF

SEQ ID NO: 28098 - protein, 213 aa, Arabidopsis thaliana
  misc_feature (1)..(213): Ceres Seq. ID no. 2702065
MGSLHDILHGRKGVQDALPGPTLDWITRVKIAVEAARGLEYLHEKVQPQVIHRDIRSSNILLFDDYQAKIADFNLSNQSPDNAARLQSTRVLGSFGYYSPEYAMTGELTHKSDVYGFGVVLLELLTGRKPVDHTMPRGQQSLVTWATPKLSEDTVEECVDPKLKGEYSPKSVAKLAAVAALCVQYESNCRPKMSTVVKALQQLLIATGSIPQF

SEQ ID NO: 28099 - DNA, 2673 bp, Arabidopsis thaliana
  misc_feature (1)..(2673): Ceres Seq. ID no. 2702152
atggaagatgatggtggtagtgatggaggcgaaggaaatggtgggttttcacctaattctagctttggggcattcgctgacactgccatggatttggatttcatggatgaactcttgtttgatggatgttggctagagacaacagatagtaagagcttgaagcagacagaacaatctccttcagcttctaccgccatgaatgacaatagccctttcctctgctttggtgagaatccatctcaagataatttctctaatgaagaaacagagagaatgtttcctcaggctgaaaagtttctcctagaagaagctgaggtgggaaaaagttggtggattgctccaagtgcaagtgaaggcccgtcttcatctgtgaaggagaggctactacaagctattagtggtcttaacgaggcggtgcaagataaggacttcttggttcagatatgggtgccaattcagcaggaagggaagagctttcttactacttgggctcagccacatttattcaaccaagaatactccagccttgcagaatacagacatgtttcagagacttataatttcccggctgatgagggtatgaaagattttgtgggtcttcccggtcgtgttttcttgcagaagtttcctgagtggactcctgatgtgcgtttctttagaagagatgaatatccacgcatcaaagaagcacaaaagtgtgatgttcgtggttcacttgcccttcctgttttcgaaagaggtagtgggacttgtttgggtgttgttgagatcgtcacaacaactcagaagatgaattaccggcaagaacttgagaagatgtgtaaagctcttgaggtctatagtgatttctactgtgctgcattacctgaaataaaagatttcctggccacaatctgcagatcatatgattttcctctagctttgtcatgggcgccgtgtgctcggcaagggaaagttggttcccgacattctgatgagaacttctctgagtgtgtttcaacaatcgattctgcttgttctgtccccgacgaacagagcaaaagtttttgggaggcatgctctgaacaccatctgctccagggggaaggcattgttgggaaagcatttgaagccaccaaactcttttttgtgcccgaagtggccacatttagcaagactaactacccccttgcacaccacgccaagatatctggactacatgctgctttagcagttccattaaagagcaaatctggtttggttgagtttgtgttggaatttttctttccgaaagcatgccttgacactgaagcgcaacaggaaatgctcaagtcactatgtgtgacactgcagcaagatttcaggagttcaaatcttttcatcaaagacctagagttagaagtcgtattacctgtaagagagacaatgctcttctcagaaaacctgctatgtggagcagaaaccgtagagtcgttgacagaaattcaaatgcaagaatcctcatggatcgcccacatgataaaggcaaacgagaagggtaaagatgtatcactttcttgggagtaccagaaagaagatcctaaagagctctcatctggccgggagaacagtcagcttgatccagtccccaataatgttcctttagaagctgagcaattacagcaagcatcaactccaggactcagagtcgacatcggtccaagcacagaatcagcttcgactggtgggggaaatatgttaagcagtaggagaccaggggagaaaaaaagagcaaaaacagaaaagaccattggcttggaggttcttcgacaatactttgctggaagcctcaaggatgcagccaagagcattggtgtttgtccaactaccttgaaaaggatatgcaggcaacatggaataatgcgatggccctcccgaaaaatcaagaaggttgggcattcgttgaagaaactccaactagttatggactctgtccaaggtgcgcagggctctatccaactcgattcattctatacaagcttcccagagttgaactccccaaatatgtctagcaatggcccttccttgaagagtaatgaacagccaagtcatttgaatgctcaaaccgataatggtattatggcagaggaaaaccccaggtcaccatcatcttcttgcagcaagagctctggttcaagcaacaataatgagaatactggaaacattctagttgctgaggatgctgatgcggtgttaaagagagctcatagcgaagcacaactgcataatgtgaatcaggaggaaacaaaatgtcttgcaagaacccagagccataaaacattcaaggagcctcttgttcttgataattcatctccattaacaggtagtagcaacacgagtttaagagctagaggtgccatcaaagtgaaagcgacatttggtgaggccagaatacggtttaccttactcccgagttggggcttcgcagagctgaagcaagagattgctaggcgtttcaacatagatgacatttcctggtttgaccttaagtacctggatgatgataaggagtgggttcttctgacatgtgaagcggatctcgtggaatgcattgacatatatagattaacacagacccacacaattaaaataagtctgaacgaagcttctcaagtcaagctaagtggttcttttggcaacactggtctttcctga

SEQ ID NO: 28100 - protein, 890 aa, Arabidopsis thaliana
  misc_feature (1)..(890): Ceres Seq. ID no. 2702153
MEDDGGSDGGEGNGGFSPNSSFGAFADTAMDLDFMDELLFDGCWLETTDSKSLKQTEQSPSASTAMNDNSPFLCFGENPSQDNFSNEETERMFPQAEKFLLEEAEVGKSWWIAPSASEGPSSSVKERLLQAISGLNEAVQDKDFLVQIWVPIQQEGKSFLTTWAQPHLFNQEYSSLAEYRHVSETYNFPADEGMKDFVGLPGRVFLQKFPEWTPDVRFFRRDEYPRIKEAQKCDVRGSLALPVFERGSGTCLGVVEIVTTTQKMNYRQELEKMCKALEVYSDFYCAALPEIKDFLATICRSYDFPLALSWAPCARQGKVGSRHSDENFSECVSTIDSACSVPDEQSKSFWEACSEHHLLQGEGIVGKAFEATKLFFVPEVATFSKTNYPLAHHAKISGLHAALAVPLKSKSGLVEFVLEFFFPKACLDTEAQQEMLKSLCVTLQQDFRSSNLFIKDLELEVVLPVRETMLFSENLLCGAETVESLTEIQMQESSWIAHMIKANEKGKDVSLSWEYQKEDPKELSSGRENSQLDPVPNNVPLEAEQLQQASTPGLRVDIGPSTESASTGGGNMLSSRRPGEKKRAKTEKTIGLEVLRQYFAGSLKDAAKSIGVCPTTLKRICRQHGIMRWPSRKIKKVGHSLKKLQLVMDSVQGAQGSIQLDSFYTSFPELNSPNMSSNGPSLKSNEQPSHLNAQTDNGIMAEENPRSPSSSCSKSSGSSNNNENTGNILVAEDADAVLKRAHSEAQLHNVNQEETKCLARTQSHKTFKEPLVLDNSSPLTGSSNTSLRARGAIKVKATFGEARIRFTLLPSWGFAELKQEIARRFNIDDISWFDLKYLDDDKEWVLLTCEADLVECIDIYRLTQTHTIKISLNEASQVKLSGSFGNTGLS

SEQ ID NO: 28101 - protein, 861 aa, Arabidopsis thaliana
  misc_feature (1)..(861): Ceres Seq. ID no. 2702154
MDLDFMDELLFDGCWLETTDSKSLKQTEQSPSASTAMNDNSPFLCFGENPSQDNFSNEETERMFPQAEKFLLEEAEVGKSWWIAPSASEGPSSSVKERLLQAISGLNEAVQDKDFLVQIWVPIQQEGKSFLTTWAQPHLFNQEYSSLAEYRHVSETYNFPADEGMKDFVGLPGRVFLQKFPEWTPDVRFFRRDEYPRIKEAQKCDVRGSLALPVFERGSGTCLGVVEIVTTTQKMNYRQELEKMCKALEVYSDFYCAALPEIKDFLATICRSYDFPLALSWAPCARQGKVGSRHSDENFSECVSTIDSACSVPDEQSKSFWEACSEHHLLQGEGIVGKAFEATKLFFVPEVATFSKTNYPLAHHAKISGLHAALAVPLKSKSGLVEFVLEFFFPKACLDTEAQQEMLKSLCVTLQQDFRSSNLFIKDLELEVVLPVRETMLFSENLLCGAETVESLTEIQMQESSWIAHMIKANEKGKDVSLSWEYQKEDPKELSSGRENSQLDPVPNNVPLEAEQLQQASTPGLRVDIGPSTESASTGGGNMLSSRRPGEKKRAKTEKTIGLEVLRQYFAGSLKDAAKSIGVCPTTLKRICRQHGIMRWPSRKIKKVGHSLKKLQLVMDSVQGAQGSIQLDSFYTSFPELNSPNMSSNGPSLKSNEQPSHLNAQTDNGIMAEENPRSPSSSCSKSSGSSNNNENTGNILVAEDADAVLKRAHSEAQLHNVNQEETKCLARTQSHKTFKEPLVLDNSSPLTGSSNTSLRARGAIKVKATFGEARIRFTLLPSWGFAELKQEIARRFNIDDISWFDLKYLDDDKEWVLLTCEADLVECIDIYRLTQTHTIKISLNEASQVKLSGSFGNTGLS

SEQ ID NO: 28102 - protein, 856 aa, Arabidopsis thaliana
  misc_feature (1)..(856): Ceres Seq. ID no. 2702155
MDELLFDGCWLETTDSKSLKQTEQSPSASTAMNDNSPFLCFGENPSQDNFSNEETERMFPQAEKFLLEEAEVGKSWWIAPSASEGPSSSVKERLLQAISGLNEAVQDKDFLVQIWVPIQQEGKSFLTTWAQPHLFNQEYSSLAEYRHVSETYNFPADEGMKDFVGLPGRVFLQKFPEWTPDVRFFRRDEYPRIKEAQKCDVRGSLALPVFERGSGTCLGVVEIVTTTQKMNYRQELEKMCKALEVYSDFYCAALPEIKDFLATICRSYDFPLALSWAPCARQGKVGSRHSDENFSECVSTIDSACSVPDEQSKSFWEACSEHHLLQGEGIVGKAFEATKLFFVPEVATFSKTNYPLAHHAKISGLHAALAVPLKSKSGLVEFVLEFFFPKACLDTEAQQEMLKSLCVTLQQDFRSSNLFIKDLELEVVLPVRETMLFSENLLCGAETVESLTEIQMQESSWIAHMIKANEKGKDVSLSWEYQKEDPKELSSGRENSQLDPVPNNVPLEAEQLQQASTPGLRVDIGPSTESASTGGGNMLSSRRPGEKKRAKTEKTIGLEVLRQYFAGSLKDAAKSIGVCPTTLKRICRQHGIMRWPSRKIKKVGHSLKKLQLVMDSVQGAQGSIQLDSFYTSFPELNSPNMSSNGPSLKSNEQPSHLNAQTDNGIMAEENPRSPSSSCSKSSGSSNNNENTGNILVAEDADAVLKRAHSEAQLHNVNQEETKCLARTQSHKTFKEPLVLDNSSPLTGSSNTSLRARGAIKVKATFGEARIRFTLLPSWGFAELKQEIARRFNIDDISWFDLKYLDDDKEWVLLTCEADLVECIDIYRLTQTHTIKISLNEASQVKLSGSFGNTGLS

SEQ ID NO: 28103 - DNA, 1140 bp, Arabidopsis thaliana
  misc_feature (1)..(1140): Ceres Seq. ID no. 2702261
atggaaatcgatgaagaagagccaatggtgttcttggaccgtacaacaagagcaacacggggtaaacggatgaccaagttgcttgatgacgaagtagaagaagatgaacagttttggaatcaagaagctcttaaagaggaagaacatgatgatgaatatgaagcagaacgtgaggttgctgatgagtttgacagtgacttcaatgacgatgtatttatgtcttgcttatgtattgagtacttattcatcaaggagcctgagcctgatgcagtcgctgtaaatgaaaaagaattgagggatctgccaaagaagcggctgatttaccctgggaaaactgcttcaaagaaaaagaaaaagaagacgaaggtagtttcacaactagaatatattcctggagatgagaagccaggtgaagaattgggaaacaaggaacaagaagaaaaagaagagaatgaagcacaagaagatatggaaggtgagaaagtcattaggaaatcaacacggacttcagtggttgtacggcaagcagaaagagatgcattgcgtgctgctatacaagcaacaacaaagccaatacaaaggaaaaaagtaggggaggaaaaacggatgacccaagaagaaatgctgctggaagctgctcaaacagaaatcatgaacttgaggaatttagaacgtgtcttggcaagggaagaagaagtaaaaaagaaagcgattgtgcataaagcagtctacaagggtcctcagattcggtatcattcaaaagatggatgtaactatttagaattctgtaatggtgcgtcattcaattcagagttgtcgacgaagtctgttccctatccagaaaaagctgtatgtgtgattacgggattacctgccaagtaccgggatccaaaaacgggtcttccttatgcaactagagacgccttcaaagcaatacgtgaaaggttcatggacgaacatgatggtttgagaaagaaaatggagatgggagatttgtttgatacactagtggcgaaaggttttgcaacaaaacaaaagagaacgaagattccaaagagtaacaaatcattttccctcagaagctcagctcgtttccttagctccgagtctgaagaagagagtgaagaagattcagattaa

SEQ ID NO: 28104 - protein, 379 aa, Arabidopsis thaliana
  misc_feature (1)..(379): Ceres Seq. ID no. 2702262
MEIDEEEPMVFLDRTTRATRGKRMTKLLDDEVEEDEQFWNQEALKEEEHDDEYEAEREVADEFDSDFNDDVFMSCLCIEYLFIKEPEPDAVAVNEKELRDLPKKRLIYPGKTASKKKKKKTKVVSQLEYIPGDEKPGEELGNKEQEEKEENEAQEDMEGEKVIRKSTRTSVVVRQAERDALRAAIQATTKPIQRKKVGEEKRMTQEEMLLEAAQTEIMNLRNLERVLAREEEVKKKAIVHKAVYKGPQIRYHSKDGCNYLEFCNGASFNSELSTKSVPYPEKAVCVITGLPAKYRDPKTGLPYATRDAFKAIRERFMDEHDGLRKKMEMGDLFDTLVAKGFATKQKRTKIPKSNKSFSLRSSARFLSSESEEESEEDSD

SEQ ID NO: 28105 - protein, 371 aa, Arabidopsis thaliana
  misc_feature (1)..(371): Ceres Seq. ID no. 2702263
MVFLDRTTRATRGKRMTKLLDDEVEEDEQFWNQEALKEEEHDDEYEAEREVADEFDSDFNDDVFMSCLCIEYLFIKEPEPDAVAVNEKELRDLPKKRLIYPGKTASKKKKKKTKVVSQLEYIPGDEKPGEELGNKEQEEKEENEAQEDMEGEKVIRKSTRTSVVVRQAERDALRAAIQATTKPIQRKKVGEEKRMTQEEMLLEAAQTEIMNLRNLERVLAREEEVKKKAIVHKAVYKGPQIRYHSKDGCNYLEFCNGASFNSELSTKSVPYPEKAVCVITGLPAKYRDPKTGLPYATRDAFKAIRERFMDEHDGLRKKMEMGDLFDTLVAKGFATKQKRTKIPKSNKSFSLRSSARFLSSESEEESEEDSD

SEQ ID NO: 28106 - protein, 356 aa, Arabidopsis thaliana
  misc_feature (1)..(356): Ceres Seq. ID no. 2702264
MTKLLDDEVEEDEQFWNQEALKEEEHDDEYEAEREVADEFDSDFNDDVFMSCLCIEYLFIKEPEPDAVAVNEKELRDLPKKRLIYPGKTASKKKKKKTKVVSQLEYIPGDEKPGEELGNKEQEEKEENEAQEDMEGEKVIRKSTRTSVVVRQAERDALRAAIQATTKPIQRKKVGEEKRMTQEEMLLEAAQTEIMNLRNLERVLAREEEVKKKAIVHKAVYKGPQIRYHSKDGCNYLEFCNGASFNSELSTKSVPYPEKAVCVITGLPAKYRDPKTGLPYATRDAFKAIRERFMDEHDGLRKKMEMGDLFDTLVAKGFATKQKRTKIPKSNKSFSLRSSARFLSSESEEESEEDSD

SEQ ID NO: 28107 - DNA, 1179 bp, Arabidopsis thaliana
  misc_feature (1)..(1179): Ceres Seq. ID no. 2702287
atgtcgccgtcaatgatagctccggtgatggaagaagagaacaagaaataccaaaaaggcgtgaaacatctttgtgaaaatggtctgaccaaagtaccaaccaagtatatatggcctgaacctgaccgacccatcttgacaaaatcggacaagctcatcaaaccaaacaaaaacctaaagctccccctcatagatttcgctgagctccttggacctaaccggcctcatgttctacgaaccatagccgaggcctgcaaaacctacggcttctttcaggttggttctctaaaccctaaagcacatgcggtgatatctagatttcttgctaaacaagtaagctatggtaatgggcaggttgtgaatcatgggatggaaggagacgtgagcaagaatatgatagacgtgtgtaagagattctttgagcttccgtacgaggagagatccaagtacatgtcgtcggacatgtcggctccagtacgatacggcacgagtttcaaccagatcaaagacaatgtcttttgttggagagacttcttgaaactctatgcacatccactccctgactatcttcctcattggccttcttctccttctgacttcaggagttcggcggctacatacgctaaagagacgaaagagatgttcgaaatgatggtcaaagccatcttagaaagtcttgaaattgatggcagtgatgaggcggctaaggagttggaagagggaagtcaggtggtggtggtgaactgttatccaccgtgtccggagccagagctgacgctagggatgccaccgcactcagactacggcttcttgacgcttctacttcaagacgaagtcgaaggtcttcaaattctgtatcgtgacgagtgggtcaccgttgatcccatccctggctcttttgttgtcaacgtaggcgatcatctcgagatatttagcaatgggaggtataaaagcgtgctacatagggtattggtgaactctacaaaacctaggatatcggtggcgtcgctacacagcttccctttgacttctgtcgtaaagccatcgccgaaactcgtcgataaacataatccatcacagtatatggacactgattttaccacttttcttcagtatataacttctcgtgaacccaaatggaagaattttcttgaatcacgcaagattcaccatgtatga

SEQ ID NO: 28108 - protein, 392 aa, Arabidopsis thaliana
  misc_feature (1)..(392): Ceres Seq. ID no. 2702288
MSPSMIAPVMEEENKKYQKGVKHLCENGLTKVPTKYIWPEPDRPILTKSDKLIKPNKNLKLPLIDFAELLGPNRPHVLRTIAEACKTYGFFQVGSLNPKAHAVISRFLAKQVSYGNGQVVNHGMEGDVSKNMIDVCKRFFELPYEERSKYMSSDMSAPVRYGTSFNQIKDNVFCWRDFLKLYAHPLPDYLPHWPSSPSDFRSSAATYAKETKEMFEMMVKAILESLEIDGSDEAAKELEEGSQVVVVNCYPPCPEPELTLGMPPHSDYGFLTLLLQDEVEGLQILYRDEWVTVDPIPGSFVVNVGDHLEIFSNGRYKSVLHRVLVNSTKPRISVASLHSFPLTSVVKPSPKLVDKHNPSQYMDTDFTTFLQYITSREPKWKNFLESRKIHHV

SEQ ID NO: 28109 - protein, 388 aa, Arabidopsis thaliana
  misc_feature (1)..(388): Ceres Seq. ID no. 2702289
MIAPVMEEENKKYQKGVKHLCENGLTKVPTKYIWPEPDRPILTKSDKLIKPNKNLKLPLIDFAELLGPNRPHVLRTIAEACKTYGFFQVGSLNPKAHAVISRFLAKQVSYGNGQVVNHGMEGDVSKNMIDVCKRFFELPYEERSKYMSSDMSAPVRYGTSFNQIKDNVFCWRDFLKLYAHPLPDYLPHWPSSPSDFRSSAATYAKETKEMFEMMVKAILESLEIDGSDEAAKELEEGSQVVVVNCYPPCPEPELTLGMPPHSDYGFLTLLLQDEVEGLQILYRDEWVTVDPIPGSFVVNVGDHLEIFSNGRYKSVLHRVLVNSTKPRISVASLHSFPLTSVVKPSPKLVDKHNPSQYMDTDFTTFLQYITSREPKWKNFLESRKIHHV

SEQ ID NO: 28110 - protein, 383 aa, Arabidopsis thaliana
  misc_feature (1)..(383): Ceres Seq. ID no. 2702290
MEEENKKYQKGVKHLCENGLTKVPTKYIWPEPDRPILTKSDKLIKPNKNLKLPLIDFAELLGPNRPHVLRTIAEACKTYGFFQVGSLNPKAHAVISRFLAKQVSYGNGQVVNHGMEGDVSKNMIDVCKRFFELPYEERSKYMSSDMSAPVRYGTSFNQIKDNVFCWRDFLKLYAHPLPDYLPHWPSSPSDFRSSAATYAKETKEMFEMMVKAILESLEIDGSDEAAKELEEGSQVVVVNCYPPCPEPELTLGMPPHSDYGFLTLLLQDEVEGLQILYRDEWVTVDPIPGSFVVNVGDHLEIFSNGRYKSVLHRVLVNSTKPRISVASLHSFPLTSVVKPSPKLVDKHNPSQYMDTDFTTFLQYITSREPKWKNFLESRKIHHV

SEQ ID NO: 28111 - DNA, 744 bp, Arabidopsis thaliana
  misc_feature (1)..(744): Ceres Seq. ID no. 2702364
atggaaattgcaaccgatacagcaaagcagatgagagacgaagagttgttcaaagcagcggaatggggagattcatcgttgttcatgtcattatctgaagaacagctctctaaatctctcaatttcagaaacgaagatggtcgctctctcctccatgtcgctgcttccttcggccattctcaaatagtgaagttgttatcaagttcagatgaagcaaagactgtaatcaatagcaaggatgatgaaggatgggctcctttgcattccgctgctagcatcggtaatgctgagctcgttgaggtgcttttgaccagaggtgctgatgtcaatgccaaaaataacggtggtcgcactgctcttcactatgctgctagcaaaggccggttggagattgctcagcttttattaacacacggtgcaaagattaacatcacagacaaggttggttgcactccgcttcacagggcagcaagcgtgggaaagttagaagtttgtgaatttcttattgaagaaggagcagagatcgatgctacggataaaatgggtcaaactgcactcatgcattcagttatctgcgatgacaaacagttaaaagtttccatggatcaggttgcgttcctgcttataagacatggtgcagatgtggatgtagaagacaaggaaggctacactgttctaggccgagctaccaatgaattccgacctgcacttatcgatgctgctaaggccatgcttgaaggataa

SEQ ID NO: 28112 - protein, 247 aa, Arabidopsis thaliana
  misc_feature (1)..(247): Ceres Seq. ID no. 2702365
MEIATDTAKQMRDEELFKAAEWGDSSLFMSLSEEQLSKSLNFRNEDGRSLLHVAASFGHSQIVKLLSSSDEAKTVINSKDDEGWAPLHSAASIGNAELVEVLLTRGADVNAKNNGGRTALHYAASKGRLEIAQLLLTHGAKINITDKVGCTPLHRAASVGKLEVCEFLIEEGAEIDATDKMGQTALMHSVICDDKQLKVSMDQVAFLLIRHGADVDVEDKEGYTVLGRATNEFRPALIDAAKAMLEG

SEQ ID NO: 28113 - protein, 237 aa, Arabidopsis thaliana
  misc_feature (1)..(237): Ceres Seq. ID no. 2702366
MRDEELFKAAEWGDSSLFMSLSEEQLSKSLNFRNEDGRSLLHVAASFGHSQIVKLLSSSDEAKTVINSKDDEGWAPLHSAASIGNAELVEVLLTRGADVNAKNNGGRTALHYAASKGRLEIAQLLLTHGAKINITDKVGCTPLHRAASVGKLEVCEFLIEEGAEIDATDKMGQTALMHSVICDDKQLKVSMDQVAFLLIRHGADVDVEDKEGYTVLGRATNEFRPALIDAAKAMLEG

SEQ ID NO: 28114 - protein, 219 aa, Arabidopsis thaliana
  misc_feature (1)..(219): Ceres Seq. ID no. 2702367
MSLSEEQLSKSLNFRNEDGRSLLHVAASFGHSQIVKLLSSSDEAKTVINSKDDEGWAPLHSAASIGNAELVEVLLTRGADVNAKNNGGRTALHYAASKGRLEIAQLLLTHGAKINITDKVGCTPLHRAASVGKLEVCEFLIEEGAEIDATDKMGQTALMHSVICDDKQLKVSMDQVAFLLIRHGADVDVEDKEGYTVLGRATNEFRPALIDAAKAMLEG

SEQ ID NO: 28115 - DNA, 1860 bp, Arabidopsis thaliana
  misc_feature (1)..(1860): Ceres Seq. ID no. 2702375
atgagaggttcttggtacaagagtgtttcctctgtttttggtctcagaccacggatcagagggttgttattcttcattgttggtgttgtggctctagttactattttagcaccattgacatctaattcgtatgattcttcgtcaagttcgacacttgtgccgaacatttatagtaactataggaggataaaggagcaagctgctgttgattatcttgatctgaggtctctttctttaggggctagtttaaaagagtttcctttttgtggtaaagaaagagaaagttatgtgccttgttataacataactgggaatttgcttgctgggcttcaagagggtgaggagttagatcgacattgcgagtttgaaagagagaaggaaagatgtgtagttcgtcctccgagagattataaaataccacttaggtggccacttggtagagatatcatatggagtgggaacgtgaagattaccaaagaccagtttctttcttcaggaactgtgacaacgaggttaatgttgcttgaagagaatcaaataacctttcactcggaggacggcctggtctttgatggggtcaaagactatgctcgtcaaattgctgagatgataggtttaggaagtgatactgaatttgctcaagcgggtgtacggactgtgttagacattggttgcggatttggtagctttggtgctcatttagtgtctttgaagctgatgcctatatgtattgctgagtatgaggcaactgggagccaagttcagttagctctagagagaggccttcctgcaatgattggcaatttcttttcaaaacagcttccttatccagcactgtcttttgatatggtccattgtgctcaatgtggcactacttgggatatcaaagatgcaatgctacttttggaagtggatcgtgttctgaaacccgggggatactttgttttaacttctcccacaaacaaagcacagggaaacttaccagataccaagaaaacgagcatctcaacacgggtgaatgagttatctaagaaaatctgttggagtctaacagctcagcaggatgagacgtttctttggcagaaaacttctgattcaagttgctattcttctcgttcgcaagcttctatacctctttgcaaagatggagatagcgttccgtattaccacccattggttccatgtataagcggaaccacgagtaaacgctggatttctatacagaacaggtctgctgttgcaggaacaacctctgccgggcttgaaattcatggtttaaaaccggaagaattcttcgaggatacacaaatatggagatcagctctgaaaaactattggtccttgcttacacctctaattttctctgaccatccgaagagacccggtgatgaggatcctctcccgcctttcaacatgatacgcaatgtgatggacatgcatgctcgttttgggaatttaaatgccgctttactcgacgaaggaaaatctgcttgggtaatgaacgtcgtcccagtcaatgcacgtaatactcttcctatcatacttgatcgtggtttcgccggtgttctacatgactggtgtgaaccattcccgacatatcctcgaacatatgacatgcttcatgccaatgaacttctcacacatcttagctcagaacgatgcagcctaatggacttgttcttggagatggaccggattcttcgccctgagggatgggttgttctaagcgacaaagtgggagtaatcgagatggctcgagcacttgcagctcgagtgcgttgggaagcaagagtcattgatcttcaagatggtagtgaccaaagacttctcgtctgtcaaaaaccattcatcaaaaaataa

SEQ ID NO: 28116 - protein, 619 aa, Arabidopsis thaliana
  misc_feature (1)..(619): Ceres Seq. ID no. 2702376
MRGSWYKSVSSVFGLRPRIRGLLFFIVGVVALVTILAPLTSNSYDSSSSSTLVPNIYSNYRRIKEQAAVDYLDLRSLSLGASLKEFPFCGKERESYVPCYNITGNLLAGLQEGEELDRHCEFEREKERCVVRPPRDYKIPLRWPLGRDIIWSGNVKITKDQFLSSGTVTTRLMLLEENQITFHSEDGLVFDGVKDYARQIAEMIGLGSDTEFAQAGVRTVLDIGCGFGSFGAHLVSLKLMPICIAEYEATGSQVQLALERGLPAMIGNFFSKQLPYPALSFDMVHCAQCGTTWDIKDAMLLLEVDRVLKPGGYFVLTSPTNKAQGNLPDTKKTSISTRVNELSKKICWSLTAQQDETFLWQKTSDSSCYSSRSQASIPLCKDGDSVPYYHPLVPCISGTTSKRWISIQNRSAVAGTTSAGLEIHGLKPEEFFEDTQIWRSALKNYWSLLTPLIFSDHPKRPGDEDPLPPFNMIRNVMDMHARFGNLNAALLDEGKSAWVMNVVPVNARNTLPIILDRGFAGVLHDWCEPFPTYPRTYDMLHANELLTHLSSERCSLMDLFLEMDRILRPEGWVVLSDKVGVIEMARALAARVRWEARVIDLQDGSDQRLLVCQKPFIKK

SEQ ID NO: 28117 - protein, 447 aa, Arabidopsis thaliana
  misc_feature (1)..(447): Ceres Seq. ID no. 2702377
MLLEENQITFHSEDGLVFDGVKDYARQIAEMIGLGSDTEFAQAGVRTVLDIGCGFGSFGAHLVSLKLMPICIAEYEATGSQVQLALERGLPAMIGNFFSKQLPYPALSFDMVHCAQCGTTWDIKDAMLLLEVDRVLKPGGYFVLTSPTNKAQGNLPDTKKTSISTRVNELSKKICWSLTAQQDETFLWQKTSDSSCYSSRSQASIPLCKDGDSVPYYHPLVPCISGTTSKRWISIQNRSAVAGTTSAGLEIHGLKPEEFFEDTQIWRSALKNYWSLLTPLIFSDHPKRPGDEDPLPPFNMIRNVMDMHARFGNLNAALLDEGKSAWVMNVVPVNARNTLPIILDRGFAGVLHDWCEPFPTYPRTYDMLHANELLTHLSSERCSLMDLFLEMDRILRPEGWVVLSDKVGVIEMARALAARVRWEARVIDLQDGSDQRLLVCQKPFIKK

SEQ ID NO: 28118 - protein, 417 aa, Arabidopsis thaliana
  misc_feature (1)..(417): Ceres Seq. ID no. 2702378
MIGLGSDTEFAQAGVRTVLDIGCGFGSFGAHLVSLKLMPICIAEYEATGSQVQLALERGLPAMIGNFFSKQLPYPALSFDMVHCAQCGTTWDIKDAMLLLEVDRVLKPGGYFVLTSPTNKAQGNLPDTKKTSISTRVNELSKKICWSLTAQQDETFLWQKTSDSSCYSSRSQASIPLCKDGDSVPYYHPLVPCISGTTSKRWISIQNRSAVAGTTSAGLEIHGLKPEEFFEDTQIWRSALKNYWSLLTPLIFSDHPKRPGDEDPLPPFNMIRNVMDMHARFGNLNAALLDEGKSAWVMNVVPVNARNTLPIILDRGFAGVLHDWCEPFPTYPRTYDMLHANELLTHLSSERCSLMDLFLEMDRILRPEGWVVLSDKVGVIEMARALAARVRWEARVIDLQDGSDQRLLVCQKPFIKK

SEQ ID NO: 28119 - DNA, 1563 bp, Arabidopsis thaliana
  misc_feature (1)..(1563): Ceres Seq. ID no. 2702694
atgacaggtttgcttaatgacagggagctttatagcaataacattacaggggagatacctgaggagcttggcgacttggtggaactagtaagcttggatctttacgcaaacagcataagcggtcccatcccttcgtctcttggcaaactaggaaaactccggttcttgcgtcttaacaacaatagcttatcaggggaaattccaatgactttgacttctgtgcagctgcaagttctggatatctcaaacaatcggctcagtggagatattcctgttaatggttctttttcgctcttcactcctatcagttttgcgaataatagcttaacggatcttcccgaacctccgcctacttctacctctcctacgccaccaccaccttcaggttttcacttccattttcttcttagtgtttcttgtcggggggcaaatgactgcagcaatagcagggggagttgctgcaggtgcagcacttctatttgctgttccagccattgcgtttctgaagaagacccagaggttcatttaggacaactcaaaaggtttaccttgcgtgaactgttagttgctactgataactttagcaataaaaatgtattgggtagaggtggttttggtaaagtgtataaaggacgtttagccgatggcaatctagtggctgtcaaaaggctaaaagaagaacgtaccaagggtggggaactgcagtttcaaaccgaagttgagatgatcagtatggccgttcataggaacttgcttcggcttcgtggcttttgcatgactccaactgaaagattacttgtttatccctacatggctaatggaagtgttgcttcttgtttaagagagcgtcctgaaggcaatccagcacttgattggccaaaaagaaagcatattgctctgggatcagcaagggggcttgcgtatttacatgatcattgcgaccaaaaaatcattcaccgggatgttaaagctgctaatatattgttagatgaagagtttgaagctgttgttggagattttgggctcgcaaaattaatgaattataatgactcccatgtgacaactgctgtacgcggtacaattggccatatagcgcccgagtacctctcgacaggaaaatcttctgagaagactgatgtttttgggtacggggtcatgcttctcgagctcatcactggacaaaaggctttcgatcttgctcggcttgcaaatgatgatgatatcatgttactcgactgggtgaaagaggttttgaaagagaagaagttggaaagccttgtggatgcagaactcgaaggaaagtacgtggaaacagaagtggagcagctgatacaaatggctctgctctgcactcaaagttctgcaatggaacgtccaaagatgtcagaagtagtgagaatgctggaaggagatggtttagctgagagatgggaagaatggcaaaaggaggagatgccaatacatgattttaactatcaagcctatcctcatgctggcactgactggctcatcccctattccaattcccttatcgaaaacgattacccctcgggtccaagataa

SEQ ID NO: 28120 - protein, 520 aa, Arabidopsis thaliana
  misc_feature (1)..(520): Ceres Seq. ID no. 2702695
MTGLLNDRELYSNNITGEIPEELGDLVELVSLDLYANSISGPIPSSLGKLGKLRFLRLNNNSLSGEIPMTLTSVQLQVLDISNNRLSGDIPVNGSFSLFTPISFANNSLTDLPEPPPTSTSPTPPPPSGFHFHFLLSVSCRGANDCSNSRGSCCRCSTSICCSSHCVSEEDPEVHLGQLKRFTLRELLVATDNFSNKNVLGRGGFGKVYKGRLADGNLVAVKRLKEERTKGGELQFQTEVEMISMAVHRNLLRLRGFCMTPTERLLVYPYMANGSVASCLRERPEGNPALDWPKRKHIALGSARGLAYLHDHCDQKIIHRDVKAANILLDEEFEAVVGDFGLAKLMNYNDSHVTTAVRGTIGHIAPEYLSTGKSSEKTDVFGYGVMLLELITGQKAFDLARLANDDDIMLLDWVKEVLKEKKLESLVDAELEGKYVETEVEQLIQMALLCTQSSAMERPKMSEVVRMLEGDGLAERWEEWQKEEMPIHDFNYQAYPHAGTDWLIPYSNSLIENDYPSGPR

SEQ ID NO: 28121 - protein, 452 aa, Arabidopsis thaliana
  misc_feature (1)..(452): Ceres Seq. ID no. 2702696
MTLTSVQLQVLDISNNRLSGDIPVNGSFSLFTPISFANNSLTDLPEPPPTSTSPTPPPPSGFHFHFLLSVSCRGANDCSNSRGSCCRCSTSICCSSHCVSEEDPEVHLGQLKRFTLRELLVATDNFSNKNVLGRGGFGKVYKGRLADGNLVAVKRLKEERTKGGELQFQTEVEMISMAVHRNLLRLRGFCMTPTERLLVYPYMANGSVASCLRERPEGNPALDWPKRKHIALGSARGLAYLHDHCDQKIIHRDVKAANILLDEEFEAVVGDFGLAKLMNYNDSHVTTAVRGTIGHIAPEYLSTGKSSEKTDVFGYGVMLLELITGQKAFDLARLANDDDIMLLDWVKEVLKEKKLESLVDAELEGKYVETEVEQLIQMALLCTQSSAMERPKMSEVVRMLEGDGLAERWEEWQKEEMPIHDFNYQAYPHAGTDWLIPYSNSLIENDYPSGPR

SEQ ID NO: 28122 - protein, 279 aa, Arabidopsis thaliana
  misc_feature (1)..(279): Ceres Seq. ID no. 2702697
MISMAVHRNLLRLRGFCMTPTERLLVYPYMANGSVASCLRERPEGNPALDWPKRKHIALGSARGLAYLHDHCDQKIIHRDVKAANILLDEEFEAVVGDFGLAKLMNYNDSHVTTAVRGTIGHIAPEYLSTGKSSEKTDVFGYGVMLLELITGQKAFDLARLANDDDIMLLDWVKEVLKEKKLESLVDAELEGKYVETEVEQLIQMALLCTQSSAMERPKMSEVVRMLEGDGLAERWEEWQKEEMPIHDFNYQAYPHAGTDWLIPYSNSLIENDYPSGPR

SEQ ID NO: 28123 - DNA, 1638 bp, Arabidopsis thaliana
  misc_feature (1)..(1638): Ceres Seq. ID no. 2702830
atggcttccattgatgaagaaaggtcacttcttgaagttgaagaatctcttatacaggaagaagtaaaattatatgctgaagatggttcaatagatattcatggaaacccaccattgaagcagacaacaggaaactggaaagcttgtccattcatttttgcaaacgaatgctgcgaacggttggcttattatggaattgccaagaatctcatcacgtacttcacaaatgaattgcatgagactaatgtttctgctgctagacacgtcatgacatggcaaggaacatgttacatcactcctcttattggagctttaatagctgatgcttactggggaagatattggactattgcttgtttctctgccatttatttcaccggaatggttgcattgacactctcagcttcagttccgggtcttaagccagcggaatgcattggctctctatgtccaccagcaacaatggttcagtctacggttttattttcagggctttaccttatcgctcttggcactggaggaatcaaaccatgtgtctcatcctttggtgctgatcagtttgataagaccgatccaagcgaacgagtcagaaaagcttctttctttaactggttttacttcactatcaacattggtgcttttgtttcatctactgttctagtttggattcaagagaattatggatgggaattaggattcttgatacctaccgtgttcatgggacttgctactatgagtttcttctttggcacgccgctttatagatttcagaaaccgagaggtagcccgattactagcgtctgccaagttcttgtagccgcataccgtaaatcgaatctcaaggtccctgaagactccacggacgaaggagatgcaaacactaacccgtggaagctatgtaccgtgactcaagtcgaagaagttaagattctgttacgtttggtccccatttgggcctcaggaatcatcttctcagttctccattcacagatttacactctctttgttcaacaaggacggtgcatgaaacgaaccatcggcttattcgaaatccctcccgcaactctcgggatgttcgacactgcaagtgttctcatatctgtcccaatctatgaccgcgtcatcgttcccttagtgagacggttcacaggcttagctaaaggattcaccgagctacaaagaatggggattggtctttttgtctctgttttgagcttgacatttgcagctatcgttgagacggttcggttacagttagctagagatcttgatctagtggaaagtggagacattgttccattaaacatcttttggcaaatccctcagtactttttaatgggcactgctggagttttcttctttgttgggaggattgagtttttctatgagcaatctccagattcaatgagaagcttgtgtagtgcttgggctcttctcactactacactaggaaactacttgagctcgttgatcattacccttgtggcgtatttgagcggaaaagattgttggattccttcagacaacattaacaatggacatcttgattacttcttctggcttttggtcagtcttggatctgttaacatacctgtttttgtcttcttctctgtgaaatatactcatatgaaggtttga

SEQ ID NO: 28124 - protein, 545 aa, Arabidopsis thaliana
  misc_feature (1)..(545): Ceres Seq. ID no. 2702831
MASIDEERSLLEVEESLIQEEVKLYAEDGSIDIHGNPPLKQTTGNWKACPFIFANECCERLAYYGIAKNLITYFTNELHETNVSAARHVMTWQGTCYITPLIGALIADAYWGRYWTIACFSAIYFTGMVALTLSASVPGLKPAECIGSLCPPATMVQSTVLFSGLYLIALGTGGIKPCVSSFGADQFDKTDPSERVRKASFFNWFYFTINIGAFVSSTVLVWIQENYGWELGFLIPTVFMGLATMSFFFGTPLYRFQKPRGSPITSVCQVLVAAYRKSNLKVPEDSTDEGDANTNPWKLCTVTQVEEVKILLRLVPIWASGIIFSVLHSQIYTLFVQQGRCMKRTIGLFEIPPATLGMFDTASVLISVPIYDRVIVPLVRRFTGLAKGFTELQRMGIGLFVSVLSLTFAAIVETVRLQLARDLDLVESGDIVPLNIFWQIPQYFLMGTAGVFFFVGRIEFFYEQSPDSMRSLCSAWALLTTTLGNYLSSLIITLVAYLSGKDCWIPSDNINNGHLDYFFWLLVSLGSVNIPVFVFFSVKYTHMKV

SEQ ID NO: 28125 - protein, 456 aa, Arabidopsis thaliana
  misc_feature (1)..(456): Ceres Seq. ID no. 2702832
MTWQGTCYITPLIGALIADAYWGRYWTIACFSAIYFTGMVALTLSASVPGLKPAECIGSLCPPATMVQSTVLFSGLYLIALGTGGIKPCVSSFGADQFDKTDPSERVRKASFFNWFYFTINIGAFVSSTVLVWIQENYGWELGFLIPTVFMGLATMSFFFGTPLYRFQKPRGSPITSVCQVLVAAYRKSNLKVPEDSTDEGDANTNPWKLCTVTQVEEVKILLRLVPIWASGIIFSVLHSQIYTLFVQQGRCMKRTIGLFEIPPATLGMFDTASVLISVPIYDRVIVPLVRRFTGLAKGFTELQRMGIGLFVSVLSLTFAAIVETVRLQLARDLDLVESGDIVPLNIFWQIPQYFLMGTAGVFFFVGRIEFFYEQSPDSMRSLCSAWALLTTTLGNYLSSLIITLVAYLSGKDCWIPSDNINNGHLDYFFWLLVSLGSVNIPVFVFFSVKYTHMKV

SEQ ID NO: 28126 - protein, 418 aa, Arabidopsis thaliana
  misc_feature (1)..(418): Ceres Seq. ID no. 2702833
MVALTLSASVPGLKPAECIGSLCPPATMVQSTVLFSGLYLIALGTGGIKPCVSSFGADQFDKTDPSERVRKASFFNWFYFTINIGAFVSSTVLVWIQENYGWELGFLIPTVFMGLATMSFFFGTPLYRFQKPRGSPITSVCQVLVAAYRKSNLKVPEDSTDEGDANTNPWKLCTVTQVEEVKILLRLVPIWASGIIFSVLHSQIYTLFVQQGRCMKRTIGLFEIPPATLGMFDTASVLISVPIYDRVIVPLVRRFTGLAKGFTELQRMGIGLFVSVLSLTFAAIVETVRLQLARDLDLVESGDIVPLNIFWQIPQYFLMGTAGVFFFVGRIEFFYEQSPDSMRSLCSAWALLTTTLGNYLSSLIITLVAYLSGKDCWIPSDNINNGHLDYFFWLLVSLGSVNIPVFVFFSVKYTHMKV

SEQ ID NO: 28127 - DNA, 4473 bp, Arabidopsis thaliana
  misc_feature (1)..(4473): Ceres Seq. ID no. 2702853
atgactaaactggcttacctccatgagccaggggtactccacaatctcgattgccgttttgcattaaacgagatatatacttacaccggaaacatcttgattgcggtgaatccattccaaagacttccgcatttgtatagtgtccatatgatggagcaatataaaggagctgcgtttggagagctaagtccgcatctgtttgctgttgcagacaccagttacagggcgatgattaatgaggcaagaagccagtccattttggttagtggagagagcggagctggaaaaacagagacaaccaaaatgctcatgagatatcttgcattcatgggaggcagatcagataccgaagggagaagcgttgaacaacaagttttagagtctaatccagtgctcgaagcttttggaaacgccaaaactgtgaaaaacaacaattcaagtcggtttggaaaatttgttgagatccaatttgacaagcgtgggaaaatatctggagctgccatccgcacttatcttcttgaacggtctcgtgtttgccaagtttcagacccagagaggaactatcactgcttctacatgctctgtgcagcaccgcctgaggaagctaagaaattcaaggtaggagatccaaggacgttccactatctaaaccagacgaactgctacgaggtttccaatgtagatgatgcaagagagtatttagagaccagaaatgccatggacattgtgggcattggacaagaggcacaggatgccatattccgagttgtagctgcgatcctccaccttgggaatgtcaattttatcaaaggagaagaagcagattcttcaaaactcagggatgataagtcaagatatcatcttcaaacagcagcagaattactcatgtgcaatgagaagatgatggaagattcactctgcaagcgtgttattgtcactccggatggtaacattacaaagccgcttgatccagaatcggcagcctcaaaccgtgatgctttagccaagacagtgtactccaggctgtttgactggattgtagataagatcaacagttcaataggtcaagacccggatgctaaaagcttgatcggagtcctcgacatttatggttttgaaagcttcaagatcaacagttttgagcagctatgcatcaatctcacaaatgagaagttacaacagcatttcaatcagcatgtattcaagatggagcaagaggaatacacgagggaggaaataaactggagctatgttgaatttgttgataaccaggatgtcttagatcttattgagaagaaaccaggaggcataattgccctacttgatgaagcatgcatgtttcccaagtcgactcatgagacgtttgcacagaagatgtatcaaacatataagggacacaagcgtttcagcaaacctaagcttgcccaaacagccttcactgtcaaccactatgcaggagatgttacgtactcagcagagcaatttcttgacaaaaacaaggattatgttgtggcagaacatcaagctttgctagatgcatctaagtgctcttttgtcgccaatttgtttccaccacttccagaagacgcatcaaagcagtccaaattttcatccatagggacccgtttcaagcaacaactccaagctctaatggagacgctgaacacaacagagccccattatattagatgtgtgaaaccaaatgcagttctgaagcccggaatttttgagaacgacaacgtcctaaaccaactaagatgcggaggtgtactggaagctataagaatcagttgtgctggttatccaacgaaacgagctttcgatgaattcctagatcgttttgtgatgctagcaacagacgttccagagggatccgacgaaaaatccgcatgtgcttcgatctgcaacaagatgggtctaaaaggctaccagatagggaaaacaaagatatttcttagggccggacagatggctgaactagatgcaagaagaaccgaggtcttggctggtgccactaaactcattcagaggcagatcagaacttatctgacaagaaaagagttccttgggcagaaaagggctacaatttatatgcaaaaactttggagagcaaaacttgctcgcaagttgtatcaaaacatgagaagagaagctgcttcaatttgtatccaaaagaacattcgtgctcacagagcaaggaaaaactatactaagctccaggcatcagcaacagttattcagactggtttacggacaatgtctgctcgaaacaagcatagacacagaagaagaacaaaggcagcaattataattcagagggaatggagaagacaccaagttcatgaagcttataagaagcacaaaaaagcaacattagcattacaatgtctatggagagctaaagtagctcgaaaagagctaaaaaatctcagaatggctgccagagaaactggggcactaaaggaagccaaggacaagttagagaaacgtgtggaagagctaacctggcgtctcgaattagagaagaatcaaaaggctgatctcgaagacgccaaagcacaagaaatcgcaaaactacaaaataatttaactgaattgcaagagaagctagatgaagcctacgctgcaatcatacgagacaaagaagcagcaaaattagccattgaacaagctccaccaatcatcaaagaggttccagttgtagataacactcaactggagttactgaacagtcaaaacaatgaactggaggttgaggtagctaaattaaaaggaaaaattaaggagtttgaagtgaaatgttttgcacttgagaatgatagcagggcaagtgtaactgaagcagaagatgcaaaatcaaaggccgtcgaatttcaagaaatcatcgaaagattacatacgaacctgtcaaaccttgaatccgaaaatcaggttttgcgtcagcaggctttggccgcttcaacaagcgttgaagagattggagagttaaacagcctgaaggataaggttgcaattctagagtcagaaaatgaaactcttcgaagacagacagagtctgcagaaaagacaatgcctcctgcaagagtttttgcgtctgaaaagaatcttgaaaatgaacatcaaacaaaagagattcaggcaacaaaggagccaaggaatccaatcaatgtgttagcaaaacaagggtctctaacagataggcaacaggagagccatgaggtgcttatgaaatgcctcaccgacgagagaaggtttgataacgaaaaatctgtggcagcttggatagtgtacaaggcattacttcaatggagattatttgaagcagagaaaacaaacatatttgatagaattgttcataagattcgatcgtccattgagggccaagatgacacaagggaactagcttattggctcacaacaagctctaccctcttatatcttctccaatctacactcaagttcagcaatacaaataatgcggcttcaagacgtaacagatcatcccatgctacactatttgggagattggttcaaggaatgcaaccatcttcagtgggattggaaacatccagcggttacagtgggatggctggaataccaaatgaccaacagatggtcgaagctaaatatccggctttactattcaagcaacacttagcagcatacgttgagaaaacatatggaatgatccgagacaaattaaagaaagagataaatccattactaaatctctgtatccatgcaccaagaccaacaagagccaaaaccttgcgagatgtgactaaaagcatccacttgaccacaattgccaagcaacaagcatcatatgtacagtggcagaacattgtcaacaagcttgaacataccttgacttttatggcagagaaccatgtcccatctatgatcacaagaaaactcttccatcaggttttctcgtacatcaatgtgcagctctttaatagtttgttgcttcgccgagagtgttgttcagttagcaatggagaatacctaaaaatgggcttgcatgaattagagcaatggtgcctgaaggcagatgacgaggcaacacgatcaccatgggatgaacttcaacacataaggcaagcagtgatgtttctggtctcacatcaaaagacacagaaatcattggacgaaatcgcaaaagagatatgcccggtactaagcattccacaagtatatcgaatcgggactatgttttgggacgacaaatacggaactcaaggactctcccccgaggtgatcaatcagatgaggaaactaatgacggaagattcagcgaacatgacttacccttctttcttgctagacgtcgattcaagcattcctttctcagtggaagatgtttcgcaatccttccacggcggtaacattagcctctccgacgtcgatccatcgccgcttctccgccagcgatctgattttcacttcttattccagacattgccggaataa

SEQ ID NO: 28128 - protein, 1490 aa, Arabidopsis thaliana
  misc_feature (1)..(1490): Ceres Seq. ID no. 2702854
MTKLAYLHEPGVLHNLDCRFALNEIYTYTGNILIAVNPFQRLPHLYSVHMMEQYKGAAFGELSPHLFAVADTSYRAMINEARSQSILVSGESGAGKTETTKMLMRYLAFMGGRSDTEGRSVEQQVLESNPVLEAFGNAKTVKNNNSSRFGKFVEIQFDKRGKISGAAIRTYLLERSRVCQVSDPERNYHCFYMLCAAPPEEAKKFKVGDPRTFHYLNQTNCYEVSNVDDAREYLETRNAMDIVGIGQEAQDAIFRVVAAILHLGNVNFIKGEEADSSKLRDDKSRYHLQTAAELLMCNEKMMEDSLCKRVIVTPDGNITKPLDPESAASNRDALAKTVYSRLFDWIVDKINSSIGQDPDAKSLIGVLDIYGFESFKINSFEQLCINLTNEKLQQHFNQHVFKMEQEEYTREEINWSYVEFVDNQDVLDLIEKKPGGIIALLDEACMFPKSTHETFAQKMYQTYKGHKRFSKPKLAQTAFTVNHYAGDVTYSAEQFLDKNKDYVVAEHQALLDASKCSFVANLFPPLPEDASKQSKFSSIGTRFKQQLQALMETLNTTEPHYIRCVKPNAVLKPGIFENDNVLNQLRCGGVLEAIRISCAGYPTKRAFDEFLDRFVMLATDVPEGSDEKSACASICNKMGLKGYQIGKTKIFLRAGQMAELDARRTEVLAGATKLIQRQIRTYLTRKEFLGQKRATIYMQKLWRAKLARKLYQNMRREAASICIQKNIRAHRARKNYTKLQASATVIQTGLRTMSARNKHRHRRRTKAAIIIQREWRRHQVHEAYKKHKKATLALQCLWRAKVARKELKNLRMAARETGALKEAKDKLEKRVEELTWRLELEKNQKADLEDAKAQEIAKLQNNLTELQEKLDEAYAAIIRDKEAAKLAIEQAPPIIKEVPVVDNTQLELLNSQNNELEVEVAKLKGKIKEFEVKCFALENDSRASVTEAEDAKSKAVEFQEIIERLHTNLSNLESENQVLRQQALAASTSVEEIGELNSLKDKVAILESENETLRRQTESAEKTMPPARVFASEKNLENEHQTKEIQATKEPRNPINVLAKQGSLTDRQQESHEVLMKCLTDERRFDNEKSVAAWIVYKALLQWRLFEAEKTNIFDRIVHKIRSSIEGQDDTRELAYWLTTSSTLLYLLQSTLKFSNTNNAASRRNRSSHATLFGRLVQGMQPSSVGLETSSGYSGMAGIPNDQQMVEAKYPALLFKQHLAAYVEKTYGMIRDKLKKEINPLLNLCIHAPRPTRAKTLRDVTKSIHLTTIAKQQASYVQWQNIVNKLEHTLTFMAENHVPSMITRKLFHQVFSYINVQLFNSLLLRRECCSVSNGEYLKMGLHELEQWCLKADDEATRSPWDELQHIRQAVMFLVSHQKTQKSLDEIAKEICPVLSIPQVYRIGTMFWDDKYGTQGLSPEVINQMRKLMTEDSANMTYPSFLLDVDSSIPFSVEDVSQSFHGGNISLSDVDPSPLLRQRSDFHFLFQTLPE

SEQ ID NO: 28129 - protein, 1441 aa, Arabidopsis thaliana
  misc_feature (1)..(1441): Ceres Seq. ID no. 2702855
MMEQYKGAAFGELSPHLFAVADTSYRAMINEARSQSILVSGESGAGKTETTKMLMRYLAFMGGRSDTEGRSVEQQVLESNPVLEAFGNAKTVKNNNSSRFGKFVEIQFDKRGKISGAAIRTYLLERSRVCQVSDPERNYHCFYMLCAAPPEEAKKFKVGDPRTFHYLNQTNCYEVSNVDDAREYLETRNAMDIVGIGQEAQDAIFRVVAAILHLGNVNFIKGEEADSSKLRDDKSRYHLQTAAELLMCNEKMMEDSLCKRVIVTPDGNITKPLDPESAASNRDALAKTVYSRLFDWIVDKINSSIGQDPDAKSLIGVLDIYGFESFKINSFEQLCINLTNEKLQQHFNQHVFKMEQEEYTREEINWSYVEFVDNQDVLDLIEKKPGGIIALLDEACMFPKSTHETFAQKMYQTYKGHKRFSKPKLAQTAFTVNHYAGDVTYSAEQFLDKNKDYVVAEHQALLDASKCSFVANLFPPLPEDASKQSKFSSIGTRFKQQLQALMETLNTTEPHYIRCVKPNAVLKPGIFENDNVLNQLRCGGVLEAIRISCAGYPTKRAFDEFLDRFVMLATDVPEGSDEKSACASICNKMGLKGYQIGKTKIFLRAGQMAELDARRTEVLAGATKLIQRQIRTYLTRKEFLGQKRATIYMQKLWRAKLARKLYQNMRREAASICIQKNIRAHRARKNYTKLQASATVIQTGLRTMSARNKHRHRRRTKAAIIIQREWRRHQVHEAYKKHKKATLALQCLWRAKVARKELKNLRMAARETGALKEAKDKLEKRVEELTWRLELEKNQKADLEDAKAQEIAKLQNNLTELQEKLDEAYAAIIRDKEAAKLAIEQAPPIIKEVPVVDNTQLELLNSQNNELEVEVAKLKGKIKEFEVKCFALENDSRASVTEAEDAKSKAVEFQEIIERLHTNLSNLESENQVLRQQALAASTSVEEIGELNSLKDKVAILESENETLRRQTESAEKTMPPARVFASEKNLENEHQTKEIQATKEPRNPINVLAKQGSLTDRQQESHEVLMKCLTDERRFDNEKSVAAWIVYKALLQWRLFEAEKTNIFDRIVHKIRSSIEGQDDTRELAYWLTTSSTLLYLLQSTLKFSNTNNAASRRNRSSHATLFGRLVQGMQPSSVGLETSSGYSGMAGIPNDQQMVEAKYPALLFKQHLAAYVEKTYGMIRDKLKKEINPLLNLCIHAPRPTRAKTLRDVTKSIHLTTIAKQQASYVQWQNIVNKLEHTLTFMAENHVPSMITRKLFHQVFSYINVQLFNSLLLRRECCSVSNGEYLKMGLHELEQWCLKADDEATRSPWDELQHIRQAVMFLVSHQKTQKSLDEIAKEICPVLSIPQVYRIGTMFWDDKYGTQGLSPEVINQMRKLMTEDSANMTYPSFLLDVDSSIPFSVEDVSQSFHGGNISLSDVDPSPLLRQRSDFHFLFQTLPE

SEQ ID NO: 28130 - protein, 1440 aa, Arabidopsis thaliana
  misc_feature (1)..(1440): Ceres Seq. ID no. 2702856
MEQYKGAAFGELSPHLFAVADTSYRAMINEARSQSILVSGESGAGKTETTKMLMRYLAFMGGRSDTEGRSVEQQVLESNPVLEAFGNAKTVKNNNSSRFGKFVEIQFDKRGKISGAAIRTYLLERSRVCQVSDPERNYHCFYMLCAAPPEEAKKFKVGDPRTFHYLNQTNCYEVSNVDDAREYLETRNAMDIVGIGQEAQDAIFRVVAAILHLGNVNFIKGEEADSSKLRDDKSRYHLQTAAELLMCNEKMMEDSLCKRVIVTPDGNITKPLDPESAASNRDALAKTVYSRLFDWIVDKINSSIGQDPDAKSLIGVLDIYGFESFKINSFEQLCINLTNEKLQQHFNQHVFKMEQEEYTREEINWSYVEFVDNQDVLDLIEKKPGGIIALLDEACMFPKSTHETFAQKMYQTYKGHKRFSKPKLAQTAFTVNHYAGDVTYSAEQFLDKNKDYVVAEHQALLDASKCSFVANLFPPLPEDASKQSKFSSIGTRFKQQLQALMETLNTTEPHYIRCVKPNAVLKPGIFENDNVLNQLRCGGVLEAIRISCAGYPTKRAFDEFLDRFVMLATDVPEGSDEKSACASICNKMGLKGYQIGKTKIFLRAGQMAELDARRTEVLAGATKLIQRQIRTYLTRKEFLGQKRATIYMQKLWRAKLARKLYQNMRREAASICIQKNIRAHRARKNYTKLQASATVIQTGLRTMSARNKHRHRRRTKAAIIIQREWRRHQVHEAYKKHKKATLALQCLWRAKVARKELKNLRMAARETGALKEAKDKLEKRVEELTWRLELEKNQKADLEDAKAQEIAKLQNNLTELQEKLDEAYAAIIRDKEAAKLAIEQAPPIIKEVPVVDNTQLELLNSQNNELEVEVAKLKGKIKEFEVKCFALENDSRASVTEAEDAKSKAVEFQEIIERLHTNLSNLESENQVLRQQALAASTSVEEIGELNSLKDKVAILESENETLRRQTESAEKTMPPARVFASEKNLENEHQTKEIQATKEPRNPINVLAKQGSLTDRQQESHEVLMKCLTDERRFDNEKSVAAWIVYKALLQWRLFEAEKTNIFDRIVHKIRSSIEGQDDTRELAYWLTTSSTLLYLLQSTLKFSNTNNAASRRNRSSHATLFGRLVQGMQPSSVGLETSSGYSGMAGIPNDQQMVEAKYPALLFKQHLAAYVEKTYGMIRDKLKKEINPLLNLCIHAPRPTRAKTLRDVTKSIHLTTIAKQQASYVQWQNIVNKLEHTLTFMAENHVPSMITRKLFHQVFSYINVQLFNSLLLRRECCSVSNGEYLKMGLHELEQWCLKADDEATRSPWDELQHIRQAVMFLVSHQKTQKSLDEIAKEICPVLSIPQVYRIGTMFWDDKYGTQGLSPEVINQMRKLMTEDSANMTYPSFLLDVDSSIPFSVEDVSQSFHGGNISLSDVDPSPLLRQRSDFHFLFQTLPE

SEQ ID NO: 28131 - DNA, 1701 bp, Arabidopsis thaliana
  misc_feature (1)..(1701): Ceres Seq. ID no. 2703078
atgcagaaacaattagcatatattacaaaacacatactaattgtttctccttctccttcttccttgcaaatggatactttagcttcaaactcttcggatctcacgaccaagtcaagtctcggaatgtcgtcgtttaccaacatgtatctcctcacaacgcttcaagcccttgcggccctttgcttcttgatgattctcaacaaaataaagtcatcttcacgaaacaagaagttgcatcctctcccgccaggacccaccggttttccaattgttggaatgattccggcgatgcttaaaaaccgtccagttttccggtggctccacagcctcatgaaggagcttaacacggagatagcttgtgtgcgtctaggaaacactcacgtgatccctgtgacatgtcctaagattgcacgtgagatcttcaagcaacaagacgcactctttgcgtcaagaccactcacttatgctcaaaagattctctctaacggctacaaaacctgcgtgatcacaccgtttggcgaacaattcaagaagatgaggaaagtgatcatgacagagattgtttgtccagcgagacaccgttggctacacgacaatagagctgaggaaaccgatcacttgaccgcttggctctacaacatggttaagaactctgaaccagtcgatctccgttttgttacgaggcattattgtggaaatgcaatcaagaggcttatgttcgggacgaggacgttctcggagaaaaccgaagccgatggtggaccgactttggaagatatcgagcatatggatgctatgttcgaggggttagggtttacgtttgcgttttgtatatcggattatctaccgatgcttacgggattggatctaaacggacatgaaaagattatgagagaatccagtgcaattatggataaatatcacgatcctataattgatgagaggattaagatgtggagagaaggtaagagaactcagatcgaagattttctagacattttcatctctatcaaggacgaagctggccagcctttgcttaccgctgatgaaatcaaaccaaccattaaggaacttgtaatggcggcgccagacaacccatcaaacgccgtggaatgggccattgcggagatgataaacaaaccggagatcctccacaaagctatggaagagatcgatagagtcgtcggaaaagaaagattcgtccaagaatccgatataccaaaacttaactatgttaaagctattatccgagaagctttccgtcttcatcccgtcgccgccttcaacctcccacacgtggcactctctgatacgaccgtcgcaggttaccatattcctaaaggaagtcaagttttacttagccgttacggtcttggtcgtaaccccaaggtttggtctgatccacttagcttcaaaccagaaaggcatctcaatgagtgttcggaagtgactttgacggagaatgatctccgttttatctcgtttagtaccggaaagagaggatgtgctgctccggcgttaggtacggcgataacgaccatgatgctagcgaggcttttgcaagggtttaagtggaaactagcaggaagtgagacacgtgtcgagcttatggaatcgagtcatgatatgtttctttcgaagcctttggtgttggtcggagaattgagattgtcggaggacctttacccaatggtgaagtga

SEQ ID NO: 28132 - protein, 566 aa, Arabidopsis thaliana
  misc_feature (1)..(566): Ceres Seq. ID no. 2703079
MQKQLAYITKHILIVSPSPSSLQMDTLASNSSDLTTKSSLGMSSFTNMYLLTTLQALAALCFLMILNKIKSSSRNKKLHPLPPGPTGFPIVGMIPAMLKNRPVFRWLHSLMKELNTEIACVRLGNTHVIPVTCPKIAREIFKQQDALFASRPLTYAQKILSNGYKTCVITPFGEQFKKMRKVIMTEIVCPARHRWLHDNRAEETDHLTAWLYNMVKNSEPVDLRFVTRHYCGNAIKRLMFGTRTFSEKTEADGGPTLEDIEHMDAMFEGLGFTFAFCISDYLPMLTGLDLNGHEKIMRESSAIMDKYHDPIIDERIKMWREGKRTQIEDFLDIFISIKDEAGQPLLTADEIKPTIKELVMAAPDNPSNAVEWAIAEMINKPEILHKAMEEIDRVVGKERFVQESDIPKLNYVKAIIREAFRLHPVAAFNLPHVALSDTTVAGYHIPKGSQVLLSRYGLGRNPKVWSDPLSFKPERHLNECSEVTLTENDLRFISFSTGKRGCAAPALGTAITTMMLARLLQGFKWKLAGSETRVELMESSHDMFLSKPLVLVGELRLSEDLYPMVK

SEQ ID NO: 28133 - protein, 543 aa, Arabidopsis thaliana
  misc_feature (1)..(543): Ceres Seq. ID no. 2703080
MDTLASNSSDLTTKSSLGMSSFTNMYLLTTLQALAALCFLMILNKIKSSSRNKKLHPLPPGPTGFPIVGMIPAMLKNRPVFRWLHSLMKELNTEIACVRLGNTHVIPVTCPKIAREIFKQQDALFASRPLTYAQKILSNGYKTCVITPFGEQFKKMRKVIMTEIVCPARHRWLHDNRAEETDHLTAWLYNMVKNSEPVDLRFVTRHYCGNAIKRLMFGTRTFSEKTEADGGPTLEDIEHMDAMFEGLGFTFAFCISDYLPMLTGLDLNGHEKIMRESSAIMDKYHDPIIDERIKMWREGKRTQIEDFLDIFISIKDEAGQPLLTADEIKPTIKELVMAAPDNPSNAVEWAIAEMINKPEILHKAMEEIDRVVGKERFVQESDIPKLNYVKAIIREAFRLHPVAAFNLPHVALSDTTVAGYHIPKGSQVLLSRYGLGRNPKVWSDPLSFKPERHLNECSEVTLTENDLRFISFSTGKRGCAAPALGTAITTMMLARLLQGFKWKLAGSETRVELMESSHDMFLSKPLVLVGELRLSEDLYPMVK

SEQ ID NO: 28134 - protein, 525 aa, Arabidopsis thaliana
  misc_feature (1)..(525): Ceres Seq. ID no. 2703081
MSSFTNMYLLTTLQALAALCFLMILNKIKSSSRNKKLHPLPPGPTGFPIVGMIPAMLKNRPVFRWLHSLMKELNTEIACVRLGNTHVIPVTCPKIAREIFKQQDALFASRPLTYAQKILSNGYKTCVITPFGEQFKKMRKVIMTEIVCPARHRWLHDNRAEETDHLTAWLYNMVKNSEPVDLRFVTRHYCGNAIKRLMFGTRTFSEKTEADGGPTLEDIEHMDAMFEGLGFTFAFCISDYLPMLTGLDLNGHEKIMRESSAIMDKYHDPIIDERIKMWREGKRTQIEDFLDIFISIKDEAGQPLLTADEIKPTIKELVMAAPDNPSNAVEWAIAEMINKPEILHKAMEEIDRVVGKERFVQESDIPKLNYVKAIIREAFRLHPVAAFNLPHVALSDTTVAGYHIPKGSQVLLSRYGLGRNPKVWSDPLSFKPERHLNECSEVTLTENDLRFISFSTGKRGCAAPALGTAITTMMLARLLQGFKWKLAGSETRVELMESSHDMFLSKPLVLVGELRLSEDLYPMVK

SEQ ID NO: 28135 - DNA, 2172 bp, Arabidopsis thaliana
  misc_feature (1)..(2172): Ceres Seq. ID no. 2703132
atgggtaagaggcaaatatcacaagatgaagtaggtccgcccataaaaccaagagctggtttacgaagggaacaagctggaagaggttcttacagagagatactgaagagcttttgctttaacacggactgggactatgctgtgttctggcaacttaatcatcgaggatctcgaatggtacttaccttggaggatgcttactatgaccatcatgggacgaatatgcatggagcacatgacccccttgggttagctgtggcaaagatgtcttatcatgtctattctctaggggaagggattgtaggacaagttgcagtttctggagaacaccaatgggtatttcccgaaaattataacaactgtaactcagcatttgagaccattcttgtagtagctgttggtccatgtggagttgttcagctaggctctttgtgtaaaccaaaaatgccttctgaaggtttacatgctgaggctttccctgattgctctggagaagttgacaaagctatggacgtggaagagtccaatattctaactcaatacaaaactagaagaagtgatagcatgccttacaatactccttcgtcatgtcttgtcatggagaaggcagcccaagttgttggtggtcgtgaagttgtgcaaggatctacttgtgggagttatagtggtgttacgtttggctttccagttgacttggttggtgccaaacatgagaatcaagtaggtactaatataatcagggatgcacctcatgtgggaatgactagtggctgcaaagattcaagggatttagatcctaatttacatctgtatatgaagaatcatgtgctcaatgatacaagcacatctgctttagcaattgaggctgaaagattgataacaagccaatcatatccacgcctggactcaacttttcaggctacctcgagaacagataaagaaagttcttaccataatgaagtgttccaactatctgagaaccaaggaaataaatacataaaagagactgagcgtatgctggggaggaactgcgagtctagtcaatttgatgctttgatctcatctgggtatacttttgctggcagcgagctactagaagcgttaggctctgctttcaagcaaacgaacactggtcaggaggagctactgaagtctgaacatggttcaacaatgagaccaacagacgatatgagtcatagccagctcacgtttgaccctggccctgagaatcttctagatgctgtggttgctaatgtgtgtcaaagagatggtaatgcgagggatgatatgatgtcgagcagatcggtacaatcattgcttactaacatggaactggcagaaccctcaggtcagaagaagcataatattgttaacccaattaatagtgctatgaatcagccaccaatggcagaggtggatacccaacaaaattcatcagatatttgtggagcgttttcttcaattggattctcatctacgtaccccagctcctctagtgatcagtttcagacatccctggacatacccaagaagaacaaaaagagggccaaacctggtgaaagttctcgacctcgcccaagagacaggcaacttattcaagatcgaatcaaggaacttagagaacttgtgcctaatggatctaagtgcagtatcgattctttgctagaacgaacgatcaaacacatgctctttttgcagaatgttactaagcatgctgaaaagctcagtaaaagtgctaatgaaaagatgcaacaaaaggaaactggtatgcaaggttcaagctgcgcagtggaggttggaggtcatcttcaagtaagctcgatcatcgtggagaatctgaacaagcaggggatggtgcttatcgagtttaatctttgtttgaactcgagtcccaagttctgcgagtgtgtattaaaagtatttttgggtattggacagatgttatgtgaagaatgtggccattttcttgagatagcaaacgtcataaggagcttagacctcgtcatcctaagaggtttcaccgagactcagggcgagaaaacatggatatgctttgtaactgaggtaggaagtcgaattacccaattcatgaaagagattccaaagcaaatcaaagtattttccttggttttgattgaactttggattagtatgatatatatgactgactaa

SEQ ID NO: 28136 - protein, 723 aa, Arabidopsis thaliana
  misc_feature (1)..(723): Ceres Seq. ID no. 2703133
MGKRQISQDEVGPPIKPRAGLRREQAGRGSYREILKSFCFNTDWDYAVFWQLNHRGSRMVLTLEDAYYDHHGTNMHGAHDPLGLAVAKMSYHVYSLGEGIVGQVAVSGEHQWVFPENYNNCNSAFETILVVAVGPCGVVQLGSLCKPKMPSEGLHAEAFPDCSGEVDKAMDVEESNILTQYKTRRSDSMPYNTPSSCLVMEKAAQVVGGREVVQGSTCGSYSGVTFGFPVDLVGAKHENQVGTNIIRDAPHVGMTSGCKDSRDLDPNLHLYMKNHVLNDTSTSALAIEAERLITSQSYPRLDSTFQATSRTDKESSYHNEVFQLSENQGNKYIKETERMLGRNCESSQFDALISSGYTFAGSELLEALGSAFKQTNTGQEELLKSEHGSTMRPTDDMSHSQLTFDPGPENLLDAVVANVCQRDGNARDDMMSSRSVQSLLTNMELAEPSGQKKHNIVNPINSAMNQPPMAEVDTQQNSSDICGAFSSIGFSSTYPSSSSDQFQTSLDIPKKNKKRAKPGESSRPRPRDRQLIQDRIKELRELVPNGSKCSIDSLLERTIKHMLFLQNVTKHAEKLSKSANEKMQQKETGMQGSSCAVEVGGHLQVSSIIVENLNKQGMVLIEFNLCLNSSPKFCECVLKVFLGIGQMLCEECGHFLEIANVIRSLDLVILRGFTETQGEKTWICFVTEVGSRITQFMKEIPKQIKVFSLVLIELWISMIYMTD

SEQ ID NO: 28137 - protein, 665 aa, Arabidopsis thaliana
  misc_feature (1)..(665): Ceres Seq. ID no. 2703134
MVLTLEDAYYDHHGTNMHGAHDPLGLAVAKMSYHVYSLGEGIVGQVAVSGEHQWVFPENYNNCNSAFETILVVAVGPCGVVQLGSLCKPKMPSEGLHAEAFPDCSGEVDKAMDVEESNILTQYKTRRSDSMPYNTPSSCLVMEKAAQVVGGREVVQGSTCGSYSGVTFGFPVDLVGAKHENQVGTNIIRDAPHVGMTSGCKDSRDLDPNLHLYMKNHVLNDTSTSALAIEAERLITSQSYPRLDSTFQATSRTDKESSYHNEVFQLSENQGNKYIKETERMLGRNCESSQFDALISSGYTFAGSELLEALGSAFKQTNTGQEELLKSEHGSTMRPTDDMSHSQLTFDPGPENLLDAVVANVCQRDGNARDDMMSSRSVQSLLTNMELAEPSGQKKHNIVNPINSAMNQPPMAEVDTQQNSSDICGAFSSIGFSSTYPSSSSDQFQTSLDIPKKNKKRAKPGESSRPRPRDRQLIQDRIKELRELVPNGSKCSIDSLLERTIKHMLFLQNVTKHAEKLSKSANEKMQQKETGMQGSSCAVEVGGHLQVSSIIVENLNKQGMVLIEFNLCLNSSPKFCECVLKVFLGIGQMLCEECGHFLEIANVIRSLDLVILRGFTETQGEKTWICFVTEVGSRITQFMKEIPKQIKVFSLVLIELWISMIYMTD

SEQ ID NO: 28138 - protein, 649 aa, Arabidopsis thaliana
  misc_feature (1)..(649): Ceres Seq. ID no. 2703135
MHGAHDPLGLAVAKMSYHVYSLGEGIVGQVAVSGEHQWVFPENYNNCNSAFETILVVAVGPCGVVQLGSLCKPKMPSEGLHAEAFPDCSGEVDKAMDVEESNILTQYKTRRSDSMPYNTPSSCLVMEKAAQVVGGREVVQGSTCGSYSGVTFGFPVDLVGAKHENQVGTNIIRDAPHVGMTSGCKDSRDLDPNLHLYMKNHVLNDTSTSALAIEAERLITSQSYPRLDSTFQATSRTDKESSYHNEVFQLSENQGNKYIKETERMLGRNCESSQFDALISSGYTFAGSELLEALGSAFKQTNTGQEELLKSEHGSTMRPTDDMSHSQLTFDPGPENLLDAVVANVCQRDGNARDDMMSSRSVQSLLTNMELAEPSGQKKHNIVNPINSAMNQPPMAEVDTQQNSSDICGAFSSIGFSSTYPSSSSDQFQTSLDIPKKNKKRAKPGESSRPRPRDRQLIQDRIKELRELVPNGSKCSIDSLLERTIKHMLFLQNVTKHAEKLSKSANEKMQQKETGMQGSSCAVEVGGHLQVSSIIVENLNKQGMVLIEFNLCLNSSPKFCECVLKVFLGIGQMLCEECGHFLEIANVIRSLDLVILRGFTETQGEKTWICFVTEVGSRITQFMKEIPKQIKVFSLVLIELWISMIYMTD

SEQ ID NO: 28139 - DNA, 2622 bp, Arabidopsis thaliana
  misc_feature (1)..(2622): Ceres Seq. ID no. 2703670
atggaagctttaggttcctctgattgcaatttagagattttagaaactctatcagacgatgcgattcaggagattactgaaagctatgatggatttttcactactgtagagtctctcattgctggtactggagattccttagttgaagatgagtttgtgtctcatgtgtattgtctctgcaagtatgggcttgattctcttgttcgtgatcactttcttagatcacttgagcaagcttttgagaagggaggtgcatcgagtttttggcaacattttgatgcttatagtgagaagaaacatcataattatggagaggagattcagatagtgttatgcaaggctttggaagaaatttctattgaaaagcagtatcatgagaagtgtctgtccatagtagttcatgctttgcagtcgtttaaagaacagtcgtcagatgatagacagaactcagatacagaaagagttcatcttttttcgaggttccagtcaatgctgtcttcaactctgatgactacacttcctcagcattttcctgaaatactccactggtattttaaggaaaggctggaggagttaagcgcaatcatggacggagatggtattgaagaacaagaggatgattgcatggatttggacgagaagttgagatataaaaacggagaaatggatgttgatgaaggctgttcccaaggaaaacgtttgggacatgacaagttggtgaagaacattgggaaggtggtccgtgaccttagaagtattggatttacatctatggctgaaaatgcttatgcttctgccatctttttgctccttaaggcgaaagtccatgatctggctggtgatgattacaggacttctgttttggaatcaatcaaagaatggattcagacagtccctctacaattccttaatgcacttctttcttatcttggtgattccgtaagttatggtaccacatcgtctggcctcacgtcccctctggcttgttgcccatctccaagcttttccagagtggtgactccttctgaaggaattgttcggtggaaattacggctagaatattttgcatatgaaacacttcaagatttaaggattgccaaattatttgagataattgttgattatcctgagagttctcctgccattgaagacttaaagcagtgtcttgaatatactggacaacattctaagctagttgaatcttttatttcttcgctgaaataccgtttgctcactgctggtgcctcaaccaatgatatattacatcagtatgtgtcgactattaaagctcttcgggcaatagatccagctggtgtatttctggaagcagtgggtgaaccaattagagactatttacgggggcggaaagataccattaaatgtatcgtcactatgcttacagatggaagtggagggaatgcaaatggttccggaaaccctggggatagtcttcttgaagaattaatgagggatgaagaaagtcaagagaatgtcggttttgacgatgattttcacaccgatgataagcaagcctggatcaatgcttcccgttgggaaccggaccctgtcgaggctgatcctttaaaaggtagcctcagtcagaggaaggtagacatacttggaatgcttgttgatataattggatctaaagagcaactagtaaacgaatatcgtgttatgcttgcggaaaagcttctcaacaagactgattatgacatcgacactgagatacgcactgttgaacttctcaagatacattttggagaagccagtatgcaaagatgtgagataatgctgaacgacctaattgattctaagagagtgaacactaacattaaaaaagcatctcaaacaggttatatttctctcttgttctcaattttactcatgcaaggcgctgagttaagagagaatgagctttctgttgatactctcacctcaacgatactttcaacaaacttctggccaccaattcagctacctggacctgtcgacaagctgctatcagattatgccaatcgatatcatgaaatcaagacccctcgtaaattactttggaagaaaaatcttggcactgtcaagttggagctgcaatttgaagacagagcaatgcagttcacagtctcacccacacatgcagccattattatgcaatttcaagaaaagaaaagttggacctataaagatcttgctgaagtcattgggatacccattgatgcattaaaccgaagagtaaacttctggataagcaagggagttctgagagaatctacaggagcaaactcaaattccagtgtgttaacgctcgttgaatccataactgattctggaaagaacgaaggcgaggagcttctaacaggtgaggaagagggtgaaacatcaattgcctctgtggaagatcagcttcgcaaagaaatgacgatatacgagaaattcatcatgggaatgctcacaaattttggtagcatggcactagaacgaatccataacactctcaagatgttttgtgtggctgatccttcttatgacaagtcactgcaacagcttcagagctttctttctggtttggtttctgaagagaaactagagtttagagatggtatgtatttgctaaagaagtag

SEQ ID NO: 28140 - protein, 873 aa, Arabidopsis thaliana
  misc_feature (1)..(873): Ceres Seq. ID no. 2703671
MEALGSSDCNLEILETLSDDAIQEITESYDGFFTTVESLIAGTGDSLVEDEFVSHVYCLCKYGLDSLVRDHFLRSLEQAFEKGGASSFWQHFDAYSEKKHHNYGEEIQIVLCKALEEISIEKQYHEKCLSIVVHALQSFKEQSSDDRQNSDTERVHLFSRFQSMLSSTLMTTLPQHFPEILHWYFKERLEELSAIMDGDGIEEQEDDCMDLDEKLRYKNGEMDVDEGCSQGKRLGHDKLVKNIGKVVRDLRSIGFTSMAENAYASAIFLLLKAKVHDLAGDDYRTSVLESIKEWIQTVPLQFLNALLSYLGDSVSYGTTSSGLTSPLACCPSPSFSRVVTPSEGIVRWKLRLEYFAYETLQDLRIAKLFEIIVDYPESSPAIEDLKQCLEYTGQHSKLVESFISSLKYRLLTAGASTNDILHQYVSTIKALRAIDPAGVFLEAVGEPIRDYLRGRKDTIKCIVTMLTDGSGGNANGSGNPGDSLLEELMRDEESQENVGFDDDFHTDDKQAWINASRWEPDPVEADPLKGSLSQRKVDILGMLVDIIGSKEQLVNEYRVMLAEKLLNKTDYDIDTEIRTVELLKIHFGEASMQRCEIMLNDLIDSKRVNTNIKKASQTGYISLLFSILLMQGAELRENELSVDTLTSTILSTNFWPPIQLPGPVDKLLSDYANRYHEIKTPRKLLWKKNLGTVKLELQFEDRAMQFTVSPTHAAIIMQFQEKKSWTYKDLAEVIGIPIDALNRRVNFWISKGVLRESTGANSNSSVLTLVESITDSGKNEGEELLTGEEEGETSIASVEDQLRKEMTIYEKFIMGMLTNFGSMALERIHNTLKMFCVADPSYDKSLQQLQSFLSGLVSEEKLEFRDGMYLLKK

SEQ ID NO: 28141 - protein, 710 aa, Arabidopsis thaliana
  misc_feature (1)..(710): Ceres Seq. ID no. 2703672
MLSSTLMTTLPQHFPEILHWYFKERLEELSAIMDGDGIEEQEDDCMDLDEKLRYKNGEMDVDEGCSQGKRLGHDKLVKNIGKVVRDLRSIGFTSMAENAYASAIFLLLKAKVHDLAGDDYRTSVLESIKEWIQTVPLQFLNALLSYLGDSVSYGTTSSGLTSPLACCPSPSFSRVVTPSEGIVRWKLRLEYFAYETLQDLRIAKLFEIIVDYPESSPAIEDLKQCLEYTGQHSKLVESFISSLKYRLLTAGASTNDILHQYVSTIKALRAIDPAGVFLEAVGEPIRDYLRGRKDTIKCIVTMLTDGSGGNANGSGNPGDSLLEELMRDEESQENVGFDDDFHTDDKQAWINASRWEPDPVEADPLKGSLSQRKVDILGMLVDIIGSKEQLVNEYRVMLAEKLLNKTDYDIDTEIRTVELLKIHFGEASMQRCEIMLNDLIDSKRVNTNIKKASQTGYISLLFSILLMQGAELRENELSVDTLTSTILSTNFWPPIQLPGPVDKLLSDYANRYHEIKTPRKLLWKKNLGTVKLELQFEDRAMQFTVSPTHAAIIMQFQEKKSWTYKDLAEVIGIPIDALNRRVNFWISKGVLRESTGANSNSSVLTLVESITDSGKNEGEELLTGEEEGETSIASVEDQLRKEMTIYEKFIMGMLTNFGSMALERIHNTLKMFCVADPSYDKSLQQLQSFLSGLVSEEKLEFRDGMYLLKK

SEQ ID NO: 28142 - protein, 704 aa, Arabidopsis thaliana
  misc_feature (1)..(704): Ceres Seq. ID no. 2703673
MTTLPQHFPEILHWYFKERLEELSAIMDGDGIEEQEDDCMDLDEKLRYKNGEMDVDEGCSQGKRLGHDKLVKNIGKVVRDLRSIGFTSMAENAYASAIFLLLKAKVHDLAGDDYRTSVLESIKEWIQTVPLQFLNALLSYLGDSVSYGTTSSGLTSPLACCPSPSFSRVVTPSEGIVRWKLRLEYFAYETLQDLRIAKLFEIIVDYPESSPAIEDLKQCLEYTGQHSKLVESFISSLKYRLLTAGASTNDILHQYVSTIKALRAIDPAGVFLEAVGEPIRDYLRGRKDTIKCIVTMLTDGSGGNANGSGNPGDSLLEELMRDEESQENVGFDDDFHTDDKQAWINASRWEPDPVEADPLKGSLSQRKVDILGMLVDIIGSKEQLVNEYRVMLAEKLLNKTDYDIDTEIRTVELLKIHFGEASMQRCEIMLNDLIDSKRVNTNIKKASQTGYISLLFSILLMQGAELRENELSVDTLTSTILSTNFWPPIQLPGPVDKLLSDYANRYHEIKTPRKLLWKKNLGTVKLELQFEDRAMQFTVSPTHAAIIMQFQEKKSWTYKDLAEVIGIPIDALNRRVNFWISKGVLRESTGANSNSSVLTLVESITDSGKNEGEELLTGEEEGETSIASVEDQLRKEMTIYEKFIMGMLTNFGSMALERIHNTLKMFCVADPSYDKSLQQLQSFLSGLVSEEKLEFRDGMYLLKK

SEQ ID NO: 28143 - DNA, 3267 bp, Arabidopsis thaliana
  misc_feature (1)..(3267): Ceres Seq. ID no. 2703833
atgaacactggagggagactcattgctgggtctcacaacaggaatgaattcgttctcattaacgccgacgacactgccagaatacgatcagcagaagaactgagtgggcaaacttgtaaaatctgtagagatgagattgagttaacagataatggtgagccatttatcgcttgcaacgaatgtgctttccctacgtgtagaccgtgctatgagtatgaaagaagagaaggaaaccaagcttgtcctcagtgcggaacccgatacaagcgtattaaaggtagtccaagggtcgaaggggatgaagaagatgatgacattgatgatctggagcatgagttttatggaatggatcctgaacatgttactgaagctgcgctctattatatgcgtcttaacactggtcgtggtactgatgaagtgtcacacttgtattcagcttcaccaggctctgaggttcctcttttgacgtattgtgatgaggattctgatatgtattcggatagacatgctcttatcgtgcccccatctacgggtttggggaacagagtccatcatgtgccatttacagattcttttgcatctatacacacaagacccatggttcctcagaaggatcttacagtttatggatatggaagtgttgcatggaaagaccgtatggaagtatggaagaaacaacaaatagaaaagctacaagtcgttaagaatgaaagagtaaatgatggtgatggcgatggattcattgttgacgagctcgatgatcccgggctaccaatgatggatgaaggaagacaacctctgtcacgaaagctacccattcgttcgagcagaataaacccttataggatgttgattttctgtcggctcgccattcttggcttgttcttccattataggattctccatccggtgaatgatgcattcggcttgtggttaacatcggttatatgcgaaatatggttcgctgtgtcttggattcttgatcagttcccaaaatggtatcccatcgaaagagaaacatatctcgacaggctttctctaaggtatgagaaggaagggaagccatcagagttagcgcctgtcgatgtctttgttagtactgtggatccattgaaagagcctccactgattacagcaaatacggttctgtctattctcgctgttgattatccggttgagaaggttgcatgttatgtatcagatgatggtgctgcaatgcttacatttgaagctctctcttacacagccgagtttgcaagaaaatgggttcctttctgtaagaagttcagcatcgagccacgcgctcctgaatggtatttttcacagaagatggattacttgaagcataaagtcgatcccgcttttgttatggaacgccgtgccatgaagagagactatgaggaattcaaagtaaagataaatgcattggtttctgtatcacagaaagttcctgaagatggttggactatgcaagatggaactccttggcctggaaacaatgtccgggaccatccaggaatgattcaggttttcctgggacacagcggagtttgtgatatggatggaaatgagttacctcgtttggtgtatgtttctcgtgagaagcgaccgggatttgatcaccataagaaggctggagctatgaattccttgatccgggtatctgctgttctctcaaatgctccttaccttcttaatgtggactgtgatcattacatcaacaacagcaaggcaattagagaagctatgtgtttcatgatggacccgcagtccggaaagaaaatatgttatgttcagtttcctcagaggtttgatgggattgatagacacgatcgatactcaaatcgcaatgtggttttcttcgatatcaacatgaaaggtttagatggcatacaaggaccgatatatgtggggaccgggtgtgtcttcagaaggcaagcactttatggatttgatgcaccaaagaagaagcaaccaccaggcagaacctgcaactgttggccaaaatggtgctgtttgtgttgcggtatgagaaagaagaagacaggtaaggtcaaagataatcagagaaagaagcctaaagagacttcaaagcagatacatgcccttgagcacatagaagaaggccttcaagtgacaaatgctgagaataactctgagactgcccaactgaagctggagaagaaatttggtcaatcaccggttttagtagcttctactcttctgctaaatggtggagtgcctagcaatgtgaacccagcgtctttattgagggaatccattcaggttattagctgtggctacgaagagaaaaccgaatggggaaaagagattgggtggatttatggctcggtcactgaggatatcttaacgggtttcaagatgcattgccatggatggagatctgtatattgtatgccaaagcgagcggctttcaaaggttctgctcccattaacttgtcggatcgtcttcatcaagttctacgttgggcacttggctctgtcgagattttcttgagtaggcattgccctatttggtacggttatggtggtggtttaaaatggttggaaagattctcttacattaactctgttgtctatccttggacatcccttcctttgcttgtctactgctcacttcccgccatttgtctactcaccggaaaattcatcgtccctgagataagtaactacgcgggtatactcttcctgctaatgtttatgtccattgcggtaacgggtatactagaaatgcaatggggcaaaataggaatcgatgattggtggagaaacgagcagttttgggtcattggaggagtctcttcgcatctatttgctctgtttcaaggtttactcaaagttcttgcaggagtcagcacgaacttcacagtcacatctaaagcagcagatgatggagaattctcagagctttacattttcaaatggacatctttgttgattcctccgactactctgctgatcattaacatcgttggagtcattgtcggagtttcggatgcgataaataacgggtatgactcttggggaccgctttttgggagattgttctttgcgctttgggtgattgttcatttgtatccgttcctcaaagggttacttgggaaacaagatagagtaccaaccattatattggtttggtcgattcttcttgcttccatcttgactctcttgtgggtcagagtcaatccgtttgtgtccaaagatggaccggtcttggagatctgtggtcttgactgtttaaagtga

SEQ ID NO: 28144 - protein, 1088 aa, Arabidopsis thaliana
  misc_feature (1)..(1088): Ceres Seq. ID no. 2703834
MNTGGRLIAGSHNRNEFVLINADDTARIRSAEELSGQTCKICRDEIELTDNGEPFIACNECAFPTCRPCYEYERREGNQACPQCGTRYKRIKGSPRVEGDEEDDDIDDLEHEFYGMDPEHVTEAALYYMRLNTGRGTDEVSHLYSASPGSEVPLLTYCDEDSDMYSDRHALIVPPSTGLGNRVHHVPFTDSFASIHTRPMVPQKDLTVYGYGSVAWKDRMEVWKKQQIEKLQVVKNERVNDGDGDGFIVDELDDPGLPMMDEGRQPLSRKLPIRSSRINPYRMLIFCRLAILGLFFHYRILHPVNDAFGLWLTSVICEIWFAVSWILDQFPKWYPIERETYLDRLSLRYEKEGKPSELAPVDVFVSTVDPLKEPPLITANTVLSILAVDYPVEKVACYVSDDGAAMLTFEALSYTAEFARKWVPFCKKFSIEPRAPEWYFSQKMDYLKHKVDPAFVMERRAMKRDYEEFKVKINALVSVSQKVPEDGWTMQDGTPWPGNNVRDHPGMIQVFLGHSGVCDMDGNELPRLVYVSREKRPGFDHHKKAGAMNSLIRVSAVLSNAPYLLNVDCDHYINNSKAIREAMCFMMDPQSGKKICYVQFPQRFDGIDRHDRYSNRNVVFFDINMKGLDGIQGPIYVGTGCVFRRQALYGFDAPKKKQPPGRTCNCWPKWCCLCCGMRKKKTGKVKDNQRKKPKETSKQIHALEHIEEGLQVTNAENNSETAQLKLEKKFGQSPVLVASTLLLNGGVPSNVNPASLLRESIQVISCGYEEKTEWGKEIGWIYGSVTEDILTGFKMHCHGWRSVYCMPKRAAFKGSAPINLSDRLHQVLRWALGSVEIFLSRHCPIWYGYGGGLKWLERFSYINSVVYPWTSLPLLVYCSLPAICLLTGKFIVPEISNYAGILFLLMFMSIAVTGILEMQWGKIGIDDWWRNEQFWVIGGVSSHLFALFQGLLKVLAGVSTNFTVTSKAADDGEFSELYIFKWTSLLIPPTTLLIINIVGVIVGVSDAINNGYDSWGPLFGRLFFALWVIVHLYPFLKGLLGKQDRVPTIILVWSILLASILTLLWVRVNPFVSKDGPVLEICGLDCLK

SEQ ID NO: 28145 - protein, 973 aa, Arabidopsis thaliana
  misc_feature (1)..(973): Ceres Seq. ID no. 2703835
MDPEHVTEAALYYMRLNTGRGTDEVSHLYSASPGSEVPLLTYCDEDSDMYSDRHALIVPPSTGLGNRVHHVPFTDSFASIHTRPMVPQKDLTVYGYGSVAWKDRMEVWKKQQIEKLQVVKNERVNDGDGDGFIVDELDDPGLPMMDEGRQPLSRKLPIRSSRINPYRMLIFCRLAILGLFFHYRILHPVNDAFGLWLTSVICEIWFAVSWILDQFPKWYPIERETYLDRLSLRYEKEGKPSELAPVDVFVSTVDPLKEPPLITANTVLSILAVDYPVEKVACYVSDDGAAMLTFEALSYTAEFARKWVPFCKKFSIEPRAPEWYFSQKMDYLKHKVDPAFVMERRAMKRDYEEFKVKINALVSVSQKVPEDGWTMQDGTPWPGNNVRDHPGMIQVFLGHSGVCDMDGNELPRLVYVSREKRPGFDHHKKAGAMNSLIRVSAVLSNAPYLLNVDCDHYINNSKAIREAMCFMMDPQSGKKICYVQFPQRFDGIDRHDRYSNRNVVFFDINMKGLDGIQGPIYVGTGCVFRRQALYGFDAPKKKQPPGRTCNCWPKWCCLCCGMRKKKTGKVKDNQRKKPKETSKQIHALEHIEEGLQVTNAENNSETAQLKLEKKFGQSPVLVASTLLLNGGVPSNVNPASLLRESIQVISCGYEEKTEWGKEIGWIYGSVTEDILTGFKMHCHGWRSVYCMPKRAAFKGSAPINLSDRLHQVLRWALGSVEIFLSRHCPIWYGYGGGLKWLERFSYINSVVYPWTSLPLLVYCSLPAICLLTGKFIVPEISNYAGILFLLMFMSIAVTGILEMQWGKIGIDDWWRNEQFWVIGGVSSHLFALFQGLLKVLAGVSTNFTVTSKAADDGEFSELYIFKWTSLLIPPTTLLIINIVGVIVGVSDAINNGYDSWGPLFGRLFFALWVIVHLYPFLKGLLGKQDRVPTIILVWSILLASILTLLWVRVNPFVSKDGPVLEICGLDCLK

SEQ ID NO: 28146 - protein, 960 aa, Arabidopsis thaliana
  misc_feature (1)..(960): Ceres Seq. ID no. 2703836
MRLNTGRGTDEVSHLYSASPGSEVPLLTYCDEDSDMYSDRHALIVPPSTGLGNRVHHVPFTDSFASIHTRPMVPQKDLTVYGYGSVAWKDRMEVWKKQQIEKLQVVKNERVNDGDGDGFIVDELDDPGLPMMDEGRQPLSRKLPIRSSRINPYRMLIFCRLAILGLFFHYRILHPVNDAFGLWLTSVICEIWFAVSWILDQFPKWYPIERETYLDRLSLRYEKEGKPSELAPVDVFVSTVDPLKEPPLITANTVLSILAVDYPVEKVACYVSDDGAAMLTFEALSYTAEFARKWVPFCKKFSIEPRAPEWYFSQKMDYLKHKVDPAFVMERRAMKRDYEEFKVKINALVSVSQKVPEDGWTMQDGTPWPGNNVRDHPGMIQVFLGHSGVCDMDGNELPRLVYVSREKRPGFDHHKKAGAMNSLIRVSAVLSNAPYLLNVDCDHYINNSKAIREAMCFMMDPQSGKKICYVQFPQRFDGIDRHDRYSNRNVVFFDINMKGLDGIQGPIYVGTGCVFRRQALYGFDAPKKKQPPGRTCNCWPKWCCLCCGMRKKKTGKVKDNQRKKPKETSKQIHALEHIEEGLQVTNAENNSETAQLKLEKKFGQSPVLVASTLLLNGGVPSNVNPASLLRESIQVISCGYEEKTEWGKEIGWIYGSVTEDILTGFKMHCHGWRSVYCMPKRAAFKGSAPINLSDRLHQVLRWALGSVEIFLSRHCPIWYGYGGGLKWLERFSYINSVVYPWTSLPLLVYCSLPAICLLTGKFIVPEISNYAGILFLLMFMSIAVTGILEMQWGKIGIDDWWRNEQFWVIGGVSSHLFALFQGLLKVLAGVSTNFTVTSKAADDGEFSELYIFKWTSLLIPPTTLLIINIVGVIVGVSDAINNGYDSWGPLFGRLFFALWVIVHLYPFLKGLLGKQDRVPTIILVWSILLASILTLLWVRVNPFVSKDGPVLEICGLDCLK

SEQ ID NO: 28147 - DNA, 1248 bp, Arabidopsis thaliana
  misc_feature (1)..(1248): Ceres Seq. ID no. 2703868
atgtctcctgcgatcaaagcaccgctcttaccaaaccaagagccttcatcatcatcatcggagaaccatggatcattcgccggagctgtgtttaacatctcgacaagcatcgtcggagctggaattatggcgattccggcggctttcaaagtcctagctgggtttttaatgaaatccagtctcgccggagaatcaacaacttacgccggcgtgatgaaggaatcgttcggaaaatctggtgccgttgctgttacggttgttacaatggttgtgacttttgggtctatgattattttctcgattatcattggtgatgttatttcgggtaatgagaaagatggaatcatacatttaggtcttcttcaagaatggtttggttctcattggtggaatacgagattctttgaaagattggcatttagttctgcaatttcgtttctgcttgcgttactctttgttgtcataagctcggtgttagcgattattgctctcgtgcaagggaagacaaagcctccgagactcttccctgaactcaatgatggtggattatcgtttttcagtctcttcactgcttcccctgtcattgtaacagccttcacctttcatttcaatggtaagaaaccaagaaccaagaactttatggttattgcagtccatccagtagcattcgaactcaaagatccattaaatgtgctttcagcaacaaggatctctgtgattctgtgtgctacgatctactcagctactggtctcttttgttaccttctgtttggggattccactatgacagatgttctaatgaactttgatcaaagcaccagttcttcggttggttcattactaaatgatattgttagactcagctacgcgattcacctcatgctcgtgtttcctctgctcaacttctcgcttagagccaacctcgacgaactcttgttccctatgaagctttctttagtggaagacaacaaaagattcttcgcactcacttttccattactgatatcttgtttcttgggtgcaattgccataccagacatttggtacttctttcagttcttgggatcaacttctacagtctctatagcattcatctttccagctgcaattgtcctacggaatgtaaatggtttctcgactttaagagagaagattgtagcttcagtaatgcttgttcttgctgttgccacaagtatcatcgctatttcgacaaatatatacactttcacagcaacagaagaaacatga

SEQ ID NO: 28148 - protein, 415 aa, Arabidopsis thaliana
  misc_feature (1)..(415): Ceres Seq. ID no. 2703869
MSPAIKAPLLPNQEPSSSSSENHGSFAGAVFNISTSIVGAGIMAIPAAFKVLAGFLMKSSLAGESTTYAGVMKESFGKSGAVAVTVVTMVVTFGSMIIFSIIIGDVISGNEKDGIIHLGLLQEWFGSHWWNTRFFERLAFSSAISFLLALLFVVISSVLAIIALVQGKTKPPRLFPELNDGGLSFFSLFTASPVIVTAFTFHFNGKKPRTKNFMVIAVHPVAFELKDPLNVLSATRISVILCATIYSATGLFCYLLFGDSTMTDVLMNFDQSTSSSVGSLLNDIVRLSYAIHLMLVFPLLNFSLRANLDELLFPMKLSLVEDNKRFFALTFPLLISCFLGAIAIPDIWYFFQFLGSTSTVSIAFIFPAAIVLRNVNGFSTLREKIVASVMLVLAVATSIIAISTNIYTFTATEET

SEQ ID NO: 28149 - protein, 373 aa, Arabidopsis thaliana
  misc_feature (1)..(373): Ceres Seq. ID no. 2703870
MAIPAAFKVLAGFLMKSSLAGESTTYAGVMKESFGKSGAVAVTVVTMVVTFGSMIIFSIIIGDVISGNEKDGIIHLGLLQEWFGSHWWNTRFFERLAFSSAISFLLALLFVVISSVLAIIALVQGKTKPPRLFPELNDGGLSFFSLFTASPVIVTAFTFHFNGKKPRTKNFMVIAVHPVAFELKDPLNVLSATRISVILCATIYSATGLFCYLLFGDSTMTDVLMNFDQSTSSSVGSLLNDIVRLSYAIHLMLVFPLLNFSLRANLDELLFPMKLSLVEDNKRFFALTFPLLISCFLGAIAIPDIWYFFQFLGSTSTVSIAFIFPAAIVLRNVNGFSTLREKIVASVMLVLAVATSIIAISTNIYTFTATEET

SEQ ID NO: 28150 - protein, 359 aa, Arabidopsis thaliana
  misc_feature (1)..(359): Ceres Seq. ID no. 2703871
MKSSLAGESTTYAGVMKESFGKSGAVAVTVVTMVVTFGSMIIFSIIIGDVISGNEKDGIIHLGLLQEWFGSHWWNTRFFERLAFSSAISFLLALLFVVISSVLAIIALVQGKTKPPRLFPELNDGGLSFFSLFTASPVIVTAFTFHFNGKKPRTKNFMVIAVHPVAFELKDPLNVLSATRISVILCATIYSATGLFCYLLFGDSTMTDVLMNFDQSTSSSVGSLLNDIVRLSYAIHLMLVFPLLNFSLRANLDELLFPMKLSLVEDNKRFFALTFPLLISCFLGAIAIPDIWYFFQFLGSTSTVSIAFIFPAAIVLRNVNGFSTLREKIVASVMLVLAVATSIIAISTNIYTFTATEET

SEQ ID NO: 28151 - DNA, 2778 bp, Arabidopsis thaliana
  misc_feature (1)..(2778): Ceres Seq. ID no. 2703953
atggttgatcaaagaagaagcgcattgggttttgtcttgttgttgttgtgtttggtactgttcttcgactgtgttgttgttggtcaaacacagagtcgattcagtgagaaactcattttgcttaatctcaggtcttctttagggttaagaggaacagattggccaattaaaggtgacccttgtgttgattggagaggtatacaatgtgagaatggtagtatcattgggatcaatatctctgggtttaggagaacaagaattggtaagctaaacccacaattctctgttgatcctcttcgtaatctaactcgtttgtcgtattttaacgcgtccgggttagcgttaccggggactatacctgagtggtttggtgttagtttgttggcattggaagtattggatcttagttcgtgttctgttaacggtgttgttccttttactcttggtaatctcactagtttaagaactttgaatctgtctcagaacagtcttactagtttagttcctagcagtttaggacagttgttgaatctatcacagcttgatctctctaggaactcattcactggtgttcttcctcaatcttttagctctctgaagaatctgttgactcttgatgtttcttccaattaccttactggacctatccctcctggtttaggagcgttatcaaagcttatccatctgaacttttcaagcaatagtttctcgtctccgattccttcagagcttggtgatcttgtcaatctggttgactttgatctcagcatcaattcattgtctggttcagttcctcaggagctaagaaagttaagtaagttgcagctaatggcgattggcgataaccttttgagtggtactttaccagtagatttgtttagtgctgagagccaactgcaaactttagttttgagggaaaatggtttctctggtagtctacctgatgtgtgctggtcgttgccaaaattgcggattcttgacattgctaagaacaacttcacaggactgctgccatattctagttatgattcagaccagatagctgaaatggttgatatctcttcgaacacattctatggagagctcacaccgattcttagacggttcaggataatggacctctctggtaattatttcgaaggtaagcttcctgattatgtgaccggggaaaatgtgtctgttacaagcaattgccttcgaaatgagaggagacagaagccgtcagcaatatgtgcagcattctataagtctagaggattagattttgatgatttcggacgtcctaatttgacacaaccgacatcgaaaaatgcttcttcagggataagccgcagaacagtaattatattggcagcagtgggtggtggagttgcttttattcttctttttgttatcttgccaattattctggttctatgcatgcgccatagacgcagagcggcacaaagaggaaataacgacaggccaaaacctgccggggaagcttcacaacaaccacctaaaggagcacaaacctttgatttgtcacgtcttggaaatgcattttcttatgagcagcttcttcaggcaacagaggaattcaatgatgctaatctgataaaacgtggtcattcggggaatctgtttcgtggtttcttggaaaatggtatacccgttgttataaaaaagatcgatgtgcgggaaggtaaaagtgaaggctatatatcagaactggagttgtttagtaaggctggacaccagaggctggttccctttttgggacactgcttggagaatgagagccaaaagttcttggtatacaagtttatgagacacggtgatttggctagctctttgttcaggaaatccgaaaacgaaggtgatggattgaagtctttggattggataacaaggttgaaaattgctcttggtgcagctgagggactctcttatttgcatcatgagtgttcaccgcctctagttcatagggatgtacaagcaagtagcatacttcttgatgataaatttgaggtacgtcttggaagcctaagcgaggcatatgctcaaggtgatgcttatcaaagcagaatttctcgtttacttcgattaccgcagatataccatctccgattaaccgatagacatctgattggtttattcttttcaggtgtaacaaatgcaatatgttcgtatgatgtctactgctttggcaaagtgttacttgagctagtaacggggaagctcgggattagctcgccagacaacgcacttgcaaaagagtacatggaagaagctttgccatacatcagcacaaacgagaaagaactagtaaccaagatcttagacccgtcattaatggtggacgaagaccttctagaagaagtatgggcaatggctatcattgcaaagtcatgcctaaacccaaaaccaacaagaagaccattaatgagacacattgtgaacgcacttgagaacccactgaaagtagtaagagaagataccaactcgggttcaggctcttcccggttaagaacaaactcgtcgagagggtcttggaacgctgctatatttgggagctggaggcagagtgcgtcggatgtaacagctgttcaagcgggagcaacaacaagcggtggtggtggtggtggtggtggtaatggtttgagaaactcggggtcgcaaggaagtagcggaaggaacaataacaacaacgggaattcatcgtcgtcgagaagacggcaatctagtgagattgtaccggaacctgctgcttatggagtagtagaggataatttatga

SEQ ID NO: 28152 - protein, 925 aa, Arabidopsis thaliana
  misc_feature (1)..(925): Ceres Seq. ID no. 2703954
MVDQRRSALGFVLLLLCLVLFFDCVVVGQTQSRFSEKLILLNLRSSLGLRGTDWPIKGDPCVDWRGIQCENGSIIGINISGFRRTRIGKLNPQFSVDPLRNLTRLSYFNASGLALPGTIPEWFGVSLLALEVLDLSSCSVNGVVPFTLGNLTSLRTLNLSQNSLTSLVPSSLGQLLNLSQLDLSRNSFTGVLPQSFSSLKNLLTLDVSSNYLTGPIPPGLGALSKLIHLNFSSNSFSSPIPSELGDLVNLVDFDLSINSLSGSVPQELRKLSKLQLMAIGDNLLSGTLPVDLFSAESQLQTLVLRENGFSGSLPDVCWSLPKLRILDIAKNNFTGLLPYSSYDSDQIAEMVDISSNTFYGELTPILRRFRIMDLSGNYFEGKLPDYVTGENVSVTSNCLRNERRQKPSAICAAFYKSRGLDFDDFGRPNLTQPTSKNASSGISRRTVIILAAVGGGVAFILLFVILPIILVLCMRHRRRAAQRGNNDRPKPAGEASQQPPKGAQTFDLSRLGNAFSYEQLLQATEEFNDANLIKRGHSGNLFRGFLENGIPVVIKKIDVREGKSEGYISELELFSKAGHQRLVPFLGHCLENESQKFLVYKFMRHGDLASSLFRKSENEGDGLKSLDWITRLKIALGAAEGLSYLHHECSPPLVHRDVQASSILLDDKFEVRLGSLSEAYAQGDAYQSRISRLLRLPQIYHLRLTDRHLIGLFFSGVTNAICSYDVYCFGKVLLELVTGKLGISSPDNALAKEYMEEALPYISTNEKELVTKILDPSLMVDEDLLEEVWAMAIIAKSCLNPKPTRRPLMRHIVNALENPLKVVREDTNSGSGSSRLRTNSSRGSWNAAIFGSWRQSASDVTAVQAGATTSGGGGGGGGNGLRNSGSQGSSGRNNNNNGNSSSSRRRQSSEIVPEPAAYGVVEDNL

SEQ ID NO: 28153 - protein, 649 aa, Arabidopsis thaliana
  misc_feature (1)..(649): Ceres Seq. ID no. 2703955
MAIGDNLLSGTLPVDLFSAESQLQTLVLRENGFSGSLPDVCWSLPKLRILDIAKNNFTGLLPYSSYDSDQIAEMVDISSNTFYGELTPILRRFRIMDLSGNYFEGKLPDYVTGENVSVTSNCLRNERRQKPSAICAAFYKSRGLDFDDFGRPNLTQPTSKNASSGISRRTVIILAAVGGGVAFILLFVILPIILVLCMRHRRRAAQRGNNDRPKPAGEASQQPPKGAQTFDLSRLGNAFSYEQLLQATEEFNDANLIKRGHSGNLFRGFLENGIPVVIKKIDVREGKSEGYISELELFSKAGHQRLVPFLGHCLENESQKFLVYKFMRHGDLASSLFRKSENEGDGLKSLDWITRLKIALGAAEGLSYLHHECSPPLVHRDVQASSILLDDKFEVRLGSLSEAYAQGDAYQSRISRLLRLPQIYHLRLTDRHLIGLFFSGVTNAICSYDVYCFGKVLLELVTGKLGISSPDNALAKEYMEEALPYISTNEKELVTKILDPSLMVDEDLLEEVWAMAIIAKSCLNPKPTRRPLMRHIVNALENPLKVVREDTNSGSGSSRLRTNSSRGSWNAAIFGSWRQSASDVTAVQAGATTSGGGGGGGGNGLRNSGSQGSSGRNNNNNGNSSSSRRRQSSEIVPEPAAYGVVEDNL

SEQ ID NO: 28154 - protein, 576 aa, Arabidopsis thaliana
  misc_feature (1)..(576): Ceres Seq. ID no. 2703956
MVDISSNTFYGELTPILRRFRIMDLSGNYFEGKLPDYVTGENVSVTSNCLRNERRQKPSAICAAFYKSRGLDFDDFGRPNLTQPTSKNASSGISRRTVIILAAVGGGVAFILLFVILPIILVLCMRHRRRAAQRGNNDRPKPAGEASQQPPKGAQTFDLSRLGNAFSYEQLLQATEEFNDANLIKRGHSGNLFRGFLENGIPVVIKKIDVREGKSEGYISELELFSKAGHQRLVPFLGHCLENESQKFLVYKFMRHGDLASSLFRKSENEGDGLKSLDWITRLKIALGAAEGLSYLHHECSPPLVHRDVQASSILLDDKFEVRLGSLSEAYAQGDAYQSRISRLLRLPQIYHLRLTDRHLIGLFFSGVTNAICSYDVYCFGKVLLELVTGKLGISSPDNALAKEYMEEALPYISTNEKELVTKILDPSLMVDEDLLEEVWAMAIIAKSCLNPKPTRRPLMRHIVNALENPLKVVREDTNSGSGSSRLRTNSSRGSWNAAIFGSWRQSASDVTAVQAGATTSGGGGGGGGNGLRNSGSQGSSGRNNNNNGNSSSSRRRQSSEIVPEPAAYGVVEDNL

SEQ ID NO: 28155 - DNA, 810 bp, Arabidopsis thaliana
  misc_feature (1)..(810): Ceres Seq. ID no. 2704409
atgttcgaagaaatacttcataaatctgaaggaaaacaaatagttatgtttcttgattatgatggtactctctctcccattgttgatgatcctgatcgagctttcatgtccaagaagatgcgaaatactgtgaggaaacttgcaaagtgttttccaacagccatagttagtgggagatgcagagagaaggtttctagttttgtgaaattaactgagttatactacgctggaagtcatggcatggacatcaaaggaccagagcaaggatctaaatacaagaaagaaaatcagtctcttctttgtcaacccgcaactgaattcctcccggtgataaacgaggtttataaaaaactagtcgagaacactcaatcgattccaggagcgaaagttgagaacaacaaattttgtgcgtctgttcactttcgatgcgtagaagaaaataaatggagtgacttggcccatcaagttcgatcagtcttgaagaattaccccaagctcatgcttacccaaggaagaaaagtattggagattcgtccaatcattaagtgggataaaggcaaagcactcgagtttttgttagaatcactaggatatgataattgtaccgatgtttttcctatatatattggagatgatcgtaccgacgaagacgcctttaagatactgagagacaaaaaacaaggtcttggaattcttgtgtccaaatacgcaaaggagactaatgcttcttattctttgcaagagccagatgaggttatggtttttttagaacgtttggtggaatggaaacagtcaaggtgtggggcatga

SEQ ID NO: 28156 - protein, 269 aa, Arabidopsis thaliana
  misc_feature (1)..(269): Ceres Seq. ID no. 2704410
MFEEILHKSEGKQIVMFLDYDGTLSPIVDDPDRAFMSKKMRNTVRKLAKCFPTAIVSGRCREKVSSFVKLTELYYAGSHGMDIKGPEQGSKYKKENQSLLCQPATEFLPVINEVYKKLVENTQSIPGAKVENNKFCASVHFRCVEENKWSDLAHQVRSVLKNYPKLMLTQGRKVLEIRPIIKWDKGKALEFLLESLGYDNCTDVFPIYIGDDRTDEDAFKILRDKKQGLGILVSKYAKETNASYSLQEPDEVMVFLERLVEWKQSRCGA

SEQ ID NO: 28157 - protein, 254 aa, Arabidopsis thaliana
  misc_feature (1)..(254): Ceres Seq. ID no. 2704411
MFLDYDGTLSPIVDDPDRAFMSKKMRNTVRKLAKCFPTAIVSGRCREKVSSFVKLTELYYAGSHGMDIKGPEQGSKYKKENQSLLCQPATEFLPVINEVYKKLVENTQSIPGAKVENNKFCASVHFRCVEENKWSDLAHQVRSVLKNYPKLMLTQGRKVLEIRPIIKWDKGKALEFLLESLGYDNCTDVFPIYIGDDRTDEDAFKILRDKKQGLGILVSKYAKETNASYSLQEPDEVMVFLERLVEWKQSRCGA

SEQ ID NO: 28158 - protein, 234 aa, Arabidopsis thaliana
  misc_feature (1)..(234): Ceres Seq. ID no. 2704412
MSKKMRNTVRKLAKCFPTAIVSGRCREKVSSFVKLTELYYAGSHGMDIKGPEQGSKYKKENQSLLCQPATEFLPVINEVYKKLVENTQSIPGAKVENNKFCASVHFRCVEENKWSDLAHQVRSVLKNYPKLMLTQGRKVLEIRPIIKWDKGKALEFLLESLGYDNCTDVFPIYIGDDRTDEDAFKILRDKKQGLGILVSKYAKETNASYSLQEPDEVMVFLERLVEWKQSRCGA

SEQ ID NO: 28159 - DNA, 531 bp, Arabidopsis thaliana
  misc_feature (1)..(531): Ceres Seq. ID no. 2704770
atgaatgaaatgtcgttctttggttatagtttcatcgtagtagcattattcttcgatttaactcaagcctatcgtcacactcccgctcaaccgccaaaagcaaacgcaaacggtgatgtcaaaccgcaagaaacgctcgtggttcacaacaaggcccgagccatggtcggagtcggaccaatggtgtggaacgaaactcttgcgacctatgcacagagctacgcacatgaacgagccagagactgtgccatgaagcattccttgggaccattcggcgagaatctagccgcgggttggggaacgatgagcggtccggtagcaactgagtattggatgacggagaaggaaaattacgattatgatagtaacacgtgtggtggtgatggtgtgtgtggacactacactcagatcgtgtggcgtgactcggttcgacttggttgtgcctccgtgagatgtaagaatgatgagtatatttgggtgatttgtagctatgatcctccggggaattacatcggtcaacgtccatattag

SEQ ID NO: 28160 - protein, 176 aa, Arabidopsis thaliana
  misc_feature (1)..(176): Ceres Seq. ID no. 2704771
MNEMSFFGYSFIVVALFFDLTQAYRHTPAQPPKANANGDVKPQETLVVHNKARAMVGVGPMVWNETLATYAQSYAHERARDCAMKHSLGPFGENLAAGWGTMSGPVATEYWMTEKENYDYDSNTCGGDGVCGHYTQIVWRDSVRLGCASVRCKNDEYIWVICSYDPPGNYIGQRPY

SEQ ID NO: 28161 - protein, 173 aa, Arabidopsis thaliana
  misc_feature (1)..(173): Ceres Seq. ID no. 2704772
MSFFGYSFIVVALFFDLTQAYRHTPAQPPKANANGDVKPQETLVVHNKARAMVGVGPMVWNETLATYAQSYAHERARDCAMKHSLGPFGENLAAGWGTMSGPVATEYWMTEKENYDYDSNTCGGDGVCGHYTQIVWRDSVRLGCASVRCKNDEYIWVICSYDPPGNYIGQRPY

SEQ ID NO: 28162 - protein, 122 aa, Arabidopsis thaliana
  misc_feature (1)..(122): Ceres Seq. ID no. 2704773
MVGVGPMVWNETLATYAQSYAHERARDCAMKHSLGPFGENLAAGWGTMSGPVATEYWMTEKENYDYDSNTCGGDGVCGHYTQIVWRDSVRLGCASVRCKNDEYIWVICSYDPPGNYIGQRPY

SEQ ID NO: 28163 - DNA, 1008 bp, Arabidopsis thaliana
  misc_feature (1)..(1008): Ceres Seq. ID no. 2704836
atgtctaaagaagctgagatgtcgatcgcggtgtcggctttgttccctggttttagattctctcctactgatgttgaacttatctcgtactatcttcgtcgtaaaatcgatggtgatgagaactctgttgctgtgattgctgaggtcgagatttacaagttcgagccgtgggacttgccagaggaatcgaaactgaaatcggagaacgagtggttttacttctgcgcgagggggaggaagtacccgcacgggtcacaaagccggcgagccacacagctaggatattggaaagcgaccggtaaagagcggagtgttaaatccgggaaccaagttgttggaaccaagagaacgcttgtatttcatatcggtcgggctcctcgtggcgagagaacggagtggattatgcatgaatactgcatccatggagccccacaggatgcattagtggtgtgccggttaagaaaaaatgctgattttcgggctagttcgacccaaaaaatggaggatggtgttgtgcaagacgatggctacgttggccaaagaggtggtttggagaaggaggacaaatcctactatgaatctgagcatcagataccaaatggtgacatcgcagaatcatcaaatgttgttgaggatcaggccgataccgatgatgattgttacgccgagattctgaacgatgatataataaagctcgacgaagaagcgttgaaagctagccaagcgtttcgaccaactaatccaactcatcaagaaacaatatcaagcgagtcatcgagtaagaggtcaaaatgtggtataaaaaaagaatcaacggaaacaatgaattgttacgctttgttcaggatcaagaacgttgccggaaccgactccagctggagattcccgaacccgttcaaaatcaagaaagatgatagccagagattgatgaagaatgttctggccactactgttttcttggctatcttattttctttcttttggactgtattaatagctaggaactaa

SEQ ID NO: 28164 - protein, 335 aa, Arabidopsis thaliana
  misc_feature (1)..(335): Ceres Seq. ID no. 2704837
MSKEAEMSIAVSALFPGFRFSPTDVELISYYLRRKIDGDENSVAVIAEVEIYKFEPWDLPEESKLKSENEWFYFCARGRKYPHGSQSRRATQLGYWKATGKERSVKSGNQVVGTKRTLVFHIGRAPRGERTEWIMHEYCIHGAPQDALVVCRLRKNADFRASSTQKMEDGVVQDDGYVGQRGGLEKEDKSYYESEHQIPNGDIAESSNVVEDQADTDDDCYAEILNDDIIKLDEEALKASQAFRPTNPTHQETISSESSSKRSKCGIKKESTETMNCYALFRIKNVAGTDSSWRFPNPFKIKKDDSQRLMKNVLATTVFLAILFSFFWTVLIARN

SEQ ID NO: 28165 - protein, 329 aa, Arabidopsis thaliana
  misc_feature (1)..(329): Ceres Seq. ID no. 2704838
MSIAVSALFPGFRFSPTDVELISYYLRRKIDGDENSVAVIAEVEIYKFEPWDLPEESKLKSENEWFYFCARGRKYPHGSQSRRATQLGYWKATGKERSVKSGNQVVGTKRTLVFHIGRAPRGERTEWIMHEYCIHGAPQDALVVCRLRKNADFRASSTQKMEDGVVQDDGYVGQRGGLEKEDKSYYESEHQIPNGDIAESSNVVEDQADTDDDCYAEILNDDIIKLDEEALKASQAFRPTNPTHQETISSESSSKRSKCGIKKESTETMNCYALFRIKNVAGTDSSWRFPNPFKIKKDDSQRLMKNVLATTVFLAILFSFFWTVLIARN

SEQ ID NO: 28166 - protein, 201 aa, Arabidopsis thaliana
  misc_feature (1)..(201): Ceres Seq. ID no. 2704839
MHEYCIHGAPQDALVVCRLRKNADFRASSTQKMEDGVVQDDGYVGQRGGLEKEDKSYYESEHQIPNGDIAESSNVVEDQADTDDDCYAEILNDDIIKLDEEALKASQAFRPTNPTHQETISSESSSKRSKCGIKKESTETMNCYALFRIKNVAGTDSSWRFPNPFKIKKDDSQRLMKNVLATTVFLAILFSFFWTVLIARN

SEQ ID NO: 28167 - DNA, 1677 bp, Arabidopsis thaliana
  misc_feature (1)..(1677): Ceres Seq. ID no. 2705651
atgtctctcaacgttgatcttgacgtatgtgttttggagagacccaatgtgtgttcttttaaaaagaggagttgctccaagttgagttgttccttgacgaagaagagaagaagtagcaaggtgatgtccgtggagatcttcgaggatgagcatgacgcggaggagttaaaggtggttgatgcattccgccaagtgcttattctcgatgaactacttccggacaaacatgatgattaccatatgatgcttaggtttttgaaggctagaaaatttgatcttgagaaaacaaatcaaatgtggtctgacatgctccgatggaggaaggagtttggtgctgacacagttatggaggattttgaatttaaggaaattgatgaagtgttgaaatactaccctcaaggacaccatggagtcgacaaggaaggaagaccggtgtacattgagaggctaggtcaagtagactctaccaagttgatgcaagtcacaaccatggatagatatgtgaactaccatgtgatggagtttgagaggactttcaatgttaagttcccagcatgctccatcgcggcaaagaagcacattgatcaaagtacaacaattcttgatgtccaaggagtggggctgaaaaacttcaacaaggcagcaagggatttgattacgcgtcttcaaaaggtcgatggtgacaactatccagagaccttgaacaggatgtttatcatcaatgctggctcaggattcaggatgttgtggaacacggttaagtctttccttgacccaaagactacagcaaagatccatgttcttggcaacaagtaccaaagcaagttgcttgaaataattgatgctagtgagctgcctgagttcttgggaggttcttgtacttgtgctgacaatgggggttgcatgcgctcggacaaaggaccatggaacaatccagatattatgaagagagttaataatggtgaccacatatgctcaaagagatctcaagctgataatgctggagagaatattatctctcaggggaataactctgcagttgaggaagctcctgaaactgaccagtcacagccctctccttgtcaaaatgtcgtggttgctcatccagcttggaacataccagaagctcacaaattttccctctcaaaaagggatgtttacgccattcaagaagcttgcaaagctacaaatgaaagtggaaggtctcctattttcactggagtcatggcttttgtaatgggtgtagtcaccatgattagagtgactaaaaacgttccaaggaagctaaccgagtcaactatatactctagcccggtttactgcgacgaaaactcgatgaacaagagctcgatgcatgggaagaaaatggcaacaacaaccatctcaggggaagatttcatggcggtcatgaaacgaatggctgagcttgagcagaaagtcacaaacttgagtgcacagccagcaactatgcctcctgaaaaggaagagatgcttaatgctgccattagccgagccgatttcttggaacaagaacttgctgcaaccaagaaggctcttgatgattctcttacccgacaagaggaccttgtggcatacgttgagagaaagaagaagaagaagaagctggtccgctttcaaatcaatgcctacttaactaatttttgttttggtgtttaa

SEQ ID NO: 28168 - protein, 558 aa, Arabidopsis thaliana
  misc_feature (1)..(558): Ceres Seq. ID no. 2705652
MSLNVDLDVCVLERPNVCSFKKRSCSKLSCSLTKKRRSSKVMSVEIFEDEHDAEELKVVDAFRQVLILDELLPDKHDDYHMMLRFLKARKFDLEKTNQMWSDMLRWRKEFGADTVMEDFEFKEIDEVLKYYPQGHHGVDKEGRPVYIERLGQVDSTKLMQVTTMDRYVNYHVMEFERTFNVKFPACSIAAKKHIDQSTTILDVQGVGLKNFNKAARDLITRLQKVDGDNYPETLNRMFIINAGSGFRMLWNTVKSFLDPKTTAKIHVLGNKYQSKLLEIIDASELPEFLGGSCTCADNGGCMRSDKGPWNNPDIMKRVNNGDHICSKRSQADNAGENIISQGNNSAVEEAPETDQSQPSPCQNVVVAHPAWNIPEAHKFSLSKRDVYAIQEACKATNESGRSPIFTGVMAFVMGVVTMIRVTKNVPRKLTESTIYSSPVYCDENSMNKSSMHGKKMATTTISGEDFMAVMKRMAELEQKVTNLSAQPATMPPEKEEMLNAAISRADFLEQELAATKKALDDSLTRQEDLVAYVERKKKKKKLVRFQINAYLTNFCFGV

SEQ ID NO: 28169 - protein, 517 aa, Arabidopsis thaliana
  misc_feature (1)..(517): Ceres Seq. ID no. 2705653
MSVEIFEDEHDAEELKVVDAFRQVLILDELLPDKHDDYHMMLRFLKARKFDLEKTNQMWSDMLRWRKEFGADTVMEDFEFKEIDEVLKYYPQGHHGVDKEGRPVYIERLGQVDSTKLMQVTTMDRYVNYHVMEFERTFNVKFPACSIAAKKHIDQSTTILDVQGVGLKNFNKAARDLITRLQKVDGDNYPETLNRMFIINAGSGFRMLWNTVKSFLDPKTTAKIHVLGNKYQSKLLEIIDASELPEFLGGSCTCADNGGCMRSDKGPWNNPDIMKRVNNGDHICSKRSQADNAGENIISQGNNSAVEEAPETDQSQPSPCQNVVVAHPAWNIPEAHKFSLSKRDVYAIQEACKATNESGRSPIFTGVMAFVMGVVTMIRVTKNVPRKLTESTIYSSPVYCDENSMNKSSMHGKKMATTTISGEDFMAVMKRMAELEQKVTNLSAQPATMPPEKEEMLNAAISRADFLEQELAATKKALDDSLTRQEDLVAYVERKKKKKKLVRFQINAYLTNFCFGV

SEQ ID NO: 28170 - protein, 478 aa, Arabidopsis thaliana
  misc_feature (1)..(478): Ceres Seq. ID no. 2705654
MMLRFLKARKFDLEKTNQMWSDMLRWRKEFGADTVMEDFEFKEIDEVLKYYPQGHHGVDKEGRPVYIERLGQVDSTKLMQVTTMDRYVNYHVMEFERTFNVKFPACSIAAKKHIDQSTTILDVQGVGLKNFNKAARDLITRLQKVDGDNYPETLNRMFIINAGSGFRMLWNTVKSFLDPKTTAKIHVLGNKYQSKLLEIIDASELPEFLGGSCTCADNGGCMRSDKGPWNNPDIMKRVNNGDHICSKRSQADNAGENIISQGNNSAVEEAPETDQSQPSPCQNVVVAHPAWNIPEAHKFSLSKRDVYAIQEACKATNESGRSPIFTGVMAFVMGVVTMIRVTKNVPRKLTESTIYSSPVYCDENSMNKSSMHGKKMATTTISGEDFMAVMKRMAELEQKVTNLSAQPATMPPEKEEMLNAAISRADFLEQELAATKKALDDSLTRQEDLVAYVERKKKKKKLVRFQINAYLTNFCFGV

SEQ ID NO: 28171 - DNA, 2361 bp, Arabidopsis thaliana
  misc_feature (1)..(2361): Ceres Seq. ID no. 2705693
atggatgctccggttccactctctttatctactctgttagaactctgcaccaatctcttgcaaaaatctgtaaacaagtccaatggtcgtttcacagcgcaattggttcattgccgtgttatcaaatcgggtcttatgttcagcgtctacctgatgaataatctcatgaacgtctactcaaaaactggttatgctcttcacgcacgcaagctgttcgacgaaatgcctctaagaacagctttttcatggaacacggttctttcggcttattctaaacgaggagatatggattcgacttgtgagttctttgatcagttgcctcaaagggattcggtttcgtggactacgatgattgttgggtataagaacattggtcaatatcataaggctataagagttatgggggatatggtcaaggaagggattgagccgacgcagtttacgcttacgaatgtgcttgcatcggtggctgcaacgcggtgtatggaaacaggtaaaaaggttcattctttcatcgttaagcttggtcttcgcggtaacgtttctgtgtcgaattcactgcttaatatgtatgcaaaatgtggtgatccaatgatggcaaaatttgttttcgatagaatggttgttagagatatctcaagctggaatgctatgattgcgttacatatgcaggtcggtcaaatggatcttgctatggcgcagttcgagcaaatggctgagcgagatatagtcacttggaattctatgatttctggtttcaatcagagagggtatgatctcagagctctagatatcttttcgaagatgctgagggattctctgttgtcgccggatagattcactctggcgagtgtgttatctgcttgtgccaatcttgagaaactttgtattgggaagcagattcattcgcacattgttactacagggtttgatatttccggaatcgtgttaaatgcattgatctcgatgtattcgaggtgtggaggggtcgagactgcccggagactgatagaacaaagaggaaccaaagatctcaagattgaaggttttacagctttacttgatgggtacattaagcttggagatatgaatcaagctaagaatatatttgtttcgttgaaagatcgtgatgtagtcgcatggaccgccatgattgtaggatatgagcaacacggttcgtatggtgaagctataaaccttttcagatcaatggttggaggagggcagagaccaaacagttacactcttgcagcaatgttaagtgtagcttcaagtttggcatcattgagccatggcaagcaaatccatgggagtgctgtaaagtcaggggaaatttattcagtttctgtcagcaatgcattgataacaatgtatgcaaaggcgggtaacattacatcggcaagccgggcatttgatttgatacgctgtgagagggatacagtatcgtggacatccatgattatcgcgttggcacagcacggtcacgcagaagaagcacttgagctttttgagacaatgctgatggaaggactaagacctgatcacataacatatgttggtgttttctctgcctgtactcatgccggtttggtcaaccaaggtcgtcaatacttcgatatgatgaaggacgttgataagattatacctacccttagccactatgcttgtatggtggacctgtttggacgtgctggtttattgcaggaagcacaagagttcatcgaaaagatgcctattgagcctgatgtagtgacatggggttcactgctttctgcttgcagagttcacaagaacatcgatcttgggaaagttgcagcagagagattgcttcttctcgagccagagaacagcggggcatactcagccttggctaacttatactcagcttgtggaaaatgggaagaagctgctaagataagaaaatcaatgaaagatggaagagtaaagaaggaacaagggtttagctggattgaagtgaagcataaagtccatgtctttggagtggaagacgggactcatccagagaagaacgagatctacatgaccatgaagaagatttgggacgagatcaagaaaatgggttatgttcccgacacagcttctgtactacacgacctcgaagaagaggttaaagaacagattctaaggcaccacagcgagaaactagcaatcgcatttggactaattagcactccggataaaaccacattgaggatcatgaagaatctcagagtgtgcaatgattgccacacggctataaagttcatttccaagcttgtgggaagggaaatcatagtgagagatacaacaagatttcaccatttcaaagatgggttttgttcttgccgagattattggtga

SEQ ID NO: 28172 - protein, 786 aa, Arabidopsis thaliana
  misc_feature (1)..(786): Ceres Seq. ID no. 2705694
MDAPVPLSLSTLLELCTNLLQKSVNKSNGRFTAQLVHCRVIKSGLMFSVYLMNNLMNVYSKTGYALHARKLFDEMPLRTAFSWNTVLSAYSKRGDMDSTCEFFDQLPQRDSVSWTTMIVGYKNIGQYHKAIRVMGDMVKEGIEPTQFTLTNVLASVAATRCMETGKKVHSFIVKLGLRGNVSVSNSLLNMYAKCGDPMMAKFVFDRMVVRDISSWNAMIALHMQVGQMDLAMAQFEQMAERDIVTWNSMISGFNQRGYDLRALDIFSKMLRDSLLSPDRFTLASVLSACANLEKLCIGKQIHSHIVTTGFDISGIVLNALISMYSRCGGVETARRLIEQRGTKDLKIEGFTALLDGYIKLGDMNQAKNIFVSLKDRDVVAWTAMIVGYEQHGSYGEAINLFRSMVGGGQRPNSYTLAAMLSVASSLASLSHGKQIHGSAVKSGEIYSVSVSNALITMYAKAGNITSASRAFDLIRCERDTVSWTSMIIALAQHGHAEEALELFETMLMEGLRPDHITYVGVFSACTHAGLVNQGRQYFDMMKDVDKIIPTLSHYACMVDLFGRAGLLQEAQEFIEKMPIEPDVVTWGSLLSACRVHKNIDLGKVAAERLLLLEPENSGAYSALANLYSACGKWEEAAKIRKSMKDGRVKKEQGFSWIEVKHKVHVFGVEDGTHPEKNEIYMTMKKIWDEIKKMGYVPDTASVLHDLEEEVKEQILRHHSEKLAIAFGLISTPDKTTLRIMKNLRVCNDCHTAIKFISKLVGREIIVRDTTRFHHFKDGFCSCRDYW

SEQ ID NO: 28173 - protein, 741 aa, Arabidopsis thaliana
  misc_feature (1)..(741): Ceres Seq. ID no. 2705695
MFSVYLMNNLMNVYSKTGYALHARKLFDEMPLRTAFSWNTVLSAYSKRGDMDSTCEFFDQLPQRDSVSWTTMIVGYKNIGQYHKAIRVMGDMVKEGIEPTQFTLTNVLASVAATRCMETGKKVHSFIVKLGLRGNVSVSNSLLNMYAKCGDPMMAKFVFDRMVVRDISSWNAMIALHMQVGQMDLAMAQFEQMAERDIVTWNSMISGFNQRGYDLRALDIFSKMLRDSLLSPDRFTLASVLSACANLEKLCIGKQIHSHIVTTGFDISGIVLNALISMYSRCGGVETARRLIEQRGTKDLKIEGFTALLDGYIKLGDMNQAKNIFVSLKDRDVVAWTAMIVGYEQHGSYGEAINLFRSMVGGGQRPNSYTLAAMLSVASSLASLSHGKQIHGSAVKSGEIYSVSVSNALITMYAKAGNITSASRAFDLIRCERDTVSWTSMIIALAQHGHAEEALELFETMLMEGLRPDHITYVGVFSACTHAGLVNQGRQYFDMMKDVDKIIPTLSHYACMVDLFGRAGLLQEAQEFIEKMPIEPDVVTWGSLLSACRVHKNIDLGKVAAERLLLLEPENSGAYSALANLYSACGKWEEAAKIRKSMKDGRVKKEQGFSWIEVKHKVHVFGVEDGTHPEKNEIYMTMKKIWDEIKKMGYVPDTASVLHDLEEEVKEQILRHHSEKLAIAFGLISTPDKTTLRIMKNLRVCNDCHTAIKFISKLVGREIIVRDTTRFHHFKDGFCSCRDYW

SEQ ID NO: 28174 - protein, 735 aa, Arabidopsis thaliana
  misc_feature (1)..(735): Ceres Seq. ID no. 2705696
MNNLMNVYSKTGYALHARKLFDEMPLRTAFSWNTVLSAYSKRGDMDSTCEFFDQLPQRDSVSWTTMIVGYKNIGQYHKAIRVMGDMVKEGIEPTQFTLTNVLASVAATRCMETGKKVHSFIVKLGLRGNVSVSNSLLNMYAKCGDPMMAKFVFDRMVVRDISSWNAMIALHMQVGQMDLAMAQFEQMAERDIVTWNSMISGFNQRGYDLRALDIFSKMLRDSLLSPDRFTLASVLSACANLEKLCIGKQIHSHIVTTGFDISGIVLNALISMYSRCGGVETARRLIEQRGTKDLKIEGFTALLDGYIKLGDMNQAKNIFVSLKDRDVVAWTAMIVGYEQHGSYGEAINLFRSMVGGGQRPNSYTLAAMLSVASSLASLSHGKQIHGSAVKSGEIYSVSVSNALITMYAKAGNITSASRAFDLIRCERDTVSWTSMIIALAQHGHAEEALELFETMLMEGLRPDHITYVGVFSACTHAGLVNQGRQYFDMMKDVDKIIPTLSHYACMVDLFGRAGLLQEAQEFIEKMPIEPDVVTWGSLLSACRVHKNIDLGKVAAERLLLLEPENSGAYSALANLYSACGKWEEAAKIRKSMKDGRVKKEQGFSWIEVKHKVHVFGVEDGTHPEKNEIYMTMKKIWDEIKKMGYVPDTASVLHDLEEEVKEQILRHHSEKLAIAFGLISTPDKTTLRIMKNLRVCNDCHTAIKFISKLVGREIIVRDTTRFHHFKDGFCSCRDYW

SEQ ID NO: 28175 - DNA, 2148 bp, Arabidopsis thaliana
  misc_feature (1)..(2148): Ceres Seq. ID no. 2705971
atggctgtttcactaccattgtttcaatttatactctttcttcttcttcttcttctttcaagaacggtttatgcatacttaatcggagtcggaagctatgacatcactggtcctgccgctgatgtcaacatgatgggctacgcaaactcagatcaaatcgcttccggtattcatttccggttacgagctcgtgccttcatcgtcgctgagcctcaagagaagaatgtagcaataagtggaattcacacacatgctggaccaggaggatatcttcaatacgtcacatatattgtgacgtctcttggatttgttcgtcaatcttttgacgttgttgttaacggcattgagcaaagcattgtccaagcacacgaaagcctacgtcctggttctgcttttgttaacaaaggggatcttttggatgctggtgtgaatcgaagtccgagttcttatctgaacaatcctgcagctgagaggagtaaatataagtatgatgttgataaggaaatgactcttgttaagtttgttgattctcagttgggacctactggtagttttaactggtttgctactcatgggacttccatgagtcggactaactcgttgattagtggagataacaaaggcgctgcagctcggtttatggaggattggtttgagaatggacagaagaattctgttagctctagaaacatccctcggagagtatcaaccattgtttctgatttcagtagaaaccagagtagacttttggatattgcggctacttataagtcatctagaggacattctgtggataagtcccttgatgttaaaacccgagtaagaaacggttcgaagcgtaaatttgtctctgccttctgtcaatcaaactgtggtgatgtgagtccaaatactcttggtaccttttgcattgacactggactgccttgtgatttcaatcacagtacctgcaatggacagaacgagttgtgctatggccgtggtccgggctaccctgatgaatttgagagtacacgtatcattggagaaaagcaattcaaaatggctgtggaactttttaacaaagctacagagaagctgcaggggaaaattggttaccaacatgcgtatctagatttctcgaatcttgatgtcacagttcctaaagcaggcggtggctctgagacggttaagacatgtccagctgcaatggggtttggttttgctgctggaacaactgatggtccaggtgcttttgatttcaaacaaggagatgatcagggtaatgtgttttggagactagtgaggaatgtgttaagaactcctggtccagaacaggtccaatgccaaaaaccaaaacccattttacttgacactggtgagatgaaagaaccatatgactgggcgatacttcgcattggccaattagtcatcctcagtgttcccggagagttcacaacaatggctggaagacgtctccgtgacgctatcaagtcttttctcatttcttcggaccccaaggaattcagcaacaacatgcatgtcgtaatcgcaggtctcaccaacacctattctcagtacatcgccactttcgaagagtacgaggttcaaagatacgagggcgcctcaacgttatacggacgacacacactcactgcttatatccaagagttcaagaaactagccacagctttagttaacggtctaacactcccacgtggtccgcaacctcctgaccttttagacaaacagatcagtttactatcccctgtggttgtagactcaactcctctaggagtcaaattcggtgacgtcaaagctgatgtacctccaaagtcaacgttcaggagaggtcaacaagttaacgcaacgttttggtcaggatgtcctcgaaatgatttgatgactgaaggatcattcgctgtggtggagacgctgcgtgagggagggaaatgggctccggtgtatgatgacgatgacttcagtttgaagttcaagtggtcgagaccggcaaagctgagttcggagagccaagccacgattgagtggagggtaccggaatctgcggtagccggagtttatagaataagacattatggagcttctaagtcgttgtttggatccattagtagcttctctggttcttctagtgcctttgtagttgtatga

SEQ ID NO: 28176 - protein, 715 aa, Arabidopsis thaliana
  misc_feature (1)..(715): Ceres Seq. ID no. 2705972
MAVSLPLFQFILFLLLLLLSRTVYAYLIGVGSYDITGPAADVNMMGYANSDQIASGIHFRLRARAFIVAEPQEKNVAISGIHTHAGPGGYLQYVTYIVTSLGFVRQSFDVVVNGIEQSIVQAHESLRPGSAFVNKGDLLDAGVNRSPSSYLNNPAAERSKYKYDVDKEMTLVKFVDSQLGPTGSFNWFATHGTSMSRTNSLISGDNKGAAARFMEDWFENGQKNSVSSRNIPRRVSTIVSDFSRNQSRLLDIAATYKSSRGHSVDKSLDVKTRVRNGSKRKFVSAFCQSNCGDVSPNTLGTFCIDTGLPCDFNHSTCNGQNELCYGRGPGYPDEFESTRIIGEKQFKMAVELFNKATEKLQGKIGYQHAYLDFSNLDVTVPKAGGGSETVKTCPAAMGFGFAAGTTDGPGAFDFKQGDDQGNVFWRLVRNVLRTPGPEQVQCQKPKPILLDTGEMKEPYDWAILRIGQLVILSVPGEFTTMAGRRLRDAIKSFLISSDPKEFSNNMHVVIAGLTNTYSQYIATFEEYEVQRYEGASTLYGRHTLTAYIQEFKKLATALVNGLTLPRGPQPPDLLDKQISLLSPVVVDSTPLGVKFGDVKADVPPKSTFRRGQQVNATFWSGCPRNDLMTEGSFAVVETLREGGKWAPVYDDDDFSLKFKWSRPAKLSSESQATIEWRVPESAVAGVYRIRHYGASKSLFGSISSFSGSSSAFVVV

SEQ ID NO: 28177 - protein, 672 aa, Arabidopsis thaliana
  misc_feature (1)..(672): Ceres Seq. ID no. 2705973
MMGYANSDQIASGIHFRLRARAFIVAEPQEKNVAISGIHTHAGPGGYLQYVTYIVTSLGFVRQSFDVVVNGIEQSIVQAHESLRPGSAFVNKGDLLDAGVNRSPSSYLNNPAAERSKYKYDVDKEMTLVKFVDSQLGPTGSFNWFATHGTSMSRTNSLISGDNKGAAARFMEDWFENGQKNSVSSRNIPRRVSTIVSDFSRNQSRLLDIAATYKSSRGHSVDKSLDVKTRVRNGSKRKFVSAFCQSNCGDVSPNTLGTFCIDTGLPCDFNHSTCNGQNELCYGRGPGYPDEFESTRIIGEKQFKMAVELFNKATEKLQGKIGYQHAYLDFSNLDVTVPKAGGGSETVKTCPAAMGFGFAAGTTDGPGAFDFKQGDDQGNVFWRLVRNVLRTPGPEQVQCQKPKPILLDTGEMKEPYDWAILRIGQLVILSVPGEFTTMAGRRLRDAIKSFLISSDPKEFSNNMHVVIAGLTNTYSQYIATFEEYEVQRYEGASTLYGRHTLTAYIQEFKKLATALVNGLTLPRGPQPPDLLDKQISLLSPVVVDSTPLGVKFGDVKADVPPKSTFRRGQQVNATFWSGCPRNDLMTEGSFAVVETLREGGKWAPVYDDDDFSLKFKWSRPAKLSSESQATIEWRVPESAVAGVYRIRHYGASKSLFGSISSFSGSSSAFVVV

SEQ ID NO: 28178 - protein, 671 aa, Arabidopsis thaliana
  misc_feature (1)..(671): Ceres Seq. ID no. 2705974
MGYANSDQIASGIHFRLRARAFIVAEPQEKNVAISGIHTHAGPGGYLQYVTYIVTSLGFVRQSFDVVVNGIEQSIVQAHESLRPGSAFVNKGDLLDAGVNRSPSSYLNNPAAERSKYKYDVDKEMTLVKFVDSQLGPTGSFNWFATHGTSMSRTNSLISGDNKGAAARFMEDWFENGQKNSVSSRNIPRRVSTIVSDFSRNQSRLLDIAATYKSSRGHSVDKSLDVKTRVRNGSKRKFVSAFCQSNCGDVSPNTLGTFCIDTGLPCDFNHSTCNGQNELCYGRGPGYPDEFESTRIIGEKQFKMAVELFNKATEKLQGKIGYQHAYLDFSNLDVTVPKAGGGSETVKTCPAAMGFGFAAGTTDGPGAFDFKQGDDQGNVFWRLVRNVLRTPGPEQVQCQKPKPILLDTGEMKEPYDWAILRIGQLVILSVPGEFTTMAGRRLRDAIKSFLISSDPKEFSNNMHVVIAGLTNTYSQYIATFEEYEVQRYEGASTLYGRHTLTAYIQEFKKLATALVNGLTLPRGPQPPDLLDKQISLLSPVVVDSTPLGVKFGDVKADVPPKSTFRRGQQVNATFWSGCPRNDLMTEGSFAVVETLREGGKWAPVYDDDDFSLKFKWSRPAKLSSESQATIEWRVPESAVAGVYRIRHYGASKSLFGSISSFSGSSSAFVVV

SEQ ID NO: 28179 - DNA, 966 bp, Arabidopsis thaliana
  misc_feature (1)..(966): Ceres Seq. ID no. 2706071
atggcttcttcgaatagacactggccaagcatgttcaagtccaaacctcatccccatcaatggcaacatgacatcaactctcctctcttgccttctgcttctcaccgatcttctcctttctcttcaggatgtgaagtggagaggagtccagagccaaaaccaagatggaatccaaagccagagcagattcggatacttgaagcaatctttaactccgggatggtgaatcctccaagagaggagatcaggaggattagggctcagcttcaagaatacggccaagtcggtgatgctaacgtcttctactggttccaaaaccgtaagtcccgtagtaaacacaaactccgcctcctccacaaccactccaaacactctctccctcaaacgcaaccgcagccgcagccgcaaccttcggcttcctcttcctcttcctcctcctcttcctcctccaaatccaccaaaccccgaaaaagcaagaacaagaacaacactaatctctctttgggtggtagtcaaatgatggggatgtttccaccggaaccggcgtttctcttcccggtctccactgtcggagggtttgaaggtatcaccgtctcatcccaattagggtttctctccggtgatatgattgagcaacaaaaaccggctccaacgtgtaccggactcctgctgagtgagatcatgaacggtagtgtgagttatggaactcatcatcaacaacacttgagtgagaaagaagttgaagaaatgaggatgaagatgttgcaacagccacagactcagatttgttacgctaccactaatcatcaaatagcttcttacaacaacaacaacaacaacaataacatcatgcttcatattcctcccactacttctactgccaccactattactacttcgcattctctcgctactgtcccatcaacttcggaccagcttcaagttcaaggtaatgttaatatataa

SEQ ID NO: 28180 - protein, 321 aa, Arabidopsis thaliana
  misc_feature (1)..(321): Ceres Seq. ID no. 2706072
MASSNRHWPSMFKSKPHPHQWQHDINSPLLPSASHRSSPFSSGCEVERSPEPKPRWNPKPEQIRILEAIFNSGMVNPPREEIRRIRAQLQEYGQVGDANVFYWFQNRKSRSKHKLRLLHNHSKHSLPQTQPQPQPQPSASSSSSSSSSSSKSTKPRKSKNKNNTNLSLGGSQMMGMFPPEPAFLFPVSTVGGFEGITVSSQLGFLSGDMIEQQKPAPTCTGLLLSEIMNGSVSYGTHHQQHLSEKEVEEMRMKMLQQPQTQICYATTNHQIASYNNNNNNNNIMLHIPPTTSTATTITTSHSLATVPSTSDQLQVQGNVNI

SEQ ID NO: 28181 - protein, 311 aa, Arabidopsis thaliana
  misc_feature (1)..(311): Ceres Seq. ID no. 2706073
MFKSKPHPHQWQHDINSPLLPSASHRSSPFSSGCEVERSPEPKPRWNPKPEQIRILEAIFNSGMVNPPREEIRRIRAQLQEYGQVGDANVFYWFQNRKSRSKHKLRLLHNHSKHSLPQTQPQPQPQPSASSSSSSSSSSSKSTKPRKSKNKNNTNLSLGGSQMMGMFPPEPAFLFPVSTVGGFEGITVSSQLGFLSGDMIEQQKPAPTCTGLLLSEIMNGSVSYGTHHQQHLSEKEVEEMRMKMLQQPQTQICYATTNHQIASYNNNNNNNNIMLHIPPTTSTATTITTSHSLATVPSTSDQLQVQGNVNI

SEQ ID NO: 28182 - protein, 248 aa, Arabidopsis thaliana
  misc_feature (1)..(248): Ceres Seq. ID no. 2706074
MVNPPREEIRRIRAQLQEYGQVGDANVFYWFQNRKSRSKHKLRLLHNHSKHSLPQTQPQPQPQPSASSSSSSSSSSSKSTKPRKSKNKNNTNLSLGGSQMMGMFPPEPAFLFPVSTVGGFEGITVSSQLGFLSGDMIEQQKPAPTCTGLLLSEIMNGSVSYGTHHQQHLSEKEVEEMRMKMLQQPQTQICYATTNHQIASYNNNNNNNNIMLHIPPTTSTATTITTSHSLATVPSTSDQLQVQGNVNI

SEQ ID NO: 28183 - DNA, 1203 bp, Arabidopsis thaliana
  misc_feature (1)..(1203): Ceres Seq. ID no. 2706381
atgggattaaggatgtcagaatcagctaaaccttattttgcaatggtctgtcttcagttcggatacgcaggtatgaacttagtaactaaaaccgtcctagaccgcggtatgagccattacgttcttgttgcataccgcaacgcttttgccacagccgctatcgcacccttcgctcttctctccgaaaggaaagtgagatcaaagatgacgtttccaatattcatgcgaatatttcttcttgctcttctcgggccggtgattgatcagaacttatactatatcggtctaaaactcacatcaccaacgttttcctccgccgttagcaacatcgtgcctgcaattaccattatccttgccacacttttcaggatggagaaagtggagatgagaaaagtaagatgcctggtaaaagtgatggggacgttagtgacagtggttggatccatattgatgatattctacaaaggtcctttcattaatttcttccggtctcacctcacggccgcctcttcgccgccgacggctgactatcttaaggctgccgtcttcctactcctcgcttccctctcatgggcgtcgttctttgttcttcaggctgcgactttgaagaaatactcagcccatctctcaatgtcaacaatggtgtgtttcatgggaacgttacagtctttagccctagccttcgtaatggaacacaatccttctgctttgaacatcggttttgacatgaaccttctcgcttctgcctacgcgggaataatgtcgtcgagcatagcttactacgttcaaggacttatgatgcagcgaaaaggaccggtctttgtcactgcttttaaccctcttatcgttgtcattgtctccatcatgagcttcttcgttctcggtcaaggaatctaccttggagggtacgttaacaacaaccgggttattggagtggttgttttgatggtgggagtctacgccgtgttatggggcaaacatgtagatgatgacggcgaagaaacacgccatgaagataacgttgtagccgttaagtgttgtagtggcaataatggtctaacgataatgccgaaaatcgacgaagctgatgaggaggatgttgaaaccggaaaggctacgtcggagaaggagtcgtcagttccggaagtggtggtggtagttttttgtagtgaaaatgtgcatagcgtttcacgacctaactag

SEQ ID NO: 28184 - protein, 400 aa, Arabidopsis thaliana
  misc_feature (1)..(400): Ceres Seq. ID no. 2706382
MGLRMSESAKPYFAMVCLQFGYAGMNLVTKTVLDRGMSHYVLVAYRNAFATAAIAPFALLSERKVRSKMTFPIFMRIFLLALLGPVIDQNLYYIGLKLTSPTFSSAVSNIVPAITIILATLFRMEKVEMRKVRCLVKVMGTLVTVVGSILMIFYKGPFINFFRSHLTAASSPPTADYLKAAVFLLLASLSWASFFVLQAATLKKYSAHLSMSTMVCFMGTLQSLALAFVMEHNPSALNIGFDMNLLASAYAGIMSSSIAYYVQGLMMQRKGPVFVTAFNPLIVVIVSIMSFFVLGQGIYLGGYVNNNRVIGVVVLMVGVYAVLWGKHVDDDGEETRHEDNVVAVKCCSGNNGLTIMPKIDEADEEDVETGKATSEKESSVPEVVVVVFCSENVHSVSRPN

SEQ ID NO: 28185 - protein, 396 aa, Arabidopsis thaliana
  misc_feature (1)..(396): Ceres Seq. ID no. 2706383
MSESAKPYFAMVCLQFGYAGMNLVTKTVLDRGMSHYVLVAYRNAFATAAIAPFALLSERKVRSKMTFPIFMRIFLLALLGPVIDQNLYYIGLKLTSPTFSSAVSNIVPAITIILATLFRMEKVEMRKVRCLVKVMGTLVTVVGSILMIFYKGPFINFFRSHLTAASSPPTADYLKAAVFLLLASLSWASFFVLQAATLKKYSAHLSMSTMVCFMGTLQSLALAFVMEHNPSALNIGFDMNLLASAYAGIMSSSIAYYVQGLMMQRKGPVFVTAFNPLIVVIVSIMSFFVLGQGIYLGGYVNNNRVIGVVVLMVGVYAVLWGKHVDDDGEETRHEDNVVAVKCCSGNNGLTIMPKIDEADEEDVETGKATSEKESSVPEVVVVVFCSENVHSVSRPN

SEQ ID NO: 28186 - protein, 386 aa, Arabidopsis thaliana
  misc_feature (1)..(386): Ceres Seq. ID no. 2706384
MVCLQFGYAGMNLVTKTVLDRGMSHYVLVAYRNAFATAAIAPFALLSERKVRSKMTFPIFMRIFLLALLGPVIDQNLYYIGLKLTSPTFSSAVSNIVPAITIILATLFRMEKVEMRKVRCLVKVMGTLVTVVGSILMIFYKGPFINFFRSHLTAASSPPTADYLKAAVFLLLASLSWASFFVLQAATLKKYSAHLSMSTMVCFMGTLQSLALAFVMEHNPSALNIGFDMNLLASAYAGIMSSSIAYYVQGLMMQRKGPVFVTAFNPLIVVIVSIMSFFVLGQGIYLGGYVNNNRVIGVVVLMVGVYAVLWGKHVDDDGEETRHEDNVVAVKCCSGNNGLTIMPKIDEADEEDVETGKATSEKESSVPEVVVVVFCSENVHSVSRPN

SEQ ID NO: 28187 - DNA, 1359 bp, Arabidopsis thaliana
  misc_feature (1)..(1359): Ceres Seq. ID no. 2706438
atggcagagattcgccagagaagagtgttgatggtcccagcaccgttccaaggccatttaccttcgatgatgaatctagcgtcctacctttcttcccaaggcttttcaatcacaatcgttagaaacgaattcaatttcaaagatatctcccataatttccctggtataaaattcttcaccatcaaggacggcttgtcagaatctgacgtgaagtctctgggtctccttgaatttgtcctggagcttaactctgtctgtgaacccctattgaaagagtttctaaccaaccatgatgatgttgttgactttatcatttatgatgaatttgtttacttccctcgacgtgttgcggaagatatgaatctgccaaagatggtctttagcccttcttccgccgctacctcgatcagccggtgtgtgcttatggagaaccaatcaaatgggttacttcctccacaagacgcaagatctcaactagaagaaacggtgccagagtttcatccctttcgtttcaaagatctgccttttacagcttatggatctatggagagattaatgatactttacgagaatgtaagcaatagagcctcatcttctggcataatacacaactcttcggattgcttagagaactcattcataacaactgcacaagagaaatggggagttccggtatacccggttggtccactccatatgaccaattccgcaatgtcatgtccaagtttatttgaagaagaaagaaactgtcttgaatggcttgagaagcaagaaacaagctcagtgatctacataagcatggggagcttggcgatgacacaagatatagaggctgtggagatggccatgggatttgtccagagtaatcaacccttcttgtgggtgatccgaccaggctctataaacggacaagaatctttagacttcttaccggaacagttcaaccaaacggtgaccgatggaagaggttttgttgtgaaatgggccccacaaaaagaggtattaaggcatagagcagtgggagggttttggaaccatggtggatggaactcgtgcttggagagcataagcagtggtgtaccaatgatttgtaggccgtattctggtgatcagagggtgaatactcgacttatgtcacatgtttggcaaaccgcgtatgagatcgaaggtgaattggaaagaggagctgttgagatggccgtgaggaggctcattgtggatcaagaaggtcaggagatgagaatgagagccaccatattgaaggaagaggttgaagcctctgtcacaaccgaaggctcttctcacaattctttaaacaatttggtccatgcaataatgatgcaaattgacgaacaatga

SEQ ID NO: 28188 - protein, 452 aa, Arabidopsis thaliana
  misc_feature (1)..(452): Ceres Seq. ID no. 2706439
MAEIRQRRVLMVPAPFQGHLPSMMNLASYLSSQGFSITIVRNEFNFKDISHNFPGIKFFTIKDGLSESDVKSLGLLEFVLELNSVCEPLLKEFLTNHDDVVDFIIYDEFVYFPRRVAEDMNLPKMVFSPSSAATSISRCVLMENQSNGLLPPQDARSQLEETVPEFHPFRFKDLPFTAYGSMERLMILYENVSNRASSSGIIHNSSDCLENSFITTAQEKWGVPVYPVGPLHMTNSAMSCPSLFEEERNCLEWLEKQETSSVIYISMGSLAMTQDIEAVEMAMGFVQSNQPFLWVIRPGSINGQESLDFLPEQFNQTVTDGRGFVVKWAPQKEVLRHRAVGGFWNHGGWNSCLESISSGVPMICRPYSGDQRVNTRLMSHVWQTAYEIEGELERGAVEMAVRRLIVDQEGQEMRMRATILKEEVEASVTTEGSSHNSLNNLVHAIMMQIDEQ

SEQ ID NO: 28189 - protein, 442 aa, Arabidopsis thaliana
  misc_feature (1)..(442): Ceres Seq. ID no. 2706440
MVPAPFQGHLPSMMNLASYLSSQGFSITIVRNEFNFKDISHNFPGIKFFTIKDGLSESDVKSLGLLEFVLELNSVCEPLLKEFLTNHDDVVDFIIYDEFVYFPRRVAEDMNLPKMVFSPSSAATSISRCVLMENQSNGLLPPQDARSQLEETVPEFHPFRFKDLPFTAYGSMERLMILYENVSNRASSSGIIHNSSDCLENSFITTAQEKWGVPVYPVGPLHMTNSAMSCPSLFEEERNCLEWLEKQETSSVIYISMGSLAMTQDIEAVEMAMGFVQSNQPFLWVIRPGSINGQESLDFLPEQFNQTVTDGRGFVVKWAPQKEVLRHRAVGGFWNHGGWNSCLESISSGVPMICRPYSGDQRVNTRLMSHVWQTAYEIEGELERGAVEMAVRRLIVDQEGQEMRMRATILKEEVEASVTTEGSSHNSLNNLVHAIMMQIDEQ

SEQ ID NO: 28190 - protein, 430 aa, Arabidopsis thaliana
  misc_feature (1)..(430): Ceres Seq. ID no. 2706441
MMNLASYLSSQGFSITIVRNEFNFKDISHNFPGIKFFTIKDGLSESDVKSLGLLEFVLELNSVCEPLLKEFLTNHDDVVDFIIYDEFVYFPRRVAEDMNLPKMVFSPSSAATSISRCVLMENQSNGLLPPQDARSQLEETVPEFHPFRFKDLPFTAYGSMERLMILYENVSNRASSSGIIHNSSDCLENSFITTAQEKWGVPVYPVGPLHMTNSAMSCPSLFEEERNCLEWLEKQETSSVIYISMGSLAMTQDIEAVEMAMGFVQSNQPFLWVIRPGSINGQESLDFLPEQFNQTVTDGRGFVVKWAPQKEVLRHRAVGGFWNHGGWNSCLESISSGVPMICRPYSGDQRVNTRLMSHVWQTAYEIEGELERGAVEMAVRRLIVDQEGQEMRMRATILKEEVEASVTTEGSSHNSLNNLVHAIMMQIDEQ

SEQ ID NO: 28191 - DNA, 1521 bp, Arabidopsis thaliana
  misc_feature (1)..(1521): Ceres Seq. ID no. 2706628
atgttcatcctcagagttcattccgttgactccgagagaccaatctccgttgaagaagaagaatcaggtttcacttacgcatcgaaaagagctcagcctcctcttaaactcatacaaccatctctcaaactcaccgaccgcaaaggcttgatccatctctatcgcaaatcttcacatagctctctgcctaaccctagctcccgatccaccactctcttcatcgtcgctgttcccaattatctctcctctctcgattttatccgtttctgtgattcccgcatctcccaagtctccgacatcctcttcatcaggaacgatggaatggaagatagatatagtgttcttatcacattttctgatcaatccgaagctgatggtttctacaacaacttgaatgggaaaaagttcgcaccatctgaggctgaggtttgtcatattctatatgtaatgtcggtggaacacacagaatttgatgaggttgctgcagaagcacctactggatttaccgagttacctacgtgtccaatatgtcttgagagattagatcctgacaccagtggtatagttagcactctttgtgatcactcgtttcagtgttcttgcacttcgaaatggacttatctgtcttgtcaggtttgtcgattgtgtcaacagcaagatgagatattaaactgttctatttgtggaaaaactgagaatgtatgggcatgccttgtctgtggcttcgtaggttgtggaagatacaaggaagggcattctattaggcactggaaagaaacgcatcactgctattctcttgatttgcgaacacaacaaatctgggattatgttggtgacagctatgttcatcggttaaaccattcaaaaattgatggaaagtcagtagagatgagcaccagttgtctgtcacaccagggggactgtggcctctgtgagtgtagtgaggatacaggaattagcggagctatctttaacagcaaagttgattcaaatatgaatcttagatcatcagtttgcctcagtggttttatttttgtggaacagattgtaatcgagtataatgaccttcttgcaagtcaactaaagggacagcgacagtactatgaatctctcattgttgaggcgagaagcaagcaagaaagtagtattgccgaagcagtagagcaaattgttgttaacacaatgcaggagcttcagaataagattgaaaaatgtgaagaggaaaaaagtggtatcactgaagttaacacaaaacttataaaagagcaggatacttggcggaagaaggccaaagaaatagaagagagggaagctgcattgctaggatcaaaagacgagatgataactgatcttcaagaacagataagagatattacggtcttcattgaagccaagaaaaccttaaagaagatgtcatcagatacggatggtatacgcgaaggaaccgtcttaccagtgcctatcagtcccgagccagtttcctcagttagaaggcaaaagaagtcaaaccggagaaagtaa

SEQ ID NO: 28192 - protein, 506 aa, Arabidopsis thaliana
  misc_feature (1)..(506): Ceres Seq. ID no. 2706629
MFILRVHSVDSERPISVEEEESGFTYASKRAQPPLKLIQPSLKLTDRKGLIHLYRKSSHSSLPNPSSRSTTLFIVAVPNYLSSLDFIRFCDSRISQVSDILFIRNDGMEDRYSVLITFSDQSEADGFYNNLNGKKFAPSEAEVCHILYVMSVEHTEFDEVAAEAPTGFTELPTCPICLERLDPDTSGIVSTLCDHSFQCSCTSKWTYLSCQVCRLCQQQDEILNCSICGKTENVWACLVCGFVGCGRYKEGHSIRHWKETHHCYSLDLRTQQIWDYVGDSYVHRLNHSKIDGKSVEMSTSCLSHQGDCGLCECSEDTGISGAIFNSKVDSNMNLRSSVCLSGFIFVEQIVIEYNDLLASQLKGQRQYYESLIVEARSKQESSIAEAVEQIVVNTMQELQNKIEKCEEEKSGITEVNTKLIKEQDTWRKKAKEIEEREAALLGSKDEMITDLQEQIRDITVFIEAKKTLKKMSSDTDGIREGTVLPVPISPEPVSSVRRQKKSNRRK

SEQ ID NO: 28193 - protein, 399 aa, Arabidopsis thaliana
  misc_feature (1)..(399): Ceres Seq. ID no. 2706630
MEDRYSVLITFSDQSEADGFYNNLNGKKFAPSEAEVCHILYVMSVEHTEFDEVAAEAPTGFTELPTCPICLERLDPDTSGIVSTLCDHSFQCSCTSKWTYLSCQVCRLCQQQDEILNCSICGKTENVWACLVCGFVGCGRYKEGHSIRHWKETHHCYSLDLRTQQIWDYVGDSYVHRLNHSKIDGKSVEMSTSCLSHQGDCGLCECSEDTGISGAIFNSKVDSNMNLRSSVCLSGFIFVEQIVIEYNDLLASQLKGQRQYYESLIVEARSKQESSIAEAVEQIVVNTMQELQNKIEKCEEEKSGITEVNTKLIKEQDTWRKKAKEIEEREAALLGSKDEMITDLQEQIRDITVFIEAKKTLKKMSSDTDGIREGTVLPVPISPEPVSSVRRQKKSNRRK

SEQ ID NO: 28194 - protein, 357 aa, Arabidopsis thaliana
  misc_feature (1)..(357): Ceres Seq. ID no. 2706631
MSVEHTEFDEVAAEAPTGFTELPTCPICLERLDPDTSGIVSTLCDHSFQCSCTSKWTYLSCQVCRLCQQQDEILNCSICGKTENVWACLVCGFVGCGRYKEGHSIRHWKETHHCYSLDLRTQQIWDYVGDSYVHRLNHSKIDGKSVEMSTSCLSHQGDCGLCECSEDTGISGAIFNSKVDSNMNLRSSVCLSGFIFVEQIVIEYNDLLASQLKGQRQYYESLIVEARSKQESSIAEAVEQIVVNTMQELQNKIEKCEEEKSGITEVNTKLIKEQDTWRKKAKEIEEREAALLGSKDEMITDLQEQIRDITVFIEAKKTLKKMSSDTDGIREGTVLPVPISPEPVSSVRRQKKSNRRK

SEQ ID NO: 28195 - DNA, 1305 bp, Arabidopsis thaliana
  misc_feature (1)..(1305): Ceres Seq. ID no. 2706655
atggattcttcttcctcttcctcttcttcttctccttcttcttcctacggtgttgctcgtgtcagccatatctccaatccttgcatcttcggggaagttgggtcgtcatcttcgtcaacgtatagagataagaaatggaagttgatgaaatgggtgagtaaacttttcaagagtggctcgaatggtggtggtagtggtgctcacactaatcatcatcctcctcagtttcaagaagacgagaatatggtctttcctctacctccttcttctttggatgatcggtcaagaggtgcacgggacaaagaagaactcgaccgttcaatttcactttctctagctgacaacacgaagcgcccacatgggtatggttggtctatggataacaaccgagattttccaaggccttttcacggtggcttgaatccatcatctttcattccaccttatgagccttcctatcaatatagacgaagacaaagaatatgtggcggttgcaatagcgatattggatcggggaactatctaggatgcatgggcacattctttcatcctgaatgcttccgttgccattcttgtggttatgctatcactgagcatgagataccaactaatgatgctggcttgatcgagtatcgatgccatccgttttggaaccaaaagtattgcccgtctcacgaatatgataaaactgctcgttgttgtagctgcgaacgtttggagtcatgggatgtgagatattacacgttagaggatgggagaagtttgtgtttagaatgtatggaaaccgcgataaccgatactggagaatgtcaaccgctttaccacgctataagagactattacgaaggaatgtacatgaaacttgatcaacagattcctatgcttcttgttcaaagagaagctctcaatgatgctatcgtaggagagaaaaacgttcttagaagaccgagacttggtgctcaccgtcttgttgggtttaggaaccttaaccctgaggtagaggaaggaatctgccaagtcctctcttacatgtggcttgaatctgaagttctctcagatccttcaacaagaaacttgccttcaacatcatcggtggccacatcatcatcatcatccttctcgaacaagaaaggaggaaaatcaaacgtggagaagaaacttggagagttctttaaacatcagatagctcatgatgcgtctccagcttatggaggaggtttcagggcagcaaatgcagcggcttgtaagtacggtcttcgtcgaacactcgatcatatccgcttaactggaacttttcctttgtga

SEQ ID NO: 28196 - protein, 434 aa, Arabidopsis thaliana
  misc_feature (1)..(434): Ceres Seq. ID no. 2706656
MDSSSSSSSSSPSSSYGVARVSHISNPCIFGEVGSSSSSTYRDKKWKLMKWVSKLFKSGSNGGGSGAHTNHHPPQFQEDENMVFPLPPSSLDDRSRGARDKEELDRSISLSLADNTKRPHGYGWSMDNNRDFPRPFHGGLNPSSFIPPYEPSYQYRRRQRICGGCNSDIGSGNYLGCMGTFFHPECFRCHSCGYAITEHEIPTNDAGLIEYRCHPFWNQKYCPSHEYDKTARCCSCERLESWDVRYYTLEDGRSLCLECMETAITDTGECQPLYHAIRDYYEGMYMKLDQQIPMLLVQREALNDAIVGEKNVLRRPRLGAHRLVGFRNLNPEVEEGICQVLSYMWLESEVLSDPSTRNLPSTSSVATSSSSSFSNKKGGKSNVEKKLGEFFKHQIAHDASPAYGGGFRAANAAACKYGLRRTLDHIRLTGTFPL

SEQ ID NO: 28197 - protein, 386 aa, Arabidopsis thaliana
  misc_feature (1)..(386): Ceres Seq. ID no. 2706657
MKWVSKLFKSGSNGGGSGAHTNHHPPQFQEDENMVFPLPPSSLDDRSRGARDKEELDRSISLSLADNTKRPHGYGWSMDNNRDFPRPFHGGLNPSSFIPPYEPSYQYRRRQRICGGCNSDIGSGNYLGCMGTFFHPECFRCHSCGYAITEHEIPTNDAGLIEYRCHPFWNQKYCPSHEYDKTARCCSCERLESWDVRYYTLEDGRSLCLECMETAITDTGECQPLYHAIRDYYEGMYMKLDQQIPMLLVQREALNDAIVGEKNVLRRPRLGAHRLVGFRNLNPEVEEGICQVLSYMWLESEVLSDPSTRNLPSTSSVATSSSSSFSNKKGGKSNVEKKLGEFFKHQIAHDASPAYGGGFRAANAAACKYGLRRTLDHIRLTGTFPL

SEQ ID NO: 28198 - protein, 353 aa, Arabidopsis thaliana
  misc_feature (1)..(353): Ceres Seq. ID no. 2706658
MVFPLPPSSLDDRSRGARDKEELDRSISLSLADNTKRPHGYGWSMDNNRDFPRPFHGGLNPSSFIPPYEPSYQYRRRQRICGGCNSDIGSGNYLGCMGTFFHPECFRCHSCGYAITEHEIPTNDAGLIEYRCHPFWNQKYCPSHEYDKTARCCSCERLESWDVRYYTLEDGRSLCLECMETAITDTGECQPLYHAIRDYYEGMYMKLDQQIPMLLVQREALNDAIVGEKNVLRRPRLGAHRLVGFRNLNPEVEEGICQVLSYMWLESEVLSDPSTRNLPSTSSVATSSSSSFSNKKGGKSNVEKKLGEFFKHQIAHDASPAYGGGFRAANAAACKYGLRRTLDHIRLTGTFPL

SEQ ID NO: 28199 - DNA, 1566 bp, Arabidopsis thaliana
  misc_feature (1)..(1566): Ceres Seq. ID no. 2706693
atgtcagttctgtcatgggcttttaccgttgcgtggtttaccctctggatgttgatgctatacttgacgaacgagatgaagctaaagttcacagacgcagctgcgattgtaaatgtgtttgctggtgtatcagctattggtcatcttggcatgcaatttcttgttgatgcatttattggtcacttttggatgctctgtctctctactttagcattcagtttcggtttcgggttcttggcaatatcagcgtcaccaatactttcaggcaatggacaaaagggcctgttctacgtagcgctaacggttatatccgttggtatatttggacggtctatctctttgggagtatttacagaagaccaactagaagacggtaggaacaagggaaaccccgccaagctcgttagctttgtcattggaaatgtggggaattttgtgttcttgttacttgctgctattgcaatgcctcagataagtccgtggtttgttaggttcacgatcccctcgggctgtgaggtattagcaatgctgatttttatttccggtgcgtgttcatacaaacgggttaaaccaggtgggagccctttgacaacggttttccgggtctttatggcttctgcttccaaaatgtcttgtgcatactcgaacaactcaagccagctctatgaaaaagctgagtgtgatcaagatattaagccccacacaagcagcttaaggtatctagatagagctgcaatgatactccaaacagagtctttggaacaacagaggaaaaacagatggaagctttgtcgggtgacagaagtggagcaaacgaaaagcgtcatacgcacggttcctttgtttgcgacatctctcatttcggggattgtcttctctcttggtaatactttcttccttgaacaagcaaaccatatggactccaagttcggatcatggaaccttcctctcccactcctcttactctttagtgaagctgcaaggctaggatcccgagaactatgtgtcatggctgcaaaacgccatgccattgacttccctgaatcacctaaacaaaccaaaacgccttatggtataccagtctccatcatcctatcgatattttgctgctccatcgctgcacatgttgagtctaggaggctcaaagtagttagtactcaaggtttactacatgaaactgtccccatgagtgtattctggctgctcccacagtacattctactcggttcaatcacaggaatctacgaaaacagctttgcgctttacctagaagaaacggtgcctgaagagttgagccaatacatggttctattaaacgtgggagtgtgcggggtcgggatcatgagcaacattgctcttgttagtttggtgggcagtgtaagcggaggcaaatggtttcaagacacaataaacaagagccgggtggataactattattgggttataacagtgttttgcatgttcaatctcttgttatatttcattgtaacctataggtacacagtgtgtaacaagaaagatggtgcaacacaagaaaatgatcgaaggataatcgcttctgtgtag

SEQ ID NO: 28200 - protein, 521 aa, Arabidopsis thaliana
  misc_feature (1)..(521): Ceres Seq. ID no. 2706694
MSVLSWAFTVAWFTLWMLMLYLTNEMKLKFTDAAAIVNVFAGVSAIGHLGMQFLVDAFIGHFWMLCLSTLAFSFGFGFLAISASPILSGNGQKGLFYVALTVISVGIFGRSISLGVFTEDQLEDGRNKGNPAKLVSFVIGNVGNFVFLLLAAIAMPQISPWFVRFTIPSGCEVLAMLIFISGACSYKRVKPGGSPLTTVFRVFMASASKMSCAYSNNSSQLYEKAECDQDIKPHTSSLRYLDRAAMILQTESLEQQRKNRWKLCRVTEVEQTKSVIRTVPLFATSLISGIVFSLGNTFFLEQANHMDSKFGSWNLPLPLLLLFSEAARLGSRELCVMAAKRHAIDFPESPKQTKTPYGIPVSIILSIFCCSIAAHVESRRLKVVSTQGLLHETVPMSVFWLLPQYILLGSITGIYENSFALYLEETVPEELSQYMVLLNVGVCGVGIMSNIALVSLVGSVSGGKWFQDTINKSRVDNYYWVITVFCMFNLLLYFIVTYRYTVCNKKDGATQENDRRIIASV

SEQ ID NO: 28201 - protein, 505 aa, Arabidopsis thaliana
  misc_feature (1)..(505): Ceres Seq. ID no. 2706695
MLMLYLTNEMKLKFTDAAAIVNVFAGVSAIGHLGMQFLVDAFIGHFWMLCLSTLAFSFGFGFLAISASPILSGNGQKGLFYVALTVISVGIFGRSISLGVFTEDQLEDGRNKGNPAKLVSFVIGNVGNFVFLLLAAIAMPQISPWFVRFTIPSGCEVLAMLIFISGACSYKRVKPGGSPLTTVFRVFMASASKMSCAYSNNSSQLYEKAECDQDIKPHTSSLRYLDRAAMILQTESLEQQRKNRWKLCRVTEVEQTKSVIRTVPLFATSLISGIVFSLGNTFFLEQANHMDSKFGSWNLPLPLLLLFSEAARLGSRELCVMAAKRHAIDFPESPKQTKTPYGIPVSIILSIFCCSIAAHVESRRLKVVSTQGLLHETVPMSVFWLLPQYILLGSITGIYENSFALYLEETVPEELSQYMVLLNVGVCGVGIMSNIALVSLVGSVSGGKWFQDTINKSRVDNYYWVITVFCMFNLLLYFIVTYRYTVCNKKDGATQENDRRIIASV

SEQ ID NO: 28202 - protein, 503 aa, Arabidopsis thaliana
  misc_feature (1)..(503): Ceres Seq. ID no. 2706696
MLYLTNEMKLKFTDAAAIVNVFAGVSAIGHLGMQFLVDAFIGHFWMLCLSTLAFSFGFGFLAISASPILSGNGQKGLFYVALTVISVGIFGRSISLGVFTEDQLEDGRNKGNPAKLVSFVIGNVGNFVFLLLAAIAMPQISPWFVRFTIPSGCEVLAMLIFISGACSYKRVKPGGSPLTTVFRVFMASASKMSCAYSNNSSQLYEKAECDQDIKPHTSSLRYLDRAAMILQTESLEQQRKNRWKLCRVTEVEQTKSVIRTVPLFATSLISGIVFSLGNTFFLEQANHMDSKFGSWNLPLPLLLLFSEAARLGSRELCVMAAKRHAIDFPESPKQTKTPYGIPVSIILSIFCCSIAAHVESRRLKVVSTQGLLHETVPMSVFWLLPQYILLGSITGIYENSFALYLEETVPEELSQYMVLLNVGVCGVGIMSNIALVSLVGSVSGGKWFQDTINKSRVDNYYWVITVFCMFNLLLYFIVTYRYTVCNKKDGATQENDRRIIASV

SEQ ID NO: 28203 - DNA, 657 bp, Arabidopsis thaliana
  misc_feature (1)..(657): Ceres Seq. ID no. 2706745
atgagcatgaaccagtttaggactatggaggaggagaagcaagacggtggtgagcttttccataccatcgaggtagctaaagttgaccggaacaacgtgtctcagccgccgccggctgctactgcagcactgctagaagttcccggtgatgaacttaacctaattccaccgttgaacttttcgatggtcgataatggtatattccggtctggattcccggactcggcgaacttctccttcatcaagactcttggccttcgctcaatcatatctttgtgtccagagccatatcctgagaacaacatgcagttcctcaaatccaatggaattagtctttttcagtttggcattgaaggctctaagtccaaggagccatttgtagatatcctagatcagaaaatccgtgaagcactcaaagtccttctcgatgagaagaaccatccacttttgattcattgcaaacgaggcaagcacagaaccgggtgtcttgttgggtgcatgaggaaactccagaaatggtgcataacatcgatactcgatgagtataagcgatttgcagcggctaaagctagagtttcggatcaaaggttcttggagtcattcgatgtatcaggcttgaagcacactccaatgtctttttcttgctccaataggtaa

SEQ ID NO: 28204 - protein, 218 aa, Arabidopsis thaliana
  misc_feature (1)..(218): Ceres Seq. ID no. 2706746
MSMNQFRTMEEEKQDGGELFHTIEVAKVDRNNVSQPPPAATAALLEVPGDELNLIPPLNFSMVDNGIFRSGFPDSANFSFIKTLGLRSIISLCPEPYPENNMQFLKSNGISLFQFGIEGSKSKEPFVDILDQKIREALKVLLDEKNHPLLIHCKRGKHRTGCLVGCMRKLQKWCITSILDEYKRFAAAKARVSDQRFLESFDVSGLKHTPMSFSCSNR

SEQ ID NO: 28205 - protein, 216 aa, Arabidopsis thaliana
  misc_feature (1)..(216): Ceres Seq. ID no. 2706747
MNQFRTMEEEKQDGGELFHTIEVAKVDRNNVSQPPPAATAALLEVPGDELNLIPPLNFSMVDNGIFRSGFPDSANFSFIKTLGLRSIISLCPEPYPENNMQFLKSNGISLFQFGIEGSKSKEPFVDILDQKIREALKVLLDEKNHPLLIHCKRGKHRTGCLVGCMRKLQKWCITSILDEYKRFAAAKARVSDQRFLESFDVSGLKHTPMSFSCSNR

SEQ ID NO: 28206 - protein, 210 aa, Arabidopsis thaliana
  misc_feature (1)..(210): Ceres Seq. ID no. 2706748
MEEEKQDGGELFHTIEVAKVDRNNVSQPPPAATAALLEVPGDELNLIPPLNFSMVDNGIFRSGFPDSANFSFIKTLGLRSIISLCPEPYPENNMQFLKSNGISLFQFGIEGSKSKEPFVDILDQKIREALKVLLDEKNHPLLIHCKRGKHRTGCLVGCMRKLQKWCITSILDEYKRFAAAKARVSDQRFLESFDVSGLKHTPMSFSCSNR

SEQ ID NO: 28207 - DNA, 792 bp, Arabidopsis thaliana
  misc_feature (1)..(792): Ceres Seq. ID no. 2706787
atggagaagaacaacaagaagcggtttgtcctcgtccatgggctgtgccacggcgcttggtgttggtacaaggtgaaaacgcatctggaggctgtaggtcactgtgtgaccgcggtggatctagctgcatccggtataaatatgactagattggaagagattcagactttgaaggattactgcaaacctttgcttgagttactgaactcacttggctcggatgacgataaggtgattcttgttgcgcatagtatgggaggaatacctgctgctctcgcttctgacatattccctagtaagattgctactattgttttcttgacagcttttatgcccgacacaagaaacctacctgcttatgtttaccaaaagctaatcagaagcgttccacaagaaggatggttggacaccgtgtttggaacgtatgggaaacatgaatgtcctctagagtttgctctttttggaccaaagttcatggccaagaatttgtatcaactctctccggtccaagatcttgaattggcgaaaatgttggtgagagtaaaccccatcattacaaataatctggcagggacaagaagctttagtgaggaagggtacggtaccgttacacgtatatatattgtatgtggagaggacatggcggtacccgaggattaccagtggtggatgatcaagaactttccgccaaaagaagtaatggagatcaaatgtgcagatcatatggcaatgttctccaagcctcacaaactatgtgctcttctcgtggagattgcatgtaaatatgcctaa

SEQ ID NO: 28208 - protein, 263 aa, Arabidopsis thaliana
  misc_feature (1)..(263): Ceres Seq. ID no. 2706788
MEKNNKKRFVLVHGLCHGAWCWYKVKTHLEAVGHCVTAVDLAASGINMTRLEEIQTLKDYCKPLLELLNSLGSDDDKVILVAHSMGGIPAALASDIFPSKIATIVFLTAFMPDTRNLPAYVYQKLIRSVPQEGWLDTVFGTYGKHECPLEFALFGPKFMAKNLYQLSPVQDLELAKMLVRVNPIITNNLAGTRSFSEEGYGTVTRIYIVCGEDMAVPEDYQWWMIKNFPPKEVMEIKCADHMAMFSKPHKLCALLVEIACKYA

SEQ ID NO: 28209 - protein, 216 aa, Arabidopsis thaliana
  misc_feature (1)..(216): Ceres Seq. ID no. 2706789
MTRLEEIQTLKDYCKPLLELLNSLGSDDDKVILVAHSMGGIPAALASDIFPSKIATIVFLTAFMPDTRNLPAYVYQKLIRSVPQEGWLDTVFGTYGKHECPLEFALFGPKFMAKNLYQLSPVQDLELAKMLVRVNPIITNNLAGTRSFSEEGYGTVTRIYIVCGEDMAVPEDYQWWMIKNFPPKEVMEIKCADHMAMFSKPHKLCALLVEIACKYA

SEQ ID NO: 28210 - protein, 179 aa, Arabidopsis thaliana
  misc_feature (1)..(179): Ceres Seq. ID no. 2706790
MGGIPAALASDIFPSKIATIVFLTAFMPDTRNLPAYVYQKLIRSVPQEGWLDTVFGTYGKHECPLEFALFGPKFMAKNLYQLSPVQDLELAKMLVRVNPIITNNLAGTRSFSEEGYGTVTRIYIVCGEDMAVPEDYQWWMIKNFPPKEVMEIKCADHMAMFSKPHKLCALLVEIACKYA

SEQ ID NO: 28211 - DNA, 783 bp, Arabidopsis thaliana
  misc_feature (1)..(783): Ceres Seq. ID no. 2706791
atggataagaataaccagaagaagtttgtgcttgtacatggaatctgccatggagcttggtgttggtacaaggtgaaagcccagctggaggctgctggtcattctgtgaccgcagttgatctagctgcatctggtgtaaacatgactagcctggatgagattcagactttgaaggattactgcaaaccgctgctcgagtttctgagctcacttggctcggatgacgataaggtgattcttgttgctcatagcatgggaggaatatcagcttcacttgctgctgatatcttccctagtaaagttgctgctattgtctttgtggcagcttttatgcccgacataagcaacccgcctgcttacgttttccaaaagctggtcaaagacgttacacaagaggtatggatggatactgtgtttgggaaacctgatcgtcctctagagtttgctctttttggaccagagttcatggccaagtatttgtataacctatctcccctccaagattttgaattggcgaaaatgtcggtgagggtaagcccgttcatgacaaacaacctggcagggacaataagcttcagtgaggacaggtacggatccgttacacgtatatatatcgtatgcggagaggacgttgcggtacctgtggattaccagcgtgggatgatcaatgacttcccggtgaaggaagtactggagatcaaagatgcagatcatatgccaatgttctctaagcctcaagaactctgtgctcttctcttggagattgcagataaatacgcctaa

SEQ ID NO: 28212 - protein, 260 aa, Arabidopsis thaliana
  misc_feature (1)..(260): Ceres Seq. ID no. 2706792
MDKNNQKKFVLVHGICHGAWCWYKVKAQLEAAGHSVTAVDLAASGVNMTSLDEIQTLKDYCKPLLEFLSSLGSDDDKVILVAHSMGGISASLAADIFPSKVAAIVFVAAFMPDISNPPAYVFQKLVKDVTQEVWMDTVFGKPDRPLEFALFGPEFMAKYLYNLSPLQDFELAKMSVRVSPFMTNNLAGTISFSEDRYGSVTRIYIVCGEDVAVPVDYQRGMINDFPVKEVLEIKDADHMPMFSKPQELCALLLEIADKYA

SEQ ID NO: 28213 - protein, 213 aa, Arabidopsis thaliana
  misc_feature (1)..(213): Ceres Seq. ID no. 2706793
MTSLDEIQTLKDYCKPLLEFLSSLGSDDDKVILVAHSMGGISASLAADIFPSKVAAIVFVAAFMPDISNPPAYVFQKLVKDVTQEVWMDTVFGKPDRPLEFALFGPEFMAKYLYNLSPLQDFELAKMSVRVSPFMTNNLAGTISFSEDRYGSVTRIYIVCGEDVAVPVDYQRGMINDFPVKEVLEIKDADHMPMFSKPQELCALLLEIADKYA

SEQ ID NO: 28214 - protein, 176 aa, Arabidopsis thaliana
  misc_feature (1)..(176): Ceres Seq. ID no. 2706794
MGGISASLAADIFPSKVAAIVFVAAFMPDISNPPAYVFQKLVKDVTQEVWMDTVFGKPDRPLEFALFGPEFMAKYLYNLSPLQDFELAKMSVRVSPFMTNNLAGTISFSEDRYGSVTRIYIVCGEDVAVPVDYQRGMINDFPVKEVLEIKDADHMPMFSKPQELCALLLEIADKYA

SEQ ID NO: 28215 - DNA, 1668 bp, Arabidopsis thaliana
  misc_feature (1)..(1668): Ceres Seq. ID no. 2706830
atgagaactgaagcacaagattcagtacctaaatcaaaccctaatccggaactaatcaaagaaaccccaaaggtctctctttacgaacaatgcagggaagagaggatcaaagagaatcttcagaggatgaacaatctgggtctcttaaatctctctcgcaaactcaaacccaagacccgacccgttaaaagatcttacggtaaccgtaattctgttcagaatccgactcctcctcttcagccttctcgccgatcttctcgattggagaacacaactccagttatctacactgatgggatcaatgagaagggcaagaaagcatctaaacgagagagtgttgtgattggtgaagggataagagctgagatttacacagaggaacatgagaagcttcttgggaatacagaaagaagctggacttgttttgttgatggctatgataagaatgggaaacggatttatgatccgtttaacggtaagacttgtcaccaatgcaggcagaagacgatggggcatcgtacacagtgcagtgaatgcaatttggttcaaggacagttctgtgatatggtgaacatgtgcttgaagctcttgagaatccagactggatttgtcccgcttgtcgcgggatctgcaattgcagtttgtgccggaataataaaggatgggttccaactggcccgatttacagaaggagctgaagatttctttctttctttggattgtttccagatagctgcacttgggtataagtctgtggcacattatctgattcaaaccaaacgggcgccaactgatgacacaacaccaagtcaagcgtctgcaaagagatcactttcctttcaagaaaagattgctggtgatgaagacgtaccaatgcttgagaatgatgattccttacagaaagaagaaggtgaaaacacgaacgaagatcagaatggtgatctccctgaagaagtacaaaaggttcagaatatggaatgtcagagtggtggttccttgaagaaagaggaggatgagacaccaaattcagctagaaggtcactgagcttcttattgccttctgtagaggatgatcaaacttcattggtggatgttcaggtcttaagttgtcttgtgccaccaaagcaagaacattcatgtgcacacaatggtgatgatcttccagatattcaggaaaggataggacaacactcaaatttggagacgaaaccagatagctacttgcttcatgtggatgagcagattccattggttgatgttcaggtcttgagttatcttgagacgccgaagcaagaacattcatgtgcccacattggtgatggtcttccaaaaattcaagaatggataggacaagacccgacttctgagacaaaaccagttagctacttgattcctatagatgatgatcaaacttcattggtggatgcgcaggtcatgtatcttgagacaccaaagcaagataaacaagaacattcatgtgcccacatcggtgatgatcttccagaaattcaacaagggacaggacaagactcgaatttggagacaagacttggggaaagtcagacccttgtggtcaaagctcgagtaacgagaagtaagaggaaagcggctctagaaccaaatccagatagcattggtggaagactaaggcagcgaagaaggacctaa

SEQ ID NO: 28216 - protein, 555 aa, Arabidopsis thaliana
  misc_feature (1)..(555): Ceres Seq. ID no. 2706831
MRTEAQDSVPKSNPNPELIKETPKVSLYEQCREERIKENLQRMNNLGLLNLSRKLKPKTRPVKRSYGNRNSVQNPTPPLQPSRRSSRLENTTPVIYTDGINEKGKKASKRESVVIGEGIRAEIYTEEHEKLLGNTERSWTCFVDGYDKNGKRIYDPFNGKTCHQCRQKTMGHRTQCSECNLVQGQFCDMVNMCLKLLRIQTGFVPLVAGSAIAVCAGIIKDGFQLARFTEGAEDFFLSLDCFQIAALGYKSVAHYLIQTKRAPTDDTTPSQASAKRSLSFQEKIAGDEDVPMLENDDSLQKEEGENTNEDQNGDLPEEVQKVQNMECQSGGSLKKEEDETPNSARRSLSFLLPSVEDDQTSLVDVQVLSCLVPPKQEHSCAHNGDDLPDIQERIGQHSNLETKPDSYLLHVDEQIPLVDVQVLSYLETPKQEHSCAHIGDGLPKIQEWIGQDPTSETKPVSYLIPIDDDQTSLVDAQVMYLETPKQDKQEHSCAHIGDDLPEIQQGTGQDSNLETRLGESQTLVVKARVTRSKRKAALEPNPDSIGGRLRQRRRT

SEQ ID NO: 28217 - protein, 513 aa, Arabidopsis thaliana
  misc_feature (1)..(513): Ceres Seq. ID no. 2706832
MNNLGLLNLSRKLKPKTRPVKRSYGNRNSVQNPTPPLQPSRRSSRLENTTPVIYTDGINEKGKKASKRESVVIGEGIRAEIYTEEHEKLLGNTERSWTCFVDGYDKNGKRIYDPFNGKTCHQCRQKTMGHRTQCSECNLVQGQFCDMVNMCLKLLRIQTGFVPLVAGSAIAVCAGIIKDGFQLARFTEGAEDFFLSLDCFQIAALGYKSVAHYLIQTKRAPTDDTTPSQASAKRSLSFQEKIAGDEDVPMLENDDSLQKEEGENTNEDQNGDLPEEVQKVQNMECQSGGSLKKEEDETPNSARRSLSFLLPSVEDDQTSLVDVQVLSCLVPPKQEHSCAHNGDDLPDIQERIGQHSNLETKPDSYLLHVDEQIPLVDVQVLSYLETPKQEHSCAHIGDGLPKIQEWIGQDPTSETKPVSYLIPIDDDQTSLVDAQVMYLETPKQDKQEHSCAHIGDDLPEIQQGTGQDSNLETRLGESQTLVVKARVTRSKRKAALEPNPDSIGGRLRQRRRT

SEQ ID NO: 28218 - protein, 386 aa, Arabidopsis thaliana
  misc_feature (1)..(386): Ceres Seq. ID no. 2706833
MGHRTQCSECNLVQGQFCDMVNMCLKLLRIQTGFVPLVAGSAIAVCAGIIKDGFQLARFTEGAEDFFLSLDCFQIAALGYKSVAHYLIQTKRAPTDDTTPSQASAKRSLSFQEKIAGDEDVPMLENDDSLQKEEGENTNEDQNGDLPEEVQKVQNMECQSGGSLKKEEDETPNSARRSLSFLLPSVEDDQTSLVDVQVLSCLVPPKQEHSCAHNGDDLPDIQERIGQHSNLETKPDSYLLHVDEQIPLVDVQVLSYLETPKQEHSCAHIGDGLPKIQEWIGQDPTSETKPVSYLIPIDDDQTSLVDAQVMYLETPKQDKQEHSCAHIGDDLPEIQQGTGQDSNLETRLGESQTLVVKARVTRSKRKAALEPNPDSIGGRLRQRRRT

SEQ ID NO: 28219 - DNA, 2406 bp, Arabidopsis thaliana
  misc_feature (1)..(2406): Ceres Seq. ID no. 2706877
atggtggtgatgctgacgcaagaaatgagtggcggtggtggtccaaaggcggaagagggtcagctgtttgtggcggtggccgtgaagggtttgatcggagacaaattaggcggtgcaggaagtcgtcgtgccgtacggtgggctgtcgataatcttttaccgaaggctgataaatttgtgatgatccacgtcatccctaccattacttctattcctactccgaatattttgatattaatgtttacgagaatgtgggttgttacagccggagatagattgccggtggaagaagtggaggagagtgtggtggaaatgtatgtaagagacgtgaaaaaagaatatgaaacagtctttgttccctttttgaaaatgtgcaagagtactaggagtaccaagcgatattttcggtctaggagaacaaaaggtacaggagtaccactgaccgttttaagatacgcaccagaaacatgtgaagtatacattgtgtgtaaagacagaatcactacaaaatctatggatccattaatcaaccgagagccgtgcacaagtccacacgcagccgcgactgcccatgacttcttgagagactgggcggctagtttccacactctacggtctccaacgttacccgatcctcgacagtcaactgaggcaggaacaaggaggtcagcatcggcaagagagctgagatttgaggcattaagccttacttgtaataaacccaaaacgcctcaaagtagtaaggcttctagtgcaacaactccagagatttttaggcgacggagaggatccgatattcctcagctgaattactcagattttgataaaacatgtaccaagccccaatcaaatgttgagaacatcgttagcgaacaccgagactctgatcgttcacccccggaaacatcaagaaaatccaagaaggttgagattgaagaagaggtcgaacgtttgaagaatgagctacaaagtacagtctttaaatataaacaagcttgtgaagagctcttctccacacaaaacaaggttaaaatgctttcgactgaatatttgaatgaatctaaaagagtgaacaatgctgtggagaaagaagagttgcagaggaacaccgcggcgctggagaaagagcggtacatgaaggcggtgaaagaggtcgaaaccgcgaaagcgttgctcgcaagagagttttgtcagcgacagatcgcggaggtgaatgctttaaggacttacttggagaagaagaaagtgatcgatcagcttttagggactgatcaccggtacagaaaatacacaattgaggaaattgtaacagccacagaaggattctcgccagagaaagtgattggagaaggaggatacgggaaagtttaccaatgtagccttgatagtactccggcggctgttaaagttgtccggctagatacaccggagaagaaacaagagttcttgaaagaggttgaggttctaagccaactccgacacccacacgtggttctcctcctcggagcttgtccggagaatggttgtttggtttacgagtacttggaaaatggaagcctcgaggaatatatatttcaccgaaaaaataaaccgcctttgccttggtttatccggtttagggtaattttcgaggtagcttgcggtttggccttcttacacagctctaaaccggaaccaattgttcaccgtgacttaaaaccgggaaatatcttgttaaaccggaactacgttagcaaaatcgctgacgttggcctagccaagctggttacggatgttgcacccgataatgtcacgatgtaccgaaactcggttcttgccggtacattgcattatattgatccagaataccacagaaccggaacaattagaccaaagtcggatctatatgcgttcggcataatcattcttcagttgttgacggctcgtaacccgagcgggattgtaccagcggtcgaaaacgcggtaaagaaagggacgttaaccgaaatgctagataaatcggttaccgattggcctttggcagaaaccgaggaattggctcggatcggtttaaaatgtgctgaatttcgatgccgagatagaccggatcttaaatcagaggttataccggttttgaaacggcttgtggagacggcgaattcgaaagtaaagaaagaaggaagcaatttacgtgcaccgagtcattacttctgtccaatcttacgggagataatggaggagccagagattgctgccgatggattcacgtacgagaggaaagcgatcttagcgtggcttgagaaacataacatttcaccggtgactcgacaaaagctagaccacttcaagctcacaccgaaccatacgctccggtctgcgattcgcgattggaaatcaagagtccggttttctaatgtcgttgtttaa

SEQ ID NO: 28220 - protein, 801 aa, Arabidopsis thaliana
  misc_feature (1)..(801): Ceres Seq. ID no. 2706878
MVVMLTQEMSGGGGPKAEEGQLFVAVAVKGLIGDKLGGAGSRRAVRWAVDNLLPKADKFVMIHVIPTITSIPTPNILILMFTRMWVVTAGDRLPVEEVEESVVEMYVRDVKKEYETVFVPFLKMCKSTRSTKRYFRSRRTKGTGVPLTVLRYAPETCEVYIVCKDRITTKSMDPLINREPCTSPHAAATAHDFLRDWAASFHTLRSPTLPDPRQSTEAGTRRSASARELRFEALSLTCNKPKTPQSSKASSATTPEIFRRRRGSDIPQLNYSDFDKTCTKPQSNVENIVSEHRDSDRSPPETSRKSKKVEIEEEVERLKNELQSTVFKYKQACEELFSTQNKVKMLSTEYLNESKRVNNAVEKEELQRNTAALEKERYMKAVKEVETAKALLAREFCQRQIAEVNALRTYLEKKKVIDQLLGTDHRYRKYTIEEIVTATEGFSPEKVIGEGGYGKVYQCSLDSTPAAVKVVRLDTPEKKQEFLKEVEVLSQLRHPHVVLLLGACPENGCLVYEYLENGSLEEYIFHRKNKPPLPWFIRFRVIFEVACGLAFLHSSKPEPIVHRDLKPGNILLNRNYVSKIADVGLAKLVTDVAPDNVTMYRNSVLAGTLHYIDPEYHRTGTIRPKSDLYAFGIIILQLLTARNPSGIVPAVENAVKKGTLTEMLDKSVTDWPLAETEELARIGLKCAEFRCRDRPDLKSEVIPVLKRLVETANSKVKKEGSNLRAPSHYFCPILREIMEEPEIAADGFTYERKAILAWLEKHNISPVTRQKLDHFKLTPNHTLRSAIRDWKSRVRFSNVVV

SEQ ID NO: 28221 - protein, 798 aa, Arabidopsis thaliana
  misc_feature (1)..(798): Ceres Seq. ID no. 2706879
MLTQEMSGGGGPKAEEGQLFVAVAVKGLIGDKLGGAGSRRAVRWAVDNLLPKADKFVMIHVIPTITSIPTPNILILMFTRMWVVTAGDRLPVEEVEESVVEMYVRDVKKEYETVFVPFLKMCKSTRSTKRYFRSRRTKGTGVPLTVLRYAPETCEVYIVCKDRITTKSMDPLINREPCTSPHAAATAHDFLRDWAASFHTLRSPTLPDPRQSTEAGTRRSASARELRFEALSLTCNKPKTPQSSKASSATTPEIFRRRRGSDIPQLNYSDFDKTCTKPQSNVENIVSEHRDSDRSPPETSRKSKKVEIEEEVERLKNELQSTVFKYKQACEELFSTQNKVKMLSTEYLNESKRVNNAVEKEELQRNTAALEKERYMKAVKEVETAKALLAREFCQRQIAEVNALRTYLEKKKVIDQLLGTDHRYRKYTIEEIVTATEGFSPEKVIGEGGYGKVYQCSLDSTPAAVKVVRLDTPEKKQEFLKEVEVLSQLRHPHVVLLLGACPENGCLVYEYLENGSLEEYIFHRKNKPPLPWFIRFRVIFEVACGLAFLHSSKPEPIVHRDLKPGNILLNRNYVSKIADVGLAKLVTDVAPDNVTMYRNSVLAGTLHYIDPEYHRTGTIRPKSDLYAFGIIILQLLTARNPSGIVPAVENAVKKGTLTEMLDKSVTDWPLAETEELARIGLKCAEFRCRDRPDLKSEVIPVLKRLVETANSKVKKEGSNLRAPSHYFCPILREIMEEPEIAADGFTYERKAILAWLEKHNISPVTRQKLDHFKLTPNHTLRSAIRDWKSRVRFSNVVV

SEQ ID NO: 28222 - protein, 793 aa, Arabidopsis thaliana
  misc_feature (1)..(793): Ceres Seq. ID no. 2706880
MSGGGGPKAEEGQLFVAVAVKGLIGDKLGGAGSRRAVRWAVDNLLPKADKFVMIHVIPTITSIPTPNILILMFTRMWVVTAGDRLPVEEVEESVVEMYVRDVKKEYETVFVPFLKMCKSTRSTKRYFRSRRTKGTGVPLTVLRYAPETCEVYIVCKDRITTKSMDPLINREPCTSPHAAATAHDFLRDWAASFHTLRSPTLPDPRQSTEAGTRRSASARELRFEALSLTCNKPKTPQSSKASSATTPEIFRRRRGSDIPQLNYSDFDKTCTKPQSNVENIVSEHRDSDRSPPETSRKSKKVEIEEEVERLKNELQSTVFKYKQACEELFSTQNKVKMLSTEYLNESKRVNNAVEKEELQRNTAALEKERYMKAVKEVETAKALLAREFCQRQIAEVNALRTYLEKKKVIDQLLGTDHRYRKYTIEEIVTATEGFSPEKVIGEGGYGKVYQCSLDSTPAAVKVVRLDTPEKKQEFLKEVEVLSQLRHPHVVLLLGACPENGCLVYEYLENGSLEEYIFHRKNKPPLPWFIRFRVIFEVACGLAFLHSSKPEPIVHRDLKPGNILLNRNYVSKIADVGLAKLVTDVAPDNVTMYRNSVLAGTLHYIDPEYHRTGTIRPKSDLYAFGIIILQLLTARNPSGIVPAVENAVKKGTLTEMLDKSVTDWPLAETEELARIGLKCAEFRCRDRPDLKSEVIPVLKRLVETANSKVKKEGSNLRAPSHYFCPILREIMEEPEIAADGFTYERKAILAWLEKHNISPVTRQKLDHFKLTPNHTLRSAIRDWKSRVRFSNVVV

SEQ ID NO: 28223 - DNA, 1284 bp, Arabidopsis thaliana
  misc_feature (1)..(1284): Ceres Seq. ID no. 2708135
atgatgcttaatcagacagtgatcttcttccttctttgggtgatcatagcacttgtagtcgaaattactttggccggaaagatcacagtttctgatatccatgagcagaaaatcgaacaacggttgaaccaactcaacaaacccgccgttaaatctatccatgtattcgcaacgacttttaattacccgtggtttgctattcccactattttcttgagtccagatggagatataatcgattgtgtatggatctatcaccaaccagcttttgatcatcctttactcaaaaaccacaccattcagatgaggccgaaaagtgactcgacaagggacaaaactggaggtaacaagacagacattatccatcaattgtggcgcacgaaaggtgaatgtcctaagaacactattcccatcagaagaagaacaagagatgatcttctaagatcagattccatcaaaactcatggaagaaagaacccaccaaccatttctccaactacttatcacctccccgatgatcagacagaagttcatgagcatgcgagtgtgtacctggactatggtgaataccatggcagcaagagccgtataagtatatggagaccagacgttaatatgaccgagtttagtttggctcaaacatgggtcgtcggtggagattgggacactgttttgaacactgtggagtctggttggcagatcctacattctatgtacggtgacaataatacaagacttttcgccttttggacgagcgattcatatggagacaacagctgctacaatcttgactgtccaggctttgttcaagtgaataaagatattgcccttggtgcagccctcaacactatctcgacctacaatggtaaccaatatgatttccttctaactattgagaaggaacaagataccggactttggtggcttaagtttgatactcatctagtcggatactggccaagctttctagtcccgaagctagcagactcagcacggatgatcgcttggggaggtgaaattgtgtatgatgctagtggccaaaatgaacatacgcttacgcaaatggggagtggccatttcgcggaagaagggtttaagaaggcggcttatatcaataacatagagtacatcgataaatctaatcatccgatcaaaccctttcctcaaaatcttgaagcttctgttactcggcctgaatgctataacctcaaggttggctctagccgaagatggggaacttacattttctatggtggacctggacgtaaccctcaatgcctatga

SEQ ID NO: 28224 - protein, 427 aa, Arabidopsis thaliana
  misc_feature (1)..(427): Ceres Seq. ID no. 2708136
MMLNQTVIFFLLWVIIALVVEITLAGKITVSDIHEQKIEQRLNQLNKPAVKSIHVFATTFNYPWFAIPTIFLSPDGDIIDCVWIYHQPAFDHPLLKNHTIQMRPKSDSTRDKTGGNKTDIIHQLWRTKGECPKNTIPIRRRTRDDLLRSDSIKTHGRKNPPTISPTTYHLPDDQTEVHEHASVYLDYGEYHGSKSRISIWRPDVNMTEFSLAQTWVVGGDWDTVLNTVESGWQILHSMYGDNNTRLFAFWTSDSYGDNSCYNLDCPGFVQVNKDIALGAALNTISTYNGNQYDFLLTIEKEQDTGLWWLKFDTHLVGYWPSFLVPKLADSARMIAWGGEIVYDASGQNEHTLTQMGSGHFAEEGFKKAAYINNIEYIDKSNHPIKPFPQNLEASVTRPECYNLKVGSSRRWGTYIFYGGPGRNPQCL

SEQ ID NO: 28225 - protein, 426 aa, Arabidopsis thaliana
  misc_feature (1)..(426): Ceres Seq. ID no. 2708137
MLNQTVIFFLLWVIIALVVEITLAGKITVSDIHEQKIEQRLNQLNKPAVKSIHVFATTFNYPWFAIPTIFLSPDGDIIDCVWIYHQPAFDHPLLKNHTIQMRPKSDSTRDKTGGNKTDIIHQLWRTKGECPKNTIPIRRRTRDDLLRSDSIKTHGRKNPPTISPTTYHLPDDQTEVHEHASVYLDYGEYHGSKSRISIWRPDVNMTEFSLAQTWVVGGDWDTVLNTVESGWQILHSMYGDNNTRLFAFWTSDSYGDNSCYNLDCPGFVQVNKDIALGAALNTISTYNGNQYDFLLTIEKEQDTGLWWLKFDTHLVGYWPSFLVPKLADSARMIAWGGEIVYDASGQNEHTLTQMGSGHFAEEGFKKAAYINNIEYIDKSNHPIKPFPQNLEASVTRPECYNLKVGSSRRWGTYIFYGGPGRNPQCL

SEQ ID NO: 28226 - protein, 326 aa, Arabidopsis thaliana
  misc_feature (1)..(326): Ceres Seq. ID no. 2708138
MRPKSDSTRDKTGGNKTDIIHQLWRTKGECPKNTIPIRRRTRDDLLRSDSIKTHGRKNPPTISPTTYHLPDDQTEVHEHASVYLDYGEYHGSKSRISIWRPDVNMTEFSLAQTWVVGGDWDTVLNTVESGWQILHSMYGDNNTRLFAFWTSDSYGDNSCYNLDCPGFVQVNKDIALGAALNTISTYNGNQYDFLLTIEKEQDTGLWWLKFDTHLVGYWPSFLVPKLADSARMIAWGGEIVYDASGQNEHTLTQMGSGHFAEEGFKKAAYINNIEYIDKSNHPIKPFPQNLEASVTRPECYNLKVGSSRRWGTYIFYGGPGRNPQCL

SEQ ID NO: 28227 - DNA, 807 bp, Arabidopsis thaliana
  misc_feature (1)..(807): Ceres Seq. ID no. 2708158
atggctaaagcagaagaaaacttgagagacaaatgtagatggagccttggaggcatgaccgctctcgttaccggtggctccaaaggcctcggggaagctgtggtggaggaactagccatgttaggagcaagagtccacacatgtgctagaaacgaaactcagcttcaagaatgcgtacgtgaatggcaagctaaagggtttgaggtcaccacttctgtatgcgacgtttcttctcgtgaccaacgagagaaactcatggaaaacgttgcctctatcttccaaggaaaactcaacatccttgtaaacaatgcgggaacgggtataacaaagccgaccacagagtatacagcacaagattactcatttctgatggctacaaatctcgactcagcttttcatctctcacagctcgcgcatcctttgttgaaagcatctggttcagggagcatcgtgctcatgtcctctactgcaggggttgtacatatcaatgttggttccatctatggagcaactaaaggagctatgaatcagctagcaaaaaacttagcatgcgagtgggcaagggataacataagggttaattctgtctgtccatggttcatagcaactcctttatatctcaatgatgaagagttaaagaaagaagtggagcgtaagacaccaatgggacgtgttggaaacgcaaatgaagtatcatcgcttgtcgcatttctctgctttccggctgcttcgtatataacaggtcagacaatctgcgtcgacggaggtttcacggtcaactgcttttctttcaagccagtgctttaa

SEQ ID NO: 28228 - protein, 268 aa, Arabidopsis thaliana
  misc_feature (1)..(268): Ceres Seq. ID no. 2708159
MAKAEENLRDKCRWSLGGMTALVTGGSKGLGEAVVEELAMLGARVHTCARNETQLQECVREWQAKGFEVTTSVCDVSSRDQREKLMENVASIFQGKLNILVNNAGTGITKPTTEYTAQDYSFLMATNLDSAFHLSQLAHPLLKASGSGSIVLMSSTAGVVHINVGSIYGATKGAMNQLAKNLACEWARDNIRVNSVCPWFIATPLYLNDEELKKEVERKTPMGRVGNANEVSSLVAFLCFPAASYITGQTICVDGGFTVNCFSFKPVL

SEQ ID NO: 28229 - protein, 250 aa, Arabidopsis thaliana
  misc_feature (1)..(250): Ceres Seq. ID no. 2708160
MTALVTGGSKGLGEAVVEELAMLGARVHTCARNETQLQECVREWQAKGFEVTTSVCDVSSRDQREKLMENVASIFQGKLNILVNNAGTGITKPTTEYTAQDYSFLMATNLDSAFHLSQLAHPLLKASGSGSIVLMSSTAGVVHINVGSIYGATKGAMNQLAKNLACEWARDNIRVNSVCPWFIATPLYLNDEELKKEVERKTPMGRVGNANEVSSLVAFLCFPAASYITGQTICVDGGFTVNCFSFKPVL

SEQ ID NO: 28230 - protein, 229 aa, Arabidopsis thaliana
  misc_feature (1)..(229): Ceres Seq. ID no. 2708161
MLGARVHTCARNETQLQECVREWQAKGFEVTTSVCDVSSRDQREKLMENVASIFQGKLNILVNNAGTGITKPTTEYTAQDYSFLMATNLDSAFHLSQLAHPLLKASGSGSIVLMSSTAGVVHINVGSIYGATKGAMNQLAKNLACEWARDNIRVNSVCPWFIATPLYLNDEELKKEVERKTPMGRVGNANEVSSLVAFLCFPAASYITGQTICVDGGFTVNCFSFKPVL

SEQ ID NO: 28231 - DNA, 1158 bp, Arabidopsis thaliana
  misc_feature (1)..(1158): Ceres Seq. ID no. 2708181
atgaaagtttgtgtaacgtataaacagcttatggaattggagcaaatctgcattttgaaacccgatgatgaggaagaaatggagtcaccatcaccatcgaaaacagaggaaaatttaggcgtggttcctctgtcttgcgcgtttacgagacaagaacattgcgtttccgagacgaaagaacgcgaagaatcgactagaagactaagcagccttatttttctttacctcatcgttatgtccgtacagattgtgggaggttttaaggcgaatagtcttgcggttatgacagatgctgcgcatttgttgtcggatgtggcgggtttgtgtgtctctttgttggcgatcaaggtctcgagctgggaagctaatccgcgaaactcgttcgggtttaaacggcttgaagttttagcggcgttcttgtctgttcagctcatatggcttgtctctggagtgataatccatgaagccattcaaagactacttagcagaagcagagaggttaatggagaaatcatgtttgggatttcggctttcgggtttttcatgaacttggttatggtcctttggttaggacataaccatagccaccaccaccacgaccatcatcaccatcatcataatcataaacatcaacatcaacatcatcacaaggaggtggtggcagaagaggaggaggaggaaatgaatcctttaaaaggtgagaaatcgtcttcaaaggagatgaacattaacatacaaggagcttatcttcacgcaatggctgatatgattcagtcactaggtgttatgattggtggaggtatcatttgggtaaaaccaaaatgggttttggttgatttgatttgcactcttgttttctctgcttttgctcttgctgctactctaccaattctcaagaacatatttggaatactgatggaacgcgtaccgcgtgatatggacatagagaagctcgaaagaggacttaagcgaatcgatggagttaagattgtttatgatctccatgtatgggagataacagtagggagaatcgtattgtcctgtcatatcttaccagagcctggagctagtcctaaagagatcattactggtgttagaaatttctgtaggaagtcttatgggatttatcatgcaactgttcaggttgaatcagagtag

SEQ ID NO: 28232 - protein, 385 aa, Arabidopsis thaliana
  misc_feature (1)..(385): Ceres Seq. ID no. 2708182
MKVCVTYKQLMELEQICILKPDDEEEMESPSPSKTEENLGVVPLSCAFTRQEHCVSETKEREESTRRLSSLIFLYLIVMSVQIVGGFKANSLAVMTDAAHLLSDVAGLCVSLLAIKVSSWEANPRNSFGFKRLEVLAAFLSVQLIWLVSGVIIHEAIQRLLSRSREVNGEIMFGISAFGFFMNLVMVLWLGHNHSHHHHDHHHHHHNHKHQHQHHHKEVVAEEEEEEMNPLKGEKSSSKEMNINIQGAYLHAMADMIQSLGVMIGGGIIWVKPKWVLVDLICTLVFSAFALAATLPILKNIFGILMERVPRDMDIEKLERGLKRIDGVKIVYDLHVWEITVGRIVLSCHILPEPGASPKEIITGVRNFCRKSYGIYHATVQVESE

SEQ ID NO: 28233 - protein, 375 aa, Arabidopsis thaliana
  misc_feature (1)..(375): Ceres Seq. ID no. 2708183
MELEQICILKPDDEEEMESPSPSKTEENLGVVPLSCAFTRQEHCVSETKEREESTRRLSSLIFLYLIVMSVQIVGGFKANSLAVMTDAAHLLSDVAGLCVSLLAIKVSSWEANPRNSFGFKRLEVLAAFLSVQLIWLVSGVIIHEAIQRLLSRSREVNGEIMFGISAFGFFMNLVMVLWLGHNHSHHHHDHHHHHHNHKHQHQHHHKEVVAEEEEEEMNPLKGEKSSSKEMNINIQGAYLHAMADMIQSLGVMIGGGIIWVKPKWVLVDLICTLVFSAFALAATLPILKNIFGILMERVPRDMDIEKLERGLKRIDGVKIVYDLHVWEITVGRIVLSCHILPEPGASPKEIITGVRNFCRKSYGIYHATVQVESE

SEQ ID NO: 28234 - protein, 359 aa, Arabidopsis thaliana
  misc_feature (1)..(359): Ceres Seq. ID no. 2708184
MESPSPSKTEENLGVVPLSCAFTRQEHCVSETKEREESTRRLSSLIFLYLIVMSVQIVGGFKANSLAVMTDAAHLLSDVAGLCVSLLAIKVSSWEANPRNSFGFKRLEVLAAFLSVQLIWLVSGVIIHEAIQRLLSRSREVNGEIMFGISAFGFFMNLVMVLWLGHNHSHHHHDHHHHHHNHKHQHQHHHKEVVAEEEEEEMNPLKGEKSSSKEMNINIQGAYLHAMADMIQSLGVMIGGGIIWVKPKWVLVDLICTLVFSAFALAATLPILKNIFGILMERVPRDMDIEKLERGLKRIDGVKIVYDLHVWEITVGRIVLSCHILPEPGASPKEIITGVRNFCRKSYGIYHATVQVESE

SEQ ID NO: 28235 - DNA, 2907 bp, Arabidopsis thaliana
  misc_feature (1)..(2907): Ceres Seq. ID no. 2708201
atgataccggaactagggagaagaccgatgcatagaggtaacgaagattcatcttttggggatgattatgagaaagagattggagtattgcttggtgagcagcagagaaggcaagtagaagctgatgagcttgagagagagcttaacttgtttagaagtggctctgctccaccgactgttgatggttctgttagtgctgccggagggctttttagcggcggaggtggggctccttttttggagtttggtggtgttaataagggtaatgggtttggtggtgatgatgaggagtttaggaaagatccggcttacttgtcttattactatgctaatatgaagttgaatccgaggttgccaccgcctttgatgtctagggaggatttgagggttgctcagaggcttaaagggagtaataatgtgttaggtggtgttggggataggagaaaagttaatgataatcgatctttgttctctatgccaccgggttttgaaggtgagaaaactggtgcttctgcttctgaatgggatgctaatggattgattggtttaccgggtttgggacttggaggcaagcagaagagttttgctgatatctttcaggctgatatggggcatggacatcctgtcgcacaacagccctcacgtcctgcaagtcgtaatacctttgatgaaaatgttgactctaataataatctgtctccgtctgcatcacaaggcattggtgcaccatctccatacagctatgcagctgttctaggctcttctttgtctagaaatggaactccagatccacaggccattgctagggtgcctagtccctgtcttactcccattgggagtggaagaatgagttcaaatgataagaggaacacaagtaaccagagcccattcaatggtgttacctctggtctcaacgagtcttctgatcttgtcaatgctttatctggcttgaacctgtcatgcagtgttgggttagatgatcggagtcaggctgagcaagatgtcgaaaaggtcaggaactatatgtttggactgcaaggtgggcataacgaagtcaatcaacatgagttcccaaacaaatctgatcaagcccataaggcaactggctcgttgaggaattcacaattgagagggccacacggatctgcctataatggtggagttggattagctaatccttaccagcaacttgatagcccaaattattgtctcaacaattacgcattaaatccagctgtagcctctatgatggctaaccaacttgggaacaataactttgctccaatgtatgataatgtatccgctttgggattttctggaatggactctagacatcatggacgaggctttgtatcttctggtcaaaacctctctgaatcacgtaatcttggcagattcagtaatcgaatgatgggaggaggtgctggtctccagtcacatatggtagacccaatgtataatcagtatgctgattcacttgatcttctcaatgatccttccatggataggaactttatgggtggttcatcatacatggatatgcttgaactccagagggcttatcttggagctcagaaatcacagtatggtgtcccttacaaatccgggagccctaacagccatagctattatgggagtccaacatttgggtctaatatgtcatatcctggcagcccattggctcatcatggtatgccaaactctcttatgtcaccttatagccctatgagacgggatgaagttaatatgcgatttccttctgcaacaagaaattattcgggagggttaatgggttcttggcacatggatgctagttttgatgaaggctttggatcttcaatgcttgaagagttcaaaagtaacaaaacaagaggatttgaactttctgaaatagctggccatgttgtggagttcagttcggatcaatatggaagccgctttattcagcagaaactcgagacagcaacaactgatgagaaaaacatggtctatgaggagatcatgccacaagctcttgtcctgatgactgacgtttttggaaactatgtgattcagaagttctttgagcatggactcccgccacagaggagagaattggcagagaaactctttgaccatgttttgcctcttagcttacagatgtatggttgccgtgtcatccagaaggcaattgaggtggttgatctagaccagaaaattaaaatggtgaaagaacttgatggacatgtaatgcgatgtgtacgtgatcagaatgggaaccatgtggttcaaaagtgtattgaatgtgtgcctgaagaaaacatcgagtttattatttcaactttctttggccatgtggtgaccctctccactcacccatatgggtgccgtgttattcagagagtattggaacactgccatgaccctgatacacagagtaaggttatggaagaaatcctgtccactgttagtatgctggcccaagatcagtatggaaactatgttgttcagcatgtgctggagcatggaaagcctgatgagcgcactgtgataatcaaagaattggcggggaagattgttcagatgagccagcagaagttcgcatcaaacgttgttgagaaatgtttgacttttggaggtcctgaggaacgagaattgcttgtgaatgagatgctgggaacaactgatgaaaacgagcctcttcaggcgatgatgaaggatcagttcgcaaactatgtagtgcagaaagttttggagacctgtgatgaccaacaacgtgagctgatacttactcgcatcaaagtgcatcttactgctttaaaaaagtacacttatggaaagcatgtcgttgcgcgtattgaaaaactcgttgctgctggagagaggagaatggctttgcagtccctaacccagccccagatggcttaa

SEQ ID NO: 28236 - protein, 968 aa, Arabidopsis thaliana
  misc_feature (1)..(968): Ceres Seq. ID no. 2708202
MIPELGRRPMHRGNEDSSFGDDYEKEIGVLLGEQQRRQVEADELERELNLFRSGSAPPTVDGSVSAAGGLFSGGGGAPFLEFGGVNKGNGFGGDDEEFRKDPAYLSYYYANMKLNPRLPPPLMSREDLRVAQRLKGSNNVLGGVGDRRKVNDNRSLFSMPPGFEGEKTGASASEWDANGLIGLPGLGLGGKQKSFADIFQADMGHGHPVAQQPSRPASRNTFDENVDSNNNLSPSASQGIGAPSPYSYAAVLGSSLSRNGTPDPQAIARVPSPCLTPIGSGRMSSNDKRNTSNQSPFNGVTSGLNESSDLVNALSGLNLSCSVGLDDRSQAEQDVEKVRNYMFGLQGGHNEVNQHEFPNKSDQAHKATGSLRNSQLRGPHGSAYNGGVGLANPYQQLDSPNYCLNNYALNPAVASMMANQLGNNNFAPMYDNVSALGFSGMDSRHHGRGFVSSGQNLSESRNLGRFSNRMMGGGAGLQSHMVDPMYNQYADSLDLLNDPSMDRNFMGGSSYMDMLELQRAYLGAQKSQYGVPYKSGSPNSHSYYGSPTFGSNMSYPGSPLAHHGMPNSLMSPYSPMRRDEVNMRFPSATRNYSGGLMGSWHMDASFDEGFGSSMLEEFKSNKTRGFELSEIAGHVVEFSSDQYGSRFIQQKLETATTDEKNMVYEEIMPQALVLMTDVFGNYVIQKFFEHGLPPQRRELAEKLFDHVLPLSLQMYGCRVIQKAIEVVDLDQKIKMVKELDGHVMRCVRDQNGNHVVQKCIECVPEENIEFIISTFFGHVVTLSTHPYGCRVIQRVLEHCHDPDTQSKVMEEILSTVSMLAQDQYGNYVVQHVLEHGKPDERTVIIKELAGKIVQMSQQKFASNVVEKCLTFGGPEERELLVNEMLGTTDENEPLQAMMKDQFANYVVQKVLETCDDQQRELILTRIKVHLTALKKYTYGKHVVARIEKLVAAGERRMALQSLTQPQMA

SEQ ID NO: 28237 - protein, 959 aa, Arabidopsis thaliana
  misc_feature (1)..(959): Ceres Seq. ID no. 2708203
MHRGNEDSSFGDDYEKEIGVLLGEQQRRQVEADELERELNLFRSGSAPPTVDGSVSAAGGLFSGGGGAPFLEFGGVNKGNGFGGDDEEFRKDPAYLSYYYANMKLNPRLPPPLMSREDLRVAQRLKGSNNVLGGVGDRRKVNDNRSLFSMPPGFEGEKTGASASEWDANGLIGLPGLGLGGKQKSFADIFQADMGHGHPVAQQPSRPASRNTFDENVDSNNNLSPSASQGIGAPSPYSYAAVLGSSLSRNGTPDPQAIARVPSPCLTPIGSGRMSSNDKRNTSNQSPFNGVTSGLNESSDLVNALSGLNLSCSVGLDDRSQAEQDVEKVRNYMFGLQGGHNEVNQHEFPNKSDQAHKATGSLRNSQLRGPHGSAYNGGVGLANPYQQLDSPNYCLNNYALNPAVASMMANQLGNNNFAPMYDNVSALGFSGMDSRHHGRGFVSSGQNLSESRNLGRFSNRMMGGGAGLQSHMVDPMYNQYADSLDLLNDPSMDRNFMGGSSYMDMLELQRAYLGAQKSQYGVPYKSGSPNSHSYYGSPTFGSNMSYPGSPLAHHGMPNSLMSPYSPMRRDEVNMRFPSATRNYSGGLMGSWHMDASFDEGFGSSMLEEFKSNKTRGFELSEIAGHVVEFSSDQYGSRFIQQKLETATTDEKNMVYEEIMPQALVLMTDVFGNYVIQKFFEHGLPPQRRELAEKLFDHVLPLSLQMYGCRVIQKAIEVVDLDQKIKMVKELDGHVMRCVRDQNGNHVVQKCIECVPEENIEFIISTFFGHVVTLSTHPYGCRVIQRVLEHCHDPDTQSKVMEEILSTVSMLAQDQYGNYVVQHVLEHGKPDERTVIIKELAGKIVQMSQQKFASNVVEKCLTFGGPEERELLVNEMLGTTDENEPLQAMMKDQFANYVVQKVLETCDDQQRELILTRIKVHLTALKKYTYGKHVVARIEKLVAAGERRMALQSLTQPQMA

SEQ ID NO: 28238 - protein, 857 aa, Arabidopsis thaliana
  misc_feature (1)..(857): Ceres Seq. ID no. 2708204
MKLNPRLPPPLMSREDLRVAQRLKGSNNVLGGVGDRRKVNDNRSLFSMPPGFEGEKTGASASEWDANGLIGLPGLGLGGKQKSFADIFQADMGHGHPVAQQPSRPASRNTFDENVDSNNNLSPSASQGIGAPSPYSYAAVLGSSLSRNGTPDPQAIARVPSPCLTPIGSGRMSSNDKRNTSNQSPFNGVTSGLNESSDLVNALSGLNLSCSVGLDDRSQAEQDVEKVRNYMFGLQGGHNEVNQHEFPNKSDQAHKATGSLRNSQLRGPHGSAYNGGVGLANPYQQLDSPNYCLNNYALNPAVASMMANQLGNNNFAPMYDNVSALGFSGMDSRHHGRGFVSSGQNLSESRNLGRFSNRMMGGGAGLQSHMVDPMYNQYADSLDLLNDPSMDRNFMGGSSYMDMLELQRAYLGAQKSQYGVPYKSGSPNSHSYYGSPTFGSNMSYPGSPLAHHGMPNSLMSPYSPMRRDEVNMRFPSATRNYSGGLMGSWHMDASFDEGFGSSMLEEFKSNKTRGFELSEIAGHVVEFSSDQYGSRFIQQKLETATTDEKNMVYEEIMPQALVLMTDVFGNYVIQKFFEHGLPPQRRELAEKLFDHVLPLSLQMYGCRVIQKAIEVVDLDQKIKMVKELDGHVMRCVRDQNGNHVVQKCIECVPEENIEFIISTFFGHVVTLSTHPYGCRVIQRVLEHCHDPDTQSKVMEEILSTVSMLAQDQYGNYVVQHVLEHGKPDERTVIIKELAGKIVQMSQQKFASNVVEKCLTFGGPEERELLVNEMLGTTDENEPLQAMMKDQFANYVVQKVLETCDDQQRELILTRIKVHLTALKKYTYGKHVVARIEKLVAAGERRMALQSLTQPQMA

SEQ ID NO: 28239 - DNA, 1077 bp, Arabidopsis thaliana
  misc_feature (1)..(1077): Ceres Seq. ID no. 2708379
atggcgggcaactatgatcgtgctggtgaggtaaaagcattcgaccagatgaagatcggcgtgaagggtcttgtcgacgccggaatcacaaaagttcctcgcattttccatcaccaagatgtggccgttacaaaccctaaaccttcctcaacgttagaaattccaacaatcgatgttggaggtggcgtgttcgagtccacggtcacgcgaaagagcgtgatcgcgaaagtgagagctgcggttgagaagttcgggttctttcaggtgattaaccatgggattccactcgaggtgatggagagtatgaaagatgggattcgtgggtttcatgagcaggactcagaagttaagaaaacgttctatagtcgtgacatcactaaaaaggttaagtataacactaatttcgatctctatagctctcaagctgcgaattggagagatactttaactatggttatggctcctgatgttccacaagcaggggacttacccgtgatttgtcgagaaatcatgttggagtactccaagcgaatgatgaagttaggggagctaatctttgagcttttatcagaagctcttggtttaaaacctaaccaccttaaagagctaaattgcgcaaagagtttgtcgttgctctcccattactacccgccttgtccagagcctgaccgaacctttggtatcagttcacatacagatatctcttttatcactattcttcttcaagaccacattggaggacttcaagttctccatgatggttactggatcgatgttcctcctaatcccgaagctctaatcgttaaccttggagatcttttacagcttataacaaacgataagtttgtaagtgtggagcacagggttttggcaaatagaggcgaagaacctcgcatttcaagcgcatctttcttcatgcacaccataccaaatgagcaagtatatggacctatgaaagagcttctatctaaacaaaaccctcccaagtacagaaacacaaccacgaccgagatggcgaggcattacttggctagaggactcgatgggacctcaccgttgctccatttcaggatctga

SEQ ID NO: 28240 - protein, 358 aa, Arabidopsis thaliana
  misc_feature (1)..(358): Ceres Seq. ID no. 2708380
MAGNYDRAGEVKAFDQMKIGVKGLVDAGITKVPRIFHHQDVAVTNPKPSSTLEIPTIDVGGGVFESTVTRKSVIAKVRAAVEKFGFFQVINHGIPLEVMESMKDGIRGFHEQDSEVKKTFYSRDITKKVKYNTNFDLYSSQAANWRDTLTMVMAPDVPQAGDLPVICREIMLEYSKRMMKLGELIFELLSEALGLKPNHLKELNCAKSLSLLSHYYPPCPEPDRTFGISSHTDISFITILLQDHIGGLQVLHDGYWIDVPPNPEALIVNLGDLLQLITNDKFVSVEHRVLANRGEEPRISSASFFMHTIPNEQVYGPMKELLSKQNPPKYRNTTTTEMARHYLARGLDGTSPLLHFRI

SEQ ID NO: 28241 - protein, 342 aa, Arabidopsis thaliana
  misc_feature (1)..(342): Ceres Seq. ID no. 2708381
MKIGVKGLVDAGITKVPRIFHHQDVAVTNPKPSSTLEIPTIDVGGGVFESTVTRKSVIAKVRAAVEKFGFFQVINHGIPLEVMESMKDGIRGFHEQDSEVKKTFYSRDITKKVKYNTNFDLYSSQAANWRDTLTMVMAPDVPQAGDLPVICREIMLEYSKRMMKLGELIFELLSEALGLKPNHLKELNCAKSLSLLSHYYPPCPEPDRTFGISSHTDISFITILLQDHIGGLQVLHDGYWIDVPPNPEALIVNLGDLLQLITNDKFVSVEHRVLANRGEEPRISSASFFMHTIPNEQVYGPMKELLSKQNPPKYRNTTTTEMARHYLARGLDGTSPLLHFRI

SEQ ID NO: 28242 - protein, 260 aa, Arabidopsis thaliana
  misc_feature (1)..(260): Ceres Seq. ID no. 2708382
MESMKDGIRGFHEQDSEVKKTFYSRDITKKVKYNTNFDLYSSQAANWRDTLTMVMAPDVPQAGDLPVICREIMLEYSKRMMKLGELIFELLSEALGLKPNHLKELNCAKSLSLLSHYYPPCPEPDRTFGISSHTDISFITILLQDHIGGLQVLHDGYWIDVPPNPEALIVNLGDLLQLITNDKFVSVEHRVLANRGEEPRISSASFFMHTIPNEQVYGPMKELLSKQNPPKYRNTTTTEMARHYLARGLDGTSPLLHFRI

SEQ ID NO: 28243 - DNA, 2640 bp, Arabidopsis thaliana
  misc_feature (1)..(2640): Ceres Seq. ID no. 2708977
atggaaggtcgtcgtcaacgtttactggtgttcatctttggggctttggccattacacatcttgttcaagctcagccgcctgatcaacgaggattcatcagtttggattgcggtttacccgttaatgagtctccttataccgacccacgaaccggattaacattctcatctgatgctgattttattttaagtggtttacgtggtgaagctggggatgataacacatatatctacaggcagtacaaggatttgagatattttcccgatggaatacgaaactgctataatctgaaagtagagcaaggcatcaactatttgataagagcagggttcggatatggaaattatgatggtcttaatgtatatcccaaatttgatttacatgttgggcctaacatgtggattgcggttgatttggaattcggaaaagatcgtgagatcatttacatgacaacgtcgaacttattgcagatttgtcttgtcaaaacaggatcaactataccaatgatatcaaccttggaactacggccactaagaaatgattcatatttgactcaattcggtcccttagacctcatctaccggcgggcctatagtagcaattctaccggttttatacggtatcctgatgatatttttgatcgcaaatgggaccgatataatgaatttgaaacggatgtgaacaccaccctcaacgtgagatcctcgagtccctttcaagtaccagaagctgtaagtaggatgggaatcacgcccgaaaatgccagcttgccattgagattttacgtgtctctagatgacgacagtgacaaggttaacgtgtactttcactttgccgaaatccaagctttgaggggcaatgagactagagaattcgacattgaattggaagaagatattattcagtcagcatatagtcctacgatgttacaatcagataccaaatataacctatcacctcacaaatgtagctccgggttgtgctacttgaaactcgttagaactccaaggtcaactcttccaccgctgattagtgctattgaggctttcaaggttgtggactttccatacgctgaaacaaatccaaatgacgtcgctgctatgaaggatatcgaagcattttatggattgaagatgattagttggcaaggagatccttgtgtccctgaactattaaagtgggaagatctaaaatgcagctacacaaataagtctactcctccaagaattatttctttagatttgtcatcacgagggttaaaaggggtcattgcgcctgccttccaaaatttgaccgagcttcgaaaactagacttgtcaaataatagttttactggaggagtgcccgagtttctagccagcatgaagtcattatcgatcataaatttaaattggaatgaccttacgggtcctcttcctaaattgcttcttgatagagaaaagaatgggcttaagctaacgatccaaggaaacccaaagttgtgtaacgatgcgtcatgcaaaaataataacaatcaaacgtacattgtaccagttgttgcgtcagtagcttctgtgctcatcattatagccgtactgattctcattcttgttttcaaaaagagaaggccaacgcaagttgattcattacctacagtgcaacatgggttaccaaatagaccgtctatatttactcaaacgaaaaggttcacttattcagaggtagaagcattaacagataattttgaaagagttcttggagaaggagggtttggggtagtgtatcatggtattttaaatggtacgcaaccaatagctgttaaactactctctcaatcatcagtacaaggctataaggaattcaaagctgaggttgaacttcttttgagagtgcaccacgtcaatttggttagtttggttggatattgtgatgaagaaagcaacttggccctgctttatgagtatgcaccgaacggagacttaaaacaacatctatcagaacggggtggctctccattgaagtggtcaagtagactaaaaattgtcgtcgaaactgcgcaaggattagaatacttgcatacgggttgcaaacctccaatggtacatcgtgatgtaaaaacaacaaatatacttttagacgaacacttccaagcaaaactcgccgattttggcctttcaagatcatttccagttggaggtgaaactcatgtttcaacagctgttgctggaactcctggatatttggatcccgaatattatcgaacaaataggttgaacgaaaagagtgatgtatatagctttgggattgtattattggagatcatcacaagtcgacctgtgattcagcaaacccgagagaagccgcacatagcagcatgggtgggatacatgcttactaagggagatattgagaacgttgtggatccaagactcaatagagattatgagcctacttctgtttggaaggctcttgagatagcaatgtcttgcgtgaatccttcttcggagaaaagaccaaccatgtctcaagttactaatgaactaaagcaatgtctaacattagaaaactcaaagcgaggagtgagagaagacatgggatcaagaagttctgttgaaatgagcacaagctttacaaccgaaattaacccaaaagcacgataa

SEQ ID NO: 28244 - protein, 879 aa, Arabidopsis thaliana
  misc_feature (1)..(879): Ceres Seq. ID no. 2708978
MEGRRQRLLVFIFGALAITHLVQAQPPDQRGFISLDCGLPVNESPYTDPRTGLTFSSDADFILSGLRGEAGDDNTYIYRQYKDLRYFPDGIRNCYNLKVEQGINYLIRAGFGYGNYDGLNVYPKFDLHVGPNMWIAVDLEFGKDREIIYMTTSNLLQICLVKTGSTIPMISTLELRPLRNDSYLTQFGPLDLIYRRAYSSNSTGFIRYPDDIFDRKWDRYNEFETDVNTTLNVRSSSPFQVPEAVSRMGITPENASLPLRFYVSLDDDSDKVNVYFHFAEIQALRGNETREFDIELEEDIIQSAYSPTMLQSDTKYNLSPHKCSSGLCYLKLVRTPRSTLPPLISAIEAFKVVDFPYAETNPNDVAAMKDIEAFYGLKMISWQGDPCVPELLKWEDLKCSYTNKSTPPRIISLDLSSRGLKGVIAPAFQNLTELRKLDLSNNSFTGGVPEFLASMKSLSIINLNWNDLTGPLPKLLLDREKNGLKLTIQGNPKLCNDASCKNNNNQTYIVPVVASVASVLIIIAVLILILVFKKRRPTQVDSLPTVQHGLPNRPSIFTQTKRFTYSEVEALTDNFERVLGEGGFGVVYHGILNGTQPIAVKLLSQSSVQGYKEFKAEVELLLRVHHVNLVSLVGYCDEESNLALLYEYAPNGDLKQHLSERGGSPLKWSSRLKIVVETAQGLEYLHTGCKPPMVHRDVKTTNILLDEHFQAKLADFGLSRSFPVGGETHVSTAVAGTPGYLDPEYYRTNRLNEKSDVYSFGIVLLEIITSRPVIQQTREKPHIAAWVGYMLTKGDIENVVDPRLNRDYEPTSVWKALEIAMSCVNPSSEKRPTMSQVTNELKQCLTLENSKRGVREDMGSRSSVEMSTSFTTEINPKAR

SEQ ID NO: 28245 - protein, 747 aa, Arabidopsis thaliana
  misc_feature (1)..(747): Ceres Seq. ID no. 2708979
MWIAVDLEFGKDREIIYMTTSNLLQICLVKTGSTIPMISTLELRPLRNDSYLTQFGPLDLIYRRAYSSNSTGFIRYPDDIFDRKWDRYNEFETDVNTTLNVRSSSPFQVPEAVSRMGITPENASLPLRFYVSLDDDSDKVNVYFHFAEIQALRGNETREFDIELEEDIIQSAYSPTMLQSDTKYNLSPHKCSSGLCYLKLVRTPRSTLPPLISAIEAFKVVDFPYAETNPNDVAAMKDIEAFYGLKMISWQGDPCVPELLKWEDLKCSYTNKSTPPRIISLDLSSRGLKGVIAPAFQNLTELRKLDLSNNSFTGGVPEFLASMKSLSIINLNWNDLTGPLPKLLLDREKNGLKLTIQGNPKLCNDASCKNNNNQTYIVPVVASVASVLIIIAVLILILVFKKRRPTQVDSLPTVQHGLPNRPSIFTQTKRFTYSEVEALTDNFERVLGEGGFGVVYHGILNGTQPIAVKLLSQSSVQGYKEFKAEVELLLRVHHVNLVSLVGYCDEESNLALLYEYAPNGDLKQHLSERGGSPLKWSSRLKIVVETAQGLEYLHTGCKPPMVHRDVKTTNILLDEHFQAKLADFGLSRSFPVGGETHVSTAVAGTPGYLDPEYYRTNRLNEKSDVYSFGIVLLEIITSRPVIQQTREKPHIAAWVGYMLTKGDIENVVDPRLNRDYEPTSVWKALEIAMSCVNPSSEKRPTMSQVTNELKQCLTLENSKRGVREDMGSRSSVEMSTSFTTEINPKAR

SEQ ID NO: 28246 - protein, 730 aa, Arabidopsis thaliana
  misc_feature (1)..(730): Ceres Seq. ID no. 2708980
MTTSNLLQICLVKTGSTIPMISTLELRPLRNDSYLTQFGPLDLIYRRAYSSNSTGFIRYPDDIFDRKWDRYNEFETDVNTTLNVRSSSPFQVPEAVSRMGITPENASLPLRFYVSLDDDSDKVNVYFHFAEIQALRGNETREFDIELEEDIIQSAYSPTMLQSDTKYNLSPHKCSSGLCYLKLVRTPRSTLPPLISAIEAFKVVDFPYAETNPNDVAAMKDIEAFYGLKMISWQGDPCVPELLKWEDLKCSYTNKSTPPRIISLDLSSRGLKGVIAPAFQNLTELRKLDLSNNSFTGGVPEFLASMKSLSIINLNWNDLTGPLPKLLLDREKNGLKLTIQGNPKLCNDASCKNNNNQTYIVPVVASVASVLIIIAVLILILVFKKRRPTQVDSLPTVQHGLPNRPSIFTQTKRFTYSEVEALTDNFERVLGEGGFGVVYHGILNGTQPIAVKLLSQSSVQGYKEFKAEVELLLRVHHVNLVSLVGYCDEESNLALLYEYAPNGDLKQHLSERGGSPLKWSSRLKIVVETAQGLEYLHTGCKPPMVHRDVKTTNILLDEHFQAKLADFGLSRSFPVGGETHVSTAVAGTPGYLDPEYYRTNRLNEKSDVYSFGIVLLEIITSRPVIQQTREKPHIAAWVGYMLTKGDIENVVDPRLNRDYEPTSVWKALEIAMSCVNPSSEKRPTMSQVTNELKQCLTLENSKRGVREDMGSRSSVEMSTSFTTEINPKAR

SEQ ID NO: 28247 - DNA, 1764 bp, Arabidopsis thaliana
  misc_feature (1)..(1764): Ceres Seq. ID no. 2709167
atgtctccgtcttcaaccactacttgcacttcccttcttgaagagttgcagatgatatgggatgagattggtgaaagttacaatgaaagagataagatgctgctagaacttgagcaggaatgtctggatatatacaataagaaggttgagaaaactcgtaagttcagagctgagttacagcgatcattagctcaagctgaagctgagattgccagcctcatgtctgcgcttggtgaaaaagtttcgtttgccaagaagaaagaaggctctttgaaggagcagatttccagtgtaaagcctgtactggaagatctactgatgaaaaaggatcgaagaaggaaagagctctctgagacactgaatcaaatagcagagatcacgtctaacatagcagggaatgattatactgttagttctggttcagaagttgatgaaagtgacttgacacaaagaaagttggatgaacttagagcagatctgcaggatcttcgaaatgaaaaggctgttcgactgcagaaagtaaactcttatatcagtgctgtccatgagctgtcagagattctgtcttttgatttctccaaggccctgaatagtgtccatagcagcttgactgagttttcaaagactcattcgaaaagcattagtaatgatactcttgctaggttcacagaacttgtaaagtctctgaaggcggagaaacatgagaggctgcttaagctacaaggtttgggaagaagcatgcaagagctgtggaacctaatggaaacacctatggatgagaggagaagatttgaccattgcagcagcttactttctagtctacctgatgatgccttgaaaaaaggatgcctcagcctagacattatccgagaggccgaagatgaagtgagaagactgaattccctgaagtccagcaaaatgaaggaattggtgtttaagaggcagtgtgaactagaagagatctgcagagggaatcatatggatatcaatagtgatgctgcaagaaagagtcttgtcgaactcattgaatctggtgatggtgatctgtctgatattcttgcaagcatagatggtcagatcgagaaggcaagagaagaagctttaagcagaaaggaaatattggacaaagttgataagtggagacacgcaaaggaggaagaaacatggcttgatgattatgaaaaggatgaaaatcgcttcagtgctgtgagaggagcacacaaaaatctaaaacgggcagaaaaagctaggagccttatcagcaaaattcctgtttttaagcagttcaacaagaaattttgggctcttcttttttcgcctaaacagttgttcaaattctctaactcgatcattgattactgcgaaaactcgaccactcattcaatggtggatgttctgaccacgaaagtgaaggcctgggagaaagaaagaggggtccccttcttatgcgataagcaaccgttattacaaacactagaagatgacattgttatccgtgctcaaagagaagaggaaaagcgtcaattccgagagcagaaacgactacaaggtcagcttgctacagagaaagaagcaaagtatggttccaagtctgcaaagaagaagccattgggacagagtcttaacacagacaatgtgactaaaactcccattggtcggcgcattggaaatacacctggacgttctgttacttctggtggcaaagattatagaggcaatgcggtgataccattgaactatgttgctcttcagaaagacgattga

SEQ ID NO: 28248 - protein, 587 aa, Arabidopsis thaliana
  misc_feature (1)..(587): Ceres Seq. ID no. 2709168
MSPSSTTTCTSLLEELQMIWDEIGESYNERDKMLLELEQECLDIYNKKVEKTRKFRAELQRSLAQAEAEIASLMSALGEKVSFAKKKEGSLKEQISSVKPVLEDLLMKKDRRRKELSETLNQIAEITSNIAGNDYTVSSGSEVDESDLTQRKLDELRADLQDLRNEKAVRLQKVNSYISAVHELSEILSFDFSKALNSVHSSLTEFSKTHSKSISNDTLARFTELVKSLKAEKHERLLKLQGLGRSMQELWNLMETPMDERRRFDHCSSLLSSLPDDALKKGCLSLDIIREAEDEVRRLNSLKSSKMKELVFKRQCELEEICRGNHMDINSDAARKSLVELIESGDGDLSDILASIDGQIEKAREEALSRKEILDKVDKWRHAKEEETWLDDYEKDENRFSAVRGAHKNLKRAEKARSLISKIPVFKQFNKKFWALLFSPKQLFKFSNSIIDYCENSTTHSMVDVLTTKVKAWEKERGVPFLCDKQPLLQTLEDDIVIRAQREEEKRQFREQKRLQGQLATEKEAKYGSKSAKKKPLGQSLNTDNVTKTPIGRRIGNTPGRSVTSGGKDYRGNAVIPLNYVALQKDD

SEQ ID NO: 28249 - protein, 570 aa, Arabidopsis thaliana
  misc_feature (1)..(570): Ceres Seq. ID no. 2709169
MIWDEIGESYNERDKMLLELEQECLDIYNKKVEKTRKFRAELQRSLAQAEAEIASLMSALGEKVSFAKKKEGSLKEQISSVKPVLEDLLMKKDRRRKELSETLNQIAEITSNIAGNDYTVSSGSEVDESDLTQRKLDELRADLQDLRNEKAVRLQKVNSYISAVHELSEILSFDFSKALNSVHSSLTEFSKTHSKSISNDTLARFTELVKSLKAEKHERLLKLQGLGRSMQELWNLMETPMDERRRFDHCSSLLSSLPDDALKKGCLSLDIIREAEDEVRRLNSLKSSKMKELVFKRQCELEEICRGNHMDINSDAARKSLVELIESGDGDLSDILASIDGQIEKAREEALSRKEILDKVDKWRHAKEEETWLDDYEKDENRFSAVRGAHKNLKRAEKARSLISKIPVFKQFNKKFWALLFSPKQLFKFSNSIIDYCENSTTHSMVDVLTTKVKAWEKERGVPFLCDKQPLLQTLEDDIVIRAQREEEKRQFREQKRLQGQLATEKEAKYGSKSAKKKPLGQSLNTDNVTKTPIGRRIGNTPGRSVTSGGKDYRGNAVIPLNYVALQKDD

SEQ ID NO: 28250 - protein, 555 aa, Arabidopsis thaliana
  misc_feature (1)..(555): Ceres Seq. ID no. 2709170
MLLELEQECLDIYNKKVEKTRKFRAELQRSLAQAEAEIASLMSALGEKVSFAKKKEGSLKEQISSVKPVLEDLLMKKDRRRKELSETLNQIAEITSNIAGNDYTVSSGSEVDESDLTQRKLDELRADLQDLRNEKAVRLQKVNSYISAVHELSEILSFDFSKALNSVHSSLTEFSKTHSKSISNDTLARFTELVKSLKAEKHERLLKLQGLGRSMQELWNLMETPMDERRRFDHCSSLLSSLPDDALKKGCLSLDIIREAEDEVRRLNSLKSSKMKELVFKRQCELEEICRGNHMDINSDAARKSLVELIESGDGDLSDILASIDGQIEKAREEALSRKEILDKVDKWRHAKEEETWLDDYEKDENRFSAVRGAHKNLKRAEKARSLISKIPVFKQFNKKFWALLFSPKQLFKFSNSIIDYCENSTTHSMVDVLTTKVKAWEKERGVPFLCDKQPLLQTLEDDIVIRAQREEEKRQFREQKRLQGQLATEKEAKYGSKSAKKKPLGQSLNTDNVTKTPIGRRIGNTPGRSVTSGGKDYRGNAVIPLNYVALQKDD

SEQ ID NO: 28251 - DNA, 909 bp, Arabidopsis thaliana
  misc_feature (1)..(909): Ceres Seq. ID no. 2709371
atggagttgaagccggaggttcaatatggagatttttcgttaaccaacagcttagtgaatgtggacaaggaggaccttcgtagggaggaagcagatagcgacgcaggttcagtgattatctgcgaccattcgatatgtgatagtggtgatggtgatatatgcgctgtagcagattatgttgagtgtgtggcggtggagacgacggagaagttggagctgcctgaggaatttgcgaaaagcgttatggttctaacgtgcgaatccacagctgagggtggatcttgtgatgtgtacttagttggcactgctcacgtatcacaggtaatcctcgaatcatgtcgagaagttgaagctgtaatcagcgccttgaaaccacaggccgccaagaagcttgaggtttttcctggtgctgaatttcgtgtgggatttgaagaggcaaacaaatatggtggcagagtgtttcttggcgatcgctcagtacagctgaaagacctgggcgatggggatatgctgacattggcgattcaagaaatgagcacggaatttccgactctcatggagacacttgtgcatgagcgagataagtacatggcatatcaattgttgagaattgcaagtgagcatagttcagtcgtggcagttgtgggtagaggacatcttcaagggatcaagaagaattggaaccaaactataaacgttagtaacctcattaatacacatttggttgaaaacaacacaataaacagagctaattttgtcaccatcactgtgctaatggtattgcagataaaggaactgatggagttaccgacaaatgaatccatatttactgtaaagaatattctgaaatatatggtggttgtagtcgttggaacagccatagtttccggaatgtatcttgctaagtaa

SEQ ID NO: 28252 - protein, 302 aa, Arabidopsis thaliana
  misc_feature (1)..(302): Ceres Seq. ID no. 2709372
MELKPEVQYGDFSLTNSLVNVDKEDLRREEADSDAGSVIICDHSICDSGDGDICAVADYVECVAVETTEKLELPEEFAKSVMVLTCESTAEGGSCDVYLVGTAHVSQVILESCREVEAVISALKPQAAKKLEVFPGAEFRVGFEEANKYGGRVFLGDRSVQLKDLGDGDMLTLAIQEMSTEFPTLMETLVHERDKYMAYQLLRIASEHSSVVAVVGRGHLQGIKKNWNQTINVSNLINTHLVENNTINRANFVTITVLMVLQIKELMELPTNESIFTVKNILKYMVVVVVGTAIVSGMYLAK

SEQ ID NO: 28253 - protein, 221 aa, Arabidopsis thaliana
  misc_feature (1)..(221): Ceres Seq. ID no. 2709373
MVLTCESTAEGGSCDVYLVGTAHVSQVILESCREVEAVISALKPQAAKKLEVFPGAEFRVGFEEANKYGGRVFLGDRSVQLKDLGDGDMLTLAIQEMSTEFPTLMETLVHERDKYMAYQLLRIASEHSSVVAVVGRGHLQGIKKNWNQTINVSNLINTHLVENNTINRANFVTITVLMVLQIKELMELPTNESIFTVKNILKYMVVVVVGTAIVSGMYLAK

SEQ ID NO: 28254 - DNA, 1389 bp, Arabidopsis thaliana
  misc_feature (1)..(1389): Ceres Seq. ID no. 2709449
atgaagtgttttcacttcaccaatggcgacaagagaacaacaacaacaatcgaagaaggagtaggaggaggagacagtgttgtttcaagagcttcaagactctcatgggctcgttctctaagcgtagcatcatccaccacttcagacccaactcgccggtccgagtttgactcagactggagtttctcaccggaaagacttacttttcccaagccattaagtcaacgttggatcggtggacttgttcctgagaatgatctaaaggtgtttactttcaaagagctgaaaatagctactaaaggtttcaatagaggtcttttgattggcgaaggagggtttggttgcgtttatagaggtgttgttgatgtttcagactctaatggttttgattcgaagattaatgttgctgttaaacagcttaatcgtcaaggtttacaggggcataaggaatggatcaatgaggtgaattttctaggagtagtgaatcatccaaatcttgtgaagttagttgggtattgtgctgatgatgatgaaagagggatgcaaaggcttctagtctatgaacttatgtgtaataagagcttggaggatcatctcgtaggccgagttgtgtcggtatctctaccgtggatgatgaggttgaagattgcgcaagatgctgctcaaggcttagcttatcttcatgaagaaatggattttcagttgatatttcgagatttcaagtcttcaaacatcttgcttgatgagagattcggtgcaaagctctcggattttggattagctaggcaaggacctcctgaaggacttggtcatgtctcaacttcagttgtaggtacggttggttacgcagctcctgagtatgtacaaaccgggaaattgacggcaaagagtgatgtatggagctttggggtagtgttgtatgaactgatcacgggaagacgagcagtggatagaaatcgacctcgaggtgaacagaagcttttagaatgggtgaagccttatgtatcagactcgaagaagttccatctgattgtcgatccacggctcgaaggccagtactactgtatgaagtctgttcaaagagtagctgctttagcaaacaaatgtctaatgaagcaaccgaaatctcggcctaaaatgagcgaagtcgtatcactacttggacgcatcatcgatgaagaagcggaaaacgttcctccgccagttgctgatgaaacagaagagataatcaaagctgagctcaatggagagagtgagcctgagctaaagaagcaaggtagtagttatcgtaagaaggttcttgatcttagggataagatgaacttaaacaagtcgctttcgaagctagactggcgaaactggacaccaggactggtcagaacatggtag

SEQ ID NO: 28255 - protein, 462 aa, Arabidopsis thaliana
  misc_feature (1)..(462): Ceres Seq. ID no. 2709450
MKCFHFTNGDKRTTTTIEEGVGGGDSVVSRASRLSWARSLSVASSTTSDPTRRSEFDSDWSFSPERLTFPKPLSQRWIGGLVPENDLKVFTFKELKIATKGFNRGLLIGEGGFGCVYRGVVDVSDSNGFDSKINVAVKQLNRQGLQGHKEWINEVNFLGVVNHPNLVKLVGYCADDDERGMQRLLVYELMCNKSLEDHLVGRVVSVSLPWMMRLKIAQDAAQGLAYLHEEMDFQLIFRDFKSSNILLDERFGAKLSDFGLARQGPPEGLGHVSTSVVGTVGYAAPEYVQTGKLTAKSDVWSFGVVLYELITGRRAVDRNRPRGEQKLLEWVKPYVSDSKKFHLIVDPRLEGQYYCMKSVQRVAALANKCLMKQPKSRPKMSEVVSLLGRIIDEEAENVPPPVADETEEIIKAELNGESEPELKKQGSSYRKKVLDLRDKMNLNKSLSKLDWRNWTPGLVRTW

SEQ ID NO: 28256 - protein, 282 aa, Arabidopsis thaliana
  misc_feature (1)..(282): Ceres Seq. ID no. 2709451
MQRLLVYELMCNKSLEDHLVGRVVSVSLPWMMRLKIAQDAAQGLAYLHEEMDFQLIFRDFKSSNILLDERFGAKLSDFGLARQGPPEGLGHVSTSVVGTVGYAAPEYVQTGKLTAKSDVWSFGVVLYELITGRRAVDRNRPRGEQKLLEWVKPYVSDSKKFHLIVDPRLEGQYYCMKSVQRVAALANKCLMKQPKSRPKMSEVVSLLGRIIDEEAENVPPPVADETEEIIKAELNGESEPELKKQGSSYRKKVLDLRDKMNLNKSLSKLDWRNWTPGLVRTW

SEQ ID NO: 28257 - protein, 273 aa, Arabidopsis thaliana
  misc_feature (1)..(273): Ceres Seq. ID no. 2709452
MCNKSLEDHLVGRVVSVSLPWMMRLKIAQDAAQGLAYLHEEMDFQLIFRDFKSSNILLDERFGAKLSDFGLARQGPPEGLGHVSTSVVGTVGYAAPEYVQTGKLTAKSDVWSFGVVLYELITGRRAVDRNRPRGEQKLLEWVKPYVSDSKKFHLIVDPRLEGQYYCMKSVQRVAALANKCLMKQPKSRPKMSEVVSLLGRIIDEEAENVPPPVADETEEIIKAELNGESEPELKKQGSSYRKKVLDLRDKMNLNKSLSKLDWRNWTPGLVRTW

SEQ ID NO: 28258 - DNA, 981 bp, Arabidopsis thaliana
  misc_feature (1)..(981): Ceres Seq. ID no. 2709504
atggagcaccaccaccagcatcaccgtcaccaccaacgcgacgacggagaagacgatcgtcaatcctttggagtaccaccgccacacgtcgatgctccgccacaacctcatggtctttaccagtcacagcctcattttgatccttacgcgcctactcctcaagctccggcgccttaccgatcagaaactcaattcgaaccccacgcgcctccgccttaccgatcagagccttactttgaaactccggcaccaccgccttcatttggtcatgtgagtcatgttggtcaccaatcacccaacgaatcttacccaccggaacaccaccgttacggaggttatcaacagccgtctaattccttactggaaagtcatggagatcacagtggagtcacgcacgtggctcaccatagctcaaatcagccccaatcgtcttctggtgtctaccacaagcctgatgagaatcgtctacctgataatcttgctggactcgccggaagagcaacggtgaaggtgtattccaaggcggagcctaactataatttgacgatcagagatggtaaggttattctcgccccagcggatccatctgatgaagcacagcattggtacaaagacgagaagtatagtactaaagtgaaggacgcagacggtcatccttgttttgctcttgtaaacaaagctactggtgaagcaatgaagcattctgtgggagctactcatcccgtgcatctgattcgatatgtgcctgataagcttgacgagtcagtactatggacagagagcaaggattttggcgatggatatcgcacaataagaatggtaaacaatacgaggctaaacgtggatgcatatcatggtgacagcaaatctggtggtgtacgtgatggcacgactatcgtcctctgggactggaacaaaggcgacaaccagctctggaagatctttcctttctgtaagcttttctttaccgtttctgcttag

SEQ ID NO: 28259 - protein, 326 aa, Arabidopsis thaliana
  misc_feature (1)..(326): Ceres Seq. ID no. 2709505
MEHHHQHHRHHQRDDGEDDRQSFGVPPPHVDAPPQPHGLYQSQPHFDPYAPTPQAPAPYRSETQFEPHAPPPYRSEPYFETPAPPPSFGHVSHVGHQSPNESYPPEHHRYGGYQQPSNSLLESHGDHSGVTHVAHHSSNQPQSSSGVYHKPDENRLPDNLAGLAGRATVKVYSKAEPNYNLTIRDGKVILAPADPSDEAQHWYKDEKYSTKVKDADGHPCFALVNKATGEAMKHSVGATHPVHLIRYVPDKLDESVLWTESKDFGDGYRTIRMVNNTRLNVDAYHGDSKSGGVRDGTTIVLWDWNKGDNQLWKIFPFCKLFFTVSA

SEQ ID NO: 28260 - DNA, 1425 bp, Arabidopsis thaliana
  misc_feature (1)..(1425): Ceres Seq. ID no. 2709603
atgggtttatttcttcttgcagctcaaaagataagttcaagaccaagttctgaactctctgaaggattttcagacaaagatcttgcgaaaacaacgggtcaagagaagagaaagatatcaggaagatctctatctcttccatcggtagaggtagtagaccagacaccaggttggccattactaagaacatccactttagctactccaatggttcaacatcagactaggaaaatatcagttgtcaattgggtcatgagcttgcctgaaagatttccacatcatccgaatcagacttgtcaacagagcttttgtgataaacaacttaaagacatactcaaggacataaacagatggtttagctatgatgttctcaagacagcaacatcagatttctctttagagaatctgatcggaaaaggaggatgtaatgaagtttacaaagggtttcttgaagatggtaaaggcgtggcagtgaagatcttgaaaccatctgtaaaagaagcagtgaaggagtttgttcatgaagtgagcatagtctcttctttgagtcactcaaacatctctcctttgattggtgtatgcgttcattacaacgacctaatctctgtttacaatctctcttccaaagggagtttggaggagactcttcaggtttctgtaggtaagcatgtcttgagatgggaagagagactcaagatagcaatagggttaggggaagctcttgattatctacataaccaatgttctaatcctgtgatccacagagatgtcaaatcttccaatgttcttctctcagatgagttcgaacctcagctttcggatttcggtctttcgatgtggggatcgaagtcttgtcgatacacgatacaaagagatgtggtgggtacatttggatatctagctcctgagtactttatgtatggaaaagttagcgataaagtcgatgtatatgcctttggagtagttttgcttgaactcatttcaggaagaacttctatttcatctgatagcccaagagggcaagagagtttggtcatgtgggcaaaaccaatgatcgaaaaaggcaatgcaaaagagctcttggatccgaatattgctggtactttcgacgaggatcagtttcataagatggttcttgctgctacacattgtctcacaagagcagccacttatcgtcccaatatcaaggagatattgaagctgctaagaggcgaagatgatgtctcgaaatgggtgaagatagaagaagatgacgaagatggtttcgacgacgaggtttacccaaattcgaacacagaattacacttgagcctcgcgatggttgacgtggaggataatgactctgtgtcaaacagtagcttggagagaagtaacaacagccttttttcttcttcttcttcttcctctcaggagcttcagtcttaa

SEQ ID NO: 28261 - protein, 474 aa, Arabidopsis thaliana
  misc_feature (1)..(474): Ceres Seq. ID no. 2709604
MGLFLLAAQKISSRPSSELSEGFSDKDLAKTTGQEKRKISGRSLSLPSVEVVDQTPGWPLLRTSTLATPMVQHQTRKISVVNWVMSLPERFPHHPNQTCQQSFCDKQLKDILKDINRWFSYDVLKTATSDFSLENLIGKGGCNEVYKGFLEDGKGVAVKILKPSVKEAVKEFVHEVSIVSSLSHSNISPLIGVCVHYNDLISVYNLSSKGSLEETLQVSVGKHVLRWEERLKIAIGLGEALDYLHNQCSNPVIHRDVKSSNVLLSDEFEPQLSDFGLSMWGSKSCRYTIQRDVVGTFGYLAPEYFMYGKVSDKVDVYAFGVVLLELISGRTSISSDSPRGQESLVMWAKPMIEKGNAKELLDPNIAGTFDEDQFHKMVLAATHCLTRAATYRPNIKEILKLLRGEDDVSKWVKIEEDDEDGFDDEVYPNSNTELHLSLAMVDVEDNDSVSNSSLERSNNSLFSSSSSSSQELQS

SEQ ID NO: 28262 - protein, 405 aa, Arabidopsis thaliana
  misc_feature (1)..(405): Ceres Seq. ID no. 2709605
MVQHQTRKISVVNWVMSLPERFPHHPNQTCQQSFCDKQLKDILKDINRWFSYDVLKTATSDFSLENLIGKGGCNEVYKGFLEDGKGVAVKILKPSVKEAVKEFVHEVSIVSSLSHSNISPLIGVCVHYNDLISVYNLSSKGSLEETLQVSVGKHVLRWEERLKIAIGLGEALDYLHNQCSNPVIHRDVKSSNVLLSDEFEPQLSDFGLSMWGSKSCRYTIQRDVVGTFGYLAPEYFMYGKVSDKVDVYAFGVVLLELISGRTSISSDSPRGQESLVMWAKPMIEKGNAKELLDPNIAGTFDEDQFHKMVLAATHCLTRAATYRPNIKEILKLLRGEDDVSKWVKIEEDDEDGFDDEVYPNSNTELHLSLAMVDVEDNDSVSNSSLERSNNSLFSSSSSSSQELQS

SEQ ID NO: 28263 - protein, 390 aa, Arabidopsis thaliana
  misc_feature (1)..(390): Ceres Seq. ID no. 2709606
MSLPERFPHHPNQTCQQSFCDKQLKDILKDINRWFSYDVLKTATSDFSLENLIGKGGCNEVYKGFLEDGKGVAVKILKPSVKEAVKEFVHEVSIVSSLSHSNISPLIGVCVHYNDLISVYNLSSKGSLEETLQVSVGKHVLRWEERLKIAIGLGEALDYLHNQCSNPVIHRDVKSSNVLLSDEFEPQLSDFGLSMWGSKSCRYTIQRDVVGTFGYLAPEYFMYGKVSDKVDVYAFGVVLLELISGRTSISSDSPRGQESLVMWAKPMIEKGNAKELLDPNIAGTFDEDQFHKMVLAATHCLTRAATYRPNIKEILKLLRGEDDVSKWVKIEEDDEDGFDDEVYPNSNTELHLSLAMVDVEDNDSVSNSSLERSNNSLFSSSSSSSQELQS

SEQ ID NO: 28264 - DNA, 1275 bp, Arabidopsis thaliana
  misc_feature (1)..(1275): Ceres Seq. ID no. 2710402
atgatttcatcgtcagagatgatggcgacggagaaggctccggaatttgtaacagccatggcaactgaaactgaacggatagggaattcgagggaagtagatgaggagaaaataagccgcaagaagaatcctgaagaagaagctcttgaagctaaatgtcttcccggaatcatcagtgcttatctcaagttaaatagttactttccttgtgcttggaaattcttacagttatcccaaggctgcggaagaaaatctgaaaaaatgcgaaagatcatatcagaagctgtctcctgcgcacaaggcattggtaacccatttccctatgaagttgcagagattaagaaggcttttgagccccctatagacttgagtaaacacatgcgcgagccaataacaggagcactgtctatggaggtaccattttcatctcatgattggttggattcttcgttacaggcgcatgttcctctggttgatgtaaataaggttcgttgggtaataaggaatatagttcgagactggggagcagagggtcagagagaacgagatgaatgctacaagcctatccttgaagagcttgattccttgtttcctgatcgtcacaaggagagcactcgtccagcctgtttagtccctggtgctggacttgggcggctggcccttgaaatttcttgtctaggcatgcaaagccaaggcaatgaagtttcatactacatgatgttatgctcaagttttattcttaattatacacaattgcctggtgagtggacaatatacccctggatacacactaactgcaattcactctcggatgatgatcaactacgccctatttctattcctgatattcatcctgcaagtgcaggagtaacagaaagtttctcaatgtgtcgtggtgattttgttgaagtattcaatgaatcaagtcaagcaggaatgtgggatgcagttgtgacttgctttttcattgacacggctcataacatcatcgagtacatcgaaaccatatccaagattttaaaggatggaggagttttgataaatctaggacctctgttgtatcactttgcagacgagcagggccttgaaaatgaaatgtcgattgagctaagtttggaggatgtaaagagagttgcttcacattatgggtttgagatggagaaagaaaaaacaatagaaacaacgtactctacaaacccccggtctatgatgaagaaccgatactatcctgtcttctggacaatgaggaagaagtgtgctataacaacaacttaa

SEQ ID NO: 28265 - protein, 424 aa, Arabidopsis thaliana
  misc_feature (1)..(424): Ceres Seq. ID no. 2710403
MISSSEMMATEKAPEFVTAMATETERIGNSREVDEEKISRKKNPEEEALEAKCLPGIISAYLKLNSYFPCAWKFLQLSQGCGRKSEKMRKIISEAVSCAQGIGNPFPYEVAEIKKAFEPPIDLSKHMREPITGALSMEVPFSSHDWLDSSLQAHVPLVDVNKVRWVIRNIVRDWGAEGQRERDECYKPILEELDSLFPDRHKESTRPACLVPGAGLGRLALEISCLGMQSQGNEVSYYMMLCSSFILNYTQLPGEWTIYPWIHTNCNSLSDDDQLRPISIPDIHPASAGVTESFSMCRGDFVEVFNESSQAGMWDAVVTCFFIDTAHNIIEYIETISKILKDGGVLINLGPLLYHFADEQGLENEMSIELSLEDVKRVASHYGFEMEKEKTIETTYSTNPRSMMKNRYYPVFWTMRKKCAITTT

SEQ ID NO: 28266 - protein, 418 aa, Arabidopsis thaliana
  misc_feature (1)..(418): Ceres Seq. ID no. 2710404
MMATEKAPEFVTAMATETERIGNSREVDEEKISRKKNPEEEALEAKCLPGIISAYLKLNSYFPCAWKFLQLSQGCGRKSEKMRKIISEAVSCAQGIGNPFPYEVAEIKKAFEPPIDLSKHMREPITGALSMEVPFSSHDWLDSSLQAHVPLVDVNKVRWVIRNIVRDWGAEGQRERDECYKPILEELDSLFPDRHKESTRPACLVPGAGLGRLALEISCLGMQSQGNEVSYYMMLCSSFILNYTQLPGEWTIYPWIHTNCNSLSDDDQLRPISIPDIHPASAGVTESFSMCRGDFVEVFNESSQAGMWDAVVTCFFIDTAHNIIEYIETISKILKDGGVLINLGPLLYHFADEQGLENEMSIELSLEDVKRVASHYGFEMEKEKTIETTYSTNPRSMMKNRYYPVFWTMRKKCAITTT

SEQ ID NO: 28267 - protein, 417 aa, Arabidopsis thaliana
  misc_feature (1)..(417): Ceres Seq. ID no. 2710405
MATEKAPEFVTAMATETERIGNSREVDEEKISRKKNPEEEALEAKCLPGIISAYLKLNSYFPCAWKFLQLSQGCGRKSEKMRKIISEAVSCAQGIGNPFPYEVAEIKKAFEPPIDLSKHMREPITGALSMEVPFSSHDWLDSSLQAHVPLVDVNKVRWVIRNIVRDWGAEGQRERDECYKPILEELDSLFPDRHKESTRPACLVPGAGLGRLALEISCLGMQSQGNEVSYYMMLCSSFILNYTQLPGEWTIYPWIHTNCNSLSDDDQLRPISIPDIHPASAGVTESFSMCRGDFVEVFNESSQAGMWDAVVTCFFIDTAHNIIEYIETISKILKDGGVLINLGPLLYHFADEQGLENEMSIELSLEDVKRVASHYGFEMEKEKTIETTYSTNPRSMMKNRYYPVFWTMRKKCAITTT

SEQ ID NO: 28268 - DNA, 1383 bp, Arabidopsis thaliana
  misc_feature (1)..(1383): Ceres Seq. ID no. 2710600
atggccaagcttttcgctagaagaggagccaaatcaactctcctcacaaccccaataaatgctaagatcttggagaaacccattgaagcattcaaagttcaaaatcctgatctcgaaatcggaatcaagatcctcaatttcccttgtgtagagcttggattgccagaaggatgcgagaaccgtgacttcattaactcataccaaaaatctgactcatttgacttgttcttgaagtttcttttctctaccaagtatatgaaacagcagttggagagtttcattgaaacaaccaaaccgagtgctcttgtagccgatatgttcttcccttgggcaacagaatccgcggagaagatcggtgttccaagacttgtgttccacggcacatcatcctttgccttgtgttgttcgtataacatgaggattcataagccacacaagaaagtcgcttcgagttctactccatttgtaatccctggtctccctggagacatagttattacagaagaccaagccaatgtcaccaacgaagaaactccattcggaaagttttggaaagaagtcagggaatcagagaccagtagctttggtgttttggtgaatagcttctacgagctggaatcatcttatgctgatttttaccgtagttttgtggcgaaaaaagcgtggcatataggtccactttcactatccaacagagggattgcagagaaagccggaagagggaaaaaggcaaacattgatgagcaagaatgcctcaaatggcttgactctaagacacctggctcagtagtttacttgtcctttggtagcggaaccggcttacccaacgaacagctgttagagattgctttcggccttgaaggctctggacaaaatttcatttgggtggttagcaaaaatgaaaaccaagttgggacaggtgaaaatgaagattggttgcctaaagggtttgaagagaggaataaaggaaaagggctgataatacgcggatgggccccgcaagtgctgatacttgaccacaaagcaatcggaggatttgtgacgcattgcggatggaactcgactttggagggcattgccgcagggctgcctatggtgacttggccgatgggggcagaacagttctacaacgagaagttattgacaaaagtgttgagaataggagtgaacgttggagctaccgagttggtgaaaaaaggaaagttgattagtagagcacaagtggagaaggcagtaagggaagtgattggtggtgagaaggcagaggaaaggcggctaagggctaaggagctgggcgagatggctaaagccgctgtggaagaaggagggtcttcttataatgatgtgaacaagtttatggaagagctgaatggtagaaagtag

SEQ ID NO: 28269 - protein, 460 aa, Arabidopsis thaliana
  misc_feature (1)..(460): Ceres Seq. ID no. 2710601
MAKLFARRGAKSTLLTTPINAKILEKPIEAFKVQNPDLEIGIKILNFPCVELGLPEGCENRDFINSYQKSDSFDLFLKFLFSTKYMKQQLESFIETTKPSALVADMFFPWATESAEKIGVPRLVFHGTSSFALCCSYNMRIHKPHKKVASSSTPFVIPGLPGDIVITEDQANVTNEETPFGKFWKEVRESETSSFGVLVNSFYELESSYADFYRSFVAKKAWHIGPLSLSNRGIAEKAGRGKKANIDEQECLKWLDSKTPGSVVYLSFGSGTGLPNEQLLEIAFGLEGSGQNFIWVVSKNENQVGTGENEDWLPKGFEERNKGKGLIIRGWAPQVLILDHKAIGGFVTHCGWNSTLEGIAAGLPMVTWPMGAEQFYNEKLLTKVLRIGVNVGATELVKKGKLISRAQVEKAVREVIGGEKAEERRLRAKELGEMAKAAVEEGGSSYNDVNKFMEELNGRK

SEQ ID NO: 28270 - protein, 375 aa, Arabidopsis thaliana
  misc_feature (1)..(375): Ceres Seq. ID no. 2710602
MKQQLESFIETTKPSALVADMFFPWATESAEKIGVPRLVFHGTSSFALCCSYNMRIHKPHKKVASSSTPFVIPGLPGDIVITEDQANVTNEETPFGKFWKEVRESETSSFGVLVNSFYELESSYADFYRSFVAKKAWHIGPLSLSNRGIAEKAGRGKKANIDEQECLKWLDSKTPGSVVYLSFGSGTGLPNEQLLEIAFGLEGSGQNFIWVVSKNENQVGTGENEDWLPKGFEERNKGKGLIIRGWAPQVLILDHKAIGGFVTHCGWNSTLEGIAAGLPMVTWPMGAEQFYNEKLLTKVLRIGVNVGATELVKKGKLISRAQVEKAVREVIGGEKAEERRLRAKELGEMAKAAVEEGGSSYNDVNKFMEELNGRK

SEQ ID NO: 28271 - protein, 355 aa, Arabidopsis thaliana
  misc_feature (1)..(355): Ceres Seq. ID no. 2710603
MFFPWATESAEKIGVPRLVFHGTSSFALCCSYNMRIHKPHKKVASSSTPFVIPGLPGDIVITEDQANVTNEETPFGKFWKEVRESETSSFGVLVNSFYELESSYADFYRSFVAKKAWHIGPLSLSNRGIAEKAGRGKKANIDEQECLKWLDSKTPGSVVYLSFGSGTGLPNEQLLEIAFGLEGSGQNFIWVVSKNENQVGTGENEDWLPKGFEERNKGKGLIIRGWAPQVLILDHKAIGGFVTHCGWNSTLEGIAAGLPMVTWPMGAEQFYNEKLLTKVLRIGVNVGATELVKKGKLISRAQVEKAVREVIGGEKAEERRLRAKELGEMAKAAVEEGGSSYNDVNKFMEELNGRK

SEQ ID NO: 28272 - DNA, 1191 bp, Arabidopsis thaliana
  misc_feature (1)..(1191): Ceres Seq. ID no. 2710940
atgatgattgctcgttttgtgctcagcattctaatcgtagcggcgatagtttctggtagtgagttttctgatactcgtgatgcaaaagtagaaaaaatcttaaagaaactcaacaaacctgctcttaaatctatcaagagtccagatggagatataatagactgcgttcatatgaataatcatccaatttatgatcatcctttattcaaaaactacacgattcagatgaaaccaagttcttaccctaaaggtaaaaataatgaatcttcagacaaagagaaacaaagtgttgtgactcaactatggacagttaacgggaaatgccccaaaaacagtattccgatcagaagaacgagaagaaaagaaattttgcgaaccgaatatatgcaaagatatgacaaaaagaatccaaacataataaatcatcctaaagcatcaactagtaactccatacatgagtacgcgcaaatccaagcgaaaggaaagtttcatggagcccatgcggatataaatgtttggaaaccttttgtacaaacaccaaaagagtttagcctagcacaaatgtgggttatggctggtccgttttctgaagttaatagcgttgaagctggttggcaggtgtatcaagatcgttatggcgatgacaacccaagatactttattttttggactgcggatgggtaccactcaggctgttacaatcttgattgccaaggatttgttcctgtcagccaaaaatttgcccttggtgcagccgttagcaatgtttccaccttcgatggtcaacaataccatatttccacaactatatggaaggatccaaattcagggaattggtggttaaaatttggtgatgaatttgtcggatattggccttccatattgttcaaccatctaaaagatggtgcgacagaaattcagtggggaggtgaaataataaattttaaagatggtgcactacacaccacgacgagaatggggagtggacattttgcagagtctggatatcaaaaagcaagttatttcaaggatgttgagataattgatgaacgtgatattcatagtagtcctaaagaaggttattcttatatgacgcaagagagttgttataacatcaggtctggctatgctaaagtatggggagtttatttttattatggtggcccaggtcgaaatctgaattgtaaataa

SEQ ID NO: 28273 - protein, 396 aa, Arabidopsis thaliana
  misc_feature (1)..(396): Ceres Seq. ID no. 2710941
MMIARFVLSILIVAAIVSGSEFSDTRDAKVEKILKKLNKPALKSIKSPDGDIIDCVHMNNHPIYDHPLFKNYTIQMKPSSYPKGKNNESSDKEKQSVVTQLWTVNGKCPKNSIPIRRTRRKEILRTEYMQRYDKKNPNIINHPKASTSNSIHEYAQIQAKGKFHGAHADINVWKPFVQTPKEFSLAQMWVMAGPFSEVNSVEAGWQVYQDRYGDDNPRYFIFWTADGYHSGCYNLDCQGFVPVSQKFALGAAVSNVSTFDGQQYHISTTIWKDPNSGNWWLKFGDEFVGYWPSILFNHLKDGATEIQWGGEIINFKDGALHTTTRMGSGHFAESGYQKASYFKDVEIIDERDIHSSPKEGYSYMTQESCYNIRSGYAKVWGVYFYYGGPGRNLNCK

SEQ ID NO: 28274 - protein, 395 aa, Arabidopsis thaliana
  misc_feature (1)..(395): Ceres Seq. ID no. 2710942
MIARFVLSILIVAAIVSGSEFSDTRDAKVEKILKKLNKPALKSIKSPDGDIIDCVHMNNHPIYDHPLFKNYTIQMKPSSYPKGKNNESSDKEKQSVVTQLWTVNGKCPKNSIPIRRTRRKEILRTEYMQRYDKKNPNIINHPKASTSNSIHEYAQIQAKGKFHGAHADINVWKPFVQTPKEFSLAQMWVMAGPFSEVNSVEAGWQVYQDRYGDDNPRYFIFWTADGYHSGCYNLDCQGFVPVSQKFALGAAVSNVSTFDGQQYHISTTIWKDPNSGNWWLKFGDEFVGYWPSILFNHLKDGATEIQWGGEIINFKDGALHTTTRMGSGHFAESGYQKASYFKDVEIIDERDIHSSPKEGYSYMTQESCYNIRSGYAKVWGVYFYYGGPGRNLNCK

SEQ ID NO: 28275 - protein, 339 aa, Arabidopsis thaliana
  misc_feature (1)..(339): Ceres Seq. ID no. 2710943
MNNHPIYDHPLFKNYTIQMKPSSYPKGKNNESSDKEKQSVVTQLWTVNGKCPKNSIPIRRTRRKEILRTEYMQRYDKKNPNIINHPKASTSNSIHEYAQIQAKGKFHGAHADINVWKPFVQTPKEFSLAQMWVMAGPFSEVNSVEAGWQVYQDRYGDDNPRYFIFWTADGYHSGCYNLDCQGFVPVSQKFALGAAVSNVSTFDGQQYHISTTIWKDPNSGNWWLKFGDEFVGYWPSILFNHLKDGATEIQWGGEIINFKDGALHTTTRMGSGHFAESGYQKASYFKDVEIIDERDIHSSPKEGYSYMTQESCYNIRSGYAKVWGVYFYYGGPGRNLNCK

SEQ ID NO: 28276 - DNA, 1551 bp, Arabidopsis thaliana
  misc_feature (1)..(1551): Ceres Seq. ID no. 2711040
atgttctctcaggctcagagcaagaagcagtttaagaggtctatgactaagaaatcacattcatggtggtgggatagtcacaattgtcccaagaactcaaaatggcttgcagagaatctagaaaagatggatgatcgagtgaaccacatgttaaaactgattgaagaagacgcagactcttttgcaaagaaagctcagatgtattttcagaaacgtcccgagttaatccagcttgtcgaggaattctaccgcatgtatcgcgcattggctgagcgttatgatcaagctagtggtgaacttcagaagaaccatacatctgagatccagtcacagagctctcttgagatatcatctcctaccaaagagaagttgagtcgccgtcaatctagccataaagaagaggaagattcatcgtctttgacagattctggttctgattctgatcattcctctgccaatgatgaagacggtgacgaggcattgatccgtagaatggctgaacttgagcttgagcttcaagagacgaaacagaagctccttctccagcaggaaagtgttgatggtgacaacaatgttgatctccttcacaaaattactacatatgagggagagcttaaagaagctaatgagaagatgcgaatgcacgaagacgagattgctaatctgaagaatcagcttcagagcttcatgtcttttgacacagaggatcatcttggtgctgaacaaaagagtgttgatttggataaagaggacactaaagaagatgcagtagctacaaaagtgctagccttggaggaagagctgagtatcgcgaaagagaagcttcagcactttgagaaagagacttattctctgaaaaatgagctcgagatcggcaaagccgctgaggagaagctgaagagcttacaacatgagctcgagttggctcagagagacgctgatacctacataaacaagctcaacgcagagaagaaagaagtcttgaagttgcaggagagattggcaatggtgaaaactagtttacaggatagagataacgagataagggcattgaaaactgcggtttcagacgctgaacagaagatattccccgaaaaagcacagatcaagggagaaatgtcgaagatgcttgaagaacgaagccaacttggagagcaactgagagagctggaatcacatataaggctgatcaaggaagagaaagctgaaacagaggagaagcttagaggaggaactgagaaaatcagcggaatgagagacgagagcaatgtgctaagagaagagattgggaagagagaagagaagataaaggaaacggaaaagcatatggaggagcttcacatggagcaagtgaggctgagaagacggtcaagtgagcttacggaagaagtggaaaggacgagagtgtctgcatcggaaatggctgagcagaaaagagaagctataagacagctttgtatgtctcttgaccattacagagatgggtacgacagactttggagagttgttgcaggacataagagtaagagagtagtggtcttatcaacttga

SEQ ID NO: 28277 - protein, 516 aa, Arabidopsis thaliana
  misc_feature (1)..(516): Ceres Seq. ID no. 2711041
MFSQAQSKKQFKRSMTKKSHSWWWDSHNCPKNSKWLAENLEKMDDRVNHMLKLIEEDADSFAKKAQMYFQKRPELIQLVEEFYRMYRALAERYDQASGELQKNHTSEIQSQSSLEISSPTKEKLSRRQSSHKEEEDSSSLTDSGSDSDHSSANDEDGDEALIRRMAELELELQETKQKLLLQQESVDGDNNVDLLHKITTYEGELKEANEKMRMHEDEIANLKNQLQSFMSFDTEDHLGAEQKSVDLDKEDTKEDAVATKVLALEEELSIAKEKLQHFEKETYSLKNELEIGKAAEEKLKSLQHELELAQRDADTYINKLNAEKKEVLKLQERLAMVKTSLQDRDNEIRALKTAVSDAEQKIFPEKAQIKGEMSKMLEERSQLGEQLRELESHIRLIKEEKAETEEKLRGGTEKISGMRDESNVLREEIGKREEKIKETEKHMEELHMEQVRLRRRSSELTEEVERTRVSASEMAEQKREAIRQLCMSLDHYRDGYDRLWRVVAGHKSKRVVVLST

SEQ ID NO: 28278 - protein, 502 aa, Arabidopsis thaliana
  misc_feature (1)..(502): Ceres Seq. ID no. 2711042
MTKKSHSWWWDSHNCPKNSKWLAENLEKMDDRVNHMLKLIEEDADSFAKKAQMYFQKRPELIQLVEEFYRMYRALAERYDQASGELQKNHTSEIQSQSSLEISSPTKEKLSRRQSSHKEEEDSSSLTDSGSDSDHSSANDEDGDEALIRRMAELELELQETKQKLLLQQESVDGDNNVDLLHKITTYEGELKEANEKMRMHEDEIANLKNQLQSFMSFDTEDHLGAEQKSVDLDKEDTKEDAVATKVLALEEELSIAKEKLQHFEKETYSLKNELEIGKAAEEKLKSLQHELELAQRDADTYINKLNAEKKEVLKLQERLAMVKTSLQDRDNEIRALKTAVSDAEQKIFPEKAQIKGEMSKMLEERSQLGEQLRELESHIRLIKEEKAETEEKLRGGTEKISGMRDESNVLREEIGKREEKIKETEKHMEELHMEQVRLRRRSSELTEEVERTRVSASEMAEQKREAIRQLCMSLDHYRDGYDRLWRVVAGHKSKRVVVLST

SEQ ID NO: 28279 - protein, 474 aa, Arabidopsis thaliana
  misc_feature (1)..(474): Ceres Seq. ID no. 2711043
MDDRVNHMLKLIEEDADSFAKKAQMYFQKRPELIQLVEEFYRMYRALAERYDQASGELQKNHTSEIQSQSSLEISSPTKEKLSRRQSSHKEEEDSSSLTDSGSDSDHSSANDEDGDEALIRRMAELELELQETKQKLLLQQESVDGDNNVDLLHKITTYEGELKEANEKMRMHEDEIANLKNQLQSFMSFDTEDHLGAEQKSVDLDKEDTKEDAVATKVLALEEELSIAKEKLQHFEKETYSLKNELEIGKAAEEKLKSLQHELELAQRDADTYINKLNAEKKEVLKLQERLAMVKTSLQDRDNEIRALKTAVSDAEQKIFPEKAQIKGEMSKMLEERSQLGEQLRELESHIRLIKEEKAETEEKLRGGTEKISGMRDESNVLREEIGKREEKIKETEKHMEELHMEQVRLRRRSSELTEEVERTRVSASEMAEQKREAIRQLCMSLDHYRDGYDRLWRVVAGHKSKRVVVLST

SEQ ID NO: 28280 - DNA, 6906 bp, Arabidopsis thaliana
  misc_feature (1)..(6906): Ceres Seq. ID no. 2711345
atggagttcgcaaacacgaaatgggtggctgcagcggcgagcatatggatacaaagcttcagcggagcaagctacacttttggaatttattcttctgttcttaaatcatctcaatcttatgaccaatctactcttgacaccgtctctgtctacaaagacatcggagcaaacgtaggcatcctctccggcctcttctataccgcggttgcaagccgaaaaagcggtaatggtggcttctttagtgggccatggttggttatatttgtggggctactccaatggttcgtcggatatggattcatatggatggcgacgtcaggagtgatcccacggcctcccgtggctatgatgtgtttgttcatgttcttcgctggtcattgtcagcctttctttaataccgcgattgtggtcaccgccgttcgtaacttctccgactatggtgggaccgccgttggcattatgaagggttatcttggactaagtggagcaattctggttcaaatgtaccacatcttctgtggaggtgacccaaggaattacattcttctcttggccgtggtaccatcacttctcatcttgacgttgatgcccttcgttagaacgtacgacacagtcatcgcaggcgacaagaaacacttgaacggtctctctgccatttctttgatcatcgtcacctatcttatggtcgtcatattggtcgaaaacattatcggaatgtcaatgcctatgaagatatgttcctttacctttctacttctcttgctcgcctctcctctcttagtggcggttagagcacaacgtgaagaggaacatagattcttgtctttggattttcctgttaccgagagaaccacattgcttgactctcctaagctcaattcttcttccgatgttaaagatgtcatgaccaatgacatgaacgttctcgaagcaatatgcacaacgaatttctggcttctatttgtagcaatgatatgtggaatgggttcaggacttgcgacaataaacaacatcagacagatgggcgagtcacttcgctactctacggttcaactcaattctctagtgtctctgtggagcatatggaactttctaggccggtttgggtcgggttacatctcagacacctatttacacagtcatggctggccaagaccggtattcatggccataacccttggccttatggctataggtcacattgtcatggcctccggtttactaggaagcctatatatcggatccttgttggtcggtttagcgtacggctcccaatggtcactcatgccaacaataacctctgaaatattcggggttcttcatatgggaactatattctatacaatttcgatagctagtccggttggttcgtactttttctcagtgaaggtaataggctacttgtatgacaaggtagcttctgaagatgatcattcttgttatggaaatcactgttttaggacttcgtttttgataatggcggccatggctctgcttggttctcttgtcgctcttgtgttgctcctccgcacaaagaagttttatgcgacgcttgtggctaagaggatcttgaaaaatttgataatttgtgtgcgaaaattgactagtggtctcgccgcttgccagttgccacaagtcaaaagtttcgaaattttggttgttaaaattgttttcaagattttgaatggaaatggcgatttagcggcagataaagagcgatgcggttctgataataacgaatatactattgaaaaccaaaccgtatcgctgtttcgtctcgttcaaagatttagtaataattcatatttatatgattatattaaactaaaattgaaagcattggagacaatggagagaataaacacgaaatgggtagcagcagcagcgagtatatggattcaaagctttagcggagctacatacacattcgctatctactcttcaatcctcaaatcatctcaatcttatgaccagtctactcttgatttcgtctctgtcttcaaagacatcggtggtacctttggtatcatctccggtttcctttacacggctatgacttctaagtcacgcggttttggtgggccttgggttgttgttttcgttgggttggttcagtggtttgttggattcttttttatttgggcttcggtggttgggttgattgctccgccgcctgtgccgttgatgtgcttgttcgtgttcttggctggtcactccttgccgtttttcaatacggctaatgttgtgacggctgctcggaacttttctcaatatggtgggactgctgttggtattatgcagggatttttaggactaagtggagcaattctgattcagttgtaccatgcggtctgcggtggtgaaggtaaccccgctactttcattcttctcctggccatagtaccaacgcttgtcatgttcttggctatgccttttgtaagagtttatgaaacggtgaccattagtgacaagaaacacttggatggtctctctgcgatctctatgatcattgccgcctatcttatggtcgttataacggttgaaaacgttctcggtttatcacgctcaatgcagattttctccttcatccttgtccttttgttgcttgcctctcccctcttggttgctgtaagagccctacgagaaaaaaggcagacactttcttctctggatggtcctgttctcgacacatctgccttgctcgaccctcctagttcaaacatttttcccgatggagatcatttggttgctgaagattcaaacatactggaagcaatgagcacagtgaacttttggctactcttcttggcaatgctatgcgggatgggttctggattcgcgactgtaaacaacatgagacagataggcgagtctcttcgctactcttctgttcaactcaattctctagtctctctctggagcatatggaactttctgggccggttcggggctggttatgtctcagacacattcttacacaaacacagctggccaagaccgatcttcatggccataactctaggtgttatggctataggccatatcatagttgcctctggtgtacaaggcagtctctatgccggttcagttttgatcggtatggcttacggttcgcaatggtcgctgatgccaacaatcacatcagagatatttgggatccggcatatgggaacgatttacttcacgatttcgattgcaggtcccatcgggtcgtacatcctctctgtgaaagtgataggttacttctacgacaaagtggcttctgaagatgacaattcttgctttggaagtcaatgtttcaggacatcttttatgatcatggcttctgtggctctctttggctctttggttgcttctgtattgttcttccgcacacacaagttttacaaaaaccttgtagcaaagaggaacttgaagtcgctagacagcctcttttcagcacatgctgaaccacctgtagatgtcgtccagccacatattgtcatcctttcccttgtgttccctaaagtctcagcaggagtactgaagagggatgggttggctttgcgtctcgtcctcaatgttctgcgtctgaaatcagccacgcctgagtgcttgatttcgggattgaagtgtttggttcaccttctcacaacggttgagtccattatggtgaacgaaggctctgattcctacaacatcttactgaattttgtaactcattcagacggaaaggtaagaaagctagcaagctcctgtctccgtgatgtcctgcagaaatcccatggaacaaaggcctggcaatcagtcagtggagctattacagaaatgttccagaactatttagacctcgcccataaatcggaagtgggttctaccgaaggagccagaggggcaaagcaagtgctttacattcttagcactctaaaagaatgcttggccttgatgtcaaaaaagcacattgctactctgattgagggatttaaggtgctgatgattcttcgcgatccatacattacaaggccagtgatagactctttaaatgcagtttgtctcaatccaacctccgaggttccggttgaggcgctgctcgaagtgttatctcttgcggctggactgttctcgggacatgaaacatctgctgatgccatgacctttacagcacgtttactgaaagttgggatgactaggagttttaccctaaacagagatctttgtgtggttaaacttcctagtgtgttcaatggtctgaatgatattattgcatctgaacacgaggaggctatctttgcagcaactgatgcgttgaagagtttgatattttcatgtattgacgaaagcttgatcagagaaggtgtcaatgaaatccggaattcaaacttgaatgtaaggaagcctagtccaacagtcatcgaaaagctgtgtgcaacagttgagagcttgcttgattacaagtaccatgcagtctgggatatggcttttcaagtagtttcagcaatgtttgataaattaggtgaacattctgcatattttatgaggaacaccctccagggtttatctgatatgcaagatttacctgatgaaggatttccttaccggaagcagttgcatgagtgtgtaggatcagcccttggtgctatgggacctgaaacatttttaagcattgtgcgtttaaaccttgaagctaatgatctgtctgaggtaaaagtttggctcttcccaatcttgaagcagtacacagttggaggacgcctaagtttcttcacagaggctatttttagcatggtcgaaacaatgagccacaaagctcaaaagctcaagctacaaggtcttcctgtagcatccaggagtgtggattctctcgtatattcattatgggctttgttaccttcattctgtaattatcccgtggatactgtggagagttttgccgatctggggcgaatattatgtggagttcttcaaacacaggctgagacccatggaattatatgtgccagtttgaatattctgattcaacaaaataaggaagttgttgaggggaaagaagtacctactaatgatgctagtcctgctatgcaacgagctactgctcgttatgattcacagcatgcggcagctaatttaaaagttctgcggttatgtgctcctaaattattggatgttttgtcaaggatatttcatgaatgtagcaaagatgatggcggttctcttcagtctgcgataggtaacttagcttccatagcggagaaaaagactgtttcaaagctacttttcaagactctgcaagagcttttagaggctaccaaaactgccattgcacaagatgaaagtcctgttagtgggatggatgtggataacaccgcagacaaaaattcttcttccaacttaagggcaaggttgtttgatctgttagtttcactcttaccgggtttggatggtcaagaagtagataccatattcagttctctgaagcctgcaatgcaggattccaagggcctaattcaaaagaaagcgtacaaagttctttcggtcattttgaagagttctgatggatttgtttcaaagaacctcgaggagttgcttgtgctgatgcacaatatatgccatgtctctgccaaacgccataaacttgattgtttatacttcctgttagctcatgcatcaaggactgatgatttaaaggagagaaaagacattgtttcttcttttctacccgaagttatacttgctttaaaggaggtaaataaaaaaacaagaaacagagcctatgacgtgcttgttcagattggtcatgcatacgcagatgaggagaatggtggagacaacgagaagttgcatgggtacttcgatatggtggttggttgcttggctggcgaaaaacctcaaatgattagtgctgctgtcaagggtgtagctcgtttgacatatgagttctccgatctcatatctagtgcttacaatttacttccttcaacatttcttctcctccagaggaaaaataaagaaattacaaaagtgaggcttctgttggagatgctcatcaagaaatgtggcacggaggctgtcaagtctgtgatgcctgaggaacatatgaaactcctgacaaacatccgaaagatcaaggaacgtaaagagaaaaaatatgcagctggctctgacatcagtaaatcgcagcattcaaaagatacttcatcaaaggttagcaggtggaatgataccaagatattttctgatgtatacgcggacagtgaggacagtgacggagacgacatggatgcggagtctcatggccgcagcaaggcttcctctttgttaaaatccaaggcatccgctttgagatccaagaaaagtcggaaccagagtcatcttgaagtggatgagtcagatgatgaaccgcttgacttaatggatcagcacaaaacaagattagctcttcggtcaagtgaacttcgcaaacggaaagctgactcggatgaagaagcagagtttgatgtggaagggcggctagttattcgtgaaggagagaggtctaaaaggaaggaactatctgatgcagattcagatgccaaaagtagcaaaggcagccgtttctctggaaactcatccaagaagaaccaaaagcggatgaagacatcagagtctggatacgcttacacaggcaaagagtatgcaagcaaaaaggcaagtggcgatcttaagaagaaagataaacttgaaccatatgcctattggccactcgatcgcaagatgatgagccgtagaccagagcaacgggcagttgcagtgagagggatgtcaagtgtggtcaagatggcaaagaaaatggaaggcaagagcgctgcagaagcacttgccaccaccaagttcaaaaaattcaagaggagtggtcagaagaaatcagctgggaagaagaaaaacaagtaa

SEQ ID NO: 28281 - protein, 2301 aa, Arabidopsis thaliana
  misc_feature (1)..(2301): Ceres Seq. ID no. 2711346
MEFANTKWVAAAASIWIQSFSGASYTFGIYSSVLKSSQSYDQSTLDTVSVYKDIGANVGILSGLFYTAVASRKSGNGGFFSGPWLVIFVGLLQWFVGYGFIWMATSGVIPRPPVAMMCLFMFFAGHCQPFFNTAIVVTAVRNFSDYGGTAVGIMKGYLGLSGAILVQMYHIFCGGDPRNYILLLAVVPSLLILTLMPFVRTYDTVIAGDKKHLNGLSAISLIIVTYLMVVILVENIIGMSMPMKICSFTFLLLLLASPLLVAVRAQREEEHRFLSLDFPVTERTTLLDSPKLNSSSDVKDVMTNDMNVLEAICTTNFWLLFVAMICGMGSGLATINNIRQMGESLRYSTVQLNSLVSLWSIWNFLGRFGSGYISDTYLHSHGWPRPVFMAITLGLMAIGHIVMASGLLGSLYIGSLLVGLAYGSQWSLMPTITSEIFGVLHMGTIFYTISIASPVGSYFFSVKVIGYLYDKVASEDDHSCYGNHCFRTSFLIMAAMALLGSLVALVLLLRTKKFYATLVAKRILKNLIICVRKLTSGLAACQLPQVKSFEILVVKIVFKILNGNGDLAADKERCGSDNNEYTIENQTVSLFRLVQRFSNNSYLYDYIKLKLKALETMERINTKWVAAAASIWIQSFSGATYTFAIYSSILKSSQSYDQSTLDFVSVFKDIGGTFGIISGFLYTAMTSKSRGFGGPWVVVFVGLVQWFVGFFFIWASVVGLIAPPPVPLMCLFVFLAGHSLPFFNTANVVTAARNFSQYGGTAVGIMQGFLGLSGAILIQLYHAVCGGEGNPATFILLLAIVPTLVMFLAMPFVRVYETVTISDKKHLDGLSAISMIIAAYLMVVITVENVLGLSRSMQIFSFILVLLLLASPLLVAVRALREKRQTLSSLDGPVLDTSALLDPPSSNIFPDGDHLVAEDSNILEAMSTVNFWLLFLAMLCGMGSGFATVNNMRQIGESLRYSSVQLNSLVSLWSIWNFLGRFGAGYVSDTFLHKHSWPRPIFMAITLGVMAIGHIIVASGVQGSLYAGSVLIGMAYGSQWSLMPTITSEIFGIRHMGTIYFTISIAGPIGSYILSVKVIGYFYDKVASEDDNSCFGSQCFRTSFMIMASVALFGSLVASVLFFRTHKFYKNLVAKRNLKSLDSLFSAHAEPPVDVVQPHIVILSLVFPKVSAGVLKRDGLALRLVLNVLRLKSATPECLISGLKCLVHLLTTVESIMVNEGSDSYNILLNFVTHSDGKVRKLASSCLRDVLQKSHGTKAWQSVSGAITEMFQNYLDLAHKSEVGSTEGARGAKQVLYILSTLKECLALMSKKHIATLIEGFKVLMILRDPYITRPVIDSLNAVCLNPTSEVPVEALLEVLSLAAGLFSGHETSADAMTFTARLLKVGMTRSFTLNRDLCVVKLPSVFNGLNDIIASEHEEAIFAATDALKSLIFSCIDESLIREGVNEIRNSNLNVRKPSPTVIEKLCATVESLLDYKYHAVWDMAFQVVSAMFDKLGEHSAYFMRNTLQGLSDMQDLPDEGFPYRKQLHECVGSALGAMGPETFLSIVRLNLEANDLSEVKVWLFPILKQYTVGGRLSFFTEAIFSMVETMSHKAQKLKLQGLPVASRSVDSLVYSLWALLPSFCNYPVDTVESFADLGRILCGVLQTQAETHGIICASLNILIQQNKEVVEGKEVPTNDASPAMQRATARYDSQHAAANLKVLRLCAPKLLDVLSRIFHECSKDDGGSLQSAIGNLASIAEKKTVSKLLFKTLQELLEATKTAIAQDESPVSGMDVDNTADKNSSSNLRARLFDLLVSLLPGLDGQEVDTIFSSLKPAMQDSKGLIQKKAYKVLSVILKSSDGFVSKNLEELLVLMHNICHVSAKRHKLDCLYFLLAHASRTDDLKERKDIVSSFLPEVILALKEVNKKTRNRAYDVLVQIGHAYADEENGGDNEKLHGYFDMVVGCLAGEKPQMISAAVKGVARLTYEFSDLISSAYNLLPSTFLLLQRKNKEITKVRLLLEMLIKKCGTEAVKSVMPEEHMKLLTNIRKIKERKEKKYAAGSDISKSQHSKDTSSKVSRWNDTKIFSDVYADSEDSDGDDMDAESHGRSKASSLLKSKASALRSKKSRNQSHLEVDESDDEPLDLMDQHKTRLALRSSELRKRKADSDEEAEFDVEGRLVIREGERSKRKELSDADSDAKSSKGSRFSGNSSKKNQKRMKTSESGYAYTGKEYASKKASGDLKKKDKLEPYAYWPLDRKMMSRRPEQRAVAVRGMSSVVKMAKKMEGKSAAEALATTKFKKFKRSGQKKSAGKKKNK

SEQ ID NO: 28282 - protein, 2199 aa, Arabidopsis thaliana
  misc_feature (1)..(2199): Ceres Seq. ID no. 2711347
MATSGVIPRPPVAMMCLFMFFAGHCQPFFNTAIVVTAVRNFSDYGGTAVGIMKGYLGLSGAILVQMYHIFCGGDPRNYILLLAVVPSLLILTLMPFVRTYDTVIAGDKKHLNGLSAISLIIVTYLMVVILVENIIGMSMPMKICSFTFLLLLLASPLLVAVRAQREEEHRFLSLDFPVTERTTLLDSPKLNSSSDVKDVMTNDMNVLEAICTTNFWLLFVAMICGMGSGLATINNIRQMGESLRYSTVQLNSLVSLWSIWNFLGRFGSGYISDTYLHSHGWPRPVFMAITLGLMAIGHIVMASGLLGSLYIGSLLVGLAYGSQWSLMPTITSEIFGVLHMGTIFYTISIASPVGSYFFSVKVIGYLYDKVASEDDHSCYGNHCFRTSFLIMAAMALLGSLVALVLLLRTKKFYATLVAKRILKNLIICVRKLTSGLAACQLPQVKSFEILVVKIVFKILNGNGDLAADKERCGSDNNEYTIENQTVSLFRLVQRFSNNSYLYDYIKLKLKALETMERINTKWVAAAASIWIQSFSGATYTFAIYSSILKSSQSYDQSTLDFVSVFKDIGGTFGIISGFLYTAMTSKSRGFGGPWVVVFVGLVQWFVGFFFIWASVVGLIAPPPVPLMCLFVFLAGHSLPFFNTANVVTAARNFSQYGGTAVGIMQGFLGLSGAILIQLYHAVCGGEGNPATFILLLAIVPTLVMFLAMPFVRVYETVTISDKKHLDGLSAISMIIAAYLMVVITVENVLGLSRSMQIFSFILVLLLLASPLLVAVRALREKRQTLSSLDGPVLDTSALLDPPSSNIFPDGDHLVAEDSNILEAMSTVNFWLLFLAMLCGMGSGFATVNNMRQIGESLRYSSVQLNSLVSLWSIWNFLGRFGAGYVSDTFLHKHSWPRPIFMAITLGVMAIGHIIVASGVQGSLYAGSVLIGMAYGSQWSLMPTITSEIFGIRHMGTIYFTISIAGPIGSYILSVKVIGYFYDKVASEDDNSCFGSQCFRTSFMIMASVALFGSLVASVLFFRTHKFYKNLVAKRNLKSLDSLFSAHAEPPVDVVQPHIVILSLVFPKVSAGVLKRDGLALRLVLNVLRLKSATPECLISGLKCLVHLLTTVESIMVNEGSDSYNILLNFVTHSDGKVRKLASSCLRDVLQKSHGTKAWQSVSGAITEMFQNYLDLAHKSEVGSTEGARGAKQVLYILSTLKECLALMSKKHIATLIEGFKVLMILRDPYITRPVIDSLNAVCLNPTSEVPVEALLEVLSLAAGLFSGHETSADAMTFTARLLKVGMTRSFTLNRDLCVVKLPSVFNGLNDIIASEHEEAIFAATDALKSLIFSCIDESLIREGVNEIRNSNLNVRKPSPTVIEKLCATVESLLDYKYHAVWDMAFQVVSAMFDKLGEHSAYFMRNTLQGLSDMQDLPDEGFPYRKQLHECVGSALGAMGPETFLSIVRLNLEANDLSEVKVWLFPILKQYTVGGRLSFFTEAIFSMVETMSHKAQKLKLQGLPVASRSVDSLVYSLWALLPSFCNYPVDTVESFADLGRILCGVLQTQAETHGIICASLNILIQQNKEVVEGKEVPTNDASPAMQRATARYDSQHAAANLKVLRLCAPKLLDVLSRIFHECSKDDGGSLQSAIGNLASIAEKKTVSKLLFKTLQELLEATKTAIAQDESPVSGMDVDNTADKNSSSNLRARLFDLLVSLLPGLDGQEVDTIFSSLKPAMQDSKGLIQKKAYKVLSVILKSSDGFVSKNLEELLVLMHNICHVSAKRHKLDCLYFLLAHASRTDDLKERKDIVSSFLPEVILALKEVNKKTRNRAYDVLVQIGHAYADEENGGDNEKLHGYFDMVVGCLAGEKPQMISAAVKGVARLTYEFSDLISSAYNLLPSTFLLLQRKNKEITKVRLLLEMLIKKCGTEAVKSVMPEEHMKLLTNIRKIKERKEKKYAAGSDISKSQHSKDTSSKVSRWNDTKIFSDVYADSEDSDGDDMDAESHGRSKASSLLKSKASALRSKKSRNQSHLEVDESDDEPLDLMDQHKTRLALRSSELRKRKADSDEEAEFDVEGRLVIREGERSKRKELSDADSDAKSSKGSRFSGNSSKKNQKRMKTSESGYAYTGKEYASKKASGDLKKKDKLEPYAYWPLDRKMMSRRPEQRAVAVRGMSSVVKMAKKMEGKSAAEALATTKFKKFKRSGQKKSAGKKKNK

SEQ ID NO: 28283 - protein, 2186 aa, Arabidopsis thaliana
  misc_feature (1)..(2186): Ceres Seq. ID no. 2711348
MMCLFMFFAGHCQPFFNTAIVVTAVRNFSDYGGTAVGIMKGYLGLSGAILVQMYHIFCGGDPRNYILLLAVVPSLLILTLMPFVRTYDTVIAGDKKHLNGLSAISLIIVTYLMVVILVENIIGMSMPMKICSFTFLLLLLASPLLVAVRAQREEEHRFLSLDFPVTERTTLLDSPKLNSSSDVKDVMTNDMNVLEAICTTNFWLLFVAMICGMGSGLATINNIRQMGESLRYSTVQLNSLVSLWSIWNFLGRFGSGYISDTYLHSHGWPRPVFMAITLGLMAIGHIVMASGLLGSLYIGSLLVGLAYGSQWSLMPTITSEIFGVLHMGTIFYTISIASPVGSYFFSVKVIGYLYDKVASEDDHSCYGNHCFRTSFLIMAAMALLGSLVALVLLLRTKKFYATLVAKRILKNLIICVRKLTSGLAACQLPQVKSFEILVVKIVFKILNGNGDLAADKERCGSDNNEYTIENQTVSLFRLVQRFSNNSYLYDYIKLKLKALETMERINTKWVAAAASIWIQSFSGATYTFAIYSSILKSSQSYDQSTLDFVSVFKDIGGTFGIISGFLYTAMTSKSRGFGGPWVVVFVGLVQWFVGFFFIWASVVGLIAPPPVPLMCLFVFLAGHSLPFFNTANVVTAARNFSQYGGTAVGIMQGFLGLSGAILIQLYHAVCGGEGNPATFILLLAIVPTLVMFLAMPFVRVYETVTISDKKHLDGLSAISMIIAAYLMVVITVENVLGLSRSMQIFSFILVLLLLASPLLVAVRALREKRQTLSSLDGPVLDTSALLDPPSSNIFPDGDHLVAEDSNILEAMSTVNFWLLFLAMLCGMGSGFATVNNMRQIGESLRYSSVQLNSLVSLWSIWNFLGRFGAGYVSDTFLHKHSWPRPIFMAITLGVMAIGHIIVASGVQGSLYAGSVLIGMAYGSQWSLMPTITSEIFGIRHMGTIYFTISIAGPIGSYILSVKVIGYFYDKVASEDDNSCFGSQCFRTSFMIMASVALFGSLVASVLFFRTHKFYKNLVAKRNLKSLDSLFSAHAEPPVDVVQPHIVILSLVFPKVSAGVLKRDGLALRLVLNVLRLKSATPECLISGLKCLVHLLTTVESIMVNEGSDSYNILLNFVTHSDGKVRKLASSCLRDVLQKSHGTKAWQSVSGAITEMFQNYLDLAHKSEVGSTEGARGAKQVLYILSTLKECLALMSKKHIATLIEGFKVLMILRDPYITRPVIDSLNAVCLNPTSEVPVEALLEVLSLAAGLFSGHETSADAMTFTARLLKVGMTRSFTLNRDLCVVKLPSVFNGLNDIIASEHEEAIFAATDALKSLIFSCIDESLIREGVNEIRNSNLNVRKPSPTVIEKLCATVESLLDYKYHAVWDMAFQVVSAMFDKLGEHSAYFMRNTLQGLSDMQDLPDEGFPYRKQLHECVGSALGAMGPETFLSIVRLNLEANDLSEVKVWLFPILKQYTVGGRLSFFTEAIFSMVETMSHKAQKLKLQGLPVASRSVDSLVYSLWALLPSFCNYPVDTVESFADLGRILCGVLQTQAETHGIICASLNILIQQNKEVVEGKEVPTNDASPAMQRATARYDSQHAAANLKVLRLCAPKLLDVLSRIFHECSKDDGGSLQSAIGNLASIAEKKTVSKLLFKTLQELLEATKTAIAQDESPVSGMDVDNTADKNSSSNLRARLFDLLVSLLPGLDGQEVDTIFSSLKPAMQDSKGLIQKKAYKVLSVILKSSDGFVSKNLEELLVLMHNICHVSAKRHKLDCLYFLLAHASRTDDLKERKDIVSSFLPEVILALKEVNKKTRNRAYDVLVQIGHAYADEENGGDNEKLHGYFDMVVGCLAGEKPQMISAAVKGVARLTYEFSDLISSAYNLLPSTFLLLQRKNKEITKVRLLLEMLIKKCGTEAVKSVMPEEHMKLLTNIRKIKERKEKKYAAGSDISKSQHSKDTSSKVSRWNDTKIFSDVYADSEDSDGDDMDAESHGRSKASSLLKSKASALRSKKSRNQSHLEVDESDDEPLDLMDQHKTRLALRSSELRKRKADSDEEAEFDVEGRLVIREGERSKRKELSDADSDAKSSKGSRFSGNSSKKNQKRMKTSESGYAYTGKEYASKKASGDLKKKDKLEPYAYWPLDRKMMSRRPEQRAVAVRGMSSVVKMAKKMEGKSAAEALATTKFKKFKRSGQKKSAGKKKNK

SEQ ID NO: 28284 - DNA, 1242 bp, Arabidopsis thaliana
  misc_feature (1)..(1242): Ceres Seq. ID no. 2711459
atgagttctcacgtggttgatgatcaaaggcaacctaataactcaatctcgagtttaagttctaaactaaccaagccatggatcacaaccacaatcttcatctttgtcttcttcttcttcatcatcctcgttggagcttctctcaggtggatggacatgtttttaatcggtggaggtagaatcaaagtgacaccaatatttacaagaaacaccaacgcaactatccccaaggaaaaactcactacaccactgaacttcacattgcaatgctcactagaccagaacatagcaacccagacgtgtcctgcaagcaacccggagaaatcacaacctagtaaggacgagccagagacttgtccagactacttcaggtggatccacaaggatcttgaagcatggcgtgagactggaatcactcgagagacgttagagagagcaagtgataaagctcacttccggctgataataaaaggaggaagagtgtatgtgcatcaatacaagaaatcttttcagacaagagatgttttcactatatggggaatagtacagctgctaaggatgtatcctggtcaagtccctgatcttgagcttctcttcatgtgccatgactcacctgaaatctggagaagagactataggccaagaccaggagtcaatgtgacgtggccacctcctccactcttccactattgtggacattccggtgctttcgacattgtcttccctgactggagcttttggggctggccggagattaacataaaggagtggaataaacagtcggagttgataagtgaagggataaagaaggtgaagtgggaagagagagagccttacgcatattggaaggggaatcctggagttgccatggccagagctatagggagaaatggaagtgggtatgtgcgaaagaatctaaagatgaagtatgtgtatgattacatgttgcatctactgcaaagctatgggaagttgatgaagatgaatgtagaagtgcctcaaggagccaaggaagtgtgtccggagacaatggcttgtccaatcaatggaggccgaatgagacaatctatggatgactcattggttatgtctccgagcgttaaggctacttgtgagatgcctccaccttttgaagaagatgagctcaaaaagtttcttgagaagaaagaaagtgttgagaaagaagttgagaagtggactaatgagtattggcaggaacagaagaagattcttaaacattga

SEQ ID NO: 28285 - protein, 413 aa, Arabidopsis thaliana
  misc_feature (1)..(413): Ceres Seq. ID no. 2711460
MSSHVVDDQRQPNNSISSLSSKLTKPWITTTIFIFVFFFFIILVGASLRWMDMFLIGGGRIKVTPIFTRNTNATIPKEKLTTPLNFTLQCSLDQNIATQTCPASNPEKSQPSKDEPETCPDYFRWIHKDLEAWRETGITRETLERASDKAHFRLIIKGGRVYVHQYKKSFQTRDVFTIWGIVQLLRMYPGQVPDLELLFMCHDSPEIWRRDYRPRPGVNVTWPPPPLFHYCGHSGAFDIVFPDWSFWGWPEINIKEWNKQSELISEGIKKVKWEEREPYAYWKGNPGVAMARAIGRNGSGYVRKNLKMKYVYDYMLHLLQSYGKLMKMNVEVPQGAKEVCPETMACPINGGRMRQSMDDSLVMSPSVKATCEMPPPFEEDELKKFLEKKESVEKEVEKWTNEYWQEQKKILKH

SEQ ID NO: 28286 - protein, 363 aa, Arabidopsis thaliana
  misc_feature (1)..(363): Ceres Seq. ID no. 2711461
MDMFLIGGGRIKVTPIFTRNTNATIPKEKLTTPLNFTLQCSLDQNIATQTCPASNPEKSQPSKDEPETCPDYFRWIHKDLEAWRETGITRETLERASDKAHFRLIIKGGRVYVHQYKKSFQTRDVFTIWGIVQLLRMYPGQVPDLELLFMCHDSPEIWRRDYRPRPGVNVTWPPPPLFHYCGHSGAFDIVFPDWSFWGWPEINIKEWNKQSELISEGIKKVKWEEREPYAYWKGNPGVAMARAIGRNGSGYVRKNLKMKYVYDYMLHLLQSYGKLMKMNVEVPQGAKEVCPETMACPINGGRMRQSMDDSLVMSPSVKATCEMPPPFEEDELKKFLEKKESVEKEVEKWTNEYWQEQKKILKH

SEQ ID NO: 28287 - protein, 361 aa, Arabidopsis thaliana
  misc_feature (1)..(361): Ceres Seq. ID no. 2711462
MFLIGGGRIKVTPIFTRNTNATIPKEKLTTPLNFTLQCSLDQNIATQTCPASNPEKSQPSKDEPETCPDYFRWIHKDLEAWRETGITRETLERASDKAHFRLIIKGGRVYVHQYKKSFQTRDVFTIWGIVQLLRMYPGQVPDLELLFMCHDSPEIWRRDYRPRPGVNVTWPPPPLFHYCGHSGAFDIVFPDWSFWGWPEINIKEWNKQSELISEGIKKVKWEEREPYAYWKGNPGVAMARAIGRNGSGYVRKNLKMKYVYDYMLHLLQSYGKLMKMNVEVPQGAKEVCPETMACPINGGRMRQSMDDSLVMSPSVKATCEMPPPFEEDELKKFLEKKESVEKEVEKWTNEYWQEQKKILKH

SEQ ID NO: 28288 - DNA, 2283 bp, Arabidopsis thaliana
  misc_feature (1)..(2283): Ceres Seq. ID no. 2711511
atgtacgccgccacacccgaaactcctttcggttccgcgagatcacaaccggttattacccgatctgtctcacaacgatataaccatccaggtcaaagtaatcaccatcatctcctccacagtctctcatttaaccaccagaacgtactagccttaccggcagcagcaagggagccgcctgtggatgtcaagattaacgatatcgctgggaattcgattgccgggatattgtacaaatgggtgaactatgggaaaggatggagaccaagatggtttgttttgcaagatggagtgctttcatattataaaatcaagggacctgataagatcgttgttatccatgagactgagaaaggatcaagagtgatcggagaggagtccacacgtatgatctctaggaataagcgtcacgccgccactaacaacaccaaccaccagctccgccgcaagccattcggcgaagttcatctcaaggtttcatcgattcgggagagtagatcagatgataagagattttcaatattcaccggcaccaagaggcttcacctacgtgcagagacaagagaggacagagaagcttggatagaggctttacaagctgtcaaagatatgtttccaagaatgtcaaactgcgagttgatggcaccgaccaacaacttagacatctcgatagagaagcttaggctgcgattggttgaggaaggagtgagtgagtcagccattcaagactgcgaacaaatcacgaggtctgagttctcggcaattcagagccagcttttgcttcttaaacaaaagcaatggcttctcattgatacactcagacaattagagacagagaaagtagatttggaaaacacggttgtagatgagactcaacgacaagctggcaacggagactcagaagaaacaattagtgaatctgatgatgataatgaacaatttgatgaggctgaggaggaaatggatacatgtgactctctttcttcaagttcattcaaaagtattggatccgtttttcgcacatcatcattctcttcagatgatgatggacttactaatggttttgagtcagagaatgatgatgttgatccttctatcaagactattggatttaactatccacatgtcaaaagacgaaagaagttacctgatccggttgaaaaagagaaaagtgttagcctttggtcaatgatcaaagacaacattggcaaggatctcacaaaagtttgtcttcctgtctacttcaatgagcctttatcttctctacaaaaatgctttgaagatttggagtattcatatcttcttgatcaagcttctgaatggggaaagaggggcaataacctcatgaggattctgaatgtagctgcatttgccgtatctggttatgcatcaactgaaggaagaatttgcaaaccttttaatccaatgttaggtgaaacatatgaggctgactatcccgataaaggccttcgatttttctcggaaaaggtgagtcatcatcctatgattgtggcatgtcattgtgatggcaccggatggaaattttggggagatagcaacttaaaaagcaaattttggggtcgatcaattcaacttgatcctattggtttgttgactttgcaatttgatgatggtgaaattgtgcaatggagtaaggtgactacatcaatatacaatctcatacttggtaaattgtattgtgatcactacgggacaatgaagattgaaggcaacggtgaatattcatgtaaacttaaattcaaggaacagtcgatgatcgatagaaatccgcatcaagttcaaggtatagtagaagacaagaatggaaaaacagtggctaggttgtttggaaaatgggatgagagtatacactatgtgatggttgatcaaggaaaggtgaatgaatcccatcttctgtggaaacgaaacaaacagcccgaaaacccgacaaagtataatctaacacggtttgggatcacattaaacgagctcacgcctggtttaaaggagaagttgccaccaacagattcaagacttagaccggaccagaggtatttagagaagggagagtatgaaatgggaaacgcagagaagttgaggttggaacaaagacaaagacaggcgagagagatgcaagagagaggttggaaaccaaagtggtttagaaaagagaaaggaagtgagacttatagatacattggaggttattgggaagctcgagattctggtagttgggatgattgtcctgacatctttggtcaagttcaccaatccatcaagtaa

SEQ ID NO: 28289 - protein, 760 aa, Arabidopsis thaliana
  misc_feature (1)..(760): Ceres Seq. ID no. 2711512
MYAATPETPFGSARSQPVITRSVSQRYNHPGQSNHHHLLHSLSFNHQNVLALPAAAREPPVDVKINDIAGNSIAGILYKWVNYGKGWRPRWFVLQDGVLSYYKIKGPDKIVVIHETEKGSRVIGEESTRMISRNKRHAATNNTNHQLRRKPFGEVHLKVSSIRESRSDDKRFSIFTGTKRLHLRAETREDREAWIEALQAVKDMFPRMSNCELMAPTNNLDISIEKLRLRLVEEGVSESAIQDCEQITRSEFSAIQSQLLLLKQKQWLLIDTLRQLETEKVDLENTVVDETQRQAGNGDSEETISESDDDNEQFDEAEEEMDTCDSLSSSSFKSIGSVFRTSSFSSDDDGLTNGFESENDDVDPSIKTIGFNYPHVKRRKKLPDPVEKEKSVSLWSMIKDNIGKDLTKVCLPVYFNEPLSSLQKCFEDLEYSYLLDQASEWGKRGNNLMRILNVAAFAVSGYASTEGRICKPFNPMLGETYEADYPDKGLRFFSEKVSHHPMIVACHCDGTGWKFWGDSNLKSKFWGRSIQLDPIGLLTLQFDDGEIVQWSKVTTSIYNLILGKLYCDHYGTMKIEGNGEYSCKLKFKEQSMIDRNPHQVQGIVEDKNGKTVARLFGKWDESIHYVMVDQGKVNESHLLWKRNKQPENPTKYNLTRFGITLNELTPGLKEKLPPTDSRLRPDQRYLEKGEYEMGNAEKLRLEQRQRQAREMQERGWKPKWFRKEKGSETYRYIGGYWEARDSGSWDDCPDIFGQVHQSIK

SEQ ID NO: 28290 - protein, 631 aa, Arabidopsis thaliana
  misc_feature (1)..(631): Ceres Seq. ID no. 2711513
MISRNKRHAATNNTNHQLRRKPFGEVHLKVSSIRESRSDDKRFSIFTGTKRLHLRAETREDREAWIEALQAVKDMFPRMSNCELMAPTNNLDISIEKLRLRLVEEGVSESAIQDCEQITRSEFSAIQSQLLLLKQKQWLLIDTLRQLETEKVDLENTVVDETQRQAGNGDSEETISESDDDNEQFDEAEEEMDTCDSLSSSSFKSIGSVFRTSSFSSDDDGLTNGFESENDDVDPSIKTIGFNYPHVKRRKKLPDPVEKEKSVSLWSMIKDNIGKDLTKVCLPVYFNEPLSSLQKCFEDLEYSYLLDQASEWGKRGNNLMRILNVAAFAVSGYASTEGRICKPFNPMLGETYEADYPDKGLRFFSEKVSHHPMIVACHCDGTGWKFWGDSNLKSKFWGRSIQLDPIGLLTLQFDDGEIVQWSKVTTSIYNLILGKLYCDHYGTMKIEGNGEYSCKLKFKEQSMIDRNPHQVQGIVEDKNGKTVARLFGKWDESIHYVMVDQGKVNESHLLWKRNKQPENPTKYNLTRFGITLNELTPGLKEKLPPTDSRLRPDQRYLEKGEYEMGNAEKLRLEQRQRQAREMQERGWKPKWFRKEKGSETYRYIGGYWEARDSGSWDDCPDIFGQVHQSIK

SEQ ID NO: 28291 - protein, 557 aa, Arabidopsis thaliana
  misc_feature (1)..(557): Ceres Seq. ID no. 2711514
MFPRMSNCELMAPTNNLDISIEKLRLRLVEEGVSESAIQDCEQITRSEFSAIQSQLLLLKQKQWLLIDTLRQLETEKVDLENTVVDETQRQAGNGDSEETISESDDDNEQFDEAEEEMDTCDSLSSSSFKSIGSVFRTSSFSSDDDGLTNGFESENDDVDPSIKTIGFNYPHVKRRKKLPDPVEKEKSVSLWSMIKDNIGKDLTKVCLPVYFNEPLSSLQKCFEDLEYSYLLDQASEWGKRGNNLMRILNVAAFAVSGYASTEGRICKPFNPMLGETYEADYPDKGLRFFSEKVSHHPMIVACHCDGTGWKFWGDSNLKSKFWGRSIQLDPIGLLTLQFDDGEIVQWSKVTTSIYNLILGKLYCDHYGTMKIEGNGEYSCKLKFKEQSMIDRNPHQVQGIVEDKNGKTVARLFGKWDESIHYVMVDQGKVNESHLLWKRNKQPENPTKYNLTRFGITLNELTPGLKEKLPPTDSRLRPDQRYLEKGEYEMGNAEKLRLEQRQRQAREMQERGWKPKWFRKEKGSETYRYIGGYWEARDSGSWDDCPDIFGQVHQSIK

SEQ ID NO: 28292 - DNA, 2247 bp, Arabidopsis thaliana
  misc_feature (1)..(2247): Ceres Seq. ID no. 2711549
atggcggattcaagcttttctcttcctcctctttgtgaaaggatctcatacacgaactattttctaagagctgtatatctcacggttctaggccttttcttttctcttctcttgcaccgaatccgacatacgagcgaatacgacaacgtttggctcgtggctttcttttgtgaatcttgtttcttcttggtatgtctgcttattacttgcctaaaatggagtcctgctgatactaaaccctttcctgatagacttgatgaaagggttcatgaccttccttcggtggatatgttcgtgcccacagcagatccggttcgagagccaccgattatggttgtggacaccgtgctttcgctgttagctgtaaattatccggcaaataaactagcttgttatgtgtcggacgatggatgctcacctctcacttatttctctctcaaggaagcttctaagttcgccaagatttgggtaccgttctgcaaaaagtacaacactagagttagagctccttctagatattttctgaaacctataagcgtcgcaacagaggattatgaattcaatagagactgggaaaagacgaagagggagtacgagaagttgaggcggaaagtggaagatgccaccggagattctcatatgttggatgtagaagatgattttgaagcattctcaaacacaaaaccaaatgatcattcaactctagttaaggtggtatgggagaacaagggaggtgtaggagacgagaaagagatccctcatatcatatacatatcaagagagaaaagaccaaattatgttcataatcaaaaatgtggagccatgaactttctggcaagagtgtcagggttgatgacaaacgcaccatacatcttgaacgtggattgcgacatgtatgccaatgatgcagatgtagtccgacaagcaatgtgtatacttctgcaagaatcattaaatatgaaacattgtgcttttgttcaattccgtcaagaattctatgattcaagcaccgagctaatagtcgtcctacaatcacatttgggacgaggaatcgcgggaatccaaggaccgatatatataggatcaggatgcgtccacacgagaagagttatgtatggtttatctccagacgatttcgaagttgatggaagtctttcttcagttgctacaagggagtttttggttaaggatagtttagcgagaagatttggtaattctaaagagatgatgaaatcagtggttgatgcaatacaaagaaatccaaatccacaaaatatacttacaaactccatagaagcggctcgagaagtgggacattttatgcagatcggctggttatatgattcagtggcggaagatttaaacacgagtatcggaatacattcgagaggttggactagctcatacatttctccggatacacctgcatttcttggatctatgccggcaggagtacccgaggcgttactccagcagcgtcgatgggcgacaggatggatcgaaatccttttcaacaagcaaagtccgttgcgaggattgtttagcaagaaaataagattccgacaacgattagcttatctttgcattatcacctgtctaaggtcaatccctgagcttatttattgtctccttcctgcttattgcctactccacaactctaccttattccccaagggactttatttaggcataactgtcacacttgttgggatacattgtctctatactctatgggaatttatgagccttggttattccgtacaatcgtggctagtctcccaatcagtttggagaatagtagccactagtagttggttatttagcatctttgatatcacactcaagcttcttggcatctcggaaacggtgttcataatcactaaaaagactgtggctgggaccaagtcagcattagggtctggaccctctcaaggagaagacgttggtccaaactcagacttgtttaaatttgaatttgatggctcactttgtttcttgcctggcacatttattgtgttggtgaatatagccgctctagctgttttttctgtgggtctacaacggtcgagttacagccatgaaggaggtggttcgggtctggcagaggcttgcggatgtgttttggtaatgatgttgttccttccatttctaatgggtttgtttaagaaaggaaaatatggaaccccattgtctactctctctatagctggctttttagcagttttatttgttgttttctctgtttga

SEQ ID NO: 28293 - protein, 748 aa, Arabidopsis thaliana
  misc_feature (1)..(748): Ceres Seq. ID no. 2711550
MADSSFSLPPLCERISYTNYFLRAVYLTVLGLFFSLLLHRIRHTSEYDNVWLVAFFCESCFFLVCLLITCLKWSPADTKPFPDRLDERVHDLPSVDMFVPTADPVREPPIMVVDTVLSLLAVNYPANKLACYVSDDGCSPLTYFSLKEASKFAKIWVPFCKKYNTRVRAPSRYFLKPISVATEDYEFNRDWEKTKREYEKLRRKVEDATGDSHMLDVEDDFEAFSNTKPNDHSTLVKVVWENKGGVGDEKEIPHIIYISREKRPNYVHNQKCGAMNFLARVSGLMTNAPYILNVDCDMYANDADVVRQAMCILLQESLNMKHCAFVQFRQEFYDSSTELIVVLQSHLGRGIAGIQGPIYIGSGCVHTRRVMYGLSPDDFEVDGSLSSVATREFLVKDSLARRFGNSKEMMKSVVDAIQRNPNPQNILTNSIEAAREVGHFMQIGWLYDSVAEDLNTSIGIHSRGWTSSYISPDTPAFLGSMPAGVPEALLQQRRWATGWIEILFNKQSPLRGLFSKKIRFRQRLAYLCIITCLRSIPELIYCLLPAYCLLHNSTLFPKGLYLGITVTLVGIHCLYTLWEFMSLGYSVQSWLVSQSVWRIVATSSWLFSIFDITLKLLGISETVFIITKKTVAGTKSALGSGPSQGEDVGPNSDLFKFEFDGSLCFLPGTFIVLVNIAALAVFSVGLQRSSYSHEGGGSGLAEACGCVLVMMLFLPFLMGLFKKGKYGTPLSTLSIAGFLAVLFVVFSV

SEQ ID NO: 28294 - protein, 652 aa, Arabidopsis thaliana
  misc_feature (1)..(652): Ceres Seq. ID no. 2711551
MFVPTADPVREPPIMVVDTVLSLLAVNYPANKLACYVSDDGCSPLTYFSLKEASKFAKIWVPFCKKYNTRVRAPSRYFLKPISVATEDYEFNRDWEKTKREYEKLRRKVEDATGDSHMLDVEDDFEAFSNTKPNDHSTLVKVVWENKGGVGDEKEIPHIIYISREKRPNYVHNQKCGAMNFLARVSGLMTNAPYILNVDCDMYANDADVVRQAMCILLQESLNMKHCAFVQFRQEFYDSSTELIVVLQSHLGRGIAGIQGPIYIGSGCVHTRRVMYGLSPDDFEVDGSLSSVATREFLVKDSLARRFGNSKEMMKSVVDAIQRNPNPQNILTNSIEAAREVGHFMQIGWLYDSVAEDLNTSIGIHSRGWTSSYISPDTPAFLGSMPAGVPEALLQQRRWATGWIEILFNKQSPLRGLFSKKIRFRQRLAYLCIITCLRSIPELIYCLLPAYCLLHNSTLFPKGLYLGITVTLVGIHCLYTLWEFMSLGYSVQSWLVSQSVWRIVATSSWLFSIFDITLKLLGISETVFIITKKTVAGTKSALGSGPSQGEDVGPNSDLFKFEFDGSLCFLPGTFIVLVNIAALAVFSVGLQRSSYSHEGGGSGLAEACGCVLVMMLFLPFLMGLFKKGKYGTPLSTLSIAGFLAVLFVVFSV

SEQ ID NO: 28295 - protein, 638 aa, Arabidopsis thaliana
  misc_feature (1)..(638): Ceres Seq. ID no. 2711552
MVVDTVLSLLAVNYPANKLACYVSDDGCSPLTYFSLKEASKFAKIWVPFCKKYNTRVRAPSRYFLKPISVATEDYEFNRDWEKTKREYEKLRRKVEDATGDSHMLDVEDDFEAFSNTKPNDHSTLVKVVWENKGGVGDEKEIPHIIYISREKRPNYVHNQKCGAMNFLARVSGLMTNAPYILNVDCDMYANDADVVRQAMCILLQESLNMKHCAFVQFRQEFYDSSTELIVVLQSHLGRGIAGIQGPIYIGSGCVHTRRVMYGLSPDDFEVDGSLSSVATREFLVKDSLARRFGNSKEMMKSVVDAIQRNPNPQNILTNSIEAAREVGHFMQIGWLYDSVAEDLNTSIGIHSRGWTSSYISPDTPAFLGSMPAGVPEALLQQRRWATGWIEILFNKQSPLRGLFSKKIRFRQRLAYLCIITCLRSIPELIYCLLPAYCLLHNSTLFPKGLYLGITVTLVGIHCLYTLWEFMSLGYSVQSWLVSQSVWRIVATSSWLFSIFDITLKLLGISETVFIITKKTVAGTKSALGSGPSQGEDVGPNSDLFKFEFDGSLCFLPGTFIVLVNIAALAVFSVGLQRSSYSHEGGGSGLAEACGCVLVMMLFLPFLMGLFKKGKYGTPLSTLSIAGFLAVLFVVFSV

SEQ ID NO: 28296 - DNA, 1449 bp, Arabidopsis thaliana
  misc_feature (1)..(1449): Ceres Seq. ID no. 2711589
atggtgcagattgtgccccacgtagcaaatgcacacatggtcaaaacttctagaaaaggactcttagcgcttgtcgtagttggagtagaagagtgttgcccgacgcgtcgatgtgatttgagagatccaaatttagtggtggattctaattgcttgctgtcaagatctacacatcaaagctcactcgttgaagattcaatcatcatcaatcatttccggatcttgaacttcaacaacagagcaagcatctttctttgtttgagaattggtgttatctgtagcactcaatctaagatgtatggtggaaaaagttacatactcaaagggagtgtatcactttccttgatcatcctcattcttttggtgacaacactcctggtttccgcaaaaaaccagcctcgcatttctctgattgaagtaaaaacttgtaacttggcaaagggggaatgggttgaagacaagaagcggccattgtattctggttttgaatgtaaacaatggttatcaaacatattttcctgcagggtaatgggcagacccgacttctcatttgagggttaccggtggcagccagaaggttgcaacataccagagtttaacagagtcaacttcttgagaagaatgcagaacaagactatagcatttataggagactccttgggaagggaacaatttcaatccctgatgtgtatggccactggaggtaaagagagtccggaggttcaaaacgtgggatcggagtatggtcttgtgatacctaaaggagctcctcgtcctggtggttgggcttataggtttccgaccacaaacacaacggttttgtcttattggtcagctagtttaacagatttggtaccgatgaacaatacagatccacctcatcttattgcaatgcatcttgaccgtccaccagcattcataagaaactaccttcaccgtttccatgtattggttctaaacaccggtcaccattggagcagagataagatagaaaaaaatcattgggtgatgcacgtaaatggaacacgtgtcgaaggcggatatttcaagaacgttgaaaacgctaaaatttttacaatacacagcctggtgaagtggcttgatgcacaacttccattgcatccacggttgaaagctttctttacgacgatttcccctaggcatgaaaagtgtaacaatactatccctttgtctagaggaagcaaaatcacaggcgaaggtggatcgctcgatacaatagttgagagtgctgtgaatgggacaagggtcaagattcttgacataactgcactttctaaactaagagatgaagctcatatcgcagggtgtaaactcaaaccgaaaaaggcgagtaacgtgacttcagctccaacgttcaacgattgcttgcattggtgcttacccgggatcccggatacttggaatgaacttctcatagcacagctttga

SEQ ID NO: 28297 - protein, 482 aa, Arabidopsis thaliana
  misc_feature (1)..(482): Ceres Seq. ID no. 2711590
MVQIVPHVANAHMVKTSRKGLLALVVVGVEECCPTRRCDLRDPNLVVDSNCLLSRSTHQSSLVEDSIIINHFRILNFNNRASIFLCLRIGVICSTQSKMYGGKSYILKGSVSLSLIILILLVTTLLVSAKNQPRISLIEVKTCNLAKGEWVEDKKRPLYSGFECKQWLSNIFSCRVMGRPDFSFEGYRWQPEGCNIPEFNRVNFLRRMQNKTIAFIGDSLGREQFQSLMCMATGGKESPEVQNVGSEYGLVIPKGAPRPGGWAYRFPTTNTTVLSYWSASLTDLVPMNNTDPPHLIAMHLDRPPAFIRNYLHRFHVLVLNTGHHWSRDKIEKNHWVMHVNGTRVEGGYFKNVENAKIFTIHSLVKWLDAQLPLHPRLKAFFTTISPRHEKCNNTIPLSRGSKITGEGGSLDTIVESAVNGTRVKILDITALSKLRDEAHIAGCKLKPKKASNVTSAPTFNDCLHWCLPGIPDTWNELLIAQL

SEQ ID NO: 28298 - protein, 470 aa, Arabidopsis thaliana
  misc_feature (1)..(470): Ceres Seq. ID no. 2711591
MVKTSRKGLLALVVVGVEECCPTRRCDLRDPNLVVDSNCLLSRSTHQSSLVEDSIIINHFRILNFNNRASIFLCLRIGVICSTQSKMYGGKSYILKGSVSLSLIILILLVTTLLVSAKNQPRISLIEVKTCNLAKGEWVEDKKRPLYSGFECKQWLSNIFSCRVMGRPDFSFEGYRWQPEGCNIPEFNRVNFLRRMQNKTIAFIGDSLGREQFQSLMCMATGGKESPEVQNVGSEYGLVIPKGAPRPGGWAYRFPTTNTTVLSYWSASLTDLVPMNNTDPPHLIAMHLDRPPAFIRNYLHRFHVLVLNTGHHWSRDKIEKNHWVMHVNGTRVEGGYFKNVENAKIFTIHSLVKWLDAQLPLHPRLKAFFTTISPRHEKCNNTIPLSRGSKITGEGGSLDTIVESAVNGTRVKILDITALSKLRDEAHIAGCKLKPKKASNVTSAPTFNDCLHWCLPGIPDTWNELLIAQL

SEQ ID NO: 28299 - protein, 384 aa, Arabidopsis thaliana
  misc_feature (1)..(384): Ceres Seq. ID no. 2711592
MYGGKSYILKGSVSLSLIILILLVTTLLVSAKNQPRISLIEVKTCNLAKGEWVEDKKRPLYSGFECKQWLSNIFSCRVMGRPDFSFEGYRWQPEGCNIPEFNRVNFLRRMQNKTIAFIGDSLGREQFQSLMCMATGGKESPEVQNVGSEYGLVIPKGAPRPGGWAYRFPTTNTTVLSYWSASLTDLVPMNNTDPPHLIAMHLDRPPAFIRNYLHRFHVLVLNTGHHWSRDKIEKNHWVMHVNGTRVEGGYFKNVENAKIFTIHSLVKWLDAQLPLHPRLKAFFTTISPRHEKCNNTIPLSRGSKITGEGGSLDTIVESAVNGTRVKILDITALSKLRDEAHIAGCKLKPKKASNVTSAPTFNDCLHWCLPGIPDTWNELLIAQL

SEQ ID NO: 28300 - DNA, 2331 bp, Arabidopsis thaliana
  misc_feature (1)..(2331): Ceres Seq. ID no. 2711644
atgcaacccaattctcacatcttcgtcatcatcaccatttcatcactcatcattacagtttctgcgtatggctcaacaggcacaatcgcagcagctttcggcgaaaacggattcttctgcgccattgacgcaagtgggaagcaagaagtcatctgttgggatagaggaaacactaaccgatcattaaaccgacccccaggtgaaatctccggttattctcctccaatgacttctctttccggtggtgaaggttttctctgcgccattacgtcgaacacttcgcgtgcgttttgttggaaccttgaagatccttctgagaatctcgttcctcgagcttttcagtataattcttacttacagattgcttctggtaacaatcatgtttgtgctattagtggattgtattactcaggtcctgattatggtcctgttcattgttgggagtatagtgataacactaatttcacttctggtcttctttggaattcttcttttcataatccttatatagatagtctcatgtttcgtaagattgtttctggagatgggttttcttgtggtgttactaaagatggagacttggtttgttggggaccaaaatcaaaccttttgaatttctccaataatgaagaattcgaggttttagcttctgggaggaactctgtttgtggtgtctctaaagattcaggtcaacttcattgctttggagatgaaacagagtttggttcgttaccaaaccggcctcggtttattgctctttcagctggtgctaatcattattgtggtatacgtgaggatgatcatggagttgagtgttggggaaggaacttgaattcttcttcatcatcttcagctcctaatacttcagggtttgtggcgatttcgtcttcggattcaacaacttgtggagttagagagcttgatttagttcttgattgttggagagttcatgattcttcgaaagcggattatagtcctcctttggagttatgtagccccgggatgtgttcgcctcgcggtaattgtggtgatggttggtttgctttcaatgcaagtatcttgaaagaatctgagcttactagcttgtgctcgtttcataacctcaacatttgtttacgttgtggaatcagttgcttggaagggtatttcccttccagcacttgtaatccaaacgcggaccgggtctgtactccttgttcgctatgtcagaatagttcttgttacggtatctgtaagattcgggctacgaaatcgaaggagcatgagcagaaagagcagagagaggtacggagattggtgatcatcatagggtgctctgttttagggttcttggtgatgttgattggtttgtctttcattccaaagatgacaaaaggtagtaaacgagatgatgaagagaggagtaagatgacttgttgcttctgtttcgataagaattctgtagaagctgatcctgatcctgtccctcatcagtcggttcttctaccaaccgctgtatctctcggggaaaccaagatcttccgtctatcagaacttaaagacgcgactcacgggttcaaagaattcaacgagctcgggagaggtagcttcgggtttgtctataaagctgttttatctgatgggatacatgttgcggtcaaaagagcgaatgctgcaacgatcattcactctaataaccgaggtttcgagtccgagctagagattctttgcaaaatcagacacaacaatattgtgaatttgttaggatactgctcagagatgggggaaaggcttttggtttatgagtacatgccgcacggtacgcttcatgatcatctccatggagatctttcacaactggactggagcatgagactgaagatcatgttgcaggctgcaagaggacttgattacttacacaacgaagtagatcctccgataattcacagagatgtgaaaacgtccaacatcttgttagacggtgaaatgtgcgcaagaattgcggatttcggattggtaagctcgaatgaaagggattcaagcaatagtgatagagaaggtgatgtgtatgactttggtattgttctacttgagatactaagcgggcgaaaagctatcgatagagagtctgatcctgcggggattgcggaatgggcggttcctttgatcaggaaaggaaaagcagcggcgataatcgataggaacatttgtttgccaagaaatgtagagcctttgcttaaattggctgagttagctgagcttgctgtgagggaaaattcgaatgaacgaccaaatatcagaaatattctgtgttttcttgatctcatcgtcaagtctggcctcactttttaa

SEQ ID NO: 28301 - protein, 776 aa, Arabidopsis thaliana
  misc_feature (1)..(776): Ceres Seq. ID no. 2711645
MQPNSHIFVIITISSLIITVSAYGSTGTIAAAFGENGFFCAIDASGKQEVICWDRGNTNRSLNRPPGEISGYSPPMTSLSGGEGFLCAITSNTSRAFCWNLEDPSENLVPRAFQYNSYLQIASGNNHVCAISGLYYSGPDYGPVHCWEYSDNTNFTSGLLWNSSFHNPYIDSLMFRKIVSGDGFSCGVTKDGDLVCWGPKSNLLNFSNNEEFEVLASGRNSVCGVSKDSGQLHCFGDETEFGSLPNRPRFIALSAGANHYCGIREDDHGVECWGRNLNSSSSSSAPNTSGFVAISSSDSTTCGVRELDLVLDCWRVHDSSKADYSPPLELCSPGMCSPRGNCGDGWFAFNASILKESELTSLCSFHNLNICLRCGISCLEGYFPSSTCNPNADRVCTPCSLCQNSSCYGICKIRATKSKEHEQKEQREVRRLVIIIGCSVLGFLVMLIGLSFIPKMTKGSKRDDEERSKMTCCFCFDKNSVEADPDPVPHQSVLLPTAVSLGETKIFRLSELKDATHGFKEFNELGRGSFGFVYKAVLSDGIHVAVKRANAATIIHSNNRGFESELEILCKIRHNNIVNLLGYCSEMGERLLVYEYMPHGTLHDHLHGDLSQLDWSMRLKIMLQAARGLDYLHNEVDPPIIHRDVKTSNILLDGEMCARIADFGLVSSNERDSSNSDREGDVYDFGIVLLEILSGRKAIDRESDPAGIAEWAVPLIRKGKAAAIIDRNICLPRNVEPLLKLAELAELAVRENSNERPNIRNILCFLDLIVKSGLTF

SEQ ID NO: 28302 - protein, 701 aa, Arabidopsis thaliana
  misc_feature (1)..(701): Ceres Seq. ID no. 2711646
MTSLSGGEGFLCAITSNTSRAFCWNLEDPSENLVPRAFQYNSYLQIASGNNHVCAISGLYYSGPDYGPVHCWEYSDNTNFTSGLLWNSSFHNPYIDSLMFRKIVSGDGFSCGVTKDGDLVCWGPKSNLLNFSNNEEFEVLASGRNSVCGVSKDSGQLHCFGDETEFGSLPNRPRFIALSAGANHYCGIREDDHGVECWGRNLNSSSSSSAPNTSGFVAISSSDSTTCGVRELDLVLDCWRVHDSSKADYSPPLELCSPGMCSPRGNCGDGWFAFNASILKESELTSLCSFHNLNICLRCGISCLEGYFPSSTCNPNADRVCTPCSLCQNSSCYGICKIRATKSKEHEQKEQREVRRLVIIIGCSVLGFLVMLIGLSFIPKMTKGSKRDDEERSKMTCCFCFDKNSVEADPDPVPHQSVLLPTAVSLGETKIFRLSELKDATHGFKEFNELGRGSFGFVYKAVLSDGIHVAVKRANAATIIHSNNRGFESELEILCKIRHNNIVNLLGYCSEMGERLLVYEYMPHGTLHDHLHGDLSQLDWSMRLKIMLQAARGLDYLHNEVDPPIIHRDVKTSNILLDGEMCARIADFGLVSSNERDSSNSDREGDVYDFGIVLLEILSGRKAIDRESDPAGIAEWAVPLIRKGKAAAIIDRNICLPRNVEPLLKLAELAELAVRENSNERPNIRNILCFLDLIVKSGLTF

SEQ ID NO: 28303 - protein, 603 aa, Arabidopsis thaliana
  misc_feature (1)..(603): Ceres Seq. ID no. 2711647
MFRKIVSGDGFSCGVTKDGDLVCWGPKSNLLNFSNNEEFEVLASGRNSVCGVSKDSGQLHCFGDETEFGSLPNRPRFIALSAGANHYCGIREDDHGVECWGRNLNSSSSSSAPNTSGFVAISSSDSTTCGVRELDLVLDCWRVHDSSKADYSPPLELCSPGMCSPRGNCGDGWFAFNASILKESELTSLCSFHNLNICLRCGISCLEGYFPSSTCNPNADRVCTPCSLCQNSSCYGICKIRATKSKEHEQKEQREVRRLVIIIGCSVLGFLVMLIGLSFIPKMTKGSKRDDEERSKMTCCFCFDKNSVEADPDPVPHQSVLLPTAVSLGETKIFRLSELKDATHGFKEFNELGRGSFGFVYKAVLSDGIHVAVKRANAATIIHSNNRGFESELEILCKIRHNNIVNLLGYCSEMGERLLVYEYMPHGTLHDHLHGDLSQLDWSMRLKIMLQAARGLDYLHNEVDPPIIHRDVKTSNILLDGEMCARIADFGLVSSNERDSSNSDREGDVYDFGIVLLEILSGRKAIDRESDPAGIAEWAVPLIRKGKAAAIIDRNICLPRNVEPLLKLAELAELAVRENSNERPNIRNILCFLDLIVKSGLTF

SEQ ID NO: 28304 - DNA, 1041 bp, Arabidopsis thaliana
  misc_feature (1)..(1041): Ceres Seq. ID no. 2711763
atgcttctatacttgctcatcacttgtctctctttcttcttcttttccaaatctttatcctttcctcaatgggcatctaaaaccaaaaatttgctctccttctacttctccaagtatttgtttacaaacagtctacaccagatcacacccgatctagcctctccggtgctcggaaaaatgtcaattcttgacctccctgaccttccactcgactgcattcttgaacttcttccaccctctgaactatgtaccatggctagggtctgtagctcgttaagagagagatgtgtaagtgatcatttatgggagaaacacttgaagactaaatggggaaaaatccttggaccttctgctcacaaagaatggcaatgctatctatcttctccatatcatctcgattctcctcatcacaaaactagtcatcttggtttggccaaaatcatatctcttatgcgatcgctttcatccatttttcgagatgatgatcataggaggagatatccatcttcaatccctcttgactctaccatgaacttctacctatccctcgaaacaggtcgcttttggtttccagctcaagtttacaaccgtgagaatggacatgtagggttcatgttgtcatgctatgatgctgagctcagctatgacactgacactaatacttttcaagctaggtatccaccacatggtaaaagagcaattgcggttgaaaaagacgtgacatgggagaggataagagcagctcccgttgatgcatcaccccataatctctatgtgtcagattctctaaatgagttaaaacccggagaccacatagagatccagtggagaaggaacaaagagtttccttatgagatgatggtgttggaatttaaccagtacacagtcggatcaaggtggagaaaaacgatgattaacaggagagatcatagagagaaaggtaacgaggaagacgggttctatggaggaattcgaaaaataaattgtaaagaagatattgaaatgtggaagcgtctttggccatcctccatcttggagtag

SEQ ID NO: 28305 - protein, 346 aa, Arabidopsis thaliana
  misc_feature (1)..(346): Ceres Seq. ID no. 2711764
MLLYLLITCLSFFFFSKSLSFPQWASKTKNLLSFYFSKYLFTNSLHQITPDLASPVLGKMSILDLPDLPLDCILELLPPSELCTMARVCSSLRERCVSDHLWEKHLKTKWGKILGPSAHKEWQCYLSSPYHLDSPHHKTSHLGLAKIISLMRSLSSIFRDDDHRRRYPSSIPLDSTMNFYLSLETGRFWFPAQVYNRENGHVGFMLSCYDAELSYDTDTNTFQARYPPHGKRAIAVEKDVTWERIRAAPVDASPHNLYVSDSLNELKPGDHIEIQWRRNKEFPYEMMVLEFNQYTVGSRWRKTMINRRDHREKGNEEDGFYGGIRKINCKEDIEMWKRLWPSSILE

SEQ ID NO: 28306 - protein, 287 aa, Arabidopsis thaliana
  misc_feature (1)..(287): Ceres Seq. ID no. 2711765
MSILDLPDLPLDCILELLPPSELCTMARVCSSLRERCVSDHLWEKHLKTKWGKILGPSAHKEWQCYLSSPYHLDSPHHKTSHLGLAKIISLMRSLSSIFRDDDHRRRYPSSIPLDSTMNFYLSLETGRFWFPAQVYNRENGHVGFMLSCYDAELSYDTDTNTFQARYPPHGKRAIAVEKDVTWERIRAAPVDASPHNLYVSDSLNELKPGDHIEIQWRRNKEFPYEMMVLEFNQYTVGSRWRKTMINRRDHREKGNEEDGFYGGIRKINCKEDIEMWKRLWPSSILE

SEQ ID NO: 28307 - protein, 262 aa, Arabidopsis thaliana
  misc_feature (1)..(262): Ceres Seq. ID no. 2711766
MARVCSSLRERCVSDHLWEKHLKTKWGKILGPSAHKEWQCYLSSPYHLDSPHHKTSHLGLAKIISLMRSLSSIFRDDDHRRRYPSSIPLDSTMNFYLSLETGRFWFPAQVYNRENGHVGFMLSCYDAELSYDTDTNTFQARYPPHGKRAIAVEKDVTWERIRAAPVDASPHNLYVSDSLNELKPGDHIEIQWRRNKEFPYEMMVLEFNQYTVGSRWRKTMINRRDHREKGNEEDGFYGGIRKINCKEDIEMWKRLWPSSILE

SEQ ID NO: 28308 - DNA, 1068 bp, Arabidopsis thaliana
  misc_feature (1)..(1068): Ceres Seq. ID no. 2711945
atggtaggagacatcgccacgagatggaaagaattgagcggtagtagcaagtggaaagacctgcttgatcctcttgacttggatctacgccgttatatcctacactatggtgatatggctgaggagatagctgctacaccaaagaagagctctttgctcgaaccggttacctcaaagccaaccctttcagacgaaggcaagaagttgttagggaggaggggcattgttgttgcatggcgagggaccattcagctgtacgagtgggctaacgatttcgatttcccacttgaatcagctgttatggttttccctggagctaacccgaatgacgagcctcgcgtagcaaatggttggctatccctttatacatccactgatccacgatcacgttttgacaagaccagtgcacaagaacaggttcaagaagagctcaaaaggttactagaattgtacaaaaacgaagacgttaccatcaccttaacaggccatagcttgggcgcagttatgtcgattctatccgccgcagactttctccataacgaatggcctaagatcacaccaagtctacaacacagcctatgtgtcacagtatttgctttcgggagtccccaaatcggtgaccgaagcttcaaaagactcgtagagtctctcgaacacctccacatcctaagagtaacaaacgtcccggacctcattccccgttaccccgtattcaggttcacagatataggcgaggagcttcaaatcaacacattaaaatcagagtacctaaaacgatctctaaacctgggacatttccataacctggaggcttacttacacggcgtggcagggacacaacacaaccaaggagaattcaaactagagattaaccgagatatagcactggtaaacaaaggtttagatgctcttgaagataagtacttagtaccaggacattggtgggttcttgagaacaaaggaatggttcaaagtgatgatgggacatggaaactaaatggtgacaggtcaaagaagaaacaagaagaagaagacgaaaaagaagaaaacaattgcaaattcccatga

SEQ ID NO: 28309 - protein, 355 aa, Arabidopsis thaliana
  misc_feature (1)..(355): Ceres Seq. ID no. 2711946
MVGDIATRWKELSGSSKWKDLLDPLDLDLRRYILHYGDMAEEIAATPKKSSLLEPVTSKPTLSDEGKKLLGRRGIVVAWRGTIQLYEWANDFDFPLESAVMVFPGANPNDEPRVANGWLSLYTSTDPRSRFDKTSAQEQVQEELKRLLELYKNEDVTITLTGHSLGAVMSILSAADFLHNEWPKITPSLQHSLCVTVFAFGSPQIGDRSFKRLVESLEHLHILRVTNVPDLIPRYPVFRFTDIGEELQINTLKSEYLKRSLNLGHFHNLEAYLHGVAGTQHNQGEFKLEINRDIALVNKGLDALEDKYLVPGHWWVLENKGMVQSDDGTWKLNGDRSKKKQEEEDEKEENNCKFP

SEQ ID NO: 28310 - protein, 317 aa, Arabidopsis thaliana
  misc_feature (1)..(317): Ceres Seq. ID no. 2711947
MAEEIAATPKKSSLLEPVTSKPTLSDEGKKLLGRRGIVVAWRGTIQLYEWANDFDFPLESAVMVFPGANPNDEPRVANGWLSLYTSTDPRSRFDKTSAQEQVQEELKRLLELYKNEDVTITLTGHSLGAVMSILSAADFLHNEWPKITPSLQHSLCVTVFAFGSPQIGDRSFKRLVESLEHLHILRVTNVPDLIPRYPVFRFTDIGEELQINTLKSEYLKRSLNLGHFHNLEAYLHGVAGTQHNQGEFKLEINRDIALVNKGLDALEDKYLVPGHWWVLENKGMVQSDDGTWKLNGDRSKKKQEEEDEKEENNCKFP

SEQ ID NO: 28311 - protein, 255 aa, Arabidopsis thaliana
  misc_feature (1)..(255): Ceres Seq. ID no. 2711948
MVFPGANPNDEPRVANGWLSLYTSTDPRSRFDKTSAQEQVQEELKRLLELYKNEDVTITLTGHSLGAVMSILSAADFLHNEWPKITPSLQHSLCVTVFAFGSPQIGDRSFKRLVESLEHLHILRVTNVPDLIPRYPVFRFTDIGEELQINTLKSEYLKRSLNLGHFHNLEAYLHGVAGTQHNQGEFKLEINRDIALVNKGLDALEDKYLVPGHWWVLENKGMVQSDDGTWKLNGDRSKKKQEEEDEKEENNCKFP

SEQ ID NO: 28312 - DNA, 3831 bp, Arabidopsis thaliana
  misc_feature (1)..(3831): Ceres Seq. ID no. 2712007
atgtattcttcaagaggcactggctacggtcaacagcaatacggttcgcaatctggttattctcagaatcttggatctggctatcctggaagttcagtgagtggtggcgcagaaggaggctctcagatttctttgagttctcgccatccatcaattacaggtgctcctcaagagactgacattggtggtggatacagatctcatttatctacagctgctagtcattacggaacacaatatggctctgtgtatggatcaacttctcttagcagctctcagcctttaagcaccaatggtttaggttcatcagttttggataaccgctcgggatatgtccctactttacctgattcaccaaagtttgcatctggaagctatttgtctccctcgagccatggttatggtcaaaagacggacgatttgtattccgataagctgtctggttacattcccgttgatagaaggcagtatggtgaacaatcaagctcttatctcggtagggagttgcaaaatgaaccaactaggcgatatgctgatccatctaattttgctcgccagactgacttgtatgatcgcattgatcaagcatcgcttctccgaggagaacaattattaaaaatgcagtcgcttcatacctcttctgttgatgcaggtgtcaacagacaaaccgattatcttacagaacgaagttctactgtgcgtcattctgaccaagaagcaatgcattatggaggaaggcttgagtctgatcctcacggtttatcagtacgcaacacatcttcttatgccagccaacataccccatcgttattaggagctgttcctcggcgaaacttagatgactatatttatccggagagttcttcaaatcctggttatggtgttagcttacctccaggcagggattatggcaccgggaaaggtatccatagtgcagcgtctctcgacttggactaccctggtggcatgctggctcgtggtactggcgctgctcctcgtgttgatgatctccggaaaggtgaccgggcaagttatctcagggagtttgatctaagagaagaagagcgtcgtcgtgaggatcaacgcgccagagataaggagcgagaacgagagagggagcgcgaacatgacagagaacgagagcgtcagagggaacgagaaaggcaaagagctagggaccgggagagggaacgcatattggagagacgggagaaggaaagacaaggagaaagagaacgtgagcgaaaacgtgctctcgaaataaaacgagatcggactccaacagcaagagctacgtccaaggacacaaaggagcggactccagtgcccaaatctatttctagggatgcacgttgttgtgaactggccgaaacagaagcttacactttctatgcatactgctgtgaggacgacagttttgagcatgattacattgaagatggtggagctgatgtgaaaagtacttccactaagcctttagctttgaaaactggaggaaaaagtgtttggaacgccaagatggttttgatgagcgggctgagcaggactgctctggaagatcttgcttcagataaattctttgaggatcgtatacctcatatatgcaacatattaaaattcgctgttcttaaaaaagatcattcattcatggcgattggtggttcctgggatcccacagatggcatggacccatcagttgatcagtcttccttaattcagacaatgctgagacactcaaaggataagcttcatcttgatctgagtaactgccgtcactggaatccattcctagagatacattatgacagagttggtacagatggagtgtttagctacaaagagatcacagtactttttgtccccgatttatcagaatgtcttccttcatttgatgtttggagaacccaatggttggcacacaggaaagctcttactgaaagagatcgactactctctcaggaggttaagaaagatactgttgaagtaaccaaggatgcagagaaaaagtcaccaggagatacttccggcactccgacaactggaactaagaagactgttaaaaagatcattaaaagagttgttaagaggcctgtcaacgatggaaaagcaactggtatgaaaggtgagaagtcggatgttcctgaacatgttgccataccagagaccacagtcccaaaagaagagtccactggtacatcttctaacaaaaaaatagtgaaaaaggtagctgaaactggagatacctcagatcccagtgctaaggctaatgagcagactcctgcaaagacaattgtaaagaaaaaaattattaaaagggtggctaaaaggaaggttgctgaaatagacaacaaaatggacggtgactccaagaaagacggagatagtgatgagaaaaaggtgatggaggtaggcaagaaatcctctgattcaggtagtgtggagatgaaaccgacggccgaatctttagaagatgtgaaagacgagaatgcctccaaaactgtggatgtaaaacaggaaacaggatctccggatactaagaaaaaggagggtgcctctagttcaagcaagaaagacactaagacaggtgaagacaagaaggctgaaaagaaaaacaactcagagactatgtctgaggggaagaaaattgataggaataatactgatgagaaagaggtaaaagaaaaggttaccgagaaagagataaaagagagaggtggaaaagatgagtccaggattcaagtgaaggacaggaaaaagtgtgaggaacctcctcgcgctggatttattctacagacaaaacggaacaaagactccaaattgcgttcactttcggcctctttggattcgctcttggattacactgacaaggaccttgatgagtcatcatttgagatttcattgtttgcggaatcgctatatgagatgctgcagtatcaaatgggttcccgtatctttgaatttctcaaaaaactacgtgtaaaaattgtgaggcaaagaaatcaacggaagaggcatcaggaggagttgtctgtcaagcaaaacgaagcaaaatcccaagataagcgtcaaaagacagctgaacatgaagacaaggaagcctcggtgataagcgaatctgctcctgggaaggatgataaagaaacttcaggcaaggaaaccgtggacggtagccgggaaattgcagataaggaagctgtagcaaagaccaaagaaactttgggcagtaaagaagttactgtgggtgaagctgttaatatggaagtggagaatcaggatgaggaggatgacgatggtgatgacgacccagaggaagatcctgaggaggatcctgaagaagaccctgaagaagatccggaagaagatccagaagaatgcgaggaaatggacgttgcaaatactgagcaagaagagcctgctgaagagccgcagaagaaagaagaaaaccttgagaaaactagtggcactgttgctgatcctataactgaagccgaaactgataatagaaaagaagaaagaggtcctaacgactcaaaaactgaaatcaaacccaagtcggaaacggaaaagcacgggaaacaagatggaggaacatctgatgcagcaaaacgagaagaaacagttgataaagagctgttgcaggctttcagattttttgaccgtaaccaggcaggctatgttagggttgaagatatgagagtaaccattcacagcttgggaaagtttctatctcaccgtgaagtcaaggaacttgtgcagagcgctttgttagagagcaacactggaagagatgatcgaattttatacaataaacttgttagattgtctctatag

SEQ ID NO: 28313 - protein, 1276 aa, Arabidopsis thaliana
  misc_feature (1)..(1276): Ceres Seq. ID no. 2712008
MYSSRGTGYGQQQYGSQSGYSQNLGSGYPGSSVSGGAEGGSQISLSSRHPSITGAPQETDIGGGYRSHLSTAASHYGTQYGSVYGSTSLSSSQPLSTNGLGSSVLDNRSGYVPTLPDSPKFASGSYLSPSSHGYGQKTDDLYSDKLSGYIPVDRRQYGEQSSSYLGRELQNEPTRRYADPSNFARQTDLYDRIDQASLLRGEQLLKMQSLHTSSVDAGVNRQTDYLTERSSTVRHSDQEAMHYGGRLESDPHGLSVRNTSSYASQHTPSLLGAVPRRNLDDYIYPESSSNPGYGVSLPPGRDYGTGKGIHSAASLDLDYPGGMLARGTGAAPRVDDLRKGDRASYLREFDLREEERRREDQRARDKEREREREREHDRERERQRERERQRARDRERERILERREKERQGERERERKRALEIKRDRTPTARATSKDTKERTPVPKSISRDARCCELAETEAYTFYAYCCEDDSFEHDYIEDGGADVKSTSTKPLALKTGGKSVWNAKMVLMSGLSRTALEDLASDKFFEDRIPHICNILKFAVLKKDHSFMAIGGSWDPTDGMDPSVDQSSLIQTMLRHSKDKLHLDLSNCRHWNPFLEIHYDRVGTDGVFSYKEITVLFVPDLSECLPSFDVWRTQWLAHRKALTERDRLLSQEVKKDTVEVTKDAEKKSPGDTSGTPTTGTKKTVKKIIKRVVKRPVNDGKATGMKGEKSDVPEHVAIPETTVPKEESTGTSSNKKIVKKVAETGDTSDPSAKANEQTPAKTIVKKKIIKRVAKRKVAEIDNKMDGDSKKDGDSDEKKVMEVGKKSSDSGSVEMKPTAESLEDVKDENASKTVDVKQETGSPDTKKKEGASSSSKKDTKTGEDKKAEKKNNSETMSEGKKIDRNNTDEKEVKEKVTEKEIKERGGKDESRIQVKDRKKCEEPPRAGFILQTKRNKDSKLRSLSASLDSLLDYTDKDLDESSFEISLFAESLYEMLQYQMGSRIFEFLKKLRVKIVRQRNQRKRHQEELSVKQNEAKSQDKRQKTAEHEDKEASVISESAPGKDDKETSGKETVDGSREIADKEAVAKTKETLGSKEVTVGEAVNMEVENQDEEDDDGDDDPEEDPEEDPEEDPEEDPEEDPEECEEMDVANTEQEEPAEEPQKKEENLEKTSGTVADPITEAETDNRKEERGPNDSKTEIKPKSETEKHGKQDGGTSDAAKREETVDKELLQAFRFFDRNQAGYVRVEDMRVTIHSLGKFLSHREVKELVQSALLESNTGRDDRILYNKLVRLSL

SEQ ID NO: 28314 - protein, 1070 aa, Arabidopsis thaliana
  misc_feature (1)..(1070): Ceres Seq. ID no. 2712009
MQSLHTSSVDAGVNRQTDYLTERSSTVRHSDQEAMHYGGRLESDPHGLSVRNTSSYASQHTPSLLGAVPRRNLDDYIYPESSSNPGYGVSLPPGRDYGTGKGIHSAASLDLDYPGGMLARGTGAAPRVDDLRKGDRASYLREFDLREEERRREDQRARDKEREREREREHDRERERQRERERQRARDRERERILERREKERQGERERERKRALEIKRDRTPTARATSKDTKERTPVPKSISRDARCCELAETEAYTFYAYCCEDDSFEHDYIEDGGADVKSTSTKPLALKTGGKSVWNAKMVLMSGLSRTALEDLASDKFFEDRIPHICNILKFAVLKKDHSFMAIGGSWDPTDGMDPSVDQSSLIQTMLRHSKDKLHLDLSNCRHWNPFLEIHYDRVGTDGVFSYKEITVLFVPDLSECLPSFDVWRTQWLAHRKALTERDRLLSQEVKKDTVEVTKDAEKKSPGDTSGTPTTGTKKTVKKIIKRVVKRPVNDGKATGMKGEKSDVPEHVAIPETTVPKEESTGTSSNKKIVKKVAETGDTSDPSAKANEQTPAKTIVKKKIIKRVAKRKVAEIDNKMDGDSKKDGDSDEKKVMEVGKKSSDSGSVEMKPTAESLEDVKDENASKTVDVKQETGSPDTKKKEGASSSSKKDTKTGEDKKAEKKNNSETMSEGKKIDRNNTDEKEVKEKVTEKEIKERGGKDESRIQVKDRKKCEEPPRAGFILQTKRNKDSKLRSLSASLDSLLDYTDKDLDESSFEISLFAESLYEMLQYQMGSRIFEFLKKLRVKIVRQRNQRKRHQEELSVKQNEAKSQDKRQKTAEHEDKEASVISESAPGKDDKETSGKETVDGSREIADKEAVAKTKETLGSKEVTVGEAVNMEVENQDEEDDDGDDDPEEDPEEDPEEDPEEDPEEDPEECEEMDVANTEQEEPAEEPQKKEENLEKTSGTVADPITEAETDNRKEERGPNDSKTEIKPKSETEKHGKQDGGTSDAAKREETVDKELLQAFRFFDRNQAGYVRVEDMRVTIHSLGKFLSHREVKELVQSALLESNTGRDDRILYNKLVRLSL

SEQ ID NO: 28315 - protein, 1036 aa, Arabidopsis thaliana
  misc_feature (1)..(1036): Ceres Seq. ID no. 2712010
MHYGGRLESDPHGLSVRNTSSYASQHTPSLLGAVPRRNLDDYIYPESSSNPGYGVSLPPGRDYGTGKGIHSAASLDLDYPGGMLARGTGAAPRVDDLRKGDRASYLREFDLREEERRREDQRARDKEREREREREHDRERERQRERERQRARDRERERILERREKERQGERERERKRALEIKRDRTPTARATSKDTKERTPVPKSISRDARCCELAETEAYTFYAYCCEDDSFEHDYIEDGGADVKSTSTKPLALKTGGKSVWNAKMVLMSGLSRTALEDLASDKFFEDRIPHICNILKFAVLKKDHSFMAIGGSWDPTDGMDPSVDQSSLIQTMLRHSKDKLHLDLSNCRHWNPFLEIHYDRVGTDGVFSYKEITVLFVPDLSECLPSFDVWRTQWLAHRKALTERDRLLSQEVKKDTVEVTKDAEKKSPGDTSGTPTTGTKKTVKKIIKRVVKRPVNDGKATGMKGEKSDVPEHVAIPETTVPKEESTGTSSNKKIVKKVAETGDTSDPSAKANEQTPAKTIVKKKIIKRVAKRKVAEIDNKMDGDSKKDGDSDEKKVMEVGKKSSDSGSVEMKPTAESLEDVKDENASKTVDVKQETGSPDTKKKEGASSSSKKDTKTGEDKKAEKKNNSETMSEGKKIDRNNTDEKEVKEKVTEKEIKERGGKDESRIQVKDRKKCEEPPRAGFILQTKRNKDSKLRSLSASLDSLLDYTDKDLDESSFEISLFAESLYEMLQYQMGSRIFEFLKKLRVKIVRQRNQRKRHQEELSVKQNEAKSQDKRQKTAEHEDKEASVISESAPGKDDKETSGKETVDGSREIADKEAVAKTKETLGSKEVTVGEAVNMEVENQDEEDDDGDDDPEEDPEEDPEEDPEEDPEEDPEECEEMDVANTEQEEPAEEPQKKEENLEKTSGTVADPITEAETDNRKEERGPNDSKTEIKPKSETEKHGKQDGGTSDAAKREETVDKELLQAFRFFDRNQAGYVRVEDMRVTIHSLGKFLSHREVKELVQSALLESNTGRDDRILYNKLVRLSL

SEQ ID NO: 28316 - DNA, 2655 bp, Arabidopsis thaliana
  misc_feature (1)..(2655): Ceres Seq. ID no. 2712086
atgaagattcaccttttgttggccatgattggaacctttgtcgttataattggagcccaggatcaagaaggtttcatcagtttagattgtggattacctagtgacgaatctccttacgatgattcgtttaacggattaacattcacatcggattccactttcatccaaacaggaaaaattgatagtgtcgataaagatcttaacataaacttatcaaaacaatatttgactcttagatacttcccagaaggaaaacgtaattgttatagtcttgatgtcaagcgtggcacaacttatctcatcgtggttagctttgtatatggaaattatgatggtcttaaccgtgatccaaacttcgatatccatcttggtcccaataagtggaaaagaatagatttggatggagagaaagaaggtacaagagaagagatcatacacaaagccaggtcaaactctttggatatttgtcttgttaagacaggagaaactttgccaataatttcagccatagaaatacggccactaaggaataatacgtatgttacacaatctggttcgctgatgatgtctttccgggtttatcttagcaattcagatgcatctataaggtatgctgatgacgtccatgatcgtatttggtctccattcaacggatcttcacatacacatataacaactgatctcaatataaacaactcaaatgcatatgagattccaaaaaatatactccaaactgctgccataccaagaaacgccagtgcgccgctgattattacgtgggatccactacccattaatgcggaggtatacttgtacatgcactttgcggagattcaaacccttgaagccaacgagacgaggcagtttgacgttatcttgagaggaaactttaatcattcaggatttagtccaaccaagttaaaggtatttacattatacacagaagaaccaatgaaatgtggttcagaaggttgttatttacagctagtaaaaacaccgaactcaactctgccacctctgatcaacgctattgaggcatacagtgttatcgagttctcacaattggaaacaagtcttagtgatgtggacgctatcaagaacatcaaaaatacttataagctgaataaaatcacttggcaaggagatccatgtctccctcaagatttgtcgtgggaaagtattagatgcacctacgtagatggctccacttcaccaacaatcatttccttagatttgtcgaaaagtggattaaatgggagtataccccaaattttacaaaatttcacgcaattacaagaactggacttatcaaataatagcttgactggaccggtgcctatcttccttgccaacatgaaaacgttatctttaataaacttaagtgggaacaatctcagtggttcagttcctcaagctcttcttgacaaagaaaaagaaggacttgtgttaaaacttgaaggaaatccagatttgtgcaaatccagtttttgcaataccgaaaagaaaaataaattcttgctcccggttattgcatcagctgcctctttggttattgtagttgtggttgtggctcttttttttgtcttccgaaagaagaaggccagcccttcaaatctacatgctccaccaagtatgcctgtatcgaatcccgggcacaatagtcaatcagaatcatcattcacatcgaaaaaaattaggtttacttactctgaggttcaagaaatgacaaataacttcgataaagctctcggtgaaggaggatttggagtcgtgtatcatggttttgttaatgttattgaacaagtagcagttaaattgctatcacaatcatcttctcaaggctataagcatttcaaggcagaggtggaactccttatgagagttcaccatataaatttggtgagtcttgttgggtattgtgatgaaggagaacacttggctcttatttatgaatacatgccaaatggagacttaaagcaacatttgtcaggaaagcatggcggattcgtcctgagctgggaaagtagactaaaaatagttttggatgcagcactaggattggagtatttacatactggatgtgtaccaccaatggttcacagagatatcaaaactacgaatatacttctagatcaacatctccaagctaaattagctgattttgggctttcaagatcttttcccatcggaaatgagaaaaatgtgtcaactgttgttgctggtactcctggatatcttgatcctgagtattatcaaacaaattggttgacagaaaagagtgatatatacagtttcggaattgtactgttagagataatttcaaaccgtcctataatccagcaatcccgtgaaaagcctcacatagtggaatgggtcagttttatgataacaaaaggagatcttagaagtattatggatccaaacctccaccaagattatgatattggttctgtctggaaggccattgaattagcaatgtcatgtgtgagtctttcttctgcaagacgaccaaacatgtctcgagttgtgaatgaattaaaagaatgtcttatatccgaaacctctaggataggtgagggacgagacatggaatcaaaaggttcaatggaattcagcagagacatttataatgaggtaatacctcaagctcgctag

SEQ ID NO: 28317 - protein, 884 aa, Arabidopsis thaliana
  misc_feature (1)..(884): Ceres Seq. ID no. 2712087
MKIHLLLAMIGTFVVIIGAQDQEGFISLDCGLPSDESPYDDSFNGLTFTSDSTFIQTGKIDSVDKDLNINLSKQYLTLRYFPEGKRNCYSLDVKRGTTYLIVVSFVYGNYDGLNRDPNFDIHLGPNKWKRIDLDGEKEGTREEIIHKARSNSLDICLVKTGETLPIISAIEIRPLRNNTYVTQSGSLMMSFRVYLSNSDASIRYADDVHDRIWSPFNGSSHTHITTDLNINNSNAYEIPKNILQTAAIPRNASAPLIITWDPLPINAEVYLYMHFAEIQTLEANETRQFDVILRGNFNHSGFSPTKLKVFTLYTEEPMKCGSEGCYLQLVKTPNSTLPPLINAIEAYSVIEFSQLETSLSDVDAIKNIKNTYKLNKITWQGDPCLPQDLSWESIRCTYVDGSTSPTIISLDLSKSGLNGSIPQILQNFTQLQELDLSNNSLTGPVPIFLANMKTLSLINLSGNNLSGSVPQALLDKEKEGLVLKLEGNPDLCKSSFCNTEKKNKFLLPVIASAASLVIVVVVVALFFVFRKKKASPSNLHAPPSMPVSNPGHNSQSESSFTSKKIRFTYSEVQEMTNNFDKALGEGGFGVVYHGFVNVIEQVAVKLLSQSSSQGYKHFKAEVELLMRVHHINLVSLVGYCDEGEHLALIYEYMPNGDLKQHLSGKHGGFVLSWESRLKIVLDAALGLEYLHTGCVPPMVHRDIKTTNILLDQHLQAKLADFGLSRSFPIGNEKNVSTVVAGTPGYLDPEYYQTNWLTEKSDIYSFGIVLLEIISNRPIIQQSREKPHIVEWVSFMITKGDLRSIMDPNLHQDYDIGSVWKAIELAMSCVSLSSARRPNMSRVVNELKECLISETSRIGEGRDMESKGSMEFSRDIYNEVIPQAR

SEQ ID NO: 28318 - protein, 876 aa, Arabidopsis thaliana
  misc_feature (1)..(876): Ceres Seq. ID no. 2712088
MIGTFVVIIGAQDQEGFISLDCGLPSDESPYDDSFNGLTFTSDSTFIQTGKIDSVDKDLNINLSKQYLTLRYFPEGKRNCYSLDVKRGTTYLIVVSFVYGNYDGLNRDPNFDIHLGPNKWKRIDLDGEKEGTREEIIHKARSNSLDICLVKTGETLPIISAIEIRPLRNNTYVTQSGSLMMSFRVYLSNSDASIRYADDVHDRIWSPFNGSSHTHITTDLNINNSNAYEIPKNILQTAAIPRNASAPLIITWDPLPINAEVYLYMHFAEIQTLEANETRQFDVILRGNFNHSGFSPTKLKVFTLYTEEPMKCGSEGCYLQLVKTPNSTLPPLINAIEAYSVIEFSQLETSLSDVDAIKNIKNTYKLNKITWQGDPCLPQDLSWESIRCTYVDGSTSPTIISLDLSKSGLNGSIPQILQNFTQLQELDLSNNSLTGPVPIFLANMKTLSLINLSGNNLSGSVPQALLDKEKEGLVLKLEGNPDLCKSSFCNTEKKNKFLLPVIASAASLVIVVVVVALFFVFRKKKASPSNLHAPPSMPVSNPGHNSQSESSFTSKKIRFTYSEVQEMTNNFDKALGEGGFGVVYHGFVNVIEQVAVKLLSQSSSQGYKHFKAEVELLMRVHHINLVSLVGYCDEGEHLALIYEYMPNGDLKQHLSGKHGGFVLSWESRLKIVLDAALGLEYLHTGCVPPMVHRDIKTTNILLDQHLQAKLADFGLSRSFPIGNEKNVSTVVAGTPGYLDPEYYQTNWLTEKSDIYSFGIVLLEIISNRPIIQQSREKPHIVEWVSFMITKGDLRSIMDPNLHQDYDIGSVWKAIELAMSCVSLSSARRPNMSRVVNELKECLISETSRIGEGRDMESKGSMEFSRDIYNEVIPQAR

SEQ ID NO: 28319 - protein, 697 aa, Arabidopsis thaliana
  misc_feature (1)..(697): Ceres Seq. ID no. 2712089
MMSFRVYLSNSDASIRYADDVHDRIWSPFNGSSHTHITTDLNINNSNAYEIPKNILQTAAIPRNASAPLIITWDPLPINAEVYLYMHFAEIQTLEANETRQFDVILRGNFNHSGFSPTKLKVFTLYTEEPMKCGSEGCYLQLVKTPNSTLPPLINAIEAYSVIEFSQLETSLSDVDAIKNIKNTYKLNKITWQGDPCLPQDLSWESIRCTYVDGSTSPTIISLDLSKSGLNGSIPQILQNFTQLQELDLSNNSLTGPVPIFLANMKTLSLINLSGNNLSGSVPQALLDKEKEGLVLKLEGNPDLCKSSFCNTEKKNKFLLPVIASAASLVIVVVVVALFFVFRKKKASPSNLHAPPSMPVSNPGHNSQSESSFTSKKIRFTYSEVQEMTNNFDKALGEGGFGVVYHGFVNVIEQVAVKLLSQSSSQGYKHFKAEVELLMRVHHINLVSLVGYCDEGEHLALIYEYMPNGDLKQHLSGKHGGFVLSWESRLKIVLDAALGLEYLHTGCVPPMVHRDIKTTNILLDQHLQAKLADFGLSRSFPIGNEKNVSTVVAGTPGYLDPEYYQTNWLTEKSDIYSFGIVLLEIISNRPIIQQSREKPHIVEWVSFMITKGDLRSIMDPNLHQDYDIGSVWKAIELAMSCVSLSSARRPNMSRVVNELKECLISETSRIGEGRDMESKGSMEFSRDIYNEVIPQAR

SEQ ID NO: 28320 - DNA, 849 bp, Arabidopsis thaliana
  misc_feature (1)..(849): Ceres Seq. ID no. 2712102
atgttgtatcaggcggcttcagaggctgcacaaaagagatggactacaagcgatttcgatatcggaaagccacttggtagaggaaagtttggccatgtttatctagcaagagagaaacggagcgatcacattgtggctttaaaggttctttttaaggctcagcttcaacaatctcaagttgaacaccagttacgaagggaagtagagattcaatctcatcttcggcatcccaatattctgcggctctacggttacttctatgatcagaaaagagtttatttgattttggagtatgctgtaaggggtgagctttataaagagcttcagaagtgcaagtacttcagcgaacgtcgagcagcaacttatgttgcgtcattggctagagccctcatctattgccatggaaagcatgtaattcacagagatataaaacctgaaaatctgttgattggtgctcagggtgagctcaagattgcagattttggatggtcagtacacacattcaaccgtagaaggactatgtgtggcactttggattaccttccacctgagatggtggaaagcgttgaacatgatgcgagtgtcgatatatggagtctaggaattctctgctacgaatttctttatggtgttcctccttttgaggccagggagcattcagagacatacaaaaggattgttcaagtggatctcaagttccctcccaaacccattgtgtcatcatctgcaaaggacctgattagccagatgttggttaaggagtctacgcaacgtttggccttgcacaagcttcttgaacacccgtggattgtgcaaaacgcagacccatcaggcctttacagaggatga

SEQ ID NO: 28321 - protein, 282 aa, Arabidopsis thaliana
  misc_feature (1)..(282): Ceres Seq. ID no. 2712103
MLYQAASEAAQKRWTTSDFDIGKPLGRGKFGHVYLAREKRSDHIVALKVLFKAQLQQSQVEHQLRREVEIQSHLRHPNILRLYGYFYDQKRVYLILEYAVRGELYKELQKCKYFSERRAATYVASLARALIYCHGKHVIHRDIKPENLLIGAQGELKIADFGWSVHTFNRRRTMCGTLDYLPPEMVESVEHDASVDIWSLGILCYEFLYGVPPFEAREHSETYKRIVQVDLKFPPKPIVSSSAKDLISQMLVKESTQRLALHKLLEHPWIVQNADPSGLYRG

SEQ ID NO: 28322 - DNA, 6465 bp, Arabidopsis thaliana
  misc_feature (1)..(6465): Ceres Seq. ID no. 2712339
atgagcggaaggagatgtgatcggaggttgaatgtgcagaaagtttcagcggcagatgaactcgaaactaaacttggatttgggcttttctcccaaggggaaacgcggctcgggtggctactcacgtttgcatcatcatcttgggaagatgccgatactgggaaaacctttagttgtgtggaccttttctttgtcactcaggacggctcttcttttaagactaagtacaagttccgcccttacttgtatgccgccaccaaagacaatatggaactggaagttgaagcctacttgagacgccgatatgaaagacaagttgctgatattcagattgttcacaaagaagatctttatcttaaaaatcatctatctggcctgcaaaaaaaatatctcaaagtatcatttgacactgtgcaacaattggtggaagtaaagagggatctgttgcatattgtcgaacgaaacctcgcaaaatttaatgcacttgaagcttacgaatccatcttgtctggaaaacgagaacaacgtcctcaagactgcttagactctgtggtggacctccgcgagtacgatgttccttatcatgtccgatttgcaattgataatgatgtgcgtagtgggcaatggtacaatgtcagtatttccagcactgatgtcatactagagaagaggacggatcttctccaacgcgcagaagttcgcgtttgtgcattcgatatagagacagtaaagcttccattgaagttcccggatgctgaatatgatcaaattatgatgatatcctacatggttgatgggcaaggttttctaattactaacagagagtgtgttggcaaagacatagaagatctggaatatacacccaaaccagagtttgaagggtatttcaaagtcacgaatgttaccaacgaggttgaactcctccgaaaatggttttctcatatgcaagagttgaaacctggtatttatgttacatacaacggtgacttttttgactggccatttatagaacggagagcatctcatcatgggatcaaaatgaacgaggagttgggattccgttgtgatcaaaatcaaggtgaatgtcgagctaagtttgtgtgccatttggattgtttttcttgggtgaaacgtgatagctatcttcctcagggaagccagggtctgaaggctgttacaaaggtaaaactgggttacgatccactggaagtgaatcctgaggacatggttcggtttgcaatggaaaagccacagacaatggcctcctactctgtctctgatgctgttgcaacttactacctatacatgacatatgtccatccgttcgttttttctctcgcaactatcattccaatggtccctgatgaggttttacgcaaagggagtggcaccctttgtgaaatgcttttgatggttgaggcttacaaggcaaatgttgtatgtcccaacaaaaatcaagctgaccctgagaagttctaccaaggtaaacttcttgaaagtgagacatatattggtggccatgtagagtgcctccaaagtggtgttttcagatctgacattccaaccagttttaagctcgacgcatccgcataccagcaactgatcgataaccttggtcgggatctggaatatgctatcactgttgaaggaaaaatgagaatggattcagtttccaattttgatgaagtaaaggaagtaatcagggaaaagctcgagaagttacgggatgatcctatacgtgaagaggggcctcttatttatcaccttgatgtcgcggcgatgtatccaaatattatcttaacaaacaggcttcagccaccatcaatagttacggatgaggtttgcacagcatgtgatttcaacggcccggaaaagacctgtcttagaaaacttgaatgggtttggcgtggggtgacgttcaagggaaataaaagtgaatattaccatctgaagaagcagattgagtctgaatctgttgatgctggagcaaatatgcagtcttcaaaaccttttcttgatctgccaaaggtggaacaacaatccaaattaaaagaacgactgaaaaaatactgtcaaaaggcatatagccgagtacttgacaagccaatcactgaagttcgcgaggctgggatatgcatgagagaaaacccgttctatgtggacactgtgcgcagctttcgagataggaggtatgaatacaaaacacttaacaaggtctggaagggaaagttgtcagaggccaaggcaagtggcaatttaatcaagatccaggaagcacatgacatggtagtggtttacgattccttgcagctagctcataagtgtatacttaattccttttatggatatgtcatgcgaaagggcgcaagatggtactccatggaaatggctggggtagttacttatactggagccaaaatcatccagaatgctcgtttgcttattgaacgaattgggaaaccacttgagctggatacagatggtatatggtgtgctctacctggatcttttcctgagaactttacctttaaaaccatagatatgaagaaattcaccatctcgtatccgtgtgtaatacttaatgttgatgtggcgaagaataattcaaatgaccaatatcagactctagtagatcctgtacgaaagacatataattcacgtagcgaatgctcaattgaatttgaagtggatggaccgtacaaggcaatgattattcctgcatccaaggaagagggaatcttaattaagaagcggtatgctgttttcaatcatgacggaaccatagcagaactcaaggggtttgagatgaagcgtagaggagagctgaaactcattaaagttttccaggccgagctatttgacaaatttctgcatggatcaacccttgaagagtgttattctgctgttgcagctgttgcaaatcgttggcttgacctactcgagggtcaaggaaaagatattgccgatagtgaattgctagattatatatcagaatcaagcactatgagcaaatcgttagcagattatggtcaacaaaagtcatgtgcagtgaccacagcaaaacgcctggctgattttcttggtgatacaatggtcaaagataaaggactgcgctgccaatacatcgttgctcgtgaaccagaggggacacctgtaagtgaacgtgctgtccctgttgccatatttcaaacagatgatcctgaaaaaaagttttatctgcaaaaatggtgcaagatatcatcatatactggaatccgttcaattattgactggatgtattacaagcagcgtcttcattcagctattcaaaaagttattaccattcctgctgcaatgcagaaggtggcaaatcctgtacttagggtgcgtcatccttattggctcgagaaaaaggtctgtgacaaatttcgtcagggaaaaatagttgatatgtttagctcagcaaacaaagatcattcgacaactcaagataatgtagtggcggatattgaagagttttgcaaagaaaacagaccttccgtaaaagggccaaagccagttgcgcgttcatttgaagtcgatagaaatcactctgagggtaagcagcaagagagttgggatccagagttccatgatatctcattacagaacgttgacaagaatgtagattaccaaggatggcttgaactggaaaaaagaaaatggaaaatgactctaacgaataagaaaaaaagaaggtttgatgatctaaagccttgtaatcagattgatgcacacaagataaataaaaaagtctgtaagggaagagtaggtgtaggctcatactttaggaggcctgaagaagctttgactagttcctatttgcagataatacagttggtccaaagtccacagagcgggcaattttttgcttgggttgttgtggaaggattgatgcttaagatcccattgacgatcccaagggtgttttacattaattccaaagcttctatagctggaaacttcacgggaaagtgtatcaacaagattcttcctcacggaaagccttgttacaatttgatggaggcacgtcatttacacaatacacatatcttgcttcttgtcaatattcaggaagatcaatttataaaagaaagcaaaaagcttgccgctctacttgcagaccccgaaattgagggcatatatgaaactaagatgcctctggagtttagtgctatatgtcagattggatgtgtatgcaaaattgaagacacggccaaacaccgtaacacccaagatggatggaaacttggtgaacttcacaggataactacaactgagtgtcgctacttggagaattctattccacttgtttatttgtatcacagcacctcaacaggtcgtgctgtttatgttttatattgtcatgcttcgaagcttatgtctgttgtggtagtcaatccttacggtgacaaggaattattatcatctgccctagagagacagtttagagatagatgccaagaactgtcacctgagccattttcttgggatggtatccttttccaggtcgagtatgttgaccatccagaagctgccacgaaatttttacaaaaagcgctctgtgaatacagagaagaaaattgtggagcaactgtggcagtcattgaatgccctgactttaacaccacgaaggaaggtgtaaaggccctggaagatttcccatgtgtgaggattcccttcaacgacgatgacaatagttatcagcctgtctcctggcaacgtccagcagcaaaaatagcagtgctccgttgtgcttcagcaattcagtggttggaccggaggattgcccagtcaagatacgcccatgtgcctctggggaattttggacgtgattggttaacgttcacagtagatatcttcctgtccagggcactccgtgaccagcaacaggttctttgggtctcagataatggtgttccagaccttggagatataaacaatgaagagacatttctagctgatgagttacaagagacaagtttgctattccctggagcgtacagaaaagtgtctgtggagttaaaggtccatagattagctgttaatgcccttctgaaaagtgacctggtgagtgaaatggaaggaggcggctttttgggtgtgaattctagaggaagtagcttaaacgataatggcagttttgatgagaataatggatgcgcgcaagcatttcgtgtcctgaaacaattgatcaagcgcttgttgcatgatgcgtgtaattctggcaatatatatgctgattccattttgcaacatctgtcttggtggctccgcagcccttcctcaaagcttcacgatccagctctccatctcatgcttcacaaggtcatgcaaaaggtgtttgcgctgcttttgactgatttgcggaggttaggtgctataataatatacgcagacttctcaaaggtcattatcgacacagggaaatttgatctatctgctgcaaagacttattgtgaaagcttgctcacagtgatggggagtagagatatctttaagttgatcttgcttgagccggttcactactggcactcgttacttttcatggaccagcataactacgctggtatccgagctaccggagatgaaatttcaggtaacgaagttactattgaaccaaagtggagcgttgcacggcatttacccgagtatattcagaaggattttatcataattgttgccacgtttatatttggcccctggaaatttgcattagagaaaaaaaggggcagtgcagagagtttagaggcagagatggtagaatatctcaaggaacagataggaacccggttcataagcatgattgttgagaagattggtaatatcaggtcacacatcaaggatataaacgtgtcagatgcatcttgggcttctggtcaagctcccaaaggagattacacgttcgaatttatacaaattattactgctgttctggctcttgatcaaaacgttcagcaagatgttctggtaatgagaaagattctgttgaagtacattaaagtaaaagaatgtgctgctgaagccgaatttattgatcctgggccatccttcatcttacccaacgtggcttgcagcaactgcggtgcctacagagacctagatttctgcagagactcagctctcttaacagaaaaagaatggtcatgtgcggatccgcaatgtgtgaagatatatgacaaagagcagatagagagtagcattatccagatggtgagacagagggaaagaatgtaccagttgcaggatctagtgtgcaataggtgcaatcaggtgaaagccgctcatttgacagagcagtgtgagtgttctggatcctttagatgcaaggagagtggttcagatttccacaagaggattgagattttcttggatatagcaaagcgccagaagtttagactgctagaagaatgcatctcctggattttatttgccaccagctgttga

SEQ ID NO: 28323 - protein, 2154 aa, Arabidopsis thaliana
  misc_feature (1)..(2154): Ceres Seq. ID no. 2712340
MSGRRCDRRLNVQKVSAADELETKLGFGLFSQGETRLGWLLTFASSSWEDADTGKTFSCVDLFFVTQDGSSFKTKYKFRPYLYAATKDNMELEVEAYLRRRYERQVADIQIVHKEDLYLKNHLSGLQKKYLKVSFDTVQQLVEVKRDLLHIVERNLAKFNALEAYESILSGKREQRPQDCLDSVVDLREYDVPYHVRFAIDNDVRSGQWYNVSISSTDVILEKRTDLLQRAEVRVCAFDIETVKLPLKFPDAEYDQIMMISYMVDGQGFLITNRECVGKDIEDLEYTPKPEFEGYFKVTNVTNEVELLRKWFSHMQELKPGIYVTYNGDFFDWPFIERRASHHGIKMNEELGFRCDQNQGECRAKFVCHLDCFSWVKRDSYLPQGSQGLKAVTKVKLGYDPLEVNPEDMVRFAMEKPQTMASYSVSDAVATYYLYMTYVHPFVFSLATIIPMVPDEVLRKGSGTLCEMLLMVEAYKANVVCPNKNQADPEKFYQGKLLESETYIGGHVECLQSGVFRSDIPTSFKLDASAYQQLIDNLGRDLEYAITVEGKMRMDSVSNFDEVKEVIREKLEKLRDDPIREEGPLIYHLDVAAMYPNIILTNRLQPPSIVTDEVCTACDFNGPEKTCLRKLEWVWRGVTFKGNKSEYYHLKKQIESESVDAGANMQSSKPFLDLPKVEQQSKLKERLKKYCQKAYSRVLDKPITEVREAGICMRENPFYVDTVRSFRDRRYEYKTLNKVWKGKLSEAKASGNLIKIQEAHDMVVVYDSLQLAHKCILNSFYGYVMRKGARWYSMEMAGVVTYTGAKIIQNARLLIERIGKPLELDTDGIWCALPGSFPENFTFKTIDMKKFTISYPCVILNVDVAKNNSNDQYQTLVDPVRKTYNSRSECSIEFEVDGPYKAMIIPASKEEGILIKKRYAVFNHDGTIAELKGFEMKRRGELKLIKVFQAELFDKFLHGSTLEECYSAVAAVANRWLDLLEGQGKDIADSELLDYISESSTMSKSLADYGQQKSCAVTTAKRLADFLGDTMVKDKGLRCQYIVAREPEGTPVSERAVPVAIFQTDDPEKKFYLQKWCKISSYTGIRSIIDWMYYKQRLHSAIQKVITIPAAMQKVANPVLRVRHPYWLEKKVCDKFRQGKIVDMFSSANKDHSTTQDNVVADIEEFCKENRPSVKGPKPVARSFEVDRNHSEGKQQESWDPEFHDISLQNVDKNVDYQGWLELEKRKWKMTLTNKKKRRFDDLKPCNQIDAHKINKKVCKGRVGVGSYFRRPEEALTSSYLQIIQLVQSPQSGQFFAWVVVEGLMLKIPLTIPRVFYINSKASIAGNFTGKCINKILPHGKPCYNLMEARHLHNTHILLLVNIQEDQFIKESKKLAALLADPEIEGIYETKMPLEFSAICQIGCVCKIEDTAKHRNTQDGWKLGELHRITTTECRYLENSIPLVYLYHSTSTGRAVYVLYCHASKLMSVVVVNPYGDKELLSSALERQFRDRCQELSPEPFSWDGILFQVEYVDHPEAATKFLQKALCEYREENCGATVAVIECPDFNTTKEGVKALEDFPCVRIPFNDDDNSYQPVSWQRPAAKIAVLRCASAIQWLDRRIAQSRYAHVPLGNFGRDWLTFTVDIFLSRALRDQQQVLWVSDNGVPDLGDINNEETFLADELQETSLLFPGAYRKVSVELKVHRLAVNALLKSDLVSEMEGGGFLGVNSRGSSLNDNGSFDENNGCAQAFRVLKQLIKRLLHDACNSGNIYADSILQHLSWWLRSPSSKLHDPALHLMLHKVMQKVFALLLTDLRRLGAIIIYADFSKVIIDTGKFDLSAAKTYCESLLTVMGSRDIFKLILLEPVHYWHSLLFMDQHNYAGIRATGDEISGNEVTIEPKWSVARHLPEYIQKDFIIIVATFIFGPWKFALEKKRGSAESLEAEMVEYLKEQIGTRFISMIVEKIGNIRSHIKDINVSDASWASGQAPKGDYTFEFIQIITAVLALDQNVQQDVLVMRKILLKYIKVKECAAEAEFIDPGPSFILPNVACSNCGAYRDLDFCRDSALLTEKEWSCADPQCVKIYDKEQIESSIIQMVRQRERMYQLQDLVCNRCNQVKAAHLTEQCECSGSFRCKESGSDFHKRIEIFLDIAKRQKFRLLEECISWILFATSC

SEQ ID NO: 28324 - protein, 2065 aa, Arabidopsis thaliana
  misc_feature (1)..(2065): Ceres Seq. ID no. 2712341
MELEVEAYLRRRYERQVADIQIVHKEDLYLKNHLSGLQKKYLKVSFDTVQQLVEVKRDLLHIVERNLAKFNALEAYESILSGKREQRPQDCLDSVVDLREYDVPYHVRFAIDNDVRSGQWYNVSISSTDVILEKRTDLLQRAEVRVCAFDIETVKLPLKFPDAEYDQIMMISYMVDGQGFLITNRECVGKDIEDLEYTPKPEFEGYFKVTNVTNEVELLRKWFSHMQELKPGIYVTYNGDFFDWPFIERRASHHGIKMNEELGFRCDQNQGECRAKFVCHLDCFSWVKRDSYLPQGSQGLKAVTKVKLGYDPLEVNPEDMVRFAMEKPQTMASYSVSDAVATYYLYMTYVHPFVFSLATIIPMVPDEVLRKGSGTLCEMLLMVEAYKANVVCPNKNQADPEKFYQGKLLESETYIGGHVECLQSGVFRSDIPTSFKLDASAYQQLIDNLGRDLEYAITVEGKMRMDSVSNFDEVKEVIREKLEKLRDDPIREEGPLIYHLDVAAMYPNIILTNRLQPPSIVTDEVCTACDFNGPEKTCLRKLEWVWRGVTFKGNKSEYYHLKKQIESESVDAGANMQSSKPFLDLPKVEQQSKLKERLKKYCQKAYSRVLDKPITEVREAGICMRENPFYVDTVRSFRDRRYEYKTLNKVWKGKLSEAKASGNLIKIQEAHDMVVVYDSLQLAHKCILNSFYGYVMRKGARWYSMEMAGVVTYTGAKIIQNARLLIERIGKPLELDTDGIWCALPGSFPENFTFKTIDMKKFTISYPCVILNVDVAKNNSNDQYQTLVDPVRKTYNSRSECSIEFEVDGPYKAMIIPASKEEGILIKKRYAVFNHDGTIAELKGFEMKRRGELKLIKVFQAELFDKFLHGSTLEECYSAVAAVANRWLDLLEGQGKDIADSELLDYISESSTMSKSLADYGQQKSCAVTTAKRLADFLGDTMVKDKGLRCQYIVAREPEGTPVSERAVPVAIFQTDDPEKKFYLQKWCKISSYTGIRSIIDWMYYKQRLHSAIQKVITIPAAMQKVANPVLRVRHPYWLEKKVCDKFRQGKIVDMFSSANKDHSTTQDNVVADIEEFCKENRPSVKGPKPVARSFEVDRNHSEGKQQESWDPEFHDISLQNVDKNVDYQGWLELEKRKWKMTLTNKKKRRFDDLKPCNQIDAHKINKKVCKGRVGVGSYFRRPEEALTSSYLQIIQLVQSPQSGQFFAWVVVEGLMLKIPLTIPRVFYINSKASIAGNFTGKCINKILPHGKPCYNLMEARHLHNTHILLLVNIQEDQFIKESKKLAALLADPEIEGIYETKMPLEFSAICQIGCVCKIEDTAKHRNTQDGWKLGELHRITTTECRYLENSIPLVYLYHSTSTGRAVYVLYCHASKLMSVVVVNPYGDKELLSSALERQFRDRCQELSPEPFSWDGILFQVEYVDHPEAATKFLQKALCEYREENCGATVAVIECPDFNTTKEGVKALEDFPCVRIPFNDDDNSYQPVSWQRPAAKIAVLRCASAIQWLDRRIAQSRYAHVPLGNFGRDWLTFTVDIFLSRALRDQQQVLWVSDNGVPDLGDINNEETFLADELQETSLLFPGAYRKVSVELKVHRLAVNALLKSDLVSEMEGGGFLGVNSRGSSLNDNGSFDENNGCAQAFRVLKQLIKRLLHDACNSGNIYADSILQHLSWWLRSPSSKLHDPALHLMLHKVMQKVFALLLTDLRRLGAIIIYADFSKVIIDTGKFDLSAAKTYCESLLTVMGSRDIFKLILLEPVHYWHSLLFMDQHNYAGIRATGDEISGNEVTIEPKWSVARHLPEYIQKDFIIIVATFIFGPWKFALEKKRGSAESLEAEMVEYLKEQIGTRFISMIVEKIGNIRSHIKDINVSDASWASGQAPKGDYTFEFIQIITAVLALDQNVQQDVLVMRKILLKYIKVKECAAEAEFIDPGPSFILPNVACSNCGAYRDLDFCRDSALLTEKEWSCADPQCVKIYDKEQIESSIIQMVRQRERMYQLQDLVCNRCNQVKAAHLTEQCECSGSFRCKESGSDFHKRIEIFLDIAKRQKFRLLEECISWILFATSC

SEQ ID NO: 28325 - protein, 1897 aa, Arabidopsis thaliana
  misc_feature (1)..(1897): Ceres Seq. ID no. 2712342
MMISYMVDGQGFLITNRECVGKDIEDLEYTPKPEFEGYFKVTNVTNEVELLRKWFSHMQELKPGIYVTYNGDFFDWPFIERRASHHGIKMNEELGFRCDQNQGECRAKFVCHLDCFSWVKRDSYLPQGSQGLKAVTKVKLGYDPLEVNPEDMVRFAMEKPQTMASYSVSDAVATYYLYMTYVHPFVFSLATIIPMVPDEVLRKGSGTLCEMLLMVEAYKANVVCPNKNQADPEKFYQGKLLESETYIGGHVECLQSGVFRSDIPTSFKLDASAYQQLIDNLGRDLEYAITVEGKMRMDSVSNFDEVKEVIREKLEKLRDDPIREEGPLIYHLDVAAMYPNIILTNRLQPPSIVTDEVCTACDFNGPEKTCLRKLEWVWRGVTFKGNKSEYYHLKKQIESESVDAGANMQSSKPFLDLPKVEQQSKLKERLKKYCQKAYSRVLDKPITEVREAGICMRENPFYVDTVRSFRDRRYEYKTLNKVWKGKLSEAKASGNLIKIQEAHDMVVVYDSLQLAHKCILNSFYGYVMRKGARWYSMEMAGVVTYTGAKIIQNARLLIERIGKPLELDTDGIWCALPGSFPENFTFKTIDMKKFTISYPCVILNVDVAKNNSNDQYQTLVDPVRKTYNSRSECSIEFEVDGPYKAMIIPASKEEGILIKKRYAVFNHDGTIAELKGFEMKRRGELKLIKVFQAELFDKFLHGSTLEECYSAVAAVANRWLDLLEGQGKDIADSELLDYISESSTMSKSLADYGQQKSCAVTTAKRLADFLGDTMVKDKGLRCQYIVAREPEGTPVSERAVPVAIFQTDDPEKKFYLQKWCKISSYTGIRSIIDWMYYKQRLHSAIQKVITIPAAMQKVANPVLRVRHPYWLEKKVCDKFRQGKIVDMFSSANKDHSTTQDNVVADIEEFCKENRPSVKGPKPVARSFEVDRNHSEGKQQESWDPEFHDISLQNVDKNVDYQGWLELEKRKWKMTLTNKKKRRFDDLKPCNQIDAHKINKKVCKGRVGVGSYFRRPEEALTSSYLQIIQLVQSPQSGQFFAWVVVEGLMLKIPLTIPRVFYINSKASIAGNFTGKCINKILPHGKPCYNLMEARHLHNTHILLLVNIQEDQFIKESKKLAALLADPEIEGIYETKMPLEFSAICQIGCVCKIEDTAKHRNTQDGWKLGELHRITTTECRYLENSIPLVYLYHSTSTGRAVYVLYCHASKLMSVVVVNPYGDKELLSSALERQFRDRCQELSPEPFSWDGILFQVEYVDHPEAATKFLQKALCEYREENCGATVAVIECPDFNTTKEGVKALEDFPCVRIPFNDDDNSYQPVSWQRPAAKIAVLRCASAIQWLDRRIAQSRYAHVPLGNFGRDWLTFTVDIFLSRALRDQQQVLWVSDNGVPDLGDINNEETFLADELQETSLLFPGAYRKVSVELKVHRLAVNALLKSDLVSEMEGGGFLGVNSRGSSLNDNGSFDENNGCAQAFRVLKQLIKRLLHDACNSGNIYADSILQHLSWWLRSPSSKLHDPALHLMLHKVMQKVFALLLTDLRRLGAIIIYADFSKVIIDTGKFDLSAAKTYCESLLTVMGSRDIFKLILLEPVHYWHSLLFMDQHNYAGIRATGDEISGNEVTIEPKWSVARHLPEYIQKDFIIIVATFIFGPWKFALEKKRGSAESLEAEMVEYLKEQIGTRFISMIVEKIGNIRSHIKDINVSDASWASGQAPKGDYTFEFIQIITAVLALDQNVQQDVLVMRKILLKYIKVKECAAEAEFIDPGPSFILPNVACSNCGAYRDLDFCRDSALLTEKEWSCADPQCVKIYDKEQIESSIIQMVRQRERMYQLQDLVCNRCNQVKAAHLTEQCECSGSFRCKESGSDFHKRIEIFLDIAKRQKFRLLEECISWILFATSC

SEQ ID NO: 28326 - DNA, 1347 bp, Arabidopsis thaliana
  misc_feature (1)..(1347): Ceres Seq. ID no. 2712578
atgacaacacataaacatagaagaacagagaaaaatctctgttttaagcaatactacaaatggatcctctgttttatcctcactctctatttttttgcttccttctttgtcgaccatgatcaagatcatagatcttctacttccatatcaaagcatcttcttactaaccataaacctaagcttttcgcttctcgtgccatgtttgaatctaaaatccatgatcacaaacttgggtttacctctcaacaacctaacatcaaaacagacgtattcaacaatttgaaaatctacgtctatgacttaccttcaaagttcaacaaagactggttagccaatgatagatgcaccaaccacctctttgccgcggaagtggctctccataaggcgtttctcagcctcgaaggagatgtaaggacggaagatccgtatgaagccgatttcttctttgtccctgtctatgtctcttgcaacttcagcaccattaatggctttccagcgattggccatgcacgatcactcatcaatgacgcgataaagctcgtctcgactcaataccctttttggaaccgaaccagtggctctgatcatgtcttcacggccacacacgactttggctcttgcttccacaccatggaggatagagctattgctgatggagtaccaatttttttgagaaactctataattttgcaaacatttggtgttacttttaaccatccatgccaagaggtagagaacgtggtgataccaccgtacatctcaccggaaagtttacacaagactcaaaagaatattccggtaactaaagaacgagacatttgggtttttttccgtggcaagatggaacttcatcccaaaaacatcagtggacgcttctatagcaagcgtgtaaggacgaatatatggcggagttacggtggtgaccggaggttttatctccaacggcaaagatttgccggttaccagtcagaaatagctcgttctgttttctgtttatgtcctctcgggtgggcaccgtggagcccaagacttgttgaatcggtggctcttggctgtgttccggtgattatagccgacgggattcgtttgccgttcccttccaccgtacgttggccggatatttcgctcacggtggcggagagagacgttggaaagctaggggatattttggaacacgtggcggctactaatttgtcagtcatacagagaaacttggaggatccgtctgttaggcgggcccttatgtttaatgttccttcaagagagggagatgccacgtggcaagttttggaggctttgtcaaagaaattgaataggtctgttagaaggtcaaactctttcttgtaa

SEQ ID NO: 28327 - protein, 448 aa, Arabidopsis thaliana
  misc_feature (1)..(448): Ceres Seq. ID no. 2712579
MTTHKHRRTEKNLCFKQYYKWILCFILTLYFFASFFVDHDQDHRSSTSISKHLLTNHKPKLFASRAMFESKIHDHKLGFTSQQPNIKTDVFNNLKIYVYDLPSKFNKDWLANDRCTNHLFAAEVALHKAFLSLEGDVRTEDPYEADFFFVPVYVSCNFSTINGFPAIGHARSLINDAIKLVSTQYPFWNRTSGSDHVFTATHDFGSCFHTMEDRAIADGVPIFLRNSIILQTFGVTFNHPCQEVENVVIPPYISPESLHKTQKNIPVTKERDIWVFFRGKMELHPKNISGRFYSKRVRTNIWRSYGGDRRFYLQRQRFAGYQSEIARSVFCLCPLGWAPWSPRLVESVALGCVPVIIADGIRLPFPSTVRWPDISLTVAERDVGKLGDILEHVAATNLSVIQRNLEDPSVRRALMFNVPSREGDATWQVLEALSKKLNRSVRRSNSFL

SEQ ID NO: 28328 - protein, 382 aa, Arabidopsis thaliana
  misc_feature (1)..(382): Ceres Seq. ID no. 2712580
MFESKIHDHKLGFTSQQPNIKTDVFNNLKIYVYDLPSKFNKDWLANDRCTNHLFAAEVALHKAFLSLEGDVRTEDPYEADFFFVPVYVSCNFSTINGFPAIGHARSLINDAIKLVSTQYPFWNRTSGSDHVFTATHDFGSCFHTMEDRAIADGVPIFLRNSIILQTFGVTFNHPCQEVENVVIPPYISPESLHKTQKNIPVTKERDIWVFFRGKMELHPKNISGRFYSKRVRTNIWRSYGGDRRFYLQRQRFAGYQSEIARSVFCLCPLGWAPWSPRLVESVALGCVPVIIADGIRLPFPSTVRWPDISLTVAERDVGKLGDILEHVAATNLSVIQRNLEDPSVRRALMFNVPSREGDATWQVLEALSKKLNRSVRRSNSFL

SEQ ID NO: 28329 - protein, 238 aa, Arabidopsis thaliana
  misc_feature (1)..(238): Ceres Seq. ID no. 2712581
MEDRAIADGVPIFLRNSIILQTFGVTFNHPCQEVENVVIPPYISPESLHKTQKNIPVTKERDIWVFFRGKMELHPKNISGRFYSKRVRTNIWRSYGGDRRFYLQRQRFAGYQSEIARSVFCLCPLGWAPWSPRLVESVALGCVPVIIADGIRLPFPSTVRWPDISLTVAERDVGKLGDILEHVAATNLSVIQRNLEDPSVRRALMFNVPSREGDATWQVLEALSKKLNRSVRRSNSFL

SEQ ID NO: 28330 - DNA, 1503 bp, Arabidopsis thaliana
  misc_feature (1)..(1503): Ceres Seq. ID no. 2712611
atgtcttgtctgagaaattattattgtcgagctttcggttataaacagtctcgatcttgctacagtcgatcactgaatcgtgaaatagctaacgagtcatctgaagttgagagacgagctcgttctctgagagttttggatatcatatcttcgaaatctggtggagtttcgaatcgtcaggaccattttggtttcgttcaggaatttcgacaaacagattcgtggcgattcagaggtcaggcaatttccgaggattttgatctctcaagaaccaaaaatggagtttcaagcgtgctcgaagaagttatgctggaggattcttcaagctctgtcaagcgagatggatggagtttcgatgcttatggtttatcatccgccgtgagatcttgtgggttgaatcgagactttagaaccggttctgggtttcattgtttagcgttgaaaggtgggtttatctcagatgtctacttaggaagttctctggtcgttttgtacagagattctggtgaagtagagaatgcatataaagtgtttgaagaaatgcctgagaggaatgtggtttcatggacggctatgatttcagggtttgcgcaagaatggcgagttgatatctgcttgaagctttattcaaagatgagaaagtcaacctctgatccgaatgattacacattcacggctctcttgagcgcttgcacgggaagcggagccctagggcaaggaagaagtgttcattgtcagacactccacatgggattgaagtcgtatctacatatctcaaactctctcatctcgatgtactgcaaatgcggtgatttgaaggatgcttttcgtatctttgaccagttttcaaacaaagacgttgtttcttggaactctatgattgctggttacgcgcagcacggccttgcaatgcaagcaatcgagctctttgaattaatgatgcctaaaagcggaacaaagccagatgcaatcacatatctaggagttttgtcatcgtgtagacacgcaggtcttgtaaaagaaggaagaaagttcttcaatttgatggcggaacacggcctgaaaccagaactcaaccattactcttgtctagtcgatcttctcgggagatttggtctgttgcaagaagccctggaactgatcgagaacatgccaatgaaaccaaactcagtcatatggggatctctgctattctcttgccgtgttcacggcgatgtctggaccggaatcagagctgcagaggaacgactaatgcttgaacctgattgcgcagccacgcatgtccagctggcaaatctttacgccagtgtagggtactggaaagaagcggcgacagtgaggaagctgatgaaagataaaggactgaagacgaatccgggttgcagttggatcgagatcaataactatgttttcatgtttaaagctgaagatggtagcaactgtagaatgctagagattgttcatgttcttcattgtctcattgatcacatggagttcctctaa

SEQ ID NO: 28331 - protein, 500 aa, Arabidopsis thaliana
  misc_feature (1)..(500): Ceres Seq. ID no. 2712612
MSCLRNYYCRAFGYKQSRSCYSRSLNREIANESSEVERRARSLRVLDIISSKSGGVSNRQDHFGFVQEFRQTDSWRFRGQAISEDFDLSRTKNGVSSVLEEVMLEDSSSSVKRDGWSFDAYGLSSAVRSCGLNRDFRTGSGFHCLALKGGFISDVYLGSSLVVLYRDSGEVENAYKVFEEMPERNVVSWTAMISGFAQEWRVDICLKLYSKMRKSTSDPNDYTFTALLSACTGSGALGQGRSVHCQTLHMGLKSYLHISNSLISMYCKCGDLKDAFRIFDQFSNKDVVSWNSMIAGYAQHGLAMQAIELFELMMPKSGTKPDAITYLGVLSSCRHAGLVKEGRKFFNLMAEHGLKPELNHYSCLVDLLGRFGLLQEALELIENMPMKPNSVIWGSLLFSCRVHGDVWTGIRAAEERLMLEPDCAATHVQLANLYASVGYWKEAATVRKLMKDKGLKTNPGCSWIEINNYVFMFKAEDGSNCRMLEIVHVLHCLIDHMEFL

SEQ ID NO: 28332 - protein, 398 aa, Arabidopsis thaliana
  misc_feature (1)..(398): Ceres Seq. ID no. 2712613
MLEDSSSSVKRDGWSFDAYGLSSAVRSCGLNRDFRTGSGFHCLALKGGFISDVYLGSSLVVLYRDSGEVENAYKVFEEMPERNVVSWTAMISGFAQEWRVDICLKLYSKMRKSTSDPNDYTFTALLSACTGSGALGQGRSVHCQTLHMGLKSYLHISNSLISMYCKCGDLKDAFRIFDQFSNKDVVSWNSMIAGYAQHGLAMQAIELFELMMPKSGTKPDAITYLGVLSSCRHAGLVKEGRKFFNLMAEHGLKPELNHYSCLVDLLGRFGLLQEALELIENMPMKPNSVIWGSLLFSCRVHGDVWTGIRAAEERLMLEPDCAATHVQLANLYASVGYWKEAATVRKLMKDKGLKTNPGCSWIEINNYVFMFKAEDGSNCRMLEIVHVLHCLIDHMEFL

SEQ ID NO: 28333 - protein, 320 aa, Arabidopsis thaliana
  misc_feature (1)..(320): Ceres Seq. ID no. 2712614
MPERNVVSWTAMISGFAQEWRVDICLKLYSKMRKSTSDPNDYTFTALLSACTGSGALGQGRSVHCQTLHMGLKSYLHISNSLISMYCKCGDLKDAFRIFDQFSNKDVVSWNSMIAGYAQHGLAMQAIELFELMMPKSGTKPDAITYLGVLSSCRHAGLVKEGRKFFNLMAEHGLKPELNHYSCLVDLLGRFGLLQEALELIENMPMKPNSVIWGSLLFSCRVHGDVWTGIRAAEERLMLEPDCAATHVQLANLYASVGYWKEAATVRKLMKDKGLKTNPGCSWIEINNYVFMFKAEDGSNCRMLEIVHVLHCLIDHMEFL

SEQ ID NO: 28334 - DNA, 1059 bp, Arabidopsis thaliana
  misc_feature (1)..(1059): Ceres Seq. ID no. 2712716
atgacttctttgagtaggcgttgcgaaaagagaaactttgatgagcttgagggagctccaagcagtaaaaacacatatattgatggcatggcagttgacactttctcggtggtttttaatgggtttacaaatggtgaaagacaatatctagaactaaatgacggtgagtctaacggttctcaggatgtaactagtcgcctgaatgatgtagcagatagctccatgtgggtttcaagggctcctggtggcactgatgaattaaatgatggttttgaagacatcaaatatgatttgacattagactgtcaaaaggattgtgtggttggagcagagatatctctgagatatgattgtgttgggatatcaaatcctcacatcagtgattctctctcaagtggtagtgtgttcctatgtcatggaagcataagaagaaaccaaacagggttgctactgactcaagaactcagttcttgtagtcaggatcagagtagtggcgctaagtcccatgacgttggtccttttgaaatattgaagcctcaacagttaaaagaaaagttatcttggttgacattatcgatacatgaagaggattgtcgttatattctacaaaaggaggatgaagttgcgaatttgcgacaacaaactttcaagcttacattacctgatttagtgacctttccagattttcttgtgaaaagaagccggtatgaaggagcgatacagaggaaatggacttgcagggacaagtgtaaggtttggtggagaaacaaaggcgaagaagatggtcgttggtgggaaggaggaattctagctgtgaaacccaaatcaactcattttcttgatagtccatgggagaggttcccagttcctttgtctcttgaggtaataagatcaaggattgagaacaactattaccggagtatggaagcgttaaggcacgatgtatcagttatgctatccaatgcagagactttctttgatctaaacaaatgtgtaggtgtagcagtcaaaatttcagatctttctcaatggttcgaccgcacgttgtcttctttgtag

SEQ ID NO: 28335 - protein, 352 aa, Arabidopsis thaliana
  misc_feature (1)..(352): Ceres Seq. ID no. 2712717
MTSLSRRCEKRNFDELEGAPSSKNTYIDGMAVDTFSVVFNGFTNGERQYLELNDGESNGSQDVTSRLNDVADSSMWVSRAPGGTDELNDGFEDIKYDLTLDCQKDCVVGAEISLRYDCVGISNPHISDSLSSGSVFLCHGSIRRNQTGLLLTQELSSCSQDQSSGAKSHDVGPFEILKPQQLKEKLSWLTLSIHEEDCRYILQKEDEVANLRQQTFKLTLPDLVTFPDFLVKRSRYEGAIQRKWTCRDKCKVWWRNKGEEDGRWWEGGILAVKPKSTHFLDSPWERFPVPLSLEVIRSRIENNYYRSMEALRHDVSVMLSNAETFFDLNKCVGVAVKISDLSQWFDRTLSSL

SEQ ID NO: 28336 - protein, 323 aa, Arabidopsis thaliana
  misc_feature (1)..(323): Ceres Seq. ID no. 2712718
MAVDTFSVVFNGFTNGERQYLELNDGESNGSQDVTSRLNDVADSSMWVSRAPGGTDELNDGFEDIKYDLTLDCQKDCVVGAEISLRYDCVGISNPHISDSLSSGSVFLCHGSIRRNQTGLLLTQELSSCSQDQSSGAKSHDVGPFEILKPQQLKEKLSWLTLSIHEEDCRYILQKEDEVANLRQQTFKLTLPDLVTFPDFLVKRSRYEGAIQRKWTCRDKCKVWWRNKGEEDGRWWEGGILAVKPKSTHFLDSPWERFPVPLSLEVIRSRIENNYYRSMEALRHDVSVMLSNAETFFDLNKCVGVAVKISDLSQWFDRTLSSL

SEQ ID NO: 28337 - protein, 278 aa, Arabidopsis thaliana
  misc_feature (1)..(278): Ceres Seq. ID no. 2712719
MWVSRAPGGTDELNDGFEDIKYDLTLDCQKDCVVGAEISLRYDCVGISNPHISDSLSSGSVFLCHGSIRRNQTGLLLTQELSSCSQDQSSGAKSHDVGPFEILKPQQLKEKLSWLTLSIHEEDCRYILQKEDEVANLRQQTFKLTLPDLVTFPDFLVKRSRYEGAIQRKWTCRDKCKVWWRNKGEEDGRWWEGGILAVKPKSTHFLDSPWERFPVPLSLEVIRSRIENNYYRSMEALRHDVSVMLSNAETFFDLNKCVGVAVKISDLSQWFDRTLSSL

SEQ ID NO: 28338 - DNA, 1704 bp, Arabidopsis thaliana
  misc_feature (1)..(1704): Ceres Seq. ID no. 2712856
atgatcaccatttactccgcccagattgctgaagggattaaatcctttttttctccaggtgaggcgcttttgagttttagaaatggagttttggcttctgatggtgttattggtctgtggagaccagaggatcctgatccatgtaactggaaaggagtgacctgtgatgcaaaaacaaaaagagttatagccttgagtcttacttatcacaaattaaggggacctttaccccctgagcttggaaagctggatcagttaaggcttttaatgcttcacaacaatgcgttatatcaatcaatacctgcctcattgggaaattgcacggcattagagggaatatacttgcagaataattacatcactgggacaatcccaagtgaaataggaaacctgtccgggctgaaaaacctggacctctcaaacaacaatctcaatggagctatccctgcttcacttgggcagttgaaaaggcttactaaattcaatgtctcaaacaatttcctggtgggaaaaataccttctgacggcctactcgctagactctcgagggactccttcaacggaaatcgtaacttgtgtggaaaacaaatcgatattgtgtgcaatgacagtggaaattctacagcttctgggtctccaacaggccaaggaggtaataaccctaaaaggctgcttataagtgcttcagctactgtgggtgggctgctcctagtggcgctcatgtgtttctggggatgctttctctataaaaagcttggtagagttgagagtaaaagccttgtgatagatgtcggtggagatttgccctacgcttccaaagacattatcaagaaactggaatctcttaatgaagagcacataataggctgtggaggctttggcacagtgtacaagctgtctatggacgatggcaatgtttttgcgctgaaaagaattgttaagttaaatgaaggttttgatcggttttttgaaagggagcttgagattcttgggagcatcaaacatcgttaccttgtgaatctacgtggatactgcaattcacccacatcaaagcttctgctatatgattaccttcctggtggtagccttgatgaagctctacataagagaggcgagcagctggattgggattcgcgagttaatatcataataggagcggcaaaagggttggcatacttgcatcatgattgttctcctaggattatacaccgtgatataaaatcaagcaacatcttactggatggaaatctggaggctcgggtatcagactttgggcttgccaagttgttagaggacgaagaatctcatattacaaccattgttgcaggcacattcggttacttggctccagagtatatgcaaagcggtagagcgactgagaaaaccgatgtttacagcttcggggttttggttcttgaagtcttgagtggtaaacttcccacggatgcctcattcatcgagaaaggctttaacattgttggttggctaaacttcttaatcagcgaaaaccgggcaaaggagattgttgatctaagctgtgaaggagtggagagagagagtctcgacgcacttctatcaatagcaacaaagtgtgtgtcgtcaagtccagatgagcggccaacaatgcacagagtcgtccagttacttgaatccgaagttatgactccttgccccagcgacttctacgactccagctccgattga

SEQ ID NO: 28339 - protein, 567 aa, Arabidopsis thaliana
  misc_feature (1)..(567): Ceres Seq. ID no. 2712857
MITIYSAQIAEGIKSFFSPGEALLSFRNGVLASDGVIGLWRPEDPDPCNWKGVTCDAKTKRVIALSLTYHKLRGPLPPELGKLDQLRLLMLHNNALYQSIPASLGNCTALEGIYLQNNYITGTIPSEIGNLSGLKNLDLSNNNLNGAIPASLGQLKRLTKFNVSNNFLVGKIPSDGLLARLSRDSFNGNRNLCGKQIDIVCNDSGNSTASGSPTGQGGNNPKRLLISASATVGGLLLVALMCFWGCFLYKKLGRVESKSLVIDVGGDLPYASKDIIKKLESLNEEHIIGCGGFGTVYKLSMDDGNVFALKRIVKLNEGFDRFFERELEILGSIKHRYLVNLRGYCNSPTSKLLLYDYLPGGSLDEALHKRGEQLDWDSRVNIIIGAAKGLAYLHHDCSPRIIHRDIKSSNILLDGNLEARVSDFGLAKLLEDEESHITTIVAGTFGYLAPEYMQSGRATEKTDVYSFGVLVLEVLSGKLPTDASFIEKGFNIVGWLNFLISENRAKEIVDLSCEGVERESLDALLSIATKCVSSSPDERPTMHRVVQLLESEVMTPCPSDFYDSSSD

SEQ ID NO: 28340 - protein, 478 aa, Arabidopsis thaliana
  misc_feature (1)..(478): Ceres Seq. ID no. 2712858
MLHNNALYQSIPASLGNCTALEGIYLQNNYITGTIPSEIGNLSGLKNLDLSNNNLNGAIPASLGQLKRLTKFNVSNNFLVGKIPSDGLLARLSRDSFNGNRNLCGKQIDIVCNDSGNSTASGSPTGQGGNNPKRLLISASATVGGLLLVALMCFWGCFLYKKLGRVESKSLVIDVGGDLPYASKDIIKKLESLNEEHIIGCGGFGTVYKLSMDDGNVFALKRIVKLNEGFDRFFERELEILGSIKHRYLVNLRGYCNSPTSKLLLYDYLPGGSLDEALHKRGEQLDWDSRVNIIIGAAKGLAYLHHDCSPRIIHRDIKSSNILLDGNLEARVSDFGLAKLLEDEESHITTIVAGTFGYLAPEYMQSGRATEKTDVYSFGVLVLEVLSGKLPTDASFIEKGFNIVGWLNFLISENRAKEIVDLSCEGVERESLDALLSIATKCVSSSPDERPTMHRVVQLLESEVMTPCPSDFYDSSSD

SEQ ID NO: 28341 - protein, 327 aa, Arabidopsis thaliana
  misc_feature (1)..(327): Ceres Seq. ID no. 2712859
MCFWGCFLYKKLGRVESKSLVIDVGGDLPYASKDIIKKLESLNEEHIIGCGGFGTVYKLSMDDGNVFALKRIVKLNEGFDRFFERELEILGSIKHRYLVNLRGYCNSPTSKLLLYDYLPGGSLDEALHKRGEQLDWDSRVNIIIGAAKGLAYLHHDCSPRIIHRDIKSSNILLDGNLEARVSDFGLAKLLEDEESHITTIVAGTFGYLAPEYMQSGRATEKTDVYSFGVLVLEVLSGKLPTDASFIEKGFNIVGWLNFLISENRAKEIVDLSCEGVERESLDALLSIATKCVSSSPDERPTMHRVVQLLESEVMTPCPSDFYDSSSD

SEQ ID NO: 28342 - DNA, 747 bp, Arabidopsis thaliana
  misc_feature (1)..(747): Ceres Seq. ID no. 2712953
atggatgaatatgtagaggatgaacacgaattcagctacgaatggaaccaagagaacgggccagcgaaatggggaaagctaagaccggaatggaaaatgtgcggaaaaggagaaatgcaatcgcctattgatcttatgaacaaaagagttagacttgttactcatcttaaaaagcttactagacactacaaaccttgtaacgccactctcaaaaatagaggccatgatatgatgctgaaatttggagaagaagggtcagggagtattacggtcaatggaactgagtataaactcttacagcttcattggcattctccctctgaacatactatgaatggaagaaggtttgctctcgagctacacatggttcacgaaaacattaacggaagtttggctgtagtcacagtcctctacaaaatcggaaggccagattcttttctcggattgctggaaaataaattgtcggcaattacagatcaaaatgaggcggagaaatatgtagatgtgattgacccaagggatattaagattgggagcagaaaattttatagatacattggatcacttactactcctccttgtacgcaaaatgttatttggaccgtcgttaaaaaggtaaggactgtgacgaaaaaccaagtgaagctactcagagtggcggttcacgataattcagacacaaatgcgagaccagttcaacctacaaataagcgcgtggtaaagttatacaaaccaaaatcactatga

SEQ ID NO: 28343 - protein, 248 aa, Arabidopsis thaliana
  misc_feature (1)..(248): Ceres Seq. ID no. 2712954
MDEYVEDEHEFSYEWNQENGPAKWGKLRPEWKMCGKGEMQSPIDLMNKRVRLVTHLKKLTRHYKPCNATLKNRGHDMMLKFGEEGSGSITVNGTEYKLLQLHWHSPSEHTMNGRRFALELHMVHENINGSLAVVTVLYKIGRPDSFLGLLENKLSAITDQNEAEKYVDVIDPRDIKIGSRKFYRYIGSLTTPPCTQNVIWTVVKKVRTVTKNQVKLLRVAVHDNSDTNARPVQPTNKRVVKLYKPKSL

SEQ ID NO: 28344 - protein, 216 aa, Arabidopsis thaliana
  misc_feature (1)..(216): Ceres Seq. ID no. 2712955
MCGKGEMQSPIDLMNKRVRLVTHLKKLTRHYKPCNATLKNRGHDMMLKFGEEGSGSITVNGTEYKLLQLHWHSPSEHTMNGRRFALELHMVHENINGSLAVVTVLYKIGRPDSFLGLLENKLSAITDQNEAEKYVDVIDPRDIKIGSRKFYRYIGSLTTPPCTQNVIWTVVKKVRTVTKNQVKLLRVAVHDNSDTNARPVQPTNKRVVKLYKPKSL

SEQ ID NO: 28345 - protein, 210 aa, Arabidopsis thaliana
  misc_feature (1)..(210): Ceres Seq. ID no. 2712956
MQSPIDLMNKRVRLVTHLKKLTRHYKPCNATLKNRGHDMMLKFGEEGSGSITVNGTEYKLLQLHWHSPSEHTMNGRRFALELHMVHENINGSLAVVTVLYKIGRPDSFLGLLENKLSAITDQNEAEKYVDVIDPRDIKIGSRKFYRYIGSLTTPPCTQNVIWTVVKKVRTVTKNQVKLLRVAVHDNSDTNARPVQPTNKRVVKLYKPKSL

SEQ ID NO: 28346 - DNA, 1215 bp, Arabidopsis thaliana
  misc_feature (1)..(1215): Ceres Seq. ID no. 2713290
atggactctgaaagcgtcgtagctgctgacggtgcggattgtgctattgcaaatggtgaagtgacaatggaaggagacagtagtaatggaaatggtggtacttcagagaatttggaatgttgttctactcagcatcctatggaggcatctgagggcacacagaatgaacaagtggatgattcaaaacagatgagaggacaaaaggtgcaaggaagggtcaagcatgagaagacctctggaggcaagaatattccatcagtcttggtgaagaagaaaaaagatgggaaagtggtggcatcaaatggttctgttgctccaaacgtaaagcctgtaaagtctcctaagagcaaatcgctcaatggtagagaggctcatgtcacgaagcatgggaaccatgactctctaccagctgaagggaccagggacaagccaaaactgagggaaacaaggaaacaagtcaatgatacatctgaagatgatacacagtatagtccaaaagaagatgatggcaaacctcgtcgagctagtgcacttccaaattatggattcagttttagatgtgaccaacgagctgaaaaaagaagagagttctattcaaagcttgaggaaaagatccatgcgaaagaagaagaaaagaataccgtacaagctaagtccaaggaaactcaagaagctgagcttaagatgctaaggaagagtctgaacttcaaagccacacctatgcctaccttctatcaagaacctcagctacctaaaacagagttaaagaagatagcgataacaagaccaaaatctccaaaactcgggcggaagaagaccaattctcgagcagattctgaagaagccattactattcaaacccctcgctttggtaggttgagcttagatgagaaaactcctaaagataacccggttgttgaaggaagtgtacccggtgagaccaagaagccaccagtgcgcaagtcacttcccaggttgccttcagaaaagacaaatctgtccaacgggaaggtggctccagcaaaagctgtaacagcctcaacaaaggcaaagtcggaaagaaagaaaccagataaagatgtggatgacctaagccagtcaagtcctgtagacgacaatgctgacccagaagattcacaagaacaagctccaagagtgaatgaagacagaaacgaatctcacatggtagtggaagtggttgcggttgagccttaa

SEQ ID NO: 28347 - protein, 404 aa, Arabidopsis thaliana
  misc_feature (1)..(404): Ceres Seq. ID no. 2713291
MDSESVVAADGADCAIANGEVTMEGDSSNGNGGTSENLECCSTQHPMEASEGTQNEQVDDSKQMRGQKVQGRVKHEKTSGGKNIPSVLVKKKKDGKVVASNGSVAPNVKPVKSPKSKSLNGREAHVTKHGNHDSLPAEGTRDKPKLRETRKQVNDTSEDDTQYSPKEDDGKPRRASALPNYGFSFRCDQRAEKRREFYSKLEEKIHAKEEEKNTVQAKSKETQEAELKMLRKSLNFKATPMPTFYQEPQLPKTELKKIAITRPKSPKLGRKKTNSRADSEEAITIQTPRFGRLSLDEKTPKDNPVVEGSVPGETKKPPVRKSLPRLPSEKTNLSNGKVAPAKAVTASTKAKSERKKPDKDVDDLSQSSPVDDNADPEDSQEQAPRVNEDRNESHMVVEVVAVEP

SEQ ID NO: 28348 - protein, 382 aa, Arabidopsis thaliana
  misc_feature (1)..(382): Ceres Seq. ID no. 2713292
MEGDSSNGNGGTSENLECCSTQHPMEASEGTQNEQVDDSKQMRGQKVQGRVKHEKTSGGKNIPSVLVKKKKDGKVVASNGSVAPNVKPVKSPKSKSLNGREAHVTKHGNHDSLPAEGTRDKPKLRETRKQVNDTSEDDTQYSPKEDDGKPRRASALPNYGFSFRCDQRAEKRREFYSKLEEKIHAKEEEKNTVQAKSKETQEAELKMLRKSLNFKATPMPTFYQEPQLPKTELKKIAITRPKSPKLGRKKTNSRADSEEAITIQTPRFGRLSLDEKTPKDNPVVEGSVPGETKKPPVRKSLPRLPSEKTNLSNGKVAPAKAVTASTKAKSERKKPDKDVDDLSQSSPVDDNADPEDSQEQAPRVNEDRNESHMVVEVVAVEP

SEQ ID NO: 28349 - protein, 358 aa, Arabidopsis thaliana
  misc_feature (1)..(358): Ceres Seq. ID no. 2713293
MEASEGTQNEQVDDSKQMRGQKVQGRVKHEKTSGGKNIPSVLVKKKKDGKVVASNGSVAPNVKPVKSPKSKSLNGREAHVTKHGNHDSLPAEGTRDKPKLRETRKQVNDTSEDDTQYSPKEDDGKPRRASALPNYGFSFRCDQRAEKRREFYSKLEEKIHAKEEEKNTVQAKSKETQEAELKMLRKSLNFKATPMPTFYQEPQLPKTELKKIAITRPKSPKLGRKKTNSRADSEEAITIQTPRFGRLSLDEKTPKDNPVVEGSVPGETKKPPVRKSLPRLPSEKTNLSNGKVAPAKAVTASTKAKSERKKPDKDVDDLSQSSPVDDNADPEDSQEQAPRVNEDRNESHMVVEVVAVEP

SEQ ID NO: 28350 - DNA, 2451 bp, Arabidopsis thaliana
  misc_feature (1)..(2451): Ceres Seq. ID no. 2713369
atgtggatgccgaaaaacaataacgtgggagtcaaggaaggagggtctagcggagttgtagctgttgcaatagacaaagacaaaagcagccaacacgctcttaaatgggctgttgataatttgttgcagcgaggccaatccgtcattcttgtccacgtcaagcttcgaccttctccattgaataatagcgcttctcttcatgcttcctctgcaaagctgagccaagattcttcattggtatgcagagatccagaaggcatttccaaagaaatatttcttcctttccgttgcttctgcacacgcaaagacattcaatgccaagatgtgttgcttgaggagtccgatgttgccaaagcattggtcgaatacgtaaaccaagcggccattgaggttttagtagttggttcctccagcaaaggtggttttctcaggttcaacaaacctacagatattccaggcagcataacaaaaaacgctcctgatttctgcacggtttatatcatttccaaaggaaagattcaaacaatgagatcagcttctcgttctgcacccatgactgctcctctacgcagttcagttcaaccacctagcttaaagcctcctcaacctatgccttctacttccgctaacagtctgcgagccgatagacggtcttttgagtctaaccaacgaaggtctgtagaagatcaacaacgcaggtctatggaggatcaacaacgcaggtcaatagacgatcaatcagagtccttcagatctccttttacaagaagaggcaatggtagatcatacggagatttaactgttccagaatcagacatatcctttatcagttccggaagaccaagcattgaccgtatcttcccttctctatatgacaacaatgatccaagccgaactcctcctaggctttcaaatttctcagacatggactatagttctagccttgatcagtcttccaactatggaaggagatcagtggatatgaactcacccactgatttcgagagcgaaagattttcatccgcctctcaatcaatagatgatgtagaggctgagatgaggaggcttaaactggagttgaagcagactatggaaatgtatagtacagcttgcaaagaagcactcacagcaaaacaaaaggcgactgagcttcaacgttggaagttagaagaagagagaaaactagaagaagcgagaaatgcagaggaagcagcattagccattgcagagaaagagaaagcaaagtcaaaagcagctatggaggcagctgaagcagctcaaaggattgctgaattagaggctaagaagagagtcaacgcggaaatgaaagctttaaaagagtcagaggagaaaacaaaggctcttaccgctttagcaaactcagatgtcaggtataggaagtactccattgaagatattgagcttgcaacagagtttttcgctgagaaatataagattggagaaggtggttatggacctgtctacaaatgttatcttgatcatacaccagtggctgttaaagttcttcgtcccgatgcagctcaaggaagatcgcaatttcaacaagaggtcgaggtattgagctgcattaggcatccgaacatggttctacttcttggggcttgtccggaatgcggatgtttagtctacgagttcatggctaatgggagcttagaagatcgtcttttcagactaggaaacagtccacctctctcgtggcagatgagatttagaatcgctgcagagataggcactggattgttgttcttgcaccaagctaaacctgagcctcttgttcaccgtgatctcaaaccaggaaacatcttgctagaccgtaacttcgtcagcaagatatctgatgttggtttagctagattggtccctccaacagttgcagacacagtgacacaataccgcatgacttcaaccgctggcacattctgttatatcgacccagagtatcaacaaacaggaatgttgggtgtgaaatcagacatttactcacttggaattatgtttctacagttgataacagcaaaaccaccaatgggtctaactcattatgtcgagagagcactagagaaaggaactttggttgatttactcgatccagttgtttctgattggccaatggaagacactgaagagtttgctaaattagctcttaaatgtgcagagctaaggagaaaagatagacctgatcttgctaaagttattttgcctgagctaaatagattaagaacacttgctgatgaatcatcacattctgtagtagtcggcaatagccctctaccatctccaactggtagccaaagttctttgaaactggtgagaaccactaaaagcgaaaatcgaaactcgaatatattactatactcacctactgatttcttctttactaaccatttgcaggaacatatgagtggtgcttctatctcagtgcctcagtaa

SEQ ID NO: 28351 - protein, 816 aa, Arabidopsis thaliana
  misc_feature (1)..(816): Ceres Seq. ID no. 2713370
MWMPKNNNVGVKEGGSSGVVAVAIDKDKSSQHALKWAVDNLLQRGQSVILVHVKLRPSPLNNSASLHASSAKLSQDSSLVCRDPEGISKEIFLPFRCFCTRKDIQCQDVLLEESDVAKALVEYVNQAAIEVLVVGSSSKGGFLRFNKPTDIPGSITKNAPDFCTVYIISKGKIQTMRSASRSAPMTAPLRSSVQPPSLKPPQPMPSTSANSLRADRRSFESNQRRSVEDQQRRSMEDQQRRSIDDQSESFRSPFTRRGNGRSYGDLTVPESDISFISSGRPSIDRIFPSLYDNNDPSRTPPRLSNFSDMDYSSSLDQSSNYGRRSVDMNSPTDFESERFSSASQSIDDVEAEMRRLKLELKQTMEMYSTACKEALTAKQKATELQRWKLEEERKLEEARNAEEAALAIAEKEKAKSKAAMEAAEAAQRIAELEAKKRVNAEMKALKESEEKTKALTALANSDVRYRKYSIEDIELATEFFAEKYKIGEGGYGPVYKCYLDHTPVAVKVLRPDAAQGRSQFQQEVEVLSCIRHPNMVLLLGACPECGCLVYEFMANGSLEDRLFRLGNSPPLSWQMRFRIAAEIGTGLLFLHQAKPEPLVHRDLKPGNILLDRNFVSKISDVGLARLVPPTVADTVTQYRMTSTAGTFCYIDPEYQQTGMLGVKSDIYSLGIMFLQLITAKPPMGLTHYVERALEKGTLVDLLDPVVSDWPMEDTEEFAKLALKCAELRRKDRPDLAKVILPELNRLRTLADESSHSVVVGNSPLPSPTGSQSSLKLVRTTKSENRNSNILLYSPTDFFFTNHLQEHMSGASISVPQ

SEQ ID NO: 28352 - protein, 814 aa, Arabidopsis thaliana
  misc_feature (1)..(814): Ceres Seq. ID no. 2713371
MPKNNNVGVKEGGSSGVVAVAIDKDKSSQHALKWAVDNLLQRGQSVILVHVKLRPSPLNNSASLHASSAKLSQDSSLVCRDPEGISKEIFLPFRCFCTRKDIQCQDVLLEESDVAKALVEYVNQAAIEVLVVGSSSKGGFLRFNKPTDIPGSITKNAPDFCTVYIISKGKIQTMRSASRSAPMTAPLRSSVQPPSLKPPQPMPSTSANSLRADRRSFESNQRRSVEDQQRRSMEDQQRRSIDDQSESFRSPFTRRGNGRSYGDLTVPESDISFISSGRPSIDRIFPSLYDNNDPSRTPPRLSNFSDMDYSSSLDQSSNYGRRSVDMNSPTDFESERFSSASQSIDDVEAEMRRLKLELKQTMEMYSTACKEALTAKQKATELQRWKLEEERKLEEARNAEEAALAIAEKEKAKSKAAMEAAEAAQRIAELEAKKRVNAEMKALKESEEKTKALTALANSDVRYRKYSIEDIELATEFFAEKYKIGEGGYGPVYKCYLDHTPVAVKVLRPDAAQGRSQFQQEVEVLSCIRHPNMVLLLGACPECGCLVYEFMANGSLEDRLFRLGNSPPLSWQMRFRIAAEIGTGLLFLHQAKPEPLVHRDLKPGNILLDRNFVSKISDVGLARLVPPTVADTVTQYRMTSTAGTFCYIDPEYQQTGMLGVKSDIYSLGIMFLQLITAKPPMGLTHYVERALEKGTLVDLLDPVVSDWPMEDTEEFAKLALKCAELRRKDRPDLAKVILPELNRLRTLADESSHSVVVGNSPLPSPTGSQSSLKLVRTTKSENRNSNILLYSPTDFFFTNHLQEHMSGASISVPQ

SEQ ID NO: 28353 - protein, 641 aa, Arabidopsis thaliana
  misc_feature (1)..(641): Ceres Seq. ID no. 2713372
MRSASRSAPMTAPLRSSVQPPSLKPPQPMPSTSANSLRADRRSFESNQRRSVEDQQRRSMEDQQRRSIDDQSESFRSPFTRRGNGRSYGDLTVPESDISFISSGRPSIDRIFPSLYDNNDPSRTPPRLSNFSDMDYSSSLDQSSNYGRRSVDMNSPTDFESERFSSASQSIDDVEAEMRRLKLELKQTMEMYSTACKEALTAKQKATELQRWKLEEERKLEEARNAEEAALAIAEKEKAKSKAAMEAAEAAQRIAELEAKKRVNAEMKALKESEEKTKALTALANSDVRYRKYSIEDIELATEFFAEKYKIGEGGYGPVYKCYLDHTPVAVKVLRPDAAQGRSQFQQEVEVLSCIRHPNMVLLLGACPECGCLVYEFMANGSLEDRLFRLGNSPPLSWQMRFRIAAEIGTGLLFLHQAKPEPLVHRDLKPGNILLDRNFVSKISDVGLARLVPPTVADTVTQYRMTSTAGTFCYIDPEYQQTGMLGVKSDIYSLGIMFLQLITAKPPMGLTHYVERALEKGTLVDLLDPVVSDWPMEDTEEFAKLALKCAELRRKDRPDLAKVILPELNRLRTLADESSHSVVVGNSPLPSPTGSQSSLKLVRTTKSENRNSNILLYSPTDFFFTNHLQEHMSGASISVPQ

SEQ ID NO: 28354 - DNA, 720 bp, Arabidopsis thaliana
  misc_feature (1)..(720): Ceres Seq. ID no. 2714342
atgggaaggggcaagatcgcgattaagaggatcaataactctacgagccgtcaggttacgttctcgaagcgaaggaatggattgttgaagaaagctaaggagcttgcgattctctgcgatgctgaggttggtgtcatcatcttctccagcaccggtaggctctacgatttctccagctccagcatgaaatcggtcatagagagatacagcgatgccaaaggagaaaccagttcagaaaatgatcccgcttcagaaattcaggaaatgtatatagtaactctggaaaagtatgcatattcagaagagcttgtacttgacaggcaaatgatgggggaggagctctctggactaagtgtagaagctttacagaatttggaaaatcagcttgaattgagccttcgtggcgttcgaatgaaaaaggatcaaatgttaatcgaagaaatacaagtacttaaccgagaggggaatctcgttcaccaagagaatttagacctccacaagaaagtaaacctaatgcaccaacagaacatggaactacatgaaaaggtttcagaggtcgagggtgtgaaaatcgcaaacaagaattctcttctcacaaatggtctagacatgagagatacctcgaacgaacatgtccatcttcagctcagccaaccgcagcatgatcatgagacgcattcaaaagctatccaactcaactatttttccttcattgcataa

SEQ ID NO: 28355 - protein, 239 aa, Arabidopsis thaliana
  misc_feature (1)..(239): Ceres Seq. ID no. 2714343
MGRGKIAIKRINNSTSRQVTFSKRRNGLLKKAKELAILCDAEVGVIIFSSTGRLYDFSSSSMKSVIERYSDAKGETSSENDPASEIQEMYIVTLEKYAYSEELVLDRQMMGEELSGLSVEALQNLENQLELSLRGVRMKKDQMLIEEIQVLNREGNLVHQENLDLHKKVNLMHQQNMELHEKVSEVEGVKIANKNSLLTNGLDMRDTSNEHVHLQLSQPQHDHETHSKAIQLNYFSFIA

SEQ ID NO: 28356 - protein, 178 aa, Arabidopsis thaliana
  misc_feature (1)..(178): Ceres Seq. ID no. 2714344
MKSVIERYSDAKGETSSENDPASEIQEMYIVTLEKYAYSEELVLDRQMMGEELSGLSVEALQNLENQLELSLRGVRMKKDQMLIEEIQVLNREGNLVHQENLDLHKKVNLMHQQNMELHEKVSEVEGVKIANKNSLLTNGLDMRDTSNEHVHLQLSQPQHDHETHSKAIQLNYFSFIA

SEQ ID NO: 28357 - protein, 151 aa, Arabidopsis thaliana
  misc_feature (1)..(151): Ceres Seq. ID no. 2714345
MYIVTLEKYAYSEELVLDRQMMGEELSGLSVEALQNLENQLELSLRGVRMKKDQMLIEEIQVLNREGNLVHQENLDLHKKVNLMHQQNMELHEKVSEVEGVKIANKNSLLTNGLDMRDTSNEHVHLQLSQPQHDHETHSKAIQLNYFSFIA

SEQ ID NO: 28358 - DNA, 2106 bp, Arabidopsis thaliana
  misc_feature (1)..(2106): Ceres Seq. ID no. 2714801
atggacgacttcagtaatcttgagaaacatgaatctgaattaggagcattctttggagacttggcttttgaagaggattcaagaagtgaggatatatcattggaagggcttcaacaagaacttgaagaatgtgaaagtgacgaggttgttgccaatatactgtccagtggtgacaaacttagagaatatgccaaaggtgttgaaaacaatctacggaaggttgaattggattcagttgaggttgctattctcttacctgattacataaaagaaagtgataaactagtctcacttcacgatcagattcgtgactgtaactgcatcttgtcacaaatggaaactcttctcagtggatttcaggaagagattggttctataagttcagacataaagattcttcaagaaaattcaatggacatgggtttgagactgaaaaatcgaagggtgactgaatcaaagctagcaaaatttgtcgaagactttatagtaccaccaaagatgattcatgtaattgttgatggagaggtgaatgaagagtatatcaaaacacttggaattctgagcaagaagctgaaatttgtagaaacagatcaagcagttaaaagttccaaagcattaaaagatgtagagcctgagcttgaaaagctccggcaaaaagctatttccaaggtttatgattttattgttcagaagcttatagccctgaggaaacccaaaacaaacattcagattcttcaacagagtgtgtttttaaagtacaagtatattatctccttcctcaaagaacatggaaaagaagtgtttatggatgtccgcgctgcatacatagataccatgaacaaggtgctaagtgcacattttcagtcttatattcaagcatttgagaaactacagttagatatagccacatcaaacgacttgattggtgtggacactagaagcactggcctcttctcaagatctaaggagccactaaagaaccgttgtgccgtttttgctttgggtgagaggatacaaattataaaggaaattgatcaacctgctttgatcccgcacatagccgaagccagctctctcaagtatccttatgaagtgctcttcaggagcttgcacaagctacttatggatacagctacttctgagtatatcttttgtgaagatttctttggtgaacagtctatattttatgaaatatttgcgggcccattctctgttatctatgagcacttggattccgtcctctcaagctgttatgatgctatcggtttgctgcttatgattcgcattatacaccaccaccagcttatcatgtctcgccggaggattccatgcctggattcatatctggacaaggttaatatttctttgtggcctcgttttaagacggtgtttgacttgcacatcggcagtctgcgaaatgcaaacataaatacaatatgggaagatgatgtgcatcctcactatatcatgagacgttatgctgaattcacggcttcgtttattcacctgaatgttgaatatggagatgggcagcttgatataaatttggagcgtttaagaatggcagtagacagcttgattcttaagcttgcaaagttgttcccaaggccaaagcaacagatggtgtttctcattaacaactatgatatgaccattgctgtgctgaaggaagctgaaccagagggtgggaaaattcaaatgcattttgaggaattactaaagagcaacacttccttatttgcggaagaattgctggtggagcatttcagtgatatgatcaaatttgttaaaagccgagccaatgaggattcaagtccaaatttagagaggtccatcacagttgctgaagtagagccgctggtgaaggactttggaagcagatggaagacagcgatagaattgatgcacaaagatatcataacttgctttagtaacttcttgtgtggtatggatattttgatagctggaatgacacaacttttgctttattacacaagactcgaagactgtatcaagaagatagatggtggatctgctctcaacagggatattgtcaactatcaatcaatcatgttcgagatcaagaaatacaaaaagactttctga

SEQ ID NO: 28359 - protein, 701 aa, Arabidopsis thaliana
  misc_feature (1)..(701): Ceres Seq. ID no. 2714802
MDDFSNLEKHESELGAFFGDLAFEEDSRSEDISLEGLQQELEECESDEVVANILSSGDKLREYAKGVENNLRKVELDSVEVAILLPDYIKESDKLVSLHDQIRDCNCILSQMETLLSGFQEEIGSISSDIKILQENSMDMGLRLKNRRVTESKLAKFVEDFIVPPKMIHVIVDGEVNEEYIKTLGILSKKLKFVETDQAVKSSKALKDVEPELEKLRQKAISKVYDFIVQKLIALRKPKTNIQILQQSVFLKYKYIISFLKEHGKEVFMDVRAAYIDTMNKVLSAHFQSYIQAFEKLQLDIATSNDLIGVDTRSTGLFSRSKEPLKNRCAVFALGERIQIIKEIDQPALIPHIAEASSLKYPYEVLFRSLHKLLMDTATSEYIFCEDFFGEQSIFYEIFAGPFSVIYEHLDSVLSSCYDAIGLLLMIRIIHHHQLIMSRRRIPCLDSYLDKVNISLWPRFKTVFDLHIGSLRNANINTIWEDDVHPHYIMRRYAEFTASFIHLNVEYGDGQLDINLERLRMAVDSLILKLAKLFPRPKQQMVFLINNYDMTIAVLKEAEPEGGKIQMHFEELLKSNTSLFAEELLVEHFSDMIKFVKSRANEDSSPNLERSITVAEVEPLVKDFGSRWKTAIELMHKDIITCFSNFLCGMDILIAGMTQLLLYYTRLEDCIKKIDGGSALNRDIVNYQSIMFEIKKYKKTF

SEQ ID NO: 28360 - protein, 590 aa, Arabidopsis thaliana
  misc_feature (1)..(590): Ceres Seq. ID no. 2714803
METLLSGFQEEIGSISSDIKILQENSMDMGLRLKNRRVTESKLAKFVEDFIVPPKMIHVIVDGEVNEEYIKTLGILSKKLKFVETDQAVKSSKALKDVEPELEKLRQKAISKVYDFIVQKLIALRKPKTNIQILQQSVFLKYKYIISFLKEHGKEVFMDVRAAYIDTMNKVLSAHFQSYIQAFEKLQLDIATSNDLIGVDTRSTGLFSRSKEPLKNRCAVFALGERIQIIKEIDQPALIPHIAEASSLKYPYEVLFRSLHKLLMDTATSEYIFCEDFFGEQSIFYEIFAGPFSVIYEHLDSVLSSCYDAIGLLLMIRIIHHHQLIMSRRRIPCLDSYLDKVNISLWPRFKTVFDLHIGSLRNANINTIWEDDVHPHYIMRRYAEFTASFIHLNVEYGDGQLDINLERLRMAVDSLILKLAKLFPRPKQQMVFLINNYDMTIAVLKEAEPEGGKIQMHFEELLKSNTSLFAEELLVEHFSDMIKFVKSRANEDSSPNLERSITVAEVEPLVKDFGSRWKTAIELMHKDIITCFSNFLCGMDILIAGMTQLLLYYTRLEDCIKKIDGGSALNRDIVNYQSIMFEIKKYKKTF

SEQ ID NO: 28361 - protein, 564 aa, Arabidopsis thaliana
  misc_feature (1)..(564): Ceres Seq. ID no. 2714804
MDMGLRLKNRRVTESKLAKFVEDFIVPPKMIHVIVDGEVNEEYIKTLGILSKKLKFVETDQAVKSSKALKDVEPELEKLRQKAISKVYDFIVQKLIALRKPKTNIQILQQSVFLKYKYIISFLKEHGKEVFMDVRAAYIDTMNKVLSAHFQSYIQAFEKLQLDIATSNDLIGVDTRSTGLFSRSKEPLKNRCAVFALGERIQIIKEIDQPALIPHIAEASSLKYPYEVLFRSLHKLLMDTATSEYIFCEDFFGEQSIFYEIFAGPFSVIYEHLDSVLSSCYDAIGLLLMIRIIHHHQLIMSRRRIPCLDSYLDKVNISLWPRFKTVFDLHIGSLRNANINTIWEDDVHPHYIMRRYAEFTASFIHLNVEYGDGQLDINLERLRMAVDSLILKLAKLFPRPKQQMVFLINNYDMTIAVLKEAEPEGGKIQMHFEELLKSNTSLFAEELLVEHFSDMIKFVKSRANEDSSPNLERSITVAEVEPLVKDFGSRWKTAIELMHKDIITCFSNFLCGMDILIAGMTQLLLYYTRLEDCIKKIDGGSALNRDIVNYQSIMFEIKKYKKTF

SEQ ID NO: 28362 - DNA, 2199 bp, Arabidopsis thaliana
  misc_feature (1)..(2199): Ceres Seq. ID no. 2715592
atggctgagtcgtcaacgatcgaagcaaggctggttcgatgtcccaagtgcaagaatctcttacaagagcctaaagattgccccttttttcagtgtggtggttgtggaaccgttctttgcgccaagaacaaggaccgtgaagctgatttattgtcggttaagtccgttgaaaatagatccaaagaaattgaagttacctctggctcaagtgaagaagaatctgattcaaatgcttcattaagacaccaacaagatggtcaaactgagacttgggatgttcacaatgatcctagttcgaaaatgaatgttgttgattcgggtaataacgattctcaaccaggtttggatcagattaggaaaagaacaaccaagagatgcgatttagaaggtttcagattctccacttctaactattttacagattctctgtctactgatgaagcaattgagcaagacagagctggactggtgagaaaattggataagctaaaagaacagcttgttcaacctaaagaacagcagatcccgagttcgtcttcaggattccaaaaggctccattgcgggttttcagctccgggaggcgtattgcaggtccttcctactaccagtattattcagaacccgaacctccatgtctttataacaacaacagtgatgtttctctacatggtccgatgcataacccggctaatgttccagcatatggtgaccctcacgggttcccaatgcatgaaagaactctgcagccatctcatctgcacaactctagacagtatattggtaataatggtcatgatgtttttgatacacaccctcataatgggatgtttcatcaatcaacttgctcttggttgcctgatgctctgcgtaatcccggtttttaccctcatgagagaagttttgggtttggtacttcattgcatagcccgagaacctttattcctcctggttctcaatctcctggaccacagctccgaggaagatgcacgagtggatttaaggatatgcgaatgaatgcagtttctcgtgttcacccctctaaacctgtatcatcttcaggtggttctcgcctaattcaacctgtggctggtggtgcaccatttataaactgtataaactgcttcaaacttctgaaattgccagagaaaatagattctgctacgagaaagaaacagagaatgcgctgcggagcatgctcttgtgtaatagattattcctttgttgataagaagctcattctctctacagatcctgcttcagcaagaaaaccagaaactcatagtaggctgcgttgggaaactactgctaacttctcttctgatgactatgataatgctgcttacgaattccatgcaatggatagaggatcagccgatgtatcaactgctctggttttgatctccaacacagctcaagaaatgcagattacggatgctacttctcctagcgtgtctgaagacgagttaagttcagacagttcaacagttaggaaagttaatcttgcttcacctcttcacaaacaatttgaatactcttcgatcaatgtaagggaccggtctgggccaaggagccaaagctctcgttcagaacaggacagggtcacactgagcaaaacagccatgagacagaactctatgaaagaagcttcagttgcaattgagatggacgttaatgactactctcacaacaatgaagtgtcacaagattctgcgaatgactgtacagatgatcagggaagaaccaagaagggtggatttgcgagtatcatgaagaatagcttcaaggatctgaagaaatccatacagaacgaaggcagaagtgatgtctcaataaatggtcatcctgtagctgaacgtctggtgaaaatggcagagaagcaggctggaccaatccgaccaggaaactactggtacgactacagagctggattctggggagtactgggaagtcactgccttggaatattaccgcctttcattgaagagctcaattacccaatgccagagaattgcgctggcggaaccacaagagtctttgtgaacggaagagagcttcaccagaaagacctgcgcttgctcactgccagaggtcttccacgggatagagatcgatcctacactgtttacatctcaggtagagtcatagacgaagataccggtgaagagctagatagtcttggtaaactcgccccaacgtaa

SEQ ID NO: 28363 - protein, 732 aa, Arabidopsis thaliana
  misc_feature (1)..(732): Ceres Seq. ID no. 2715593
MAESSTIEARLVRCPKCKNLLQEPKDCPFFQCGGCGTVLCAKNKDREADLLSVKSVENRSKEIEVTSGSSEEESDSNASLRHQQDGQTETWDVHNDPSSKMNVVDSGNNDSQPGLDQIRKRTTKRCDLEGFRFSTSNYFTDSLSTDEAIEQDRAGLVRKLDKLKEQLVQPKEQQIPSSSSGFQKAPLRVFSSGRRIAGPSYYQYYSEPEPPCLYNNNSDVSLHGPMHNPANVPAYGDPHGFPMHERTLQPSHLHNSRQYIGNNGHDVFDTHPHNGMFHQSTCSWLPDALRNPGFYPHERSFGFGTSLHSPRTFIPPGSQSPGPQLRGRCTSGFKDMRMNAVSRVHPSKPVSSSGGSRLIQPVAGGAPFINCINCFKLLKLPEKIDSATRKKQRMRCGACSCVIDYSFVDKKLILSTDPASARKPETHSRLRWETTANFSSDDYDNAAYEFHAMDRGSADVSTALVLISNTAQEMQITDATSPSVSEDELSSDSSTVRKVNLASPLHKQFEYSSINVRDRSGPRSQSSRSEQDRVTLSKTAMRQNSMKEASVAIEMDVNDYSHNNEVSQDSANDCTDDQGRTKKGGFASIMKNSFKDLKKSIQNEGRSDVSINGHPVAERLVKMAEKQAGPIRPGNYWYDYRAGFWGVLGSHCLGILPPFIEELNYPMPENCAGGTTRVFVNGRELHQKDLRLLTARGLPRDRDRSYTVYISGRVIDEDTGEELDSLGKLAPT

SEQ ID NO: 28364 - protein, 632 aa, Arabidopsis thaliana
  misc_feature (1)..(632): Ceres Seq. ID no. 2715594
MNVVDSGNNDSQPGLDQIRKRTTKRCDLEGFRFSTSNYFTDSLSTDEAIEQDRAGLVRKLDKLKEQLVQPKEQQIPSSSSGFQKAPLRVFSSGRRIAGPSYYQYYSEPEPPCLYNNNSDVSLHGPMHNPANVPAYGDPHGFPMHERTLQPSHLHNSRQYIGNNGHDVFDTHPHNGMFHQSTCSWLPDALRNPGFYPHERSFGFGTSLHSPRTFIPPGSQSPGPQLRGRCTSGFKDMRMNAVSRVHPSKPVSSSGGSRLIQPVAGGAPFINCINCFKLLKLPEKIDSATRKKQRMRCGACSCVIDYSFVDKKLILSTDPASARKPETHSRLRWETTANFSSDDYDNAAYEFHAMDRGSADVSTALVLISNTAQEMQITDATSPSVSEDELSSDSSTVRKVNLASPLHKQFEYSSINVRDRSGPRSQSSRSEQDRVTLSKTAMRQNSMKEASVAIEMDVNDYSHNNEVSQDSANDCTDDQGRTKKGGFASIMKNSFKDLKKSIQNEGRSDVSINGHPVAERLVKMAEKQAGPIRPGNYWYDYRAGFWGVLGSHCLGILPPFIEELNYPMPENCAGGTTRVFVNGRELHQKDLRLLTARGLPRDRDRSYTVYISGRVIDEDTGEELDSLGKLAPT

SEQ ID NO: 28365 - protein, 507 aa, Arabidopsis thaliana
  misc_feature (1)..(507): Ceres Seq. ID no. 2715595
MHNPANVPAYGDPHGFPMHERTLQPSHLHNSRQYIGNNGHDVFDTHPHNGMFHQSTCSWLPDALRNPGFYPHERSFGFGTSLHSPRTFIPPGSQSPGPQLRGRCTSGFKDMRMNAVSRVHPSKPVSSSGGSRLIQPVAGGAPFINCINCFKLLKLPEKIDSATRKKQRMRCGACSCVIDYSFVDKKLILSTDPASARKPETHSRLRWETTANFSSDDYDNAAYEFHAMDRGSADVSTALVLISNTAQEMQITDATSPSVSEDELSSDSSTVRKVNLASPLHKQFEYSSINVRDRSGPRSQSSRSEQDRVTLSKTAMRQNSMKEASVAIEMDVNDYSHNNEVSQDSANDCTDDQGRTKKGGFASIMKNSFKDLKKSIQNEGRSDVSINGHPVAERLVKMAEKQAGPIRPGNYWYDYRAGFWGVLGSHCLGILPPFIEELNYPMPENCAGGTTRVFVNGRELHQKDLRLLTARGLPRDRDRSYTVYISGRVIDEDTGEELDSLGKLAPT

SEQ ID NO: 28366 - DNA, 1344 bp, Arabidopsis thaliana
  misc_feature (1)..(1344): Ceres Seq. ID no. 2715781
atggatgagatttgggaaagagctgtagaagcggctctagatggtcaaacagataggttagctacacgaacgctaacacttgatggtgctgtgaaatgcgttcagggacgtttaccaccacctagtgttctcgagaagtttcagaatcttcagcatctttctgtagctaacatcggtgtttcttctctggaacagtttcctagacttggtaatttacagaagctaatcttatctgataatcggatcactgttggtttagagtttcttgttgaagctgggcttgattcgttctgtgatttggatttatctaataaccggatccagtttgttgaggatctagctcctttggcggagttgaagcttgtgtctcttgatctgtatgagtgtcctgtgactaggcttaaggattatcgatctagggtttttgggttgattaaaactttgaagtatttagataagactgatgctgaagggaatgagaggcctgagtctgatgatgaagatgatgaggaagatgaagaggatgaagaagaagaagaggaaggtgatgaggaggatcctggaagtggggagattgatggagatgaaagagcagaggctcctcggatgagtaatggccatagtgaaagggtagatggtgttgttgatgttgatgaggatgaagagagtgatgctgaggatgatgagtcagagcaggctactggagtgaacgggacgagttatcgggctaatggattccgtcttgaagctgttaatggggaagaagtaagggaagatgatggggatgatagtgagtctggtgaggaggaagtaggggaagataatgatgtggttgaggttcatgagattgaagatagtgagaatgaggaagatggggttgatgatgaagaagatgatgaagaggatgaggaggaagaggaagttgataatgctgatcgtggtcttggtgggtcagggagcacaagcaggttgatgaacgcaggagagattgatgggcatgaacaaggagatgacgatgaagatggtgatggcgagactggggaagatgaccaaggggttgaggatgatggagagtttgcggatgaagatgatgatgttgaagaggaggatgaagaatctggtgaagggtaccttgttcagccagtttctcaagtggaagatcatgatgctgtgggtaatgacatcgagccgatcaatgaggacaatgatccagatgaagaagaagaagtcgaagatgacctgccaattcctgaccagtccttggcttcatcatctcgcccaaagagaaaacgagatgacgatgatgacggtgaggatgatgacgatgatgatgaggaacgttga

SEQ ID NO: 28367 - protein, 447 aa, Arabidopsis thaliana
  misc_feature (1)..(447): Ceres Seq. ID no. 2715782
MDEIWERAVEAALDGQTDRLATRTLTLDGAVKCVQGRLPPPSVLEKFQNLQHLSVANIGVSSLEQFPRLGNLQKLILSDNRITVGLEFLVEAGLDSFCDLDLSNNRIQFVEDLAPLAELKLVSLDLYECPVTRLKDYRSRVFGLIKTLKYLDKTDAEGNERPESDDEDDEEDEEDEEEEEEGDEEDPGSGEIDGDERAEAPRMSNGHSERVDGVVDVDEDEESDAEDDESEQATGVNGTSYRANGFRLEAVNGEEVREDDGDDSESGEEEVGEDNDVVEVHEIEDSENEEDGVDDEEDDEEDEEEEEVDNADRGLGGSGSTSRLMNAGEIDGHEQGDDDEDGDGETGEDDQGVEDDGEFADEDDDVEEEDEESGEGYLVQPVSQVEDHDAVGNDIEPINEDNDPDEEEEVEDDLPIPDQSLASSSRPKRKRDDDDDGEDDDDDDEER

SEQ ID NO: 28368 - protein, 245 aa, Arabidopsis thaliana
  misc_feature (1)..(245): Ceres Seq. ID no. 2715783
MSNGHSERVDGVVDVDEDEESDAEDDESEQATGVNGTSYRANGFRLEAVNGEEVREDDGDDSESGEEEVGEDNDVVEVHEIEDSENEEDGVDDEEDDEEDEEEEEVDNADRGLGGSGSTSRLMNAGEIDGHEQGDDDEDGDGETGEDDQGVEDDGEFADEDDDVEEEDEESGEGYLVQPVSQVEDHDAVGNDIEPINEDNDPDEEEEVEDDLPIPDQSLASSSRPKRKRDDDDDGEDDDDDDEER

SEQ ID NO: 28369 - DNA, 990 bp, Arabidopsis thaliana
  misc_feature (1)..(990): Ceres Seq. ID no. 2715797
atggtggtggttcaaatagctacggcagggttaaacatatttttcaagctagcaatggaagatggtatgaacccaagtgtactcgtggcctatcgtctcttgtttgctacacttttcatgattcctatatgcttcatctttcaaagtgtggtgataccaagtatcctaaccattacgggtctagctctaacgtcagcaacattcacctctgctgctggcgttctcactccattggtcactttcatcttcgctgcacttcttaggatggagagtgtacggcttggatcgagcgtagggctggctaaggtttttggaacattgtttggtgttggtggagctcttgtctttatattctatagaggaatagagatccgactatggtcaactcacgttaacctagtgaaccaaccacgtgactcctcacgtgatgctaccactcaccatatttccatccttggggctcttctagtttttgggggaaacatttccatctcactttggtttttattgcaggttaagataagcaaacaatttggagggccttattggaacgcgactctaatgaacatgatgggaggcgtagtggctatgcttgtcgctctttgctgggaacacgatttagatgaatggagattaggatggaatatcagactattaaccattgcttatgcggcaattctgatttccgggatggtggtagcagtcaacgcatggtgcattgagtctagaggaccgttatttgtatcggtatttagccctgtaggacttgtgatcgtagctcttgttggatcatttttgctagatgaaacacttcatttggggagcataattggtacagtgattatcgttggagcattatacattgtgctatgggctaaaaacaaggaaatgaagagtatgcttacgacatcggatcataatgaaacaaataagactagcaaagatatcacagtcaacaatctcccaacattaagtacaaatgtcccttga

SEQ ID NO: 28370 - protein, 329 aa, Arabidopsis thaliana
  misc_feature (1)..(329): Ceres Seq. ID no. 2715798
MVVVQIATAGLNIFFKLAMEDGMNPSVLVAYRLLFATLFMIPICFIFQSVVIPSILTITGLALTSATFTSAAGVLTPLVTFIFAALLRMESVRLGSSVGLAKVFGTLFGVGGALVFIFYRGIEIRLWSTHVNLVNQPRDSSRDATTHHISILGALLVFGGNISISLWFLLQVKISKQFGGPYWNATLMNMMGGVVAMLVALCWEHDLDEWRLGWNIRLLTIAYAAILISGMVVAVNAWCIESRGPLFVSVFSPVGLVIVALVGSFLLDETLHLGSIIGTVIIVGALYIVLWAKNKEMKSMLTTSDHNETNKTSKDITVNNLPTLSTNVP

SEQ ID NO: 28371 - protein, 311 aa, Arabidopsis thaliana
  misc_feature (1)..(311): Ceres Seq. ID no. 2715799
MEDGMNPSVLVAYRLLFATLFMIPICFIFQSVVIPSILTITGLALTSATFTSAAGVLTPLVTFIFAALLRMESVRLGSSVGLAKVFGTLFGVGGALVFIFYRGIEIRLWSTHVNLVNQPRDSSRDATTHHISILGALLVFGGNISISLWFLLQVKISKQFGGPYWNATLMNMMGGVVAMLVALCWEHDLDEWRLGWNIRLLTIAYAAILISGMVVAVNAWCIESRGPLFVSVFSPVGLVIVALVGSFLLDETLHLGSIIGTVIIVGALYIVLWAKNKEMKSMLTTSDHNETNKTSKDITVNNLPTLSTNVP

SEQ ID NO: 28372 - protein, 307 aa, Arabidopsis thaliana
  misc_feature (1)..(307): Ceres Seq. ID no. 2715800
MNPSVLVAYRLLFATLFMIPICFIFQSVVIPSILTITGLALTSATFTSAAGVLTPLVTFIFAALLRMESVRLGSSVGLAKVFGTLFGVGGALVFIFYRGIEIRLWSTHVNLVNQPRDSSRDATTHHISILGALLVFGGNISISLWFLLQVKISKQFGGPYWNATLMNMMGGVVAMLVALCWEHDLDEWRLGWNIRLLTIAYAAILISGMVVAVNAWCIESRGPLFVSVFSPVGLVIVALVGSFLLDETLHLGSIIGTVIIVGALYIVLWAKNKEMKSMLTTSDHNETNKTSKDITVNNLPTLSTNVP

SEQ ID NO: 28373 - DNA, 1461 bp, Arabidopsis thaliana
  misc_feature (1)..(1461): Ceres Seq. ID no. 2716470
atggcgatttctgaatccaaccctgactcaaatcttagcattcaagctggagatgaatggcaaaagcttcctctattcgccaattcgtcacatccagattcatcgtccccggaacggtcttcttcgcgttttggtgattctagctacaccgtttcgatataccgcagcattggcaagctttactgcgcaaatcccgtctttaaggcttatttggtctcgtcttctccgaaacaagcgttggggttttacttcgatatactaagatttggttttgttcctgattcatacaccttcgtttcgttgattagttgtattgagaagacttgttgcgttgattctggtaaaatgtgtcatgggcaagccattaagcatggatgcgatcaagttttgcctgttcaaaattcgttaatgcatatgtatacttgttgtggtgctttggatcttgcaaagaagctgtttgttgaaattcctaagagagatattgtgtcctggaactctataatagctgggatggtgaggaatggtgatgttttggctgcacacaagttgttcgatgaaatgcctgacaaaaacattatttcttggaatatcatgattagtgcttatttgggtgcgaataatcctggagtttccattagtttgttccgtgagatggtcagagcagggttccaaggaaatgagagtacgttggttttgttgttgaatgcttgtggtagatcagctagattgaaggaagctcttattgacatgtatggaaagtgcaaggaagtaggtttagcacgtaggatattcgatagtctatctattagaaacaaagttacttggaatgtgatgatattggcacattgtcttcacgggcgtcctgaaggtgggctcgagttatttgaagccatgatcaatggtatgcttagacccgatgaagtgacatttgttggtgttctctgcggttgtgctagagctgggcttgtttctcaaggacaaagttactattctctgatggttgatgagttccagatcaaacccaactttggacaccaatggtgcatggctaatctttactccagcgccgggttccctgaagaagcagaggaagctctgaagaatctgccagatgaagatgtgacaccagaatctacaaagtgggcaaacttgctcagctcgtcgcgttttacaggaaacccgactctaggggagagcattgccaagtccctgatagagacagatcctttgaactacaagtattaccatttgctgatgaatatttacagtgttacgggacggtgggaggatgttaatagagtgagagagatggtgaaggagaggaaaataggacgaatacccgggtgtggccttgtggacttgaaggagatagtccatggccttagactaggatgcaaagaagcagaaaaggtgttcactgagactagtttagaaaaatgctacagtgattcaccgtcataa

SEQ ID NO: 28374 - protein, 486 aa, Arabidopsis thaliana
  misc_feature (1)..(486): Ceres Seq. ID no. 2716471
MAISESNPDSNLSIQAGDEWQKLPLFANSSHPDSSSPERSSSRFGDSSYTVSIYRSIGKLYCANPVFKAYLVSSSPKQALGFYFDILRFGFVPDSYTFVSLISCIEKTCCVDSGKMCHGQAIKHGCDQVLPVQNSLMHMYTCCGALDLAKKLFVEIPKRDIVSWNSIIAGMVRNGDVLAAHKLFDEMPDKNIISWNIMISAYLGANNPGVSISLFREMVRAGFQGNESTLVLLLNACGRSARLKEALIDMYGKCKEVGLARRIFDSLSIRNKVTWNVMILAHCLHGRPEGGLELFEAMINGMLRPDEVTFVGVLCGCARAGLVSQGQSYYSLMVDEFQIKPNFGHQWCMANLYSSAGFPEEAEEALKNLPDEDVTPESTKWANLLSSSRFTGNPTLGESIAKSLIETDPLNYKYYHLLMNIYSVTGRWEDVNRVREMVKERKIGRIPGCGLVDLKEIVHGLRLGCKEAEKVFTETSLEKCYSDSPS

SEQ ID NO: 28375 - protein, 371 aa, Arabidopsis thaliana
  misc_feature (1)..(371): Ceres Seq. ID no. 2716472
MCHGQAIKHGCDQVLPVQNSLMHMYTCCGALDLAKKLFVEIPKRDIVSWNSIIAGMVRNGDVLAAHKLFDEMPDKNIISWNIMISAYLGANNPGVSISLFREMVRAGFQGNESTLVLLLNACGRSARLKEALIDMYGKCKEVGLARRIFDSLSIRNKVTWNVMILAHCLHGRPEGGLELFEAMINGMLRPDEVTFVGVLCGCARAGLVSQGQSYYSLMVDEFQIKPNFGHQWCMANLYSSAGFPEEAEEALKNLPDEDVTPESTKWANLLSSSRFTGNPTLGESIAKSLIETDPLNYKYYHLLMNIYSVTGRWEDVNRVREMVKERKIGRIPGCGLVDLKEIVHGLRLGCKEAEKVFTETSLEKCYSDSPS

SEQ ID NO: 28376 - protein, 350 aa, Arabidopsis thaliana
  misc_feature (1)..(350): Ceres Seq. ID no. 2716473
MHMYTCCGALDLAKKLFVEIPKRDIVSWNSIIAGMVRNGDVLAAHKLFDEMPDKNIISWNIMISAYLGANNPGVSISLFREMVRAGFQGNESTLVLLLNACGRSARLKEALIDMYGKCKEVGLARRIFDSLSIRNKVTWNVMILAHCLHGRPEGGLELFEAMINGMLRPDEVTFVGVLCGCARAGLVSQGQSYYSLMVDEFQIKPNFGHQWCMANLYSSAGFPEEAEEALKNLPDEDVTPESTKWANLLSSSRFTGNPTLGESIAKSLIETDPLNYKYYHLLMNIYSVTGRWEDVNRVREMVKERKIGRIPGCGLVDLKEIVHGLRLGCKEAEKVFTETSLEKCYSDSPS

SEQ ID NO: 28377 - DNA, 1077 bp, Arabidopsis thaliana
  misc_feature (1)..(1077): Ceres Seq. ID no. 2716859
atgattccgtttcctctgttaccaacgccgattgaaaccaactacagagcttgcaccattccttatagattcccttccgataatctcaagaaagccactcctactgaaatctcctggatcaacgtcttcgccaattccattccttctttcaagaaacgtgcagagagcgataccagtgttccagatgctcctgctagagctaaaatttttgaacaaagatatgcgggatttcttgaaggctggaagaaagatccagagagtaatggtgggccaccagatggtgttattctcggccgagttcgtgagcatttactcagagagttaggatttagggacatattcaagaaagtcaaggatgaggagaatgcaaaggctatatcactatttcctgaagttgtcagtctgagtgatgctattgaagatgacggagaacggttagagaatttggtgagagggatatttgctggaaacatctttgatcttggttctgcacagttgtctctctttggtgctcccacaggaaaagcttgtcctaattacgcgctcttttcttttcgcattttgaagcttgctgaggttttctcaagggatggcatatctttcttggctacctctcaaaacttggttccacgaccatgggtcatcgatgacttgaacaagttccaagccaaatgggtcaagaagccttggaagaaggtcacttgtttacataattttgggtattttgcctttcgcaagagagttgctccgtcgaggaattcagacttaatctaccagttaaaggatggaaatggccaattgataggcgttgatacttcaaagcttctgattgcaaattcagggaacgatttagcggttattgatctctcaagagtatcgcacgagcttgcttacctttcatctgatgcagacttagtcatcctagaaggcatgggtcgcgggatcgagacaaacctttatgctcagttcaagtgtgattctctcaagatcggaatggtgaagcacgttgaagtagcacagtttctcggaggacgactttacgactgtgtctttaaattcaatgaagttcagagttaa

SEQ ID NO: 28378 - protein, 358 aa, Arabidopsis thaliana
  misc_feature (1)..(358): Ceres Seq. ID no. 2716860
MIPFPLLPTPIETNYRACTIPYRFPSDNLKKATPTEISWINVFANSIPSFKKRAESDTSVPDAPARAKIFEQRYAGFLEGWKKDPESNGGPPDGVILGRVREHLLRELGFRDIFKKVKDEENAKAISLFPEVVSLSDAIEDDGERLENLVRGIFAGNIFDLGSAQLSLFGAPTGKACPNYALFSFRILKLAEVFSRDGISFLATSQNLVPRPWVIDDLNKFQAKWVKKPWKKVTCLHNFGYFAFRKRVAPSRNSDLIYQLKDGNGQLIGVDTSKLLIANSGNDLAVIDLSRVSHELAYLSSDADLVILEGMGRGIETNLYAQFKCDSLKIGMVKHVEVAQFLGGRLYDCVFKFNEVQS

SEQ ID NO: 28379 - DNA, 2238 bp, Arabidopsis thaliana
  misc_feature (1)..(2238): Ceres Seq. ID no. 2717036
atgattacaagcttatctcaaatctcttttgggacattgaggcgctttggctcttctgttttaccttctgcactgaaacgcgaatttgttgaaggattgcgtacgttagtaaggtctggtgatatccgtcgagctgtttccttattctattctgcgccggtcgagcttcagtctcaacaggcttacgcagctctgttccaagcatgtgcagagcaacgcaatctcctcgatggaatcaacttgcaccaccacatgctctcacatccctattgttattcacagaacgttatacttgctaatttcctcattaatatgtatgccaaatgtgggaatatcttatacgcacgacaggtgtttgatacaatgcctgagaggaatgttgtttcatggactgcattgatcacaggctatgtacaggctgggaatgagcaagagggattctgtcttttctcgtctatgttatcccattgtttccctaacgagtttacgctgtcaagcgtgttaacttcatgtcgatatgagcctggaaagcaggtacatggacttgctctgaaacttggtttacattgttcgatctatgtggcgaatgcagttatctctatgtacggtaggtgtcatgatggtgccgcagcatatgaagcttggactgtgtttgaagccataaagtttaagaatttggttacttggaactcaatgattgctgcttttcagtgctgcaatcttgggaaaaaggccattggcgtttttatgcggatgcatagtgatggagtgggatttgatcgtgccacgttgcttaatatatgttcttccttgtacaaaagctctgacttagttcctaatgaggtttcaaagtgttgtcttcaactgcattctctgactgtaaaatccgggttggtgactcagactgaagtggctactgcattgattaaagtttattcagaaatgttagaagactatactgactgctacaagctttttatggaaatgagtcactgcagggacattgttgcttggaatgggattataacagcgtttgcagtgtatgatccggagagagctattcatctctttggtcagttacgtcaggagaagctaagccctgactggtatactttctcaagtgtactaaaagcttgtgcaggacttgtcactgctcgccatgctttgtctatacacgctcaagtgatcaagggtggttttttggctgacacggtgctgaacaactcattaatccatgcgtatgccaagtgtggctctcttgacttgtgtatgcgtgtatttgacgatatggattcgcgggatgttgtttcctggaactcaatgctcaaggcttactcattacatggccaagtagactcaattctaccagtctttcagaaaatggacatcaaccccgattcagcgactttcatagcccttctctcggcttgcagccacgcaggacgagtagaagaaggattgagaatattcagatccatgtttgagaaacctgaaactcttcctcagctaaatcactacgcttgtgtgatcgatatgctaagccgagctgagcgttttgctgaggcagaagaggttatcaagcagatgccaatggacccagatgctgtagtttggattgcattattgggatcatgtagaaagcacggtaacacccggttgggtaagttagcggcagataaacttaaagagctagtcgaacccacaaactcaatgagttacatccagatgtcaaacatatacaacgcagaaggtagctttaacgaagccaatcttagcataaaggagatggaaacatggagagtacggaaagaaccagacttaagctggacagagataggaaacaaggttcacgaattcgcatcgggaggaagacaccgtccggacaaggaagccgtatacagagaattgaagagactgattagttggttaaaggagatgggttacgttccagaaatgaggtcagcttcacaagatatagaagacgaagaacaggaggaagataatttattacatcacagcgagaaacttgcgttagcgtttgcggttatggagggaagaaaatcgagtgattgtggtgtgaatttgatacagattatgaagaacacaaggatctgtattgattgccataacttcatgaaattagcttctaagcttttgggaaaagagattcttatgagagactcgaatcggtttcaccatttcaaagattcttcttgctcctgtaatgactactggtaa

SEQ ID NO: 28380 - protein, 745 aa, Arabidopsis thaliana
  misc_feature (1)..(745): Ceres Seq. ID no. 2717037
MITSLSQISFGTLRRFGSSVLPSALKREFVEGLRTLVRSGDIRRAVSLFYSAPVELQSQQAYAALFQACAEQRNLLDGINLHHHMLSHPYCYSQNVILANFLINMYAKCGNILYARQVFDTMPERNVVSWTALITGYVQAGNEQEGFCLFSSMLSHCFPNEFTLSSVLTSCRYEPGKQVHGLALKLGLHCSIYVANAVISMYGRCHDGAAAYEAWTVFEAIKFKNLVTWNSMIAAFQCCNLGKKAIGVFMRMHSDGVGFDRATLLNICSSLYKSSDLVPNEVSKCCLQLHSLTVKSGLVTQTEVATALIKVYSEMLEDYTDCYKLFMEMSHCRDIVAWNGIITAFAVYDPERAIHLFGQLRQEKLSPDWYTFSSVLKACAGLVTARHALSIHAQVIKGGFLADTVLNNSLIHAYAKCGSLDLCMRVFDDMDSRDVVSWNSMLKAYSLHGQVDSILPVFQKMDINPDSATFIALLSACSHAGRVEEGLRIFRSMFEKPETLPQLNHYACVIDMLSRAERFAEAEEVIKQMPMDPDAVVWIALLGSCRKHGNTRLGKLAADKLKELVEPTNSMSYIQMSNIYNAEGSFNEANLSIKEMETWRVRKEPDLSWTEIGNKVHEFASGGRHRPDKEAVYRELKRLISWLKEMGYVPEMRSASQDIEDEEQEEDNLLHHSEKLALAFAVMEGRKSSDCGVNLIQIMKNTRICIDCHNFMKLASKLLGKEILMRDSNRFHHFKDSSCSCNDYW

SEQ ID NO: 28381 - protein, 661 aa, Arabidopsis thaliana
  misc_feature (1)..(661): Ceres Seq. ID no. 2717038
MLSHPYCYSQNVILANFLINMYAKCGNILYARQVFDTMPERNVVSWTALITGYVQAGNEQEGFCLFSSMLSHCFPNEFTLSSVLTSCRYEPGKQVHGLALKLGLHCSIYVANAVISMYGRCHDGAAAYEAWTVFEAIKFKNLVTWNSMIAAFQCCNLGKKAIGVFMRMHSDGVGFDRATLLNICSSLYKSSDLVPNEVSKCCLQLHSLTVKSGLVTQTEVATALIKVYSEMLEDYTDCYKLFMEMSHCRDIVAWNGIITAFAVYDPERAIHLFGQLRQEKLSPDWYTFSSVLKACAGLVTARHALSIHAQVIKGGFLADTVLNNSLIHAYAKCGSLDLCMRVFDDMDSRDVVSWNSMLKAYSLHGQVDSILPVFQKMDINPDSATFIALLSACSHAGRVEEGLRIFRSMFEKPETLPQLNHYACVIDMLSRAERFAEAEEVIKQMPMDPDAVVWIALLGSCRKHGNTRLGKLAADKLKELVEPTNSMSYIQMSNIYNAEGSFNEANLSIKEMETWRVRKEPDLSWTEIGNKVHEFASGGRHRPDKEAVYRELKRLISWLKEMGYVPEMRSASQDIEDEEQEEDNLLHHSEKLALAFAVMEGRKSSDCGVNLIQIMKNTRICIDCHNFMKLASKLLGKEILMRDSNRFHHFKDSSCSCNDYW

SEQ ID NO: 28382 - protein, 641 aa, Arabidopsis thaliana
  misc_feature (1)..(641): Ceres Seq. ID no. 2717039
MYAKCGNILYARQVFDTMPERNVVSWTALITGYVQAGNEQEGFCLFSSMLSHCFPNEFTLSSVLTSCRYEPGKQVHGLALKLGLHCSIYVANAVISMYGRCHDGAAAYEAWTVFEAIKFKNLVTWNSMIAAFQCCNLGKKAIGVFMRMHSDGVGFDRATLLNICSSLYKSSDLVPNEVSKCCLQLHSLTVKSGLVTQTEVATALIKVYSEMLEDYTDCYKLFMEMSHCRDIVAWNGIITAFAVYDPERAIHLFGQLRQEKLSPDWYTFSSVLKACAGLVTARHALSIHAQVIKGGFLADTVLNNSLIHAYAKCGSLDLCMRVFDDMDSRDVVSWNSMLKAYSLHGQVDSILPVFQKMDINPDSATFIALLSACSHAGRVEEGLRIFRSMFEKPETLPQLNHYACVIDMLSRAERFAEAEEVIKQMPMDPDAVVWIALLGSCRKHGNTRLGKLAADKLKELVEPTNSMSYIQMSNIYNAEGSFNEANLSIKEMETWRVRKEPDLSWTEIGNKVHEFASGGRHRPDKEAVYRELKRLISWLKEMGYVPEMRSASQDIEDEEQEEDNLLHHSEKLALAFAVMEGRKSSDCGVNLIQIMKNTRICIDCHNFMKLASKLLGKEILMRDSNRFHHFKDSSCSCNDYW

SEQ ID NO: 28383 - DNA, 2046 bp, Arabidopsis thaliana
  misc_feature (1)..(2046): Ceres Seq. ID no. 2717056
atgctgagtgagagtcttttcaaatctcttggacatttggccagccacggtcatttgcacgacgctttcaaaacgttttctcttcttcgtcttcaatcttcttctgcagtttcagatgacctcgttttgcattccgcggcttcccttttatccgcttgcgttgatgttcgtgcatttttagcaggggtgcaagttcacgctcactgtatttcgtcgggtgtcgaatatcactctgtgttagtcccaaagctggttaccttttactctgctttcaatctccacaatgaagctcaatcgattattgagaactctgacattttgcatcccttaccttggaatgtgctcattgcttcgtatgccaagaacgagctttttgaggaggttattgctgcttacaagagaatggtgagcaagggaatccgacccgatgccttcacttatccgtctgttcttaaggcttgtggtgaaacacttgacgttgcctttggaagggtggttcatggttccatcgaggttagctcttacaagtccagcttgtatgtttgtaatgcattgatctctatgtataaaaggtttagaaatatgggtattgctcggaggttgtttgatcgaatgtttgaaagggatgctgtctcatggaatgcagtgataaactgttatgcttcggaaggcatgtggagtgaagcgtttgagcttttcgataaaatgtggttttcaggtgttgaggtcagtgtcataacttggaatattatttctggaggttgtttgcaaacaggaaattatgtaggagctttgggtttgatctctaggatgagaaattttcctacgagcttagatcctgtggctatgattattggtttgaaggcttgctctctcataggagcaatacgattgggaaaagagattcacggtcttgctattcacagttcttatgatgggattgacaatgttcgaaacacgttgatcacaatgtactcaaaatgcaaagaccttaggcacgccttaatagtgtttcgacagactgaagaaaatagtttgtgtacttggaactctatcatttccggttatgcgcagctgaacaaatcagaagaagcctctcacctgctgagggagatgttggttgctggctttcagccaaattccattacactagcaagcattctccctctttgtgctcggattgcaaacctgcaacatggaaaagagtttcattgctacatcctgaggcgcaagtgcttcaaggactatacaatgctgtggaactcccttgttgatgtttatgcaaaatcgggaaagattgtagctgcaaagcaagtatctgatttgatgagcaaaagagacgaagtaacatacacttccttgatagatggatacggaaatcaaggtgaagggggagtagccttggccctgttcaaggagatgaccagatctggtattaaacctgaccatgtaaccgtggttgcagttctatcagcctgcagtcattccaagttagtccatgaaggtgaaaggctgtttatgaagatgcagtgtgagtatggtatacgtccttgtcttcaacatttttcttgtatggttgatctctatggcagagcaggtttcctagcaaaagccaaagacataattcacaatatgccatataagccatccggtgccacgtgggctaccctactgaacgcgtgtcacatccatgggaacacacagattggtaaatgggcagcagaaaagctcctggagatgaagccagagaacccgggatactacgtgttaattgcaaatatgtatgcagctgctggttcttggagcaagcttgctgaagtgaggactataatgagggacttgggtgtgaaaaaggatcctggctgtgcttggatcgacacagattctggattttcactgttttcggtgggggacacatcaagccctgaagcatgtaatacttatcctctattagatggactgaatcagctgatgaaagacaatgctggttatgccatcaataaggtgcaaagttcagatgaagaacttcttcaagaaatgggatga

SEQ ID NO: 28384 - protein, 681 aa, Arabidopsis thaliana
  misc_feature (1)..(681): Ceres Seq. ID no. 2717057
MLSESLFKSLGHLASHGHLHDAFKTFSLLRLQSSSAVSDDLVLHSAASLLSACVDVRAFLAGVQVHAHCISSGVEYHSVLVPKLVTFYSAFNLHNEAQSIIENSDILHPLPWNVLIASYAKNELFEEVIAAYKRMVSKGIRPDAFTYPSVLKACGETLDVAFGRVVHGSIEVSSYKSSLYVCNALISMYKRFRNMGIARRLFDRMFERDAVSWNAVINCYASEGMWSEAFELFDKMWFSGVEVSVITWNIISGGCLQTGNYVGALGLISRMRNFPTSLDPVAMIIGLKACSLIGAIRLGKEIHGLAIHSSYDGIDNVRNTLITMYSKCKDLRHALIVFRQTEENSLCTWNSIISGYAQLNKSEEASHLLREMLVAGFQPNSITLASILPLCARIANLQHGKEFHCYILRRKCFKDYTMLWNSLVDVYAKSGKIVAAKQVSDLMSKRDEVTYTSLIDGYGNQGEGGVALALFKEMTRSGIKPDHVTVVAVLSACSHSKLVHEGERLFMKMQCEYGIRPCLQHFSCMVDLYGRAGFLAKAKDIIHNMPYKPSGATWATLLNACHIHGNTQIGKWAAEKLLEMKPENPGYYVLIANMYAAAGSWSKLAEVRTIMRDLGVKKDPGCAWIDTDSGFSLFSVGDTSSPEACNTYPLLDGLNQLMKDNAGYAINKVQSSDEELLQEMG

SEQ ID NO: 28385 - protein, 547 aa, Arabidopsis thaliana
  misc_feature (1)..(547): Ceres Seq. ID no. 2717058
MVSKGIRPDAFTYPSVLKACGETLDVAFGRVVHGSIEVSSYKSSLYVCNALISMYKRFRNMGIARRLFDRMFERDAVSWNAVINCYASEGMWSEAFELFDKMWFSGVEVSVITWNIISGGCLQTGNYVGALGLISRMRNFPTSLDPVAMIIGLKACSLIGAIRLGKEIHGLAIHSSYDGIDNVRNTLITMYSKCKDLRHALIVFRQTEENSLCTWNSIISGYAQLNKSEEASHLLREMLVAGFQPNSITLASILPLCARIANLQHGKEFHCYILRRKCFKDYTMLWNSLVDVYAKSGKIVAAKQVSDLMSKRDEVTYTSLIDGYGNQGEGGVALALFKEMTRSGIKPDHVTVVAVLSACSHSKLVHEGERLFMKMQCEYGIRPCLQHFSCMVDLYGRAGFLAKAKDIIHNMPYKPSGATWATLLNACHIHGNTQIGKWAAEKLLEMKPENPGYYVLIANMYAAAGSWSKLAEVRTIMRDLGVKKDPGCAWIDTDSGFSLFSVGDTSSPEACNTYPLLDGLNQLMKDNAGYAINKVQSSDEELLQEMG

SEQ ID NO: 28386 - protein, 494 aa, Arabidopsis thaliana
  misc_feature (1)..(494): Ceres Seq. ID no. 2717059
MYKRFRNMGIARRLFDRMFERDAVSWNAVINCYASEGMWSEAFELFDKMWFSGVEVSVITWNIISGGCLQTGNYVGALGLISRMRNFPTSLDPVAMIIGLKACSLIGAIRLGKEIHGLAIHSSYDGIDNVRNTLITMYSKCKDLRHALIVFRQTEENSLCTWNSIISGYAQLNKSEEASHLLREMLVAGFQPNSITLASILPLCARIANLQHGKEFHCYILRRKCFKDYTMLWNSLVDVYAKSGKIVAAKQVSDLMSKRDEVTYTSLIDGYGNQGEGGVALALFKEMTRSGIKPDHVTVVAVLSACSHSKLVHEGERLFMKMQCEYGIRPCLQHFSCMVDLYGRAGFLAKAKDIIHNMPYKPSGATWATLLNACHIHGNTQIGKWAAEKLLEMKPENPGYYVLIANMYAAAGSWSKLAEVRTIMRDLGVKKDPGCAWIDTDSGFSLFSVGDTSSPEACNTYPLLDGLNQLMKDNAGYAINKVQSSDEELLQEMG

SEQ ID NO: 28387 - DNA, 1968 bp, Arabidopsis thaliana
  misc_feature (1)..(1968): Ceres Seq. ID no. 2717064
atgggttgtatttgtgccaccgcccgttcaccaagcgccgccgttaccgataaagatctattagattccagcaaatccatccttcaacttctccctcatcatcccccgtcgtcttcgtcttcatccaagaaggaaggatctttcacacgtacgacttcttcagcttctatcaccattgtggctaatggttatcctgtggcacgccgtccttccacttcatctgatcgaaacagcaccaaaccggtcgttgttgtgggagctccgaccagaaatccaacaagaagagtcaccgctataccggttgcacagccggcacagcagcagccagcacgtgtgatcagcaataaaacggaactccctgctgcagaatggccgtcttggctggcttctgttgctggggaggccattaaaggatgggttcctcgctgcgcagagtcctttgagaagttagacaaaattggacaggggacttacagcagcgtgtacaaagctagagaccttgaaacggggaagattgtggcgatgaagaaagttcggtttgtgaacatggatccagagagtgttcggtttatggccagggagattctcattcttcgtaagcttgatcaccccaatgttatgaagctagaaggtctagttacctctagactctcaggtagcctctaccttgtctttgagtacatggaacacgatctcgcaggtctagctgcaactcctggaatcaaattctctgaacctcagatcaagtgctatatgcagcaattgttccgtgggcttgaacattgccacagacgaggaattcttcaccgtgatattaaaggctcaaatctcttaatcaataatgaaggtgtcttgaagattggtgatttcggattggcgaatttttaccgaggtgatggagatctgcagctgaccagtcgtgttgtgaccttatggtacagagcacctgagctgttgctcggtgccactgagtatggaccagccattgacctgtggagcgccggctgcattctcactgagctcttcgccggaaaacctattatgccaggacgcacagaagtggagcagatgcacaagatctttaagctctgtggttcaccctcggaagattactggagaagagcaacactgccactagcaacaagctttaaacccagtcatccttacaagcctgttcttgctgaaacctttaaccatttcccttcatcagctctgatgctcatcaataagctactggcaatagaacctgaaaaacggggatcggctgcttctaccttgaggagcgaattcttcaccacggagccactccctgcgaatccatcaaacttacctagatatccaccaagcaaggaacttgatgccaagcttcgcaacgaagaagcaagaaaactaagggcagaaggtaacaagagaagagggggagaaactgtgacaagaggacggccaaaggatcttaaaacagcccagacaccagagtttatggctgcaggacagtccaaagtcacatgcataagccacaaattcaaaacagacgaggaaggtggcaccgggtttaggatagaaccaccaagaagagggatccagcagaatggtaaagctcatgcttcttcaatggttcacccaacagtggctgatacagaatggaacggaggtggaagcatcaaaagacaaactaatgcagagatgaagtctaggacatctcaaacaggagacttgtctggtgaatcttataggagagatcccaacagagattactcaaccggcaatgcaccaaggaaaaacagaatcaattactcaggaccattgatgcctcctggtggaaatcttgaagatttgcttaaagagcatgagaagcagatccaacaagctgtccgcaaagcacgtgtagaaaagtctgcatcaagaaaaaaccaagctttaacaggacaacaacagcagcaacgttacacaggaagaaatgctcggtag

SEQ ID NO: 28388 - protein, 655 aa, Arabidopsis thaliana
  misc_feature (1)..(655): Ceres Seq. ID no. 2717065
MGCICATARSPSAAVTDKDLLDSSKSILQLLPHHPPSSSSSSKKEGSFTRTTSSASITIVANGYPVARRPSTSSDRNSTKPVVVVGAPTRNPTRRVTAIPVAQPAQQQPARVISNKTELPAAEWPSWLASVAGEAIKGWVPRCAESFEKLDKIGQGTYSSVYKARDLETGKIVAMKKVRFVNMDPESVRFMAREILILRKLDHPNVMKLEGLVTSRLSGSLYLVFEYMEHDLAGLAATPGIKFSEPQIKCYMQQLFRGLEHCHRRGILHRDIKGSNLLINNEGVLKIGDFGLANFYRGDGDLQLTSRVVTLWYRAPELLLGATEYGPAIDLWSAGCILTELFAGKPIMPGRTEVEQMHKIFKLCGSPSEDYWRRATLPLATSFKPSHPYKPVLAETFNHFPSSALMLINKLLAIEPEKRGSAASTLRSEFFTTEPLPANPSNLPRYPPSKELDAKLRNEEARKLRAEGNKRRGGETVTRGRPKDLKTAQTPEFMAAGQSKVTCISHKFKTDEEGGTGFRIEPPRRGIQQNGKAHASSMVHPTVADTEWNGGGSIKRQTNAEMKSRTSQTGDLSGESYRRDPNRDYSTGNAPRKNRINYSGPLMPPGGNLEDLLKEHEKQIQQAVRKARVEKSASRKNQALTGQQQQQRYTGRNAR

SEQ ID NO: 28389 - protein, 481 aa, Arabidopsis thaliana
  misc_feature (1)..(481): Ceres Seq. ID no. 2717066
MKKVRFVNMDPESVRFMAREILILRKLDHPNVMKLEGLVTSRLSGSLYLVFEYMEHDLAGLAATPGIKFSEPQIKCYMQQLFRGLEHCHRRGILHRDIKGSNLLINNEGVLKIGDFGLANFYRGDGDLQLTSRVVTLWYRAPELLLGATEYGPAIDLWSAGCILTELFAGKPIMPGRTEVEQMHKIFKLCGSPSEDYWRRATLPLATSFKPSHPYKPVLAETFNHFPSSALMLINKLLAIEPEKRGSAASTLRSEFFTTEPLPANPSNLPRYPPSKELDAKLRNEEARKLRAEGNKRRGGETVTRGRPKDLKTAQTPEFMAAGQSKVTCISHKFKTDEEGGTGFRIEPPRRGIQQNGKAHASSMVHPTVADTEWNGGGSIKRQTNAEMKSRTSQTGDLSGESYRRDPNRDYSTGNAPRKNRINYSGPLMPPGGNLEDLLKEHEKQIQQAVRKARVEKSASRKNQALTGQQQQQRYTGRNAR

SEQ ID NO: 28390 - protein, 473 aa, Arabidopsis thaliana
  misc_feature (1)..(473): Ceres Seq. ID no. 2717067
MDPESVRFMAREILILRKLDHPNVMKLEGLVTSRLSGSLYLVFEYMEHDLAGLAATPGIKFSEPQIKCYMQQLFRGLEHCHRRGILHRDIKGSNLLINNEGVLKIGDFGLANFYRGDGDLQLTSRVVTLWYRAPELLLGATEYGPAIDLWSAGCILTELFAGKPIMPGRTEVEQMHKIFKLCGSPSEDYWRRATLPLATSFKPSHPYKPVLAETFNHFPSSALMLINKLLAIEPEKRGSAASTLRSEFFTTEPLPANPSNLPRYPPSKELDAKLRNEEARKLRAEGNKRRGGETVTRGRPKDLKTAQTPEFMAAGQSKVTCISHKFKTDEEGGTGFRIEPPRRGIQQNGKAHASSMVHPTVADTEWNGGGSIKRQTNAEMKSRTSQTGDLSGESYRRDPNRDYSTGNAPRKNRINYSGPLMPPGGNLEDLLKEHEKQIQQAVRKARVEKSASRKNQALTGQQQQQRYTGRNAR

SEQ ID NO: 28391 - DNA, 1050 bp, Arabidopsis thaliana
  misc_feature (1)..(1050): Ceres Seq. ID no. 2717349
atggccgataaaatgttcaaagcattgttgtgggcttttgccacggcggttgtgatggccgaggctgttcgtggacaactagtcccttgctatttcgttttcggagactctgtcttcgacaatggtaacaacaatgagttggataccctggccaaagtcaactattcaccttacggtattgattttgctagaggtcctaccgggaggttcagcaatggtcgtaatattcccgactttatcgctgaagaattgagaattagttatgacattccaccattcaccagagcatcgacggaacaagctcacaccggaataaattacgcttctggtggtgccggacttctcgaagaaactagccaacatttaggtgaaagaatcagttttgaaaagcaaataactaatcaccggaagatgattatgacggcgggagttccaccggagaagcttaagaagtgtctatatacaattaatattggaagcaatgattatctcaacaactatttcatgccggctccctacactaccaatgaaaatttcagtttcgatgaatatgctgattttctcattcaaagttatcgctcttatttgaagtcattgtacgtcttaggagcaaggaaggtagcggtctttggggtgagtaagcttgggtgcacgccgcggatgatcgcctcccatggtggaggtaaaggctgcgctactgaagtgaacaaagctgtcgaacctttcaacaagaaacttaaagatctcatctctgaattcaacagaatcagtgttgttgatcatgctaagttcacctttgttgatcttttcagcagccaaaatcctattgagtatttcattttaggatttacggtaacagacaaaagttgttgtacggtagaatcagggcaagaactttgtgccgcaaataaaccggtttgtccgaatcgagaacggtacgtctactgggacaatgtccatagcacagaagcagctaataaggtcgttgtaaaggctgcgtttgccggactcattacgtctcctataagcattttactgcttgtactataa

SEQ ID NO: 28392 - protein, 349 aa, Arabidopsis thaliana
  misc_feature (1)..(349): Ceres Seq. ID no. 2717350
MADKMFKALLWAFATAVVMAEAVRGQLVPCYFVFGDSVFDNGNNNELDTLAKVNYSPYGIDFARGPTGRFSNGRNIPDFIAEELRISYDIPPFTRASTEQAHTGINYASGGAGLLEETSQHLGERISFEKQITNHRKMIMTAGVPPEKLKKCLYTINIGSNDYLNNYFMPAPYTTNENFSFDEYADFLIQSYRSYLKSLYVLGARKVAVFGVSKLGCTPRMIASHGGGKGCATEVNKAVEPFNKKLKDLISEFNRISVVDHAKFTFVDLFSSQNPIEYFILGFTVTDKSCCTVESGQELCAANKPVCPNRERYVYWDNVHSTEAANKVVVKAAFAGLITSPISILLLVL

SEQ ID NO: 28393 - protein, 345 aa, Arabidopsis thaliana
  misc_feature (1)..(345): Ceres Seq. ID no. 2717351
MFKALLWAFATAVVMAEAVRGQLVPCYFVFGDSVFDNGNNNELDTLAKVNYSPYGIDFARGPTGRFSNGRNIPDFIAEELRISYDIPPFTRASTEQAHTGINYASGGAGLLEETSQHLGERISFEKQITNHRKMIMTAGVPPEKLKKCLYTINIGSNDYLNNYFMPAPYTTNENFSFDEYADFLIQSYRSYLKSLYVLGARKVAVFGVSKLGCTPRMIASHGGGKGCATEVNKAVEPFNKKLKDLISEFNRISVVDHAKFTFVDLFSSQNPIEYFILGFTVTDKSCCTVESGQELCAANKPVCPNRERYVYWDNVHSTEAANKVVVKAAFAGLITSPISILLLVL

SEQ ID NO: 28394 - protein, 331 aa, Arabidopsis thaliana
  misc_feature (1)..(331): Ceres Seq. ID no. 2717352
MAEAVRGQLVPCYFVFGDSVFDNGNNNELDTLAKVNYSPYGIDFARGPTGRFSNGRNIPDFIAEELRISYDIPPFTRASTEQAHTGINYASGGAGLLEETSQHLGERISFEKQITNHRKMIMTAGVPPEKLKKCLYTINIGSNDYLNNYFMPAPYTTNENFSFDEYADFLIQSYRSYLKSLYVLGARKVAVFGVSKLGCTPRMIASHGGGKGCATEVNKAVEPFNKKLKDLISEFNRISVVDHAKFTFVDLFSSQNPIEYFILGFTVTDKSCCTVESGQELCAANKPVCPNRERYVYWDNVHSTEAANKVVVKAAFAGLITSPISILLLVL

SEQ ID NO: 28395 - DNA, 579 bp, Arabidopsis thaliana
  misc_feature (1)..(579): Ceres Seq. ID no. 2717417
atgtcgcagctgttatcttctcctccaatggcggttttctccaaaaccttcataaaccataagttttcagatgctcgttttctctcttctcactcaattctcacctccggtggattcgccggaaaaattattcctttaaaaccgacggcgaggttgaaattaacggtgaagtctcgacaaagtgattactttgagaaacagaggtttggtgactcgtcttcttcgcaaaacgctgaagtatcttctcctagattttacgtgggtcattcgatttacaaagggaaagctgctcttacgatagaaccacgagcaccagagtttgtggctttggaaattgtgatgatgaaaatcaattggtttggtgaaagatattatgattgtggtgttcaaaacaagctcttgaatgtagatgagagtgtatacataccaatcactaaagcagagtttgctgttcttatctctgctttcaacgctggagtgcatttgctaactccatcaaaccagaagactctaaccgccttaacaatgcttcgcctaagtatggaggagactacgaatggagtagatgatggagattag

SEQ ID NO: 28396 - protein, 192 aa, Arabidopsis thaliana
  misc_feature (1)..(192): Ceres Seq. ID no. 2717418
MSQLLSSPPMAVFSKTFINHKFSDARFLSSHSILTSGGFAGKIIPLKPTARLKLTVKSRQSDYFEKQRFGDSSSSQNAEVSSPRFYVGHSIYKGKAALTIEPRAPEFVALEIVMMKINWFGERYYDCGVQNKLLNVDESVYIPITKAEFAVLISAFNAGVHLLTPSNQKTLTALTMLRLSMEETTNGVDDGD

SEQ ID NO: 28397 - protein, 183 aa, Arabidopsis thaliana
  misc_feature (1)..(183): Ceres Seq. ID no. 2717419
MAVFSKTFINHKFSDARFLSSHSILTSGGFAGKIIPLKPTARLKLTVKSRQSDYFEKQRFGDSSSSQNAEVSSPRFYVGHSIYKGKAALTIEPRAPEFVALEIVMMKINWFGERYYDCGVQNKLLNVDESVYIPITKAEFAVLISAFNAGVHLLTPSNQKTLTALTMLRLSMEETTNGVDDGD

SEQ ID NO: 28398 - DNA, 1845 bp, Arabidopsis thaliana
  misc_feature (1)..(1845): Ceres Seq. ID no. 2717493
atggctacagctactctcactcttttcctagggctcttagccttaactagtaccatacttagcttcaacgccgatgctaggcctcaaccaagtgatgaggatcttggtaccatcattggacctcatcaaactagcttcgatgacgagataggcatcgtgattggaccacatgcgaccgtagatgacgaagacattgacatggacatgggcaccaccgttggaccgcagaccaacctaaatgatgatgatttgggcaccatcattggacccgagtttgagatccacaagcaagatttccccgcagatttcatatttggaacatctgtttccgcatatcaggttgaaggtgctaaaaagggttctgggagaggcttgacctcatgggacgaatttacacacatgtttcctgagaaggttcaacaaaatggcgatggagatgagggagtcgacttctatacccgttacaaggatgatataaaattaatgaaggagttgaacacgaatggcttcagattttcaatctcatggaccaggatcttgccttatggaactattaaaaaaggtgtaaacgaggagggggtgaagttctacaacgatcttataaatgaacttttagctaatggaattcagccttcggttactctctttcactgggaatctccacttgctctagaaatggagtacggaggtttcctaaacgaaaggatagtagaggatttccgtgagtttgcaaacttttgcttcaaggaatttggagatagggtgaagaattgggcgacgtttaacgagccatcggtatacagcgttgctggttactcgaaaggtaagaaagcaccaggacggtgctctaaatggcaagccccaaaatgtcccacaggagattcatccgaggagccatacatagttgctcacaaccaaattcttgctcatcttgctgctgttgatgaattccgaaactgtaaaaaggtcgagggtggagggaaaattgggatagtgttggtatctcactggttcgagcctaaagatccaaattcgagtgaagacgtcaaagcagctagacgatccctcgagtaccaactcggctggtttcttcgccctctcacatatggacagtatccagcggaaatgttagaagatgtaaacatccgactgcgtgaatttacaccagaagaatctgagaaactaagaaaatctttggatttcgtcggattaaattactatggagcattcttctctacccctctcgccaaagtcaattcatcgcagcttaattatgagaccgacttacgtgtaaactggacagttattactaataacctaagtcttcctgatttgcagacaacttcaatgggtatagtgatatatccagcgggtttgaagaatatcttgaaacatatcaaagacgaatacatggacccagagatttacattatggagaatgggatggacgagatcgactatgggaccaaaaacataacggaagctactaacgattacgggaggaaagagttcatcaagagtcacatcttaatcatgggtaaatccatcaggatggacaaagtgaggctgaagggttactacatatggtcgttaatggacaacttcgagtgggataaaggttataaagtcaggttcgggctctattacgtcgattataatgacaacatgaaacgttatataaggtcatctggaaaatggctaagtgagtttcttgattccaaagagactctccataaatgctatttcgagggccatcgtgagaaaggatatgcacccaagttgttcgacgttgagtatctggaacctgagaactcgcagctaagttacaggagcgattttatgtga

SEQ ID NO: 28399 - protein, 614 aa, Arabidopsis thaliana
  misc_feature (1)..(614): Ceres Seq. ID no. 2717494
MATATLTLFLGLLALTSTILSFNADARPQPSDEDLGTIIGPHQTSFDDEIGIVIGPHATVDDEDIDMDMGTTVGPQTNLNDDDLGTIIGPEFEIHKQDFPADFIFGTSVSAYQVEGAKKGSGRGLTSWDEFTHMFPEKVQQNGDGDEGVDFYTRYKDDIKLMKELNTNGFRFSISWTRILPYGTIKKGVNEEGVKFYNDLINELLANGIQPSVTLFHWESPLALEMEYGGFLNERIVEDFREFANFCFKEFGDRVKNWATFNEPSVYSVAGYSKGKKAPGRCSKWQAPKCPTGDSSEEPYIVAHNQILAHLAAVDEFRNCKKVEGGGKIGIVLVSHWFEPKDPNSSEDVKAARRSLEYQLGWFLRPLTYGQYPAEMLEDVNIRLREFTPEESEKLRKSLDFVGLNYYGAFFSTPLAKVNSSQLNYETDLRVNWTVITNNLSLPDLQTTSMGIVIYPAGLKNILKHIKDEYMDPEIYIMENGMDEIDYGTKNITEATNDYGRKEFIKSHILIMGKSIRMDKVRLKGYYIWSLMDNFEWDKGYKVRFGLYYVDYNDNMKRYIRSSGKWLSEFLDSKETLHKCYFEGHREKGYAPKLFDVEYLEPENSQLSYRSDFM

SEQ ID NO: 28400 - protein, 548 aa, Arabidopsis thaliana
  misc_feature (1)..(548): Ceres Seq. ID no. 2717495
MDMGTTVGPQTNLNDDDLGTIIGPEFEIHKQDFPADFIFGTSVSAYQVEGAKKGSGRGLTSWDEFTHMFPEKVQQNGDGDEGVDFYTRYKDDIKLMKELNTNGFRFSISWTRILPYGTIKKGVNEEGVKFYNDLINELLANGIQPSVTLFHWESPLALEMEYGGFLNERIVEDFREFANFCFKEFGDRVKNWATFNEPSVYSVAGYSKGKKAPGRCSKWQAPKCPTGDSSEEPYIVAHNQILAHLAAVDEFRNCKKVEGGGKIGIVLVSHWFEPKDPNSSEDVKAARRSLEYQLGWFLRPLTYGQYPAEMLEDVNIRLREFTPEESEKLRKSLDFVGLNYYGAFFSTPLAKVNSSQLNYETDLRVNWTVITNNLSLPDLQTTSMGIVIYPAGLKNILKHIKDEYMDPEIYIMENGMDEIDYGTKNITEATNDYGRKEFIKSHILIMGKSIRMDKVRLKGYYIWSLMDNFEWDKGYKVRFGLYYVDYNDNMKRYIRSSGKWLSEFLDSKETLHKCYFEGHREKGYAPKLFDVEYLEPENSQLSYRSDFM

SEQ ID NO: 28401 - protein, 546 aa, Arabidopsis thaliana
  misc_feature (1)..(546): Ceres Seq. ID no. 2717496
MGTTVGPQTNLNDDDLGTIIGPEFEIHKQDFPADFIFGTSVSAYQVEGAKKGSGRGLTSWDEFTHMFPEKVQQNGDGDEGVDFYTRYKDDIKLMKELNTNGFRFSISWTRILPYGTIKKGVNEEGVKFYNDLINELLANGIQPSVTLFHWESPLALEMEYGGFLNERIVEDFREFANFCFKEFGDRVKNWATFNEPSVYSVAGYSKGKKAPGRCSKWQAPKCPTGDSSEEPYIVAHNQILAHLAAVDEFRNCKKVEGGGKIGIVLVSHWFEPKDPNSSEDVKAARRSLEYQLGWFLRPLTYGQYPAEMLEDVNIRLREFTPEESEKLRKSLDFVGLNYYGAFFSTPLAKVNSSQLNYETDLRVNWTVITNNLSLPDLQTTSMGIVIYPAGLKNILKHIKDEYMDPEIYIMENGMDEIDYGTKNITEATNDYGRKEFIKSHILIMGKSIRMDKVRLKGYYIWSLMDNFEWDKGYKVRFGLYYVDYNDNMKRYIRSSGKWLSEFLDSKETLHKCYFEGHREKGYAPKLFDVEYLEPENSQLSYRSDFM

SEQ ID NO: 28402 - DNA, 1389 bp, Arabidopsis thaliana
  misc_feature (1)..(1389): Ceres Seq. ID no. 2729671
atgaggtttatcttgcgtcatctgcattcacttggagtgatcaacaaatttgattcctttcttctacattttcacaccaaatcgcttaaatctaaccacactttgaagcaatatcttgaatctggggaaccaatcaaagctcttttagatttccggcaccgattcagacaaagtcctagttttgttgacagtttttctgttttgtttgccattaaagtttcgtcagctcagaaagcttcctcacttgatggtagacagatccacgctcttgtaagaaaactaggtttcaatgccgttattcaaattcaaacatctttagtgggattctactcttccgtgggtgatgtcgattatgcacgccaagtgttcgacgaaacgcctgagaaacagaacattgtcttgtggacagcgatgatttcagcttacactgagaatgagaactctgtggaagctattgagctgtttaaacgaatggaagcggaaaagatcgaacttgatggagtgattgtgactgtggctttatcagcttgtgctgatctcggggcggtgcagatgggagaagagatttattcgcgtagtatcaagagaaaacgaagattggctatggatttaactctgagaaattcacttcttaacatgtacgtgaaatctggggaaactgagaaagctaggaaactctttgatgaaagtatgagaaaagatgtgactacttacacatctatgatcttcgggtatgctttaaacggtcaagctcaagaatctttagaactcttcaagaaaatgaagacgattgatcagagccaagatactgtcattactccaaatgatgtgactttcatcggcgtcttgatggcttgtagtcacagtggcttagtagaagaaggaaaacgacatttcaagagcatgattatggattacaatctgaaacctagagaagctcatttcggatgtatggtggatttgttttgtcggtcaggtcatttgaaagatgctcacgagttcatcaatcagatgccgataaagccaaacacagtgatatggagaacactgctaggcgcttgcagtcttcacgggaatgttgagctcggagaagaagttcagagacggatctttgagttagatcgtgatcatgtcggagattatgttgcgttgtcaaatatctacgcttcaaaaggaatgtgggatgagaaatcaaagatgagggatcgtgtgaggaagagaagaatgcctggtaaaagctggattgaactcggaagcattatcaatgagtttgtctcaggacctgataataacgatgagcagctgatgatgggagagattagtgaggttttgagatgtttagtttcttgtatgacaagttttgattgtgtaatagggaaaaaaatgtag

SEQ ID NO: 28403 - protein, 462 aa, Arabidopsis thaliana
  misc_feature (1)..(462): Ceres Seq. ID no. 2729672
MRFILRHLHSLGVINKFDSFLLHFHTKSLKSNHTLKQYLESGEPIKALLDFRHRFRQSPSFVDSFSVLFAIKVSSAQKASSLDGRQIHALVRKLGFNAVIQIQTSLVGFYSSVGDVDYARQVFDETPEKQNIVLWTAMISAYTENENSVEAIELFKRMEAEKIELDGVIVTVALSACADLGAVQMGEEIYSRSIKRKRRLAMDLTLRNSLLNMYVKSGETEKARKLFDESMRKDVTTYTSMIFGYALNGQAQESLELFKKMKTIDQSQDTVITPNDVTFIGVLMACSHSGLVEEGKRHFKSMIMDYNLKPREAHFGCMVDLFCRSGHLKDAHEFINQMPIKPNTVIWRTLLGACSLHGNVELGEEVQRRIFELDRDHVGDYVALSNIYASKGMWDEKSKMRDRVRKRRMPGKSWIELGSIINEFVSGPDNNDEQLMMGEISEVLRCLVSCMTSFDCVIGKKM

SEQ ID NO: 28404 - protein, 325 aa, Arabidopsis thaliana
  misc_feature (1)..(325): Ceres Seq. ID no. 2729673
MISAYTENENSVEAIELFKRMEAEKIELDGVIVTVALSACADLGAVQMGEEIYSRSIKRKRRLAMDLTLRNSLLNMYVKSGETEKARKLFDESMRKDVTTYTSMIFGYALNGQAQESLELFKKMKTIDQSQDTVITPNDVTFIGVLMACSHSGLVEEGKRHFKSMIMDYNLKPREAHFGCMVDLFCRSGHLKDAHEFINQMPIKPNTVIWRTLLGACSLHGNVELGEEVQRRIFELDRDHVGDYVALSNIYASKGMWDEKSKMRDRVRKRRMPGKSWIELGSIINEFVSGPDNNDEQLMMGEISEVLRCLVSCMTSFDCVIGKKM

SEQ ID NO: 28405 - protein, 305 aa, Arabidopsis thaliana
  misc_feature (1)..(305): Ceres Seq. ID no. 2729674
MEAEKIELDGVIVTVALSACADLGAVQMGEEIYSRSIKRKRRLAMDLTLRNSLLNMYVKSGETEKARKLFDESMRKDVTTYTSMIFGYALNGQAQESLELFKKMKTIDQSQDTVITPNDVTFIGVLMACSHSGLVEEGKRHFKSMIMDYNLKPREAHFGCMVDLFCRSGHLKDAHEFINQMPIKPNTVIWRTLLGACSLHGNVELGEEVQRRIFELDRDHVGDYVALSNIYASKGMWDEKSKMRDRVRKRRMPGKSWIELGSIINEFVSGPDNNDEQLMMGEISEVLRCLVSCMTSFDCVIGKKM

SEQ ID NO: 28406 - DNA, 1533 bp, Arabidopsis thaliana
  misc_feature (1)..(1533): Ceres Seq. ID no. 2729766
atggaagacaaaatccagtcagatgatttcacttcccataaaaacccaactcttcctcaagtcattgaagagctaaaagagctctgggctatggttttaccaatcacagcaatgaactgtcttgtctacgtgcgcgccgtcgtgtctgttctcttcctcggccgtctcggtagcctcgagttagccggaggagctctctccatcggattcaccaacatcacaggatactctgttatggttggactcgcctcgggtctcgagccagtgtgtagccaagcctacggtagcaaaaactgggatctcctcacgctctctcttcaccgtatggtcgtgattctcttaatggcctctctgcccataagcctcctttggatcaaccttggacccatcatgcttttcatgggtcaaaacccggagataaccgctacagcggctgaatattgtctctacgcgcttcctgatcttttgaccaatactctccttcagccgttacgtgtttatctaaggtcgcagcgagtgacgaaaccgatgatgtggtgtacgctagcagcagtggcgttccatgtgccattgaattattggcttgtgatggtgaagcattggggtgttcctggtgtggctattgcgtctgttgtgacgaatttgatcatggttgtgcttttggttggttatgtttgggttagtgggatgttgcagaagagagtgagtggtgatggtgatggtgggtctactacgatggtggcggtggtggctcagtcgtcgtctgtgatggagttggttggagggttgggaccgttgatgagagtggcggttccgagttgtttggggatatgtttggaatggtggtggtatgagattgtgattgtgatgggtggttacttggagaatcctaagcttgctgtggctgccactgggattttgattcagactactagtcttatgtatacggttcctatggctttagctggatgcgtctctgctcgggttgggaacgagctcggtgcaggtagaccttacaaggccagactagccgcgaacgtggctctagcttgcgcgtttgtagtaggagcattgaatgtggcttggacggttattctaaaagagcgttgggctggactattcactggctatgagccactcaaggtcttggttgcttcggttatgccaattgtcgggctatgcgagctagggaattgtccacagaccacgggctgcgggattcttagagggacaggtcggcctgcggttggggcacatgtgaatctcgggtcgttttatttcgttgggactcccgtggcagttggactagcgttttggttgaaaattgggtttagtgggttgtggtttgggttgctttcagctcaagcggcttgcgtggtttcgatattgtatgcggttttggcgaggacggattgggaaggggaagccgtgaaggcaatgagactgacgagtttggagatgaggaaagttggacaagatgaagagtcttcattgttattgttggatgatgagaagttgggtgatgttttgtaa

SEQ ID NO: 28407 - protein, 510 aa, Arabidopsis thaliana
  misc_feature (1)..(510): Ceres Seq. ID no. 2729767
MEDKIQSDDFTSHKNPTLPQVIEELKELWAMVLPITAMNCLVYVRAVVSVLFLGRLGSLELAGGALSIGFTNITGYSVMVGLASGLEPVCSQAYGSKNWDLLTLSLHRMVVILLMASLPISLLWINLGPIMLFMGQNPEITATAAEYCLYALPDLLTNTLLQPLRVYLRSQRVTKPMMWCTLAAVAFHVPLNYWLVMVKHWGVPGVAIASVVTNLIMVVLLVGYVWVSGMLQKRVSGDGDGGSTTMVAVVAQSSSVMELVGGLGPLMRVAVPSCLGICLEWWWYEIVIVMGGYLENPKLAVAATGILIQTTSLMYTVPMALAGCVSARVGNELGAGRPYKARLAANVALACAFVVGALNVAWTVILKERWAGLFTGYEPLKVLVASVMPIVGLCELGNCPQTTGCGILRGTGRPAVGAHVNLGSFYFVGTPVAVGLAFWLKIGFSGLWFGLLSAQAACVVSILYAVLARTDWEGEAVKAMRLTSLEMRKVGQDEESSLLLLDDEKLGDVL

SEQ ID NO: 28408 - protein, 480 aa, Arabidopsis thaliana
  misc_feature (1)..(480): Ceres Seq. ID no. 2729768
MVLPITAMNCLVYVRAVVSVLFLGRLGSLELAGGALSIGFTNITGYSVMVGLASGLEPVCSQAYGSKNWDLLTLSLHRMVVILLMASLPISLLWINLGPIMLFMGQNPEITATAAEYCLYALPDLLTNTLLQPLRVYLRSQRVTKPMMWCTLAAVAFHVPLNYWLVMVKHWGVPGVAIASVVTNLIMVVLLVGYVWVSGMLQKRVSGDGDGGSTTMVAVVAQSSSVMELVGGLGPLMRVAVPSCLGICLEWWWYEIVIVMGGYLENPKLAVAATGILIQTTSLMYTVPMALAGCVSARVGNELGAGRPYKARLAANVALACAFVVGALNVAWTVILKERWAGLFTGYEPLKVLVASVMPIVGLCELGNCPQTTGCGILRGTGRPAVGAHVNLGSFYFVGTPVAVGLAFWLKIGFSGLWFGLLSAQAACVVSILYAVLARTDWEGEAVKAMRLTSLEMRKVGQDEESSLLLLDDEKLGDVL

SEQ ID NO: 28409 - protein, 473 aa, Arabidopsis thaliana
  misc_feature (1)..(473): Ceres Seq. ID no. 2729769
MNCLVYVRAVVSVLFLGRLGSLELAGGALSIGFTNITGYSVMVGLASGLEPVCSQAYGSKNWDLLTLSLHRMVVILLMASLPISLLWINLGPIMLFMGQNPEITATAAEYCLYALPDLLTNTLLQPLRVYLRSQRVTKPMMWCTLAAVAFHVPLNYWLVMVKHWGVPGVAIASVVTNLIMVVLLVGYVWVSGMLQKRVSGDGDGGSTTMVAVVAQSSSVMELVGGLGPLMRVAVPSCLGICLEWWWYEIVIVMGGYLENPKLAVAATGILIQTTSLMYTVPMALAGCVSARVGNELGAGRPYKARLAANVALACAFVVGALNVAWTVILKERWAGLFTGYEPLKVLVASVMPIVGLCELGNCPQTTGCGILRGTGRPAVGAHVNLGSFYFVGTPVAVGLAFWLKIGFSGLWFGLLSAQAACVVSILYAVLARTDWEGEAVKAMRLTSLEMRKVGQDEESSLLLLDDEKLGDVL

SEQ ID NO: 28410 - DNA, 1032 bp, Arabidopsis thaliana
  misc_feature (1)..(1032): Ceres Seq. ID no. 2730036
atggattacactgtttcctctctacaatgcttcttcttagttttatgtctctctcttttggtttgctctaactctgaaactagttacaagtcaaacaagaaacctatattgataaacttcggcgactctaactccgacaccggaggagttcttgctggagttggacttcctatcggactccctcatggcattaccttcttccatagaggcactggtcgtctcggtgacggtcgactcatcgttgacttctactgtgaacatttaaagatgacatatttgagtccatatttggattcactttcaccaaatttcaaaagaggagtcaatttcgcagtctcgggcgccaccgctcttccgatcttttccttccctcttgccattcaaattcgtcaattcgtccatttcaaaaaccgttctcaagaacttatctcttccggtagaagagaccttattgatgataatggatttagaaacgcgttgtacatgatcgatattggacaaaacgatcttttacttgctctatatgattcgaatttaacctatgcacccgttgtcgaaaaaattccttccatgcttcttgagataaagaaagccatacagggtgaattggcgattcacctgcataacgattcggatcttgacccgattggttgtttccgggttcacaatgaagtcgccaaagccttcaacaaaggactccttagtctctgcaacgaactgagatcccaattcaaagacgccactctcgtctacgttgatatttactccatcaaatataaactctccgccgatttcaaactatacggatttgtggacccgttgatggcttgttgcggttatggaggaagacctaacaactatgatcgaaaagcaacgtgtggtcaacccggttcaactatttgtcgtgatgtaaccaaagcaattgtatgggatggggttcactatactgaagctgctaaccggtttgtcgttgatgctgttttgacgaatcggtactcttacccaaaaaattcccttgaccggttttggtag

SEQ ID NO: 28411 - protein, 343 aa, Arabidopsis thaliana
  misc_feature (1)..(343): Ceres Seq. ID no. 2730037
MDYTVSSLQCFFLVLCLSLLVCSNSETSYKSNKKPILINFGDSNSDTGGVLAGVGLPIGLPHGITFFHRGTGRLGDGRLIVDFYCEHLKMTYLSPYLDSLSPNFKRGVNFAVSGATALPIFSFPLAIQIRQFVHFKNRSQELISSGRRDLIDDNGFRNALYMIDIGQNDLLLALYDSNLTYAPVVEKIPSMLLEIKKAIQGELAIHLHNDSDLDPIGCFRVHNEVAKAFNKGLLSLCNELRSQFKDATLVYVDIYSIKYKLSADFKLYGFVDPLMACCGYGGRPNNYDRKATCGQPGSTICRDVTKAIVWDGVHYTEAANRFVVDAVLTNRYSYPKNSLDRFW

SEQ ID NO: 28412 - protein, 254 aa, Arabidopsis thaliana
  misc_feature (1)..(254): Ceres Seq. ID no. 2730038
MTYLSPYLDSLSPNFKRGVNFAVSGATALPIFSFPLAIQIRQFVHFKNRSQELISSGRRDLIDDNGFRNALYMIDIGQNDLLLALYDSNLTYAPVVEKIPSMLLEIKKAIQGELAIHLHNDSDLDPIGCFRVHNEVAKAFNKGLLSLCNELRSQFKDATLVYVDIYSIKYKLSADFKLYGFVDPLMACCGYGGRPNNYDRKATCGQPGSTICRDVTKAIVWDGVHYTEAANRFVVDAVLTNRYSYPKNSLDRFW

SEQ ID NO: 28413 - protein, 182 aa, Arabidopsis thaliana
  misc_feature (1)..(182): Ceres Seq. ID no. 2730039
MIDIGQNDLLLALYDSNLTYAPVVEKIPSMLLEIKKAIQGELAIHLHNDSDLDPIGCFRVHNEVAKAFNKGLLSLCNELRSQFKDATLVYVDIYSIKYKLSADFKLYGFVDPLMACCGYGGRPNNYDRKATCGQPGSTICRDVTKAIVWDGVHYTEAANRFVVDAVLTNRYSYPKNSLDRFW

SEQ ID NO: 28414 - DNA, 1110 bp, Arabidopsis thaliana
  misc_feature (1)..(1110): Ceres Seq. ID no. 2730114
atggcgacaaacttcaaatccctattaccagttatcggtacggatgaaaccctaaattcattattttcagcaaatgtcgcactcatcatcaaagttttcatattaaatctcaaggaaactaaaatgcatgagacaatggtttttgtagacatcagtcctttagtggtcaaatgtgatgatgccaacatggcggaggatgccggcgtggcggaggttgtgggaaagctggacagggcctgtcgggacgcaggattcttctacgtaattggtcatggaatatcggaggattttataaggaaggtgagagtgatgtcgcatcaattcttcgagcttccttatgaagagaaacttaagatcaagattactccagctgctggatacagaggatatcagagaatcggactaaacttaacgaatgggaaacaagatatgcacgaagccattgattgttacaaagagtttaagcaagggaagcatggggacattggaaaggttatggaaggggcaaaccagtggccagagaatcctcaagaatacaaagagttgatggaggagtatattaagctctgcatagatctttctagaaatatcttaaggggaatctcattagcccttggtggatcaccttatgagtttgagggaaagatgcttacagatccgttttggataatgcgtattcttggttatccagtaactcgtctcatctttttcacttacagtggagctcacactgactatggcttgttgtcacttataaatcaagatgatgacaaaactgctcttcaggtgagagacttggccggcgattggataccagttattccgatccctggatcatttgtctgcaacatcggtgacatgctaaagattctttctaacggagtttacgaatccacacttcatagagtgatcaataactctccccgataccgtgtttgcgtcggattcttttacgagacgaacttcgacgcagcggtggagccgttggatatcttcaaagagaagtacccaggaaaaggaacatcccaagttttcaaaagagttgtctatggggagcatctggttcacaaactccagaccacttttcaaaatttagtggaacacagttaa

SEQ ID NO: 28415 - protein, 369 aa, Arabidopsis thaliana
  misc_feature (1)..(369): Ceres Seq. ID no. 2730115
MATNFKSLLPVIGTDETLNSLFSANVALIIKVFILNLKETKMHETMVFVDISPLVVKCDDANMAEDAGVAEVVGKLDRACRDAGFFYVIGHGISEDFIRKVRVMSHQFFELPYEEKLKIKITPAAGYRGYQRIGLNLTNGKQDMHEAIDCYKEFKQGKHGDIGKVMEGANQWPENPQEYKELMEEYIKLCIDLSRNILRGISLALGGSPYEFEGKMLTDPFWIMRILGYPVTRLIFFTYSGAHTDYGLLSLINQDDDKTALQVRDLAGDWIPVIPIPGSFVCNIGDMLKILSNGVYESTLHRVINNSPRYRVCVGFFYETNFDAAVEPLDIFKEKYPGKGTSQVFKRVVYGEHLVHKLQTTFQNLVEHS

SEQ ID NO: 28416 - protein, 328 aa, Arabidopsis thaliana
  misc_feature (1)..(328): Ceres Seq. ID no. 2730116
MHETMVFVDISPLVVKCDDANMAEDAGVAEVVGKLDRACRDAGFFYVIGHGISEDFIRKVRVMSHQFFELPYEEKLKIKITPAAGYRGYQRIGLNLTNGKQDMHEAIDCYKEFKQGKHGDIGKVMEGANQWPENPQEYKELMEEYIKLCIDLSRNILRGISLALGGSPYEFEGKMLTDPFWIMRILGYPVTRLIFFTYSGAHTDYGLLSLINQDDDKTALQVRDLAGDWIPVIPIPGSFVCNIGDMLKILSNGVYESTLHRVINNSPRYRVCVGFFYETNFDAAVEPLDIFKEKYPGKGTSQVFKRVVYGEHLVHKLQTTFQNLVEHS

SEQ ID NO: 28417 - protein, 324 aa, Arabidopsis thaliana
  misc_feature (1)..(324): Ceres Seq. ID no. 2730117
MVFVDISPLVVKCDDANMAEDAGVAEVVGKLDRACRDAGFFYVIGHGISEDFIRKVRVMSHQFFELPYEEKLKIKITPAAGYRGYQRIGLNLTNGKQDMHEAIDCYKEFKQGKHGDIGKVMEGANQWPENPQEYKELMEEYIKLCIDLSRNILRGISLALGGSPYEFEGKMLTDPFWIMRILGYPVTRLIFFTYSGAHTDYGLLSLINQDDDKTALQVRDLAGDWIPVIPIPGSFVCNIGDMLKILSNGVYESTLHRVINNSPRYRVCVGFFYETNFDAAVEPLDIFKEKYPGKGTSQVFKRVVYGEHLVHKLQTTFQNLVEHS

SEQ ID NO: 28418 - DNA, 774 bp, Arabidopsis thaliana
  misc_feature (1)..(774): Ceres Seq. ID no. 2730195
atggcgaattactcaagtattcacattctcttcttggtcttcatcacaatttttattgttgttgtttgttttgaaattgcaggcggcattgctgtttccgccgccaccgtcttcactttacagaacagttgtccttacaccgtttggcctggaattctctccggcaacgacaacaccctcggcgacggcggatttcccttaacaccaggcgcttccgtacagctcacggctcctgcaggatggtcaggacggttctgggctcgtaccggctgcaacttcgacgcctccggccacggtaactgcggcaccggagactgcggcggtgttcttaaatgtaacggcggcggagttccaccagtcactctggctgaattcacacttgtaggcgacggcggcaaggatttctacgacgtgagtctcgtcgacggttacaatgtcgagatggggattaaacctcaaggaggttccggtgattgccattacgccggctgcgtcgccgacgtcaacgcggtttgccctaacgagcttcggctcatggatccacatacaggaatcatcgcggcgtgtaaaagcgcttgtgcggcgtttaattctgaggagttctgttgtaccggtgctcacgcgacgccgcaaacttgttctccgacgcattactcggcgatgtttaaaagcgcttgccctggtgcttacagttacgcctacgacgacgccacgagcaccttcacttgtaccggctctaactacttgatctctttctgccccacccggaactaa

SEQ ID NO: 28419 - protein, 257 aa, Arabidopsis thaliana
  misc_feature (1)..(257): Ceres Seq. ID no. 2730196
MANYSSIHILFLVFITIFIVVVCFEIAGGIAVSAATVFTLQNSCPYTVWPGILSGNDNTLGDGGFPLTPGASVQLTAPAGWSGRFWARTGCNFDASGHGNCGTGDCGGVLKCNGGGVPPVTLAEFTLVGDGGKDFYDVSLVDGYNVEMGIKPQGGSGDCHYAGCVADVNAVCPNELRLMDPHTGIIAACKSACAAFNSEEFCCTGAHATPQTCSPTHYSAMFKSACPGAYSYAYDDATSTFTCTGSNYLISFCPTRN

SEQ ID NO: 28420 - DNA, 1380 bp, Arabidopsis thaliana
  misc_feature (1)..(1380): Ceres Seq. ID no. 2730313
atggattactctttccttctaatcattctcttactcacaatctctacttcatgttgtgctgctccttcttcttatgtggaagaacaattgagagacagaatcagtaacttacctggacaacctagtaatgtcgattttagacagtactcaggctatgtcactgtgcatgaagaacgtggaagagctttgttctactggttggtcgagtctccgttggcccgtgacccaaagtctagacctttggttctgtggctcaatggtggccctggttgttcttctgttgcttatggtgctgctgaagaaattggaccttttcgtgttggttctgatggcaagactcttcattccaaactttatgcttggaataaattggcaaacttgctattcttggagtctccagctggagttggtttctcatattcaaacacaacttcagatctttacacaaccggtgatcagagaacagctgaggattcgtacatatttcttgtcaactggtttgagaggtttccacaatacaagcatagggagttttacattgttggagaaagctatgcaggtcattttgttcctcaactgtctaaacttgtccatgaaaggaacaagggcttcaagaacccggctataaacctcaaaggttttatggtgggaaatgctgttacagatgactatcatgattatataggaacatttgaatactggtggaatcacggtctcatatccgattccacgtatcaccaactaaagaccgcgtgctactcagtatcatctcagcatccttcaatgcagtgtatggtggctctgagaaatgccgaattagagcaaggaaatatcgatccatatagcattttcaccaaaccttgcaacagtactgtggcacttaagagattcttaaagggtcgctacccatggatgtcaagagcttatgatccttgtacagagagatattcgaatgtgtattttaaccgcttggacgttcagaaggctctccacgcaaatgtcactcgcttatcttacccctggaaagcatgcagtgacattgtaggaagctattgggacgattctcctctgtctatgcttcctatatacaaagaattgattactgcaggtctcaaaatatgggtcttcagtggggatacagatgctgttgttcctataaccgctacccgatactctgtagatgcactgaagctagcaaccatcacgaactggtacccgtggtacgaccatggcaaggtaggtgggtggagtcaagtttacaaaggacttacattagtgacagtagcaggagctggtcatgaagtgcctctacaccgtccccggcaagcctttattcttttcagatcctttttagagagcaaaccaatgcctatgacttga

SEQ ID NO: 28421 - protein, 459 aa, Arabidopsis thaliana
  misc_feature (1)..(459): Ceres Seq. ID no. 2730314
MDYSFLLIILLLTISTSCCAAPSSYVEEQLRDRISNLPGQPSNVDFRQYSGYVTVHEERGRALFYWLVESPLARDPKSRPLVLWLNGGPGCSSVAYGAAEEIGPFRVGSDGKTLHSKLYAWNKLANLLFLESPAGVGFSYSNTTSDLYTTGDQRTAEDSYIFLVNWFERFPQYKHREFYIVGESYAGHFVPQLSKLVHERNKGFKNPAINLKGFMVGNAVTDDYHDYIGTFEYWWNHGLISDSTYHQLKTACYSVSSQHPSMQCMVALRNAELEQGNIDPYSIFTKPCNSTVALKRFLKGRYPWMSRAYDPCTERYSNVYFNRLDVQKALHANVTRLSYPWKACSDIVGSYWDDSPLSMLPIYKELITAGLKIWVFSGDTDAVVPITATRYSVDALKLATITNWYPWYDHGKVGGWSQVYKGLTLVTVAGAGHEVPLHRPRQAFILFRSFLESKPMPMT

SEQ ID NO: 28422 - protein, 245 aa, Arabidopsis thaliana
  misc_feature (1)..(245): Ceres Seq. ID no. 2730315
MVGNAVTDDYHDYIGTFEYWWNHGLISDSTYHQLKTACYSVSSQHPSMQCMVALRNAELEQGNIDPYSIFTKPCNSTVALKRFLKGRYPWMSRAYDPCTERYSNVYFNRLDVQKALHANVTRLSYPWKACSDIVGSYWDDSPLSMLPIYKELITAGLKIWVFSGDTDAVVPITATRYSVDALKLATITNWYPWYDHGKVGGWSQVYKGLTLVTVAGAGHEVPLHRPRQAFILFRSFLESKPMPMT

SEQ ID NO: 28423 - DNA, 954 bp, Arabidopsis thaliana
  misc_feature (1)..(954): Ceres Seq. ID no. 2730518
atggctgtaaagcaaaaggtctgtgttactggtgcaggagggtttattgcttcatggctcgtcaagtttcttctctctcgtggctacactgtccatggaaccgttcgagatccttgtgatgaaaagaatgaccatttgaggaaactggataatgcttcaaaaaatctgaaacttttcaaggcagatttgtttgatgatgaaggtcttttctcagccattgatggttgctctggcgttttccatatcgcttctcctgtgccttttgaaggagaagaactgattaaaccagctctcactggcaccaagaatgttctagaagcatgcacagaaaccaaagtgcagaaagttgtggttgtatcatcaatcgctgcagttgtttacaatccaaaatggcctcaagatgttgctaaggacgaggattgttggtcagacactcaataccttcactcacttgagcgttattactatcttgccaaaacattaacggaacgtgaagctttagagtggagtaagagaaactttgctgatgttgttacgctctgtccgtctgtcattataggccctaggcttcaatccacgcttaactctagtagtttgggacttctcaagttcataaaaggtggtataaagtccttgttgagcgatgaactgtatcttgtggatgtgcgtgatgttgcggatgcgcttttgttggtgtatgaaaatcgagaagcaacaggaagatacatatgtaattctcattcactttacactgattctcttatggagaagctcaagaatatgtatcctaaacgcaacttccctgaaagtttcacggaggtaaaagagaaggaagtgaggcctctaagtgcagagaagttgaaaaacttggggtggaagtttaggccattagaagaaaccattgatgattctgttgtgagctttgaagcagctggtgatcttccaaaggcataa

SEQ ID NO: 28424 - protein, 317 aa, Arabidopsis thaliana
  misc_feature (1)..(317): Ceres Seq. ID no. 2730519
MAVKQKVCVTGAGGFIASWLVKFLLSRGYTVHGTVRDPCDEKNDHLRKLDNASKNLKLFKADLFDDEGLFSAIDGCSGVFHIASPVPFEGEELIKPALTGTKNVLEACTETKVQKVVVVSSIAAVVYNPKWPQDVAKDEDCWSDTQYLHSLERYYYLAKTLTEREALEWSKRNFADVVTLCPSVIIGPRLQSTLNSSSLGLLKFIKGGIKSLLSDELYLVDVRDVADALLLVYENREATGRYICNSHSLYTDSLMEKLKNMYPKRNFPESFTEVKEKEVRPLSAEKLKNLGWKFRPLEETIDDSVVSFEAAGDLPKA

SEQ ID NO: 28425 - DNA, 747 bp, Arabidopsis thaliana
  misc_feature (1)..(747): Ceres Seq. ID no. 2730552
atggctgaccctaacaatcctatcactgaacctaaagctataatccaatcttctacttcatcgtcagttactattgtgccagttcccacgtgcggtgacagcctctctgactctgccacgtgtgaaaacccttgtccacttgatactatcactactactactactactgtttgttttgcggctccttcttctactgcaagtggtaatgatattaatactttaatggccactgacaccgacatctctcgccggaaaaagaatccggtttatcggggaattcgttgtcggagtggaaaatgggtgtctgaaatccgagagcctaaaaagactacacgtgtctggcttgggacttatccgacgccggagatggctgctgccgcatatgacgtggcggcgttagctcttaaaggtggagacactctcttgaacttcccggattccctgggatcttaccccattcccctttcctcttccgcagctcatatcagatgcgctgcagctgcggctgctgcgactaggggtgcggctggagcggccgtgaaggtaggtcaaaagaaggaagataaagtttatgatacggcggaatcttcaactatggggtttgtggatgaagaagagctattgaacatgcctggtttgctagcggatatggccaaagggatgatggtggctccaccgtggatgggatctccaccgtcagatgattcgccagagaattctgatggagagagcttgtggagctattga

SEQ ID NO: 28426 - protein, 248 aa, Arabidopsis thaliana
  misc_feature (1)..(248): Ceres Seq. ID no. 2730553
MADPNNPITEPKAIIQSSTSSSVTIVPVPTCGDSLSDSATCENPCPLDTITTTTTTVCFAAPSSTASGNDINTLMATDTDISRRKKNPVYRGIRCRSGKWVSEIREPKKTTRVWLGTYPTPEMAAAAYDVAALALKGGDTLLNFPDSLGSYPIPLSSSAAHIRCAAAAAAATRGAAGAAVKVGQKKEDKVYDTAESSTMGFVDEEELLNMPGLLADMAKGMMVAPPWMGSPPSDDSPENSDGESLWSY

SEQ ID NO: 28427 - protein, 174 aa, Arabidopsis thaliana
  misc_feature (1)..(174): Ceres Seq. ID no. 2730554
MATDTDISRRKKNPVYRGIRCRSGKWVSEIREPKKTTRVWLGTYPTPEMAAAAYDVAALALKGGDTLLNFPDSLGSYPIPLSSSAAHIRCAAAAAAATRGAAGAAVKVGQKKEDKVYDTAESSTMGFVDEEELLNMPGLLADMAKGMMVAPPWMGSPPSDDSPENSDGESLWSY

SEQ ID NO: 28428 - protein, 126 aa, Arabidopsis thaliana
  misc_feature (1)..(126): Ceres Seq. ID no. 2730555
MAAAAYDVAALALKGGDTLLNFPDSLGSYPIPLSSSAAHIRCAAAAAAATRGAAGAAVKVGQKKEDKVYDTAESSTMGFVDEEELLNMPGLLADMAKGMMVAPPWMGSPPSDDSPENSDGESLWSY

SEQ ID NO: 28429 - DNA, 1152 bp, Arabidopsis thaliana
  misc_feature (1)..(1152): Ceres Seq. ID no. 2730931
atgtcttctccactactctctctcacctcattgccactaattctcctcacctcatcatcccttttgtctccattagaggtcaatcttttaaaactcaaagatttcgcttttgtctttatatcttacttttgtgagattcaaagggatgatctttgttgtgttgagttaacagagaggttgaaagagaagatagaggaaacatttgggtgtgagtatgagctttttattgaattcacaggtttgattagttggtgcaaaggagctagcattggttggcatagtgatgataacagatcatatctaaaacaaagagattttgcggcagtttgttacttgaatagttacgagaaagatttcataggcggtctttttcgttttcagagtggtgaaccagtaaccgttgctccatcggctggtgatgttatcatgtacacagctgatgaccggaatattcactcagttgatgaggtaacagatggagaaagattgactcttgcactctggtttagccgggactcatcacatgacgaagattccaagcttctttctcgtctttcacaatgtacatcacatgaagtgtgcctccctttgcctgcatccactaacatgtactggttctgtcctcatcaagatggttctaatcaaaacataggttttgatgtttgcgttgcgaggttgcatcttcttggttttgatgtacatagcttacaaggcgaagatcattctacggatgcctctgaacaacttatgggaccactacaattagctaaaggaggaaagttactcacccgaaaatttgccaacattcttcatgctcttcaggttgttcagttctaccattggaaagcttctgaactcgtaacttctaatgtcgaaaatgacacattagaagaggtgaaagctatgtcccactctcagttggaaactatcaatgccctgaaatcagttttcctgctagatgagaacctcgtagccacaacttttggatattcgtgctctggtgaggatcgaaaggattcactcgacttgacgggtatagctctcgcggttacctcttgggaagagtatagctgtaagttactcaaggagctattatcatccttgcctcaatggaaaacttatcaaactatacacaaagtggaatctgattag

SEQ ID NO: 28430 - protein, 383 aa, Arabidopsis thaliana
  misc_feature (1)..(383): Ceres Seq. ID no. 2730932
MSSPLLSLTSLPLILLTSSSLLSPLEVNLLKLKDFAFVFISYFCEIQRDDLCCVELTERLKEKIEETFGCEYELFIEFTGLISWCKGASIGWHSDDNRSYLKQRDFAAVCYLNSYEKDFIGGLFRFQSGEPVTVAPSAGDVIMYTADDRNIHSVDEVTDGERLTLALWFSRDSSHDEDSKLLSRLSQCTSHEVCLPLPASTNMYWFCPHQDGSNQNIGFDVCVARLHLLGFDVHSLQGEDHSTDASEQLMGPLQLAKGGKLLTRKFANILHALQVVQFYHWKASELVTSNVENDTLEEVKAMSHSQLETINALKSVFLLDENLVATTFGYSCSGEDRKDSLDLTGIALAVTSWEEYSCKLLKELLSSLPQWKTYQTIHKVESD

SEQ ID NO: 28431 - protein, 241 aa, Arabidopsis thaliana
  misc_feature (1)..(241): Ceres Seq. ID no. 2730933
MYTADDRNIHSVDEVTDGERLTLALWFSRDSSHDEDSKLLSRLSQCTSHEVCLPLPASTNMYWFCPHQDGSNQNIGFDVCVARLHLLGFDVHSLQGEDHSTDASEQLMGPLQLAKGGKLLTRKFANILHALQVVQFYHWKASELVTSNVENDTLEEVKAMSHSQLETINALKSVFLLDENLVATTFGYSCSGEDRKDSLDLTGIALAVTSWEEYSCKLLKELLSSLPQWKTYQTIHKVESD

SEQ ID NO: 28432 - DNA, 1383 bp, Arabidopsis thaliana
  misc_feature (1)..(1383): Ceres Seq. ID no. 2731007
atggaggttttctactacttggtgtttggagtcatggctgccgtagtggcagcgttggagcttagcaagacgaacaaggatcggatcaacacttcgtcttccttcaattcattcaagaacaattacctcctcgttttctctattatgatggctggggattggcttcagggtccttatgtgtattacctttacagcacttatggttttggaaaaggagatattggtcagctattcattgctggttttggttcgtcaatgttgtttggaactattgttggatctctggctgacaaacagggtcgaaagagggcatgtgttacatactgtatagtttacatactaagttgcatcaccaagcactctccacagtacaaagttttgatggttggccgtatcttgggtggtattgctacatctctcttgttttctgctttcgagtcctggctaattgcagagcacaataagaggaactttgagcaacagtggctgtcacttacattctctaaggctgtatttcttggaaacggtctggtggctatcctttcgggattgtttggcaatcttcttgttgacactttttcctttggtcctgttgctccctttgacgccgctgcgtgctttcttgcaattggaatggcgatcatattgggaacatggtctgagaattttggagatccatctgacagcaaagacttgctgactcagttcaaagttgctgccatagcaattgcttcagatgaaaagattgcattgctgggcgctattcagtctctattcgaagcctcgatgtacacctttgttttcctctggacaccagctcttagcccaaacgatgaagaaattccacatggcttcgtctttgcaaccttcatgttagcctcaatgttgggaagctcccttgcagctcgtctcatgtctcgctcatctctcagagtcgaaaactacatgcaaattgtctttctagtctcggctgcttcacttcttcttcccattacaacaagtgtcttggtgacaccgtcaaaggtgaaagacgaaggattgtcgttaactagctccattcagctgcttggtttctgtgtttttgagtcttgtgtcggaatattttggccttcgataatgaagatgaggtcgcagtatatacctgaagaagcacgaagcaccataatgaatttcttccgtgttccactcaacatctttgtctgcatcgtcttgtacaacgtggacgcatttccgatcacaatcatgtttggtatgtgctcaatcttcctcttcgtagcctccatattacaacggcggcttatggtcatctctgaaaagccaaaggcagaagattggagtccgatgaaggagcgaaactcggaagttgatcctcttaccctctga

SEQ ID NO: 28433 - protein, 460 aa, Arabidopsis thaliana
  misc_feature (1)..(460): Ceres Seq. ID no. 2731008
MEVFYYLVFGVMAAVVAALELSKTNKDRINTSSSFNSFKNNYLLVFSIMMAGDWLQGPYVYYLYSTYGFGKGDIGQLFIAGFGSSMLFGTIVGSLADKQGRKRACVTYCIVYILSCITKHSPQYKVLMVGRILGGIATSLLFSAFESWLIAEHNKRNFEQQWLSLTFSKAVFLGNGLVAILSGLFGNLLVDTFSFGPVAPFDAAACFLAIGMAIILGTWSENFGDPSDSKDLLTQFKVAAIAIASDEKIALLGAIQSLFEASMYTFVFLWTPALSPNDEEIPHGFVFATFMLASMLGSSLAARLMSRSSLRVENYMQIVFLVSAASLLLPITTSVLVTPSKVKDEGLSLTSSIQLLGFCVFESCVGIFWPSIMKMRSQYIPEEARSTIMNFFRVPLNIFVCIVLYNVDAFPITIMFGMCSIFLFVASILQRRLMVISEKPKAEDWSPMKERNSEVDPLTL

SEQ ID NO: 28434 - protein, 449 aa, Arabidopsis thaliana
  misc_feature (1)..(449): Ceres Seq. ID no. 2731009
MAAVVAALELSKTNKDRINTSSSFNSFKNNYLLVFSIMMAGDWLQGPYVYYLYSTYGFGKGDIGQLFIAGFGSSMLFGTIVGSLADKQGRKRACVTYCIVYILSCITKHSPQYKVLMVGRILGGIATSLLFSAFESWLIAEHNKRNFEQQWLSLTFSKAVFLGNGLVAILSGLFGNLLVDTFSFGPVAPFDAAACFLAIGMAIILGTWSENFGDPSDSKDLLTQFKVAAIAIASDEKIALLGAIQSLFEASMYTFVFLWTPALSPNDEEIPHGFVFATFMLASMLGSSLAARLMSRSSLRVENYMQIVFLVSAASLLLPITTSVLVTPSKVKDEGLSLTSSIQLLGFCVFESCVGIFWPSIMKMRSQYIPEEARSTIMNFFRVPLNIFVCIVLYNVDAFPITIMFGMCSIFLFVASILQRRLMVISEKPKAEDWSPMKERNSEVDPLTL

SEQ ID NO: 28435 - protein, 412 aa, Arabidopsis thaliana
  misc_feature (1)..(412): Ceres Seq. ID no. 2731010
MMAGDWLQGPYVYYLYSTYGFGKGDIGQLFIAGFGSSMLFGTIVGSLADKQGRKRACVTYCIVYILSCITKHSPQYKVLMVGRILGGIATSLLFSAFESWLIAEHNKRNFEQQWLSLTFSKAVFLGNGLVAILSGLFGNLLVDTFSFGPVAPFDAAACFLAIGMAIILGTWSENFGDPSDSKDLLTQFKVAAIAIASDEKIALLGAIQSLFEASMYTFVFLWTPALSPNDEEIPHGFVFATFMLASMLGSSLAARLMSRSSLRVENYMQIVFLVSAASLLLPITTSVLVTPSKVKDEGLSLTSSIQLLGFCVFESCVGIFWPSIMKMRSQYIPEEARSTIMNFFRVPLNIFVCIVLYNVDAFPITIMFGMCSIFLFVASILQRRLMVISEKPKAEDWSPMKERNSEVDPLTL

SEQ ID NO: 28436 - DNA, 2193 bp, Arabidopsis thaliana
  misc_feature (1)..(2193): Ceres Seq. ID no. 2731141
atggctaccggaaacttggcttctcgtcttcatctcttgatcgatctttgtgttcgccaattccctgaaagagaagaagtaactttgccgacgaaggaaacggaaaaagatctgcttctttctctatctcaggtgttgagagaaattcaatcttggaggagcgaaatttcatgtgataaggcggtggaatcgcgagaggagactgttgttgatcatgatgaatctgctgatgctttatatggtccagactctatagagtatttatgcttagaaagacttgtggcggatcttaatgtgcatgttaaacatttggctggcaacatacttgtggaagtatccggttgtcttgttgaatctggaagtcaatgggatgagttcattcgtttgctttgtgaatgtttgcggttagcagttatctacagtttcccaattcctgctgtaggatctgaaactggatttggaagtctagatcaatgtttcttcggttctgatgttcttaaatgtaagctggaaaaggctaactggtccacggtgtcggatatctttcgagttcttcgtaatatattgaagcgcttgagccaagaagacaatgaggaaatttttgatgtatacttggaatctgtcaactctacacttgcaaaagttccttggtgccgattggatactattttttctcatcagcatggtagtggtgaaagaaatttccaaggtcagagtggaaacagtgaggaagcaactgtatttcttgggagctttgtccagtttctctgttccatggttcagcaggttcatgttgtagaagattctgatgattttgaaccttcatatttgatcctccaaaaaaccatcaagcttattccggatctcctccgttggtgccaaccaaagttgaaaagtcaaagtggctcttgcatgtcaagatacctagggcacaagttactggtgttgatgatcaggcttactgataagtccaaaatcaaatgtaccattcttctttcatggctgcaatatttgcaacgggattctcaaggctttcttcaacacaccctaacaaagtttaaacccgttcaagataattgtttggagggttcgccattctttgtgagtttgtctgatagggaggtcaatgagatgcattctaatcatttgcaaagactctctgtgtttctgttcctacggtgctccttcactttgatttactcaagtagacataacgacaagctatgtgagtttgattgtagaaagaaagggatggcagagatgtttaaatggattgaacgacagattccaggcaatatgttttctgatcacagaatttatagcaagaagaatgttgaattttctgcatccttcgttcggctgttcatgcatgaggatgatctattatttaaagtcctcctgcaattgctgtctgtaccattgcatagacaggaattgcctaacgtggaagggggttcgcttgaagatgaggaacaaattactctcttccgtttatcaaccttgttcaatcctgtaagattattctgtatatttctttcagagctgcattatgatcatcaagtacttcttgattaccttatatctaaagatattggggctagctgcgcagagtacctgctgagatgcttgcgtgcagtatgtgattcatggactctatttgtggaattcccatttgaaggaagtacagatgctccatctccgaagagaagaaaagttttgcctgagacttctgaggttgaacaaaactggagattacatgcccaggcttttgaagacgccaaagattgtctgctttcgttacaaaattcagttgttaagctacatcagaagaaactgtttccatacaacccagaggctcttctacgacgctctgtctatcccatgagtaatatatctggaccaaagcaaaatgttgtgatccttagtttgtgggttgcggtgagattctctgagacagaacagaaggatcagatgccaacacaaagaagtctcctttccagatcaaatttcaaactaatcggctcaccagtagaagtgtatagagatcctacattctttggttggtgcagctgctatgaaacagagagcattatgttcttgcctccacaatccaaatctgaatggtataagatactctctagtcaagctaatgtgaaactgccccagccaattagagtaagcaatgaagtgtag

SEQ ID NO: 28437 - protein, 730 aa, Arabidopsis thaliana
  misc_feature (1)..(730): Ceres Seq. ID no. 2731142
MATGNLASRLHLLIDLCVRQFPEREEVTLPTKETEKDLLLSLSQVLREIQSWRSEISCDKAVESREETVVDHDESADALYGPDSIEYLCLERLVADLNVHVKHLAGNILVEVSGCLVESGSQWDEFIRLLCECLRLAVIYSFPIPAVGSETGFGSLDQCFFGSDVLKCKLEKANWSTVSDIFRVLRNILKRLSQEDNEEIFDVYLESVNSTLAKVPWCRLDTIFSHQHGSGERNFQGQSGNSEEATVFLGSFVQFLCSMVQQVHVVEDSDDFEPSYLILQKTIKLIPDLLRWCQPKLKSQSGSCMSRYLGHKLLVLMIRLTDKSKIKCTILLSWLQYLQRDSQGFLQHTLTKFKPVQDNCLEGSPFFVSLSDREVNEMHSNHLQRLSVFLFLRCSFTLIYSSRHNDKLCEFDCRKKGMAEMFKWIERQIPGNMFSDHRIYSKKNVEFSASFVRLFMHEDDLLFKVLLQLLSVPLHRQELPNVEGGSLEDEEQITLFRLSTLFNPVRLFCIFLSELHYDHQVLLDYLISKDIGASCAEYLLRCLRAVCDSWTLFVEFPFEGSTDAPSPKRRKVLPETSEVEQNWRLHAQAFEDAKDCLLSLQNSVVKLHQKKLFPYNPEALLRRSVYPMSNISGPKQNVVILSLWVAVRFSETEQKDQMPTQRSLLSRSNFKLIGSPVEVYRDPTFFGWCSCYETESIMFLPPQSKSEWYKILSSQANVKLPQPIRVSNEV

SEQ ID NO: 28438 - protein, 472 aa, Arabidopsis thaliana
  misc_feature (1)..(472): Ceres Seq. ID no. 2731143
MVQQVHVVEDSDDFEPSYLILQKTIKLIPDLLRWCQPKLKSQSGSCMSRYLGHKLLVLMIRLTDKSKIKCTILLSWLQYLQRDSQGFLQHTLTKFKPVQDNCLEGSPFFVSLSDREVNEMHSNHLQRLSVFLFLRCSFTLIYSSRHNDKLCEFDCRKKGMAEMFKWIERQIPGNMFSDHRIYSKKNVEFSASFVRLFMHEDDLLFKVLLQLLSVPLHRQELPNVEGGSLEDEEQITLFRLSTLFNPVRLFCIFLSELHYDHQVLLDYLISKDIGASCAEYLLRCLRAVCDSWTLFVEFPFEGSTDAPSPKRRKVLPETSEVEQNWRLHAQAFEDAKDCLLSLQNSVVKLHQKKLFPYNPEALLRRSVYPMSNISGPKQNVVILSLWVAVRFSETEQKDQMPTQRSLLSRSNFKLIGSPVEVYRDPTFFGWCSCYETESIMFLPPQSKSEWYKILSSQANVKLPQPIRVSNEV

SEQ ID NO: 28439 - protein, 426 aa, Arabidopsis thaliana
  misc_feature (1)..(426): Ceres Seq. ID no. 2731144
MSRYLGHKLLVLMIRLTDKSKIKCTILLSWLQYLQRDSQGFLQHTLTKFKPVQDNCLEGSPFFVSLSDREVNEMHSNHLQRLSVFLFLRCSFTLIYSSRHNDKLCEFDCRKKGMAEMFKWIERQIPGNMFSDHRIYSKKNVEFSASFVRLFMHEDDLLFKVLLQLLSVPLHRQELPNVEGGSLEDEEQITLFRLSTLFNPVRLFCIFLSELHYDHQVLLDYLISKDIGASCAEYLLRCLRAVCDSWTLFVEFPFEGSTDAPSPKRRKVLPETSEVEQNWRLHAQAFEDAKDCLLSLQNSVVKLHQKKLFPYNPEALLRRSVYPMSNISGPKQNVVILSLWVAVRFSETEQKDQMPTQRSLLSRSNFKLIGSPVEVYRDPTFFGWCSCYETESIMFLPPQSKSEWYKILSSQANVKLPQPIRVSNEV

SEQ ID NO: 28440 - DNA, 2385 bp, Arabidopsis thaliana
  misc_feature (1)..(2385): Ceres Seq. ID no. 2731145
atgacgagaggttcgatgaaacgcagcgtattgtttgtagagacagacgccgctgccgagtatccgtacgcaaataacaatctcatatcgatgtacgtgaggtgtagttcgctggaacaagcacggaaagtgttcgacaaaatgcctcagagaaacattgtaactctattcggacttagtgctgtatttgagtatgtttccatgggatcatcactgcattcgcagattataaagcttggatcttttcagatgatcttttttatgccactgaacgaaatagcttcttccgttgtagaacttacacggaaatgcgtctcgatcacggtactaaaacgggcgcgtcagatccacgctctcgtcctcaccgccggcgctggcgccgctaccgagtctccgtacgcaaataacaatctcatctcaatgtatgtgaggtgtggttcactggaacaagcacggaaagtgttcgacaaaatgcctcacagaaacgtagtttcttataatgcgctttattcggcgtattcccggaacccagattttgcaagttatgcgtttcctctaacaacccatatggcgtttgagtacgtgaagcccaatagttcaactttcactagcttagtgcaagtatgtgctgtgcttgaggatgttttaatggggtcatcattaaactcgcagattataaagcttggttattcagataatgtagttgtccagacatcggttttggggatgtactctagttgcggggacttagaatctgcgaggagaatatttgactgtgtaaataatagagatgcggttgcttggaacacaatgatagttgggagtttgaaaaatgataagatagaagatgggcttatgttctttcgaaacatgttgatgtctggtgttgatccaacgcagttcacgtattcgattgtgttgaatggttgtagtaaattgggaagctattcactggggaaactaatccatgcccggataatagtctctgatagtttagctgatttacctctagataatgctcttcttgacatgtattgcagttgtggagacatgagggaagcattttatgtgtttgggaggattcataacccaaatttggtttcatggaactcgattatttcagggtgctcagaaaacggctttggagagcaagcgatgcttatgtatagaaggttgctgaggatgtccacacctcggccggatgaatatactttctctgctgctatatctgcgacagcggaaccagaaagatttgttcatgggaagcttcttcacggacaagtaacgaaattaggatatgaaaggagtgtttttgttggaacaacactattgtcgatgtacttcaagaacagggaagctgaatctgcacagaaggtgtttgatgtgatgaaggaaagggatgttgttctctggactgagatgatcgtagggcattctagattaggaaacagcgaattagcggtccaattcttcattgaaatgtacagagaaaagaatagaagtgatggtttttccctgagtagtgtcataggagcatgttcagatatggcaatgctaagacaaggtgaagttttccattgtcttgccataaggacgggattcgattgtgttatgtcagtatgtggagcgctagtagacatgtatgggaaaaacggtaaatacgaaactgcagaaacaatattctctcttgcttcaaatccagatttgaaatgttggaattcgatgctaggtgcttatagtcagcatggaatggtagaaaaagctctgagcttcttcgagcaaatactagaaaacggattcatgccagatgctgttacatacttgtctttattagcagcctgtagccacaggggatcaacgttgcaaggtaagttcctatggaaccaaatgaaggaacagggcatcaaagcagggtttaagcactactcttgcatggtgaatttagtatcaaaagctgggttagtagacgaggcactggaactgatagaacaatctcctcccgggaacaaccaagcagagctctggagaactctgctaagcgcatgtgttaacacaagaaacttgcagataggactatatgcagctgagcaaatactgaaacttgatccagaagacactgcaacacacattctactatcaaatttatatgcagtaaatgggagatgggaggatgttgcagagatgagaaggaagattagaggattagcttcatctaaagatccaggattgagctggattgaagtgaacaacaacaatacacaagttttctcctcaggagaccagtcgaacccagaagttgtaagtcaagctcaagatgaattaaatagattaaagagaaatatgttgtgcaaatcatcattcaataaacttgtctgttcaaattaa

SEQ ID NO: 28441 - protein, 794 aa, Arabidopsis thaliana
  misc_feature (1)..(794): Ceres Seq. ID no. 2731146
MTRGSMKRSVLFVETDAAAEYPYANNNLISMYVRCSSLEQARKVFDKMPQRNIVTLFGLSAVFEYVSMGSSLHSQIIKLGSFQMIFFMPLNEIASSVVELTRKCVSITVLKRARQIHALVLTAGAGAATESPYANNNLISMYVRCGSLEQARKVFDKMPHRNVVSYNALYSAYSRNPDFASYAFPLTTHMAFEYVKPNSSTFTSLVQVCAVLEDVLMGSSLNSQIIKLGYSDNVVVQTSVLGMYSSCGDLESARRIFDCVNNRDAVAWNTMIVGSLKNDKIEDGLMFFRNMLMSGVDPTQFTYSIVLNGCSKLGSYSLGKLIHARIIVSDSLADLPLDNALLDMYCSCGDMREAFYVFGRIHNPNLVSWNSIISGCSENGFGEQAMLMYRRLLRMSTPRPDEYTFSAAISATAEPERFVHGKLLHGQVTKLGYERSVFVGTTLLSMYFKNREAESAQKVFDVMKERDVVLWTEMIVGHSRLGNSELAVQFFIEMYREKNRSDGFSLSSVIGACSDMAMLRQGEVFHCLAIRTGFDCVMSVCGALVDMYGKNGKYETAETIFSLASNPDLKCWNSMLGAYSQHGMVEKALSFFEQILENGFMPDAVTYLSLLAACSHRGSTLQGKFLWNQMKEQGIKAGFKHYSCMVNLVSKAGLVDEALELIEQSPPGNNQAELWRTLLSACVNTRNLQIGLYAAEQILKLDPEDTATHILLSNLYAVNGRWEDVAEMRRKIRGLASSKDPGLSWIEVNNNNTQVFSSGDQSNPEVVSQAQDELNRLKRNMLCKSSFNKLVCSN

SEQ ID NO: 28442 - protein, 789 aa, Arabidopsis thaliana
  misc_feature (1)..(789): Ceres Seq. ID no. 2731147
MKRSVLFVETDAAAEYPYANNNLISMYVRCSSLEQARKVFDKMPQRNIVTLFGLSAVFEYVSMGSSLHSQIIKLGSFQMIFFMPLNEIASSVVELTRKCVSITVLKRARQIHALVLTAGAGAATESPYANNNLISMYVRCGSLEQARKVFDKMPHRNVVSYNALYSAYSRNPDFASYAFPLTTHMAFEYVKPNSSTFTSLVQVCAVLEDVLMGSSLNSQIIKLGYSDNVVVQTSVLGMYSSCGDLESARRIFDCVNNRDAVAWNTMIVGSLKNDKIEDGLMFFRNMLMSGVDPTQFTYSIVLNGCSKLGSYSLGKLIHARIIVSDSLADLPLDNALLDMYCSCGDMREAFYVFGRIHNPNLVSWNSIISGCSENGFGEQAMLMYRRLLRMSTPRPDEYTFSAAISATAEPERFVHGKLLHGQVTKLGYERSVFVGTTLLSMYFKNREAESAQKVFDVMKERDVVLWTEMIVGHSRLGNSELAVQFFIEMYREKNRSDGFSLSSVIGACSDMAMLRQGEVFHCLAIRTGFDCVMSVCGALVDMYGKNGKYETAETIFSLASNPDLKCWNSMLGAYSQHGMVEKALSFFEQILENGFMPDAVTYLSLLAACSHRGSTLQGKFLWNQMKEQGIKAGFKHYSCMVNLVSKAGLVDEALELIEQSPPGNNQAELWRTLLSACVNTRNLQIGLYAAEQILKLDPEDTATHILLSNLYAVNGRWEDVAEMRRKIRGLASSKDPGLSWIEVNNNNTQVFSSGDQSNPEVVSQAQDELNRLKRNMLCKSSFNKLVCSN

SEQ ID NO: 28443 - protein, 764 aa, Arabidopsis thaliana
  misc_feature (1)..(764): Ceres Seq. ID no. 2731148
MYVRCSSLEQARKVFDKMPQRNIVTLFGLSAVFEYVSMGSSLHSQIIKLGSFQMIFFMPLNEIASSVVELTRKCVSITVLKRARQIHALVLTAGAGAATESPYANNNLISMYVRCGSLEQARKVFDKMPHRNVVSYNALYSAYSRNPDFASYAFPLTTHMAFEYVKPNSSTFTSLVQVCAVLEDVLMGSSLNSQIIKLGYSDNVVVQTSVLGMYSSCGDLESARRIFDCVNNRDAVAWNTMIVGSLKNDKIEDGLMFFRNMLMSGVDPTQFTYSIVLNGCSKLGSYSLGKLIHARIIVSDSLADLPLDNALLDMYCSCGDMREAFYVFGRIHNPNLVSWNSIISGCSENGFGEQAMLMYRRLLRMSTPRPDEYTFSAAISATAEPERFVHGKLLHGQVTKLGYERSVFVGTTLLSMYFKNREAESAQKVFDVMKERDVVLWTEMIVGHSRLGNSELAVQFFIEMYREKNRSDGFSLSSVIGACSDMAMLRQGEVFHCLAIRTGFDCVMSVCGALVDMYGKNGKYETAETIFSLASNPDLKCWNSMLGAYSQHGMVEKALSFFEQILENGFMPDAVTYLSLLAACSHRGSTLQGKFLWNQMKEQGIKAGFKHYSCMVNLVSKAGLVDEALELIEQSPPGNNQAELWRTLLSACVNTRNLQIGLYAAEQILKLDPEDTATHILLSNLYAVNGRWEDVAEMRRKIRGLASSKDPGLSWIEVNNNNTQVFSSGDQSNPEVVSQAQDELNRLKRNMLCKSSFNKLVCSN

SEQ ID NO: 28444 - DNA, 1587 bp, Arabidopsis thaliana
  misc_feature (1)..(1587): Ceres Seq. ID no. 2731330
atgggtttcatagtcggcgttgtaatcggactcctcgtcggaatcgcaatcatcatcggctttgtcaagttggagaattctcgatccaagcttcgctctgaacttttgacttggctcaaccatcacttgacaaagatctggccttatgttgatgaggcagcctctgagcttataaaggcatccgtggagcctgttcttgagcaatatagacctgccattgtggcctccttaacattttctaagcttactctcggtacagtggcacctcaatttacaggtgtttccgttatcgacggtgataaaaatgggattaccttggaacttgatatgcaatgggatggaaacccaaatatagtacttggcgtcaagaccttagttggtgtatccctccccattcaggtgaaaaacatcggattcactggtgttttcaggctaatttttaggccactagttgaggactttccctgctttggagctgtcagcgtttctcttagagaaaagaaaaaattggacttcacccttaaggttgttggaggtgatatttcagcaattcctggactttctgaagctattgaggtggaatcatatgtgtttatcttagaacttgctagacaggttggcaatttgagtagacagcttaaatttttttgtgtttctattcccagcgatctggagctaaagcctgttggaatgttagaggtgaagcttgtgcaagcaaagaacttgaccaacaaagatctagttggaaaatcagacccctttgctaaaatgtttatacgccctttgcgtgaaaagactaaaagaagcaagacaattaacaatgacctgaatcccatctggaatgagcattttgaatttgttgtggaagacgcgtcaactcaacatttagtggtcagaatatatgatgacgagggtgtacaagcatctgagcttattggttgtgcccaaatccggctttgtgaacttgaacctggtaaagtgaaagacgtctggttgaagctggtcaaagatttggagatccagagagatactaagaaccgtggagaggttcaccttgagctcctttacatcccttatggttcgggaaacggcattgtaaatccctttgtcacttcatcgatgacgtccttagagagggtgctcaagaatgatacaacagatgaagaaaatgcatcaagccgtaaaagaaaagatgtcattgtaagaggagttctctctgtgacagtgatatctgcagaagagataccaatacaagatctgatggggaaagctgatccatatgttgttctctcgatgaagaaatcaggtgccaagagcaaaactcgggtcgtcaatgacagcttgaacccggtatggaaccagacttttgattttgtagttgaagacgggttacatgatatgctagtccttgaagtctgggaccacgacacctttggaaaggactacattgggagatgtatcctcacgttgacaagggttataatggaagaggagtacaaagactggtacccattagacgaatccaaaacgggcaagcttcagctgcatctgaagtggatggctcaatcaatttatcgtgattcctaa

SEQ ID NO: 28445 - protein, 528 aa, Arabidopsis thaliana
  misc_feature (1)..(528): Ceres Seq. ID no. 2731331
MGFIVGVVIGLLVGIAIIIGFVKLENSRSKLRSELLTWLNHHLTKIWPYVDEAASELIKASVEPVLEQYRPAIVASLTFSKLTLGTVAPQFTGVSVIDGDKNGITLELDMQWDGNPNIVLGVKTLVGVSLPIQVKNIGFTGVFRLIFRPLVEDFPCFGAVSVSLREKKKLDFTLKVVGGDISAIPGLSEAIEVESYVFILELARQVGNLSRQLKFFCVSIPSDLELKPVGMLEVKLVQAKNLTNKDLVGKSDPFAKMFIRPLREKTKRSKTINNDLNPIWNEHFEFVVEDASTQHLVVRIYDDEGVQASELIGCAQIRLCELEPGKVKDVWLKLVKDLEIQRDTKNRGEVHLELLYIPYGSGNGIVNPFVTSSMTSLERVLKNDTTDEENASSRKRKDVIVRGVLSVTVISAEEIPIQDLMGKADPYVVLSMKKSGAKSKTRVVNDSLNPVWNQTFDFVVEDGLHDMLVLEVWDHDTFGKDYIGRCILTLTRVIMEEEYKDWYPLDESKTGKLQLHLKWMAQSIYRDS

SEQ ID NO: 28446 - protein, 419 aa, Arabidopsis thaliana
  misc_feature (1)..(419): Ceres Seq. ID no. 2731332
MQWDGNPNIVLGVKTLVGVSLPIQVKNIGFTGVFRLIFRPLVEDFPCFGAVSVSLREKKKLDFTLKVVGGDISAIPGLSEAIEVESYVFILELARQVGNLSRQLKFFCVSIPSDLELKPVGMLEVKLVQAKNLTNKDLVGKSDPFAKMFIRPLREKTKRSKTINNDLNPIWNEHFEFVVEDASTQHLVVRIYDDEGVQASELIGCAQIRLCELEPGKVKDVWLKLVKDLEIQRDTKNRGEVHLELLYIPYGSGNGIVNPFVTSSMTSLERVLKNDTTDEENASSRKRKDVIVRGVLSVTVISAEEIPIQDLMGKADPYVVLSMKKSGAKSKTRVVNDSLNPVWNQTFDFVVEDGLHDMLVLEVWDHDTFGKDYIGRCILTLTRVIMEEEYKDWYPLDESKTGKLQLHLKWMAQSIYRDS

SEQ ID NO: 28447 - protein, 298 aa, Arabidopsis thaliana
  misc_feature (1)..(298): Ceres Seq. ID no. 2731333
MLEVKLVQAKNLTNKDLVGKSDPFAKMFIRPLREKTKRSKTINNDLNPIWNEHFEFVVEDASTQHLVVRIYDDEGVQASELIGCAQIRLCELEPGKVKDVWLKLVKDLEIQRDTKNRGEVHLELLYIPYGSGNGIVNPFVTSSMTSLERVLKNDTTDEENASSRKRKDVIVRGVLSVTVISAEEIPIQDLMGKADPYVVLSMKKSGAKSKTRVVNDSLNPVWNQTFDFVVEDGLHDMLVLEVWDHDTFGKDYIGRCILTLTRVIMEEEYKDWYPLDESKTGKLQLHLKWMAQSIYRDS

SEQ ID NO: 28448 - DNA, 678 bp, Arabidopsis thaliana
  misc_feature (1)..(678): Ceres Seq. ID no. 2992353
atggcggctgctgcaagaaattatcaaaaggaagttcttgcaaatgagaaggcgcaaggatcaaatcctgttaatgaagaggttgatcttgatgaacttatggatgatccagagctagaaagattgcacgcagataggattgcagcactaaagagagaggttgagaagagagaatcgtttaaaagacaagggcatggtgaatatcgagaggtgagtgaaggagatttcttgggtgaagtcaccaggagtgagaaagtgatatgtcatttctaccataaggaattttaccggtgcaagattatggacaagcatctgaaaactcttgcacctagacatgtggacacaaagttcattaaagtggacgcagagaatgctcctttctttgtcacgaagcttgcaataaagactttgccttgcgttgtgcttttcagcaagggagttgcgatggataggctagttgggttccaggatctgggaaccaaggacgatttcacaacgaataaactagagaacgttcttcttaaaaaggttagagaatttttgcttaaagagtgcaaatctttaacaggaatgctcagcaagaagaagaaagaggaagatgatgaagacgccgaatatcaagagagcatacggaggtctgttaggtcttcagagaatctggactctgattctgactga

SEQ ID NO: 28449 - protein, 225 aa, Arabidopsis thaliana
  misc_feature (1)..(225): Ceres Seq. ID no. 2992354
MAAAARNYQKEVLANEKAQGSNPVNEEVDLDELMDDPELERLHADRIAALKREVEKRESFKRQGHGEYREVSEGDFLGEVTRSEKVICHFYHKEFYRCKIMDKHLKTLAPRHVDTKFIKVDAENAPFFVTKLAIKTLPCVVLFSKGVAMDRLVGFQDLGTKDDFTTNKLENVLLKKVREFLLKECKSLTGMLSKKKKEEDDEDAEYQESIRRSVRSSENLDSDSD

SEQ ID NO: 28450 - protein, 192 aa, Arabidopsis thaliana
  misc_feature (1)..(192): Ceres Seq. ID no. 2992355
MDDPELERLHADRIAALKREVEKRESFKRQGHGEYREVSEGDFLGEVTRSEKVICHFYHKEFYRCKIMDKHLKTLAPRHVDTKFIKVDAENAPFFVTKLAIKTLPCVVLFSKGVAMDRLVGFQDLGTKDDFTTNKLENVLLKKVREFLLKECKSLTGMLSKKKKEEDDEDAEYQESIRRSVRSSENLDSDSD

SEQ ID NO: 28451 - protein, 125 aa, Arabidopsis thaliana
  misc_feature (1)..(125): Ceres Seq. ID no. 2992356
MDKHLKTLAPRHVDTKFIKVDAENAPFFVTKLAIKTLPCVVLFSKGVAMDRLVGFQDLGTKDDFTTNKLENVLLKKVREFLLKECKSLTGMLSKKKKEEDDEDAEYQESIRRSVRSSENLDSDSD

SEQ ID NO: 28452 - DNA, 1122 bp, Arabidopsis thaliana
  misc_feature (1)..(1122): Ceres Seq. ID no. 2993885
atggcgatgacgatgattcaactatgttatgcaggagtgactctctttgcaagagctactttggttcatggattaagccctcgggtttttatcctctataggcaagcctttgccaccattttcatcttcccatttctttacttatccaggagaaaatcaaagatagctatatcttctttggatctaaagagcttttctttaatattcttggtctcgcttataggcattacaatcaatcaaaatctatatcttgaaggtctttacttaacttcatcatcaatgggaagtgcagtgggtaacatcatccctgcaatcaccttcctcatctcatttctcgccggatacgagaaactgaatctccgagatataagaggcttagcaaagatcgcagggacgatcctatgtgtagcaggagcgatctccatgactcttcttcgtggaccaaagattctcaactcagaatccgctttaccgatcgctaaatcggtattaggacatcttaaagaccagaacacgtggttgattggctgtttgttcttgttttctagcactctttgttggtccttttggcttatacttcaggttccaatctctgcctactatccagataacctctctttatcagcatggatgtgtttattcggaacaatacaatgtgcagtcgtcactttcttccttgagaaagacccaaacgcttggattctccattcctactccgagtttgccacatgtctctatgcaggaattggggcgtcagcactttcttttacggtccaagcttgggctattgcaaagagaggtcctgtgttttctgcactgtttaatcctctttgtacagtcattgtcacaatcttggctgctttgttcttccatgaagagatttacactggaagtttaatcggaggattgggcgtgatattgggactttacactgtgctctggggtaaagcaaaagatgtcatgatgaatcaagatcagagagacaatgatcagaagtcagaagtgaagattcatatagaagattcttcaaacacaacaatctgtaataaagatctgaagaatcctctgttgtccaaacacaaatcaacagaagaaatccaaacacatcaacaactatactaa

SEQ ID NO: 28453 - protein, 373 aa, Arabidopsis thaliana
  misc_feature (1)..(373): Ceres Seq. ID no. 2993886
MAMTMIQLCYAGVTLFARATLVHGLSPRVFILYRQAFATIFIFPFLYLSRRKSKIAISSLDLKSFSLIFLVSLIGITINQNLYLEGLYLTSSSMGSAVGNIIPAITFLISFLAGYEKLNLRDIRGLAKIAGTILCVAGAISMTLLRGPKILNSESALPIAKSVLGHLKDQNTWLIGCLFLFSSTLCWSFWLILQVPISAYYPDNLSLSAWMCLFGTIQCAVVTFFLEKDPNAWILHSYSEFATCLYAGIGASALSFTVQAWAIAKRGPVFSALFNPLCTVIVTILAALFFHEEIYTGSLIGGLGVILGLYTVLWGKAKDVMMNQDQRDNDQKSEVKIHIEDSSNTTICNKDLKNPLLSKHKSTEEIQTHQQLY

SEQ ID NO: 28454 - protein, 371 aa, Arabidopsis thaliana
  misc_feature (1)..(371): Ceres Seq. ID no. 2993887
MTMIQLCYAGVTLFARATLVHGLSPRVFILYRQAFATIFIFPFLYLSRRKSKIAISSLDLKSFSLIFLVSLIGITINQNLYLEGLYLTSSSMGSAVGNIIPAITFLISFLAGYEKLNLRDIRGLAKIAGTILCVAGAISMTLLRGPKILNSESALPIAKSVLGHLKDQNTWLIGCLFLFSSTLCWSFWLILQVPISAYYPDNLSLSAWMCLFGTIQCAVVTFFLEKDPNAWILHSYSEFATCLYAGIGASALSFTVQAWAIAKRGPVFSALFNPLCTVIVTILAALFFHEEIYTGSLIGGLGVILGLYTVLWGKAKDVMMNQDQRDNDQKSEVKIHIEDSSNTTICNKDLKNPLLSKHKSTEEIQTHQQLY

SEQ ID NO: 28455 - protein, 369 aa, Arabidopsis thaliana
  misc_feature (1)..(369): Ceres Seq. ID no. 2993888
MIQLCYAGVTLFARATLVHGLSPRVFILYRQAFATIFIFPFLYLSRRKSKIAISSLDLKSFSLIFLVSLIGITINQNLYLEGLYLTSSSMGSAVGNIIPAITFLISFLAGYEKLNLRDIRGLAKIAGTILCVAGAISMTLLRGPKILNSESALPIAKSVLGHLKDQNTWLIGCLFLFSSTLCWSFWLILQVPISAYYPDNLSLSAWMCLFGTIQCAVVTFFLEKDPNAWILHSYSEFATCLYAGIGASALSFTVQAWAIAKRGPVFSALFNPLCTVIVTILAALFFHEEIYTGSLIGGLGVILGLYTVLWGKAKDVMMNQDQRDNDQKSEVKIHIEDSSNTTICNKDLKNPLLSKHKSTEEIQTHQQLY

SEQ ID NO: 28456 - DNA, 639 bp, Arabidopsis thaliana
  misc_feature (1)..(639): Ceres Seq. ID no. 2993897
atgtataaagacttgaacatcaatatagtgtgtcctggaaaagattcaactcttggggttgagagtgttggcacagttcctgcatcactcgtgacttatgcttccattctagcaattcaaccagacttaatcattaatgcgggaaccgctggtggctttaaggccaaaggagcatgtattagcgatgtttatgttgtctctactgttgctttccatgacagaagaatacctgttcctgtccttgatatatatggtgttggtatgcggaacaccttccccacacccaaccttataaaggagctgaacctaaaggtgggaagattatccactggcgattctatggatatgtctccacatgacgaagaatccatcacagcaaatgatgctacagttaaagatatggagttactacgacttatttacggattcttggcatttcagggagcagcagtggcctatgtggctgatatctttaaagtgcctacgattctaataaaaggtgtgactgatattgtggatggcaatagaccaacttctgaagaatttttggagaacttagctgcagtcactgccaaacttgatgagtcacttaccaaagtgattgacttcatcagtgggaaatgtctctcagacctctaa

SEQ ID NO: 28457 - protein, 212 aa, Arabidopsis thaliana
  misc_feature (1)..(212): Ceres Seq. ID no. 2993898
MYKDLNINIVCPGKDSTLGVESVGTVPASLVTYASILAIQPDLIINAGTAGGFKAKGACISDVYVVSTVAFHDRRIPVPVLDIYGVGMRNTFPTPNLIKELNLKVGRLSTGDSMDMSPHDEESITANDATVKDMELLRLIYGFLAFQGAAVAYVADIFKVPTILIKGVTDIVDGNRPTSEEFLENLAAVTAKLDESLTKVIDFISGKCLSDL

SEQ ID NO: 28458 - protein, 125 aa, Arabidopsis thaliana
  misc_feature (1)..(125): Ceres Seq. ID no. 2993899
MRNTFPTPNLIKELNLKVGRLSTGDSMDMSPHDEESITANDATVKDMELLRLIYGFLAFQGAAVAYVADIFKVPTILIKGVTDIVDGNRPTSEEFLENLAAVTAKLDESLTKVIDFISGKCLSDL

SEQ ID NO: 28459 - DNA, 1023 bp, Arabidopsis thaliana
  misc_feature (1)..(1023): Ceres Seq. ID no. 2996383
atggtttattctcattcatacttgccttttttttttctttctattttccgtaggcgctcagctcttgttgagggtattatgtgtgagtaccagagaggaattaatggtgttcacagccagaacgacactgacagcgaagaaggagccaagatctttaagctgttagagacggctgctgaacctgaatttcttatggcagaaatgagcccagagcagttgagatctttcactacatataaagcaaaatttgaggcagcccagcaaatgcggaaggaaaaatcagtggcagaaactctggaagacgctggtttaggtgaaaggaacgtcaccccgttcatgaggattaggcttgttggcctgacgagcttaagttatgaaggagagcacaatccaaaagaaggcattgtaacaatctgggatcccacggagagacagagaaccgagctgacagaggggaaaatatacatgatgaaagggctagtaccaataaactcagattcagaaatactttacttacatgcgagagggtcaagctcaagatggcagcctttgtctcctaaagattctgaaaattttcatgaatttgatatcgctgcgtacgttgtatatgttggaaatgcatacacggatgttctacaaaagaagcagtgggtgtttgtgacagatggatccgcacaacattcaggggaaatctcaaacagtcttcttgctataagcttcagcacctcattcatggatgatagctctgtttcccacatcagccataatttggttggatccgtggtcggattttgcaatctaattaaaagagcaaaggatgtgacaaacgaaatttgggttgctgaggcagcagagaactcagtctacttcataaacgcagaagctgcctactcttctcacctcaaaaccagcagtgcccatatccaaacatgggctaagctctcttcttccaaatccgttcgttctcgtcgacttcctctttctataattattcggttcaaaaagattggtcttttgtattaa

SEQ ID NO: 28460 - protein, 340 aa, Arabidopsis thaliana
  misc_feature (1)..(340): Ceres Seq. ID no. 2996384
MVYSHSYLPFFFLSIFRRRSALVEGIMCEYQRGINGVHSQNDTDSEEGAKIFKLLETAAEPEFLMAEMSPEQLRSFTTYKAKFEAAQQMRKEKSVAETLEDAGLGERNVTPFMRIRLVGLTSLSYEGEHNPKEGIVTIWDPTERQRTELTEGKIYMMKGLVPINSDSEILYLHARGSSSRWQPLSPKDSENFHEFDIAAYVVYVGNAYTDVLQKKQWVFVTDGSAQHSGEISNSLLAISFSTSFMDDSSVSHISHNLVGSVVGFCNLIKRAKDVTNEIWVAEAAENSVYFINAEAAYSSHLKTSSAHIQTWAKLSSSKSVRSRRLPLSIIIRFKKIGLLY

SEQ ID NO: 28461 - protein, 314 aa, Arabidopsis thaliana
  misc_feature (1)..(314): Ceres Seq. ID no. 2996385
MCEYQRGINGVHSQNDTDSEEGAKIFKLLETAAEPEFLMAEMSPEQLRSFTTYKAKFEAAQQMRKEKSVAETLEDAGLGERNVTPFMRIRLVGLTSLSYEGEHNPKEGIVTIWDPTERQRTELTEGKIYMMKGLVPINSDSEILYLHARGSSSRWQPLSPKDSENFHEFDIAAYVVYVGNAYTDVLQKKQWVFVTDGSAQHSGEISNSLLAISFSTSFMDDSSVSHISHNLVGSVVGFCNLIKRAKDVTNEIWVAEAAENSVYFINAEAAYSSHLKTSSAHIQTWAKLSSSKSVRSRRLPLSIIIRFKKIGLLY

SEQ ID NO: 28462 - protein, 276 aa, Arabidopsis thaliana
  misc_feature (1)..(276): Ceres Seq. ID no. 2996386
MAEMSPEQLRSFTTYKAKFEAAQQMRKEKSVAETLEDAGLGERNVTPFMRIRLVGLTSLSYEGEHNPKEGIVTIWDPTERQRTELTEGKIYMMKGLVPINSDSEILYLHARGSSSRWQPLSPKDSENFHEFDIAAYVVYVGNAYTDVLQKKQWVFVTDGSAQHSGEISNSLLAISFSTSFMDDSSVSHISHNLVGSVVGFCNLIKRAKDVTNEIWVAEAAENSVYFINAEAAYSSHLKTSSAHIQTWAKLSSSKSVRSRRLPLSIIIRFKKIGLLY

SEQ ID NO: 28463 - DNA, 825 bp, Arabidopsis thaliana
  misc_feature (1)..(825): Ceres Seq. ID no. 2996468
atgggaggaagtgctagtctccagtcagactcgatggaagcagcagcagcagcagattcttcgattcccagagacaaagactttggcaaattccaattcggatgcgagcactacaagagacgatgtaaaatcagagctccttgctgcaatctcatcttctcatgccgccattgccacaacgactctgcgaattctcttcctgatcctaaagaacgtcatgatttggtccgccaaaacgtcaaacaggttgtttgttcaatttgtcaaactgagcaagaggttgctaaagtctgctcgaattgtggcgtcaatatgggagaatacttttgcgatatctgcaaattctttgacgacgatatttcgaaagaacagtttcattgtgatgactgtggaatttgtagagttggtgggcgtgacaaattctttcattgccagaactgtggagcttgctacggaatgggcttgcgcgataaacactcgtgcattgagaactctacaaaaaattcttgtcctgtctgttatgagtatctatttgattcggtaaaggccgcacatgtgatgaaatgtggtcatacaatgcatatggattgctttgaacaaatgatcaatgaaaaccagtaccgatgcccaatttgtgccaagtcaatggtggatatgtctccttcgtggcacctattagatttcgaggtttcaattctctgcaatgactgcaacaaggggagtaaagctatgttccacattttgggacacaagtgcagtgattgcggttcatacaacactcggagaatctcaacgccacaagatccagtgagtgaaacagagtga

SEQ ID NO: 28464 - protein, 274 aa, Arabidopsis thaliana
  misc_feature (1)..(274): Ceres Seq. ID no. 2996469
MGGSASLQSDSMEAAAAADSSIPRDKDFGKFQFGCEHYKRRCKIRAPCCNLIFSCRHCHNDSANSLPDPKERHDLVRQNVKQVVCSICQTEQEVAKVCSNCGVNMGEYFCDICKFFDDDISKEQFHCDDCGICRVGGRDKFFHCQNCGACYGMGLRDKHSCIENSTKNSCPVCYEYLFDSVKAAHVMKCGHTMHMDCFEQMINENQYRCPICAKSMVDMSPSWHLLDFEVSILCNDCNKGSKAMFHILGHKCSDCGSYNTRRISTPQDPVSETE

SEQ ID NO: 28465 - protein, 263 aa, Arabidopsis thaliana
  misc_feature (1)..(263): Ceres Seq. ID no. 2996470
MEAAAAADSSIPRDKDFGKFQFGCEHYKRRCKIRAPCCNLIFSCRHCHNDSANSLPDPKERHDLVRQNVKQVVCSICQTEQEVAKVCSNCGVNMGEYFCDICKFFDDDISKEQFHCDDCGICRVGGRDKFFHCQNCGACYGMGLRDKHSCIENSTKNSCPVCYEYLFDSVKAAHVMKCGHTMHMDCFEQMINENQYRCPICAKSMVDMSPSWHLLDFEVSILCNDCNKGSKAMFHILGHKCSDCGSYNTRRISTPQDPVSETE

SEQ ID NO: 28466 - protein, 180 aa, Arabidopsis thaliana
  misc_feature (1)..(180): Ceres Seq. ID no. 2996471
WEEVLVSSQTRWKQQQQQILRFPETKTLANSNSDASTTRDDVKSELLAAISSSHAAIATTTLRILFLILKNVMIWSAKTSNRLFVQFVKLSKRLLKSARIVASIWENTFAISANSLTTIFRKNSFIVMTVEFVELVGVTNSFIARTVELATEWACAINTRALRTLQKILVLSVMSIYLIR

SEQ ID NO: 28467 - DNA, 732 bp, Arabidopsis thaliana
  misc_feature (1)..(732): Ceres Seq. ID no. 2996700
atggtggcgcaaaacagtcggcgggagcttctagcagcttccctgatcctaactttagctctaattcgtctaacggaagcaaactccgaaggggacgctcttcacgcgcttcgccggagcttatcagatccagacaatgttgttcagagttgggatccaactcttgttaatccttgtacttggtttcatgtcacttgtaatcaacaccatcaagtcactcgtctggatttggggaattcaaacttatctggacatctagtacctgaacttgggaagcttgaacatttacaatatctgtatggaatcatcactcttttgccttttgattatctgaaaacatttacattatcagtcacacatataacattttgctttgagtcatatagtgaactctacaaaaacgagattcaaggaactataccttctgagcttggaaatctgaagagtctaatcagtttggatctgtacaacaacaatctcaccgggaaaatcccatcttctttgggaaaattgaagcggcttaacgaaaaccgattgaccggtcctattcctagagaactcacagttatttcaagccttaaagttgttgatgtctcagggaatgatttgtgtggaacaattccagtagaaggaccttttgaacacattcctatgcaaaactttgagaacaacctgagattggagggaccagaactactaggtcttgcgagctatgacaccaattgcacttaa

SEQ ID NO: 28468 - protein, 243 aa, Arabidopsis thaliana
  misc_feature (1)..(243): Ceres Seq. ID no. 2996701
MVAQNSRRELLAASLILTLALIRLTEANSEGDALHALRRSLSDPDNVVQSWDPTLVNPCTWFHVTCNQHHQVTRLDLGNSNLSGHLVPELGKLEHLQYLYGIITLLPFDYLKTFTLSVTHITFCFESYSELYKNEIQGTIPSELGNLKSLISLDLYNNNLTGKIPSSLGKLKRLNENRLTGPIPRELTVISSLKVVDVSGNDLCGTIPVEGPFEHIPMQNFENNLRLEGPELLGLASYDTNCT

SEQ ID NO: 28469 - DNA, 1440 bp, Arabidopsis thaliana
  misc_feature (1)..(1440): Ceres Seq. ID no. 2996710
atggccgatgatgagtcaagaaccatcctgttggagaagaacgaagactgccctggctgtatcattgatcgaaccaagcaacagcaacgaggcgttccttacttgcacctctccttcatctggctcgtgtcactctgcactgagaatgaccaatatgtattgtggcagatcagagacttccatatagcaaaacaagaagaagatattggtttctatgctggttttgttggatcatcattcatgattggaagagctttgacatctattttctgggggaaattagctgatcgttatggtcgcaaacctattattctcattgggacattctcagtgatcatattcaataccctctttggtctaagcacaagtttctggcttgcaatttccgttagatttcttcttggctgcttcaattgtttacttggagttataagagcatatgcttcagaagtcgttagcgaagagtataacgctcttagtctttctgtcgtgagtacatcaagaggtataggattgatactaggtcctgctattggaggttatcttgctcagcctgcagaaaagtacccaaatatattttcccagagttcagtttttgggaggtttccatattttctgccgagcttagttatatccgtctatgctactgcggttctcatcgcttgctggtggcttcctgaaactcttcatacacgttgtagaattgcacaagggagacttaatccaacagagctaaacgatgatgaaagtagaggaggaggacttgatgaacagaaaataattaataagccaagtctcttgaggaatcgtccattgatggctatcatcattgtttattgtgttttttccctccaagagatagcatacaatgagatattctcactctgggctgttagtgaccgaagctatggaggattgagcttctcatctcaagatgttggtgaagttttagctatatcaggacttgggcttctggtgtttcaacttttggtatacccgccattggagaaatccgtgggactccttgcggttatacgtctttctgcggtattgctgataccgctgctttcgtgttacccctatatagctttgctttctggggtgactctccatttggtgataaattgtgcatccatcataaaaaacgctttgtctatctcacttgtcacaggactgtttatcatgttgaacaaagctgtgcctcagaatcagagaggtgctgctaatggcatttctatgaccgcgatgtctgttttcaaatcatttggccctgccggtggaggggtcttattctcatgggcgcaaaagagacaagacgctacattccttccaggtcaaatttttgcaccatgtgatgagatggtgttcttggtgttgaatttggtacagctcgtaggattgatactaacgttcataccttacatttcccaaatccagtaa

SEQ ID NO: 28470 - protein, 479 aa, Arabidopsis thaliana
  misc_feature (1)..(479): Ceres Seq. ID no. 2996711
MADDESRTILLEKNEDCPGCIIDRTKQQQRGVPYLHLSFIWLVSLCTENDQYVLWQIRDFHIAKQEEDIGFYAGFVGSSFMIGRALTSIFWGKLADRYGRKPIILIGTFSVIIFNTLFGLSTSFWLAISVRFLLGCFNCLLGVIRAYASEVVSEEYNALSLSVVSTSRGIGLILGPAIGGYLAQPAEKYPNIFSQSSVFGRFPYFLPSLVISVYATAVLIACWWLPETLHTRCRIAQGRLNPTELNDDESRGGGLDEQKIINKPSLLRNRPLMAIIIVYCVFSLQEIAYNEIFSLWAVSDRSYGGLSFSSQDVGEVLAISGLGLLVFQLLVYPPLEKSVGLLAVIRLSAVLLIPLLSCYPYIALLSGVTLHLVINCASIIKNALSISLVTGLFIMLNKAVPQNQRGAANGISMTAMSVFKSFGPAGGGVLFSWAQKRQDATFLPGQIFAPCDEMVFLVLNLVQLVGLILTFIPYISQIQ

SEQ ID NO: 28471 - protein, 399 aa, Arabidopsis thaliana
  misc_feature (1)..(399): Ceres Seq. ID no. 2996712
MIGRALTSIFWGKLADRYGRKPIILIGTFSVIIFNTLFGLSTSFWLAISVRFLLGCFNCLLGVIRAYASEVVSEEYNALSLSVVSTSRGIGLILGPAIGGYLAQPAEKYPNIFSQSSVFGRFPYFLPSLVISVYATAVLIACWWLPETLHTRCRIAQGRLNPTELNDDESRGGGLDEQKIINKPSLLRNRPLMAIIIVYCVFSLQEIAYNEIFSLWAVSDRSYGGLSFSSQDVGEVLAISGLGLLVFQLLVYPPLEKSVGLLAVIRLSAVLLIPLLSCYPYIALLSGVTLHLVINCASIIKNALSISLVTGLFIMLNKAVPQNQRGAANGISMTAMSVFKSFGPAGGGVLFSWAQKRQDATFLPGQIFAPCDEMVFLVLNLVQLVGLILTFIPYISQIQ

SEQ ID NO: 28472 - DNA, 1023 bp, Arabidopsis thaliana
  misc_feature (1)..(1023): Ceres Seq. ID no. 2996845
atggagaaaggtgaggattcaagcacattcaaaatggggaattctgcacaagagaggagtttaccgtatgtacctgactgttacgtcgtcccgccttctagcaaaccatgtgactcaaattccggaatcgtacccactatcgatgtttctcggctgaaagggggagatgatgaacgtcgagggatagtgaaccatggaatcaaccagaacatactagatgacgccttggaggttgcgaatagcttcttcgagctgccggcgaaggagaagaaacagtttatgtcaaacgatgtctacgcaccggttcggtacagtacgagtctcaaggacggtttggacacgatccaattctggaggatttttctaaagcactatgcacatcctcttcatcgttggattcatctttggccagagaatccacccggatacagggaaaaaatgggaaagttctgcgaggaagtgaggaaactatcgatagagttaatgggagcaataacggaaagcctaggtctagggagagactacctgtcgtctcggatggacgaaaacggcatgcaagtcatgacagttaactgctatccaccctgtccggaccctgagacggcgctaggcctgccgccgcattcagactatagttgcatcaccctccttctacagaacttggacggtctcaagatcttcgatccaatggctcacggtggatctggccgttgggttggtgtcccacaagtcacaggtgtacttaaggtccatattggtgaccatgtggaagttctaagcaatggattatacaagagcatcgttcataaagtcactttgaatgaagagaagacgagaatctctctcgcgagcttgcatagcttgggtatggacgataagatgagtgtaccgcgcgaattggttaacgatgaaaatccggttcggtataaagagagcagctttaacgattttcttgattttcttgtcaaaaatgacatttctcaaggggataggtttattgacactctcagaatcaaggactga

SEQ ID NO: 28473 - protein, 340 aa, Arabidopsis thaliana
  misc_feature (1)..(340): Ceres Seq. ID no. 2996846
MEKGEDSSTFKMGNSAQERSLPYVPDCYVVPPSSKPCDSNSGIVPTIDVSRLKGGDDERRGIVNHGINQNILDDALEVANSFFELPAKEKKQFMSNDVYAPVRYSTSLKDGLDTIQFWRIFLKHYAHPLHRWIHLWPENPPGYREKMGKFCEEVRKLSIELMGAITESLGLGRDYLSSRMDENGMQVMTVNCYPPCPDPETALGLPPHSDYSCITLLLQNLDGLKIFDPMAHGGSGRWVGVPQVTGVLKVHIGDHVEVLSNGLYKSIVHKVTLNEEKTRISLASLHSLGMDDKMSVPRELVNDENPVRYKESSFNDFLDFLVKNDISQGDRFIDTLRIKD

SEQ ID NO: 28474 - protein, 329 aa, Arabidopsis thaliana
  misc_feature (1)..(329): Ceres Seq. ID no. 2996847
MGNSAQERSLPYVPDCYVVPPSSKPCDSNSGIVPTIDVSRLKGGDDERRGIVNHGINQNILDDALEVANSFFELPAKEKKQFMSNDVYAPVRYSTSLKDGLDTIQFWRIFLKHYAHPLHRWIHLWPENPPGYREKMGKFCEEVRKLSIELMGAITESLGLGRDYLSSRMDENGMQVMTVNCYPPCPDPETALGLPPHSDYSCITLLLQNLDGLKIFDPMAHGGSGRWVGVPQVTGVLKVHIGDHVEVLSNGLYKSIVHKVTLNEEKTRISLASLHSLGMDDKMSVPRELVNDENPVRYKESSFNDFLDFLVKNDISQGDRFIDTLRIKD

SEQ ID NO: 28475 - protein, 247 aa, Arabidopsis thaliana
  misc_feature (1)..(247): Ceres Seq. ID no. 2996848
MSNDVYAPVRYSTSLKDGLDTIQFWRIFLKHYAHPLHRWIHLWPENPPGYREKMGKFCEEVRKLSIELMGAITESLGLGRDYLSSRMDENGMQVMTVNCYPPCPDPETALGLPPHSDYSCITLLLQNLDGLKIFDPMAHGGSGRWVGVPQVTGVLKVHIGDHVEVLSNGLYKSIVHKVTLNEEKTRISLASLHSLGMDDKMSVPRELVNDENPVRYKESSFNDFLDFLVKNDISQGDRFIDTLRIKD

SEQ ID NO: 28476 - DNA, 2469 bp, Arabidopsis thaliana
  misc_feature (1)..(2469): Ceres Seq. ID no. 2996861
atgatcgtgttcatgagaataattcatgttgcgcagactcgcagattgatgatccgatgcaatcgcattcgacaatgtgggttttctgtgaaaactgcggcattggatttagaatcgtcggattcgataatcccaggcttagactctcatgcttacggtgcaatgctccgtcgctgcattcagaagaacgacccaatttcagcaaaggctattcattgcgacatcttgaagaaaggaagctgcttagaccttttcgccacaaacattctactcaacgcttatgtgaaagctggctttgacaaagatgcgttaaacctgttcgacgaaatgcctgagagaaataatgtctcttttgttactcttgcgcaagggtatgcgtgtcaagatcccattggtttgtattccaggttgcatcgagagggtcatgagcttaatccacacgtcttcacttctttcttgaagttgtttgttagtttggacaaagctgagatttgtccatggttgcattctcctatcgttaagctcggttatgattctaatgcttttgttggagctgcgcttattaatgcttactctgtctgtggttctgttgatagtgcaagaactgtttttgaagggattttgtgcaaagacattgttgtttgggcaggaattgtatcttgctatgtagaaaatggatatttcgaggattctcttaagctgctatcttgtatgaggatggctggtttcatgcccaacaactacacctttgacacggcgcttaaggctagtattgggctaggcgcatttgatttcgcgaaaggtgttcatggccaaatcttaaaaacatgttatgtgttggatcctcgtgtgggtgttggtttgcttcagttgtatacacaactcggagacatgtctgatgctttcaaagtgtttaatgagatgccaaagaatgatgtggtaccttggagttttatgattgctcgtttttgtcaaaacggtttctgcaacgaggcggttgatctttttattcgaatgagggaagcttttgttgtccctaacgagtttactttaagcagtattttgaatggctgtgccatcggaaagtgttctggcttaggtgagcaactccatggtcttgtagtcaaagttggctttgatttggatatctatgtctcaaatgctcttattgatgtatatgccaaatgtgagaaaatggataccgctgtgaagttatttgctgagttatcaagtaaaaatgaggtaagctggaacacagtcattgtcgggtatgagaatctaggcgaaggaggaaaagcgttcagcatgtttcgtgaagcgctcagaaatcaggtgtcggtaactgaagtaactttctcaagtgctcttggagcttgtgcttcattggcgagcatggacctcggtgtccaagttcatggactggcgataaaaaccaataatgccaaaaaagttgcagtgagtaactcattgatagatatgtatgcaaaatgtggtgatatcaaattcgcacaatcggtgttcaacgagatggaaacgatagatgtcgcttcatggaatgcgttgatctcaggctattccacacatggactgggtagacaggcattgagaatcctcgacattatgaaggatagagattgcaagccaaatggtttaacatttcttggtgttctttctggatgcagcaatgcaggattaatagatcaaggtcaagaatgttttgaatcaatgattcgtgatcatggtattgaaccatgtttggaacattatacgtgtatggtcaggcttttgggaagatcagggcagcttgacaaagcaatgaagctgattgaagggattccatatgagcctagcgttatgatctggagggcaatgcttagtgcctctatgaatcagaacaatgaagagtttgcaaggagatcggcagaggaaatactaaagatcaatccaaaggacgaggcgacatatgttctggtatcaaacatgtacgcaggtgcaaaacaatgggcaaacgtagcttccattaggaaaagcatgaaggaaatgggtgtcaagaaggaacctggtttaagttggatagaacatcaaggtgatgtgcattacttcagtgtggggttatcagatcatccggatatgaagctcataaatggaatgttggaatggcttaacatgaaagcaactcgagctggttacgttcctgatcggaatgcggtcctgctcgatatggatgatgaagaaaaggataagagattgtgggttcatagcgagaggttggctttggcgtatgggcttgttcgaatgccatcatcaagaaatcgcatactgatcatgaagaatctacggatatgttcagattgccacagtgctatgaaagtgatttcaagtatcgtacagcgagatctggttataagagatatgaaccggttccatcattttcatgcaggagtctgctcttgcggcgaccactggtga

SEQ ID NO: 28477 - protein, 822 aa, Arabidopsis thaliana
  misc_feature (1)..(822): Ceres Seq. ID no. 2996862
MIVFMRIIHVAQTRRLMIRCNRIRQCGFSVKTAALDLESSDSIIPGLDSHAYGAMLRRCIQKNDPISAKAIHCDILKKGSCLDLFATNILLNAYVKAGFDKDALNLFDEMPERNNVSFVTLAQGYACQDPIGLYSRLHREGHELNPHVFTSFLKLFVSLDKAEICPWLHSPIVKLGYDSNAFVGAALINAYSVCGSVDSARTVFEGILCKDIVVWAGIVSCYVENGYFEDSLKLLSCMRMAGFMPNNYTFDTALKASIGLGAFDFAKGVHGQILKTCYVLDPRVGVGLLQLYTQLGDMSDAFKVFNEMPKNDVVPWSFMIARFCQNGFCNEAVDLFIRMREAFVVPNEFTLSSILNGCAIGKCSGLGEQLHGLVVKVGFDLDIYVSNALIDVYAKCEKMDTAVKLFAELSSKNEVSWNTVIVGYENLGEGGKAFSMFREALRNQVSVTEVTFSSALGACASLASMDLGVQVHGLAIKTNNAKKVAVSNSLIDMYAKCGDIKFAQSVFNEMETIDVASWNALISGYSTHGLGRQALRILDIMKDRDCKPNGLTFLGVLSGCSNAGLIDQGQECFESMIRDHGIEPCLEHYTCMVRLLGRSGQLDKAMKLIEGIPYEPSVMIWRAMLSASMNQNNEEFARRSAEEILKINPKDEATYVLVSNMYAGAKQWANVASIRKSMKEMGVKKEPGLSWIEHQGDVHYFSVGLSDHPDMKLINGMLEWLNMKATRAGYVPDRNAVLLDMDDEEKDKRLWVHSERLALAYGLVRMPSSRNRILIMKNLRICSDCHSAMKVISSIVQRDLVIRDMNRFHHFHAGVCSCGDHW

SEQ ID NO: 28478 - protein, 818 aa, Arabidopsis thaliana
  misc_feature (1)..(818): Ceres Seq. ID no. 2996863
MRIIHVAQTRRLMIRCNRIRQCGFSVKTAALDLESSDSIIPGLDSHAYGAMLRRCIQKNDPISAKAIHCDILKKGSCLDLFATNILLNAYVKAGFDKDALNLFDEMPERNNVSFVTLAQGYACQDPIGLYSRLHREGHELNPHVFTSFLKLFVSLDKAEICPWLHSPIVKLGYDSNAFVGAALINAYSVCGSVDSARTVFEGILCKDIVVWAGIVSCYVENGYFEDSLKLLSCMRMAGFMPNNYTFDTALKASIGLGAFDFAKGVHGQILKTCYVLDPRVGVGLLQLYTQLGDMSDAFKVFNEMPKNDVVPWSFMIARFCQNGFCNEAVDLFIRMREAFVVPNEFTLSSILNGCAIGKCSGLGEQLHGLVVKVGFDLDIYVSNALIDVYAKCEKMDTAVKLFAELSSKNEVSWNTVIVGYENLGEGGKAFSMFREALRNQVSVTEVTFSSALGACASLASMDLGVQVHGLAIKTNNAKKVAVSNSLIDMYAKCGDIKFAQSVFNEMETIDVASWNALISGYSTHGLGRQALRILDIMKDRDCKPNGLTFLGVLSGCSNAGLIDQGQECFESMIRDHGIEPCLEHYTCMVRLLGRSGQLDKAMKLIEGIPYEPSVMIWRAMLSASMNQNNEEFARRSAEEILKINPKDEATYVLVSNMYAGAKQWANVASIRKSMKEMGVKKEPGLSWIEHQGDVHYFSVGLSDHPDMKLINGMLEWLNMKATRAGYVPDRNAVLLDMDDEEKDKRLWVHSERLALAYGLVRMPSSRNRILIMKNLRICSDCHSAMKVISSIVQRDLVIRDMNRFHHFHAGVCSCGDHW

SEQ ID NO: 28479 - protein, 806 aa, Arabidopsis thaliana
  misc_feature (1)..(806): Ceres Seq. ID no. 2996864
MIRCNRIRQCGFSVKTAALDLESSDSIIPGLDSHAYGAMLRRCIQKNDPISAKAIHCDILKKGSCLDLFATNILLNAYVKAGFDKDALNLFDEMPERNNVSFVTLAQGYACQDPIGLYSRLHREGHELNPHVFTSFLKLFVSLDKAEICPWLHSPIVKLGYDSNAFVGAALINAYSVCGSVDSARTVFEGILCKDIVVWAGIVSCYVENGYFEDSLKLLSCMRMAGFMPNNYTFDTALKASIGLGAFDFAKGVHGQILKTCYVLDPRVGVGLLQLYTQLGDMSDAFKVFNEMPKNDVVPWSFMIARFCQNGFCNEAVDLFIRMREAFVVPNEFTLSSILNGCAIGKCSGLGEQLHGLVVKVGFDLDIYVSNALIDVYAKCEKMDTAVKLFAELSSKNEVSWNTVIVGYENLGEGGKAFSMFREALRNQVSVTEVTFSSALGACASLASMDLGVQVHGLAIKTNNAKKVAVSNSLIDMYAKCGDIKFAQSVFNEMETIDVASWNALISGYSTHGLGRQALRILDIMKDRDCKPNGLTFLGVLSGCSNAGLIDQGQECFESMIRDHGIEPCLEHYTCMVRLLGRSGQLDKAMKLIEGIPYEPSVMIWRAMLSASMNQNNEEFARRSAEEILKINPKDEATYVLVSNMYAGAKQWANVASIRKSMKEMGVKKEPGLSWIEHQGDVHYFSVGLSDHPDMKLINGMLEWLNMKATRAGYVPDRNAVLLDMDDEEKDKRLWVHSERLALAYGLVRMPSSRNRILIMKNLRICSDCHSAMKVISSIVQRDLVIRDMNRFHHFHAGVCSCGDHW

SEQ ID NO: 28480 - DNA, 2253 bp, Arabidopsis thaliana
  misc_feature (1)..(2253): Ceres Seq. ID no. 2996881
atggaggagagcgcagaaatattgcgggaaagaagtctcaagttttacaaaggatgccggaaatacactgaaggactaggcgaggcatacgatggggacattgctttcgcaagtgcacttgaaacatttggtggaggccataatgatccaataagtgtggcttttggaggaccggtaatgacgaaatttacaattgcgttgagggaaattgggacttataaggaagttcttcggtcacaggtggaacatatactgaatgacagattacttcagtttgccaatatggacttgcatgaagttaaggcccgtgagaagtttttatctttgaggaaaggtacaaaaagtgacgttgctgctgctttagaacaggaacttcatacttcgaggtctatgtttgagcaagctcggttcaaccttgtgactgctctatcaaatgttgaagctaagaaaaggtttgaatttttggaagcagtcagtggaacaatggatgcacatcttcggtacttcaaacagggttacgaattactgcatcagatggaaccatatatcaatcaggtcttgacatatgcgcaacaatccagagaaagatcaaattatgaacaagcagcacttaatgaaaagatgcaggagtacaaaagacaggttgatcgagagagcaggtggggttcaaatggttctaatggatcaccaaatggagatggcatacaagcaatcggtagaagctctcacaaaatgatagacgccgtaatgcaatctgctgcaagaggaaaggggtctggaagccagctttctggacagagaaatagctccgagcttgggtctggactgcttagtaggtggctttcttcgaataatcatggacatggtggtgtccatgatgagaagtctgtagctcgtcatacagtgaacttactcacctcaacaattaaagtcgacgctgatcaatcagatctgaggttttgctttaggatcatatcacctacaaaaaactacacgttgcaggctgagagtgcactcgatcaaatggattggatagaaaagatcactggggttattgcatcactacttagttctcaggtccctgaacagcgtcttcctggtagtcccatgggaagtggccaccatcgatctgctagtgaaagtagctcatatgaaagttctgaatatgatcatcctactactgaagaatttgtatgtgagaggagctttttggggtacaatgaaaggccatcaagaagttttcagccgcaacggtccattagaaagggtgagaagcccattgatgctcttcgaaaggtctgtgggaatgacaaatgtgcggattgtggagctccagaaccagactgggcttctttaaatctgggggttcttgtctgtatcgaatgttctggtgttcaccgtaatcttggtgtgcatatatctaaggttaggtcactcactctcgacgtgaaagtatgggagccatctgttataagtttgttccaagctcttggaaatactttcgcaaacacagtttgggaggaattgcttcattcaaggagcgccatccattttgaccccggcttaacagtgtctgataaatccagggtgatggtcactggaaaacccagctatgctgatatgatatctatcaaggagaagtatatacaagctaagtatgcggagaagttatttgttcggagatcaagagacagcgatttcccacaatcagctgcacaacaaatgtgggacgcagtgagtggcaatgataaaaaagctgtttaccggctcattgtcaatggtgatgcggatgtgaattatgtgtatgaccaaacttccagttcttcgttaacactttccagagtaatattagtaccagaaaggccaaagcgtgaggatgttctactcagattaagaaatgagttacttgatagaacaggtagttcttcaaatatatctcctgagggaagcggaggttcctctctgcttcactgtgcttgtgagaaggcagaccttgggatggtagagcttttgctgcagtatggtgcaaatgtaaacgcctcagattcaagtggtcaaacgccgctgcactgttgtcttctcagaggaaaagtgacaatagcaagattgcttctcactaggggagcagacccggaagctatgaacagagaaggcaaaaccgctcttgatattgctgcagagtcaaattttactgatccagaagttcttgctctcctttcagacacaaatggatacaatcacagacagtgctga

SEQ ID NO: 28481 - protein, 750 aa, Arabidopsis thaliana
  misc_feature (1)..(750): Ceres Seq. ID no. 2996882
MEESAEILRERSLKFYKGCRKYTEGLGEAYDGDIAFASALETFGGGHNDPISVAFGGPVMTKFTIALREIGTYKEVLRSQVEHILNDRLLQFANMDLHEVKAREKFLSLRKGTKSDVAAALEQELHTSRSMFEQARFNLVTALSNVEAKKRFEFLEAVSGTMDAHLRYFKQGYELLHQMEPYINQVLTYAQQSRERSNYEQAALNEKMQEYKRQVDRESRWGSNGSNGSPNGDGIQAIGRSSHKMIDAVMQSAARGKGSGSQLSGQRNSSELGSGLLSRWLSSNNHGHGGVHDEKSVARHTVNLLTSTIKVDADQSDLRFCFRIISPTKNYTLQAESALDQMDWIEKITGVIASLLSSQVPEQRLPGSPMGSGHHRSASESSSYESSEYDHPTTEEFVCERSFLGYNERPSRSFQPQRSIRKGEKPIDALRKVCGNDKCADCGAPEPDWASLNLGVLVCIECSGVHRNLGVHISKVRSLTLDVKVWEPSVISLFQALGNTFANTVWEELLHSRSAIHFDPGLTVSDKSRVMVTGKPSYADMISIKEKYIQAKYAEKLFVRRSRDSDFPQSAAQQMWDAVSGNDKKAVYRLIVNGDADVNYVYDQTSSSSLTLSRVILVPERPKREDVLLRLRNELLDRTGSSSNISPEGSGGSSLLHCACEKADLGMVELLLQYGANVNASDSSGQTPLHCCLLRGKVTIARLLLTRGADPEAMNREGKTALDIAAESNFTDPEVLALLSDTNGYNHRQC

SEQ ID NO: 28482 - protein, 691 aa, Arabidopsis thaliana
  misc_feature (1)..(691): Ceres Seq. ID no. 2996883
MTKFTIALREIGTYKEVLRSQVEHILNDRLLQFANMDLHEVKAREKFLSLRKGTKSDVAAALEQELHTSRSMFEQARFNLVTALSNVEAKKRFEFLEAVSGTMDAHLRYFKQGYELLHQMEPYINQVLTYAQQSRERSNYEQAALNEKMQEYKRQVDRESRWGSNGSNGSPNGDGIQAIGRSSHKMIDAVMQSAARGKGSGSQLSGQRNSSELGSGLLSRWLSSNNHGHGGVHDEKSVARHTVNLLTSTIKVDADQSDLRFCFRIISPTKNYTLQAESALDQMDWIEKITGVIASLLSSQVPEQRLPGSPMGSGHHRSASESSSYESSEYDHPTTEEFVCERSFLGYNERPSRSFQPQRSIRKGEKPIDALRKVCGNDKCADCGAPEPDWASLNLGVLVCIECSGVHRNLGVHISKVRSLTLDVKVWEPSVISLFQALGNTFANTVWEELLHSRSAIHFDPGLTVSDKSRVMVTGKPSYADMISIKEKYIQAKYAEKLFVRRSRDSDFPQSAAQQMWDAVSGNDKKAVYRLIVNGDADVNYVYDQTSSSSLTLSRVILVPERPKREDVLLRLRNELLDRTGSSSNISPEGSGGSSLLHCACEKADLGMVELLLQYGANVNASDSSGQTPLHCCLLRGKVTIARLLLTRGADPEAMNREGKTALDIAAESNFTDPEVLALLSDTNGYNHRQC

SEQ ID NO: 28483 - protein, 656 aa, Arabidopsis thaliana
  misc_feature (1)..(656): Ceres Seq. ID no. 2996884
MDLHEVKAREKFLSLRKGTKSDVAAALEQELHTSRSMFEQARFNLVTALSNVEAKKRFEFLEAVSGTMDAHLRYFKQGYELLHQMEPYINQVLTYAQQSRERSNYEQAALNEKMQEYKRQVDRESRWGSNGSNGSPNGDGIQAIGRSSHKMIDAVMQSAARGKGSGSQLSGQRNSSELGSGLLSRWLSSNNHGHGGVHDEKSVARHTVNLLTSTIKVDADQSDLRFCFRIISPTKNYTLQAESALDQMDWIEKITGVIASLLSSQVPEQRLPGSPMGSGHHRSASESSSYESSEYDHPTTEEFVCERSFLGYNERPSRSFQPQRSIRKGEKPIDALRKVCGNDKCADCGAPEPDWASLNLGVLVCIECSGVHRNLGVHISKVRSLTLDVKVWEPSVISLFQALGNTFANTVWEELLHSRSAIHFDPGLTVSDKSRVMVTGKPSYADMISIKEKYIQAKYAEKLFVRRSRDSDFPQSAAQQMWDAVSGNDKKAVYRLIVNGDADVNYVYDQTSSSSLTLSRVILVPERPKREDVLLRLRNELLDRTGSSSNISPEGSGGSSLLHCACEKADLGMVELLLQYGANVNASDSSGQTPLHCCLLRGKVTIARLLLTRGADPEAMNREGKTALDIAAESNFTDPEVLALLSDTNGYNHRQC

SEQ ID NO: 28484 - DNA, 1386 bp, Arabidopsis thaliana
  misc_feature (1)..(1386): Ceres Seq. ID no. 2997079
atggcggaagaatctttattaccatctcatacagaagatgtatcagcttctcctaataaatcttcatcacttctgtctgaaatatcaaatgcttccacgagaccttttgttcttgctttcactgttggttcttgtggtgccttgagctttggatgcattttttcattttttggatcgatattgacagtggggctaatccttggagcattaatttgtgggaaattggcagatttggttggtcgtgtctatacgatatggattacaaacattcttgttttaatcggctggttagctattgcatttgccaaggatgttcggctactcgatcttggaaggttattgcaagggatctcggtcggaattagctcatatttgggacctatttacattagcgagttagcaccaagaaatttgcgaggagctgcttcttcgttgatgcagttatttgtcggtgtgggtctatcggccttttatgctctcggaacagccgttgcttggcgcagtttagccattttaggatctataccttctctagtggttctgcctcttcttttcttcatccccgaatctcctagatggctagctaaagttgggagggaaaaggaggttgaaggggttttattaagcttgcgaggagcaaaatctgatgtatcagatgaagcagcaacgatattagaatatacaaaacatgtcgaacaacaagacatcgatagccgcggtttcttcaagttgttccagcgaaaatacgcgttgccactaactattggagttgtccttatatctatgcctcagcttggaggtcttaatggttatactttttacaccgataccattttcacctctaccggtgtatcaagtgacattggattcatattgacatctattgttcagatgactggaggcgttttaggtgttttgcttgtggatatatccggaagacgttctctcctactgttttctcaagctggaatgttcttgggttgtctagcaacagccatttcattcttcttgcagaagaacaattgctgggaaacaggaacaccaataatggctctcattagtgttatggtgtattttggatcatacggattaggcatgggaccaataccatggatcatagcatcagagatttaccctgtagacgtgaaaggagcagcaggaacagtgtgtaacttggtcacctctataagctcatggctcgttacttactccttcaattttttgcttcaatggagttctacaggaacgtttatgatgtttgccactgtgatgggtcttggatttgtgttcacagccaagcttgttccagagaccaaaggcaaatctttagaagaaattcaatctgcttttactgattctacttctgaagattctacaattttctaa

SEQ ID NO: 28485 - protein, 461 aa, Arabidopsis thaliana
  misc_feature (1)..(461): Ceres Seq. ID no. 2997080
MAEESLLPSHTEDVSASPNKSSSLLSEISNASTRPFVLAFTVGSCGALSFGCIFSFFGSILTVGLILGALICGKLADLVGRVYTIWITNILVLIGWLAIAFAKDVRLLDLGRLLQGISVGISSYLGPIYISELAPRNLRGAASSLMQLFVGVGLSAFYALGTAVAWRSLAILGSIPSLVVLPLLFFIPESPRWLAKVGREKEVEGVLLSLRGAKSDVSDEAATILEYTKHVEQQDIDSRGFFKLFQRKYALPLTIGVVLISMPQLGGLNGYTFYTDTIFTSTGVSSDIGFILTSIVQMTGGVLGVLLVDISGRRSLLLFSQAGMFLGCLATAISFFLQKNNCWETGTPIMALISVMVYFGSYGLGMGPIPWIIASEIYPVDVKGAAGTVCNLVTSISSWLVTYSFNFLLQWSSTGTFMMFATVMGLGFVFTAKLVPETKGKSLEEIQSAFTDSTSEDSTIF

SEQ ID NO: 28486 - protein, 316 aa, Arabidopsis thaliana
  misc_feature (1)..(316): Ceres Seq. ID no. 2997081
MQLFVGVGLSAFYALGTAVAWRSLAILGSIPSLVVLPLLFFIPESPRWLAKVGREKEVEGVLLSLRGAKSDVSDEAATILEYTKHVEQQDIDSRGFFKLFQRKYALPLTIGVVLISMPQLGGLNGYTFYTDTIFTSTGVSSDIGFILTSIVQMTGGVLGVLLVDISGRRSLLLFSQAGMFLGCLATAISFFLQKNNCWETGTPIMALISVMVYFGSYGLGMGPIPWIIASEIYPVDVKGAAGTVCNLVTSISSWLVTYSFNFLLQWSSTGTFMMFATVMGLGFVFTAKLVPETKGKSLEEIQSAFTDSTSEDSTIF

SEQ ID NO: 28487 - DNA, 933 bp, Arabidopsis thaliana
  misc_feature (1)..(933): Ceres Seq. ID no. 2997185
atgtttactgattgctcctcctccacaacgtcgcgtctcatccatttatacaaccgcaatggtgttttcctcccccgcccgagcgtcagccaattcagcttacggacaactgcgtctacttggcgctgcactctctccattcgctcctcttcttctccatctgcgattgtaattgatggaaaggctgaggccaaaaagattagagatgatatcaaaatcgaagtttcaagaatgaaggaatcaatcggtgtggttcctgctgaagattcatcagaagaagaggtgttgaaatatgtatcaggattcaatgatgatccttctgttcacggagtccttgttcagttgcctctaccatcgcatatggatgaacagaacatattgaatgcggttagtatagagaaggacgttgatggatttcacccgctaaatattggacggcttgccatgcgtggtagagaacctttattcgttccatgtactccaaaaggatgcatcgagttgttgcacagatacaacattgaattcaaaggcaaaagagcagttgttattggaaggagtaacattgttggtatgccagctgctctgttgctgcagaaggaggatgcaaccgttagcattatccattcaagaaccatgaaccctgaagaactcacaagacaagctgatatcctaatctcagctgttgggaaaccaaacatggtcagaggaagctggataaaaccgggtgcagtcctcatcgatgttgggattaaacctgttgaggatccaagtgctgccggtggagagcggttggttggagacatttgctatgtggaggctagcaaaattgcatcagccatcacacctgttcctggtgatgtaggaccaatgaccatagccatgcttctatccaacactttaacatcagccaagagaattcacaacttccagtga

SEQ ID NO: 28488 - protein, 310 aa, Arabidopsis thaliana
  misc_feature (1)..(310): Ceres Seq. ID no. 2997186
MFTDCSSSTTSRLIHLYNRNGVFLPRPSVSQFSLRTTASTWRCTLSIRSSSSPSAIVIDGKAEAKKIRDDIKIEVSRMKESIGVVPAEDSSEEEVLKYVSGFNDDPSVHGVLVQLPLPSHMDEQNILNAVSIEKDVDGFHPLNIGRLAMRGREPLFVPCTPKGCIELLHRYNIEFKGKRAVVIGRSNIVGMPAALLLQKEDATVSIIHSRTMNPEELTRQADILISAVGKPNMVRGSWIKPGAVLIDVGIKPVEDPSAAGGERLVGDICYVEASKIASAITPVPGDVGPMTIAMLLSNTLTSAKRIHNFQ

SEQ ID NO: 28489 - protein, 233 aa, Arabidopsis thaliana
  misc_feature (1)..(233): Ceres Seq. ID no. 2997187
MKESIGVVPAEDSSEEEVLKYVSGFNDDPSVHGVLVQLPLPSHMDEQNILNAVSIEKDVDGFHPLNIGRLAMRGREPLFVPCTPKGCIELLHRYNIEFKGKRAVVIGRSNIVGMPAALLLQKEDATVSIIHSRTMNPEELTRQADILISAVGKPNMVRGSWIKPGAVLIDVGIKPVEDPSAAGGERLVGDICYVEASKIASAITPVPGDVGPMTIAMLLSNTLTSAKRIHNFQ

SEQ ID NO: 28490 - protein, 190 aa, Arabidopsis thaliana
  misc_feature (1)..(190): Ceres Seq. ID no. 2997188
MDEQNILNAVSIEKDVDGFHPLNIGRLAMRGREPLFVPCTPKGCIELLHRYNIEFKGKRAVVIGRSNIVGMPAALLLQKEDATVSIIHSRTMNPEELTRQADILISAVGKPNMVRGSWIKPGAVLIDVGIKPVEDPSAAGGERLVGDICYVEASKIASAITPVPGDVGPMTIAMLLSNTLTSAKRIHNFQ

SEQ ID NO: 28491 - DNA, 1296 bp, Arabidopsis thaliana
  misc_feature (1)..(1296): Ceres Seq. ID no. 2997336
atgatccgttcttcgattgtaattttatctctgttactaatttcacacttggtttctgcaaaagttctgttgatcggtaacagcacatctctctccttcgacgacgtcgaagccactttcactccgatgattaagagatcggatcaaggcggtgtgttgtatgtagcagagccactcgatgcttgttcggatttggtgaatacggtgaatgtgaaaaatggaactactgtgtctcctccgtatgtgttgattatccgcggtggttgtagtttcgaagataagattaggaatgctcaaaaggctggttataaagctgctattgtttatgactatgaagattttgggttcttagtatcaacaactggggaagtacttaaagagtatgcgggtcgtaccgattttgaagtgtggctcatgccaagtttcgagacttcagcatggtcaatcatggctatttctttcatatctctcctcgccatgtcggctgtgctcgctacttgcttctttgtccgtaggcatcgagttaggcgtcggcgtattctggctcttaatggcaatgactttcatcgtatgcccaaaagcatgataatacgtatgcctactaccatatttaacggtatttgtgatgaagcaactacatctatattgtgctgcatatgccttgagaattatgagaaaggggacaagctaaggatcctaccttgccatcacaaatttcatgttgcttgtgtagacttgtggcttggccagaggaaatccttttgcccggtttgcaaacgcgatgcaagaagcatcagtaccgacaagcccccatcagagcacacaccctttctttctcggactcctagcatgaccccgacgtcatcgtttctcttatcatcatcctccacaaccccattgcagtcatctcatgagctaccaatatccatcagagtagacccttctttaccatccacctcaatgcagccacacacagttcctatgtatctctcccactctcgctcccacacaagcttccaaaatggatcaaaccgattttcccggcctataccagttagccggagttcagcagatctcaggaacgccgtttcccaaagatcttacaactcaccccaccaggtttctttgcctcgtttcctccactcaagatatacgcacatacttggcccgggaaatgcatcaagaagccaggttgttgggttgttaacaagccagcgcgagcattcacttcatcaaaatgactcgcgcaggtctttcattcactttgcatctgcgagctccttaccaggctggtaa

SEQ ID NO: 28492 - protein, 431 aa, Arabidopsis thaliana
  misc_feature (1)..(431): Ceres Seq. ID no. 2997337
MIRSSIVILSLLLISHLVSAKVLLIGNSTSLSFDDVEATFTPMIKRSDQGGVLYVAEPLDACSDLVNTVNVKNGTTVSPPYVLIIRGGCSFEDKIRNAQKAGYKAAIVYDYEDFGFLVSTTGEVLKEYAGRTDFEVWLMPSFETSAWSIMAISFISLLAMSAVLATCFFVRRHRVRRRRILALNGNDFHRMPKSMIIRMPTTIFNGICDEATTSILCCICLENYEKGDKLRILPCHHKFHVACVDLWLGQRKSFCPVCKRDARSISTDKPPSEHTPFLSRTPSMTPTSSFLLSSSSTTPLQSSHELPISIRVDPSLPSTSMQPHTVPMYLSHSRSHTSFQNGSNRFSRPIPVSRSSADLRNAVSQRSYNSPHQVSLPRFLHSRYTHILGPGNASRSQVVGLLTSQREHSLHQNDSRRSFIHFASASSLPGW

SEQ ID NO: 28493 - protein, 389 aa, Arabidopsis thaliana
  misc_feature (1)..(389): Ceres Seq. ID no. 2997338
MIKRSDQGGVLYVAEPLDACSDLVNTVNVKNGTTVSPPYVLIIRGGCSFEDKIRNAQKAGYKAAIVYDYEDFGFLVSTTGEVLKEYAGRTDFEVWLMPSFETSAWSIMAISFISLLAMSAVLATCFFVRRHRVRRRRILALNGNDFHRMPKSMIIRMPTTIFNGICDEATTSILCCICLENYEKGDKLRILPCHHKFHVACVDLWLGQRKSFCPVCKRDARSISTDKPPSEHTPFLSRTPSMTPTSSFLLSSSSTTPLQSSHELPISIRVDPSLPSTSMQPHTVPMYLSHSRSHTSFQNGSNRFSRPIPVSRSSADLRNAVSQRSYNSPHQVSLPRFLHSRYTHILGPGNASRSQVVGLLTSQREHSLHQNDSRRSFIHFASASSLPGW

SEQ ID NO: 28494 - protein, 293 aa, Arabidopsis thaliana
  misc_feature (1)..(293): Ceres Seq. ID no. 2997339
MPSFETSAWSIMAISFISLLAMSAVLATCFFVRRHRVRRRRILALNGNDFHRMPKSMIIRMPTTIFNGICDEATTSILCCICLENYEKGDKLRILPCHHKFHVACVDLWLGQRKSFCPVCKRDARSISTDKPPSEHTPFLSRTPSMTPTSSFLLSSSSTTPLQSSHELPISIRVDPSLPSTSMQPHTVPMYLSHSRSHTSFQNGSNRFSRPIPVSRSSADLRNAVSQRSYNSPHQVSLPRFLHSRYTHILGPGNASRSQVVGLLTSQREHSLHQNDSRRSFIHFASASSLPGW

SEQ ID NO: 28495 - DNA, 1671 bp, Arabidopsis thaliana
  misc_feature (1)..(1671): Ceres Seq. ID no. 2997408
atggctgattcaaaatctggtgacacggaagtagcgcatcgctctagcgatccaagcgaaaagcgtggtggctggatcactttaccgttcatgctaggcatgtccataacttctttcggatggggaatgaacttgatcgtcttcttgatcgaggaattccacatcaagaacatcgctgctgctcagatttcaaatgttgtcaatggagttgtcaacatgttacctgttgttgcagccatcctagctgattccttttttgggaacattcccgtcatctccacctccactttcatttctctggctggaacctctctcttgaccttaatcacatctttgaactacttgatgcctagaccgtgtgaaacggggtcaattctatgccagtcgccatcaaaactacagcttgggatcttgtatgtagccttagctctagtgatcattggatcagctgggacgcggttcaccttggcagccgcgggtgcgaaccaatataagaagcctaaagaacaaggaagattcttcaactggttcttccttgcactgtatattggagctattactggcacgacagcgattgtatatacacaagacaatgctagctggaaacttgggttcggtctatgtgccgttgctaacttgatcagtttcatcgttttcatcgccggggttagattctacaagcatgacaaacccttgggaagtccttatacaagcctgatccgtgttttagttgctgctacaatgaaaagaaaggcagtgatttcatcaaaagacgaagactatcatcaatatggtctcgggaaagaggccaagacttatactacaatgccctccaagagctttaggttcttgaaccgtgcagcattaaagaacaaagaagatttaaacacgagtggtgactcaagtaataacatgtggaggctatgctctgttcaggaagtagaagacttcaaagccattctccgacttgtacctctctgggcagccgtcatgttcctcagcactcccgtggcagtacaaatgagcatgacggttctccaagctttggtcatggaccgcaaacttagcccgcacttcgaagtctctgccgggtctctacaagtcatagtactcgtctttggttgtgtctttatcatgctcaacaactggatcatctatcccatgtaccaaaagctaatcggcaaaccactgacaccacttcaacaagttgggatcggtcacgttttcaccatcctaagcatggcgatatcagctgttgtggaagcaaagagactgaaaacagttgaaaatggaggccatcccatgtcagtgctatggctagttcctgctcttgtgatggttggaataggcgaggcgtttcattttcccgcgaatgttgcagtattctatggagaattccctgagtctctgaagaacaccgcaacttcattgacctcagtggtgattggaatctctttctatctgagcacagctgttatcgacgtgatccaaagaaccacctcgtggttaccaaatgacataaaccatggaagagttgacaatgtttactgggttgtagtcataggaggagtcttgaatctcggctatttccttgtctgctcttggttttacaaatacagaaacctcaaggatgatgatcatgaacaagatcctaaagatgttaaaacctag

SEQ ID NO: 28496 - protein, 556 aa, Arabidopsis thaliana
  misc_feature (1)..(556): Ceres Seq. ID no. 2997409
MADSKSGDTEVAHRSSDPSEKRGGWITLPFMLGMSITSFGWGMNLIVFLIEEFHIKNIAAAQISNVVNGVVNMLPVVAAILADSFFGNIPVISTSTFISLAGTSLLTLITSLNYLMPRPCETGSILCQSPSKLQLGILYVALALVIIGSAGTRFTLAAAGANQYKKPKEQGRFFNWFFLALYIGAITGTTAIVYTQDNASWKLGFGLCAVANLISFIVFIAGVRFYKHDKPLGSPYTSLIRVLVAATMKRKAVISSKDEDYHQYGLGKEAKTYTTMPSKSFRFLNRAALKNKEDLNTSGDSSNNMWRLCSVQEVEDFKAILRLVPLWAAVMFLSTPVAVQMSMTVLQALVMDRKLSPHFEVSAGSLQVIVLVFGCVFIMLNNWIIYPMYQKLIGKPLTPLQQVGIGHVFTILSMAISAVVEAKRLKTVENGGHPMSVLWLVPALVMVGIGEAFHFPANVAVFYGEFPESLKNTATSLTSVVIGISFYLSTAVIDVIQRTTSWLPNDINHGRVDNVYWVVVIGGVLNLGYFLVCSWFYKYRNLKDDDHEQDPKDVKT
